United States Patent Application Publication US 2023/0330270 A1 - sequence listing, part 2

SEQ ID NO: 5986 - DNA, 20 bp, synthetic construct
  misc_feature 1..20: note = Description of Artificial Sequence: Synthetic oligonucleotide
  misc_feature 1..20: note = Target: FXN; (-) strand; PAM type: NNGRRT; PAM sequence: CCGGGT
  source 1..20: mol_type = other DNA
atcactgcaagctctgcctc

SEQ ID NO: 5987 - DNA, 20 bp, synthetic construct
  misc_feature 1..20: note = Description of Artificial Sequence: Synthetic oligonucleotide
  misc_feature 1..20: note = Target: FXN; (-) strand; PAM type: NNGRRT; PAM sequence: TCGGAT
  source 1..20: mol_type = other DNA
tggagtgcagtggcacgatc

SEQ ID NO: 5988 - DNA, 20 bp, synthetic construct
  misc_feature 1..20: note = Description of Artificial Sequence: Synthetic oligonucleotide
  misc_feature 1..20: note = Target: FXN; (-) strand; PAM type: NNGRRT; PAM sequence: TGGAGT
  source 1..20: mol_type = other DNA
tctcgctctgtcacccaggc

SEQ ID NO: 5989 - DNA, 20 bp, synthetic construct
  misc_feature 1..20: note = Description of Artificial Sequence: Synthetic oligonucleotide
  misc_feature 1..20: note = Target: FXN; (-) strand; PAM type: NNGRRT; PAM sequence: TGGGGT
  source 1..20: mol_type = other DNA
aggttttaacatatgaatgg

SEQ ID NO: 5990 - DNA, 20 bp, synthetic construct
  misc_feature 1..20: note = Description of Artificial Sequence: Synthetic oligonucleotide
  misc_feature 1..20: note = Target: FXN; (-) strand; PAM type: NNGRRT; PAM sequence: ATGAAT
  source 1..20: mol_type = other DNA
tggtgattaggttttaacat

SEQ ID NO: 5991 - DNA, 20 bp, synthetic construct
  misc_feature 1..20: note = Description of Artificial Sequence: Synthetic oligonucleotide
  misc_feature 1..20: note = Target: FXN; (-) strand; PAM type: NNGRRT; PAM sequence: GAGGGT
  source 1..20: mol_type = other DNA
atgtgtttcttagagtcctg

SEQ ID NO: 5992 - DNA, 20 bp, synthetic construct
  misc_feature 1..20: note = Description of Artificial Sequence: Synthetic oligonucleotide
  misc_feature 1..20: note = Target: FXN; (-) strand; PAM type: NNGRRT; PAM sequence: TAGAGT
  source 1..20: mol_type = other DNA
aacaatagaaatgtgtttct

SEQ ID NO: 5993 - DNA, 20 bp, synthetic construct
  misc_feature 1..20: note = Description of Artificial Sequence: Synthetic oligonucleotide
  misc_feature 1..20: note = Target: FXN; (-) strand; PAM type: NNGRRT; PAM sequence: CTGGGT
  source 1..20: mol_type = other DNA
ttataacaaaataccagcca

SEQ ID NO: 5994 - DNA, 20 bp, synthetic construct
  misc_feature 1..20: note = Description of Artificial Sequence: Synthetic oligonucleotide
  misc_feature 1..20: note = Target: FXN; (-) strand; PAM type: NNGRRT; PAM sequence: TGGGAT
  source 1..20: mol_type = other DNA
atttgttatttgtcttagtc

SEQ ID NO: 5995 - DNA, 20 bp, synthetic construct
  misc_feature 1..20: note = Description of Artificial Sequence: Synthetic oligonucleotide
  misc_feature 1..20: note = Target: FXN; (-) strand; PAM type: NNGRRT; PAM sequence: AGGGAT
  source 1..20: mol_type = other DNA
ctatctcttaacctggtgtc

SEQ ID NO: 5996 - DNA, 20 bp, synthetic construct
  misc_feature 1..20: note = Description of Artificial Sequence: Synthetic oligonucleotide
  misc_feature 1..20: note = Target: FXN; (-) strand; PAM type: NNGRRT; PAM sequence: TGGGGT
  source 1..20: mol_type = other DNA
cagggaggacagggcagtga

SEQ ID NO: 5997 - DNA, 20 bp, synthetic construct
  misc_feature 1..20: note = Description of Artificial Sequence: Synthetic oligonucleotide
  misc_feature 1..20: note = Target: FXN; (-) strand; PAM type: NNGRRT; PAM sequence: CAGAAT
  source 1..20: mol_type = other DNA
gaaaaggagggtacgatgaa

SEQ ID NO: 5998 - DNA, 20 bp, synthetic construct
  misc_feature 1..20: note = Description of Artificial Sequence: Synthetic oligonucleotide
  misc_feature 1..20: note = Target: FXN; (-) strand; PAM type: NNGRRT; PAM sequence: GAGGGT
  source 1..20: mol_type = other DNA
aggtcaaactctaagaaaag

SEQ ID NO: 5999 - DNA, 20 bp, synthetic construct
  misc_feature 1..20: note = Description of Artificial Sequence: Synthetic oligonucleotide
  misc_feature 1..20: note = Target: FXN; (-) strand; PAM type: NNGRRT; PAM sequence: ATGGAT
  source 1..20: mol_type = other DNA
accttgtatataagcaatac

SEQ ID NO: 6000 - DNA, 20 bp, synthetic construct
  misc_feature 1..20: note = Description of Artificial Sequence: Synthetic oligonucleotide
  misc_feature 1..20: note = Target: FXN; (-) strand; PAM type: NNGRRT; PAM sequence: CAGAAT
  source 1..20: mol_type = other DNA
ccatagcagaacagatacag

SEQ ID NO: 6001 - DNA, 20 bp, synthetic construct
  misc_feature 1..20: note = Description of Artificial Sequence: Synthetic oligonucleotide
  misc_feature 1..20: note = Target: FXN; (-) strand; PAM type: NNGRRT; PAM sequence: CTGGAT
  source 1..20: mol_type = other DNA
caaatgtcacctaaaggaac

SEQ ID NO: 6002 - DNA, 20 bp, synthetic construct
  misc_feature 1..20: note = Description of Artificial Sequence: Synthetic oligonucleotide
  misc_feature 1..20: note = Target: FXN; (-) strand; PAM type: NNGRRT; PAM sequence: ATGAGT
  source 1..20: mol_type = other DNA
accaccacttttggcatcaa

SEQ ID NO: 6003 - DNA, 20 bp, synthetic construct
  misc_feature 1..20: note = Description of Artificial Sequence: Synthetic oligonucleotide
  misc_feature 1..20: note = Target: FXN; (-) strand; PAM type: NNGRRT; PAM sequence: GAGGAT
  source 1..20: mol_type = other DNA
aggacccatacctcgcaggg

SEQ ID NO: 6004 - DNA, 20 bp, synthetic construct
  misc_feature 1..20: note = Description of Artificial Sequence: Synthetic oligonucleotide
  misc_feature 1..20: note = Target: FXN; (-) strand; PAM type: NNGRRT; PAM sequence: GTGAAT
  source 1..20: mol_type = other DNA
caaaccacagcacttgaaga

SEQ ID NO: 6005 - DNA, 20 bp, synthetic construct
  misc_feature 1..20: note = Description of Artificial Sequence: Synthetic oligonucleotide
  misc_feature 1..20: note = Target: FXN; (-) strand; PAM type: NNGRRT; PAM sequence: AAGAGT
  source 1..20: mol_type = other DNA
ctgtcaaaccacagcacttg

SEQ ID NO: 6006 - DNA, 20 bp, synthetic construct
  misc_feature 1..20: note = Description of Artificial Sequence: Synthetic oligonucleotide
  misc_feature 1..20: note = Target: FXN; (-) strand; PAM type: NNGRRT; PAM sequence: CTGGAT
  source 1..20: mol_type = other DNA
accccctggtaaggactggc

SEQ ID NO: 6007 - DNA, 20 bp, synthetic construct
  misc_feature 1..20: note = Description of Artificial Sequence: Synthetic oligonucleotide
  misc_feature 1..20: note = Target: FXN; (-) strand; PAM type: NNGRRT; PAM sequence: TGGGAT
  source 1..20: mol_type = other DNA
actcacacagtgcctgctca

SEQ ID NO: 6008 - DNA, 20 bp, synthetic construct
  misc_feature 1..20: note = Description of Artificial Sequence: Synthetic oligonucleotide
  misc_feature 1..20: note = Target: FXN; (-) strand; PAM type: NNGRRT; PAM sequence: ATGAGT
  source 1..20: mol_type = other DNA
agccaccgcacctggccatg

SEQ ID NO: 6009 - DNA, 20 bp, synthetic construct
  misc_feature 1..20: note = Description of Artificial Sequence: Synthetic oligonucleotide
  misc_feature 1..20: note = Target: FXN; (-) strand; PAM type: NNGRRT; PAM sequence: TGGGAT
  source 1..20: mol_type = other DNA
accttggcctcccaaagtgc

SEQ ID NO: 6010 - DNA, 20 bp, synthetic construct
  misc_feature 1..20: note = Description of Artificial Sequence: Synthetic oligonucleotide
  misc_feature 1..20: note = Target: FXN; (-) strand; PAM type: NNGRRT; PAM sequence: TGGGAT
  source 1..20: mol_type = other DNA
gcctcagcctcctgagtagc

SEQ ID NO: 6011 - DNA, 20 bp, synthetic construct
  misc_feature 1..20: note = Description of Artificial Sequence: Synthetic oligonucleotide
  misc_feature 1..20: note = Target: FXN; (-) strand; PAM type: NNGRRT; PAM sequence: CTGAGT
  source 1..20: mol_type = other DNA
gattctcctgcctcagcctc

SEQ ID NO: 6012 - DNA, 20 bp, synthetic construct
  misc_feature 1..20: note = Description of Artificial Sequence: Synthetic oligonucleotide
  misc_feature 1..20: note = Target: FXN; (-) strand; PAM type: NNGRRT; PAM sequence: CCGGGT
  source 1..20: mol_type = other DNA
cttattgcaacctccgcctc

SEQ ID NO: 6013 - DNA, 20 bp, synthetic construct
  misc_feature 1..20: note = Description of Artificial Sequence: Synthetic oligonucleotide
  misc_feature 1..20: note = Target: FXN; (-) strand; PAM type: NNGRRT; PAM sequence: TGGAAT
  source 1..20: mol_type = other DNA
tcttgctctgttgcccaggc

SEQ ID NO: 6014 - DNA, 20 bp, synthetic construct
  misc_feature 1..20: note = Description of Artificial Sequence: Synthetic oligonucleotide
  misc_feature 1..20: note = Target: FXN; (-) strand; PAM type: NNGRRT; PAM sequence: CGGAGT
  source 1..20: mol_type = other DNA
ttttttttttttttctgaga

SEQ ID NO: 6015 - DNA, 20 bp, synthetic construct
  misc_feature 1..20: note = Description of Artificial Sequence: Synthetic oligonucleotide
  misc_feature 1..20: note = Target: FXN; (-) strand; PAM type: NNGRRT; PAM sequence: ATGAGT
  source 1..20: mol_type = other DNA
ttggaggtcaaggtcatagg

SEQ ID NO: 6016 - DNA, 20 bp, synthetic construct
  misc_feature 1..20: note = Description of Artificial Sequence: Synthetic oligonucleotide
  misc_feature 1..20: note = Target: FXN; (-) strand; PAM type: NNGRRT; PAM sequence: TAGGAT
  source 1..20: mol_type = other DNA
aagcttggaggtcaaggtca

SEQ ID NO: 6017 - DNA, 20 bp, synthetic construct
  misc_feature 1..20: note = Description of Artificial Sequence: Synthetic oligonucleotide
  misc_feature 1..20: note = Target: FXN; (-) strand; PAM type: NNGRRT; PAM sequence: AAGAAT
  source 1..20: mol_type = other DNA
ggtattcaggctctgaacaa

SEQ ID NO: 6018 - DNA, 20 bp, synthetic construct
  misc_feature 1..20: note = Description of Artificial Sequence: Synthetic oligonucleotide
  misc_feature 1..20: note = Target: FXN; (-) strand; PAM type: NNGRRT; PAM sequence: GAGGGT
  source 1..20: mol_type = other DNA
ataccccaagtacagagcct

SEQ ID NO: 6019 - DNA, 20 bp, synthetic construct
  misc_feature 1..20: note = Description of Artificial Sequence: Synthetic oligonucleotide
  misc_feature 1..20: note = Target: FXN; (-) strand; PAM type: NNGRRT; PAM sequence: AGGGAT
  source 1..20: mol_type = other DNA
cagtttactcctctgaagga

SEQ ID NO: 6020 - DNA, 20 bp, synthetic construct
  misc_feature 1..20: note = Description of Artificial Sequence: Synthetic oligonucleotide
  misc_feature 1..20: note = Target: FXN; (-) strand; PAM type: NNGRRT; PAM sequence: CAGGAT
  source 1..20: mol_type = other DNA
cagggaagtttccatctctc

SEQ ID NO: 6021 - DNA, 20 bp, synthetic construct
  misc_feature 1..20: note = Description of Artificial Sequence: Synthetic oligonucleotide
  misc_feature 1..20: note = Target: FXN; (-) strand; PAM type: NNGRRT; PAM sequence: GAGAAT
  source 1..20: mol_type = other DNA
acatccaaggaaaagtgtct

SEQ ID NO: 6022 - DNA, 20 bp, synthetic construct
  misc_feature 1..20: note = Description of Artificial Sequence: Synthetic oligonucleotide
  misc_feature 1..20: note = Target: FXN; (-) strand; PAM type: NNGRRT; PAM sequence: AGGAAT
  source 1..20: mol_type = other DNA
gtggaaggaattgttttccc

SEQ ID NO: 6023 - DNA, 20 bp, synthetic construct
  misc_feature 1..20: note = Description of Artificial Sequence: Synthetic oligonucleotide
  misc_feature 1..20: note = Target: FXN; (-) strand; PAM type: NNGRRT; PAM sequence: AGGAAT
  source 1..20: mol_type = other DNA
cagagtctgtgcacagtgga

SEQ ID NO: 6024 - DNA, 20 bp, synthetic construct
  misc_feature 1..20: note = Description of Artificial Sequence: Synthetic oligonucleotide
  misc_feature 1..20: note = Target: FXN; (-) strand; PAM type: NNGRRT; PAM sequence: CAGAGT
  source 1..20: mol_type = other DNA
gaacccaagctgtctggccc

SEQ ID NO: 6025 - DNA, 20 bp, synthetic construct
  misc_feature 1..20: note = Description of Artificial Sequence: Synthetic oligonucleotide
  misc_feature 1..20: note = Target: FXN; (-) strand; PAM type: NNGRRT; PAM sequence: TGGGAT
  source 1..20: mol_type = other DNA
cagacattaagtggcagagc

SEQ ID NO: 6026 - DNA, 20 bp, synthetic construct
  misc_feature 1..20: note = Description of Artificial Sequence: Synthetic oligonucleotide
  misc_feature 1..20: note = Target: FXN; (-) strand; PAM type: NNGRRT; PAM sequence: AAGGGT
  source 1..20: mol_type = other DNA
atgaggaaactgacgcacca

SEQ ID NO: 6027 - DNA, 20 bp, synthetic construct
  misc_feature 1..20: note = Description of Artificial Sequence: Synthetic oligonucleotide
  misc_feature 1..20: note = Target: FXN; (-) strand; PAM type: NNGRRT; PAM sequence: GAGGAT
  source 1..20: mol_type = other DNA
agtacagactcttaacgaat

SEQ ID NO: 6028 - DNA, 20 bp, synthetic construct
  misc_feature 1..20: note = Description of Artificial Sequence: Synthetic oligonucleotide
  misc_feature 1..20: note = Target: FXN; (-) strand; PAM type: NNGRRT; PAM sequence: ACGAAT
  source 1..20: mol_type = other DNA
ttaacaagtacagactctta

SEQ ID NO: 6029 - DNA, 20 bp, synthetic construct
  misc_feature 1..20: note = Description of Artificial Sequence: Synthetic oligonucleotide
  misc_feature 1..20: note = Target: FXN; (-) strand; PAM type: NNGRRT; PAM sequence: TGGGGT
  source 1..20: mol_type = other DNA
aaggctaggggtactgattt

SEQ ID NO: 6030 - DNA, 20 bp, synthetic construct
  misc_feature 1..20: note = Description of Artificial Sequence: Synthetic oligonucleotide
  misc_feature 1..20: note = Target: FXN; (-) strand; PAM type: NNGRRT; PAM sequence: AGGGGT
  source 1..20: mol_type = other DNA
tgaaacgaccccaaaaggct

SEQ ID NO: 6031 - DNA, 20 bp, synthetic construct
  misc_feature 1..20: note = Description of Artificial Sequence: Synthetic oligonucleotide
  misc_feature 1..20: note = Target: FXN; (-) strand; PAM type: NNGRRT; PAM sequence: GAGGAT
  source 1..20: mol_type = other DNA
tactcaggaggccgaggtgg

SEQ ID NO: 6032 - DNA, 20 bp, synthetic construct
  misc_feature 1..20: note = Description of Artificial Sequence: Synthetic oligonucleotide
  misc_feature 1..20: note = Target: FXN; (-) strand; PAM type: NNGRRT; PAM sequence: TGGGGT
  source 1..20: mol_type = other DNA
aaaacattatctgggtgtgg

SEQ ID NO: 6033 - DNA, 20 bp, synthetic construct
  misc_feature 1..20: note = Description of Artificial Sequence: Synthetic oligonucleotide
  misc_feature 1..20: note = Target: FXN; (-) strand; PAM type: NNGRRT; PAM sequence: CTGGGT
  source 1..20: mol_type = other DNA
aaaaatatcaaaaacattat

SEQ ID NO: 6034 - DNA, 20 bp, synthetic construct
  misc_feature 1..20: note = Description of Artificial Sequence: Synthetic oligonucleotide
  misc_feature 1..20: note = Target: FXN; (-) strand; PAM type: NNGRRT; PAM sequence: CTGGGT
  source 1..20: mol_type = other DNA
tcgcaccattgcactccagc

SEQ ID NO: 6035 - DNA, 20 bp, synthetic construct
  misc_feature 1..20: note = Description of Artificial Sequence: Synthetic oligonucleotide
  misc_feature 1..20: note = Target: FXN; (-) strand; PAM type: NNGRRT; PAM sequence: CAGGAT
  source 1..20: mol_type = other DNA
aggtggaggttgcagtgagc

SEQ ID NO: 6036 - DNA, 20 bp, synthetic construct
  misc_feature 1..20: note = Description of Artificial Sequence: Synthetic oligonucleotide
  misc_feature 1..20: note = Target: FXN; (-) strand; PAM type: NNGRRT; PAM sequence: TTGAAT
  source 1..20: mol_type = other DNA
ggctgaggcagaagaattgc

SEQ ID NO: 6037 - DNA, 20 bp, synthetic construct
  misc_feature 1..20: note = Description of Artificial Sequence: Synthetic oligonucleotide
  misc_feature 1..20: note = Target: FXN; (-) strand; PAM type: NNGRRT; PAM sequence: AAGAAT
  source 1..20: mol_type = other DNA
tactcaggaggctgaggcag

SEQ ID NO: 6038 - DNA, 20 bp, synthetic construct
  misc_feature 1..20: note = Description of Artificial Sequence: Synthetic oligonucleotide
  misc_feature 1..20: note = Target: FXN; (-) strand; PAM type: NNGRRT; PAM sequence: AGGAGT
  source 1..20: mol_type = other DNA
cgggtggatcacctgaggtc

SEQ ID NO: 6039 - DNA, 20 bp, synthetic construct
  misc_feature 1..20: note = Description of Artificial Sequence: Synthetic oligonucleotide
  misc_feature 1..20: note = Target: FXN; (-) strand; PAM type: NNGRRT; PAM sequence: GTGGAT
  source 1..20: mol_type = other DNA
agtttgggaggcggaggcgg

SEQ ID NO: 6040 - DNA, 20 bp, synthetic construct
  misc_feature 1..20: note = Description of Artificial Sequence: Synthetic oligonucleotide
  misc_feature 1..20: note = Target: FXN; (-) strand; PAM type: NNGRRT; PAM sequence: GCGGGT
  source 1..20: mol_type = other DNA
ctgcagtttgggaggcggag

SEQ ID NO: 6041 - DNA, 20 bp, synthetic construct
  misc_feature 1..20: note = Description of Artificial Sequence: Synthetic oligonucleotide
  misc_feature 1..20: note = Target: FXN; (-) strand; PAM type: NNGRRT; PAM sequence: AAGAGT
  source 1..20: mol_type = other DNA
tgggaggattacttgagctc

SEQ ID NO: 6042 - DNA, 20 bp, synthetic construct
  misc_feature 1..20: note = Description of Artificial Sequence: Synthetic oligonucleotide
  misc_feature 1..20: note = Target: FXN; (-) strand; PAM type: NNGRRT; PAM sequence: GAGGAT
  source 1..20: mol_type = other DNA
actttgggaggccaaggtgg

SEQ ID NO: 6043 - DNA, 20 bp, synthetic construct
  misc_feature 1..20: note = Description of Artificial Sequence: Synthetic oligonucleotide
  misc_feature 1..20: note = Target: FXN; (-) strand; PAM type: NNGRRT; PAM sequence: CAGAGT
  source 1..20: mol_type = other DNA
agtggatggggagggtgggg

SEQ ID NO: 6044 - DNA, 20 bp, synthetic construct
  misc_feature 1..20: note = Description of Artificial Sequence: Synthetic oligonucleotide
  misc_feature 1..20: note = Target: FXN; (-) strand; PAM type: NNGRRT; PAM sequence: GAGGGT
  source 1..20: mol_type = other DNA
gctgggggacagtggatggg

SEQ ID NO: 6045 - DNA, 20 bp, synthetic construct
  misc_feature 1..20: note = Description of Artificial Sequence: Synthetic oligonucleotide
  misc_feature 1..20: note = Target: FXN; (-) strand; PAM type: NNGRRT; PAM sequence: GTGGAT
  source 1..20: mol_type = other DNA
aggaaacgggctgggggaca

SEQ ID NO: 6046 - DNA, 20 bp, synthetic construct
  misc_feature 1..20: note = Description of Artificial Sequence: Synthetic oligonucleotide
  misc_feature 1..20: note = Target: FXN; (-) strand; PAM type: NNGRRT; PAM sequence: CTGGGT
  source 1..20: mol_type = other DNA
tggagcgaggagggggcgcc

SEQ ID NO: 6047 - DNA, 20 bp, synthetic construct
  misc_feature 1..20: note = Description of Artificial Sequence: Synthetic oligonucleotide
  misc_feature 1..20: note = Target: FXN; (-) strand; PAM type: NNGRRT; PAM sequence: TGGAGT
  source 1..20: mol_type = other DNA
gggcacaagagtggtgcagc

SEQ ID NO: 6048 - DNA, 20 bp, synthetic construct
  misc_feature 1..20: note = Description of Artificial Sequence: Synthetic oligonucleotide
  misc_feature 1..20: note = Target: FXN; (-) strand; PAM type: NNGRRT; PAM sequence: AAGAGT
  source 1..20: mol_type = other DNA
gacaagagccactggggcac

SEQ ID NO: 6049 - DNA, 20 bp, synthetic construct
  misc_feature 1..20: note = Description of Artificial Sequence: Synthetic oligonucleotide
  misc_feature 1..20: note = Target: FXN; (-) strand; PAM type: NNGRRT; PAM sequence: CTGAGT
  source 1..20: mol_type = other DNA
ggacatccaggtgacagggt

SEQ ID NO: 6050 - DNA, 20 bp, synthetic construct
  misc_feature 1..20: note = Description of Artificial Sequence: Synthetic oligonucleotide
  misc_feature 1..20: note = Target: FXN; (-) strand; PAM type: NNGRRT; PAM sequence: CAGGGT
  source 1..20: mol_type = other DNA
actgctggacatccaggtga

SEQ ID NO: 6051 - DNA, 20 bp, synthetic construct
  misc_feature 1..20: note = Description of Artificial Sequence: Synthetic oligonucleotide
  misc_feature 1..20: note = Target: FXN; (-) strand; PAM type: NNGRRT; PAM sequence: CAGAAT
  source 1..20: mol_type = other DNA
tattatcatgatctgcagga

SEQ ID NO: 6052 - DNA, 20 bp, synthetic construct
  misc_feature 1..20: note = Description of Artificial Sequence: Synthetic oligonucleotide
  misc_feature 1..20: note = Target: FXN; (-) strand; PAM type: NNGRRT; PAM sequence: CAGAAT
  source 1..20: mol_type = other DNA
caacaggaaatagcaagagg

SEQ ID NO: 6053 - DNA, 20 bp, synthetic construct
  misc_feature 1..20: note = Description of Artificial Sequence: Synthetic oligonucleotide
  misc_feature 1..20: note = Target: FXN; (-) strand; PAM type: NNGRRT; PAM sequence: CAGGGT
  source 1..20: mol_type = other DNA
gctgcaggctgttcaggtta

SEQ ID NO: 6054 - DNA, 20 bp, synthetic construct
  misc_feature 1..20: note = Description of Artificial Sequence: Synthetic oligonucleotide
  misc_feature 1..20: note = Target: FXN; (-) strand; PAM type: NNGRRT; PAM sequence: GAGAAT
  source 1..20: mol_type = other DNA
tcaactgcaccaccagtttc

SEQ ID NO: 6055 - DNA, 20 bp, synthetic construct
  misc_feature 1..20: note = Description of Artificial Sequence: Synthetic oligonucleotide
  misc_feature 1..20: note = Target: FXN; (-) strand; PAM type: NNGRRT; PAM sequence: TAGGAT
  source 1..20: mol_type = other DNA
agtattttaggaatatttct

SEQ ID NO: 6056 - DNA, 20 bp, synthetic construct
  misc_feature 1..20: note = Description of Artificial Sequence: Synthetic oligonucleotide
  misc_feature 1..20: note = Target: FXN; (-) strand; PAM type: NNGRRT; PAM sequence: AGGAAT
  source 1..20: mol_type = other DNA
gccctatattaaagtatttt

SEQ ID NO: 6057 - DNA, 20 bp, synthetic construct
  misc_feature 1..20: note = Description of Artificial Sequence: Synthetic oligonucleotide
  misc_feature 1..20: note = Target: FXN; (-) strand; PAM type: NNGRRT; PAM sequence: CTGGAT
  source 1..20: mol_type = other DNA
ctcctcagcttcccaaaatg

SEQ ID NO: 6058 - DNA, 20 bp, synthetic construct
  misc_feature 1..20: note = Description of Artificial Sequence: Synthetic oligonucleotide
  misc_feature 1..20: note = Target: FXN; (-) strand; PAM type: NNGRRT; PAM sequence: CGGGGT
  source 1..20: mol_type = other DNA
ttttgtatttttagtagaga

SEQ ID NO: 6059 - DNA, 20 bp, synthetic construct
  misc_feature 1..20: note = Description of Artificial Sequence: Synthetic oligonucleotide
  misc_feature 1..20: note = Target: FXN; (-) strand; PAM type: NNGRRT; PAM sequence: TGGGAT
  source 1..20: mol_type = other DNA
gcctcagcctcccgcgtagc

SEQ ID NO: 6060 - DNA, 20 bp, synthetic construct
  misc_feature 1..20: note = Description of Artificial Sequence: Synthetic oligonucleotide
  misc_feature 1..20: note = Target: FXN; (-) strand; PAM type: NNGRRT; PAM sequence: TCGAGT
  source 1..20: mol_type = other DNA
gcaacccccgcctcccgggt

SEQ ID NO: 6061 - DNA, 20 bp, synthetic construct
  misc_feature 1..20: note = Description of Artificial Sequence: Synthetic oligonucleotide
  misc_feature 1..20: note = Target: FXN; (-) strand; PAM type: NNGRRT; PAM sequence: CCGGGT
  source 1..20: mol_type = other DNA
ctcactgcaacccccgcctc

SEQ ID NO: 6062 - DNA, 20 bp, synthetic construct
  misc_feature 1..20: note = Description of Artificial Sequence: Synthetic oligonucleotide
  misc_feature 1..20: note = Target: FXN; (-) strand; PAM type: NNGRRT; PAM sequence: TGGAGT
  source 1..20: mol_type = other DNA
tctcgctctgtcgcccaggc

SEQ ID NO: 6063 - DNA, 20 bp, synthetic construct
  misc_feature 1..20: note = Description of Artificial Sequence: Synthetic oligonucleotide
  misc_feature 1..20: note = Target: FXN; (-) strand; PAM type: NNGRRT; PAM sequence: CGGAGT
  source 1..20: mol_type = other DNA
cccctcacccaagctagttt

SEQ ID NO: 6064 - DNA, 20 bp, synthetic construct
  misc_feature 1..20: note = Description of Artificial Sequence: Synthetic oligonucleotide
  misc_feature 1..20: note = Target: FXN; (-) strand; PAM type: NNGRRT; PAM sequence: CAGGAT
  source 1..20: mol_type = other DNA
gcagcacttttaaagaaagg

SEQ ID NO: 6065 - DNA, 20 bp, synthetic construct
  misc_feature 1..20: note = Description of Artificial Sequence: Synthetic oligonucleotide
  misc_feature 1..20: note = Target: FXN; (-) strand; PAM type: NNGRRT; PAM sequence: TAGAGT
  source 1..20: mol_type = other DNA
gtgccaagtcaactgtcctg

SEQ ID NO: 6066 - DNA, 20 bp, synthetic construct
  misc_feature 1..20: note = Description of Artificial Sequence: Synthetic oligonucleotide
  misc_feature 1..20: note = Target: FXN; (-) strand; PAM type: NNGRRT; PAM sequence: GGGGGT
  source 1..20: mol_type = other DNA
ggcctggcacttccaccctt

SEQ ID NO: 6067 - DNA, 20 bp, synthetic construct
  misc_feature 1..20: note = Description of Artificial Sequence: Synthetic oligonucleotide
  misc_feature 1..20: note = Target: FXN; (-) strand; PAM type: NNGRRT; PAM sequence: GTGGGT
  source 1..20: mol_type = other DNA
tcacggaactttcacctcca

SEQ ID NO: 6068 - DNA, 20 bp, synthetic construct
  misc_feature 1..20: note = Description of Artificial Sequence: Synthetic oligonucleotide
  misc_feature 1..20: note = Target: FXN; (-) strand; PAM type: NNGRRT; PAM sequence: GGGAAT
  source 1..20: mol_type = other DNA
tccattttttctaagaaaaa

SEQ ID NO: 6069 - DNA, 20 bp, synthetic construct
  misc_feature 1..20: note = Description of Artificial Sequence: Synthetic oligonucleotide
  misc_feature 1..20: note = Target: FXN; (-) strand; PAM type: NNGRRT; PAM sequence: CCGAGT
  source 1..20: mol_type = other DNA
ctacattcgagtgcctgtaa

SEQ ID NO: 6070 - DNA, 20 bp, synthetic construct
  misc_feature 1..20: note = Description of Artificial Sequence: Synthetic oligonucleotide
  misc_feature 1..20: note = Target: FXN; (-) strand; PAM type: NNGRRT; PAM sequence: TCGAGT
  source 1..20: mol_type = other DNA
atatattgctacttctacat

SEQ ID NO: 6071 - DNA, 20 bp, synthetic construct
  misc_feature 1..20: note = Description of Artificial Sequence: Synthetic oligonucleotide
  misc_feature 1..20: note = Target: FXN; (-) strand; PAM type: NNGRRT; PAM sequence: GTGAAT
  source 1..20: mol_type = other DNA
aagtacgttactatttttca

SEQ ID NO: 6072 - DNA, 20 bp, synthetic construct
  misc_feature 1..20: note = Description of Artificial Sequence: Synthetic oligonucleotide
  misc_feature 1..20: note = Target: FXN; (-) strand; PAM type: NNGRRT; PAM sequence: CTGGGT
  source 1..20: mol_type = other DNA
ggaaggtgttttatcttacc

SEQ ID NO: 6073 - DNA, 20 bp, synthetic construct
  misc_feature 1..20: note = Description of Artificial Sequence: Synthetic oligonucleotide
  misc_feature 1..20: note = Target: FXN; (-) strand; PAM type: NNGRRT; PAM sequence: GTGGAT
  source 1..20: mol_type = other DNA
atttcattaaaaataatgtg

SEQ ID NO: 6074 - DNA, 20 bp, synthetic construct
  misc_feature 1..20: note = Description of Artificial Sequence: Synthetic oligonucleotide
  misc_feature 1..20: note = Target: FXN; (-) strand; PAM type: NNGRRT; PAM sequence: ATGGAT
  source 1..20: mol_type = other DNA
aacagtaggggatgggttaa

SEQ ID NO: 6075 - DNA, 20 bp, synthetic construct
  misc_feature 1..20: note = Description of Artificial Sequence: Synthetic oligonucleotide
  misc_feature 1..20: note = Target: FXN; (-) strand; PAM type: NNGRRT; PAM sequence: ATGGGT
  source 1..20: mol_type = other DNA
tgaatgtccaacagtagggg

SEQ ID NO: 6076 - DNA, 20 bp, synthetic construct
  misc_feature 1..20: note = Description of Artificial Sequence: Synthetic oligonucleotide
  misc_feature 1..20: note = Target: FXN; (-) strand; PAM type: NNGRRT; PAM sequence: GGGGAT
  source 1..20: mol_type = other DNA
aacctgaatgtccaacagta

SEQ ID NO: 6077 - DNA, 20 bp, synthetic construct
  misc_feature 1..20: note = Description of Artificial Sequence: Synthetic oligonucleotide
  misc_feature 1..20: note = Target: FXN; (-) strand; PAM type: NNGRRT; PAM sequence: CTGAAT
  source 1..20: mol_type = other DNA
attgaaactctggaaacaac

SEQ ID NO: 6078 - DNA, 20 bp, synthetic construct
  misc_feature 1..20: note = Description of Artificial Sequence: Synthetic oligonucleotide
  misc_feature 1..20: note = Target: FXN; (-) strand; PAM type: NNGRRT; PAM sequence: TAGGGT
  source 1..20: mol_type = other DNA
gcatggcctgctctaactat

SEQ ID NO: 6079 - DNA, 20 bp, synthetic construct
  misc_feature 1..20: note = Description of Artificial Sequence: Synthetic oligonucleotide
  misc_feature 1..20: note = Target: FXN; (-) strand; PAM type: NNGRRT; PAM sequence: TTGGGT
  source 1..20: mol_type = other DNA
tggtttgagctattaaatat

SEQ ID NO: 6080 - DNA, 20 bp, synthetic construct
  misc_feature 1..20: note = Description of Artificial Sequence: Synthetic oligonucleotide
  misc_feature 1..20: note = Target: FXN; (-) strand; PAM type: NNGRRT; PAM sequence: ATGAGT
  source 1..20: mol_type = other DNA
agaccaaactggaagctgga

SEQ ID NO: 6081 - DNA, 20 bp, synthetic construct
  misc_feature 1..20: note = Description of Artificial Sequence: Synthetic oligonucleotide
  misc_feature 1..20: note = Target: FXN; (-) strand; PAM type: NNGRRT; PAM sequence: TGGAAT
  source 1..20: mol_type = other DNA
ataaagaccaaactggaagc

SEQ ID NO: 6082 - DNA, 20 bp, synthetic construct
  misc_feature 1..20: note = Description of Artificial Sequence: Synthetic oligonucleotide
  misc_feature 1..20: note = Target: FXN; (-) strand; PAM type: NNGRRT; PAM sequence: GTGAGT
  source 1..20: mol_type = other DNA
taagttcttcccaccagaat

SEQ ID NO: 6083 - DNA, 20 bp, synthetic construct
  misc_feature 1..20: note = Description of Artificial Sequence: Synthetic oligonucleotide
  misc_feature 1..20: note = Target: FXN; (-) strand; PAM type: NNGRRT; PAM sequence: CAGAAT
  source 1..20: mol_type = other DNA
caccactaagttcttcccac

SEQ ID NO: 6084 - DNA, 20 bp, synthetic construct
  misc_feature 1..20: note = Description of Artificial Sequence: Synthetic oligonucleotide
  misc_feature 1..20: note = Target: FXN; (-) strand; PAM type: NNGRRT; PAM sequence: GGGAAT
  source 1..20: mol_type = other DNA
gtgcctgacagctttccatg

SEQ ID NO: 6085 - DNA, 20 bp, synthetic construct
  misc_feature 1..20: note = Description of Artificial Sequence: Synthetic oligonucleotide
  misc_feature 1..20: note = Target: FXN; (-) strand; PAM type: NNGRRT; PAM sequence: GGGGGT
  source 1..20: mol_type = other DNA
catgcagatactggttggca

SEQ ID NO: 6086 - DNA, 20 bp, synthetic construct
  misc_feature 1..20: note = Description of Artificial Sequence: Synthetic oligonucleotide
  misc_feature 1..20: note = Target: FXN; (-) strand; PAM type: NNGRRT; PAM sequence: GAGGGT
  source 1..20: mol_type = other DNA
aatgcatctgagtgtggaag

SEQ ID NO: 6087 - DNA, 20 bp, synthetic construct
  misc_feature 1..20: note = Description of Artificial Sequence: Synthetic oligonucleotide
  misc_feature 1..20: note = Target: FXN; (-) strand; PAM type: NNGRRT; PAM sequence: CTGAGT
  source 1..20: mol_type = other DNA
ggggctgggggtaaatgcat

SEQ ID NO: 6088 - DNA, 20 bp, synthetic construct
  misc_feature 1..20: note = Description of Artificial Sequence: Synthetic oligonucleotide
  misc_feature 1..20: note = Target: FXN; (-) strand; PAM type: NNGRRT; PAM sequence: GGGGGT
  source 1..20: mol_type = other DNA
cggttggctctcttggggct

SEQ ID NO: 6089 - DNA, 20 bp, synthetic construct
  misc_feature 1..20: note = Description of Artificial Sequence: Synthetic oligonucleotide
  misc_feature 1..20: note = Target: FXN; (-) strand; PAM type: NNGRRT; PAM sequence: TGGAGT
  source 1..20: mol_type = other DNA
tgctgtgcctcttttctgaa

SEQ ID NO: 6090 - DNA, 20 bp, synthetic construct
  misc_feature 1..20: note = Description of Artificial Sequence: Synthetic oligonucleotide
  misc_feature 1..20: note = Target: FXN; (-) strand; PAM type: NNGRRT; PAM sequence: CTGAAT
  source 1..20: mol_type = other DNA
gctagtgctgtgcctctttt

SEQ ID NO: 6091 - DNA, 20 bp, synthetic construct
  misc_feature 1..20: note = Description of Artificial Sequence: Synthetic oligonucleotide
  misc_feature 1..20: note = Target: FXN; (-) strand; PAM type: NNGRRT; PAM sequence: AGGGAT
  source 1..20: mol_type = other DNA
gcctctcgagaggctgaagc

SEQ ID NO: 6092 - DNA, 20 bp, synthetic construct
  misc_feature 1..20: note = Description of Artificial Sequence: Synthetic oligonucleotide
  misc_feature 1..20: note = Target: FXN; (-) strand; PAM type: NNGRRT; PAM sequence: TGGAGT
  source 1..20: mol_type = other DNA
tctggcctaaaatagctgac

SEQ ID NO: 6093 - DNA, 20 bp, synthetic construct
  misc_feature 1..20: note = Description of Artificial Sequence: Synthetic oligonucleotide
  misc_feature 1..20: note = Target: FXN; (-) strand; PAM type: NNGRRT; PAM sequence: ATGAGT
  source 1..20: mol_type = other DNA
aaagagagagagagagagaa

SEQ ID NO: 6094 - DNA, 20 bp, synthetic construct
  misc_feature 1..20: note = Description of Artificial Sequence: Synthetic oligonucleotide
  misc_feature 1..20: note = Target: FXN; (-) strand; PAM type: NNGRRT; PAM sequence: CAGGGT
  source 1..20: mol_type = other DNA
ctgcactccagcctgggtct

SEQ ID NO: 6095 - DNA, 20 bp, synthetic construct
  misc_feature 1..20: note = Description of Artificial Sequence: Synthetic oligonucleotide
  misc_feature 1..20: note = Target: FXN; (-) strand; PAM type: NNGRRT; PAM sequence: CTGGGT
  source 1..20: mol_type = other DNA
tcgcaccactgcactccagc

SEQ ID NO: 6096 - DNA, 20 bp, synthetic construct
  misc_feature 1..20: note = Description of Artificial Sequence: Synthetic oligonucleotide
  misc_feature 1..20: note = Target: FXN; (-) strand; PAM type: NNGRRT; PAM sequence: GAGGAT
  source 1..20: mol_type = other DNA
tactcaggaggctgaggcag

SEQ ID NO: 6097 - DNA, 20 bp, synthetic construct
  misc_feature 1..20: note = Description of Artificial Sequence: Synthetic oligonucleotide
  misc_feature 1..20: note = Target: FXN; (-) strand; PAM type: NNGRRT; PAM sequence: AGGAGT
  source 1..20: mol_type = other DNA
cgggcggatcatctgaggtc

SEQ ID NO: 6098 - DNA, 20 bp, synthetic construct
  misc_feature 1..20: note = Description of Artificial Sequence: Synthetic oligonucleotide
  misc_feature 1..20: note = Target: FXN; (-) strand; PAM type: NNGRRT; PAM sequence: GCGGAT
  source 1..20: mol_type = other DNA
actttgggaggccgaggcgg

SEQ ID NO: 6099 - DNA, 20 bp, synthetic construct
  misc_feature 1..20: note = Description of Artificial Sequence: Synthetic oligonucleotide
  misc_feature 1..20: note = Target: FXN; (-) strand; PAM type: NNGRRT; PAM sequence: ATGAGT
  source 1..20: mol_type = other DNA
aagcctactctcaaagaaaa

SEQ ID NO: 6100 - DNA, 20 bp, synthetic construct
  misc_feature 1..20: note = Description of Artificial Sequence: Synthetic oligonucleotide
  misc_feature 1..20: note = Target: FXN; (-) strand; PAM type: NNGRRT; PAM sequence: GTGAAT
  source 1..20: mol_type = other DNA
gcacatgggactgcctgaaa

SEQ ID NO: 6101 - DNA, 20 bp, synthetic construct
  misc_feature 1..20: note = Description of Artificial Sequence: Synthetic oligonucleotide
  misc_feature 1..20: note = Target: FXN; (-) strand; PAM type: NNGRRT; PAM sequence: TTGGAT
  source 1..20: mol_type = other DNA
ctcccatccacggaggaaat

SEQ ID NO: 6102 - DNA, 20 bp, synthetic construct
  misc_feature 1..20: note = Description of Artificial Sequence: Synthetic oligonucleotide
  misc_feature 1..20: note = Target: FXN; (-) strand; PAM type: NNGRRT; PAM sequence: TAGGAT
  source 1..20: mol_type = other DNA
acctcggcctcccaaagagc

SEQ ID NO: 6103 - DNA, 20 bp, synthetic construct
  misc_feature 1..20: note = Description of Artificial Sequence: Synthetic oligonucleotide
  misc_feature 1..20: note = Target: FXN; (-) strand; PAM type: NNGRRT; PAM sequence: CAGGGT
  source 1..20: mol_type = other DNA
ttttgtatttttagtagaga

SEQ ID NO: 6104 - DNA, 20 bp, synthetic construct
  misc_feature 1..20: note = Description of Artificial Sequence: Synthetic oligonucleotide
  misc_feature 1..20: note = Target: FXN; (-) strand; PAM type: NNGRRT; PAM sequence: TGGGAT
  source 1..20: mol_type = other DNA
gcctcaggctcccgagtagc

SEQ ID NO: 6105 - DNA, 20 bp, synthetic construct
  misc_feature 1..20: note = Description of Artificial Sequence: Synthetic oligonucleotide
  misc_feature 1..20: note = Target: FXN; (-) strand; PAM type: NNGRRT; PAM sequence: CCGAGT
  source 1..20: mol_type = other DNA
gattctcctgcctcaggctc

SEQ ID NO: 6106 - DNA, 20 bp, synthetic construct
  misc_feature 1..20: note = Description of Artificial Sequence: Synthetic oligonucleotide
  misc_feature 1..20: note = Target: FXN; (-) strand; PAM type: NNGRRT; PAM sequence: CTGGGT
  source 1..20: mol_type = other DNA
ctcactgcagcctccatctc

SEQ ID NO: 6107 - DNA, 20 bp, synthetic construct
  misc_feature 1..20: note = Description of Artificial Sequence: Synthetic oligonucleotide
  misc_feature 1..20: note = Target: FXN; (-) strand; PAM type: NNGRRT; PAM sequence: TGGAGT
  source 1..20: mol_type = other DNA
atttcgctcgttacccaggc

SEQ ID NO: 6108 - DNA, 20 bp, synthetic construct
  misc_feature 1..20: note = Description of Artificial Sequence: Synthetic oligonucleotide
  misc_feature 1..20: note = Target: FXN; (-) strand; PAM type: NNGRRT; PAM sequence: TGGAAT
  source 1..20: mol_type = other DNA
ttttttcttttttttagaga

SEQ ID NO: 6109 - DNA, 20 bp, synthetic construct
  misc_feature 1..20: note = Description of Artificial Sequence: Synthetic oligonucleotide
  misc_feature 1..20: note = Target: FXN; (-) strand; PAM type: NNGRRT; PAM sequence: GAGAAT
  source 1..20: mol_type = other DNA
caaacgtggaaagtcaaagg

SEQ ID NO: 6110 - DNA, 20 bp, synthetic construct
  misc_feature 1..20: note = Description of Artificial Sequence: Synthetic oligonucleotide
  misc_feature 1..20: note = Target: FXN; (-) strand; PAM type: NNGRRT; PAM sequence: TGGAAT
  source 1..20: mol_type = other DNA
gaaaagaataagccaggaga

SEQ ID NO: 6111 - DNA, 20 bp, synthetic construct
  misc_feature 1..20: note = Description of Artificial Sequence: Synthetic oligonucleotide
  misc_feature 1..20: note = Target: FXN; (-) strand; PAM type: NNGRRT; PAM sequence: AAGAAT
  source 1..20: mol_type = other DNA
tttagtagatgtgacaagaa

SEQ ID NO: 6112 - DNA, 20 bp, synthetic construct
  misc_feature 1..20: note = Description of Artificial Sequence: Synthetic oligonucleotide
  misc_feature 1..20: note = Target: FXN; (-) strand; PAM type: NNGRRT; PAM sequence: CTGAAT
  source 1..20: mol_type = other DNA
tggggacaggtagaatgttc

SEQ ID NO: 6113 - DNA, 20 bp, synthetic construct
  misc_feature 1..20: note = Description of Artificial Sequence: Synthetic oligonucleotide
  misc_feature 1..20: note = Target: FXN; (-) strand; PAM type: NNGRRT; PAM sequence: TAGAAT
  source 1..20: mol_type = other DNA
catatagctctggggacagg

SEQ ID NO: 6114 - DNA, 20 bp, synthetic construct
  misc_feature 1..20: note = Description of Artificial Sequence: Synthetic oligonucleotide
  misc_feature 1..20: note = Target: FXN; (-) strand; PAM type: NNGRRT; PAM sequence: CTGAGT
  source 1..20: mol_type = other DNA
atgcaaagccctctggaaat

SEQ ID NO: 6115 - DNA, 20 bp, synthetic construct
  misc_feature 1..20: note = Description of Artificial Sequence: Synthetic oligonucleotide
  misc_feature 1..20: note = Target: FXN; (-) strand; PAM type: NNGRRT; PAM sequence: ATGGAT
  source 1..20: mol_type = other DNA
gccggaagccgaggctggaa

SEQ ID NO: 6116 - DNA, 20 bp, synthetic construct
  misc_feature 1..20: note = Description of Artificial Sequence: Synthetic oligonucleotide
  misc_feature 1..20: note = Target: FXN; (-) strand; PAM type: NNGRRT; PAM sequence: AGGAAT
  source 1..20: mol_type = other DNA
agcagagagtctgctggggg

SEQ ID NO: 6117 - DNA, 20 bp, synthetic construct
  misc_feature 1..20: note = Description of Artificial Sequence: Synthetic oligonucleotide
  misc_feature 1..20: note = Target: FXN; (-) strand; PAM type: NNGRRT; PAM sequence: GAGAGT
  source 1..20: mol_type = other DNA
ggagtaaggggaaagcagca

SEQ ID NO: 6118 - DNA, 20 bp, synthetic construct
  misc_feature 1..20: note = Description of Artificial Sequence: Synthetic oligonucleotide
  misc_feature 1..20: note = Target: FXN; (-) strand; PAM type: NNGRRT; PAM sequence: AGGAGT
  source 1..20: mol_type = other DNA
aacctcccagaactgccaga

SEQ ID NO: 6119 - DNA, 20 bp, synthetic construct
  misc_feature 1..20: note = Description of Artificial Sequence: Synthetic oligonucleotide
  misc_feature 1..20: note = Target: FXN; (-) strand; PAM type: NNGRRT; PAM sequence: AAGGGT
  source 1..20: mol_type = other DNA
cttcctacacatggcaggtc

SEQ ID NO: 6120 - DNA, 20 bp, synthetic construct
  misc_feature 1..20: note = Description of Artificial Sequence: Synthetic oligonucleotide
  misc_feature 1..20: note = Target: FXN; (-) strand; PAM type: NNGRRT; PAM sequence: CAGAGT
  source 1..20: mol_type = other DNA
tggaaggtgctacctgccgg

SEQ ID NO: 6121 - DNA, 20 bp, synthetic construct
  misc_feature 1..20: note = Description of Artificial Sequence: Synthetic oligonucleotide
  misc_feature 1..20: note = Target: FXN; (-) strand; PAM type: NNGRRT; PAM sequence: AAGAAT
  source 1..20: mol_type = other DNA
aggctggttgacgtgtcttg

SEQ ID NO: 6122 - DNA, 20 bp, synthetic construct
  misc_feature 1..20: note = Description of Artificial Sequence: Synthetic oligonucleotide
  misc_feature 1..20: note = Target: FXN; (-) strand; PAM type: NNGRRT; PAM sequence: GAGAAT
  source 1..20: mol_type = other DNA
tgttttgagactgagctgga

SEQ ID NO: 6123 - DNA, 20 bp, synthetic construct
  misc_feature 1..20: note = Description of Artificial Sequence: Synthetic oligonucleotide
  misc_feature 1..20: note = Target: FXN; (-) strand; PAM type: NNGRRT; PAM sequence: AAGGGT
  source 1..20: mol_type = other DNA
ttgagagtgagctggagaga

SEQ ID NO: 6124 - DNA, 20 bp, synthetic construct
  misc_feature 1..20: note = Description of Artificial Sequence: Synthetic oligonucleotide
  misc_feature 1..20: note = Target: FXN; (-) strand; PAM type: NNGRRT; PAM sequence: GAGAGT
  source 1..20: mol_type = other DNA
ggcctgatagggtgtgtttt

SEQ ID NO: 6125 - DNA, 20 bp, synthetic construct
  misc_feature 1..20: note = Description of Artificial Sequence: Synthetic oligonucleotide
  misc_feature 1..20: note = Target: FXN; (-) strand; PAM type: NNGRRT; PAM sequence: TAGGGT
  source 1..20: mol_type = other DNA
aaaaagagtggttggcctga

SEQ ID NO: 6126 - DNA, 20 bp, synthetic construct
  misc_feature 1..20: note = Description of Artificial Sequence: Synthetic oligonucleotide
  misc_feature 1..20: note = Target: FXN; (-) strand; PAM type: NNGRRT; PAM sequence: AAGAGT
  source 1..20: mol_type = other DNA
gtgaggagctgtcctttaaa

SEQ ID NO: 6127 - DNA, 20 bp, synthetic construct
  misc_feature 1..20: note = Description of Artificial Sequence: Synthetic oligonucleotide
  misc_feature 1..20: note = Target: FXN; (-) strand; PAM type: NNGRRT; PAM sequence: CTGGAT
  source 1..20: mol_type = other DNA
atgtggggaaggctacctga

SEQ ID NO: 6128 - DNA, 20 bp, synthetic construct
  misc_feature 1..20: note = Description of Artificial Sequence: Synthetic oligonucleotide
  misc_feature 1..20: note = Target: FXN; (-) strand; PAM type: NNGRRT; PAM sequence: CAGGAT
  source 1..20: mol_type = other DNA
cccagtccatcacccacttc

SEQ ID NO: 6129 - DNA, 20 bp, synthetic construct
  misc_feature 1..20: note = Description of Artificial Sequence: Synthetic oligonucleotide
  misc_feature 1..20: note = Target: FXN; (-) strand; PAM type: NNGRRT; PAM sequence: GAGGAT
  source 1..20: mol_type = other DNA
aagagcttttgtgcccctgt

SEQ ID NO: 6130 - DNA, 20 bp, synthetic construct
  misc_feature 1..20: note = Description of Artificial Sequence: Synthetic oligonucleotide
  misc_feature 1..20: note = Target: FXN; (-) strand; PAM type: NNGRRT; PAM sequence: GTGAAT
  source 1..20: mol_type = other DNA
agtgacagctgcacaatctt

SEQ ID NO: 6131 - DNA, 20 bp, synthetic construct
  misc_feature 1..20: note = Description of Artificial Sequence: Synthetic oligonucleotide
  misc_feature 1..20: note = Target: FXN; (-) strand; PAM type: NNGRRT; PAM sequence: TGGAAT
  source 1..20: mol_type = other DNA
ctggaataatgaaaatgttc

SEQ ID NO: 6132 - DNA, 20 bp, synthetic construct
  misc_feature 1..20: note = Description of Artificial Sequence: Synthetic oligonucleotide
  misc_feature 1..20: note = Target: FXN; (-) strand; PAM type: NNGRRT; PAM sequence: TGGAAT
  source 1..20: mol_type = other DNA
atatgaatagggtttccttc

SEQ ID NO: 6133 - DNA, 20 bp, synthetic construct
  misc_feature 1..20: note = Description of Artificial Sequence: Synthetic oligonucleotide
  misc_feature 1..20: note = Target: FXN; (-) strand; PAM type: NNGRRT; PAM sequence: TAGGGT
  source 1..20: mol_type = other DNA
ggagtgattgctaatatgaa

SEQ ID NO: 6134 - DNA, 20 bp, synthetic construct
  misc_feature 1..20: note = Description of Artificial Sequence: Synthetic oligonucleotide
  misc_feature 1..20: note = Target: FXN; (-) strand; PAM type: NNGRRT; PAM sequence: ATGAAT
  source 1..20: mol_type = other DNA
atgggggagtgattgctaat

SEQ ID NO: 6135 - DNA, 20 bp, synthetic construct
  misc_feature 1..20: note = Description of Artificial Sequence: Synthetic oligonucleotide
  misc_feature 1..20: note = Target: FXN; (-) strand; PAM type: NNGRRT; PAM sequence: GGGAGT
  source 1..20: mol_type = other DNA
tttagggaaaggcggaatgg

SEQ ID NO: 6136 - DNA, 20 bp, synthetic construct
  misc_feature 1..20: note = Description of Artificial Sequence: Synthetic oligonucleotide
  misc_feature 1..20: note = Target: FXN; (-) strand; PAM type: NNGRRT; PAM sequence: CGGAAT
  source 1..20: mol_type = other DNA
tgctgggttttagggaaagg

SEQ ID NO: 6137 - DNA, 20 bp, synthetic construct
  misc_feature 1..20: note = Description of Artificial Sequence: Synthetic oligonucleotide
  misc_feature 1..20: note = Target: FXN; (-) strand; PAM type: NNGRRT; PAM sequence: CTGGGT
  source 1..20: mol_type = other DNA
agaaagtagattagtgattg

SEQ ID NO: 6138 - DNA, 20 bp, synthetic construct
  misc_feature 1..20: note = Description of Artificial Sequence: Synthetic oligonucleotide
  misc_feature 1..20: note = Target: FXN; (-) strand; PAM type: NNGRRT; PAM sequence: CAGGGT
  source 1..20: mol_type = other DNA
cattctatgtcttgagctta

SEQ ID NO: 6139 - DNA, 20 bp, synthetic construct
  misc_feature 1..20: note = Description of Artificial Sequence: Synthetic oligonucleotide
  misc_feature 1..20: note = Target: FXN; (-) strand; PAM type: NNGRRT; PAM sequence: AGGGGT
  source 1..20: mol_type = other DNA
tgactagaaggaaaagaggg

SEQ ID NO: 6140 - DNA, 20 bp, synthetic construct
  misc_feature 1..20: note = Description of Artificial Sequence: Synthetic oligonucleotide
  misc_feature 1..20: note = Target: FXN; (-) strand; PAM type: NNGRRT; PAM sequence: AAGGGT
  source 1..20: mol_type = other DNA
taatcagaatagttactctg

SEQ ID NO: 6141 - DNA, 20 bp, synthetic construct
  misc_feature 1..20: note = Description of Artificial Sequence: Synthetic oligonucleotide
  misc_feature 1..20: note = Target: FXN; (-) strand; PAM type: NNGRRT; PAM sequence: CAGAAT
  source 1..20: mol_type = other DNA
taatctatgctattggtaat

SEQ ID NO: 6142 - DNA, 20 bp, synthetic construct
  misc_feature 1..20: note = Description of Artificial Sequence: Synthetic oligonucleotide
  misc_feature 1..20: note = Target: FXN; (-) strand; PAM type: NNGRRT; PAM sequence: ATGAAT
  source 1..20: mol_type = other DNA
tgtctataggaacagcatgg

SEQ ID NO: 6143 - DNA, 20 bp, synthetic construct
  misc_feature 1..20: note = Description of Artificial Sequence: Synthetic oligonucleotide
  misc_feature 1..20: note = Target: FXN; (-) strand; PAM type: NNGRRT; PAM sequence: ATGGAT
  source 1..20: mol_type = other DNA
gaattgtctataggaacagc

SEQ ID NO: 6144 - DNA, 20 bp, synthetic construct
  misc_feature 1..20: note = Description of Artificial Sequence: Synthetic oligonucleotide
  misc_feature 1..20: note = Target: FXN; (-) strand; PAM type: NNGRRT; PAM sequence: TAGAAT
  source 1..20: mol_type = other DNA
tggaatactacgctgcaaaa

SEQ ID NO: 6145 - DNA, 20 bp, synthetic construct
  misc_feature 1..20: note = Description of Artificial Sequence: Synthetic oligonucleotide
  misc_feature 1..20: note = Target: FXN; (-) strand; PAM type: NNGRRT; PAM sequence: TGGAAT
  source 1..20: mol_type = other DNA
attgtggtatagtcatgcaa

SEQ ID NO: 6146 - DNA, 20 bp, synthetic construct
  misc_feature 1..20: note = Description of Artificial Sequence: Synthetic oligonucleotide
  misc_feature 1..20: note = Target: FXN; (-) strand; PAM type: NNGRRT; PAM sequence: AGGGGT
  source 1..20: mol_type = other DNA
gatcatcagctccactctta

SEQ ID NO: 6147 - DNA, 20 bp, synthetic construct
  misc_feature 1..20: note = Description of Artificial Sequence: Synthetic oligonucleotide
  misc_feature 1..20: note = Target: FXN; (-) strand; PAM type: NNGRRT; PAM sequence: CAGGAT
  source 1..20: mol_type = other DNA
cggggtttcaccttgttagc

SEQ ID NO: 6148 - DNA, 20 bp, synthetic construct
  misc_feature 1..20: note = Description of Artificial Sequence: Synthetic oligonucleotide
  misc_feature 1..20: note = Target: FXN; (-) strand; PAM type: NNGRRT; PAM sequence: CGGGGT
  source 1..20: mol_type = other DNA
ttttgtatttttagtagaga

SEQ ID NO: 6149 - DNA, 20 bp, synthetic construct
  misc_feature 1..20: note = Description of Artificial Sequence: Synthetic oligonucleotide
  misc_feature 1..20: note = Target: FXN; (-) strand; PAM type: NNGRRT; PAM sequence: CCGAGT
  source 1..20: mol_type = other DNA
cattctcctgcctcagcctc

SEQ ID NO: 6150 - DNA, 20 bp, synthetic construct
  misc_feature 1..20: note = Description of Artificial Sequence: Synthetic oligonucleotide
  misc_feature 1..20: note = Target: FXN; (-) strand; PAM type: NNGRRT; PAM sequence: CCGGGT
  source 1..20: mol_type = other DNA
ctgcaagcaagctccgcctc

SEQ ID NO: 6151 - DNA, 20 bp, synthetic construct
  misc_feature 1..20: note = Description of Artificial Sequence: Synthetic oligonucleotide
  misc_feature 1..20: note = Target: FXN; (-) strand; PAM type: NNGRRT; PAM sequence: TGGAGT
  source 1..20: mol_type = other DNA
tctcgctctgtcgcccaggc

SEQ ID NO: 6152 - DNA, 20 bp, synthetic construct
  misc_feature 1..20: note = Description of Artificial Sequence: Synthetic oligonucleotide
  misc_feature 1..20: note = Target: FXN; (-) strand; PAM type: NNGRRT; PAM sequence: CGGAGT
  source 1..20: mol_type = other DNA
ttttttttttttttttgaga

SEQ ID NO: 6153 - DNA, 20 bp, synthetic construct
  misc_feature 1..20: note = Description of Artificial Sequence: Synthetic oligonucleotide
  misc_feature 1..20: note = Target: FXN; (-) strand; PAM type: NNGRRT; PAM sequence: TTGAAT
  source 1..20: mol_type = other DNA
ttggacagtatctactaaag

SEQ ID NO: 6154 - DNA, 20 bp, synthetic construct
  misc_feature 1..20: note = Description of Artificial Sequence: Synthetic oligonucleotide
  misc_feature 1..20: note = Target: FXN; (-) strand; PAM type: NNGRRT; PAM sequence: AAGAGT
  source 1..20: mol_type = other DNA
ctccatctcaaaaaaaaaaa

SEQ ID NO: 6155 - DNA, 20 bp, synthetic construct
  misc_feature 1..20: note = Description of Artificial Sequence: Synthetic oligonucleotide
  misc_feature 1..20: note = Target: FXN; (-) strand; PAM type: NNGRRT; PAM sequence: GAGAAT
  source 1..20: mol_type = other DNA
tactcgggaggctgaggcag

SEQ ID NO: 6156 - DNA, 20 bp, synthetic construct
  misc_feature 1..20: note = Description of Artificial Sequence: Synthetic oligonucleotide
  misc_feature 1..20: note = Target: FXN; (-) strand; PAM type: NNGRRT; PAM sequence: AGGAGT
  source 1..20: mol_type = other DNA
cgggcggatcacctgaggtt

SEQ ID NO: 6157 - DNA, 20 bp, synthetic construct
  misc_feature 1..20: note = Description of Artificial Sequence: Synthetic oligonucleotide
  misc_feature 1..20: note = Target: FXN; (-) strand; PAM type: NNGRRT; PAM sequence: GCGGAT
  source 1..20: mol_type = other DNA
acttcgggaggccgaggcgg

SEQ ID NO: 6158 - DNA, 20 bp, synthetic construct
  misc_feature 1..20: note = Description of Artificial Sequence: Synthetic oligonucleotide
  misc_feature 1..20: note = Target: FXN; (-) strand; PAM type: NNGRRT; PAM sequence: AAGAGT
  source 1..20: mol_type = other DNA
taaaataaaataaaataaaa

SEQ ID NO: 6159 - DNA, 20 bp, synthetic construct
  misc_feature 1..20: note = Description of Artificial Sequence: Synthetic oligonucleotide
  misc_feature 1..20: note = Target: FXN; (-) strand; PAM type: NNGRRT; PAM sequence: CTGGGT
  source 1..20: mol_type = other DNA
tcgtgccattgcattccatc

SEQ ID NO: 6160 - DNA, 20 bp, synthetic construct
  misc_feature 1..20: note = Description of Artificial Sequence: Synthetic oligonucleotide
  misc_feature 1..20: note = Target: FXN; (-) strand; PAM type: NNGRRT; PAM sequence: AGGGAT
  source 1..20: mol_type = other DNA
cctcaggagcctgaggtggg

SEQ ID NO: 6161 - DNA, 20 bp, synthetic construct
  misc_feature 1..20: note = Description of Artificial Sequence: Synthetic oligonucleotide
  misc_feature 1..20: note = Target: FXN; (-) strand; PAM type: NNGRRT; PAM sequence: AGGAAT
  source 1..20: mol_type = other DNA
gagaaggatcacttgaaccc

SEQ ID NO: 6162 - DNA, 20 bp, synthetic construct
  misc_feature 1..20: note = Description of Artificial Sequence: Synthetic oligonucleotide
  misc_feature 1..20: note = Target: FXN; (-) strand; PAM type: NNGRRT; PAM sequence: AAGGAT
  source 1..20: mol_type = other DNA
actttgggaggccaagggag

SEQ ID NO: 6163 - DNA, 20 bp, synthetic construct
  misc_feature 1..20: note = Description of Artificial Sequence: Synthetic oligonucleotide
  misc_feature 1..20: note = Target: FXN; (-) strand; PAM type: NNGRRT; PAM sequence: CTGGGT
  source 1..20: mol_type = other DNA
tatcaagagctggccatggg

SEQ ID NO: 6164 - DNA, 20 bp, synthetic construct
  misc_feature 1..20: note = Description of Artificial Sequence: Synthetic oligonucleotide
  misc_feature 1..20: note = Target: FXN; (-) strand; PAM type: NNGRRT; PAM sequence: TAGAAT
  source 1..20: mol_type = other DNA
cttaactatgccaatctaat

SEQ ID NO: 6165 - DNA, 20 bp, synthetic construct
  misc_feature 1..20: note = Description of Artificial Sequence: Synthetic oligonucleotide
  misc_feature 1..20: note = Target: FXN; (-) strand; PAM type: NNGRRT; PAM sequence: GTGAAT
  source 1..20: mol_type = other DNA
ttcaacttttcacaaagatg

SEQ ID NO: 6166 - DNA, 20 bp, synthetic construct
  misc_feature 1..20: note = Description of Artificial Sequence: Synthetic oligonucleotide
  misc_feature 1..20: note = Target: FXN; (-) strand; PAM type: NNGRRT; PAM sequence: TTGAAT
  source 1..20: mol_type = other DNA
ggctgaggcaggataatctc

SEQ ID NO: 6167 - DNA, 20 bp, synthetic construct
  misc_feature 1..20: note = Description of Artificial Sequence: Synthetic oligonucleotide
  misc_feature 1..20: note = Target: FXN; (-) strand; PAM type: NNGRRT; PAM sequence: CAGGAT
  source 1..20: mol_type = other DNA
agctactcgggaggctgagg

SEQ ID NO: 6168 - DNA, 20 bp, synthetic construct
  misc_feature 1..20: note = Description of Artificial Sequence: Synthetic oligonucleotide
  misc_feature 1..20: note = Target: FXN; (-) strand; PAM type: NNGRRT; PAM sequence: AGGAGT
  source 1..20: mol_type = other DNA
cgggtggatcacctgaggtc

SEQ ID NO: 6169 - DNA, 20 bp, synthetic construct
  misc_feature 1..20: note = Description of Artificial Sequence: Synthetic oligonucleotide
  misc_feature 1..20: note = Target: FXN; (-) strand; PAM type: NNGRRT; PAM sequence: GTGGAT
  source 1..20: mol_type = other DNA
attttgggaggctgaggcgg

SEQ ID NO: 6170 - DNA, 20 bp, synthetic construct
  misc_feature 1..20: note = Description of Artificial Sequence: Synthetic oligonucleotide
  misc_feature 1..20: note = Target: FXN; (-) strand; PAM type: NNGRRT; PAM sequence: GCGGGT
  source 1..20: mol_type = other DNA
tagcattttgggaggctgag

SEQ ID NO: 6171 - DNA, 20 bp, synthetic construct
  misc_feature 1..20: note = Description of Artificial Sequence: Synthetic oligonucleotide
  misc_feature 1..20: note = Target: FXN; (-) strand; PAM type: NNGRRT; PAM sequence: CAGAGT
  source 1..20: mol_type = other DNA
ctgcactccagcctgggtga

SEQ ID NO: 6172 - DNA, 20 bp, synthetic construct
  misc_feature 1..20: note = Description of Artificial Sequence: Synthetic oligonucleotide
  misc_feature 1..20: note = Target: FXN; (-) strand; PAM type: NNGRRT; PAM sequence: CTGGGT
  source 1..20: mol_type = other DNA
ttgtgccactgcactccagc

SEQ ID NO: 6173 - DNA, 20 bp, synthetic construct
  misc_feature 1..20: note = Description of Artificial Sequence: Synthetic oligonucleotide
  misc_feature 1..20: note = Target: FXN; (-) strand; PAM type: NNGRRT; PAM sequence: GAGAAT
  source 1..20: mol_type = other DNA
tacttgggaggctgagacag

SEQ ID NO: 6174 - DNA, 20 bp, synthetic construct
  misc_feature 1..20: note = Description of Artificial Sequence: Synthetic oligonucleotide
  misc_feature 1..20: note = Target: FXN; (-) strand; PAM type: NNGRRT; PAM sequence: AGGAGT
  source 1..20: mol_type = other DNA
taggtggctcacctgaggtc

SEQ ID NO: 6175 - DNA, 20 bp, synthetic construct
  misc_feature 1..20: note = Description of Artificial Sequence: Synthetic oligonucleotide
  misc_feature 1..20: note = Target: FXN; (-) strand; PAM type: NNGRRT; PAM sequence: AGGGGT
  source 1..20: mol_type = other DNA
aaaaatttaaacagcacaga

SEQ ID NO: 6176 - DNA, 20 bp, synthetic construct
  misc_feature 1..20: note = Description of Artificial Sequence: Synthetic oligonucleotide
  misc_feature 1..20: note = Target: FXN; (-) strand; PAM type: NNGRRT; PAM sequence: GAGAAT
  source 1..20: mol_type = other DNA
tactcaggaggctgaggcag

SEQ ID NO: 6177 - DNA, 20 bp, synthetic construct
  misc_feature 1..20: note = Description of Artificial Sequence: Synthetic oligonucleotide
  misc_feature 1..20: note = Target: FXN; (-) strand; PAM type: NNGRRT; PAM sequence: ACGGGT
  source 1..20: mol_type = other DNA
aaaattagccgggcgtggtg

SEQ ID NO: 6178 - DNA, 20 bp, synthetic construct
  misc_feature 1..20: note = Description of Artificial Sequence: Synthetic oligonucleotide
  misc_feature 1..20: note = Target: FXN; (-) strand; PAM type: NNGRRT; PAM sequence: TAGGAT
  source 1..20: mol_type = other DNA
gcctcagcttctcgaaatgt

SEQ ID NO: 6179 - DNA, 20 bp, synthetic construct
  misc_feature 1..20: note = Description of Artificial Sequence: Synthetic oligonucleotide
  misc_feature 1..20: note = Target: FXN; (-) strand; PAM type: NNGRRT; PAM sequence: TGGAGT
  source 1..20: mol_type = other DNA
tctcactctgtcacccaggc

SEQ ID NO: 6180 - DNA, 20 bp, synthetic construct
  misc_feature 1..20: note = Description of Artificial Sequence: Synthetic oligonucleotide
  misc_feature 1..20: note = Target: FXN; (-) strand; PAM type: NNGRRT; PAM sequence: CAGAGT
  source 1..20: mol_type = other DNA
ttttttttttttttttgaga

SEQ ID NO: 6181 - DNA, 20 bp, synthetic construct
  misc_feature 1..20: note = Description of Artificial Sequence: Synthetic oligonucleotide
  misc_feature 1..20: note = Target: FXN; (-) strand; PAM type: NNGRRT; PAM sequence: AAGAGT
  source 1..20: mol_type = other DNA
gtcttcaaaaaactctgcta

SEQ ID NO: 6182 - DNA, 20 bp, synthetic construct
  misc_feature 1..20: note = Description of Artificial Sequence: Synthetic oligonucleotide
  misc_feature 1..20: note = Target: FXN; (-) strand; PAM type: NNGRRT; PAM sequence: TGGAGT
  source 1..20: mol_type = other DNA
tctcgctctgtcacccaggc

SEQ ID NO: 6183 - DNA, 20 bp, synthetic construct
  misc_feature 1..20: note = Description of Artificial Sequence: Synthetic oligonucleotide
  misc_feature 1..20: note = Target: FXN; (-) strand; PAM type: NNGRRT; PAM sequence: CAGAGT
  source 1..20: mol_type = other DNA
atccatccatccatctatga

SEQ ID NO: 6184 - DNA, 20 bp, synthetic construct
  misc_feature 1..20: note = Description of Artificial Sequence: Synthetic oligonucleotide
  misc_feature 1..20: note = Target: FXN; (-) strand; PAM type: NNGRRT; PAM sequence: CAGAGT
  source 1..20: mol_type = other DNA
gagaggctgagtgacttgcc

SEQ ID NO: 6185 - DNA, 20 bp, synthetic construct
  misc_feature 1..20: note = Description of Artificial Sequence: Synthetic oligonucleotide
  misc_feature 1..20: note = Target: FXN; (-) strand; PAM type: NNGRRT; PAM sequence: CTGAGT
  source 1..20: mol_type = other DNA
gaaaatgaggctcagagagg

SEQ ID NO: 6186 - DNA, 20 bp, synthetic construct
  misc_feature 1..20: note = Description of Artificial Sequence: Synthetic oligonucleotide
  misc_feature 1..20: note = Target: FXN; (-) strand; PAM type: NNGRRT; PAM sequence: ATGGGT
  source 1..20: mol_type = other DNA
cccctctctgatttgccttc

SEQ ID NO: 6187 - DNA, 20 bp, synthetic construct
  misc_feature 1..20: note = Description of Artificial Sequence: Synthetic oligonucleotide
  misc_feature 1..20: note = Target: FXN; (-) strand; PAM type: NNGRRT; PAM sequence: ACGGGT
  source 1..20: mol_type = other DNA
cttatccctactgaagaact

SEQ ID NO: 6188 - DNA, 20 bp, synthetic construct
  misc_feature 1..20: note = Description of Artificial Sequence: Synthetic oligonucleotide
  misc_feature 1..20: note = Target: FXN; (-) strand; PAM type: NNGRRT; PAM sequence: AGGAAT
  source 1..20: mol_type = other DNA
ttttcaaaaatatgcttccc

SEQ ID NO: 6189 - DNA, 20 bp, synthetic construct
  misc_feature 1..20: note = Description of Artificial Sequence: Synthetic oligonucleotide
  misc_feature 1..20: note = Target: FXN; (-) strand; PAM type: NNGRRT; PAM sequence: TAGAAT
  source 1..20: mol_type = other DNA
taagacctagggatacacat

SEQ ID NO: 6190 - DNA, 20 bp, synthetic construct
  misc_feature 1..20: note = Description of Artificial Sequence: Synthetic oligonucleotide
  misc_feature 1..20: note = Target: FXN; (-) strand; PAM type: NNGRRT; PAM sequence: AGGGAT
  source 1..20: mol_type = other DNA
aatctctaggaataagacct

SEQ ID NO: 6191 - DNA, 20 bp, synthetic construct
  misc_feature 1..20: note = Description of Artificial Sequence: Synthetic oligonucleotide
  misc_feature 1..20: note = Target: FXN; (-) strand; PAM type: NNGRRT; PAM sequence: AGGAAT
  source 1..20: mol_type = other DNA
accaagtaatcaaaatctct

SEQ ID NO: 6192 - DNA, 20 bp, synthetic construct
  misc_feature 1..20: note = Description of Artificial Sequence: Synthetic oligonucleotide
  misc_feature 1..20: note = Target: FXN; (-) strand; PAM type: NNGRRT; PAM sequence: TGGAAT
  source 1..20: mol_type = other DNA
ttctcatactagctgcatat

SEQ ID NO: 6193 - DNA, 20 bp, synthetic construct
  misc_feature 1..20: note = Description of Artificial Sequence: Synthetic oligonucleotide
  misc_feature 1..20: note = Target: FXN; (-) strand; PAM type: NNGRRT; PAM sequence: CAGAGT
  source 1..20: mol_type = other DNA
ctgcactccagcctgggtga

SEQ ID NO: 6194 - DNA, 20 bp, synthetic construct
  misc_feature 1..20: note = Description of Artificial Sequence: Synthetic oligonucleotide
  misc_feature 1..20: note = Target: FXN; (-) strand; PAM type: NNGRRT; PAM sequence: CTGGGT
  source 1..20: mol_type = other DNA
ttgcgccactgcactccagc

SEQ ID NO: 6195 - DNA, 20 bp, synthetic construct
  misc_feature 1..20: note = Description of Artificial Sequence: Synthetic oligonucleotide
  misc_feature 1..20: note = Target: FXN; (-) strand; PAM type: NNGRRT; PAM sequence: GGGGGT
  source 1..20: mol_type = other DNA
caaaactttggaaggctgat

SEQ ID NO: 6196 - DNA, 20 bp, synthetic construct
  misc_feature 1..20: note = Description of Artificial Sequence: Synthetic oligonucleotide
  misc_feature 1..20: note = Target: FXN; (-) strand; PAM type: NNGRRT; PAM sequence: TAGGAT
  source 1..20: mol_type = other DNA
accagcacttccctggcttc

SEQ ID NO: 6197 - DNA, 20 bp, synthetic construct
  misc_feature 1..20: note = Description of Artificial Sequence: Synthetic oligonucleotide
  misc_feature 1..20: note = Target: FXN; (-) strand; PAM type: NNGRRT; PAM sequence: AGGGAT
  source 1..20: mol_type = other DNA
aacccagaaaaccatctttg

SEQ ID NO: 6198 - DNA, 20 bp, synthetic construct
  misc_feature 1..20: note = Description of Artificial Sequence: Synthetic oligonucleotide
  misc_feature 1..20: note = Target: FXN; (-) strand; PAM type: NNGRRT; PAM sequence: CTGAAT
  source 1..20: mol_type = other DNA
tcatgccactgcactccagg

SEQ ID NO: 6199 - DNA, 20 bp, synthetic construct
  misc_feature 1..20: note = Description of Artificial Sequence: Synthetic oligonucleotide
  misc_feature 1..20: note = Target: FXN; (-) strand; PAM type: NNGRRT; PAM sequence: CTGGGT
  source 1..20: mol_type = other DNA
actaaaaatacaaaaattag

SEQ ID NO: 6200 - DNA, 20 bp, synthetic construct
  misc_feature 1..20: note = Description of Artificial Sequence: Synthetic oligonucleotide
  misc_feature 1..20: note = Target: FXN; (-) strand; PAM type: NNGRRT; PAM sequence: AGGAGT
  source 1..20: mol_type = other DNA
tgggaggattacttgagttc

SEQ ID NO: 6201 - DNA, 20 bp, synthetic construct
  misc_feature 1..20: note = Description of Artificial Sequence: Synthetic oligonucleotide
  misc_feature 1..20: note = Target: FXN; (-) strand; PAM type: NNGRRT; PAM sequence: TTGAGT
  source 1..20: mol_type = other DNA
ggctgaggtgggaggattac

SEQ ID NO: 6202 - DNA, 20 bp, synthetic construct
  misc_feature 1..20: note = Description of Artificial Sequence: Synthetic oligonucleotide
  misc_feature 1..20: note = Target: FXN; (-) strand; PAM type: NNGRRT; PAM sequence: GAGGAT
  source 1..20: mol_type = other DNA
actttgggaggctgaggtgg

SEQ ID NO: 6203 - DNA, 20 bp, synthetic construct
  misc_feature 1..20: note = Description of Artificial Sequence: Synthetic oligonucleotide
  misc_feature 1..20: note = Target: FXN; (-) strand; PAM type: NNGRRT; PAM sequence: GAGGAT
  source 1..20: mol_type = other DNA
tattagtcaattgccatcaa

SEQ ID NO: 6204 - DNA, 20 bp, synthetic construct
  misc_feature 1..20: note = Description of Artificial Sequence: Synthetic oligonucleotide
  misc_feature 1..20: note = Target: FXN; (-) strand; PAM type: NNGRRT; PAM sequence: TTGAAT
  source 1..20: mol_type = other DNA
tgtcctcaacaattccatga

SEQ ID NO: 6205 - DNA, 20 bp, synthetic construct
  misc_feature 1..20: note = Description of Artificial Sequence: Synthetic oligonucleotide
  misc_feature 1..20: note = Target: FXN; (-) strand; PAM type: NNGRRT; PAM sequence: TGGAGT
  source 1..20: mol_type = other DNA
tggttgcctcctccattatg

SEQ ID NO: 6206 - DNA, 20 bp, synthetic construct
  misc_feature 1..20: note = Description of Artificial Sequence: Synthetic oligonucleotide
  misc_feature 1..20: note = Target: FXN; (-) strand; PAM type: NNGRRT; PAM sequence: CTGAAT
  source 1..20: mol_type = other DNA
tttgctgctaacagcaatta

SEQ ID NO: 6207 - DNA, 20 bp, synthetic construct
  misc_feature 1..20: note = Description of Artificial Sequence: Synthetic oligonucleotide
  misc_feature 1..20: note = Target: FXN; (-) strand; PAM type: NNGRRT; PAM sequence: AAGAGT
  source 1..20: mol_type = other DNA
aagttggtaggtcagtttgt

SEQ ID NO: 6208 - DNA, 20 bp, synthetic construct
  misc_feature 1..20: note = Description of Artificial Sequence: Synthetic oligonucleotide
  misc_feature 1..20: note = Target: FXN; (-) strand; PAM type: NNGRRT; PAM sequence: GTGGAT
  source 1..20: mol_type = other DNA
cccccacctctgatcaggct

SEQ ID NO: 6209 - DNA, 20 bp, synthetic construct
  misc_feature 1..20: note = Description of Artificial Sequence: Synthetic oligonucleotide
  misc_feature 1..20: note = Target: FXN; (-) strand; PAM type: NNGRRT; PAM sequence: CAGAGT
  source 1..20: mol_type = other DNA
tcaatgtctgcatgtgtggg

SEQ ID NO: 6210 - DNA, 20 bp, synthetic construct
  misc_feature 1..20: note = Description of Artificial Sequence: Synthetic oligonucleotide
  misc_feature 1..20: note = Target: FXN; (-) strand; PAM type: NNGRRT; PAM sequence: TAGAAT
  source 1..20: mol_type = other DNA
agtaaaccaaacgcagctgc

SEQ ID NO: 6211 - DNA, 20 bp, synthetic construct
  misc_feature 1..20: note = Description of Artificial Sequence: Synthetic oligonucleotide
  misc_feature 1..20: note = Target: FXN; (-) strand; PAM type: NNGRRT; PAM sequence: CTGGGT
  source 1..20: mol_type = other DNA
tcacacaactgcactccagc

SEQ ID NO: 6212 - DNA, 20 bp, synthetic construct
  misc_feature 1..20: note = Description of Artificial Sequence: Synthetic oligonucleotide
  misc_feature 1..20: note = Target: FXN; (-) strand; PAM type: NNGRRT; PAM sequence: GAGAAT
  source 1..20: mol_type = other DNA
tactcaggaggttgaggcgg

SEQ ID NO: 6213 - DNA, 20 bp, synthetic construct
  misc_feature 1..20: note = Description of Artificial Sequence: Synthetic oligonucleotide
  misc_feature 1..20: note = Target: FXN; (-) strand; PAM type: NNGRRT; PAM sequence: AGGAGT
  source 1..20: mol_type = other DNA
cgggtggatcacttgagatc

SEQ ID NO: 6214 - DNA, 20 bp, synthetic construct
  misc_feature 1..20: note = Description of Artificial Sequence: Synthetic oligonucleotide
  misc_feature 1..20: note = Target: FXN; (-) strand; PAM type: NNGRRT; PAM sequence: GTGGAT
  source 1..20: mol_type = other DNA
actttaggaggctgaggcgg

SEQ ID NO: 6215 - DNA, 20 bp, synthetic construct
  misc_feature 1..20: note = Description of Artificial Sequence: Synthetic oligonucleotide
  misc_feature 1..20: note = Target: FXN; (-) strand; PAM type: NNGRRT; PAM sequence: GCGGGT
  source 1..20: mol_type = other DNA
cagcactttaggaggctgag

SEQ ID NO: 6216 - DNA, 20 bp, synthetic construct
  misc_feature 1..20: note = Description of Artificial Sequence: Synthetic oligonucleotide
  misc_feature 1..20: note = Target: FXN; (-) strand; PAM type: NNGRRT; PAM sequence: CTGGGT
  source 1..20: mol_type = other DNA
ttgtgccactgcactccagc

SEQ ID NO: 6217 - DNA, 20 bp, synthetic construct
  misc_feature 1..20: note = Description of Artificial Sequence: Synthetic oligonucleotide
  misc_feature 1..20: note = Target: FXN; (-) strand; PAM type: NNGRRT; PAM sequence: CCGAGT
  source 1..20: mol_type = other DNA
aaataaaataaaataattag

SEQ ID NO: 6218 - DNA, 20 bp, synthetic construct
  misc_feature 1..20: note = Description of Artificial Sequence: Synthetic oligonucleotide
  misc_feature 1..20: note = Target: FXN; (-) strand; PAM type: NNGRRT; PAM sequence: AGGAGT
  source 1..20: mol_type = other DNA
tgagagaatcgcttgaggcc

SEQ ID NO: 6219 - DNA, 20 bp, synthetic construct
  misc_feature 1..20: note = Description of Artificial Sequence: Synthetic oligonucleotide
  misc_feature 1..20: note = Target: FXN; (-) strand; PAM type: NNGRRT; PAM sequence: GAGAAT
  source 1..20: mol_type = other DNA
gctttgggaggccgaggtga

SEQ ID NO: 6220 - DNA, 20 bp, synthetic construct
  misc_feature 1..20: note = Description of Artificial Sequence: Synthetic oligonucleotide
  misc_feature 1..20: note = Target: FXN; (-) strand; PAM type: NNGRRT; PAM sequence: CTGGGT
  source 1..20: mol_type = other DNA
ctaaatttatagatttgtgg

SEQ ID NO: 6221 - DNA, 20 bp, synthetic construct
  misc_feature 1..20: note = Description of Artificial Sequence: Synthetic oligonucleotide
  misc_feature 1..20: note = Target: FXN; (-) strand; PAM type: NNGRRT; PAM sequence: TTGAAT
  source 1..20: mol_type = other DNA
atagatcctcccataatctg

SEQ ID NO: 6222 - DNA, 20 bp, synthetic construct
  misc_feature 1..20: note = Description of Artificial Sequence: Synthetic oligonucleotide
  misc_feature 1..20: note = Target: FXN; (-) strand; PAM type: NNGRRT; PAM sequence: GTGAAT
  source 1..20: mol_type = other DNA
tattcatagatcctcccttt

SEQ ID NO: 6223 - DNA, 20 bp, synthetic construct
  misc_feature 1..20: note = Description of Artificial Sequence: Synthetic oligonucleotide
  misc_feature 1..20: note = Target: FXN; (-) strand; PAM type: NNGRRT; PAM sequence: CAGGGT
  source 1..20: mol_type = other DNA
gaccacagagtggtctaaga

SEQ ID NO: 6224 - DNA, 20 bp, synthetic construct
  misc_feature 1..20: note = Description of Artificial Sequence: Synthetic oligonucleotide
  misc_feature 1..20: note = Target: FXN; (-) strand; PAM type: NNGRRT; PAM sequence: CAGAGT
  source 1..20: mol_type = other DNA
ttcctgataaccactgacca

SEQ ID NO: 6225 - DNA, 20 bp, synthetic construct
  misc_feature 1..20: note = Description of Artificial Sequence: Synthetic oligonucleotide
  misc_feature 1..20: note = Target: FXN; (-) strand; PAM type: NNGRRT; PAM sequence: GAGAAT
  source 1..20: mol_type = other DNA
tactcgggaggctgaggcaa

SEQ ID NO: 6226 - DNA, 20 bp, synthetic construct
  misc_feature 1..20: note = Description of Artificial Sequence: Synthetic oligonucleotide
  misc_feature 1..20: note = Target: FXN; (-) strand; PAM type: NNGRRT; PAM sequence: AGGAGT
  source 1..20: mol_type = other DNA
cagttggattacctgaggtc

SEQ ID NO: 6227 - DNA, 20 bp, synthetic construct
  misc_feature 1..20: note = Description of Artificial Sequence: Synthetic oligonucleotide
  misc_feature 1..20: note = Target: FXN; (-) strand; PAM type: NNGRRT; PAM sequence: TTGGAT
  source 1..20: mol_type = other DNA
actttgggaggccaaagcag

SEQ ID NO: 6228 - DNA, 20 bp, synthetic construct
  misc_feature 1..20: note = Description of Artificial Sequence: Synthetic oligonucleotide
  misc_feature 1..20: note = Target: FXN; (-) strand; PAM type: NNGRRT; PAM sequence: AGGAGT
  source 1..20: mol_type = other DNA
agttttggccatgatgggaa

SEQ ID NO: 6229 - DNA, 20 bp, synthetic construct
  misc_feature 1..20: note = Description of Artificial Sequence: Synthetic oligonucleotide
  misc_feature 1..20: note = Target: FXN; (-) strand; PAM type: NNGRRT; PAM sequence: AGGAAT
  source 1..20: mol_type = other DNA
cagagagacaatctcagggc

SEQ ID NO: 6230 - DNA, 20 bp, synthetic construct
  misc_feature 1..20: note = Description of Artificial Sequence: Synthetic oligonucleotide
  misc_feature 1..20: note = Target: FXN; (-) strand; PAM type: NNGRRT; PAM sequence: CAGAAT
  source 1..20: mol_type = other DNA
tcctttgaaagaatgggtta

SEQ ID NO: 6231 - DNA, 20 bp, synthetic construct
  misc_feature 1..20: note = Description of Artificial Sequence: Synthetic oligonucleotide
  misc_feature 1..20: note = Target: FXN; (-) strand; PAM type: NNGRRT; PAM sequence: ATGGGT
  source 1..20: mol_type = other DNA
gcatctcttcctttgaaaga

SEQ ID NO: 6232 - DNA, 20 bp, synthetic construct
  misc_feature 1..20: note = Description of Artificial Sequence: Synthetic oligonucleotide
  misc_feature 1..20: note = Target: FXN; (-) strand; PAM type: NNGRRT; PAM sequence: AAGAAT
  source 1..20: mol_type = other DNA
ataggcatctcttcctttga

SEQ ID NO: 6233 - DNA, 20 bp, synthetic construct
  misc_feature 1..20: note = Description of Artificial Sequence: Synthetic oligonucleotide
  misc_feature 1..20: note = Target: FXN; (-) strand; PAM type: NNGRRT; PAM sequence: ATGAAT
  source 1..20: mol_type = other DNA
ttgagtgatactcaaggtat

SEQ ID NO: 6234 - DNA, 20 bp, synthetic construct
  misc_feature 1..20: note = Description of Artificial Sequence: Synthetic oligonucleotide
  misc_feature 1..20: note = Target: FXN; (-) strand; PAM type: NNGRRT; PAM sequence: TTGAGT
  source 1..20: mol_type = other DNA
tgttagaaataattttgccc

SEQ ID NO: 6235 - DNA, 20 bp, synthetic construct
  misc_feature 1..20: note = Description of Artificial Sequence: Synthetic oligonucleotide
  misc_feature 1..20: note = Target: FXN; (-) strand; PAM type: NNGRRT; PAM sequence: CAGAGT
  source 1..20: mol_type = other DNA
ggaattcatactctagggta

SEQ ID NO: 6236 - DNA, 20 bp, synthetic construct
  misc_feature 1..20: note = Description of Artificial Sequence: Synthetic oligonucleotide
  misc_feature 1..20: note = Target: FXN; (-) strand; PAM type: NNGRRT; PAM sequence: TAGGGT
  source 1..20: mol_type = other DNA
ctaatcaggaattcatactc

SEQ ID NO: 6237 - DNA, 20 bp, synthetic construct
  misc_feature 1..20: note = Description of Artificial Sequence: Synthetic oligonucleotide
  misc_feature 1..20: note = Target: FXN; (-) strand; PAM type: NNGRRT; PAM sequence: AGGAAT
  source 1..20: mol_type = other DNA
gcacctgaaggactctaatc

SEQ ID NO: 6238 - DNA, 20 bp, synthetic construct
  misc_feature 1..20: note = Description of Artificial Sequence: Synthetic oligonucleotide
  misc_feature 1..20: note = Target: FXN; (-) strand; PAM type: NNGRRT; PAM sequence: TGGAGT
  source 1..20: mol_type = other DNA
aaggaaggaccgtgtctgct

SEQ ID NO: 6239 - DNA, 20 bp, synthetic construct
  misc_feature 1..20: note = Description of Artificial Sequence: Synthetic oligonucleotide
  misc_feature 1..20: note = Target: FXN; (-) strand; PAM type: NNGRRT; PAM sequence: CAGAGT
  source 1..20: mol_type = other DNA
gtgctccacagagtcaacct

SEQ ID NO: 6240 - DNA, 20 bp, synthetic construct
  misc_feature 1..20: note = Description of Artificial Sequence: Synthetic oligonucleotide
  misc_feature 1..20: note = Target: FXN; (-) strand; PAM type: NNGRRT; PAM sequence: CAGAGT
  source 1..20: mol_type = other DNA
acagagggatcagtgctcca

SEQ ID NO: 6241 - DNA, 20 bp, synthetic construct
  misc_feature 1..20: note = Description of Artificial Sequence: Synthetic oligonucleotide
  misc_feature 1..20: note = Target: FXN; (-) strand; PAM type: NNGRRT; PAM sequence: AGGGAT
  source 1..20: mol_type = other DNA
aatagacaattataacacag

SEQ ID NO: 6242 - DNA, 20 bp, synthetic construct
  misc_feature 1..20: note = Description of Artificial Sequence: Synthetic oligonucleotide
  misc_feature 1..20: note = Target: FXN; (-) strand; PAM type: NNGRRT; PAM sequence: AAGAAT
  source 1..20: mol_type = other DNA
tgttccagacactgggatca

SEQ ID NO: 6243 - DNA, 20 bp, synthetic construct
  misc_feature 1..20: note = Description of Artificial Sequence: Synthetic oligonucleotide
  misc_feature 1..20: note = Target: FXN; (-) strand; PAM type: NNGRRT; PAM sequence: TGGGAT
  source 1..20: mol_type = other DNA
cttggcactgttccagacac

SEQ ID NO: 6244 - DNA, 20 bp, synthetic construct
  misc_feature 1..20: note = Description of Artificial Sequence: Synthetic oligonucleotide
  misc_feature 1..20: note = Target: FXN; (-) strand; PAM type: NNGRRT; PAM sequence: ATGAAT
  source 1..20: mol_type = other DNA
tggaaaagtctcatttacat

SEQ ID NO: 6245 - DNA, 20 bp, synthetic construct
  misc_feature 1..20: note = Description of Artificial Sequence: Synthetic oligonucleotide
  misc_feature 1..20: note = Target: FXN; (-) strand; PAM type: NNGRRT; PAM sequence: GCGAGT
  source 1..20: mol_type = other DNA
atttgtctatgtggccagta

SEQ ID NO: 6246 - DNA, 20 bp, synthetic construct
  misc_feature 1..20: note = Description of Artificial Sequence: Synthetic oligonucleotide
  misc_feature 1..20: note = Target: FXN; (-) strand; PAM type: NNGRRT; PAM sequence: CTGGAT
  source 1..20: mol_type = other DNA
agatgtcctcttgggtgtat

SEQ ID NO: 6247 - DNA, 20 bp, synthetic construct
  misc_feature 1..20: note = Description of Artificial Sequence: Synthetic oligonucleotide
  misc_feature 1..20: note = Target: FXN; (-) strand; PAM type: NNGRRT; PAM sequence: TTGGGT
  source 1..20: mol_type = other DNA
aaaaaagaacagatgtcctc

SEQ ID NO: 6248 - DNA, 20 bp, synthetic construct
  misc_feature 1..20: note = Description of Artificial Sequence: Synthetic oligonucleotide
  misc_feature 1..20: note = Target: FXN; (-) strand; PAM type: NNGRRT; PAM sequence: AGGGGT
  source 1..20: mol_type = other DNA
tgtaatgaccagtgccagta

SEQ ID NO: 6249 - DNA, 20 bp, synthetic construct
  misc_feature 1..20: note = Description of Artificial Sequence: Synthetic oligonucleotide
  misc_feature 1..20: note = Target: FXN; (-) strand; PAM type: NNGRRT; PAM sequence: TAGAGT
  source 1..20: mol_type = other DNA
agaggtcctttcagctctgg

SEQ ID NO: 6250 - DNA, 20 bp, synthetic construct
  misc_feature 1..20: note = Description of Artificial Sequence: Synthetic oligonucleotide
  misc_feature 1..20: note = Target: FXN; (-) strand; PAM type: NNGRRT; PAM sequence: TGGGGT
  source 1..20: mol_type = other DNA
ctggaggtaacttcaggtag

SEQ ID NO: 6251 - DNA, 20 bp, synthetic construct
  misc_feature 1..20: note = Description of Artificial Sequence: Synthetic oligonucleotide
  misc_feature 1..20: note = Target: FXN; (-) strand; PAM type: NNGRRT; PAM sequence: GTGAAT
  source 1..20: mol_type = other DNA
agtaatatgctgacacctta

SEQ ID NO: 6252 - DNA, 20 bp, synthetic construct
  misc_feature 1..20: note = Description of Artificial Sequence: Synthetic oligonucleotide
  misc_feature 1..20: note = Target: FXN; (-) strand; PAM type: NNGRRT; PAM sequence: GTGAGT
  source 1..20: mol_type = other DNA
gttttttttttttttaacag

SEQ ID NO: 6253 - DNA, 20 bp, synthetic construct
  misc_feature 1..20: note = Description of Artificial Sequence: Synthetic oligonucleotide
  misc_feature 1..20: note = Target: FXN; (-) strand; PAM type: NNGRRT; PAM sequence: CTGAAT
  source 1..20: mol_type = other DNA
gatttatgaatcattctttg

SEQ ID NO: 6254 - DNA, 20 bp, synthetic construct
  misc_feature 1..20: note = Description of Artificial Sequence: Synthetic oligonucleotide
  misc_feature 1..20: note = Target: FXN; (-) strand; PAM type: NNGRRT; PAM sequence: ATGAAT
  source 1..20: mol_type = other DNA
ggttgcagccttcccgattt

SEQ ID NO: 6255 - DNA, 20 bp, synthetic construct
  misc_feature 1..20: note = Description of Artificial Sequence: Synthetic oligonucleotide
  misc_feature 1..20: note = Target: FXN; (-) strand; PAM type: NNGRRT; PAM sequence: TGGAGT
  source 1..20: mol_type = other DNA
tccaaccacgtggcacaccg

SEQ ID NO: 6256 - DNA, 20 bp, synthetic construct
  misc_feature 1..20: note = Description of Artificial Sequence: Synthetic oligonucleotide
  misc_feature 1..20: note = Target: FXN; (-) strand; PAM type: NNGRRT; PAM sequence: TGGGAT
  source 1..20: mol_type = other DNA
gcctcggcctcccaaagtgc

SEQ ID NO: 6257 - DNA, 20 bp, synthetic construct
  misc_feature 1..20: note = Description of Artificial Sequence: Synthetic oligonucleotide
  misc_feature 1..20: note = Target: FXN; (-) strand; PAM type: NNGRRT; PAM sequence: CAGGAT
  source 1..20: mol_type = other DNA
cagggtttcaccgtgttagc

SEQ ID NO: 6258 - DNA, 20 bp, synthetic construct
  misc_feature 1..20: note = Description of Artificial Sequence: Synthetic oligonucleotide
  misc_feature 1..20: note = Target: FXN; (-) strand; PAM type: NNGRRT; PAM sequence: CAGGGT
  source 1..20: mol_type = other DNA
ttttgcatttttagtagaga

SEQ ID NO: 6259 - DNA, 20 bp, synthetic construct
  misc_feature 1..20: note = Description of Artificial Sequence: Synthetic oligonucleotide
  misc_feature 1..20: note = Target: FXN; (-) strand; PAM type: NNGRRT; PAM sequence: CGGGAT
  source 1..20: mol_type = other DNA
cccaggctggagtgcagtgg

SEQ ID NO: 6260 - DNA, 20 bp, synthetic construct
  misc_feature 1..20: note = Description of Artificial Sequence: Synthetic oligonucleotide
  misc_feature 1..20: note = Target: FXN; (-) strand; PAM type: NNGRRT; PAM sequence: TGGAGT
  source 1..20: mol_type = other DNA
tctcgctctgtcgcccaggc

SEQ ID NO: 6261 - DNA, 20 bp, synthetic construct
  misc_feature 1..20: note = Description of Artificial Sequence: Synthetic oligonucleotide
  misc_feature 1..20: note = Target: FXN; (-) strand; PAM type: NNGRRT; PAM sequence: CCGAGT
  source 1..20: mol_type = other DNA
atctactcttgtaccaatca

SEQ ID NO: 6262 - DNA, 20 bp, synthetic construct
  misc_feature 1..20: note = Description of Artificial Sequence: Synthetic oligonucleotide
  misc_feature 1..20: note = Target: FXN; (-) strand; PAM type: NNGRRT; PAM sequence: TCGGAT
  source 1..20: mol_type = other DNA
cctccttacctattttgagt

SEQ ID NO: 6263 - DNA, 20 bp, synthetic construct
  misc_feature 1..20: note = Description of Artificial Sequence: Synthetic oligonucleotide
  misc_feature 1..20: note = Target: FXN; (-) strand; PAM type: NNGRRT; PAM sequence: TTGAGT
  source 1..20: mol_type = other DNA
aaactgcctccttacctatt

SEQ ID NO: 6264 - DNA, 20 bp, synthetic construct
  misc_feature 1..20: note = Description of Artificial Sequence: Synthetic oligonucleotide
  misc_feature 1..20: note = Target: FXN; (-) strand; PAM type: NNGRRT; PAM sequence: CTGAGT
  source 1..20: mol_type = other DNA
ttgaagctggaatggtactc

SEQ ID NO: 6265 - DNA, 20 bp, synthetic construct
  misc_feature 1..20: note = Description of Artificial Sequence: Synthetic oligonucleotide
  misc_feature 1..20: note = Target: FXN; (-) strand; PAM type: NNGRRT; PAM sequence: TGGAAT
  source 1..20: mol_type = other DNA
agacacttccagcttgaagc

SEQ ID NO: 6266 - DNA, 20 bp, synthetic construct
  misc_feature 1..20: note = Description of Artificial Sequence: Synthetic oligonucleotide
  misc_feature 1..20: note = Target: FXN; (-) strand; PAM type: NNGRRT; PAM sequence: TGGGAT
  source 1..20: mol_type = other DNA
ctgagcaggggtttttaact

SEQ ID NO: 6267 - DNA, 20 bp, synthetic construct
  misc_feature 1..20: note = Description of Artificial Sequence: Synthetic oligonucleotide
  misc_feature 1..20: note = Target: FXN; (-) strand; PAM type: NNGRRT; PAM sequence: AGGGGT
  source 1..20: mol_type = other DNA
aaaagatgctgcctctgagc

SEQ ID NO: 6268 - DNA, 20 bp, synthetic construct
  misc_feature 1..20: note = Description of Artificial Sequence: Synthetic oligonucleotide
  misc_feature 1..20: note = Target: FXN; (-) strand; PAM type: NNGRRT; PAM sequence: CAGAGT
  source 1..20: mol_type = other DNA
ctgcactccagcctgggtga

SEQ ID NO: 6269 - DNA, 20 bp, synthetic construct
  misc_feature 1..20: note = Description of Artificial Sequence: Synthetic oligonucleotide
  misc_feature 1..20: note = Target: FXN; (-) strand; PAM type: NNGRRT; PAM sequence: CTGGGT
  source 1..20: mol_type = other DNA
tcgtgccactgcactccagc

SEQ ID NO: 6270 - DNA, 20 bp, synthetic construct
  misc_feature 1..20: note = Description of Artificial Sequence: Synthetic oligonucleotide
  misc_feature 1..20: note = Target: FXN; (-) strand; PAM type: NNGRRT; PAM sequence: GAGAAT
  source 1..20: mol_type = other DNA
tactcgggagactgaggcaa

SEQ ID NO: 6271 - DNA, 20 bp, synthetic construct
  misc_feature 1..20: note = Description of Artificial Sequence: Synthetic oligonucleotide
  misc_feature 1..20: note = Target: FXN; (-) strand; PAM type: NNGRRT; PAM sequence: AAGAGT
  source 1..20: mol_type = other DNA
ccagtggatcacttgaggtc

SEQ ID NO: 6272 - DNA, 20 bp, synthetic construct
  misc_feature 1..20: note = Description of Artificial Sequence: Synthetic oligonucleotide
  misc_feature 1..20: note = Target: FXN; (-) strand; PAM type: NNGRRT; PAM sequence: GTGGAT
  source 1..20: mol_type = other DNA
actttgggaggctgaggcca

SEQ ID NO: 6273 - DNA, 20 bp, synthetic construct
  misc_feature 1..20: note = Description of Artificial Sequence: Synthetic oligonucleotide
  misc_feature 1..20: note = Target: FXN; (-) strand; PAM type: NNGRRT; PAM sequence: CAGGAT
  source 1..20: mol_type = other DNA
ttggaaagaaaatacaaatc

SEQ ID NO: 6274 - DNA, 20 bp, synthetic construct
  misc_feature 1..20: note = Description of Artificial Sequence: Synthetic oligonucleotide
  misc_feature 1..20: note = Target: FXN; (-) strand; PAM type: NNGRRT; PAM sequence: TAGGAT
  source 1..20: mol_type = other DNA
taaagtagataccaacttgc

SEQ ID NO: 6275 - DNA, 20 bp, synthetic construct
  misc_feature 1..20: note = Description of Artificial Sequence: Synthetic oligonucleotide
  misc_feature 1..20: note = Target: FXN; (-) strand; PAM type: NNGRRT; PAM sequence: TTGGGT
  source 1..20: mol_type = other DNA
gacacatataagatggcatg

SEQ ID NO: 6276 - DNA, 20 bp, synthetic construct
  misc_feature 1..20: note = Description of Artificial Sequence: Synthetic oligonucleotide
  misc_feature 1..20: note = Target: FXN; (-) strand; PAM type: NNGRRT; PAM sequence: GTGAGT
  source 1..20: mol_type = other DNA
tgagccaccacgcccggctg

SEQ ID NO: 6277 - DNA, 20 bp, synthetic construct
  misc_feature 1..20: note = Description of Artificial Sequence: Synthetic oligonucleotide
  misc_feature 1..20: note = Target: FXN; (-) strand; PAM type: NNGRRT; PAM sequence: TGGGAT
  source 1..20: mol_type = other DNA
gccttggcctcccaaagtgc

SEQ ID NO: 6278 - DNA, 20 bp, synthetic construct
  misc_feature 1..20: note = Description of Artificial Sequence: Synthetic oligonucleotide
  misc_feature 1..20: note = Target: FXN; (-) strand; PAM type: NNGRRT; PAM sequence: CAGAAT
  source 1..20: mol_type = other DNA
cggggtttcaccgtgttagc

SEQ ID NO: 6279 - DNA, 20 bp, synthetic construct
  misc_feature 1..20: note = Description of Artificial Sequence: Synthetic oligonucleotide
  misc_feature 1..20: note = Target: FXN; (-) strand; PAM type: NNGRRT; PAM sequence: CGGGGT
  source 1..20: mol_type = other DNA
ttgtatttttttagtagaga

SEQ ID NO: 6280 - DNA, 20 bp, synthetic construct
  misc_feature 1..20: note = Description of Artificial Sequence: Synthetic oligonucleotide
  misc_feature 1..20: note = Target: FXN; (-) strand; PAM type: NNGRRT; PAM sequence: CCGAGT
  source 1..20: mol_type = other DNA
cattctcctgcctcagcttc

SEQ ID NO: 6281 - DNA, 20 bp, synthetic construct
  misc_feature 1..20: note = Description of Artificial Sequence: Synthetic oligonucleotide
  misc_feature 1..20: note = Target: FXN; (-) strand; PAM type: NNGRRT; PAM sequence: CCGGGT
  source 1..20: mol_type = other DNA
ttcactgcaagctctgcctc

SEQ ID NO: 6282 - DNA, 20 bp, synthetic construct
  misc_feature 1..20: note = Description of Artificial Sequence: Synthetic oligonucleotide
  misc_feature 1..20: note = Target: FXN; (-) strand; PAM type: NNGRRT; PAM sequence: TAGAGT
  source 1..20: mol_type = other DNA
tctcgctctgtcacccaggc

SEQ ID NO: 6283 - DNA, 20 bp, synthetic construct
  misc_feature 1..20: note = Description of Artificial Sequence: Synthetic oligonucleotide
  misc_feature 1..20: note = Target: FXN; (-) strand; PAM type: NNGRRT; PAM sequence: TGGAGT
  source 1..20: mol_type = other DNA
tcttttttttttttttgaga

SEQ ID NO: 6284 - DNA, 20 bp, synthetic construct
  misc_feature 1..20: note = Description of Artificial Sequence: Synthetic oligonucleotide
  misc_feature 1..20: note = Target: FXN; (-) strand; PAM type: NNGRRT; PAM sequence: GTGAGT
  source 1..20: mol_type = other DNA
acagacagtggccacagctg

SEQ ID NO: 6285 - DNA, 20 bp, synthetic construct
  misc_feature 1..20: note = Description of Artificial Sequence: Synthetic oligonucleotide
  misc_feature 1..20: note = Target: FXN; (-) strand; PAM type: NNGRRT; PAM sequence: GGGAAT
  source 1..20: mol_type = other DNA
tgcatgcccttaagtgcagg

SEQ ID NO: 6286 - DNA, 20 bp, synthetic construct
  misc_feature 1..20: note = Description of Artificial Sequence: Synthetic oligonucleotide
  misc_feature 1..20: note = Target: FXN; (-) strand; PAM type: NNGRRT; PAM sequence: GGGAGT
  source 1..20: mol_type = other DNA
agacaatctgagtctatttt

SEQ ID NO: 6287 - DNA, 20 bp, synthetic construct
  misc_feature 1..20: note = Description of Artificial Sequence: Synthetic oligonucleotide
  misc_feature 1..20: note = Target: FXN; (-) strand; PAM type: NNGRRT; PAM sequence: CTGAGT
  source 1..20: mol_type = other DNA
atcattattccttagacaat

SEQ ID NO: 6288 - DNA, 20 bp, synthetic construct
  misc_feature 1..20: note = Description of Artificial Sequence: Synthetic oligonucleotide
  misc_feature 1..20: note = Target: FXN; (-) strand; PAM type: NNGRRT; PAM sequence: GTGAAT
  source 1..20: mol_type = other DNA
aatgaccaactggtcaaata

SEQ ID NO: 6289 - DNA, 20 bp, synthetic construct
  misc_feature 1..20: note = Description of Artificial Sequence: Synthetic oligonucleotide
  misc_feature 1..20: note = Target: FXN; (-) strand; PAM type: NNGRRT; PAM sequence: ATGAAT
  source 1..20: mol_type = other DNA
tgcaaaaaggacatttgtga

SEQ ID NO: 6290 - DNA, 20 bp, synthetic construct
  misc_feature 1..20: note = Description of Artificial Sequence: Synthetic oligonucleotide
  misc_feature 1..20: note = Target: FXN; (-) strand; PAM type: NNGRRT; PAM sequence: GTGAAT
  source 1..20: mol_type = other DNA
ctcctgcaaaaaggacattt

SEQ ID NO: 6291 - DNA, 20 bp, synthetic construct
  misc_feature 1..20: note = Description of Artificial Sequence: Synthetic oligonucleotide
  misc_feature 1..20: note = Target: FXN; (-) strand; PAM type: NNGRRT; PAM sequence: GTGGGT
  source 1..20: mol_type = other DNA
ctctaccctgctacccctct

SEQ ID NO: 6292 - DNA, 20 bp, synthetic construct
  misc_feature 1..20: note = Description of Artificial Sequence: Synthetic oligonucleotide
  misc_feature 1..20: note = Target: FXN; (-) strand; PAM type: NNGRRT; PAM sequence: TTGAGT
  source 1..20: mol_type = other DNA
ctatcggaattggaaatctt

SEQ ID NO: 6293 - DNA, 20 bp, synthetic construct
  misc_feature 1..20: note = Description of Artificial Sequence: Synthetic oligonucleotide
  misc_feature 1..20: note = Target: FXN; (-) strand; PAM type: NNGRRT; PAM sequence: CGGAAT
  source 1..20: mol_type = other DNA
caaaattgactttttcctat

SEQ ID NO: 6294 - DNA, 20 bp, synthetic construct
  misc_feature 1..20: note = Description of Artificial Sequence: Synthetic oligonucleotide
  misc_feature 1..20: note = Target: FXN; (-) strand; PAM type: NNGRRT; PAM sequence: GGGGGT
  source 1..20: mol_type = other DNA
cctcagcatacagcaaatca

SEQ ID NO: 6295 - DNA, 20 bp, synthetic construct
  misc_feature 1..20: note = Description of Artificial Sequence: Synthetic oligonucleotide
  misc_feature 1..20: note = Target: FXN; (-) strand; PAM type: NNGRRT; PAM sequence: GCGAGT
  source 1..20: mol_type = other DNA
cagaggactgagtataagac

SEQ ID NO: 6296 - DNA, 20 bp, synthetic construct
  misc_feature 1..20: note = Description of Artificial Sequence: Synthetic oligonucleotide
  misc_feature 1..20: note = Target: FXN; (-) strand; PAM type: NNGRRT; PAM sequence: CTGAGT
  source 1..20: mol_type = other DNA
ccagcagaaagggcagagga

SEQ ID NO: 6297 - DNA, 20 bp, synthetic construct
  misc_feature 1..20: note = Description of Artificial Sequence: Synthetic oligonucleotide
  misc_feature 1..20: note = Target: FXN; (-) strand; PAM type: NNGRRT; PAM sequence: AAGAAT
  source 1..20: mol_type = other DNA
taataaaaaaaaagagctca

SEQ ID NO: 6298 - DNA, 20 bp, synthetic construct
  misc_feature 1..20: note = Description of Artificial Sequence: Synthetic oligonucleotide
  misc_feature 1..20: note = Target: FXN; (-) strand; PAM type: NNGRRT; PAM sequence: ATGGGT
  source 1..20: mol_type = other DNA
taatgctaaatgacgagtta

SEQ ID NO: 6299 - DNA, 20 bp, synthetic construct
  misc_feature 1..20: note = Description of Artificial Sequence: Synthetic oligonucleotide
  misc_feature 1..20: note = Target: FXN; (-) strand; PAM type: NNGRRT; PAM sequence: ACGAGT
  source 1..20: mol_type = other DNA
gctatacctaatgctaaatg

SEQ ID NO: 6300 - DNA, 20 bp, synthetic construct
  misc_feature 1..20: note = Description of Artificial Sequence: Synthetic oligonucleotide
  misc_feature 1..20: note = Target: FXN; (-) strand; PAM type: NNGRRT; PAM sequence: AGGGAT
  source 1..20: mol_type = other DNA
ggagggagggggaagggggg

SEQ ID NO: 6301 - DNA, 20 bp, synthetic construct
  misc_feature 1..20: note = Description of Artificial Sequence: Synthetic oligonucleotide
  misc_feature 1..20: note = Target: FXN; (-) strand; PAM type: NNGRRT; PAM sequence: TGGGGT
  source 1..20: mol_type = other DNA
tcacactctggggactgttg

SEQ ID NO: 6302 - DNA, 20 bp, synthetic construct
  misc_feature 1..20: note = Description of Artificial Sequence: Synthetic oligonucleotide
  misc_feature 1..20: note = Target: FXN; (-) strand; PAM type: NNGRRT; PAM sequence: ATGGAT
  source 1..20: mol_type = other DNA
ttcatgtcctttgtagggac

SEQ ID NO: 6303 - DNA, 20 bp, synthetic construct
  misc_feature 1..20: note = Description of Artificial Sequence: Synthetic oligonucleotide
  misc_feature 1..20: note = Target: FXN; (-) strand; PAM type: NNGRRT; PAM sequence: ATGAGT
  source 1..20: mol_type = other DNA
ctatgcagcaataaaaaatg

SEQ ID NO: 6304 - DNA, 20 bp, synthetic construct
  misc_feature 1..20: note = Description of Artificial Sequence: Synthetic oligonucleotide
  misc_feature 1..20: note = Target: FXN; (-) strand; PAM type: NNGRRT; PAM sequence: TGGAAT
  source 1..20: mol_type = other DNA
aatgtggcacatatacacca

SEQ ID NO: 6305 - DNA, 20 bp, synthetic construct
  misc_feature 1..20: note = Description of Artificial Sequence: Synthetic oligonucleotide
  misc_feature 1..20: note = Target: FXN; (-) strand; PAM type: NNGRRT; PAM sequence: CTGGAT
  source 1..20: mol_type = other DNA
gctcatccaacaatgataga

SEQ ID NO: 6306 - DNA, 20 bp, synthetic construct
  misc_feature 1..20: note = Description of Artificial Sequence: Synthetic oligonucleotide
  misc_feature 1..20: note = Target: FXN; (-) strand; PAM type: NNGRRT; PAM sequence: CAGAGT
  source 1..20: mol_type = other DNA
tatttcccactcctctcata

SEQ ID NO: 6307 - DNA, 20 bp, synthetic construct
  misc_feature 1..20: note = Description of Artificial Sequence: Synthetic oligonucleotide
  misc_feature 1..20: note = Target: FXN; (-) strand; PAM type: NNGRRT; PAM sequence: AGGAGT
  source 1..20: mol_type = other DNA
ttcttaaaactgtataattc

SEQ ID NO: 6308 - DNA, 20 bp, synthetic construct
  misc_feature 1..20: note = Description of Artificial Sequence: Synthetic oligonucleotide
  misc_feature 1..20: note = Target: FXN; (-) strand; PAM type: NNGRRT; PAM sequence: CTGGGT
  source 1..20: mol_type = other DNA
tcacgccaccacacttcagc

SEQ ID NO: 6309 - DNA, 20 bp, synthetic construct
  misc_feature 1..20: note = Description of Artificial Sequence: Synthetic oligonucleotide
  misc_feature 1..20: note = Target: FXN; (-) strand; PAM type: NNGRRT; PAM sequence: GAGAAT
  source 1..20: mol_type = other DNA
tacttggtaggctgaggtgg

SEQ ID NO: 6310 - DNA, 20 bp, synthetic construct
  misc_feature 1..20: note = Description of Artificial Sequence: Synthetic oligonucleotide
  misc_feature 1..20: note = Target: FXN; (-) strand; PAM type: NNGRRT; PAM sequence: CTGGGT
  source 1..20: mol_type = other DNA
tacaaaaaattacaaattca

SEQ ID NO: 6311 - DNA, 20 bp, synthetic construct
  misc_feature 1..20: note = Description of Artificial Sequence: Synthetic oligonucleotide
  misc_feature 1..20: note = Target: FXN; (-) strand; PAM type: NNGRRT; PAM sequence: AGGAGT
  source 1..20: mol_type = other DNA
agggaggatcgcttgggccc

SEQ ID NO: 6312 - DNA, 20 bp, synthetic construct
  misc_feature 1..20: note = Description of Artificial Sequence: Synthetic oligonucleotide
  misc_feature 1..20: note = Target: FXN; (-) strand; PAM type: NNGRRT; PAM sequence: GAGGAT
  source 1..20: mol_type = other DNA
acttcgggagcccaaggagg

SEQ ID NO: 6313 - DNA, 20 bp, synthetic construct
  misc_feature 1..20: note = Description of Artificial Sequence: Synthetic oligonucleotide
  misc_feature 1..20: note = Target: FXN; (-) strand; PAM type: NNGRRT; PAM sequence: TGGGAT
  source 1..20: mol_type = other DNA
aaagcattttttaaaagggc

SEQ ID NO: 6314 - DNA, 20 bp, synthetic construct
  misc_feature 1..20: note = Description of Artificial Sequence: Synthetic oligonucleotide
  misc_feature 1..20: note = Target: FXN; (-) strand; PAM type: NNGRRT; PAM sequence: ATGAGT
  source 1..20: mol_type = other DNA
tcataagtatttgtcctttt

SEQ ID NO: 6315 - DNA, 20 bp, synthetic construct
  misc_feature 1..20: note = Description of Artificial Sequence: Synthetic oligonucleotide
  misc_feature 1..20: note = Target: FXN; (-) strand; PAM type: NNGRRT; PAM sequence: TGGAAT
  source 1..20: mol_type = other DNA
acttttgactacttcatcag

SEQ ID NO: 6316 - DNA, 20 bp, synthetic construct
  misc_feature 1..20: note = Description of Artificial Sequence: Synthetic oligonucleotide
  misc_feature 1..20: note = Target: FXN; (-) strand; PAM type: NNGRRT; PAM sequence: TGGGAT
  source 1..20: mol_type = other DNA
acctcggcctcccaaagtgc

SEQ ID NO: 6317 - DNA, 20 bp, synthetic construct
  misc_feature 1..20: note = Description of Artificial Sequence: Synthetic oligonucleotide
  misc_feature 1..20: note = Target: FXN; (-) strand; PAM type: NNGRRT; PAM sequence: CAGGAT
  source 1..20: mol_type = other DNA
tgctcaggctgcagcagtgg

SEQ ID NO: 6318 - DNA, 20 bp, synthetic construct
  misc_feature 1..20: note = Description of Artificial Sequence: Synthetic oligonucleotide
  misc_feature 1..20: note = Target: FXN; (-) strand; PAM type: NNGRRT; PAM sequence: CAGGGT
  source 1..20: mol_type = other DNA
ttgtttgtttgtttttacaa

SEQ ID NO: 6319 - DNA, 20 bp, synthetic construct
  misc_feature 1..20: note = Description of Artificial Sequence: Synthetic oligonucleotide
  misc_feature 1..20: note = Target: FXN; (-) strand; PAM type: NNGRRT; PAM sequence: GTGGGT
  source 1..20: mol_type = other DNA
aatcttaaatccaggtctct

SEQ ID NO: 6320 - DNA, 20 bp, synthetic construct
  misc_feature 1..20: note = Description of Artificial Sequence: Synthetic oligonucleotide
  misc_feature 1..20: note = Target: FXN; (-) strand; PAM type: NNGRRT; PAM sequence: AAGAGT
  source 1..20: mol_type = other DNA
gaaaacagaggttcatagta

SEQ ID NO: 6321 - DNA, 20 bp, synthetic construct
  misc_feature 1..20: note = Description of Artificial Sequence: Synthetic oligonucleotide
  misc_feature 1..20: note = Target: FXN; (-) strand; PAM type: NNGRRT; PAM sequence: TAGGAT
  source 1..20: mol_type = other DNA
ttgactacaattgttggcgg

SEQ ID NO: 6322 - DNA, 20 bp, synthetic construct
  misc_feature 1..20: note = Description of Artificial Sequence: Synthetic oligonucleotide
  misc_feature 1..20: note = Target: FXN; (-) strand; PAM type: NNGRRT; PAM sequence: CTGGGT
  source 1..20: mol_type = other DNA
gaatgggacaaggggcacta

SEQ ID NO: 6323 - DNA, 20 bp, synthetic construct
  misc_feature 1..20: note = Description of Artificial Sequence: Synthetic oligonucleotide
  misc_feature 1..20: note = Target: FXN; (-) strand; PAM type: NNGRRT; PAM sequence: AGGAAT
  source 1..20: mol_type = other DNA
acaataataatataactgat

SEQ ID NO: 6324 - DNA, 20 bp, synthetic construct
  misc_feature 1..20: note = Description of Artificial Sequence: Synthetic oligonucleotide
  misc_feature 1..20: note = Target: FXN; (-) strand; PAM type: NNGRRT; PAM sequence: GAGGGT
  source 1..20: mol_type = other DNA
aaagagttattgaaattcca

SEQ ID NO: 6325 - DNA, 20 bp, synthetic construct
  misc_feature 1..20: note = Description of Artificial Sequence: Synthetic oligonucleotide
  misc_feature 1..20: note = Target: FXN; (-) strand; PAM type: NNGRRT; PAM sequence: AAGAGT
  source 1..20: mol_type = other DNA
aacaaaaaacccaaaaaaca

SEQ ID NO: 6326 - DNA, 20 bp, synthetic construct
  misc_feature 1..20: note = Description of Artificial Sequence: Synthetic oligonucleotide
  misc_feature 1..20: note = Target: FXN; (-) strand; PAM type: NNGRRT; PAM sequence: GAGGAT
  source 1..20: mol_type = other DNA
tacttgggaggctgaagtgg

SEQ ID NO: 6327 - DNA, 20 bp, synthetic construct
  misc_feature 1..20: note = Description of Artificial Sequence: Synthetic oligonucleotide
  misc_feature 1..20: note = Target: FXN; (-) strand; PAM type: NNGRRT; PAM sequence: CTGAAT
  source 1..20: mol_type = other DNA
ctccatccaatcgagaggct

SEQ ID NO: 6328 - DNA, 20 bp, synthetic construct
  misc_feature 1..20: note = Description of Artificial Sequence: Synthetic oligonucleotide
  misc_feature 1..20: note = Target: FXN; (-) strand; PAM type: NNGRRT; PAM sequence: ATGGGT
  source 1..20: mol_type = other DNA
aggcctgtggtctctttaga

SEQ ID NO: 6329 - DNA, 20 bp, synthetic construct
  misc_feature 1..20: note = Description of Artificial Sequence: Synthetic oligonucleotide
  misc_feature 1..20: note = Target: FXN; (-) strand; PAM type: NNGRRT; PAM sequence: TAGAAT
  source 1..20: mol_type = other DNA
tctaaggcctgtggtctctt

SEQ ID NO: 6330 - DNA, 20 bp, synthetic construct
  misc_feature 1..20: note = Description of Artificial Sequence: Synthetic oligonucleotide
  misc_feature 1..20: note = Target: FXN; (-) strand; PAM type: NNGRRT; PAM sequence: AAGAGT
  source 1..20: mol_type = other DNA
tgaaaacactctttcaacaa

SEQ ID NO: 6331 - DNA, 20 bp, synthetic construct
  misc_feature 1..20: note = Description of Artificial Sequence: Synthetic oligonucleotide
  misc_feature 1..20: note = Target: FXN; (-) strand; PAM type: NNGRRT; PAM sequence: TTGAAT
  source 1..20: mol_type = other DNA
ttatttttctctaaagagcc

SEQ ID NO: 6332 - DNA, 20 bp, synthetic construct
  misc_feature 1..20: note = Description of Artificial Sequence: Synthetic oligonucleotide
  misc_feature 1..20: note = Target: FXN; (-) strand; PAM type: NNGRRT; PAM sequence: TAGAGT
  source 1..20: mol_type = other DNA
aatgcagactctaactctat

SEQ ID NO: 6333 - DNA, 20 bp, synthetic construct
  misc_feature 1..20: note = Description of Artificial Sequence: Synthetic oligonucleotide
  misc_feature 1..20: note = Target: FXN; (-) strand; PAM type: NNGRRT; PAM sequence: GAGAGT
  source 1..20: mol_type = other DNA
gagaatggtggtgaagctcg

SEQ ID NO: 6334 - DNA, 20 bp, synthetic construct
  misc_feature 1..20: note = Description of Artificial Sequence: Synthetic oligonucleotide
  misc_feature 1..20: note = Target: FXN; (-) strand; PAM type: NNGRRT; PAM sequence: GAGAAT
  source 1..20: mol_type = other DNA
ccctgtgaggtctgcaaggt

SEQ ID NO: 6335 - DNA, 20 bp, synthetic construct
  misc_feature 1..20: note = Description of Artificial Sequence: Synthetic oligonucleotide
  misc_feature 1..20: note = Target: FXN; (-) strand; PAM type: NNGRRT; PAM sequence: TAGGAT
  source 1..20: mol_type = other DNA
ctttgctttcagaatcagaa

SEQ ID NO: 6336 - DNA, 20 bp, synthetic construct
  misc_feature 1..20: note = Description of Artificial Sequence: Synthetic oligonucleotide
  misc_feature 1..20: note = Target: FXN; (-) strand; PAM type: NNGRRT; PAM sequence: CAGAAT
  source 1..20: mol_type = other DNA
aagagctttgctttcagaat

SEQ ID NO: 6337 - DNA, 20 bp, synthetic construct
  misc_feature 1..20: note = Description of Artificial Sequence: Synthetic oligonucleotide
  misc_feature 1..20: note = Target: FXN; (-) strand; PAM type: NNGRRT; PAM sequence: CAGAAT
  source 1..20: mol_type = other DNA
tgtaggaagagctttgcttt

SEQ ID NO: 6338 - DNA, 20 bp, synthetic construct
  misc_feature 1..20: note = Description of Artificial Sequence: Synthetic oligonucleotide
  misc_feature 1..20: note = Target: FXN; (-) strand; PAM type: NNGRRT; PAM sequence: AGGAGT
  source 1..20: mol_type = other DNA
gtcttttagtatttagaaat

SEQ ID NO: 6339 - DNA, 20 bp, synthetic construct
  misc_feature 1..20: note = Description of Artificial Sequence: Synthetic oligonucleotide
  misc_feature 1..20: note = Target: FXN; (-) strand; PAM type: NNGRRT; PAM sequence: GGGGAT
  source 1..20: mol_type = other DNA
acagttaagacaccactcta

SEQ ID NO: 6340 - DNA, 20 bp, synthetic construct
  misc_feature 1..20: note = Description of Artificial Sequence: Synthetic oligonucleotide
  misc_feature 1..20: note = Target: FXN; (-) strand; PAM type: NNGRRT; PAM sequence: CTGGAT
  source 1..20: mol_type = other DNA
ttctgaacatacctacatac

SEQ ID NO: 6341 - DNA, 20 bp, synthetic construct
  misc_feature 1..20: note = Description of Artificial Sequence: Synthetic oligonucleotide
  misc_feature 1..20: note = Target: FXN; (-) strand; PAM type: NNGRRT; PAM sequence: AAGAAT
  source 1..20: mol_type = other DNA
gtcacatttcggaagtcttt

SEQ ID NO: 6342 - DNA, 20 bp, synthetic construct
  misc_feature 1..20: note = Description of Artificial Sequence: Synthetic oligonucleotide
  misc_feature 1..20: note = Target: FXN; (-) strand; PAM type: NNGRRT; PAM sequence: TGGGAT
  source 1..20: mol_type = other DNA
acctcagcctctcaaagtgt

SEQ ID NO: 6343 - DNA, 20 bp, synthetic construct
  misc_feature 1..20: note = Description of Artificial Sequence: Synthetic oligonucleotide
  misc_feature 1..20: note = Target: FXN; (-) strand; PAM type: NNGRRT; PAM sequence: CAGGAT
  source 1..20: mol_type = other DNA
cagggactcactatgttgcc

SEQ ID NO: 6344 - DNA, 20 bp, synthetic construct
  misc_feature 1..20: note = Description of Artificial Sequence: Synthetic oligonucleotide
  misc_feature 1..20: note = Target: FXN; (-) strand; PAM type: NNGRRT; PAM sequence: TGGGAT
  source 1..20: mol_type = other DNA
gccttggcctcccaaagtgc

SEQ ID NO: 6345 - DNA, 20 bp, synthetic construct
  misc_feature 1..20: note = Description of Artificial Sequence: Synthetic oligonucleotide
  misc_feature 1..20: note = Target: FXN; (-) strand; PAM type: NNGRRT; PAM sequence: TGGAGT
  source 1..20: mol_type = other DNA
tctggccctgttgcccaggc

SEQ ID NO: 6346 - DNA, 20 bp, synthetic construct
  misc_feature 1..20: note = Description of Artificial Sequence: Synthetic oligonucleotide
  misc_feature 1..20: note = Target: FXN; (-) strand; PAM type: NNGRRT; PAM sequence: CAGGGT
  source 1..20: mol_type = other DNA
ctttttttttttttttggga

SEQ ID NO: 6347 - DNA, 20 bp, synthetic construct
  misc_feature 1..20: note = Description of Artificial Sequence: Synthetic oligonucleotide
  misc_feature 1..20: note = Target: FXN; (-) strand; PAM type: NNGRRT; PAM sequence: AAGGAT
  source 1..20: mol_type = other DNA
atcaggaaaggctcacttac

SEQ ID NO: 6348 - DNA, 20 bp, synthetic construct
  misc_feature 1..20: note = Description of Artificial Sequence: Synthetic oligonucleotide
  misc_feature 1..20: note = Target: FXN; (-) strand; PAM type: NNGRRT; PAM sequence: GAGAAT
  source 1..20: mol_type = other DNA
ctagagtaaacttttctact

SEQ ID NO: 6349 - DNA, 20 bp, synthetic construct
  misc_feature 1..20: note = Description of Artificial Sequence: Synthetic oligonucleotide
  misc_feature 1..20: note = Target: FXN; (-) strand; PAM type: NNGRRT; PAM sequence: TAGAGT
  source 1..20: mol_type = other DNA
gcagggagaagttatgtaac

SEQ ID NO: 6350 - DNA, 20 bp, synthetic construct
  misc_feature 1..20: note = Description of Artificial Sequence: Synthetic oligonucleotide
  misc_feature 1..20: note = Target: FXN; (-) strand; PAM type: NNGRRT; PAM sequence: CTGGAT
  source 1..20: mol_type = other DNA
atagaggaaaactgtctagg

SEQ ID NO: 6351 - DNA, 20 bp, synthetic construct
  misc_feature 1..20: note = Description of Artificial Sequence: Synthetic oligonucleotide
  misc_feature 1..20: note = Target: FXN; (-) strand; PAM type: NNGRRT; PAM sequence: GGGAAT
  source 1..20: mol_type = other DNA
acacaaccccaacctgcaaa

SEQ ID NO: 6352 - DNA, 20 bp, synthetic construct
  misc_feature 1..20: note = Description of Artificial Sequence: Synthetic oligonucleotide
  misc_feature 1..20: note = Target: FXN; (-) strand; PAM type: NNGRRT; PAM sequence: CAGGGT
  source 1..20: mol_type = other DNA
ataacactctaccacctcca

SEQ ID NO: 6353 - DNA, 20 bp, synthetic construct
  misc_feature 1..20: note = Description of Artificial Sequence: Synthetic oligonucleotide
  misc_feature 1..20: note = Target: FXN; (-) strand; PAM type: NNGRRT; PAM sequence: AGGGAT
  source 1..20: mol_type = other DNA
acatcaatggaaaaggcagg

SEQ ID NO: 6354 - DNA, 20 bp, synthetic construct
  misc_feature 1..20: note = Description of Artificial Sequence: Synthetic oligonucleotide
  misc_feature 1..20: note = Target: FXN; (-) strand; PAM type: NNGRRT; PAM sequence: AGGGAT
  source 1..20: mol_type = other DNA
agccaggctgctgagggatg

SEQ ID NO: 6355 - DNA, 20 bp, synthetic construct
  misc_feature 1..20: note = Description of Artificial Sequence: Synthetic oligonucleotide
  misc_feature 1..20: note = Target: FXN; (-) strand; PAM type: NNGRRT; PAM sequence: AGGGAT
  source 1..20: mol_type = other DNA
caacagcagccaggctgctg

SEQ ID NO: 6356 - DNA, 20 bp, synthetic construct
  misc_feature 1..20: note = Description of Artificial Sequence: Synthetic oligonucleotide
  misc_feature 1..20: note = Target: FXN; (-) strand; PAM type: NNGRRT; PAM sequence: CTGGAT
  source 1..20: mol_type = other DNA
ttggaagtgctaatgaatga

SEQ ID NO: 6357 - DNA, 20 bp, synthetic construct
  misc_feature 1..20: note = Description of Artificial Sequence: Synthetic oligonucleotide
  misc_feature 1..20: note = Target: FXN; (-) strand; PAM type: NNGRRT; PAM sequence: ATGAAT
  source 1..20: mol_type = other DNA
tgctctctttggaagtgcta

SEQ ID NO: 6358 - DNA, 20 bp, synthetic construct
  misc_feature 1..20: note = Description of Artificial Sequence: Synthetic oligonucleotide
  misc_feature 1..20: note = Target: FXN; (-) strand; PAM type: NNGRRT; PAM sequence: AAGAAT
  source 1..20: mol_type = other DNA
caaataccgttagtctttca

SEQ ID NO: 6359 - DNA, 20 bp, synthetic construct
  misc_feature 1..20: note = Description of Artificial Sequence: Synthetic oligonucleotide
  misc_feature 1..20: note = Target: FXN; (-) strand; PAM type: NNGRRT; PAM sequence: TAGAGT
  source 1..20: mol_type = other DNA
atgatgtcaatgttaggggg

SEQ ID NO: 6360 - DNA, 20 bp, synthetic construct
  misc_feature 1..20: note = Description of Artificial Sequence: Synthetic oligonucleotide
  misc_feature 1..20: note = Target: FXN; (-) strand; PAM type: NNGRRT; PAM sequence: GGGGGT
  source 1..20: mol_type = other DNA
taaaaatgatgtcaatgtta

SEQ ID NO: 6361 - DNA, 20 bp, synthetic construct
  misc_feature 1..20: note = Description of Artificial Sequence: Synthetic oligonucleotide
  misc_feature 1..20: note = Target: FXN; (-) strand; PAM type: NNGRRT; PAM sequence: CAGAAT
  source 1..20: mol_type = other DNA
gaacaaagcattagagatca

SEQ ID NO: 6362 - DNA, 20 bp, synthetic construct
  misc_feature 1..20: note = Description of Artificial Sequence: Synthetic oligonucleotide
  misc_feature 1..20: note = Target: FXN; (-) strand; PAM type: NNGRRT; PAM sequence: TTGGAT
  source 1..20: mol_type = other DNA
gttgaactctagcacacttc

SEQ ID NO: 6363 - DNA, 20 bp, synthetic construct
  misc_feature 1..20: note = Description of Artificial Sequence: Synthetic oligonucleotide
  misc_feature 1..20: note = Target: FXN; (-) strand; PAM type: NNGRRT; PAM sequence: TAGAAT
  source 1..20: mol_type = other DNA
tctgtgaattagggccttcc

SEQ ID NO: 6364 - DNA, 20 bp, synthetic construct
  misc_feature 1..20: note = Description of Artificial Sequence: Synthetic oligonucleotide
  misc_feature 1..20: note = Target: FXN; (-) strand; PAM type: NNGRRT; PAM sequence: GTGAAT
  source 1..20: mol_type = other DNA
tctaaaaaccaatacaatct

SEQ ID NO: 6365 - DNA, 20 bp, synthetic construct
  misc_feature 1..20: note = Description of Artificial Sequence: Synthetic oligonucleotide
  misc_feature 1..20: note = Target: FXN; (-) strand; PAM type: NNGRRT; PAM sequence: CTGGGT
  source 1..20: mol_type = other DNA
tccaacctccagcacactaa

SEQ ID NO: 6366 - DNA, 20 bp, synthetic construct
  misc_feature 1..20: note = Description of Artificial Sequence: Synthetic oligonucleotide
  misc_feature 1..20: note = Target: FXN; (-) strand; PAM type: NNGRRT; PAM sequence: AAGAAT
  source 1..20: mol_type = other DNA
caagcacagccagggtcagg

SEQ ID NO: 6367 - DNA, 20 bp, synthetic construct
  misc_feature 1..20: note = Description of Artificial Sequence: Synthetic oligonucleotide
  misc_feature 1..20: note = Target: FXN; (-) strand; PAM type: NNGRRT; PAM sequence: CAGGGT
  source 1..20: mol_type = other DNA
cacacaggctcaagcacagc

SEQ ID NO: 6368 - DNA, 20 bp, synthetic construct
  misc_feature 1..20: note = Description of Artificial Sequence: Synthetic oligonucleotide
  misc_feature 1..20: note = Target: FXN; (-) strand; PAM type: NNGRRT; PAM sequence: AAGGAT
  source 1..20: mol_type = other DNA
acttcgttcccccggagatg

SEQ ID NO: 6369 - DNA, 20 bp, synthetic construct
  misc_feature 1..20: note = Description of Artificial Sequence: Synthetic oligonucleotide
  misc_feature 1..20: note = Target: FXN; (-) strand; PAM type: NNGRRT; PAM sequence: TGGGGT
  source 1..20: mol_type = other DNA
agatatggggaaagttcttt

SEQ ID NO: 6370 - DNA, 20 bp, synthetic construct
  misc_feature 1..20: note = Description of Artificial Sequence: Synthetic oligonucleotide
  misc_feature 1..20: note = Target: FXN; (-) strand; PAM type: NNGRRT; PAM sequence: CTGGGT
  source 1..20: mol_type = other DNA
gaccggggagcctgtggtct

SEQ ID NO: 6371 - DNA, 20 bp, synthetic construct
  misc_feature 1..20: note = Description of Artificial Sequence: Synthetic oligonucleotide
  misc_feature 1..20: note = Target: FXN; (-) strand; PAM type: NNGRRT; PAM sequence: CTGGAT
  source 1..20: mol_type = other DNA
cccatccggcggtggccact

SEQ ID NO: 6372 - DNA, 20 bp, synthetic construct
  misc_feature 1..20: note = Description of Artificial Sequence: Synthetic oligonucleotide
  misc_feature 1..20: note = Target: FXN; (-) strand; PAM type: NNGRRT; PAM sequence: GGGAGT
  source 1..20: mol_type = other DNA
gtctgtgtgggcagcaggcc

SEQ ID NO: 6373 - DNA, 20 bp, synthetic construct
  misc_feature 1..20: note = Description of Artificial Sequence: Synthetic oligonucleotide
  misc_feature 1..20: note = Target: FXN; (-) strand; PAM type: NNGRRT; PAM sequence: CTGGGT
  source 1..20: mol_type = other DNA
gaagacaggcgcagaacggc

SEQ ID NO: 6374 - DNA, 20 bp, synthetic construct
  misc_feature 1..20: note = Description of Artificial Sequence: Synthetic oligonucleotide
  misc_feature 1..20: note = Target: FXN; (-) strand; PAM type: NNGRRT; PAM sequence: CGGAAT
  source 1..20: mol_type = other DNA
gaaactgcgggatcttcccg

SEQ ID NO: 6375 - DNA, 20 bp, synthetic construct
  misc_feature 1..20: note = Description of Artificial Sequence: Synthetic oligonucleotide
  misc_feature 1..20: note = Target: FXN; (-) strand; PAM type: NNGRRT; PAM sequence: CGGGAT
  source 1..20: mol_type = other DNA
atgacgacggcccgaaactg

SEQ ID NO: 6376 - DNA, 20 bp, synthetic construct
  misc_feature 1..20: note = Description of Artificial Sequence: Synthetic oligonucleotide
  misc_feature 1..20: note = Target: FXN; (-) strand; PAM type: NNGRRT; PAM sequence: AGGGGT
  source 1..20: mol_type = other DNA
acaacctcctgctcctctac

SEQ ID NO: 6377 - DNA, 20 bp, synthetic construct
  misc_feature 1..20: note = Description of Artificial Sequence: Synthetic oligonucleotide
  misc_feature 1..20: note = Target: FXN; (-) strand; PAM type: NNGRRT; PAM sequence: GCGGGT
  source 1..20: mol_type = other DNA
gacttctttagccaagttgg

SEQ ID NO: 6378 - DNA, 20 bp, synthetic construct
  misc_feature 1..20: note = Description of Artificial Sequence: Synthetic oligonucleotide
  misc_feature 1..20: note = Target: FXN; (-) strand; PAM type: NNGRRT; PAM sequence: GAGAGT
  source 1..20: mol_type = other DNA
ttctggaaatcttttccaca

SEQ ID NO: 6379 - DNA, 20 bp, synthetic construct
  misc_feature 1..20: note = Description of Artificial Sequence: Synthetic oligonucleotide
  misc_feature 1..20: note = Target: FXN; (-) strand; PAM type: NNGRRT; PAM sequence: AAGGAT
  source 1..20: mol_type = other DNA
ctacttttcaaagcagactc

SEQ ID NO: 6380 - DNA, 20 bp, synthetic construct
  misc_feature 1..20: note = Description of Artificial Sequence: Synthetic oligonucleotide
  misc_feature 1..20: note = Target: FXN; (-) strand; PAM type: NNGRRT; PAM sequence: CAGAAT
  source 1..20: mol_type = other DNA
ttgccagttgaatgcctctg

SEQ ID NO: 6381 - DNA, 20 bp, synthetic construct
  misc_feature 1..20: note = Description of Artificial Sequence: Synthetic oligonucleotide
  misc_feature 1..20: note = Target: FXN; (-) strand; PAM type: NNGRRT; PAM sequence: TTGAAT
  source 1..20: mol_type = other DNA
tgagggtggtatcttgccag

SEQ ID NO: 6382 - DNA, 20 bp, synthetic construct
  misc_feature 1..20: note = Description of Artificial Sequence: Synthetic oligonucleotide
  misc_feature 1..20: note = Target: FXN; (-) strand; PAM type: NNGRRT; PAM sequence: GAGGGT
  source 1..20: mol_type = other DNA
agacctgcagatctggctat

SEQ ID NO: 6383 - DNA, 20 bp, synthetic construct
  misc_feature 1..20: note = Description of Artificial Sequence: Synthetic oligonucleotide
  misc_feature 1..20: note = Target: FXN; (-) strand; PAM type: NNGRRT; PAM sequence: GTGAAT
  source 1..20: mol_type = other DNA
gaagcagaagctgaggagtg

SEQ ID NO: 6384 - DNA, 20 bp, synthetic construct
  misc_feature 1..20: note = Description of Artificial Sequence: Synthetic oligonucleotide
  misc_feature 1..20: note = Target: FXN; (-) strand; PAM type: NNGRRT; PAM sequence: AGGAGT
  source 1..20: mol_type = other DNA
gaaaccagaagcagaagctg

SEQ ID NO: 6385 - DNA, 20 bp, synthetic construct
  misc_feature 1..20: note = Description of Artificial Sequence: Synthetic oligonucleotide
  misc_feature 1..20: note = Target: FXN; (-) strand; PAM type: NNGRRT; PAM sequence: GTGGGT
  source 1..20: mol_type = other DNA
acatctgtgaataagagtaa

SEQ ID NO: 6386 - DNA, 20 bp, synthetic construct
  misc_feature 1..20: note = Description of Artificial Sequence: Synthetic oligonucleotide
  misc_feature 1..20: note = Target: FXN; (-) strand; PAM type: NNGRRT; PAM sequence: AAGAGT
  source 1..20: mol_type = other DNA
gcatattcacatctgtgaat

SEQ ID NO: 6387 - DNA, 20 bp, synthetic construct
  misc_feature 1..20: note = Description of Artificial Sequence: Synthetic oligonucleotide
  misc_feature 1..20: note = Target: FXN; (-) strand; PAM type: NNGRRT; PAM sequence: GTGAAT
  source 1..20: mol_type = other DNA
ggacctgcatattcacatct

SEQ ID NO: 6388 - DNA, 20 bp, synthetic construct
  misc_feature 1..20: note = Description of Artificial Sequence: Synthetic oligonucleotide
  misc_feature 1..20: note = Target: FXN; (-) strand; PAM type: NNGRRT; PAM sequence: AAGAGT
  source 1..20: mol_type = other DNA
gaagcccggtcccacctaca

SEQ ID NO: 6389 - DNA, 20 bp, synthetic construct
  misc_feature 1..20: note = Description of Artificial Sequence: Synthetic oligonucleotide
  misc_feature 1..20: note = Target: FXN; (-) strand; PAM type: NNGRRT; PAM sequence: CAGGGT
  source 1..20: mol_type = other DNA
gtgtccacatgcgatcctct

SEQ ID NO: 6390 - DNA, 20 bp, synthetic construct
  misc_feature 1..20: note = Description of Artificial Sequence: Synthetic oligonucleotide
  misc_feature 1..20: note = Target: FXN; (-) strand; PAM type: NNGRRT; PAM sequence: GTGGGT
  source 1..20: mol_type = other DNA
ctggccctacagcacagcta

SEQ ID NO: 6391 - DNA, 20 bp, synthetic construct
  misc_feature 1..20: note = Description of Artificial Sequence: Synthetic oligonucleotide
  misc_feature 1..20: note = Target: FXN; (-) strand; PAM type: NNGRRT; PAM sequence: GGGAGT
  source 1..20: mol_type = other DNA
ttatttatgcaatgccttgg

SEQ ID NO: 6392 - DNA, 20 bp, synthetic construct
  misc_feature 1..20: note = Description of Artificial Sequence: Synthetic oligonucleotide
  misc_feature 1..20: note = Target: FXN; (-) strand; PAM type: NNGRRT; PAM sequence: TGGGGT
  source 1..20: mol_type = other DNA
aatcaccactcggaaccctg

SEQ ID NO: 6393 - DNA, 20 bp, synthetic construct
  misc_feature 1..20: note = Description of Artificial Sequence: Synthetic oligonucleotide
  misc_feature 1..20: note = Target: FXN; (-) strand; PAM type: NNGRRT; PAM sequence: CTGAGT
  source 1..20: mol_type = other DNA
cacaggagggccagcagcag

SEQ ID NO: 6394 - DNA, 20 bp, synthetic construct
  misc_feature 1..20: note = Description of Artificial Sequence: Synthetic oligonucleotide
  misc_feature 1..20: note = Target: FXN; (-) strand; PAM type: NNGRRT; PAM sequence: CAGGGT
  source 1..20: mol_type = other DNA
cagtgcacgcctgggtcacc

SEQ ID NO: 6395 - DNA, 20 bp, synthetic construct
  misc_feature 1..20: note = Description of Artificial Sequence: Synthetic oligonucleotide
  misc_feature 1..20: note = Target: FXN; (-) strand; PAM type: NNGRRT; PAM sequence: CTGGGT
  source 1..20: mol_type = other DNA
gccaccacagcagtgcacgc

SEQ ID NO: 6396 - DNA, 20 bp, synthetic construct
  misc_feature 1..20: note = Description of Artificial Sequence: Synthetic oligonucleotide
  misc_feature 1..20: note = Target: FXN; (-) strand; PAM type: NNGRRT; PAM sequence: GTGGAT
  source 1..20: mol_type = other DNA
atcttggccctggcctttct

SEQ ID NO: 6397 - DNA, 20 bp, synthetic construct
  misc_feature 1..20: note = Description of Artificial Sequence: Synthetic oligonucleotide
  misc_feature 1..20: note = Target: FXN; (-) strand; PAM type: NNGRRT; PAM sequence: GAGGGT
  source 1..20: mol_type = other DNA
tcatttggaaccctcgaaca

SEQ ID NO: 6398 - DNA, 20 bp, synthetic construct
  misc_feature 1..20: note = Description of Artificial Sequence: Synthetic oligonucleotide
  misc_feature 1..20: note = Target: FXN; (-) strand; PAM type: NNGRRT; PAM sequence: TGGGAT
  source 1..20: mol_type = other DNA
gccttggcctcccaaagtgc

SEQ ID NO: 6399 - DNA, 20 bp, synthetic construct
  misc_feature 1..20: note = Description of Artificial Sequence: Synthetic oligonucleotide
  misc_feature 1..20: note = Target: FXN; (-) strand; PAM type: NNGRRT; PAM sequence: CAGGGT
  source 1..20: mol_type = other DNA
ttttgtatttttagtagaga

SEQ ID NO: 6400 - DNA, 20 bp, synthetic construct
  misc_feature 1..20: note = Description of Artificial Sequence: Synthetic oligonucleotide
  misc_feature 1..20: note = Target: FXN; (-) strand; PAM type: NNGRRT; PAM sequence: GCGAAT
  source 1..20: mol_type = other DNA
ggtgcctgccaccatgcctg

SEQ ID NO: 6401 - DNA, 20 bp, synthetic construct
  misc_feature 1..20: note = Description of Artificial Sequence: Synthetic oligonucleotide
  misc_feature 1..20: note = Target: FXN; (-) strand; PAM type: NNGRRT; PAM sequence: TGGGAT
  source 1..20: mol_type = other DNA
gtctcagtctcccaagcagc

SEQ ID NO: 6402 - DNA, 20 bp, synthetic construct
  misc_feature 1..20: note = Description of Artificial Sequence: Synthetic oligonucleotide
  misc_feature 1..20: note = Target: FXN; (-) strand; PAM type: NNGRRT; PAM sequence: CTGGGT
  source 1..20: mol_type = other DNA
ttcgttacaaccttcgcctc

SEQ ID NO: 6403 - DNA, 20 bp, synthetic construct
  misc_feature 1..20: note = Description of Artificial Sequence: Synthetic oligonucleotide
  misc_feature 1..20: note = Target: FXN; (-) strand; PAM type: NNGRRT; PAM sequence: TGGAGT
  source 1..20: mol_type = other DNA
tctcactctgtcgcccagga

SEQ ID NO: 6404 - DNA, 20 bp, synthetic construct
  misc_feature 1..20: note = Description of Artificial Sequence: Synthetic oligonucleotide
  misc_feature 1..20: note = Target: FXN; (-) strand; PAM type: NNGRRT; PAM sequence: CAGGAT
  source 1..20: mol_type = other DNA
gacagtctcactctgtcgcc

SEQ ID NO: 6405 - DNA, 20 bp, synthetic construct
  misc_feature 1..20: note = Description of Artificial Sequence: Synthetic oligonucleotide
  misc_feature 1..20: note = Target: FXN; (-) strand; PAM type: NNGRRT; PAM sequence: GGGAGT
  source 1..20: mol_type = other DNA
ttatttatgcaatgtcttgg

SEQ ID NO: 6406 - DNA, 20 bp, synthetic construct
  misc_feature 1..20: note = Description of Artificial Sequence: Synthetic oligonucleotide
  misc_feature 1..20: note = Target: FXN; (-) strand; PAM type: NNGRRT; PAM sequence: GTGAGT
  source 1..20: mol_type = other DNA
gaggcaggacattcagcggg

SEQ ID NO: 6407 - DNA, 20 bp, synthetic construct
  misc_feature 1..20: note = Description of Artificial Sequence: Synthetic oligonucleotide
  misc_feature 1..20: note = Target: FXN; (-) strand; PAM type: NNGRRT; PAM sequence: CGGGGT
  source 1..20: mol_type = other DNA
agcagaggcaggacattcag

SEQ ID NO: 6408 - DNA, 20 bp, synthetic construct
  misc_feature 1..20: note = Description of Artificial Sequence: Synthetic oligonucleotide
  misc_feature 1..20: note = Target: FXN; (-) strand; PAM type: NNGRRT; PAM sequence: TTGGAT
  source 1..20: mol_type = other DNA
tctccaagctctttactcct

SEQ ID NO: 6409 - DNA, 20 bp, synthetic construct
  misc_feature 1..20: note = Description of Artificial Sequence: Synthetic oligonucleotide
  misc_feature 1..20: note = Target: FXN; (-) strand; PAM type: NNGRRT; PAM sequence: ATGGGT
  source 1..20: mol_type = other DNA
gccatcttcatgtagtggtc

SEQ ID NO: 6410 - DNA, 20 bp, synthetic construct
  misc_feature 1..20: note = Description of Artificial Sequence: Synthetic oligonucleotide
  misc_feature 1..20: note = Target: FXN; (-) strand; PAM type: NNGRRT; PAM sequence: AAGAGT
  source 1..20: mol_type = other DNA
attttcttacagcaaattgg

SEQ ID NO: 6411 - DNA, 20 bp, synthetic construct
  misc_feature 1..20: note = Description of Artificial Sequence: Synthetic oligonucleotide
  misc_feature 1..20: note = Target: FXN; (-) strand; PAM type: NNGRRT; PAM sequence: TAGGAT
  source 1..20: mol_type = other DNA
gcgtcagcttcccaaagtgc

SEQ ID NO: 6412 - DNA, 20 bp, synthetic construct
  misc_feature 1..20: note = Description of Artificial Sequence: Synthetic oligonucleotide
  misc_feature 1..20: note = Target: FXN; (-) strand; PAM type: NNGRRT; PAM sequence: CGGGGT
  source 1..20: mol_type = other DNA
ttttgtatttttggtagaga

SEQ ID NO: 6413 - DNA, 20 bp, synthetic construct
  misc_feature 1..20: note = Description of Artificial Sequence: Synthetic oligonucleotide
  misc_feature 1..20: note = Target: FXN; (-) strand; PAM type: NNGRRT; PAM sequence: CTGAGT
  source 1..20: mol_type = other DNA
aatccttccacctcagcctc

SEQ ID NO: 6414 - DNA, 20 bp, synthetic construct
  misc_feature 1..20: note = Description of Artificial Sequence: Synthetic oligonucleotide
  misc_feature 1..20: note = Target: FXN; (-) strand; PAM type: NNGRRT; PAM sequence: TGGAGT
  source 1..20: mol_type = other DNA
tctcactgtgtcacccaggc

SEQ ID NO: 6415 - DNA, 20 bp, synthetic construct
  misc_feature 1..20: note = Description of Artificial Sequence: Synthetic oligonucleotide
  misc_feature 1..20: note = Target: FXN; (-) strand; PAM type: NNGRRT; PAM sequence: TGGGGT
  source 1..20: mol_type = other DNA
tcttttttttttttttgaga

SEQ ID NO: 6416 - DNA, 20 bp, synthetic construct
  misc_feature 1..20: note = Description of Artificial Sequence: Synthetic oligonucleotide
  misc_feature 1..20: note = Target: FXN; (-) strand; PAM type: NNGRRT; PAM sequence: TGGAGT
  source 1..20: mol_type = other DNA
cattgtggtcattttctttt

SEQ ID NO: 6417 - DNA, 20 bp, synthetic construct
  misc_feature 1..20: note = Description of Artificial Sequence: Synthetic oligonucleotide
  misc_feature 1..20: note = Target: FXN; (-) strand; PAM type: NNGRRT; PAM sequence: CAGAAT
  source 1..20: mol_type = other DNA
ggacccaggtacagggaaaa

SEQ ID NO: 6418 - DNA, 20 bp, synthetic construct
  misc_feature 1..20: note = Description of Artificial Sequence: Synthetic oligonucleotide
  misc_feature 1..20: note = Target: FXN; (-) strand; PAM type: NNGRRT; PAM sequence: ACGAGT
  source 1..20: mol_type = other DNA
tgggaggattgcttgaagcc

SEQ ID NO: 6419 - DNA, 20 bp, synthetic construct
  misc_feature 1..20: note = Description of Artificial Sequence: Synthetic oligonucleotide
  misc_feature 1..20: note = Target: FXN; (-) strand; PAM type: NNGRRT; PAM sequence: GAGGAT
  source 1..20: mol_type = other DNA
actttgggaggctgatgtgg

SEQ ID NO: 6420 - DNA, 20 bp, synthetic construct
  misc_feature 1..20: note = Description of Artificial Sequence: Synthetic oligonucleotide
  misc_feature 1..20: note = Target: FXN; (-) strand; PAM type: NNGRRT; PAM sequence: CAGGGT
  source 1..20: mol_type = other DNA
cctttattctgcaacctcct

SEQ ID NO: 6421 - DNA, 20 bp, synthetic construct
  misc_feature 1..20: note = Description of Artificial Sequence: Synthetic oligonucleotide
  misc_feature 1..20: note = Target: FXN; (-) strand; PAM type: NNGRRT; PAM sequence: TAGAAT
  source 1..20: mol_type = other DNA
cactgatgcccacgtgtccc

SEQ ID NO: 6422 - DNA, 20 bp, synthetic construct
  misc_feature 1..20: note = Description of Artificial Sequence: Synthetic oligonucleotide
  misc_feature 1..20: note = Target: FXN; (-) strand; PAM type: NNGRRT; PAM sequence: CTGAGT
  source 1..20: mol_type = other DNA
atcgggttgccaggcagagc

SEQ ID NO: 6423 - DNA, 20 bp, synthetic construct
  misc_feature 1..20: note = Description of Artificial Sequence: Synthetic oligonucleotide
  misc_feature 1..20: note = Target: FXN; (-) strand; PAM type: NNGRRT; PAM sequence: TCGGGT
  source 1..20: mol_type = other DNA
cctatactctgatactgcta

SEQ ID NO: 6424 - DNA, 20 bp, synthetic construct
  misc_feature 1..20: note = Description of Artificial Sequence: Synthetic oligonucleotide
  misc_feature 1..20: note = Target: FXN; (-) strand; PAM type: NNGRRT; PAM sequence: CAGGGT
  source 1..20: mol_type = other DNA
aaatgagtgaaccaaaccat

SEQ ID NO: 6425 - DNA, 20 bp, synthetic construct
  misc_feature 1..20: note = Description of Artificial Sequence: Synthetic oligonucleotide
  misc_feature 1..20: note = Target: FXN; (-) strand; PAM type: NNGRRT; PAM sequence: ATGAGT
  source 1..20: mol_type = other DNA
ttcccagtatggagataaaa

SEQ ID NO: 6426 - DNA, 20 bp, synthetic construct
  misc_feature 1..20: note = Description of Artificial Sequence: Synthetic oligonucleotide
  misc_feature 1..20: note = Target: FXN; (-) strand; PAM type: NNGRRT; PAM sequence: AAGGAT
  source 1..20: mol_type = other DNA
gcttgggcaataaaagtatc

SEQ ID NO: 6427 - DNA, 20 bp, synthetic construct
  misc_feature 1..20: note = Description of Artificial Sequence: Synthetic oligonucleotide
  misc_feature 1..20: note = Target: FXN; (-) strand; PAM type: NNGRRT; PAM sequence: TAGGAT
  source 1..20: mol_type = other DNA
gcttttccaaagactgaggc

SEQ ID NO: 6428 - DNA, 20 bp, synthetic construct
  misc_feature 1..20: note = Description of Artificial Sequence: Synthetic oligonucleotide
  misc_feature 1..20: note = Target: FXN; (-) strand; PAM type: NNGRRT; PAM sequence: CTGAGT
  source 1..20: mol_type = other DNA
gagcccagaagaaagggcac

SEQ ID NO: 6429 - DNA, 20 bp, synthetic construct
  misc_feature 1..20: note = Description of Artificial Sequence: Synthetic oligonucleotide
  misc_feature 1..20: note = Target: FXN; (-) strand; PAM type: NNGRRT; PAM sequence: CAGAGT
  source 1..20: mol_type = other DNA
caccctgatggaggtaagaa

SEQ ID NO: 6430 - DNA, 20 bp, synthetic construct
  misc_feature 1..20: note = Description of Artificial Sequence: Synthetic oligonucleotide
  misc_feature 1..20: note = Target: FXN; (-) strand; PAM type: NNGRRT; PAM sequence: ATGGAT
  source 1..20: mol_type = other DNA
ttccacttcctcatggcctc

SEQ ID NO: 6431 - DNA, 20 bp, synthetic construct
  misc_feature 1..20: note = Description of Artificial Sequence: Synthetic oligonucleotide
  misc_feature 1..20: note = Target: FXN; (-) strand; PAM type: NNGRRT; PAM sequence: GGGAAT
  source 1..20: mol_type = other DNA
tggcacatgcacgttgcttt

SEQ ID NO: 6432 - DNA, 20 bp, synthetic construct
  misc_feature 1..20: note = Description of Artificial Sequence: Synthetic oligonucleotide
  misc_feature 1..20: note = Target: FXN; (-) strand; PAM type: NNGRRT; PAM sequence: GTGAAT
  source 1..20: mol_type = other DNA
atccacctcaagctcatcca

SEQ ID NO: 6433 - DNA, 20 bp, synthetic construct
  misc_feature 1..20: note = Description of Artificial Sequence: Synthetic oligonucleotide
  misc_feature 1..20: note = Target: FXN; (-) strand; PAM type: NNGRRT; PAM sequence: TTGAAT
  source 1..20: mol_type = other DNA
atattttgatccacggttgg

SEQ ID NO: 6434 - DNA, 20 bp, synthetic construct
  misc_feature 1..20: note = Description of Artificial Sequence: Synthetic oligonucleotide
  misc_feature 1..20: note = Target: FXN; (-) strand; PAM type: NNGRRT; PAM sequence: GTGGGT
  source 1..20: mol_type = other DNA
atctgcagataccaaaatcc

SEQ ID NO: 6435 - DNA, 20 bp, synthetic construct
  misc_feature 1..20: note = Description of Artificial Sequence: Synthetic oligonucleotide
  misc_feature 1..20: note = Target: FXN; (-) strand; PAM type: NNGRRT; PAM sequence: CAGGAT
  source 1..20: mol_type = other DNA
tatccatagggaaggggttc

SEQ ID NO: 6436 - DNA, 20 bp, synthetic construct
  misc_feature 1..20: note = Description of Artificial Sequence: Synthetic oligonucleotide
  misc_feature 1..20: note = Target: FXN; (-) strand; PAM type: NNGRRT; PAM sequence: AGGGGT
  source 1..20: mol_type = other DNA
ttccttggtatccataggga

SEQ ID NO: 6437 - DNA, 20 bp, synthetic construct
  misc_feature 1..20: note = Description of Artificial Sequence: Synthetic oligonucleotide
  misc_feature 1..20: note = Target: FXN; (-) strand; PAM type: NNGRRT; PAM sequence: ATGAAT
  source 1..20: mol_type = other DNA
aacacattaaccatttaaaa

SEQ ID NO: 6438 - DNA, 20 bp, synthetic construct
  misc_feature 1..20: note = Description of Artificial Sequence: Synthetic oligonucleotide
  misc_feature 1..20: note = Target: FXN; (-) strand; PAM type: NNGRRT; PAM sequence: AAGAAT
  source 1..20: mol_type = other DNA
atatcttctggaacaattcc

SEQ ID NO: 6439 - DNA, 20 bp, synthetic construct
  misc_feature 1..20: note = Description of Artificial Sequence: Synthetic oligonucleotide
  misc_feature 1..20: note = Target: FXN; (-) strand; PAM type: NNGRRT; PAM sequence: AAGAGT
  source 1..20: mol_type = other DNA
ttcttatcttagcatctaag

SEQ ID NO: 6440 - DNA, 20 bp, synthetic construct
  misc_feature 1..20: note = Description of Artificial Sequence: Synthetic oligonucleotide
  misc_feature 1..20: note = Target: FXN; (-) strand; PAM type: NNGRRT; PAM sequence: TGGAGT
  source 1..20: mol_type = other DNA
gctgcccccaagaaattgac

SEQ ID NO: 6441 - DNA, 20 bp, synthetic construct
  misc_feature 1..20: note = Description of Artificial Sequence: Synthetic oligonucleotide
  misc_feature 1..20: note = Target: FXN; (-) strand; PAM type: NNGRRT; PAM sequence: GGGAGT
  source 1..20: mol_type = other DNA
atggagggacacgccgtcgt

SEQ ID NO: 6442 - DNA, 20 bp, synthetic construct
  misc_feature 1..20: note = Description of Artificial Sequence: Synthetic oligonucleotide
  misc_feature 1..20: note = Target: FXN; (-) strand; PAM type: NNGRRT; PAM sequence: CGGAAT
  source 1..20: mol_type = other DNA
tgggcatcaagcatcttttc

SEQ ID NO: 6443 - DNA, 20 bp, synthetic construct
  misc_feature 1..20: note = Description of Artificial Sequence: Synthetic oligonucleotide
  misc_feature 1..20: note = Target: FXN; (-) strand; PAM type: NNGRRT; PAM sequence: TGGGGT
  source 1..20: mol_type = other DNA
cctcagctgcataatgaagc

SEQ ID NO: 6444 - DNA, 20 bp, synthetic construct
  misc_feature 1..20: note = Description of Artificial Sequence: Synthetic oligonucleotide
  misc_feature 1..20: note = Target: FXN; (-) strand; PAM type: NNGRRT; PAM sequence: AGGAAT
  source 1..20: mol_type = other DNA
gcccaactgtcctcaaaagc

SEQ ID NO: 6445 - DNA, 20 bp, synthetic construct
  misc_feature 1..20: note = Description of Artificial Sequence: Synthetic oligonucleotide
  misc_feature 1..20: note = Target: FXN; (-) strand; PAM type: NNGRRT; PAM sequence: AGGGGT
  source 1..20: mol_type = other DNA
ataagacattataaaagata

SEQ ID NO: 6446 - DNA, 20 bp, synthetic construct
  misc_feature 1..20: note = Description of Artificial Sequence: Synthetic oligonucleotide
  misc_feature 1..20: note = Target: FXN; (-) strand; PAM type: NNGRRT; PAM sequence: TGGAAT
  source 1..20: mol_type = other DNA
agacaattcattttccctcc

SEQ ID NO: 6447 - DNA, 20 bp, synthetic construct
  misc_feature 1..20: note = Description of Artificial Sequence: Synthetic oligonucleotide
  misc_feature 1..20: note = Target: FXN; (-) strand; PAM type: NNGRRT; PAM sequence: AAGAGT
  source 1..20: mol_type = other DNA
agtaaatccttcaaagaatg

SEQ ID NO: 6448 - DNA, 20 bp, synthetic construct
  misc_feature 1..20: note = Description of Artificial Sequence: Synthetic oligonucleotide
  misc_feature 1..20: note = Target: FXN; (-) strand; PAM type: NNGRRT; PAM sequence: AAGAAT
  source 1..20: mol_type = other DNA
ttcttgcagtaaatccttca

SEQ ID NO: 6449 - DNA, 20 bp, synthetic construct
  misc_feature 1..20: note = Description of Artificial Sequence: Synthetic oligonucleotide
  misc_feature 1..20: note = Target: FXN; (-) strand; PAM type: NNGRRT; PAM sequence: GTGAGT
  source 1..20: mol_type = other DNA
ataagaaatgatcttcccgt

SEQ ID NO: 6450 - DNA, 20 bp, synthetic construct
  misc_feature 1..20: note = Description of Artificial Sequence: Synthetic oligonucleotide
  misc_feature 1..20: note = Target: FXN; (-) strand; PAM type: NNGRRT; PAM sequence: GTGAAT
  source 1..20: mol_type = other DNA
atatacacacagacacgtat

SEQ ID NO: 6451 - DNA, 20 bp, synthetic construct
  misc_feature 1..20: note = Description of Artificial Sequence: Synthetic oligonucleotide
  misc_feature 1..20: note = Target: FXN; (-) strand; PAM type: NNGRRT; PAM sequence: ATGAGT
  source 1..20: mol_type = other DNA
ccagggctctctttatcaac

SEQ ID NO: 6452 - DNA, 20 bp, synthetic construct
  misc_feature 1..20: note = Description of Artificial Sequence: Synthetic oligonucleotide
  misc_feature 1..20: note = Target: FXN; (-) strand; PAM type: NNGRRT; PAM sequence: GGGAAT
  source 1..20: mol_type = other DNA
gatggggaagcagaggtcca

SEQ ID NO: 6453 - DNA, 20 bp, synthetic construct
  misc_feature 1..20: note = Description of Artificial Sequence: Synthetic oligonucleotide
  misc_feature 1..20: note = Target: FXN; (-) strand; PAM type: NNGRRT; PAM sequence: GGGAAT
  source 1..20: mol_type = other DNA
tgacaggaccactgaatgct

SEQ ID NO: 6454 - DNA, 20 bp, synthetic construct
  misc_feature 1..20: note = Description of Artificial Sequence: Synthetic oligonucleotide
  misc_feature 1..20: note = Target: FXN; (-) strand; PAM type: NNGRRT; PAM sequence: CTGAAT
  source 1..20: mol_type = other DNA
taggttgcttgacaggacca

SEQ ID NO: 6455 - DNA, 20 bp, synthetic construct
  misc_feature 1..20: note = Description of Artificial Sequence: Synthetic oligonucleotide
  misc_feature 1..20: note = Target: FXN; (-) strand; PAM type: NNGRRT; PAM sequence: GGGAAT
  source 1..20: mol_type = other DNA
atcccctcatctacccaata

SEQ ID NO: 6456 - DNA, 20 bp, synthetic construct
  misc_feature 1..20: note = Description of Artificial Sequence: Synthetic oligonucleotide
  misc_feature 1..20: note = Target: FXN; (-) strand; PAM type: NNGRRT; PAM sequence: ATGAAT
  source 1..20: mol_type = other DNA
aggatggctattattttcac

SEQ ID NO: 6457 - DNA, 20 bp, synthetic construct
  misc_feature 1..20: note = Description of Artificial Sequence: Synthetic oligonucleotide
  misc_feature 1..20: note = Target: FXN; (-) strand; PAM type: NNGRRT; PAM sequence: AAGGAT
  source 1..20: mol_type = other DNA
gtgagccaccgcgccaggcc

SEQ ID NO: 6458 - DNA, 20 bp, synthetic construct
  misc_feature 1..20: note = Description of Artificial Sequence: Synthetic oligonucleotide
  misc_feature 1..20: note = Target: FXN; (-) strand; PAM type: NNGRRT; PAM sequence: TGGGAT
  source 1..20: mol_type = other DNA
accttggcctccaaaagtgc

SEQ ID NO: 6459 - DNA, 20 bp, synthetic construct
  misc_feature 1..20: note = Description of Artificial Sequence: Synthetic oligonucleotide
  misc_feature 1..20: note = Target: FXN; (-) strand; PAM type: NNGRRT; PAM sequence: CGGGGT
  source 1..20: mol_type = other DNA
ttttgtatttttagtagaga

SEQ ID NO: 6460 - DNA, 20 bp, synthetic construct
  misc_feature 1..20: note = Description of Artificial Sequence: Synthetic oligonucleotide
  misc_feature 1..20: note = Target: FXN; (-) strand; PAM type: NNGRRT; PAM sequence: TGGGAT
  source 1..20: mol_type = other DNA
gcttcagcctcccaagtagc

SEQ ID NO: 6461 - DNA, 20 bp, synthetic construct
  misc_feature 1..20: note = Description of Artificial Sequence: Synthetic oligonucleotide
  misc_feature 1..20: note = Target: FXN; (-) strand; PAM type: NNGRRT; PAM sequence: CTGGGT
  source 1..20: mol_type = other DNA
gctcactgcaacctccacct

SEQ ID NO: 6462 - DNA, 20 bp, synthetic construct
  misc_feature 1..20: note = Description of Artificial Sequence: Synthetic oligonucleotide
  misc_feature 1..20: note = Target: FXN; (-) strand; PAM type: NNGRRT; PAM sequence: CAGAGT
  source 1..20: mol_type = other DNA
ttgttattattattttgaga

SEQ ID NO: 6463 - DNA, 20 bp, synthetic construct
  misc_feature 1..20: note = Description of Artificial Sequence: Synthetic oligonucleotide
  misc_feature 1..20: note = Target: FXN; (-) strand; PAM type: NNGRRT; PAM sequence: AAGGAT
  source 1..20: mol_type = other DNA
aacccagtaagggtacaata

SEQ ID NO: 6464 - DNA, 20 bp, synthetic construct
  misc_feature 1..20: note = Description of Artificial Sequence: Synthetic oligonucleotide
  misc_feature 1..20: note = Target: FXN; (-) strand; PAM type: NNGRRT; PAM sequence: AAGGGT
  source 1..20: mol_type = other DNA
tataatacgattaacccagt

SEQ ID NO: 6465 - DNA, 20 bp, synthetic construct
  misc_feature 1..20: note = Description of Artificial Sequence: Synthetic oligonucleotide
  misc_feature 1..20: note = Target: FXN; (-) strand; PAM type: NNGRRT; PAM sequence: ATGAAT
  source 1..20: mol_type = other DNA
taacatgagcataactttgc

SEQ ID NO: 6466 - DNA, 20 bp, synthetic construct
  misc_feature 1..20: note = Description of Artificial Sequence: Synthetic oligonucleotide
  misc_feature 1..20: note = Target: FXN; (-) strand; PAM type: NNGRRT; PAM sequence: TGGGAT
  source 1..20: mol_type = other DNA
gtctcagcctcctgagtacc

SEQ ID NO: 6467 - DNA, 20 bp, synthetic construct
  misc_feature 1..20: note = Description of Artificial Sequence: Synthetic oligonucleotide
  misc_feature 1..20: note = Target: FXN; (-) strand; PAM type: NNGRRT; PAM sequence: CTGAGT
  source 1..20: mol_type = other DNA
aattctcccgtctcagcctc

SEQ ID NO: 6468 - DNA, 20 bp, synthetic construct
  misc_feature 1..20: note = Description of Artificial Sequence: Synthetic oligonucleotide
  misc_feature 1..20: note = Target: FXN; (-) strand; PAM type: NNGRRT; PAM sequence: TGGGGT
  source 1..20: mol_type = other DNA
tcactgtaacctcctccgcc

SEQ ID NO: 6469 - DNA, 20 bp, synthetic construct
  misc_feature 1..20: note = Description of Artificial Sequence: Synthetic oligonucleotide
  misc_feature 1..20: note = Target: FXN; (-) strand; PAM type: NNGRRT; PAM sequence: CGGAGT
  source 1..20: mol_type = other DNA
ccttttttttttttttgaga

SEQ ID NO: 6470 - DNA, 20 bp, synthetic construct
  misc_feature 1..20: note = Description of Artificial Sequence: Synthetic oligonucleotide
  misc_feature 1..20: note = Target: FXN; (-) strand; PAM type: NNGRRT; PAM sequence: TGGAAT
  source 1..20: mol_type = other DNA
ctgctcccagcttgacttaa

SEQ ID NO: 6471 - DNA, 20 bp, synthetic construct
  misc_feature 1..20: note = Description of Artificial Sequence: Synthetic oligonucleotide
  misc_feature 1..20: note = Target: FXN; (-) strand; PAM type: NNGRRT; PAM sequence: TAGGAT
  source 1..20: mol_type = other DNA
ttttttctttttttaagaga

SEQ ID NO: 6472 - DNA, 20 bp, synthetic construct
  misc_feature 1..20: note = Description of Artificial Sequence: Synthetic oligonucleotide
  misc_feature 1..20: note = Target: FXN; (-) strand; PAM type: NNGRRT; PAM sequence: TGGGGT
  source 1..20: mol_type = other DNA
gtcaccgagttctaagtaag

SEQ ID NO: 6473 - DNA, 20 bp, synthetic construct
  misc_feature 1..20: note = Description of Artificial Sequence: Synthetic oligonucleotide
  misc_feature 1..20: note = Target: FXN; (-) strand; PAM type: NNGRRT; PAM sequence: CCGAGT
  source 1..20: mol_type = other DNA
taaaggagtacatcatgtca

SEQ ID NO: 6474 - DNA, 20 bp, synthetic construct
  misc_feature 1..20: note = Description of Artificial Sequence: Synthetic oligonucleotide
  misc_feature 1..20: note = Target: FXN; (-) strand; PAM type: NNGRRT; PAM sequence: AGGAGT
  source 1..20: mol_type = other DNA
ttgtgctgtgtcccagataa

SEQ ID NO: 6475 - DNA, 20 bp, synthetic construct
  misc_feature 1..20: note = Description of Artificial Sequence: Synthetic oligonucleotide
  misc_feature 1..20: note = Target: FXN; (-) strand; PAM type: NNGRRT; PAM sequence: GGGGAT
  source 1..20: mol_type = other DNA
ccccttttctttccttaaat

SEQ ID NO: 6476 - DNA, 20 bp, synthetic construct
  misc_feature 1..20: note = Description of Artificial Sequence: Synthetic oligonucleotide
  misc_feature 1..20: note = Target: FXN; (-) strand; PAM type: NNGRRT; PAM sequence: TGGGAT
  source 1..20: mol_type = other DNA
gcctcagcctcccaaagtgc

SEQ ID NO: 6477 - DNA, 20 bp, synthetic construct
  misc_feature 1..20: note = Description of Artificial Sequence: Synthetic oligonucleotide
  misc_feature 1..20: note = Target: FXN; (-) strand; PAM type: NNGRRT; PAM sequence: CGGGAT
  source 1..20: mol_type = other DNA
tttaatatttttagtagaga

SEQ ID NO: 6478 - DNA, 20 bp, synthetic construct
  misc_feature 1..20: note = Description of Artificial Sequence: Synthetic oligonucleotide
  misc_feature 1..20: note = Target: FXN; (-) strand; PAM type: NNGRRT; PAM sequence: CTGAGT
  source 1..20: mol_type = other DNA
gattctcctgcctcagcctc

SEQ ID NO: 6479 - DNA, 20 bp, synthetic construct
  misc_feature 1..20: note = Description of Artificial Sequence: Synthetic oligonucleotide
  misc_feature 1..20: note = Target: FXN; (-) strand; PAM type: NNGRRT; PAM sequence: TGGAGT
  source 1..20: mol_type = other DNA
tatggctctgttggccaggc

SEQ ID NO: 6480 - DNA, 20 bp, synthetic construct
  misc_feature 1..20: note = Description of Artificial Sequence: Synthetic oligonucleotide
  misc_feature 1..20: note = Target: FXN; (-) strand; PAM type: NNGRRT; PAM sequence: CGGAGT
  source 1..20: mol_type = other DNA
atttatttatttatttgaga

SEQ ID NO: 6481 - DNA, 20 bp, synthetic construct
  misc_feature 1..20: note = Description of Artificial Sequence: Synthetic oligonucleotide
  misc_feature 1..20: note = Target: FXN; (-) strand; PAM type: NNGRRT; PAM sequence: CAGAAT
  source 1..20: mol_type = other DNA
tacttttccagtttgcttga

SEQ ID NO: 6482 - DNA, 20 bp, synthetic construct
  misc_feature 1..20: note = Description of Artificial Sequence: Synthetic oligonucleotide
  misc_feature 1..20: note = Target: FXN; (-) strand; PAM type: NNGRRT; PAM sequence: CAGGGT
  source 1..20: mol_type = other DNA
cataaatgaggcgatgctcc

SEQ ID NO: 6483 - DNA, 20 bp, synthetic construct
  misc_feature 1..20: note = Description of Artificial Sequence: Synthetic oligonucleotide
  misc_feature 1..20: note = Target: FXN; (-) strand; PAM type: NNGRRT; PAM sequence: ATGGAT
  source 1..20: mol_type = other DNA
cctggaaactcatccttcac

SEQ ID NO: 6484 - DNA, 20 bp, synthetic construct
  misc_feature 1..20: note = Description of Artificial Sequence: Synthetic oligonucleotide
  misc_feature 1..20: note = Target: FXN; (-) strand; PAM type: NNGRRT; PAM sequence: GTGAAT
  source 1..20: mol_type = other DNA
acctcctccagtatgttaca

SEQ ID NO: 6485 - DNA, 20 bp, synthetic construct
  misc_feature 1..20: note = Description of Artificial Sequence: Synthetic oligonucleotide
  misc_feature 1..20: note = Target: FXN; (-) strand; PAM type: NNGRRT; PAM sequence: CTGAGT
  source 1..20: mol_type = other DNA
ttgtaccactgtcctccagc

SEQ ID NO: 6486 - DNA, 20 bp, synthetic construct
  misc_feature 1..20: note = Description of Artificial Sequence: Synthetic oligonucleotide
  misc_feature 1..20: note = Target: FXN; (-) strand; PAM type: NNGRRT; PAM sequence: GAGGAT
  source 1..20: mol_type = other DNA
atggaggtgcacacctgtgg

SEQ ID NO: 6487 - DNA, 20 bp, synthetic construct
  misc_feature 1..20: note = Description of Artificial Sequence: Synthetic oligonucleotide
  misc_feature 1..20: note = Target: FXN; (-) strand; PAM type: NNGRRT; PAM sequence: GTGGAT
  source 1..20: mol_type = other DNA
atcttgggaggacgaggcag

SEQ ID NO: 6488 - DNA, 20 bp, synthetic construct
  misc_feature 1..20: note = Description of Artificial Sequence: Synthetic oligonucleotide
  misc_feature 1..20: note = Target: FXN; (-) strand; PAM type: NNGRRT; PAM sequence: CAGAGT
  source 1..20: mol_type = other DNA
gtctacaaacaagtaagagg

SEQ ID NO: 6489 - DNA, 20 bp, synthetic construct
  misc_feature 1..20: note = Description of Artificial Sequence: Synthetic oligonucleotide
  misc_feature 1..20: note = Target: FXN; (-) strand; PAM type: NNGRRT; PAM sequence: CAGGAT
  source 1..20: mol_type = other DNA
gaactgagtacttctcacat

SEQ ID NO: 6490 - DNA, 20 bp, synthetic construct
  misc_feature 1..20: note = Description of Artificial Sequence: Synthetic oligonucleotide
  misc_feature 1..20: note = Target: FXN; (-) strand; PAM type: NNGRRT; PAM sequence: CTGAGT
  source 1..20: mol_type = other DNA
agaacaacagttgtcatgaa

SEQ ID NO: 6491 - DNA, 20 bp, synthetic construct
  misc_feature 1..20: note = Description of Artificial Sequence: Synthetic oligonucleotide
  misc_feature 1..20: note = Target: FXN; (-) strand; PAM type: NNGRRT; PAM sequence: GTGAAT
  source 1..20: mol_type = other DNA
tttgggagaagtcctccaat

SEQ ID NO: 6492 - DNA, 20 bp, synthetic construct
  misc_feature 1..20: note = Description of Artificial Sequence: Synthetic oligonucleotide
  misc_feature 1..20: note = Target: FXN; (-) strand; PAM type: NNGRRT; PAM sequence: TTGAGT
  source 1..20: mol_type = other DNA
tattttgattaagttcaagg

SEQ ID NO: 6493 - DNA, 20 bp, synthetic construct
  misc_feature 1..20: note = Description of Artificial Sequence: Synthetic oligonucleotide
  misc_feature 1..20: note = Target: FXN; (-) strand; PAM type: NNGRRT; PAM sequence: CTGAGT
  source 1..20: mol_type = other DNA
ctaatacgaagttaagtaaa

SEQ ID NO: 6494 - DNA, 20 bp, synthetic construct
  misc_feature 1..20: note = Description of Artificial Sequence: Synthetic oligonucleotide
  misc_feature 1..20: note = Target: FXN; (-) strand; PAM type: NNGRRT; PAM sequence: CAGAAT
  source 1..20: mol_type = other DNA
gataaatggttccagggaat

SEQ ID NO: 6495 - DNA, 20 bp, synthetic construct
  misc_feature 1..20: note = Description of Artificial Sequence: Synthetic oligonucleotide
  misc_feature 1..20: note = Target: FXN; (-) strand; PAM type: NNGRRT; PAM sequence: GGGAAT
  source 1..20: mol_type = other DNA
gcacacgataaatggttcca

SEQ ID NO: 6496 - DNA, 20 bp, synthetic construct
  misc_feature 1..20: note = Description of Artificial Sequence: Synthetic oligonucleotide
  misc_feature 1..20: note = Target: FXN; (-) strand; PAM type: NNGRRT; PAM sequence: CTGGAT
  source 1..20: mol_type = other DNA
agaatttggggcaggtatag

SEQ ID NO: 6497 - DNA, 20 bp, synthetic construct
  misc_feature 1..20: note = Description of Artificial Sequence: Synthetic oligonucleotide
  misc_feature 1..20: note = Target: FXN; (-) strand; PAM type: NNGRRT; PAM sequence: CAGAAT
  source 1..20: mol_type = other DNA
gaggtggcaaaagcatctgt

SEQ ID NO: 6498 - DNA, 20 bp, synthetic construct
  misc_feature 1..20: note = Description of Artificial Sequence: Synthetic oligonucleotide
  misc_feature 1..20: note = Target: FXN; (-) strand; PAM type: NNGRRT; PAM sequence: ATGGGT
  source 1..20: mol_type = other DNA
caaactccatcactatgaac

SEQ ID NO: 6499 - DNA, 20 bp, synthetic construct
  misc_feature 1..20: note = Description of Artificial Sequence: Synthetic oligonucleotide
  misc_feature 1..20: note = Target: FXN; (-) strand; PAM type: NNGRRT; PAM sequence: AAGAAT
  source 1..20: mol_type = other DNA
gcagaagataactatgtgcc

SEQ ID NO: 6500 - DNA, 20 bp, synthetic construct
  misc_feature 1..20: note = Description of Artificial Sequence: Synthetic oligonucleotide
  misc_feature 1..20: note = Target: FXN; (-) strand; PAM type: NNGRRT; PAM sequence: CTGGGT
  source 1..20: mol_type = other DNA
tcgtgccactgcactccagc

SEQ ID NO: 6501 - DNA, 20 bp, synthetic construct
  misc_feature 1..20: note = Description of Artificial Sequence: Synthetic oligonucleotide
  misc_feature 1..20: note = Target: FXN; (-) strand; PAM type: NNGRRT; PAM sequence: GAGAAT
  source 1..20: mol_type = other DNA
ctactcgggaggctgaggca

SEQ ID NO: 6502 - DNA, 20 bp, synthetic construct
  misc_feature 1..20: note = Description of Artificial Sequence: Synthetic oligonucleotide
  misc_feature 1..20: note = Target: FXN; (-) strand; PAM type: NNGRRT; PAM sequence: CCGGGT
  source 1..20: mol_type = other DNA
actaaaaatacaaaaattag

SEQ ID NO: 6503 - DNA, 20 bp, synthetic construct
  misc_feature 1..20: note = Description of Artificial Sequence: Synthetic oligonucleotide
  misc_feature 1..20: note = Target: FXN; (-) strand; PAM type: NNGRRT; PAM sequence: AGGAGT
  source 1..20: mol_type = other DNA
ggcaggtggattactaggtc

SEQ ID NO: 6504 - DNA, 20 bp, synthetic construct
  misc_feature 1..20: note = Description of Artificial Sequence: Synthetic oligonucleotide
  misc_feature 1..20: note = Target: FXN; (-) strand; PAM type: NNGRRT; PAM sequence: GTGGAT
  source 1..20: mol_type = other DNA
actttgggaggcggaggcag

SEQ ID NO: 6505 - DNA, 20 bp, synthetic construct
  misc_feature 1..20: note = Description of Artificial Sequence: Synthetic oligonucleotide
  misc_feature 1..20: note = Target: FXN; (-) strand; PAM type: NNGRRT; PAM sequence: CTGGGT
  source 1..20: mol_type = other DNA
agattagaaggcatttctgg

SEQ ID NO: 6506 - DNA, 20 bp, synthetic construct
  misc_feature 1..20: note = Description of Artificial Sequence: Synthetic oligonucleotide
  misc_feature 1..20: note = Target: FXN; (-) strand; PAM type: NNGRRT; PAM sequence: CGGGAT
  source 1..20: mol_type = other DNA
gggccactgatcaggtactt

SEQ ID NO: 6507 - DNA, 20 bp, synthetic construct
  misc_feature 1..20: note = Description of Artificial Sequence: Synthetic oligonucleotide
  misc_feature 1..20: note = Target: FXN; (-) strand; PAM type: NNGRRT; PAM sequence: CTGAGT
  source 1..20: mol_type = other DNA
gatgcagggatataagtgag

SEQ ID NO: 6508 - DNA, 20 bp, synthetic construct
  misc_feature 1..20: note = Description of Artificial Sequence: Synthetic oligonucleotide
  misc_feature 1..20: note = Target: FXN; (-) strand; PAM type: NNGRRT; PAM sequence: AGGGAT
  source 1..20: mol_type = other DNA
tctgtctctgtagcggatgc

SEQ ID NO: 6509 - DNA, 20 bp, synthetic construct
  misc_feature 1..20: note = Description of Artificial Sequence: Synthetic oligonucleotide
  misc_feature 1..20: note = Target: FXN; (-) strand; PAM type: NNGRRT; PAM sequence: GCGGAT
  source 1..20: mol_type = other DNA
gcttggattctgtctctgta

SEQ ID NO: 6510 - DNA, 20 bp, synthetic construct
  misc_feature 1..20: note = Description of Artificial Sequence: Synthetic oligonucleotide
  misc_feature 1..20: note = Target: FXN; (-) strand; PAM type: NNGRRT; PAM sequence: TTGGAT
  source 1..20: mol_type = other DNA
agaagatggaacatatgagc

SEQ ID NO: 6511 - DNA, 20 bp, synthetic construct
  misc_feature 1..20: note = Description of Artificial Sequence: Synthetic oligonucleotide
  misc_feature 1..20: note = Target: FXN; (-) strand; PAM type: NNGRRT; PAM sequence: CTGGGT
  source 1..20: mol_type = other DNA
tttgagagccaattttactg

SEQ ID NO: 6512 - DNA, 20 bp, synthetic construct
  misc_feature 1..20: note = Description of Artificial Sequence: Synthetic oligonucleotide
  misc_feature 1..20: note = Target: FXN; (-) strand; PAM type: NNGRRT; PAM sequence: CTGGAT
  source 1..20: mol_type = other DNA
tcttgcactagtacttctac

SEQ ID NO: 6513 - DNA, 20 bp, synthetic construct
  misc_feature 1..20: note = Description of Artificial Sequence: Synthetic oligonucleotide
  misc_feature 1..20: note = Target: FXN; (-) strand; PAM type: NNGRRT; PAM sequence: TGGGAT
  source 1..20: mol_type = other DNA
gcctcagcctctcaaagtgc

SEQ ID NO: 6514 - DNA, 20 bp, synthetic construct
  misc_feature 1..20: note = Description of Artificial Sequence: Synthetic oligonucleotide
  misc_feature 1..20: note = Target: FXN; (-) strand; PAM type: NNGRRT; PAM sequence: CGGGGT
  source 1..20: mol_type = other DNA
ttttgtatttttagtagagg

SEQ ID NO: 6515 - DNA, 20 bp, synthetic construct
  misc_feature 1..20: note = Description of Artificial Sequence: Synthetic oligonucleotide
  misc_feature 1..20: note = Target: FXN; (-) strand; PAM type: NNGRRT; PAM sequence: TGGGAT
  source 1..20: mol_type = other DNA
gcctcagcctcccgagtagc

SEQ ID NO: 6516 - DNA, 20 bp, synthetic construct
  misc_feature 1..20: note = Description of Artificial Sequence: Synthetic oligonucleotide
  misc_feature 1..20: note = Target: FXN; (-) strand; PAM type: NNGRRT; PAM sequence: CCGAGT
  source 1..20: mol_type = other DNA
aattctcctgcctcagcctc

SEQ ID NO: 6517 - DNA, 20 bp, synthetic construct
  misc_feature 1..20: note = Description of Artificial Sequence: Synthetic oligonucleotide
  misc_feature 1..20: note = Target: FXN; (-) strand; PAM type: NNGRRT; PAM sequence: TGGAGT
  source 1..20: mol_type = other DNA
ttccctcttgtcacccaggc

SEQ ID NO: 6518 - DNA, 20 bp, synthetic construct
  misc_feature 1..20: note = Description of Artificial Sequence: Synthetic oligonucleotide
  misc_feature 1..20: note = Target: FXN; (-) strand; PAM type: NNGRRT; PAM sequence: TGGAGT
  source 1..20: mol_type = other DNA
cgggaattacatttttttaa

SEQ ID NO: 6519 - DNA, 20 bp, synthetic construct
  misc_feature 1..20: note = Description of Artificial Sequence: Synthetic oligonucleotide
  misc_feature 1..20: note = Target: FXN; (-) strand; PAM type: NNGRRT; PAM sequence: GGGAAT
  source 1..20: mol_type = other DNA
acacttaagatggcagacac

SEQ ID NO: 6520 - DNA, 20 bp, synthetic construct
  misc_feature 1..20: note = Description of Artificial Sequence: Synthetic oligonucleotide
  misc_feature 1..20: note = Target: FXN; (-) strand; PAM type: NNGRRT; PAM sequence: AGGAAT
  source 1..20: mol_type = other DNA
atcatagagtgcggtaggaa

SEQ ID NO: 6521 - DNA, 20 bp, synthetic construct
  misc_feature 1..20: note = Description of Artificial Sequence: Synthetic oligonucleotide
  misc_feature 1..20: note = Target: FXN; (-) strand; PAM type: NNGRRT; PAM sequence: TAGAGT
  source 1..20: mol_type = other DNA
aaaaatctcagctagcatca

SEQ ID NO: 6522 - DNA, 20 bp, synthetic construct
  misc_feature 1..20: note = Description of Artificial Sequence: Synthetic oligonucleotide
  misc_feature 1..20: note = Target: FXN; (-) strand; PAM type: NNGRRT; PAM sequence: TAGGGT
  source 1..20: mol_type = other DNA
tttaaagtttttctttctct

SEQ ID NO: 6523 - DNA, 20 bp, synthetic construct
  misc_feature 1..20: note = Description of Artificial Sequence: Synthetic oligonucleotide
  misc_feature 1..20: note = Target: FXN; (-) strand; PAM type: NNGRRT; PAM sequence: AGGGAT
  source 1..20: mol_type = other DNA
ctattacttttgagctttgg

SEQ ID NO: 6524 - DNA, 20 bp, synthetic construct
  misc_feature 1..20: note = Description of Artificial Sequence: Synthetic oligonucleotide
  misc_feature 1..20: note = Target: FXN; (-) strand; PAM type: NNGRRT; PAM sequence: CAGGAT
  source 1..20: mol_type = other DNA
actggcaagaggaatcccag

SEQ ID NO: 6525 - DNA, 20 bp, synthetic construct
  misc_feature 1..20: note = Description of Artificial Sequence: Synthetic oligonucleotide
  misc_feature 1..20: note = Target: FXN; (-) strand; PAM type: NNGRRT; PAM sequence: AGGAAT
  source 1..20: mol_type = other DNA
actgctgatggactggcaag

SEQ ID NO: 6526 - DNA, 20 bp, synthetic construct
  misc_feature 1..20: note = Description of Artificial Sequence: Synthetic oligonucleotide
  misc_feature 1..20: note = Target: FXN; (-) strand; PAM type: NNGRRT; PAM sequence: AGGGAT
  source 1..20: mol_type = other DNA
ggcaggagagggcagattta

SEQ ID NO: 6527 - DNA, 20 bp, synthetic construct
  misc_feature 1..20: note = Description of Artificial Sequence: Synthetic oligonucleotide
  misc_feature 1..20: note = Target: FXN; (-) strand; PAM type: NNGRRT; PAM sequence: GTGGAT
  source 1..20: mol_type = other DNA
gctgagagaaaaggaggaag

SEQ ID NO: 6528 - DNA, 20 bp, synthetic construct
  misc_feature 1..20: note = Description of Artificial Sequence: Synthetic oligonucleotide
  misc_feature 1..20: note = Target: FXN; (-) strand; PAM type: NNGRRT; PAM sequence: TAGAGT
  source 1..20: mol_type = other DNA
tagaaaagcataattatatg

SEQ ID NO: 6529 - DNA, 20 bp, synthetic construct
  misc_feature 1..20: note = Description of Artificial Sequence: Synthetic oligonucleotide
  misc_feature 1..20: note = Target: FXN; (-) strand; PAM type: NNGRRT; PAM sequence: GGGGGT
  source 1..20: mol_type = other DNA
agtcaaagtgttgagtgtga

SEQ ID NO: 6530 - DNA, 20 bp, synthetic construct
  misc_feature 1..20: note = Description of Artificial Sequence: Synthetic oligonucleotide
  misc_feature 1..20: note = Target: FXN; (-) strand; PAM type: NNGRRT; PAM sequence: TTGAGT
  source 1..20: mol_type = other DNA
ggattgctggagtcaaagtg

SEQ ID NO: 6531 - DNA, 20 bp, synthetic construct
  misc_feature 1..20: note = Description of Artificial Sequence: Synthetic oligonucleotide
  misc_feature 1..20: note = Target: FXN; (-) strand; PAM type: NNGRRT; PAM sequence: TGGAGT
  source 1..20: mol_type = other DNA
atctggggatttgggattgc

SEQ ID NO: 6532 - DNA, 20 bp, synthetic construct
  misc_feature 1..20: note = Description of Artificial Sequence: Synthetic oligonucleotide
  misc_feature 1..20: note = Target: FXN; (-) strand; PAM type: NNGRRT; PAM sequence: TGGGAT
  source 1..20: mol_type = other DNA
cacttagggatctggggatt

SEQ ID NO: 6533 - DNA, 20 bp, synthetic construct
  misc_feature 1..20: note = Description of Artificial Sequence: Synthetic oligonucleotide
  misc_feature 1..20: note = Target: FXN; (-) strand; PAM type: NNGRRT; PAM sequence: GGGGAT
  source 1..20: mol_type = other DNA
cacagcacacttagggatct

SEQ ID NO: 6534 - DNA, 20 bp, synthetic construct
  misc_feature 1..20: note = Description of Artificial Sequence: Synthetic oligonucleotide
  misc_feature 1..20: note = Target: FXN; (-) strand; PAM type: NNGRRT; PAM sequence: AGGGAT
  source 1..20: mol_type = other DNA
gaaaatagcacagcacactt

SEQ ID NO: 6535 - DNA, 20 bp, synthetic construct
  misc_feature 1..20: note = Description of Artificial Sequence: Synthetic oligonucleotide
  misc_feature 1..20: note = Target: FXN; (-) strand; PAM type: NNGRRT; PAM sequence: GGGAAT
  source 1..20: mol_type = other DNA
accccccaggcagagatgtg

SEQ ID NO: 6536 - DNA, 20 bp, synthetic construct
  misc_feature 1..20: note = Description of Artificial Sequence: Synthetic oligonucleotide
  misc_feature 1..20: note = Target: FXN; (-) strand; PAM type: NNGRRT; PAM sequence: TAGAAT
  source 1..20: mol_type = other DNA
gccaagaacatttttcaggg

SEQ ID NO: 6537 - DNA, 20 bp, synthetic construct
  misc_feature 1..20: note = Description of Artificial Sequence: Synthetic oligonucleotide
  misc_feature 1..20: note = Target: FXN; (-) strand; PAM type: NNGRRT; PAM sequence: CAGGGT
  source 1..20: mol_type = other DNA
gctgtgccaagaacattttt

SEQ ID NO: 6538 - DNA, 20 bp, synthetic construct
  misc_feature 1..20: note = Description of Artificial Sequence: Synthetic oligonucleotide
  misc_feature 1..20: note = Target: FXN; (-) strand; PAM type: NNGRRT; PAM sequence: AGGAGT
  source 1..20: mol_type = other DNA
aggcagaggctgagtggagg

SEQ ID NO: 6539 - DNA, 20 bp, synthetic construct
  misc_feature 1..20: note = Description of Artificial Sequence: Synthetic oligonucleotide
  misc_feature 1..20: note = Target: FXN; (-) strand; PAM type: NNGRRT; PAM sequence: CTGAGT
  source 1..20: mol_type = other DNA
caagggcatccaggcagagg

SEQ ID NO: 6540 - DNA, 20 bp, synthetic construct
  misc_feature 1..20: note = Description of Artificial Sequence: Synthetic oligonucleotide
  misc_feature 1..20: note = Target: FXN; (-) strand; PAM type: NNGRRT; PAM sequence: AGGGGT
  source 1..20: mol_type = other DNA
catggaaggtacagccaagc

SEQ ID NO: 6541 - DNA, 20 bp, synthetic construct
  misc_feature 1..20: note = Description of Artificial Sequence: Synthetic oligonucleotide
  misc_feature 1..20: note = Target: FXN; (-) strand; PAM type: NNGRRT; PAM sequence: TAGAGT
  source 1..20: mol_type = other DNA
ctcttggagttggggttatt

SEQ ID NO: 6542 - DNA, 20 bp, synthetic construct
  misc_feature 1..20: note = Description of Artificial Sequence: Synthetic oligonucleotide
  misc_feature 1..20: note = Target: FXN; (-) strand; PAM type: NNGRRT; PAM sequence: TGGGGT
  source 1..20: mol_type = other DNA
cttgctaacactcttggagt

SEQ ID NO: 6543 - DNA, 20 bp, synthetic construct
  misc_feature 1..20: note = Description of Artificial Sequence: Synthetic oligonucleotide
  misc_feature 1..20: note = Target: FXN; (-) strand; PAM type: NNGRRT; PAM sequence: TGGAGT
  source 1..20: mol_type = other DNA
atatttcttgctaacactct

SEQ ID NO: 6544 - DNA, 20 bp, synthetic construct
  misc_feature 1..20: note = Description of Artificial Sequence: Synthetic oligonucleotide
  misc_feature 1..20: note = Target: FXN; (+) strand; PAM type: NNGRRT; PAM sequence: AGGAAT
  source 1..20: mol_type = other DNA
gtggcctttgttatatgccc

SEQ ID NO: 6545 - DNA, 20 bp, synthetic construct
  misc_feature 1..20: note = Description of Artificial Sequence: Synthetic oligonucleotide
  misc_feature 1..20: note = Target: FXN; (+) strand; PAM type: NNGRRT; PAM sequence: TGGAGT
  source 1..20: mol_type = other DNA
ctatgagactagaagcaaga

SEQ ID NO: 6546 - DNA, 20 bp, synthetic construct
  misc_feature 1..20: note = Description of Artificial Sequence: Synthetic oligonucleotide
  misc_feature 1..20: note = Target: FXN; (+) strand; PAM type: NNGRRT; PAM sequence: AAGAAT
  source 1..20: mol_type = other DNA
gcaaattccttagttaaaac

SEQ ID NO: 6547 - DNA, 20 bp, synthetic construct
  misc_feature 1..20: note = Description of Artificial Sequence: Synthetic oligonucleotide
  misc_feature 1..20: note = Target: FXN; (+) strand; PAM type: NNGRRT; PAM sequence: AAGAGT
  source 1..20: mol_type = other DNA
tcccctcaacagtaagcaag

SEQ ID NO: 6548 - DNA, 20 bp, synthetic construct
  misc_feature 1..20: note = Description of Artificial Sequence: Synthetic oligonucleotide
  misc_feature 1..20: note = Target: FXN; (+) strand; PAM type: NNGRRT; PAM sequence: TGGAAT
  source 1..20: mol_type = other DNA
tgtttaatatttattgactt

SEQ ID NO: 6549 - DNA, 20 bp, synthetic construct
  misc_feature 1..20: note = Description of Artificial Sequence: Synthetic oligonucleotide
  misc_feature 1..20: note = Target: FXN; (+) strand; PAM type: NNGRRT; PAM sequence: CTGAGT
  source 1..20: mol_type = other DNA
tggaattattgattactttg

SEQ ID NO: 6550 - DNA, 20 bp, synthetic construct
  misc_feature 1..20: note = Description of Artificial Sequence: Synthetic oligonucleotide
  misc_feature 1..20: note = Target: FXN; (+) strand; PAM type: NNGRRT; PAM sequence: ATGAAT
  source 1..20: mol_type = other DNA
attactttgctgagtatctt

SEQ ID NO: 6551 - DNA, 20 bp, synthetic construct
  misc_feature 1..20: note = Description of Artificial Sequence: Synthetic oligonucleotide
  misc_feature 1..20: note = Target: FXN; (+) strand; PAM type: NNGRRT; PAM sequence: CAGAGT
  source 1..20: mol_type = other DNA
tgatgtatcaaattgcattc

SEQ ID NO: 6552 - DNA, 20 bp, synthetic construct
  misc_feature 1..20: note = Description of Artificial Sequence: Synthetic oligonucleotide
  misc_feature 1..20: note = Target: FXN; (+) strand; PAM type: NNGRRT; PAM sequence: GTGGAT
  source 1..20: mol_type = other DNA
atcaaattgcattccagagt

SEQ ID NO: 6553 - DNA, 20 bp, synthetic construct
  misc_feature 1..20: note = Description of Artificial Sequence: Synthetic oligonucleotide
  misc_feature 1..20: note = Target: FXN; (+) strand; PAM type: NNGRRT; PAM sequence: TGGGAT
  source 1..20: mol_type = other DNA
atcaatccaagcaaatgcag

SEQ ID NO: 6554 - DNA, 20 bp, synthetic construct
  misc_feature 1..20: note = Description of Artificial Sequence: Synthetic oligonucleotide
  misc_feature 1..20: note = Target: FXN; (+) strand; PAM type: NNGRRT; PAM sequence: CAGAGT
  source 1..20: mol_type = other DNA
gcagtgggatttcttttccc

SEQ ID NO: 6555 - DNA, 20 bp, synthetic construct
  misc_feature 1..20: note = Description of Artificial Sequence: Synthetic oligonucleotide
  misc_feature 1..20: note = Target: FXN; (+) strand; PAM type: NNGRRT; PAM sequence: CTGAAT
  source 1..20: mol_type = other DNA
ggaagttaagtctttaggca

SEQ ID NO: 6556 - DNA, 20 bp, synthetic construct
  misc_feature 1..20: note = Description of Artificial Sequence: Synthetic oligonucleotide
  misc_feature 1..20: note = Target: FXN; (+) strand; PAM type: NNGRRT; PAM sequence: AAGAAT
  source 1..20: mol_type = other DNA
gctgaagcccaggactaagc

SEQ ID NO: 6557 - DNA, 20 bp, synthetic construct
  misc_feature 1..20: note = Description of Artificial Sequence: Synthetic oligonucleotide
  misc_feature 1..20: note = Target: FXN; (+) strand; PAM type: NNGRRT; PAM sequence: ATGAGT
  source 1..20: mol_type = other DNA
aagcccaggactaagcaaga

SEQ ID NO: 6558 - DNA, 20 bp, synthetic construct
  misc_feature 1..20: note = Description of Artificial Sequence: Synthetic oligonucleotide
  misc_feature 1..20: note = Target: FXN; (+) strand; PAM type: NNGRRT; PAM sequence: GAGAAT
  source 1..20: mol_type = other DNA
aggactaagcaagaatgagt

SEQ ID NO: 6559 - DNA, 20 bp, synthetic construct
  misc_feature 1..20: note = Description of Artificial Sequence: Synthetic oligonucleotide
  misc_feature 1..20: note = Target: FXN; (+) strand; PAM type: NNGRRT; PAM sequence: GAGGAT
  source 1..20: mol_type = other DNA
ttaaggtttggtcatctgta

SEQ ID NO: 6560 - DNA, 20 bp, synthetic construct
  misc_feature 1..20: note = Description of Artificial Sequence: Synthetic oligonucleotide
  misc_feature 1..20: note = Target: FXN; (+) strand; PAM type: NNGRRT; PAM sequence: TTGGGT
  source 1..20: mol_type = other DNA
gtttggtcatctgtagagga

SEQ ID NO: 6561 - DNA, 20 bp, synthetic construct
  misc_feature 1..20: note = Description of Artificial Sequence: Synthetic oligonucleotide
  misc_feature 1..20: note = Target: FXN; (+) strand; PAM type: NNGRRT; PAM sequence: AAGAAT
  source 1..20: mol_type = other DNA
gaagaaacaggaggccaaca

SEQ ID NO: 6562 - DNA, 20 bp, synthetic construct
  misc_feature 1..20: note = Description of Artificial Sequence: Synthetic oligonucleotide
  misc_feature 1..20: note = Target: FXN; (+) strand; PAM type: NNGRRT; PAM sequence: TAGAGT
  source 1..20: mol_type = other DNA
gaatatcactcattcaccag

SEQ ID NO: 6563 - DNA, 20 bp, synthetic construct
  misc_feature 1..20: note = Description of Artificial Sequence: Synthetic oligonucleotide
  misc_feature 1..20: note = Target: FXN; (+) strand; PAM type: NNGRRT; PAM sequence: GGGAAT
  source 1..20: mol_type = other DNA
ggtacctaaggcacacctgt

SEQ ID NO: 6564 - DNA, 20 bp, synthetic construct
  misc_feature 1..20: note = Description of Artificial Sequence: Synthetic oligonucleotide
  misc_feature 1..20: note = Target: FXN; (+) strand; PAM type: NNGRRT; PAM sequence: AAGGAT
  source 1..20: mol_type = other DNA
atgaaagtttggtttcataa

SEQ ID NO: 6565 - DNA, 20 bp, synthetic construct
  misc_feature 1..20: note = Description of Artificial Sequence: Synthetic oligonucleotide
  misc_feature 1..20: note = Target: FXN; (+) strand; PAM type: NNGRRT; PAM sequence: TTGAGT
  source 1..20: mol_type = other DNA
gaggaagtcacctctgacat

SEQ ID NO: 6566 - DNA, 20 bp, synthetic construct
  misc_feature 1..20: note = Description of Artificial Sequence: Synthetic oligonucleotide
  misc_feature 1..20: note = Target: FXN; (+) strand; PAM type: NNGRRT; PAM sequence: TTGAGT
  source 1..20: mol_type = other DNA
agtcacctctgacatttgag

SEQ ID NO: 6567 - DNA, 20 bp, synthetic construct
  misc_feature 1..20: note = Description of Artificial Sequence: Synthetic oligonucleotide
  misc_feature 1..20: note = Target: FXN; (+) strand; PAM type: NNGRRT; PAM sequence: CAGGAT
  source 1..20: mol_type = other DNA
gacatttgagttgagtccta

SEQ ID NO: 6568 - DNA, 20 bp, synthetic construct
  misc_feature 1..20: note = Description of Artificial Sequence: Synthetic oligonucleotide
  misc_feature 1..20: note = Target: FXN; (+) strand; PAM type: NNGRRT; PAM sequence: CTGGAT
  source 1..20: mol_type = other DNA
aataaattacctaaaacata

SEQ ID NO: 6569 - DNA, 20 bp, synthetic construct
  misc_feature 1..20: note = Description of Artificial Sequence: Synthetic oligonucleotide
  misc_feature 1..20: note = Target: FXN; (+) strand; PAM type: NNGRRT; PAM sequence: AAGGAT
  source 1..20: mol_type = other DNA
gtttctgctccatgatgtct

SEQ ID NO: 6570 - DNA, 20 bp, synthetic construct
  misc_feature 1..20: note = Description of Artificial Sequence: Synthetic oligonucleotide
  misc_feature 1..20: note = Target: FXN; (+) strand; PAM type: NNGRRT; PAM sequence: TGGAAT
  source 1..20: mol_type = other DNA
aagactgggaggctgggggc

SEQ ID NO: 6571 - DNA, 20 bp, synthetic construct
  misc_feature 1..20: note = Description of Artificial Sequence: Synthetic oligonucleotide
  misc_feature 1..20: note = Target: FXN; (+) strand; PAM type: NNGRRT; PAM sequence: AAGAAT
  source 1..20: mol_type = other DNA
tgggggctggaatttatctg

SEQ ID NO: 6572 - DNA, 20 bp, synthetic construct
  misc_feature 1..20: note = Description of Artificial Sequence: Synthetic oligonucleotide
  misc_feature 1..20: note = Target: FXN; (+) strand; PAM type: NNGRRT; PAM sequence: TTGGAT
  source 1..20: mol_type = other DNA
gtttctctactttggctagt

SEQ ID NO: 6573 - DNA, 20 bp, synthetic construct
  misc_feature 1..20: note = Description of Artificial Sequence: Synthetic oligonucleotide
  misc_feature 1..20: note = Target: FXN; (+) strand; PAM type: NNGRRT; PAM sequence: GAGAAT
  source 1..20: mol_type = other DNA
cagtgtcagcatcccaaaaa

SEQ ID NO: 6574 - DNA, 20 bp, synthetic construct
  misc_feature 1..20: note = Description of Artificial Sequence: Synthetic oligonucleotide
  misc_feature 1..20: note = Target: FXN; (+) strand; PAM type: NNGRRT; PAM sequence: TTGAGT
  source 1..20: mol_type = other DNA
aggctgaggtgggaggttgc

SEQ ID NO: 6575 - DNA, 20 bp, synthetic construct
  misc_feature 1..20: note = Description of Artificial Sequence: Synthetic oligonucleotide
  misc_feature 1..20: note = Target: FXN; (+) strand; PAM type: NNGRRT; PAM sequence: AGGAGT
  source 1..20: mol_type = other DNA
gtgggaggttgcttgagttc

SEQ ID NO: 6576 - DNA, 20 bp, synthetic construct
  misc_feature 1..20: note = Description of Artificial Sequence: Synthetic oligonucleotide
  misc_feature 1..20: note = Target: FXN; (+) strand; PAM type: NNGRRT; PAM sequence: GAGGAT
  source 1..20: mol_type = other DNA
tacttaggaggctgaggcag

SEQ ID NO: 6577 - DNA, 20 bp, synthetic construct
  misc_feature 1..20: note = Description of Artificial Sequence: Synthetic oligonucleotide
  misc_feature 1..20: note = Target: FXN; (+) strand; PAM type: NNGRRT; PAM sequence: CTGGGT
  source 1..20: mol_type = other DNA
ccacaccactgcatttcagc

SEQ ID NO: 6578 - DNA, 20 bp, synthetic construct
  misc_feature 1..20: note = Description of Artificial Sequence: Synthetic oligonucleotide
  misc_feature 1..20: note = Target: FXN; (+) strand; PAM type: NNGRRT; PAM sequence: CAGAAT
  source 1..20: mol_type = other DNA
ctgcatttcagcctgggtaa

SEQ ID NO: 6579 - DNA, 20 bp, synthetic construct
  misc_feature 1..20: note = Description of Artificial Sequence: Synthetic oligonucleotide
  misc_feature 1..20: note = Target: FXN; (+) strand; PAM type: NNGRRT; PAM sequence: GGGAGT
  source 1..20: mol_type = other DNA
aaaaaaaaaagagagagaga

SEQ ID NO: 6580 - DNA, 20 bp, synthetic construct
  misc_feature 1..20: note = Description of Artificial Sequence: Synthetic oligonucleotide
  misc_feature 1..20: note = Target: FXN; (+) strand; PAM type: NNGRRT; PAM sequence: TGGAAT
  source 1..20: mol_type = other DNA
ttctgcagtaccctgttggt

SEQ ID NO: 6581 - DNA, 20 bp, synthetic construct
  misc_feature 1..20: note = Description of Artificial Sequence: Synthetic oligonucleotide
  misc_feature 1..20: note = Target: FXN; (+) strand; PAM type: NNGRRT; PAM sequence: CCGAAT
  source 1..20: mol_type = other DNA
ggaatagttgtagcccaaac

SEQ ID NO: 6582 - DNA, 20 bp, synthetic construct
  misc_feature 1..20: note = Description of Artificial Sequence: Synthetic oligonucleotide
  misc_feature 1..20: note = Target: FXN; (+) strand; PAM type: NNGRRT; PAM sequence: GAGAAT
  source 1..20: mol_type = other DNA
aaacccgaattcgaagggag

SEQ ID NO: 6583 - DNA, 20 bp, synthetic construct
  misc_feature 1..20: note = Description of Artificial Sequence: Synthetic oligonucleotide
  misc_feature 1..20: note = Target: FXN; (+) strand; PAM type: NNGRRT; PAM sequence: CTGGGT
  source 1..20: mol_type = other DNA
gaggagaatagataacatcc

SEQ ID NO: 6584 - DNA, 20 bp, synthetic construct
  misc_feature 1..20: note = Description of Artificial Sequence: Synthetic oligonucleotide
  misc_feature 1..20: note = Target: FXN; (+) strand; PAM type: NNGRRT; PAM sequence: AGGAAT
  source 1..20: mol_type = other DNA
agataacatccctgggtgac

SEQ ID NO: 6585 - DNA, 20 bp, synthetic construct
  misc_feature 1..20: note = Description of Artificial Sequence: Synthetic oligonucleotide
  misc_feature 1..20: note = Target: FXN; (+) strand; PAM type: NNGRRT; PAM sequence: AGGGAT
  source 1..20: mol_type = other DNA
caatcttccataccaggcaa

SEQ ID NO: 6586 - DNA, 20 bp, synthetic construct
  misc_feature 1..20: note = Description of Artificial Sequence: Synthetic oligonucleotide
  misc_feature 1..20: note = Target: FXN; (+) strand; PAM type: NNGRRT; PAM sequence: AGGGAT
  source 1..20: mol_type = other DNA
gaagactaaggaacaacatg

SEQ ID NO: 6587 - DNA, 20 bp, synthetic construct
  misc_feature 1..20: note = Description of Artificial Sequence: Synthetic oligonucleotide
  misc_feature 1..20: note = Target: FXN; (+) strand; PAM type: NNGRRT; PAM sequence: CAGAGT
  source 1..20: mol_type = other DNA
tctagatgcctcccaatatg

SEQ ID NO: 6588 - DNA, 20 bp, synthetic construct
  misc_feature 1..20: note = Description of Artificial Sequence: Synthetic oligonucleotide
  misc_feature 1..20: note = Target: FXN; (+) strand; PAM type: NNGRRT; PAM sequence: TGGGGT
  source 1..20: mol_type = other DNA
atgcctcccaatatgcagag

SEQ ID NO: 6589 - DNA, 20 bp, synthetic construct
  misc_feature 1..20: note = Description of Artificial Sequence: Synthetic oligonucleotide
  misc_feature 1..20: note = Target: FXN; (+) strand; PAM type: NNGRRT; PAM sequence: GAGAGT
  source 1..20: mol_type = other DNA
gcagagtggggtgtacagaa

SEQ ID NO: 6590 - DNA, 20 bp, synthetic construct
  misc_feature 1..20: note = Description of Artificial Sequence: Synthetic oligonucleotide
  misc_feature 1..20: note = Target: FXN; (+) strand; PAM type: NNGRRT; PAM sequence: TGGAAT
  source 1..20: mol_type = other DNA
ctctgtcatgctaagaaagt

SEQ ID NO: 6591 - DNA, 20 bp, synthetic construct
  misc_feature 1..20: note = Description of Artificial Sequence: Synthetic oligonucleotide
  misc_feature 1..20: note = Target: FXN; (+) strand; PAM type: NNGRRT; PAM sequence: TAGAAT
  source 1..20: mol_type = other DNA
tctgaaactttaaagcacat

SEQ ID NO: 6592 - DNA, 20 bp, synthetic construct
  misc_feature 1..20: note = Description of Artificial Sequence: Synthetic oligonucleotide
  misc_feature 1..20: note = Target: FXN; (+) strand; PAM type: NNGRRT; PAM sequence: ATGGAT
  source 1..20: mol_type = other DNA
cctggaggtcttgttaaacc

SEQ ID NO: 6593 - DNA, 20 bp, synthetic construct
  misc_feature 1..20: note = Description of Artificial Sequence: Synthetic oligonucleotide
  misc_feature 1..20: note = Target: FXN; (+) strand; PAM type: NNGRRT; PAM sequence: GAGAAT
  source 1..20: mol_type = other DNA
agattctgattcagtagatc

SEQ ID NO: 6594 - DNA, 20 bp, synthetic construct
  misc_feature 1..20: note = Description of Artificial Sequence: Synthetic oligonucleotide
  misc_feature 1..20: note = Target: FXN; (+) strand; PAM type: NNGRRT; PAM sequence: GAGAAT
  source 1..20: mol_type = other DNA
gtagatcgagaatagggcct

SEQ ID NO: 6595 - DNA, 20 bp, synthetic construct
  misc_feature 1..20: note = Description of Artificial Sequence: Synthetic oligonucleotide
  misc_feature 1..20: note = Target: FXN; (+) strand; PAM type: NNGRRT; PAM sequence: GGGAAT
  source 1..20: mol_type = other DNA
atatcctaatggcagagcaa

SEQ ID NO: 6596 - DNA, 20 bp, synthetic construct
  misc_feature 1..20: note = Description of Artificial Sequence: Synthetic oligonucleotide
  misc_feature 1..20: note = Target: FXN; (+) strand; PAM type: NNGRRT; PAM sequence: TAGGAT
  source 1..20: mol_type = other DNA
acccataacctgacagctat

SEQ ID NO: 6597 - DNA, 20 bp, synthetic construct
  misc_feature 1..20: note = Description of Artificial Sequence: Synthetic oligonucleotide
  misc_feature 1..20: note = Target: FXN; (+) strand; PAM type: NNGRRT; PAM sequence: CAGAGT
  source 1..20: mol_type = other DNA
ggaacagctacagtgtacca

SEQ ID NO: 6598 - DNA, 20 bp, synthetic construct
  misc_feature 1..20: note = Description of Artificial Sequence: Synthetic oligonucleotide
  misc_feature 1..20: note = Target: FXN; (+) strand; PAM type: NNGRRT; PAM sequence: CAGGGT
  source 1..20: mol_type = other DNA
tagctaataatgatgtagca

SEQ ID NO: 6599 - DNA, 20 bp, synthetic construct
  misc_feature 1..20: note = Description of Artificial Sequence: Synthetic oligonucleotide
  misc_feature 1..20: note = Target: FXN; (+) strand; PAM type: NNGRRT; PAM sequence: GCGGAT
  source 1..20: mol_type = other DNA
actttgggcggccgaggcgg

SEQ ID NO: 6600 - DNA, 20 bp, synthetic construct
  misc_feature 1..20: note = Description of Artificial Sequence: Synthetic oligonucleotide
  misc_feature 1..20: note = Target: FXN; (+) strand; PAM type: NNGRRT; PAM sequence: AGGAGT
  source 1..20: mol_type = other DNA
cgggcggatcacctgaggtc

SEQ ID NO: 6601 - DNA, 20 bp, synthetic construct
  misc_feature 1..20: note = Description of Artificial Sequence: Synthetic oligonucleotide
  misc_feature 1..20: note = Target: FXN; (+) strand; PAM type: NNGRRT; PAM sequence: CAGAAT
  source 1..20: mol_type = other DNA
agctactctggaggctgaga

SEQ ID NO: 6602 - DNA, 20 bp, synthetic construct
  misc_feature 1..20: note = Description of Artificial Sequence: Synthetic oligonucleotide
  misc_feature 1..20: note = Target: FXN; (+) strand; PAM type: NNGRRT; PAM sequence: CTGAGT
  source 1..20: mol_type = other DNA
aatgatgcagctttctctct

SEQ ID NO: 6603 - DNA, 20 bp, synthetic construct
  misc_feature 1..20: note = Description of Artificial Sequence: Synthetic oligonucleotide
  misc_feature 1..20: note = Target: FXN; (+) strand; PAM type: NNGRRT; PAM sequence: CAGAGT
  source 1..20: mol_type = other DNA
gggcctcactgttggtgtgg

SEQ ID NO: 6604 - DNA, 20 bp, synthetic construct
  misc_feature 1..20: note = Description of Artificial Sequence: Synthetic oligonucleotide
  misc_feature 1..20: note = Target: FXN; (+) strand; PAM type: NNGRRT; PAM sequence: CAGAAT
  source 1..20: mol_type = other DNA
ggagggcttctcaatcttgg

SEQ ID NO: 6605 - DNA, 20 bp, synthetic construct
  misc_feature 1..20: note = Description of Artificial Sequence: Synthetic oligonucleotide
  misc_feature 1..20: note = Target: FXN; (+) strand; PAM type: NNGRRT; PAM sequence: CTGGAT
  source 1..20: mol_type = other DNA
aatcttggcagaattttgga

SEQ ID NO: 6606 - DNA, 20 bp, synthetic construct
  misc_feature 1..20: note = Description of Artificial Sequence: Synthetic oligonucleotide
  misc_feature 1..20: note = Target: FXN; (+) strand; PAM type: NNGRRT; PAM sequence: CAGGAT
  source 1..20: mol_type = other DNA
gggggctgtcctgcacatca

SEQ ID NO: 6607 - DNA, 20 bp, synthetic construct
  misc_feature 1..20: note = Description of Artificial Sequence: Synthetic oligonucleotide
  misc_feature 1..20: note = Target: FXN; (+) strand; PAM type: NNGRRT; PAM sequence: TAGAAT
  source 1..20: mol_type = other DNA
acagtatttaagcagctgcc

SEQ ID NO: 6608 - DNA, 20 bp, synthetic construct
  misc_feature 1..20: note = Description of Artificial Sequence: Synthetic oligonucleotide
  misc_feature 1..20: note = Target: FXN; (+) strand; PAM type: NNGRRT; PAM sequence: AAGGAT
  source 1..20: mol_type = other DNA
ctagaattaattaaacacag

SEQ ID NO: 6609 - DNA, 20 bp, synthetic construct
  misc_feature 1..20: note = Description of Artificial Sequence: Synthetic oligonucleotide
  misc_feature 1..20: note = Target: FXN; (+) strand; PAM type: NNGRRT; PAM sequence: CAGAAT
  source 1..20: mol_type = other DNA
acagaaggatgtctctcatc

SEQ ID NO: 6610 - DNA, 20 bp, synthetic construct
  misc_feature 1..20: note = Description of Artificial Sequence: Synthetic oligonucleotide
  misc_feature 1..20: note = Target: FXN; (+) strand; PAM type: NNGRRT; PAM sequence: ATGAAT
  source 1..20: mol_type = other DNA
gtgccaacaccacttcttcc

SEQ ID NO: 6611 - DNA, 20 bp, synthetic construct
  misc_feature 1..20: note = Description of Artificial Sequence: Synthetic oligonucleotide
  misc_feature 1..20: note = Target: FXN; (+) strand; PAM type: NNGRRT; PAM sequence: TGGAAT
  source 1..20: mol_type = other DNA
tcttgctatgatggccgggc

SEQ ID NO: 6612 - DNA, 20 bp, synthetic construct
  misc_feature 1..20: note = Description of Artificial Sequence: Synthetic oligonucleotide
  misc_feature 1..20: note = Target: FXN; (+) strand; PAM type: NNGRRT; PAM sequence: CTGAGT
  source 1..20: mol_type = other DNA
gatcctcccgcctcagcctc

SEQ ID NO: 6613 - DNA, 20 bp, synthetic construct
  misc_feature 1..20: note = Description of Artificial Sequence: Synthetic oligonucleotide
  misc_feature 1..20: note = Target: FXN; (+) strand; PAM type: NNGRRT; PAM sequence: CTGGGT
  source 1..20: mol_type = other DNA
acaaaaaatacaaaaactag

SEQ ID NO: 6614 - DNA, 20 bp, synthetic construct
  misc_feature 1..20: note = Description of Artificial Sequence: Synthetic oligonucleotide
  misc_feature 1..20: note = Target: FXN; (+) strand; PAM type: NNGRRT; PAM sequence: CAGAGT
  source 1..20: mol_type = other DNA
ctgcactccagcctgggcaa

SEQ ID NO: 6615 - DNA, 20 bp, synthetic construct
  misc_feature 1..20: note = Description of Artificial Sequence: Synthetic oligonucleotide
  misc_feature 1..20: note = Target: FXN; (+) strand; PAM type: NNGRRT; PAM sequence: GCGGGT
  source 1..20: mol_type = other DNA
caaacaaacaaataaatgag

SEQ ID NO: 6616 - DNA, 20 bp, synthetic construct
  misc_feature 1..20: note = Description of Artificial Sequence: Synthetic oligonucleotide
  misc_feature 1..20: note = Target: FXN; (+) strand; PAM type: NNGRRT; PAM sequence: GTGGAT
  source 1..20: mol_type = other DNA
caaacaaataaatgaggcgg

SEQ ID NO: 6617 - DNA, 20 bp, synthetic construct
  misc_feature 1..20: note = Description of Artificial Sequence: Synthetic oligonucleotide
  misc_feature 1..20: note = Target: FXN; (+) strand; PAM type: NNGRRT; PAM sequence: GAGAAT
  source 1..20: mol_type = other DNA
tactcgggaggctgaggcag

SEQ ID NO: 6618 - DNA, 20 bp, synthetic construct
  misc_feature 1..20: note = Description of Artificial Sequence: Synthetic oligonucleotide
  misc_feature 1..20: note = Target: FXN; (+) strand; PAM type: NNGRRT; PAM sequence: CAGAGT
  source 1..20: mol_type = other DNA
tcacacagctaggaagtggg

SEQ ID NO: 6619 - DNA, 20 bp, synthetic construct
  misc_feature 1..20: note = Description of Artificial Sequence: Synthetic oligonucleotide
  misc_feature 1..20: note = Target: FXN; (+) strand; PAM type: NNGRRT; PAM sequence: TAGAAT
  source 1..20: mol_type = other DNA
gctcccaagttcctcctgtt

SEQ ID NO: 6620 - DNA, 20 bp, synthetic construct
  misc_feature 1..20: note = Description of Artificial Sequence: Synthetic oligonucleotide
  misc_feature 1..20: note = Target: FXN; (+) strand; PAM type: NNGRRT; PAM sequence: TTGGGT
  source 1..20: mol_type = other DNA
ccaccaggctgcagtctccc

SEQ ID NO: 6621 - DNA, 20 bp, synthetic construct
  misc_feature 1..20: note = Description of Artificial Sequence: Synthetic oligonucleotide
  misc_feature 1..20: note = Target: FXN; (+) strand; PAM type: NNGRRT; PAM sequence: AGGGGT
  source 1..20: mol_type = other DNA
gctgcagtctcccttgggtc

SEQ ID NO: 6622 - DNA, 20 bp, synthetic construct
  misc_feature 1..20: note = Description of Artificial Sequence: Synthetic oligonucleotide
  misc_feature 1..20: note = Target: FXN; (+) strand; PAM type: NNGRRT; PAM sequence: ACGAAT
  source 1..20: mol_type = other DNA
tctccatttttgttaaatgc

SEQ ID NO: 6623 - DNA, 20 bp, synthetic construct
  misc_feature 1..20: note = Description of Artificial Sequence: Synthetic oligonucleotide
  misc_feature 1..20: note = Target: FXN; (+) strand; PAM type: NNGRRT; PAM sequence: AAGAGT
  source 1..20: mol_type = other DNA
ctctagctgctcccccacag

SEQ ID NO: 6624 - DNA, 20 bp, synthetic construct
  misc_feature 1..20: note = Description of Artificial Sequence: Synthetic oligonucleotide
  misc_feature 1..20: note = Target: FXN; (+) strand; PAM type: NNGRRT; PAM sequence: AGGGGT
  source 1..20: mol_type = other DNA
gcctgcggccagtggccacc

SEQ ID NO: 6625 - DNA, 20 bp, synthetic construct
  misc_feature 1..20: note = Description of Artificial Sequence: Synthetic oligonucleotide
  misc_feature 1..20: note = Target: FXN; (+) strand; PAM type: NNGRRT; PAM sequence: CCGGGT
  source 1..20: mol_type = other DNA
gcccaggcccagaccctcac

SEQ ID NO: 6626 - DNA, 20 bp, synthetic construct
  misc_feature 1..20: note = Description of Artificial Sequence: Synthetic oligonucleotide
  misc_feature 1..20: note = Target: FXN; (+) strand; PAM type: NNGRRT; PAM sequence: CAGAGT
  source 1..20: mol_type = other DNA
cacccgggtcccgcggccgg

SEQ ID NO: 6627 - DNA, 20 bp, synthetic construct
  misc_feature 1..20: note = Description of Artificial Sequence: Synthetic oligonucleotide
  misc_feature 1..20: note = Target: FXN; (+) strand; PAM type: NNGRRT; PAM sequence: CGGGGT
  source 1..20: mol_type = other DNA
cagggaggcgccgcgcacgc

SEQ ID NO: 6628 - DNA, 20 bp, synthetic construct
  misc_feature 1..20: note = Description of Artificial Sequence: Synthetic oligonucleotide
  misc_feature 1..20: note = Target: FXN; (+) strand; PAM type: NNGRRT; PAM sequence: CCGGGT
  source 1..20: mol_type = other DNA
ccgcgcacgccggggtcgct

SEQ ID NO: 6629 - DNA, 20 bp, synthetic construct
  misc_feature 1..20: note = Description of Artificial Sequence: Synthetic oligonucleotide
  misc_feature 1..20: note = Target: FXN; (+) strand; PAM type: NNGRRT; PAM sequence: GCGGGT
  source 1..20: mol_type = other DNA
ttttgtcctgcggtgcgact

SEQ ID NO: 6630 - DNA, 20 bp, synthetic construct
  misc_feature 1..20: note = Description of Artificial Sequence: Synthetic oligonucleotide
  misc_feature 1..20: note = Target: FXN; (+) strand; PAM type: NNGRRT; PAM sequence: AGGGGT
  source 1..20: mol_type = other DNA
ggtggaggggaccggttccg

SEQ ID NO: 6631 - DNA, 20 bp, synthetic construct
  misc_feature 1..20: note = Description of Artificial Sequence: Synthetic oligonucleotide
  misc_feature 1..20: note = Target: FXN; (+) strand; PAM type: NNGRRT; PAM sequence: CTGGAT
  source 1..20: mol_type = other DNA
cacacctaatattttcaagg

SEQ ID NO: 6632 - DNA, 20 bp, synthetic construct
  misc_feature 1..20: note = Description of Artificial Sequence: Synthetic oligonucleotide
  misc_feature 1..20: note = Target: FXN; (+) strand; PAM type: NNGRRT; PAM sequence: CAGAAT
  source 1..20: mol_type = other DNA
aggtgaaactttcagagctg

SEQ ID NO: 6633 - DNA, 20 bp, synthetic construct
  misc_feature 1..20: note = Description of Artificial Sequence: Synthetic oligonucleotide
  misc_feature 1..20: note = Target: FXN; (+) strand; PAM type: NNGRRT; PAM sequence: GGGGAT
  source 1..20: mol_type = other DNA
cgcagagctgtgtgaccttg

SEQ ID NO: 6634 - DNA, 20 bp, synthetic construct
  misc_feature 1..20: note = Description of Artificial Sequence: Synthetic oligonucleotide
  misc_feature 1..20: note = Target: FXN; (+) strand; PAM type: NNGRRT; PAM sequence: GAGGAT
  source 1..20: mol_type = other DNA
ccattttgcggacctggtgt

SEQ ID NO: 6635 - DNA, 20 bp, synthetic construct
  misc_feature 1..20: note = Description of Artificial Sequence: Synthetic oligonucleotide
  misc_feature 1..20: note = Target: FXN; (+) strand; PAM type: NNGRRT; PAM sequence: GGGAAT
  source 1..20: mol_type = other DNA
acctggtgtgaggattaaat

SEQ ID NO: 6636 - DNA, 20 bp, synthetic construct
  misc_feature 1..20: note = Description of Artificial Sequence: Synthetic oligonucleotide
  misc_feature 1..20: note = Target: FXN; (+) strand; PAM type: NNGRRT; PAM sequence: GGGGGT
  source 1..20: mol_type = other DNA
agttcccctttcttcctttg

SEQ ID NO: 6637 - DNA, 20 bp, synthetic construct
  misc_feature 1..20: note = Description of Artificial Sequence: Synthetic oligonucleotide
  misc_feature 1..20: note = Target: FXN; (+) strand; PAM type: NNGRRT; PAM sequence: AAGAAT
  source 1..20: mol_type = other DNA
gcttgaaaggaggaaaccca

SEQ ID NO: 6638 - DNA, 20 bp, synthetic construct
  misc_feature 1..20: note = Description of Artificial Sequence: Synthetic oligonucleotide
  misc_feature 1..20: note = Target: FXN; (+) strand; PAM type: NNGRRT; PAM sequence: GGGGAT
  source 1..20: mol_type = other DNA
gaaacccaaagaatggctgt

SEQ ID NO: 6639 - DNA, 20 bp, synthetic construct
  misc_feature 1..20: note = Description of Artificial Sequence: Synthetic oligonucleotide
  misc_feature 1..20: note = Target: FXN; (+) strand; PAM type: NNGRRT; PAM sequence: GAGGGT
  source 1..20: mol_type = other DNA
gggaggacatggtatttaat

SEQ ID NO: 6640 - DNA, 20 bp, synthetic construct
  misc_feature 1..20: note = Description of Artificial Sequence: Synthetic oligonucleotide
  misc_feature 1..20: note = Target: FXN; (+) strand; PAM type: NNGRRT; PAM sequence: GAGGGT
  source 1..20: mol_type = other DNA
aagatgccaaggaagtggta

SEQ ID NO: 6641 - DNA, 20 bp, synthetic construct
  misc_feature 1..20: note = Description of Artificial Sequence: Synthetic oligonucleotide
  misc_feature 1..20: note = Target: FXN; (+) strand; PAM type: NNGRRT; PAM sequence: GGGGAT
  source 1..20: mol_type = other DNA
caaaggccaggaaggcggaa

SEQ ID NO: 6642 - DNA, 20 bp, synthetic construct
  misc_feature 1..20: note = Description of Artificial Sequence: Synthetic oligonucleotide
  misc_feature 1..20: note = Target: FXN; (+) strand; PAM type: NNGRRT; PAM sequence: CAGAGT
  source 1..20: mol_type = other DNA
aaggcggaaggggatccctt

SEQ ID NO: 6643 - DNA, 20 bp, synthetic construct
  misc_feature 1..20: note = Description of Artificial Sequence: Synthetic oligonucleotide
  misc_feature 1..20: note = Target: FXN; (+) strand; PAM type: NNGRRT; PAM sequence: CGGAGT
  source 1..20: mol_type = other DNA
gccatatttgtgttgctctc

SEQ ID NO: 6644 - DNA, 20 bp, synthetic construct
  misc_feature 1..20: note = Description of Artificial Sequence: Synthetic oligonucleotide
  misc_feature 1..20: note = Target: FXN; (+) strand; PAM type: NNGRRT; PAM sequence: TGGGAT
  source 1..20: mol_type = other DNA
cattgtgtttgaagaaactt

SEQ ID NO: 6645 - DNA, 20 bp, synthetic construct
  misc_feature 1..20: note = Description of Artificial Sequence: Synthetic oligonucleotide
  misc_feature 1..20: note = Target: FXN; (+) strand; PAM type: NNGRRT; PAM sequence: ATGGAT
  source 1..20: mol_type = other DNA
taaaagttaggacttagaaa

SEQ ID NO: 6646 - DNA, 20 bp, synthetic construct
  misc_feature 1..20: note = Description of Artificial Sequence: Synthetic oligonucleotide
  misc_feature 1..20: note = Target: FXN; (+) strand; PAM type: NNGRRT; PAM sequence: GTGGAT
  source 1..20: mol_type = other DNA
actttgggaggcctaggaag

SEQ ID NO: 6647 - DNA, 20 bp, synthetic construct
  misc_feature 1..20: note = Description of Artificial Sequence: Synthetic oligonucleotide
  misc_feature 1..20: note = Target: FXN; (+) strand; PAM type: NNGRRT; PAM sequence: CGGAGT
  source 1..20: mol_type = other DNA
aaggtggatcacctgaggtc

SEQ ID NO: 6648 - DNA, 20 bp, synthetic construct
  misc_feature 1..20: note = Description of Artificial Sequence: Synthetic oligonucleotide
  misc_feature 1..20: note = Target: FXN; (+) strand; PAM type: NNGRRT; PAM sequence: GAGAAT
  source 1..20: mol_type = other DNA
tactccagaggctgcggcag

SEQ ID NO: 6649 - DNA, 20 bp, synthetic construct
  misc_feature 1..20: note = Description of Artificial Sequence: Synthetic oligonucleotide
  misc_feature 1..20: note = Target: FXN; (+) strand; PAM type: NNGRRT; PAM sequence: ATGGAT
  source 1..20: mol_type = other DNA
aaataaaaataaaaaataaa

SEQ ID NO: 6650 - DNA, 20 bp, synthetic construct
  misc_feature 1..20: note = Description of Artificial Sequence: Synthetic oligonucleotide
  misc_feature 1..20: note = Target: FXN; (+) strand; PAM type: NNGRRT; PAM sequence: ATGGGT
  source 1..20: mol_type = other DNA
cccctgcctgtgtggacagc

SEQ ID NO: 6651 - DNA, 20 bp, synthetic construct
  misc_feature 1..20: note = Description of Artificial Sequence: Synthetic oligonucleotide
  misc_feature 1..20: note = Target: FXN; (+) strand; PAM type: NNGRRT; PAM sequence: CAGAGT
  source 1..20: mol_type = other DNA
tggacagcatgggttgtcag

SEQ ID NO: 6652 - DNA, 20 bp, synthetic construct
  misc_feature 1..20: note = Description of Artificial Sequence: Synthetic oligonucleotide
  misc_feature 1..20: note = Target: FXN; (+) strand; PAM type: NNGRRT; PAM sequence: CAGAGT
  source 1..20: mol_type = other DNA
tttgttttgtttttttgaga

SEQ ID NO: 6653 - DNA, 20 bp, synthetic construct
  misc_feature 1..20: note = Description of Artificial Sequence: Synthetic oligonucleotide
  misc_feature 1..20: note = Target: FXN; (+) strand; PAM type: NNGRRT; PAM sequence: TGGAGT
  source 1..20: mol_type = other DNA
ttccctcttgttgcccaggc

SEQ ID NO: 6654 - DNA, 20 bp, synthetic construct
  misc_feature 1..20: note = Description of Artificial Sequence: Synthetic oligonucleotide
  misc_feature 1..20: note = Target: FXN; (+) strand; PAM type: NNGRRT; PAM sequence: CTGGGT
  source 1..20: mol_type = other DNA
ctcactgcaacctctgcctc

SEQ ID NO: 6655 - DNA, 20 bp, synthetic construct
  misc_feature 1..20: note = Description of Artificial Sequence: Synthetic oligonucleotide
  misc_feature 1..20: note = Target: FXN; (+) strand; PAM type: NNGRRT; PAM sequence: CCGAGT
  source 1..20: mol_type = other DNA
gattctcctgcctcagcctc

SEQ ID NO: 6656 - DNA, 20 bp, synthetic construct
  misc_feature 1..20: note = Description of Artificial Sequence: Synthetic oligonucleotide
  misc_feature 1..20: note = Target: FXN; (+) strand; PAM type: NNGRRT; PAM sequence: TGGGAT
  source 1..20: mol_type = other DNA
gcctcagcctcccgagtagc

SEQ ID NO: 6657 - DNA, 20 bp, synthetic construct
  misc_feature 1..20: note = Description of Artificial Sequence: Synthetic oligonucleotide
  misc_feature 1..20: note = Target: FXN; (+) strand; PAM type: NNGRRT; PAM sequence: TGGAAT
  source 1..20: mol_type = other DNA
acctcgccctcccaaagtgc

SEQ ID NO: 6658 - DNA, 20 bp, synthetic construct
  misc_feature 1..20: note = Description of Artificial Sequence: Synthetic oligonucleotide
  misc_feature 1..20: note = Target: FXN; (+) strand; PAM type: NNGRRT; PAM sequence: CAGAGT
  source 1..20: mol_type = other DNA
ccaccgcgtctggccatcag

SEQ ID NO: 6659 - DNA, 20 bp, synthetic construct
  misc_feature 1..20: note = Description of Artificial Sequence: Synthetic oligonucleotide
  misc_feature 1..20: note = Target: FXN; (+) strand; PAM type: NNGRRT; PAM sequence: GAGAAT
  source 1..20: mol_type = other DNA
cagcagagtttttaatttag

SEQ ID NO: 6660 - DNA, 20 bp, synthetic construct
  misc_feature 1..20: note = Description of Artificial Sequence: Synthetic oligonucleotide
  misc_feature 1..20: note = Target: FXN; (+) strand; PAM type: NNGRRT; PAM sequence: CTGGGT
  source 1..20: mol_type = other DNA
tgccgcccaggaggtggaca

SEQ ID NO: 6661 - DNA, 20 bp, synthetic construct
  misc_feature 1..20: note = Description of Artificial Sequence: Synthetic oligonucleotide
  misc_feature 1..20: note = Target: FXN; (+) strand; PAM type: NNGRRT; PAM sequence: CTGGAT
  source 1..20: mol_type = other DNA
aggaggtggacactgggttt

SEQ ID NO: 6662 - DNA, 20 bp, synthetic construct
  misc_feature 1..20: note = Description of Artificial Sequence: Synthetic oligonucleotide
  misc_feature 1..20: note = Target: FXN; (+) strand; PAM type: NNGRRT; PAM sequence: CTGAAT
  source 1..20: mol_type = other DNA
tgggcctctttttttctata

SEQ ID NO: 6663 - DNA, 20 bp, synthetic construct
  misc_feature 1..20: note = Description of Artificial Sequence: Synthetic oligonucleotide
  misc_feature 1..20: note = Target: FXN; (+) strand; PAM type: NNGRRT; PAM sequence: TTGGGT
  source 1..20: mol_type = other DNA
ccatagttcccttgcacatc

SEQ ID NO: 6664 - DNA, 20 bp, synthetic construct
  misc_feature 1..20: note = Description of Artificial Sequence: Synthetic oligonucleotide
  misc_feature 1..20: note = Target: FXN; (+) strand; PAM type: NNGRRT; PAM sequence: AGGAGT
  source 1..20: mol_type = other DNA
ttgcacatcttgggtatttg

SEQ ID NO: 6665 - DNA, 20 bp, synthetic construct
  misc_feature 1..20: note = Description of Artificial Sequence: Synthetic oligonucleotide
  misc_feature 1..20: note = Target: FXN; (+) strand; PAM type: NNGRRT; PAM sequence: TTGGGT
  source 1..20: mol_type = other DNA
catcttgggtatttgaggag

SEQ ID NO: 6666 - DNA, 20 bp, synthetic construct
  misc_feature 1..20: note = Description of Artificial Sequence: Synthetic oligonucleotide
  misc_feature 1..20: note = Target: FXN; (+) strand; PAM type: NNGRRT; PAM sequence: GTGGGT
  source 1..20: mol_type = other DNA
ttgggtatttgaggagttgg

SEQ ID NO: 6667 - DNA, 20 bp, synthetic construct
  misc_feature 1..20: note = Description of Artificial Sequence: Synthetic oligonucleotide
  misc_feature 1..20: note = Target: FXN; (+) strand; PAM type: NNGRRT; PAM sequence: CTGGAT
  source 1..20: mol_type = other DNA
attttaaagccctgactgtc

SEQ ID NO: 6668 - DNA, 20 bp, synthetic construct
  misc_feature 1..20: note = Description of Artificial Sequence: Synthetic oligonucleotide
  misc_feature 1..20: note = Target: FXN; (+) strand; PAM type: NNGRRT; PAM sequence: CTGAGT
  source 1..20: mol_type = other DNA
tctccaaaattcatcagaaa

SEQ ID NO: 6669 - DNA, 20 bp, synthetic construct
  misc_feature 1..20: note = Description of Artificial Sequence: Synthetic oligonucleotide
  misc_feature 1..20: note = Target: FXN; (+) strand; PAM type: NNGRRT; PAM sequence: CAGAAT
  source 1..20: mol_type = other DNA
aagcagctgttcaacagaaa

SEQ ID NO: 6670 - DNA, 20 bp, synthetic construct
  misc_feature 1..20: note = Description of Artificial Sequence: Synthetic oligonucleotide
  misc_feature 1..20: note = Target: FXN; (+) strand; PAM type: NNGRRT; PAM sequence: GCGAGT
  source 1..20: mol_type = other DNA
caggactttgggaggccgag

SEQ ID NO: 6671 - DNA, 20 bp, synthetic construct
  misc_feature 1..20: note = Description of Artificial Sequence: Synthetic oligonucleotide
  misc_feature 1..20: note = Target: FXN; (+) strand; PAM type: NNGRRT; PAM sequence: GTGGAT
  source 1..20: mol_type = other DNA
actttgggaggccgaggcga

SEQ ID NO: 6672 - DNA, 20 bp, synthetic construct
  misc_feature 1..20: note = Description of Artificial Sequence: Synthetic oligonucleotide
  misc_feature 1..20: note = Target: FXN; (+) strand; PAM type: NNGRRT; PAM sequence: AGGAGT
  source 1..20: mol_type = other DNA
cgagtggatcatctgagatc

SEQ ID NO: 6673 - DNA, 20 bp, synthetic construct
  misc_feature 1..20: note = Description of Artificial Sequence: Synthetic oligonucleotide
  misc_feature 1..20: note = Target: FXN; (+) strand; PAM type: NNGRRT; PAM sequence: GTGGGT
  source 1..20: mol_type = other DNA
aaaactagctcagcatggtg

SEQ ID NO: 6674 - DNA, 20 bp, synthetic construct
  misc_feature 1..20: note = Description of Artificial Sequence: Synthetic oligonucleotide
  misc_feature 1..20: note = Target: FXN; (+) strand; PAM type: NNGRRT; PAM sequence: GAGAAT
  source 1..20: mol_type = other DNA
tactcgggaggctgaggcat

SEQ ID NO: 6675 - DNA, 20 bp, synthetic construct
  misc_feature 1..20: note = Description of Artificial Sequence: Synthetic oligonucleotide
  misc_feature 1..20: note = Target: FXN; (+) strand; PAM type: NNGRRT; PAM sequence: GGGGAT
  source 1..20: mol_type = other DNA
tgcagtgagccaagattttg

SEQ ID NO: 6676 - DNA, 20 bp, synthetic construct
  misc_feature 1..20: note = Description of Artificial Sequence: Synthetic oligonucleotide
  misc_feature 1..20: note = Target: FXN; (+) strand; PAM type: NNGRRT; PAM sequence: CTGGGT
  source 1..20: mol_type = other DNA
acacttaaatgtctcctagg

SEQ ID NO: 6677 - DNA, 20 bp, synthetic construct
  misc_feature 1..20: note = Description of Artificial Sequence: Synthetic oligonucleotide
  misc_feature 1..20: note = Target: FXN; (+) strand; PAM type: NNGRRT; PAM sequence: GCGGAT
  source 1..20: mol_type = other DNA
actttgggaggctgagatgg

SEQ ID NO: 6678 - DNA, 20 bp, synthetic construct
  misc_feature 1..20: note = Description of Artificial Sequence: Synthetic oligonucleotide
  misc_feature 1..20: note = Target: FXN; (+) strand; PAM type: NNGRRT; PAM sequence: AGGAGT
  source 1..20: mol_type = other DNA
tgggcggatcacctgaggtc

SEQ ID NO: 6679 - DNA, 20 bp, synthetic construct
  misc_feature 1..20: note = Description of Artificial Sequence: Synthetic oligonucleotide
  misc_feature 1..20: note = Target: FXN; (+) strand; PAM type: NNGRRT; PAM sequence: CTGGAT
  source 1..20: mol_type = other DNA
actaaaaatacaaaaattag

SEQ ID NO: 6680 - DNA, 20 bp, synthetic construct
  misc_feature 1..20: note = Description of Artificial Sequence: Synthetic oligonucleotide
  misc_feature 1..20: note = Target: FXN; (+) strand; PAM type: NNGRRT; PAM sequence: CAGGAT
  source 1..20: mol_type = other DNA
agctactcaggaggctgagg

SEQ ID NO: 6681 - DNA, 20 bp, synthetic construct
  misc_feature 1..20: note = Description of Artificial Sequence: Synthetic oligonucleotide
  misc_feature 1..20: note = Target: FXN; (+) strand; PAM type: NNGRRT; PAM sequence: AAGAAT
  source 1..20: mol_type = other DNA
tctggctactcagcagaacc

SEQ ID NO: 6682 - DNA, 20 bp, synthetic construct
  misc_feature 1..20: note = Description of Artificial Sequence: Synthetic oligonucleotide
  misc_feature 1..20: note = Target: FXN; (+) strand; PAM type: NNGRRT; PAM sequence: AGGGAT
  source 1..20: mol_type = other DNA
cagcctatgttttttgatgg

SEQ ID NO: 6683 - DNA, 20 bp, synthetic construct
  misc_feature 1..20: note = Description of Artificial Sequence: Synthetic oligonucleotide
  misc_feature 1..20: note = Target: FXN; (+) strand; PAM type: NNGRRT; PAM sequence: CTGGAT
  source 1..20: mol_type = other DNA
cagcttcgaggaggagataa

SEQ ID NO: 6684 - DNA, 20 bp, synthetic construct
  misc_feature 1..20: note = Description of Artificial Sequence: Synthetic oligonucleotide
  misc_feature 1..20: note = Target: FXN; (+) strand; PAM type: NNGRRT; PAM sequence: AGGGAT
  source 1..20: mol_type = other DNA
tgtcttagtccatttgatgg

SEQ ID NO: 6685 - DNA, 20 bp, synthetic construct
  misc_feature 1..20: note = Description of Artificial Sequence: Synthetic oligonucleotide
  misc_feature 1..20: note = Target: FXN; (+) strand; PAM type: NNGRRT; PAM sequence: CTGGAT
  source 1..20: mol_type = other DNA
cagcttcgagaaggagataa

SEQ ID NO: 6686 - DNA, 20 bp, synthetic construct
  misc_feature 1..20: note = Description of Artificial Sequence: Synthetic oligonucleotide
  misc_feature 1..20: note = Target: FXN; (+) strand; PAM type: NNGRRT; PAM sequence: CAGAAT
  source 1..20: mol_type = other DNA
ccattttctgttgcttgtga

SEQ ID NO: 6687 - DNA, 20 bp, synthetic construct
  misc_feature 1..20: note = Description of Artificial Sequence: Synthetic oligonucleotide
  misc_feature 1..20: note = Target: FXN; (+) strand; PAM type: NNGRRT; PAM sequence: CAGAGT
  source 1..20: mol_type = other DNA
tcttgctggtggggactttg

SEQ ID NO: 6688 - DNA, 20 bp, synthetic construct
  misc_feature 1..20: note = Description of Artificial Sequence: Synthetic oligonucleotide
  misc_feature 1..20: note = Target: FXN; (+) strand; PAM type: NNGRRT; PAM sequence: CTGAGT
  source 1..20: mol_type = other DNA
gggcgtcatatggtaagggg

SEQ ID NO: 6689 - DNA, 20 bp, synthetic construct
  misc_feature 1..20: note = Description of Artificial Sequence: Synthetic oligonucleotide
  misc_feature 1..20: note = Target: FXN; (+) strand; PAM type: NNGRRT; PAM sequence: ATGAAT
  source 1..20: mol_type = other DNA
ccatgataacccattaatct

SEQ ID NO: 6690 - DNA, 20 bp, synthetic construct
  misc_feature 1..20: note = Description of Artificial Sequence: Synthetic oligonucleotide
  misc_feature 1..20: note = Target: FXN; (+) strand; PAM type: NNGRRT; PAM sequence: ATGGAT
  source 1..20: mol_type = other DNA
gataacccattaatctatga

SEQ ID NO: 6691 - DNA, 20 bp, synthetic construct
  misc_feature 1..20: note = Description of Artificial Sequence: Synthetic oligonucleotide
  misc_feature 1..20: note = Target: FXN; (+) strand; PAM type: NNGRRT; PAM sequence: GGGAAT
  source 1..20: mol_type = other DNA
cctctcaatactgccacatc

SEQ ID NO: 6692 - DNA, 20 bp, synthetic construct
  misc_feature 1..20: note = Description of Artificial Sequence: Synthetic oligonucleotide
  misc_feature 1..20: note = Target: FXN; (+) strand; PAM type: NNGRRT; PAM sequence: ATGAGT
  source 1..20: mol_type = other DNA
atcgggaattaagtttcaac

SEQ ID NO: 6693 - DNA, 20 bp, synthetic construct
  misc_feature 1..20: note = Description of Artificial Sequence: Synthetic oligonucleotide
  misc_feature 1..20: note = Target: FXN; (+) strand; PAM type: NNGRRT; PAM sequence: AAGGAT
  source 1..20: mol_type = other DNA
acacaagtttacacatagaa

SEQ ID NO: 6694 - DNA, 20 bp, synthetic construct
  misc_feature 1..20: note = Description of Artificial Sequence: Synthetic oligonucleotide
  misc_feature 1..20: note = Target: FXN; (+) strand; PAM type: NNGRRT; PAM sequence: GTGGAT
  source 1..20: mol_type = other DNA
actttgggaggccgaggcag

SEQ ID NO: 6695 - DNA, 20 bp, synthetic construct
  misc_feature 1..20: note = Description of Artificial Sequence: Synthetic oligonucleotide
  misc_feature 1..20: note = Target: FXN; (+) strand; PAM type: NNGRRT; PAM sequence: ACGAGT
  source 1..20: mol_type = other DNA
gaggccgaggcaggtggatc

SEQ ID NO: 6696 - DNA, 20 bp, synthetic construct
  misc_feature 1..20: note = Description of Artificial Sequence: Synthetic oligonucleotide
  misc_feature 1..20: note = Target: FXN; (+) strand; PAM type: NNGRRT; PAM sequence: ACGGGT
  source 1..20: mol_type = other DNA
aaaattagccgggcgtggtg

SEQ ID NO: 6697 - DNA, 20 bp, synthetic construct
  misc_feature 1..20: note = Description of Artificial Sequence: Synthetic oligonucleotide
  misc_feature 1..20: note = Target: FXN; (+) strand; PAM type: NNGRRT; PAM sequence: GAGAAT
  source 1..20: mol_type = other DNA
tactcgggacgctgaggcag

SEQ ID NO: 6698 - DNA, 20 bp, synthetic construct
  misc_feature 1..20: note = Description of Artificial Sequence: Synthetic oligonucleotide
  misc_feature 1..20: note = Target: FXN; (+) strand; PAM type: NNGRRT; PAM sequence: CTGGGT
  source 1..20: mol_type = other DNA
tcgtgccactgcactccagc

SEQ ID NO: 6699 - DNA, 20 bp, synthetic construct
  misc_feature 1..20: note = Description of Artificial Sequence: Synthetic oligonucleotide
  misc_feature 1..20: note = Target: FXN; (+) strand; PAM type: NNGRRT; PAM sequence: GAGGGT
  source 1..20: mol_type = other DNA
cttgggaggtgatgaggtat

SEQ ID NO: 6700 - DNA, 20 bp, synthetic construct
  misc_feature 1..20: note = Description of Artificial Sequence: Synthetic oligonucleotide
  misc_feature 1..20: note = Target: FXN; (+) strand; PAM type: NNGRRT; PAM sequence: TGGGAT
  source 1..20: mol_type = other DNA
gagggtggagcccatatgat

SEQ ID NO: 6701 - DNA, 20 bp, synthetic construct
  misc_feature 1..20: note = Description of Artificial Sequence: Synthetic oligonucleotide
  misc_feature 1..20: note = Target: FXN; (+) strand; PAM type: NNGRRT; PAM sequence: TTGGAT
  source 1..20: mol_type = other DNA
aagctgttggtgcattgatc

SEQ ID NO: 6702 - DNA, 20 bp, synthetic construct
  misc_feature 1..20: note = Description of Artificial Sequence: Synthetic oligonucleotide
  misc_feature 1..20: note = Target: FXN; (+) strand; PAM type: NNGRRT; PAM sequence: TAGAAT
  source 1..20: mol_type = other DNA
cctgacaccaggttaagaga

SEQ ID NO: 6703 - DNA, 20 bp, synthetic construct
  misc_feature 1..20: note = Description of Artificial Sequence: Synthetic oligonucleotide
  misc_feature 1..20: note = Target: FXN; (+) strand; PAM type: NNGRRT; PAM sequence: AGGAAT
  source 1..20: mol_type = other DNA
cactgccctgtcctccctgg

SEQ ID NO: 6704 - DNA, 20 bp, synthetic construct
  misc_feature 1..20: note = Description of Artificial Sequence: Synthetic oligonucleotide
  misc_feature 1..20: note = Target: FXN; (+) strand; PAM type: NNGRRT; PAM sequence: CCGAAT
  source 1..20: mol_type = other DNA
ccctggaggaatctgccagc

SEQ ID NO: 6705 - DNA, 20 bp, synthetic construct
  misc_feature 1..20: note = Description of Artificial Sequence: Synthetic oligonucleotide
  misc_feature 1..20: note = Target: FXN; (+) strand; PAM type: NNGRRT; PAM sequence: TAGAGT
  source 1..20: mol_type = other DNA
tcatcgtaccctccttttct

SEQ ID NO: 6706 - DNA, 20 bp, synthetic construct
  misc_feature 1..20: note = Description of Artificial Sequence: Synthetic oligonucleotide
  misc_feature 1..20: note = Target: FXN; (+) strand; PAM type: NNGRRT; PAM sequence: CTGGAT
  source 1..20: mol_type = other DNA
tcctttatttgttctcactg

SEQ ID NO: 6707 - DNA, 20 bp, synthetic construct
  misc_feature 1..20: note = Description of Artificial Sequence: Synthetic oligonucleotide
  misc_feature 1..20: note = Target: FXN; (+) strand; PAM type: NNGRRT; PAM sequence: TTGGGT
  source 1..20: mol_type = other DNA
cactgctggatagtatctgg

SEQ ID NO: 6708 - DNA, 20 bp, synthetic construct
  misc_feature 1..20: note = Description of Artificial Sequence: Synthetic oligonucleotide
  misc_feature 1..20: note = Target: FXN; (+) strand; PAM type: NNGRRT; PAM sequence: GTGAAT
  source 1..20: mol_type = other DNA
tggacagaagttcctttcag

SEQ ID NO: 6709 - DNA, 20 bp, synthetic construct
  misc_feature 1..20: note = Description of Artificial Sequence: Synthetic oligonucleotide
  misc_feature 1..20: note = Target: FXN; (+) strand; PAM type: NNGRRT; PAM sequence: CAGAAT
  source 1..20: mol_type = other DNA
ttcctttcaggtgaatttct

SEQ ID NO: 6710 - DNA, 20 bp, synthetic construct
  misc_feature 1..20: note = Description of Artificial Sequence: Synthetic oligonucleotide
  misc_feature 1..20: note = Target: FXN; (+) strand; PAM type: NNGRRT; PAM sequence: TGGAAT
  source 1..20: mol_type = other DNA
ttcaggtgaatttctcagaa

SEQ ID NO: 6711 - DNA, 20 bp, synthetic construct
  misc_feature 1..20: note = Description of Artificial Sequence: Synthetic oligonucleotide
  misc_feature 1..20: note = Target: FXN; (+) strand; PAM type: NNGRRT; PAM sequence: ATGGGT
  source 1..20: mol_type = other DNA
ttcatcctcccctgcgaggt

SEQ ID NO: 6712 - DNA, 20 bp, synthetic construct
  misc_feature 1..20: note = Description of Artificial Sequence: Synthetic oligonucleotide
  misc_feature 1..20: note = Target: FXN; (+) strand; PAM type: NNGRRT; PAM sequence: GGGGGT
  source 1..20: mol_type = other DNA
tgctgtggtttgacagggcc

SEQ ID NO: 6713 - DNA, 20 bp, synthetic construct
  misc_feature 1..20: note = Description of Artificial Sequence: Synthetic oligonucleotide
  misc_feature 1..20: note = Target: FXN; (+) strand; PAM type: NNGRRT; PAM sequence: GGGGGT
  source 1..20: mol_type = other DNA
atccaggccagtccttacca

SEQ ID NO: 6714 - DNA, 20 bp, synthetic construct
  misc_feature 1..20: note = Description of Artificial Sequence: Synthetic oligonucleotide
  misc_feature 1..20: note = Target: FXN; (+) strand; PAM type: NNGRRT; PAM sequence: TTGGGT
  source 1..20: mol_type = other DNA
taccagggggtaggcaatga

SEQ ID NO: 6715 - DNA, 20 bp, synthetic construct
  misc_feature 1..20: note = Description of Artificial Sequence: Synthetic oligonucleotide
  misc_feature 1..20: note = Target: FXN; (+) strand; PAM type: NNGRRT; PAM sequence: GTGAGT
  source 1..20: mol_type = other DNA
atcccatgagcaggcactgt

SEQ ID NO: 6716 - DNA, 20 bp, synthetic construct
  misc_feature 1..20: note = Description of Artificial Sequence: Synthetic oligonucleotide
  misc_feature 1..20: note = Target: FXN; (+) strand; PAM type: NNGRRT; PAM sequence: ACGGGT
  source 1..20: mol_type = other DNA
gacttgtggtccaagggctc

SEQ ID NO: 6717 - DNA, 20 bp, synthetic construct
  misc_feature 1..20: note = Description of Artificial Sequence: Synthetic oligonucleotide
  misc_feature 1..20: note = Target: FXN; (+) strand; PAM type: NNGRRT; PAM sequence: TGGAGT
  source 1..20: mol_type = other DNA
ccaagggctcacgggtgacc

SEQ ID NO: 6718 - DNA, 20 bp, synthetic construct
  misc_feature 1..20: note = Description of Artificial Sequence: Synthetic oligonucleotide
  misc_feature 1..20: note = Target: FXN; (+) strand; PAM type: NNGRRT; PAM sequence: GTGGGT
  source 1..20: mol_type = other DNA
cagcactttgggaggccaag

SEQ ID NO: 6719 - DNA, 20 bp, synthetic construct
  misc_feature 1..20: note = Description of Artificial Sequence: Synthetic oligonucleotide
  misc_feature 1..20: note = Target: FXN; (+) strand; PAM type: NNGRRT; PAM sequence: GTGGAT
  source 1..20: mol_type = other DNA
actttgggaggccaaggtgg

SEQ ID NO: 6720 - DNA, 20 bp, synthetic construct
  misc_feature 1..20: note = Description of Artificial Sequence: Synthetic oligonucleotide
  misc_feature 1..20: note = Target: FXN; (+) strand; PAM type: NNGRRT; PAM sequence: AGGAGT
  source 1..20: mol_type = other DNA
ggtgggtggatcatgaggtc

SEQ ID NO: 6721 - DNA, 20 bp, synthetic construct
  misc_feature 1..20: note = Description of Artificial Sequence: Synthetic oligonucleotide
  misc_feature 1..20: note = Target: FXN; (+) strand; PAM type: NNGRRT; PAM sequence: GAGAAT
  source 1..20: mol_type = other DNA
tactcaggaggctgaggcag

SEQ ID NO: 6722 - DNA, 20 bp, synthetic construct
  misc_feature 1..20: note = Description of Artificial Sequence: Synthetic oligonucleotide
  misc_feature 1..20: note = Target: FXN; (+) strand; PAM type: NNGRRT; PAM sequence: CAGAAT
  source 1..20: mol_type = other DNA
tttgcctccctcaagcagaa

SEQ ID NO: 6723 - DNA, 20 bp, synthetic construct
  misc_feature 1..20: note = Description of Artificial Sequence: Synthetic oligonucleotide
  misc_feature 1..20: note = Target: FXN; (+) strand; PAM type: NNGRRT; PAM sequence: CTGAAT
  source 1..20: mol_type = other DNA
tccattcttttgttcagagc

SEQ ID NO: 6724 - DNA, 20 bp, synthetic construct
  misc_feature 1..20: note = Description of Artificial Sequence: Synthetic oligonucleotide
  misc_feature 1..20: note = Target: FXN; (+) strand; PAM type: NNGRRT; PAM sequence: TGGGGT
  source 1..20: mol_type = other DNA
ataccctcaggctctgtact

SEQ ID NO: 6725 - DNA, 20 bp, synthetic construct
  misc_feature 1..20: note = Description of Artificial Sequence: Synthetic oligonucleotide
  misc_feature 1..20: note = Target: FXN; (+) strand; PAM type: NNGRRT; PAM sequence: GTGAGT
  source 1..20: mol_type = other DNA
tcacggttgtgaggtttgtt

SEQ ID NO: 6726 - DNA, 20 bp, synthetic construct
  misc_feature 1..20: note = Description of Artificial Sequence: Synthetic oligonucleotide
  misc_feature 1..20: note = Target: FXN; (+) strand; PAM type: NNGRRT; PAM sequence: AGGAGT
  source 1..20: mol_type = other DNA
accacgatcccttccttcag

SEQ ID NO: 6727 - DNA, 20 bp, synthetic construct
  misc_feature 1..20: note = Description of Artificial Sequence: Synthetic oligonucleotide
  misc_feature 1..20: note = Target: FXN; (+) strand; PAM type: NNGRRT; PAM sequence: AGGAAT
  source 1..20: mol_type = other DNA
aaaggtttagcagttgcccg

SEQ ID NO: 6728 - DNA, 20 bp, synthetic construct
  misc_feature 1..20: note = Description of Artificial Sequence: Synthetic oligonucleotide
  misc_feature 1..20: note = Target: FXN; (+) strand; PAM type: NNGRRT; PAM sequence: TAGAAT
  source 1..20: mol_type = other DNA
attaaattggcaaaagcagg

SEQ ID NO: 6729 - DNA, 20 bp, synthetic construct
  misc_feature 1..20: note = Description of Artificial Sequence: Synthetic oligonucleotide
  misc_feature 1..20: note = Target: FXN; (+) strand; PAM type: NNGRRT; PAM sequence: AGGAGT
  source 1..20: mol_type = other DNA
agcaggtagaatataaagca

SEQ ID NO: 6730 - DNA, 20 bp, synthetic construct
  misc_feature 1..20: note = Description of Artificial Sequence: Synthetic oligonucleotide
  misc_feature 1..20: note = Target: FXN; (+) strand; PAM type: NNGRRT; PAM sequence: AGGAGT
  source 1..20: mol_type = other DNA
acttctacttgtgcctttga

SEQ ID NO: 6731 - DNA, 20 bp, synthetic construct
  misc_feature 1..20: note = Description of Artificial Sequence: Synthetic oligonucleotide
  misc_feature 1..20: note = Target: FXN; (+) strand; PAM type: NNGRRT; PAM sequence: CAGGAT
  source 1..20: mol_type = other DNA
acaactaaggtttgaggggc

SEQ ID NO: 6732 - DNA, 20 bp, synthetic construct
  misc_feature 1..20: note = Description of Artificial Sequence: Synthetic oligonucleotide
  misc_feature 1..20: note = Target: FXN; (+) strand; PAM type: NNGRRT; PAM sequence: TTGGAT
  source 1..20: mol_type = other DNA
acattctcagacacttttcc

SEQ ID NO: 6733 - DNA, 20 bp, synthetic construct
  misc_feature 1..20: note = Description of Artificial Sequence: Synthetic oligonucleotide
  misc_feature 1..20: note = Target: FXN; (+) strand; PAM type: NNGRRT; PAM sequence: TTGGGT
  source 1..20: mol_type = other DNA
agactctggggccagacagc

SEQ ID NO: 6734 - DNA, 20 bp, synthetic construct
  misc_feature 1..20: note = Description of Artificial Sequence: Synthetic oligonucleotide
  misc_feature 1..20: note = Target: FXN; (+) strand; PAM type: NNGRRT; PAM sequence: AAGAGT
  source 1..20: mol_type = other DNA
atagttgatcctcattcgtt

SEQ ID NO: 6735 - DNA, 20 bp, synthetic construct
  misc_feature 1..20: note = Description of Artificial Sequence: Synthetic oligonucleotide
  misc_feature 1..20: note = Target: FXN; (+) strand; PAM type: NNGRRT; PAM sequence: TGGGGT
  source 1..20: mol_type = other DNA
aatcagtacccctagccttt

SEQ ID NO: 6736 - DNA, 20 bp, synthetic construct
  misc_feature 1..20: note = Description of Artificial Sequence: Synthetic oligonucleotide
  misc_feature 1..20: note = Target: FXN; (+) strand; PAM type: NNGRRT; PAM sequence: ATGAGT
  source 1..20: mol_type = other DNA
ttagagaagctttgtcaggc

SEQ ID NO: 6737 - DNA, 20 bp, synthetic construct
  misc_feature 1..20: note = Description of Artificial Sequence: Synthetic oligonucleotide
  misc_feature 1..20: note = Target: FXN; (+) strand; PAM type: NNGRRT; PAM sequence: CAGGGT
  source 1..20: mol_type = other DNA
gttgttgttgttgtttgaga

SEQ ID NO: 6738 - DNA, 20 bp, synthetic construct
  misc_feature 1..20: note = Description of Artificial Sequence: Synthetic oligonucleotide
  misc_feature 1..20: note = Target: FXN; (+) strand; PAM type: NNGRRT; PAM sequence: TGGAGT
  source 1..20: mol_type = other DNA
ccctctgttgcccaggctgc

SEQ ID NO: 6739 - DNA, 20 bp, synthetic construct
  misc_feature 1..20: note = Description of Artificial Sequence: Synthetic oligonucleotide
  misc_feature 1..20: note = Target: FXN; (+) strand; PAM type: NNGRRT; PAM sequence: CTGAGT
  source 1..20: mol_type = other DNA
aatcctcccacctcggcctc

SEQ ID NO: 6740 - DNA, 20 bp, synthetic construct
  misc_feature 1..20: note = Description of Artificial Sequence: Synthetic oligonucleotide
  misc_feature 1..20: note = Target: FXN; (+) strand; PAM type: NNGRRT; PAM sequence: TGGAAT
  source 1..20: mol_type = other DNA
gtttttgatatttttttagg

SEQ ID NO: 6741 - DNA, 20 bp, synthetic construct
  misc_feature 1..20: note = Description of Artificial Sequence: Synthetic oligonucleotide
  misc_feature 1..20: note = Target: FXN; (+) strand; PAM type: NNGRRT; PAM sequence: TGGAGT
  source 1..20: mol_type = other DNA
attttgctcatcacccaggc

SEQ ID NO: 6742 - DNA, 20 bp, synthetic construct
  misc_feature 1..20: note = Description of Artificial Sequence: Synthetic oligonucleotide
  misc_feature 1..20: note = Target: FXN; (+) strand; PAM type: NNGRRT; PAM sequence: CCGGAT
  source 1..20: mol_type = other DNA
ctcactgcaacctccacctc

SEQ ID NO: 6743 - DNA, 20 bp, synthetic construct
  misc_feature 1..20: note = Description of Artificial Sequence: Synthetic oligonucleotide
  misc_feature 1..20: note = Target: FXN; (+) strand; PAM type: NNGRRT; PAM sequence: CTGAGT
  source 1..20: mol_type = other DNA
aattcttctgcctcagcctc

SEQ ID NO: 6744 - DNA, 20 bp, synthetic construct
  misc_feature 1..20: note = Description of Artificial Sequence: Synthetic oligonucleotide
  misc_feature 1..20: note = Target: FXN; (+) strand; PAM type: NNGRRT; PAM sequence: CGGGGT
  source 1..20: mol_type = other DNA
ttttgtgtttttagtagagg

SEQ ID NO: 6745 - DNA, 20 bp, synthetic construct
  misc_feature 1..20: note = Description of Artificial Sequence: Synthetic oligonucleotide
  misc_feature 1..20: note = Target: FXN; (+) strand; PAM type: NNGRRT; PAM sequence: GGGGAT
  source 1..20: mol_type = other DNA
accttggcctcccaaagtgc

SEQ ID NO: 6746 - DNA, 20 bp, synthetic construct
  misc_feature 1..20: note = Description of Artificial Sequence: Synthetic oligonucleotide
  misc_feature 1..20: note = Target: FXN; (+) strand; PAM type: NNGRRT; PAM sequence: ATGAAT
  source 1..20: mol_type = other DNA
cccagccaagatcagtgtta

SEQ ID NO: 6747 - DNA, 20 bp, synthetic construct
  misc_feature 1..20: note = Description of Artificial Sequence: Synthetic oligonucleotide
  misc_feature 1..20: note = Target: FXN; (+) strand; PAM type: NNGRRT; PAM sequence: CAGGGT
  source 1..20: mol_type = other DNA
atgttgtgaccagcagctta

SEQ ID NO: 6748 - DNA, 20 bp, synthetic construct
  misc_feature 1..20: note = Description of Artificial Sequence: Synthetic oligonucleotide
  misc_feature 1..20: note = Target: FXN; (+) strand; PAM type: NNGRRT; PAM sequence: TTGAGT
  source 1..20: mol_type = other DNA
tcctataaataatttgctcg

SEQ ID NO: 6749 - DNA, 20 bp, synthetic construct
  misc_feature 1..20: note = Description of Artificial Sequence: Synthetic oligonucleotide
  misc_feature 1..20: note = Target: FXN; (+) strand; PAM type: NNGRRT; PAM sequence: AAGAAT
  source 1..20: mol_type = other DNA
ctttgtagcacataactacc

SEQ ID NO: 6750 - DNA, 20 bp, synthetic construct
  misc_feature 1..20: note = Description of Artificial Sequence: Synthetic oligonucleotide
  misc_feature 1..20: note = Target: FXN; (+) strand; PAM type: NNGRRT; PAM sequence: AAGAGT
  source 1..20: mol_type = other DNA
ccaagaataaggactgtaat

SEQ ID NO: 6751 - DNA, 20 bp, synthetic construct
  misc_feature 1..20: note = Description of Artificial Sequence: Synthetic oligonucleotide
  misc_feature 1..20: note = Target: FXN; (+) strand; PAM type: NNGRRT; PAM sequence: CAGGAT
  source 1..20: mol_type = other DNA
taataagagtacgtccctca

SEQ ID NO: 6752 - DNA, 20 bp, synthetic construct
  misc_feature 1..20: note = Description of Artificial Sequence: Synthetic oligonucleotide
  misc_feature 1..20: note = Target: FXN; (+) strand; PAM type: NNGRRT; PAM sequence: CTGAGT
  source 1..20: mol_type = other DNA
tcacaggattgtaatgaaga

SEQ ID NO: 6753 - DNA, 20 bp, synthetic construct
  misc_feature 1..20: note = Description of Artificial Sequence: Synthetic oligonucleotide
  misc_feature 1..20: note = Target: FXN; (+) strand; PAM type: NNGRRT; PAM sequence: TAGAAT
  source 1..20: mol_type = other DNA
caagcagatggagaacactg

SEQ ID NO: 6754 - DNA, 20 bp, synthetic construct
  misc_feature 1..20: note = Description of Artificial Sequence: Synthetic oligonucleotide
  misc_feature 1..20: note = Target: FXN; (+) strand; PAM type: NNGRRT; PAM sequence: CTGAGT
  source 1..20: mol_type = other DNA
tgccttctgccttctctttt

SEQ ID NO: 6755 - DNA, 20 bp, synthetic construct
  misc_feature 1..20: note = Description of Artificial Sequence: Synthetic oligonucleotide
  misc_feature 1..20: note = Target: FXN; (+) strand; PAM type: NNGRRT; PAM sequence: GAGAAT
  source 1..20: mol_type = other DNA
atggcaaccagtgacctttg

SEQ ID NO: 6756 - DNA, 20 bp, synthetic construct
  misc_feature 1..20: note = Description of Artificial Sequence: Synthetic oligonucleotide
  misc_feature 1..20: note = Target: FXN; (+) strand; PAM type: NNGRRT; PAM sequence: CAGGAT
  source 1..20: mol_type = other DNA
aaagcccttcggtgccttcc

SEQ ID NO: 6757 - DNA, 20 bp, synthetic construct
  misc_feature 1..20: note = Description of Artificial Sequence: Synthetic oligonucleotide
  misc_feature 1..20: note = Target: FXN; (+) strand; PAM type: NNGRRT; PAM sequence: CTGGAT
  source 1..20: mol_type = other DNA
atcaactcagaccctgtcac

SEQ ID NO: 6758 - DNA, 20 bp, synthetic construct
  misc_feature 1..20: note = Description of Artificial Sequence: Synthetic oligonucleotide
  misc_feature 1..20: note = Target: FXN; (+) strand; PAM type: NNGRRT; PAM sequence: CAGGAT
  source 1..20: mol_type = other DNA
ccaaatcttctggacttcag

SEQ ID NO: 6759 - DNA, 20 bp, synthetic construct
  misc_feature 1..20: note = Description of Artificial Sequence: Synthetic oligonucleotide
  misc_feature 1..20: note = Target: FXN; (+) strand; PAM type: NNGRRT; PAM sequence: GTGGAT
  source 1..20: mol_type = other DNA
agtgaccttttaagagcatt

SEQ ID NO: 6760 - DNA, 20 bp, synthetic construct
  misc_feature 1..20: note = Description of Artificial Sequence: Synthetic oligonucleotide
  misc_feature 1..20: note = Target: FXN; (+) strand; PAM type: NNGRRT; PAM sequence: CAGGAT
  source 1..20: mol_type = other DNA
ccactagccacatgtggcca

SEQ ID NO: 6761 - DNA, 20 bp, synthetic construct
  misc_feature 1..20: note = Description of Artificial Sequence: Synthetic oligonucleotide
  misc_feature 1..20: note = Target: FXN; (+) strand; PAM type: NNGRRT; PAM sequence: GAGAAT
  source 1..20: mol_type = other DNA
cgggcttagagagacacagg

SEQ ID NO: 6762 - DNA, 20 bp, synthetic construct
  misc_feature 1..20: note = Description of Artificial Sequence: Synthetic oligonucleotide
  misc_feature 1..20: note = Target: FXN; (+) strand; PAM type: NNGRRT; PAM sequence: CTGGGT
  source 1..20: mol_type = other DNA
taaaatactttaatataggg

SEQ ID NO: 6763 - DNA, 20 bp, synthetic construct
  misc_feature 1..20: note = Description of Artificial Sequence: Synthetic oligonucleotide
  misc_feature 1..20: note = Target: FXN; (+) strand; PAM type: NNGRRT; PAM sequence: AGGAGT
  source 1..20: mol_type = other DNA
agggcagatcacttgaggcc

SEQ ID NO: 6764 - DNA, 20 bp, synthetic construct
  misc_feature 1..20: note = Description of Artificial Sequence: Synthetic oligonucleotide
  misc_feature 1..20: note = Target: FXN; (+) strand; PAM type: NNGRRT; PAM sequence: TCGGGT
  source 1..20: mol_type = other DNA
tctactaaaaatacaaaaaa

SEQ ID NO: 6765 - DNA, 20 bp, synthetic construct
  misc_feature 1..20: note = Description of Artificial Sequence: Synthetic oligonucleotide
  misc_feature 1..20: note = Target: FXN; (+) strand; PAM type: NNGRRT; PAM sequence: GCGGGT
  source 1..20: mol_type = other DNA
acaaaaaatcgggtgcggtg

SEQ ID NO: 6766 - DNA, 20 bp, synthetic construct
  misc_feature 1..20: note = Description of Artificial Sequence: Synthetic oligonucleotide
  misc_feature 1..20: note = Target: FXN; (+) strand; PAM type: NNGRRT; PAM sequence: GAGAAT
  source 1..20: mol_type = other DNA
tacgcgggaggctgaggcac

SEQ ID NO: 6767 - DNA, 20 bp, synthetic construct
  misc_feature 1..20: note = Description of Artificial Sequence: Synthetic oligonucleotide
  misc_feature 1..20: note = Target: FXN; (+) strand; PAM type: NNGRRT; PAM sequence: GGGGGT
  source 1..20: mol_type = other DNA
atcactcgaacccgggaggc

SEQ ID NO: 6768 - DNA, 20 bp, synthetic construct
  misc_feature 1..20: note = Description of Artificial Sequence: Synthetic oligonucleotide
  misc_feature 1..20: note = Target: FXN; (+) strand; PAM type: NNGRRT; PAM sequence: CCGGAT
  source 1..20: mol_type = other DNA
aaatgcaggttagttgttca

SEQ ID NO: 6769 - DNA, 20 bp, synthetic construct
  misc_feature 1..20: note = Description of Artificial Sequence: Synthetic oligonucleotide
  misc_feature 1..20: note = Target: FXN; (+) strand; PAM type: NNGRRT; PAM sequence: CAGAGT
  source 1..20: mol_type = other DNA
ggttagttgttcaccggatg

SEQ ID NO: 6770 - DNA, 20 bp, synthetic construct
  misc_feature 1..20: note = Description of Artificial Sequence: Synthetic oligonucleotide
  misc_feature 1..20: note = Target: FXN; (+) strand; PAM type: NNGRRT; PAM sequence: GTGAAT
  source 1..20: mol_type = other DNA
aaggcctggtaccaaaaaaa

SEQ ID NO: 6771 - DNA, 20 bp, synthetic construct
  misc_feature 1..20: note = Description of Artificial Sequence: Synthetic oligonucleotide
  misc_feature 1..20: note = Target: FXN; (+) strand; PAM type: NNGRRT; PAM sequence: TTGGGT
  source 1..20: mol_type = other DNA
gaatttactccgaaactagc

SEQ ID NO: 6772 - DNA, 20 bp, synthetic construct
  misc_feature 1..20: note = Description of Artificial Sequence: Synthetic oligonucleotide
  misc_feature 1..20: note = Target: FXN; (+) strand; PAM type: NNGRRT; PAM sequence: AGGGGT
  source 1..20: mol_type = other DNA
ctccgaaactagcttgggtg

SEQ ID NO: 6773 - DNA, 20 bp, synthetic construct
  misc_feature 1..20: note = Description of Artificial Sequence: Synthetic oligonucleotide
  misc_feature 1..20: note = Target: FXN; (+) strand; PAM type: NNGRRT; PAM sequence: GGGGGT
  source 1..20: mol_type = other DNA
aagtgtgcaagggcaagtgg

SEQ ID NO: 6774 - DNA, 20 bp, synthetic construct
  misc_feature 1..20: note = Description of Artificial Sequence: Synthetic oligonucleotide
  misc_feature 1..20: note = Target: FXN; (+) strand; PAM type: NNGRRT; PAM sequence: GTGAAT
  source 1..20: mol_type = other DNA
gctttcagtatgccctccca

SEQ ID NO: 6775 - DNA, 20 bp, synthetic construct
  misc_feature 1..20: note = Description of Artificial Sequence: Synthetic oligonucleotide
  misc_feature 1..20: note = Target: FXN; (+) strand; PAM type: NNGRRT; PAM sequence: AAGGGT
  source 1..20: mol_type = other DNA
aaagtcctgaggcaaccccc

SEQ ID NO: 6776 - DNA, 20 bp, synthetic construct
  misc_feature 1..20: note = Description of Artificial Sequence: Synthetic oligonucleotide
  misc_feature 1..20: note = Target: FXN; (+) strand; PAM type: NNGRRT; PAM sequence: ATGGGT
  source 1..20: mol_type = other DNA
ctggaggtgaaagttccgtg

SEQ ID NO: 6777 - DNA, 20 bp, synthetic construct
  misc_feature 1..20: note = Description of Artificial Sequence: Synthetic oligonucleotide
  misc_feature 1..20: note = Target: FXN; (+) strand; PAM type: NNGRRT; PAM sequence: GCGAAT
  source 1..20: mol_type = other DNA
tgatgggtttgctttggtct

SEQ ID NO: 6778 - DNA, 20 bp, synthetic construct
  misc_feature 1..20: note = Description of Artificial Sequence: Synthetic oligonucleotide
  misc_feature 1..20: note = Target: FXN; (+) strand; PAM type: NNGRRT; PAM sequence: GGGAAT
  source 1..20: mol_type = other DNA
ttagaaaagcttgccctgaa

SEQ ID NO: 6779 - DNA, 20 bp, synthetic construct
  misc_feature 1..20: note = Description of Artificial Sequence: Synthetic oligonucleotide
  misc_feature 1..20: note = Target: FXN; (+) strand; PAM type: NNGRRT; PAM sequence: GAGGAT
  source 1..20: mol_type = other DNA
ggggagaggagaagagaaga

SEQ ID NO: 6780 - DNA, 20 bp, synthetic construct
  misc_feature 1..20: note = Description of Artificial Sequence: Synthetic oligonucleotide
  misc_feature 1..20: note = Target: FXN; (+) strand; PAM type: NNGRRT; PAM sequence: TCGAAT
  source 1..20: mol_type = other DNA
gagcactcggttacaggcac

SEQ ID NO: 6781 - DNA, 20 bp, synthetic construct
  misc_feature 1..20: note = Description of Artificial Sequence: Synthetic oligonucleotide
  misc_feature 1..20: note = Target: FXN; (+) strand; PAM type: NNGRRT; PAM sequence: ATGGGT
  source 1..20: mol_type = other DNA
aatatataaattatgcatta

SEQ ID NO: 6782 - DNA, 20 bp, synthetic construct
  misc_feature 1..20: note = Description of Artificial Sequence: Synthetic oligonucleotide
  misc_feature 1..20: note = Target: FXN; (+) strand; PAM type: NNGRRT; PAM sequence: CAGAGT
  source 1..20: mol_type = other DNA
tacttcttaactttggcttt

SEQ ID NO: 6783 - DNA, 20 bp, synthetic construct
  misc_feature 1..20: note = Description of Artificial Sequence: Synthetic oligonucleotide
  misc_feature 1..20: note = Target: FXN; (+) strand; PAM type: NNGRRT; PAM sequence: TGGAAT
  source 1..20: mol_type = other DNA
aacgtggcctcaaccagatt

SEQ ID NO: 6784 - DNA, 20 bp, synthetic construct
  misc_feature 1..20: note = Description of Artificial Sequence: Synthetic oligonucleotide
  misc_feature 1..20: note = Target: FXN; (+) strand; PAM type: NNGRRT; PAM sequence: CAGAGT
  source 1..20: mol_type = other DNA
agatttggaatgtcaaaaag

SEQ ID NO: 6785 - DNA, 20 bp, synthetic construct
  misc_feature 1..20: note = Description of Artificial Sequence: Synthetic oligonucleotide
  misc_feature 1..20: note = Target: FXN; (+) strand; PAM type: NNGRRT; PAM sequence: ATGAAT
  source 1..20: mol_type = other DNA
aaaagcagagtgtctatttg

SEQ ID NO: 6786 - DNA, 20 bp, synthetic construct
  misc_feature 1..20: note = Description of Artificial Sequence: Synthetic oligonucleotide
  misc_feature 1..20: note = Target: FXN; (+) strand; PAM type: NNGRRT; PAM sequence: CAGGGT
  source 1..20: mol_type = other DNA
atctggaactttgggccacc

SEQ ID NO: 6787 - DNA, 20 bp, synthetic construct
  misc_feature 1..20: note = Description of Artificial Sequence: Synthetic oligonucleotide
  misc_feature 1..20: note = Target: FXN; (+) strand; PAM type: NNGRRT; PAM sequence: CTGAGT
  source 1..20: mol_type = other DNA
ttaggcatctttccatgtga

SEQ ID NO: 6788 - DNA, 20 bp, synthetic construct
  misc_feature 1..20: note = Description of Artificial Sequence: Synthetic oligonucleotide
  misc_feature 1..20: note = Target: FXN; (+) strand; PAM type: NNGRRT; PAM sequence: ATGGAT
  source 1..20: mol_type = other DNA
atgaaatagtattagattgc

SEQ ID NO: 6789 - DNA, 20 bp, synthetic construct
  misc_feature 1..20: note = Description of Artificial Sequence: Synthetic oligonucleotide
  misc_feature 1..20: note = Target: FXN; (+) strand; PAM type: NNGRRT; PAM sequence: CAGAGT
  source 1..20: mol_type = other DNA
ttggacattcaggttgtttc

SEQ ID NO: 6790 - DNA, 20 bp, synthetic construct
  misc_feature 1..20: note = Description of Artificial Sequence: Synthetic oligonucleotide
  misc_feature 1..20: note = Target: FXN; (+) strand; PAM type: NNGRRT; PAM sequence: CAGGGT
  source 1..20: mol_type = other DNA
gtcctcctctctgggcagta

SEQ ID NO: 6791 - DNA, 20 bp, synthetic construct
  misc_feature 1..20: note = Description of Artificial Sequence: Synthetic oligonucleotide
  misc_feature 1..20: note = Target: FXN; (+) strand; PAM type: NNGRRT; PAM sequence: GTGAAT
  source 1..20: mol_type = other DNA
gggttggcatacctcctgaa

SEQ ID NO: 6792 - DNA, 20 bp, synthetic construct
  misc_feature 1..20: note = Description of Artificial Sequence: Synthetic oligonucleotide
  misc_feature 1..20: note = Target: FXN; (+) strand; PAM type: NNGRRT; PAM sequence: TTGAGT
  source 1..20: mol_type = other DNA
ccttactgtcctctgcattg

SEQ ID NO: 6793 - DNA, 20 bp, synthetic construct
  misc_feature 1..20: note = Description of Artificial Sequence: Synthetic oligonucleotide
  misc_feature 1..20: note = Target: FXN; (+) strand; PAM type: NNGRRT; PAM sequence: GCGAGT
  source 1..20: mol_type = other DNA
aggctgggaaatatagtcta

SEQ ID NO: 6794 - DNA, 20 bp, synthetic construct
  misc_feature 1..20: note = Description of Artificial Sequence: Synthetic oligonucleotide
  misc_feature 1..20: note = Target: FXN; (+) strand; PAM type: NNGRRT; PAM sequence: CCGAGT
  source 1..20: mol_type = other DNA
tgtggtcaccacagccacct

SEQ ID NO: 6795 - DNA, 20 bp, synthetic construct
  misc_feature 1..20: note = Description of Artificial Sequence: Synthetic oligonucleotide
  misc_feature 1..20: note = Target: FXN; (+) strand; PAM type: NNGRRT; PAM sequence: AGGAAT
  source 1..20: mol_type = other DNA
gtctcctctctcccagcttt

SEQ ID NO: 6796 - DNA, 20 bp, synthetic construct
  misc_feature 1..20: note = Description of Artificial Sequence: Synthetic oligonucleotide
  misc_feature 1..20: note = Target: FXN; (+) strand; PAM type: NNGRRT; PAM sequence: CAGGAT
  source 1..20: mol_type = other DNA
acacacacgatggagagggg

SEQ ID NO: 6797 - DNA, 20 bp, synthetic construct
  misc_feature 1..20: note = Description of Artificial Sequence: Synthetic oligonucleotide
  misc_feature 1..20: note = Target: FXN; (+) strand; PAM type: NNGRRT; PAM sequence: CTGGAT
  source 1..20: mol_type = other DNA
tggagccctgctgggcagca

SEQ ID NO: 6798 - DNA, 20 bp, synthetic construct
  misc_feature 1..20: note = Description of Artificial Sequence: Synthetic oligonucleotide
  misc_feature 1..20: note = Target: FXN; (+) strand; PAM type: NNGRRT; PAM sequence: TGGGGT
  source 1..20: mol_type = other DNA
acttcctgctaataacagtt

SEQ ID NO: 6799 - DNA, 20 bp, synthetic construct
  misc_feature 1..20: note = Description of Artificial Sequence: Synthetic oligonucleotide
  misc_feature 1..20: note = Target: FXN; (+) strand; PAM type: NNGRRT; PAM sequence: CAGGGT
  source 1..20: mol_type = other DNA
aataacagtttggggttcca

SEQ ID NO: 6800 - DNA, 20 bp, synthetic construct
  misc_feature 1..20: note = Description of Artificial Sequence: Synthetic oligonucleotide
  misc_feature 1..20: note = Target: FXN; (+) strand; PAM type: NNGRRT; PAM sequence: TGGAGT
  source 1..20: mol_type = other DNA
tcacaccctgagacccaggc

SEQ ID NO: 6801 - DNA, 20 bp, synthetic construct
  misc_feature 1..20: note = Description of Artificial Sequence: Synthetic oligonucleotide
  misc_feature 1..20: note = Target: FXN; (+) strand; PAM type: NNGRRT; PAM sequence: CCGGGT
  source 1..20: mol_type = other DNA
ctcactgcagcctccgcctc

SEQ ID NO: 6802 - DNA, 20 bp, synthetic construct
  misc_feature 1..20: note = Description of Artificial Sequence: Synthetic oligonucleotide
  misc_feature 1..20: note = Target: FXN; (+) strand; PAM type: NNGRRT; PAM sequence: CTGAGT
  source 1..20: mol_type = other DNA
aatcctcctgcctcagcctc

SEQ ID NO: 6803 - DNA, 20 bp, synthetic construct
  misc_feature 1..20: note = Description of Artificial Sequence: Synthetic oligonucleotide
  misc_feature 1..20: note = Target: FXN; (+) strand; PAM type: NNGRRT; PAM sequence: CGGGGT
  source 1..20: mol_type = other DNA
ttttgtatttttagtaaaga

SEQ ID NO: 6804 - DNA, 20 bp, synthetic construct
  misc_feature 1..20: note = Description of Artificial Sequence: Synthetic oligonucleotide
  misc_feature 1..20: note = Target: FXN; (+) strand; PAM type: NNGRRT; PAM sequence: TGGGAT
  source 1..20: mol_type = other DNA
gcctcggcctcccaaagtgc

SEQ ID NO: 6805 - DNA, 20 bp, synthetic construct
  misc_feature 1..20: note = Description of Artificial Sequence: Synthetic oligonucleotide
  misc_feature 1..20: note = Target: FXN; (+) strand; PAM type: NNGRRT; PAM sequence: GAGAGT
  source 1..20: mol_type = other DNA
gcccagactcatttttcttt

SEQ ID NO: 6806 - DNA, 20 bp, synthetic construct
  misc_feature 1..20: note = Description of Artificial Sequence: Synthetic oligonucleotide
  misc_feature 1..20: note = Target: FXN; (+) strand; PAM type: NNGRRT; PAM sequence: GTGGAT
  source 1..20: mol_type = other DNA
accacatccaaatttcctcc

SEQ ID NO: 6807 - DNA, 20 bp, synthetic construct
  misc_feature 1..20: note = Description of Artificial Sequence: Synthetic oligonucleotide
  misc_feature 1..20: note = Target: FXN; (+) strand; PAM type: NNGRRT; PAM sequence: GGGAGT
  source 1..20: mol_type = other DNA
tccaaatttcctccgtggat

SEQ ID NO: 6808 - DNA, 20 bp, synthetic construct
  misc_feature 1..20: note = Description of Artificial Sequence: Synthetic oligonucleotide
  misc_feature 1..20: note = Target: FXN; (+) strand; PAM type: NNGRRT; PAM sequence: CTGAGT
  source 1..20: mol_type = other DNA
gcctggtttttgcagcagga

SEQ ID NO: 6809 - DNA, 20 bp, synthetic construct
  misc_feature 1..20: note = Description of Artificial Sequence: Synthetic oligonucleotide
  misc_feature 1..20: note = Target: FXN; (+) strand; PAM type: NNGRRT; PAM sequence: CTGAGT
  source 1..20: mol_type = other DNA
caaagccttagcttctctgg

SEQ ID NO: 6810 - DNA, 20 bp, synthetic construct
  misc_feature 1..20: note = Description of Artificial Sequence: Synthetic oligonucleotide
  misc_feature 1..20: note = Target: FXN; (+) strand; PAM type: NNGRRT; PAM sequence: AGGAGT
  source 1..20: mol_type = other DNA
gtgagcagatcactgaggcc

SEQ ID NO: 6811 - DNA, 20 bp, synthetic construct
  misc_feature 1..20: note = Description of Artificial Sequence: Synthetic oligonucleotide
  misc_feature 1..20: note = Target: FXN; (+) strand; PAM type: NNGRRT; PAM sequence: GAGAAT
  source 1..20: mol_type = other DNA
tactcgggagcctgaggcag

SEQ ID NO: 6812 - DNA, 20 bp, synthetic construct
  misc_feature 1..20: note = Description of Artificial Sequence: Synthetic oligonucleotide
  misc_feature 1..20: note = Target: FXN; (+) strand; PAM type: NNGRRT; PAM sequence: CTGGGT
  source 1..20: mol_type = other DNA
tcatgccattgcactccagc

SEQ ID NO: 6813 - DNA, 20 bp, synthetic construct
  misc_feature 1..20: note = Description of Artificial Sequence: Synthetic oligonucleotide
  misc_feature 1..20: note = Target: FXN; (+) strand; PAM type: NNGRRT; PAM sequence: CAGGAT
  source 1..20: mol_type = other DNA
gaggttgcatagggcccttg

SEQ ID NO: 6814 - DNA, 20 bp, synthetic construct
  misc_feature 1..20: note = Description of Artificial Sequence: Synthetic oligonucleotide
  misc_feature 1..20: note = Target: FXN; (+) strand; PAM type: NNGRRT; PAM sequence: GTGGGT
  source 1..20: mol_type = other DNA
ccccacattgtatcctggaa

SEQ ID NO: 6815 - DNA, 20 bp, synthetic construct
  misc_feature 1..20: note = Description of Artificial Sequence: Synthetic oligonucleotide
  misc_feature 1..20: note = Target: FXN; (+) strand; PAM type: NNGRRT; PAM sequence: CTGGGT
  source 1..20: mol_type = other DNA
tcctggaagtgggtgatgga

SEQ ID NO: 6816 - DNA, 20 bp, synthetic construct
  misc_feature 1..20: note = Description of Artificial Sequence: Synthetic oligonucleotide
  misc_feature 1..20: note = Target: FXN; (+) strand; PAM type: NNGRRT; PAM sequence: GAGGGT
  source 1..20: mol_type = other DNA
gtgatggactgggtggggaa

SEQ ID NO: 6817 - DNA, 20 bp, synthetic construct
  misc_feature 1..20: note = Description of Artificial Sequence: Synthetic oligonucleotide
  misc_feature 1..20: note = Target: FXN; (+) strand; PAM type: NNGRRT; PAM sequence: TGGAGT
  source 1..20: mol_type = other DNA
ccctggaaactttcagatag

SEQ ID NO: 6818 - DNA, 20 bp, synthetic construct
  misc_feature 1..20: note = Description of Artificial Sequence: Synthetic oligonucleotide
  misc_feature 1..20: note = Target: FXN; (+) strand; PAM type: NNGRRT; PAM sequence: AAGGAT
  source 1..20: mol_type = other DNA
aggggcacaaaagctcttac

SEQ ID NO: 6819 - DNA, 20 bp, synthetic construct
  misc_feature 1..20: note = Description of Artificial Sequence: Synthetic oligonucleotide
  misc_feature 1..20: note = Target: FXN; (+) strand; PAM type: NNGRRT; PAM sequence: AAGGGT
  source 1..20: mol_type = other DNA
cattttaaaatgtataatgc

SEQ ID NO: 6820 - DNA, 20 bp, synthetic construct
  misc_feature 1..20: note = Description of Artificial Sequence: Synthetic oligonucleotide
  misc_feature 1..20: note = Target: FXN; (+) strand; PAM type: NNGRRT; PAM sequence: GTGGAT
  source 1..20: mol_type = other DNA
ctaatctactttctgtctct

SEQ ID NO: 6821 - DNA, 20 bp, synthetic construct
  misc_feature 1..20: note = Description of Artificial Sequence: Synthetic oligonucleotide
  misc_feature 1..20: note = Target: FXN; (+) strand; PAM type: NNGRRT; PAM sequence: ATGAAT
  source 1..20: mol_type = other DNA
agtcacaagcatacagcttg

SEQ ID NO: 6822 - DNA, 20 bp, synthetic construct
  misc_feature 1..20: note = Description of Artificial Sequence: Synthetic oligonucleotide
  misc_feature 1..20: note = Target: FXN; (+) strand; PAM type: NNGRRT; PAM sequence: TAGAAT
  source 1..20: mol_type = other DNA
taccctgtaagctcaagaca

SEQ ID NO: 6823 - DNA, 20 bp, synthetic construct
  misc_feature 1..20: note = Description of Artificial Sequence: Synthetic oligonucleotide
  misc_feature 1..20: note = Target: FXN; (+) strand; PAM type: NNGRRT; PAM sequence: CAGAGT
  source 1..20: mol_type = other DNA
ccttctagtcattaaccctt

SEQ ID NO: 6824 - DNA, 20 bp, synthetic construct
  misc_feature 1..20: note = Description of Artificial Sequence: Synthetic oligonucleotide
  misc_feature 1..20: note = Target: FXN; (+) strand; PAM type: NNGRRT; PAM sequence: AGGAAT
  source 1..20: mol_type = other DNA
atttatctgtgatattacaa

SEQ ID NO: 6825 - DNA, 20 bp, synthetic construct
  misc_feature 1..20: note = Description of Artificial Sequence: Synthetic oligonucleotide
  misc_feature 1..20: note = Target: FXN; (+) strand; PAM type: NNGRRT; PAM sequence: TAGGAT
  source 1..20: mol_type = other DNA
cagtttccagtttggggcta

SEQ ID NO: 6826 - DNA, 20 bp, synthetic construct
  misc_feature 1..20: note = Description of Artificial Sequence: Synthetic oligonucleotide
  misc_feature 1..20: note = Target: FXN; (+) strand; PAM type: NNGRRT; PAM sequence: CTGGGT
  source 1..20: mol_type = other DNA
gtacatgtcttttggtgaac

SEQ ID NO: 6827 - DNA, 20 bp, synthetic construct
  misc_feature 1..20: note = Description of Artificial Sequence: Synthetic oligonucleotide
  misc_feature 1..20: note = Target: FXN; (+) strand; PAM type: NNGRRT; PAM sequence: AAGAGT
  source 1..20: mol_type = other DNA
ttctgttgtgtatacccctt

SEQ ID NO: 6828 - DNA, 20 bp, synthetic construct
  misc_feature 1..20: note = Description of Artificial Sequence: Synthetic oligonucleotide
  misc_feature 1..20: note = Target: FXN; (+) strand; PAM type: NNGRRT; PAM sequence: GAGAAT
  source 1..20: mol_type = other DNA
tactcgggaggctgaggcag

SEQ ID NO: 6829 - DNA, 20 bp, synthetic construct
  misc_feature 1..20: note = Description of Artificial Sequence: Synthetic oligonucleotide
  misc_feature 1..20: note = Target: FXN; (+) strand; PAM type: NNGRRT; PAM sequence: AAGAGT
  source 1..20: mol_type = other DNA
ctcaaaaaaaaaaaaaaaaa

SEQ ID NO: 6830 - DNA, 20 bp, synthetic construct
  misc_feature 1..20: note = Description of Artificial Sequence: Synthetic oligonucleotide
  misc_feature 1..20: note = Target: FXN; (+) strand; PAM type: NNGRRT; PAM sequence: ATGGGT
  source 1..20: mol_type = other DNA
aaaaaaaaagagtggagctg

SEQ ID NO: 6831 - DNA, 20 bp, synthetic construct
  misc_feature 1..20: note = Description of Artificial Sequence: Synthetic oligonucleotide
  misc_feature 1..20: note = Target: FXN; (+) strand; PAM type: NNGRRT; PAM sequence: TGGAGT
  source 1..20: mol_type = other DNA
ctctttttttttttttgaga

SEQ ID NO: 6832 - DNA, 20 bp, synthetic construct
  misc_feature 1..20: note = Description of Artificial Sequence: Synthetic oligonucleotide
  misc_feature 1..20: note = Target: FXN; (+) strand; PAM type: NNGRRT; PAM sequence: CTGGGT
  source 1..20: mol_type = other DNA
ctcactgcaacctccgcctc

SEQ ID NO: 6833 - DNA, 20 bp, synthetic construct
  misc_feature 1..20: note = Description of Artificial Sequence: Synthetic oligonucleotide
  misc_feature 1..20: note = Target: FXN; (+) strand; PAM type: NNGRRT; PAM sequence: CCGAGT
  source 1..20: mol_type = other DNA
aattctcctgcctcagcctc

SEQ ID NO: 6834 - DNA, 20 bp, synthetic construct
  misc_feature 1..20: note = Description of Artificial Sequence: Synthetic oligonucleotide
  misc_feature 1..20: note = Target: FXN; (+) strand; PAM type: NNGRRT; PAM sequence: TGGGAT
  source 1..20: mol_type = other DNA
gcctcagcctcccgagtagc

SEQ ID NO: 6835 - DNA, 20 bp, synthetic construct
  misc_feature 1..20: note = Description of Artificial Sequence: Synthetic oligonucleotide
  misc_feature 1..20: note = Target: FXN; (+) strand; PAM type: NNGRRT; PAM sequence: CAGGGT
  source 1..20: mol_type = other DNA
ttttgtatttttagtagaga

SEQ ID NO: 6836 - DNA, 20 bp, synthetic construct
  misc_feature 1..20: note = Description of Artificial Sequence: Synthetic oligonucleotide
  misc_feature 1..20: note = Target: FXN; (+) strand; PAM type: NNGRRT; PAM sequence: TGGGAT
  source 1..20: mol_type = other DNA
gcctcggcctcccgaagtgc

SEQ ID NO: 6837 - DNA, 20 bp, synthetic construct
  misc_feature 1..20: note = Description of Artificial Sequence: Synthetic oligonucleotide
  misc_feature 1..20: note = Target: FXN; (+) strand; PAM type: NNGRRT; PAM sequence: CAGGGT
  source 1..20: mol_type = other DNA
attttattttactttaaaga

SEQ ID NO: 6838 - DNA, 20 bp, synthetic construct
  misc_feature 1..20: note = Description of Artificial Sequence: Synthetic oligonucleotide
  misc_feature 1..20: note = Target: FXN; (+) strand; PAM type: NNGRRT; PAM sequence: CAGGAT
  source 1..20: mol_type = other DNA
cagggtttcactttgtcacc

SEQ ID NO: 6839 - DNA, 20 bp, synthetic construct
  misc_feature 1..20: note = Description of Artificial Sequence: Synthetic oligonucleotide
  misc_feature 1..20: note = Target: FXN; (+) strand; PAM type: NNGRRT; PAM sequence: TGGAAT
  source 1..20: mol_type = other DNA
tttcactttgtcacccagga

SEQ ID NO: 6840 - DNA, 20 bp, synthetic construct
  misc_feature 1..20: note = Description of Artificial Sequence: Synthetic oligonucleotide
  misc_feature 1..20: note = Target: FXN; (+) strand; PAM type: NNGRRT; PAM sequence: TCGGGT
  source 1..20: mol_type = other DNA
gcagccttgacctccctggc

SEQ ID NO: 6841 - DNA, 20 bp, synthetic construct
  misc_feature 1..20: note = Description of Artificial Sequence: Synthetic oligonucleotide
  misc_feature 1..20: note = Target: FXN; (+) strand; PAM type: NNGRRT; PAM sequence: CGGGGT
  source 1..20: mol_type = other DNA
tttttaatttttggtagaga

SEQ ID NO: 6842 - DNA, 20 bp, synthetic construct
  misc_feature 1..20: note = Description of Artificial Sequence: Synthetic oligonucleotide
  misc_feature 1..20: note = Target: FXN; (+) strand; PAM type: NNGRRT; PAM sequence: CTGGGT
  source 1..20: mol_type = other DNA
gtctctgttgtctcagattc

SEQ ID NO: 6843 - DNA, 20 bp, synthetic construct
  misc_feature 1..20: note = Description of Artificial Sequence: Synthetic oligonucleotide
  misc_feature 1..20: note = Target: FXN; (+) strand; PAM type: NNGRRT; PAM sequence: GTGAAT
  source 1..20: mol_type = other DNA
caaatgaacacaaaatacag

SEQ ID NO: 6844 - DNA, 20 bp, synthetic construct
  misc_feature 1..20: note = Description of Artificial Sequence: Synthetic oligonucleotide
  misc_feature 1..20: note = Target: FXN; (+) strand; PAM type: NNGRRT; PAM sequence: AAGGAT
  source 1..20: mol_type = other DNA
aaatctgatcatatctttag

SEQ ID NO: 6845 - DNA, 20 bp, synthetic construct
  misc_feature 1..20: note = Description of Artificial Sequence: Synthetic oligonucleotide
  misc_feature 1..20: note = Target: FXN; (+) strand; PAM type: NNGRRT; PAM sequence: CTGAAT
  source 1..20: mol_type = other DNA
ataaacagtgatagcattta

SEQ ID NO: 6846 - DNA, 20 bp, synthetic construct
  misc_feature 1..20: note = Description of Artificial Sequence: Synthetic oligonucleotide
  misc_feature 1..20: note = Target: FXN; (+) strand; PAM type: NNGRRT; PAM sequence: CAGAAT
  source 1..20: mol_type = other DNA
agtgatagcatttactgaat

SEQ ID NO: 6847 - DNA, 20 bp, synthetic construct
  misc_feature 1..20: note = Description of Artificial Sequence: Synthetic oligonucleotide
  misc_feature 1..20: note = Target: FXN; (+) strand; PAM type: NNGRRT; PAM sequence: TGGGGT
  source 1..20: mol_type = other DNA
gaatcagaataactgttttt

SEQ ID NO: 6848 - DNA, 20 bp, synthetic construct
  misc_feature 1..20: note = Description of Artificial Sequence: Synthetic oligonucleotide
  misc_feature 1..20: note = Target: FXN; (+) strand; PAM type: NNGRRT; PAM sequence: CGGAGT
  source 1..20: mol_type = other DNA
ttttggggttttctttgaga

SEQ ID NO: 6849 - DNA, 20 bp, synthetic construct
  misc_feature 1..20: note = Description of Artificial Sequence: Synthetic oligonucleotide
  misc_feature 1..20: note = Target: FXN; (+) strand; PAM type: NNGRRT; PAM sequence: TGGAGT
  source 1..20: mol_type = other DNA
tttgctcttgttgcccaggc

SEQ ID NO: 6850 - DNA, 20 bp, synthetic construct
  misc_feature 1..20: note = Description of Artificial Sequence: Synthetic oligonucleotide
  misc_feature 1..20: note = Target: FXN; (+) strand; PAM type: NNGRRT; PAM sequence: CTGGAT
  source 1..20: mol_type = other DNA
ctcactgcaacctccgcccc

SEQ ID NO: 6851 - DNA, 20 bp, synthetic construct
  misc_feature 1..20: note = Description of Artificial Sequence: Synthetic oligonucleotide
  misc_feature 1..20: note = Target: FXN; (+) strand; PAM type: NNGRRT; PAM sequence: CCGAGT
  source 1..20: mol_type = other DNA
gattatcctgcctcagcctc

SEQ ID NO: 6852 - DNA, 20 bp, synthetic construct
  misc_feature 1..20: note = Description of Artificial Sequence: Synthetic oligonucleotide
  misc_feature 1..20: note = Target: FXN; (+) strand; PAM type: NNGRRT; PAM sequence: TGGGAT
  source 1..20: mol_type = other DNA
gcctcagcctcccgagtagc

SEQ ID NO: 6853 - DNA, 20 bp, synthetic construct
  misc_feature 1..20: note = Description of Artificial Sequence: Synthetic oligonucleotide
  misc_feature 1..20: note = Target: FXN; (+) strand; PAM type: NNGRRT; PAM sequence: TAGGAT
  source 1..20: mol_type = other DNA
gcctcagcctcccaaaatgc

SEQ ID NO: 6854 - DNA, 20 bp, synthetic construct
  misc_feature 1..20: note = Description of Artificial Sequence: Synthetic oligonucleotide
  misc_feature 1..20: note = Target: FXN; (+) strand; PAM type: NNGRRT; PAM sequence: CGGAGT
  source 1..20: mol_type = other DNA
ttttttttctttttttgaga

SEQ ID NO: 6855 - DNA, 20 bp, synthetic construct
  misc_feature 1..20: note = Description of Artificial Sequence: Synthetic oligonucleotide
  misc_feature 1..20: note = Target: FXN; (+) strand; PAM type: NNGRRT; PAM sequence: TGGAGT
  source 1..20: mol_type = other DNA
tctcactctgtcacccaggc

SEQ ID NO: 6856 - DNA, 20 bp, synthetic construct
  misc_feature 1..20: note = Description of Artificial Sequence: Synthetic oligonucleotide
  misc_feature 1..20: note = Target: FXN; (+) strand; PAM type: NNGRRT; PAM sequence: CGGGGT
  source 1..20: mol_type = other DNA
ctcattgcaacctccacctc

SEQ ID NO: 6857 - DNA, 20 bp, synthetic construct
  misc_feature 1..20: note = Description of Artificial Sequence: Synthetic oligonucleotide
  misc_feature 1..20: note = Target: FXN; (+) strand; PAM type: NNGRRT; PAM sequence: CAGGGT
  source 1..20: mol_type = other DNA
ttttgtatttttagtagaga

SEQ ID NO: 6858 - DNA, 20 bp, synthetic construct
  misc_feature 1..20: note = Description of Artificial Sequence: Synthetic oligonucleotide
  misc_feature 1..20: note = Target: FXN; (+) strand; PAM type: NNGRRT; PAM sequence: TGGGAT
  source 1..20: mol_type = other DNA
acctcggcctccgaaagtcc

SEQ ID NO: 6859 - DNA, 20 bp, synthetic construct
  misc_feature 1..20: note = Description of Artificial Sequence: Synthetic oligonucleotide
  misc_feature 1..20: note = Target: FXN; (+) strand; PAM type: NNGRRT; PAM sequence: GGGAAT
  source 1..20: mol_type = other DNA
tattaattgtagttgcctct

SEQ ID NO: 6860 - DNA, 20 bp, synthetic construct
  misc_feature 1..20: note = Description of Artificial Sequence: Synthetic oligonucleotide
  misc_feature 1..20: note = Target: FXN; (+) strand; PAM type: NNGRRT; PAM sequence: CAGAGT
  source 1..20: mol_type = other DNA
ttttttttttttttttgaga

SEQ ID NO: 6861 - DNA, 20 bp, synthetic construct
  misc_feature 1..20: note = Description of Artificial Sequence: Synthetic oligonucleotide
  misc_feature 1..20: note = Target: FXN; (+) strand; PAM type: NNGRRT; PAM sequence: TGGAGT
  source 1..20: mol_type = other DNA
tctcgctctgtcgcccaggc

SEQ ID NO: 6862 - DNA, 20 bp, synthetic construct
  misc_feature 1..20: note = Description of Artificial Sequence: Synthetic oligonucleotide
  misc_feature 1..20: note = Target: FXN; (+) strand; PAM type: NNGRRT; PAM sequence: CTGAGT
  source 1..20: mol_type = other DNA
cattctcctgcctcagcctc

SEQ ID NO: 6863 - DNA, 20 bp, synthetic construct
  misc_feature 1..20: note = Description of Artificial Sequence: Synthetic oligonucleotide
  misc_feature 1..20: note = Target: FXN; (+) strand; PAM type: NNGRRT; PAM sequence: CGGGGT
  source 1..20: mol_type = other DNA
ttttgtattttcagtagaga

SEQ ID NO: 6864 - DNA, 20 bp, synthetic construct
  misc_feature 1..20: note = Description of Artificial Sequence: Synthetic oligonucleotide
  misc_feature 1..20: note = Target: FXN; (+) strand; PAM type: NNGRRT; PAM sequence: CAGGAT
  source 1..20: mol_type = other DNA
cggggtttcaccatgttagc

SEQ ID NO: 6865 - DNA, 20 bp, synthetic construct
  misc_feature 1..20: note = Description of Artificial Sequence: Synthetic oligonucleotide
  misc_feature 1..20: note = Target: FXN; (+) strand; PAM type: NNGRRT; PAM sequence: CAGAGT
  source 1..20: mol_type = other DNA
atctgcctgcctcggcctcc

SEQ ID NO: 6866 - DNA, 20 bp, synthetic construct
  misc_feature 1..20: note = Description of Artificial Sequence: Synthetic oligonucleotide
  misc_feature 1..20: note = Target: FXN; (+) strand; PAM type: NNGRRT; PAM sequence: TGGGAT
  source 1..20: mol_type = other DNA
gcctcggcctcccagagtgc

SEQ ID NO: 6867 - DNA, 20 bp, synthetic construct
  misc_feature 1..20: note = Description of Artificial Sequence: Synthetic oligonucleotide
  misc_feature 1..20: note = Target: FXN; (+) strand; PAM type: NNGRRT; PAM sequence: GTGGAT
  source 1..20: mol_type = other DNA
tcgagaagctgaggcacgtg

SEQ ID NO: 6868 - DNA, 20 bp, synthetic construct
  misc_feature 1..20: note = Description of Artificial Sequence: Synthetic oligonucleotide
  misc_feature 1..20: note = Target: FXN; (+) strand; PAM type: NNGRRT; PAM sequence: ACGAGT
  source 1..20: mol_type = other DNA
gtggtggatcacttgatgtc

SEQ ID NO: 6869 - DNA, 20 bp, synthetic construct
  misc_feature 1..20: note = Description of Artificial Sequence: Synthetic oligonucleotide
  misc_feature 1..20: note = Target: FXN; (+) strand; PAM type: NNGRRT; PAM sequence: CTGGGT
  source 1..20: mol_type = other DNA
accagccactgcactccagc

SEQ ID NO: 6870 - DNA, 20 bp, synthetic construct
  misc_feature 1..20: note = Description of Artificial Sequence: Synthetic oligonucleotide
  misc_feature 1..20: note = Target: FXN; (+) strand; PAM type: NNGRRT; PAM sequence: CAGAGT
  source 1..20: mol_type = other DNA
ctgcactccagcctgggtga

SEQ ID NO: 6871 - DNA, 20 bp, synthetic construct
  misc_feature 1..20: note = Description of Artificial Sequence: Synthetic oligonucleotide
  misc_feature 1..20: note = Target: FXN; (+) strand; PAM type: NNGRRT; PAM sequence: ATGAAT
  source 1..20: mol_type = other DNA
atgttattttcatcaattta

SEQ ID NO: 6872 - DNA, 20 bp, synthetic construct
  misc_feature 1..20: note = Description of Artificial Sequence: Synthetic oligonucleotide
  misc_feature 1..20: note = Target: FXN; (+) strand; PAM type: NNGRRT; PAM sequence: TTGGGT
  source 1..20: mol_type = other DNA
aagcatttggtaatcatgtt

SEQ ID NO: 6873 - DNA, 20 bp, synthetic construct
  misc_feature 1..20: note = Description of Artificial Sequence: Synthetic oligonucleotide
  misc_feature 1..20: note = Target: FXN; (+) strand; PAM type: NNGRRT; PAM sequence: CAGAGT
  source 1..20: mol_type = other DNA
ggaaacgctggactctttag

SEQ ID NO: 6874 - DNA, 20 bp, synthetic construct
  misc_feature 1..20: note = Description of Artificial Sequence: Synthetic oligonucleotide
  misc_feature 1..20: note = Target: FXN; (+) strand; PAM type: NNGRRT; PAM sequence: TGGGGT
  source 1..20: mol_type = other DNA
gaggactatgatgtctcctt

SEQ ID NO: 6875 - DNA, 20 bp, synthetic construct
  misc_feature 1..20: note = Description of Artificial Sequence: Synthetic oligonucleotide
  misc_feature 1..20: note = Target: FXN; (+) strand; PAM type: NNGRRT; PAM sequence: AAGAAT
  source 1..20: mol_type = other DNA
atttttctgtttccccctct

SEQ ID NO: 6876 - DNA, 20 bp, synthetic construct
  misc_feature 1..20: note = Description of Artificial Sequence: Synthetic oligonucleotide
  misc_feature 1..20: note = Target: FXN; (+) strand; PAM type: NNGRRT; PAM sequence: AAGAAT
  source 1..20: mol_type = other DNA
aattttagttcactaaaatg

SEQ ID NO: 6877 - DNA, 20 bp, synthetic construct
  misc_feature 1..20: note = Description of Artificial Sequence: Synthetic oligonucleotide
  misc_feature 1..20: note = Target: FXN; (+) strand; PAM type: NNGRRT; PAM sequence: TAGGAT
  source 1..20: mol_type = other DNA
aagtagcatgtagttgtagg

SEQ ID NO: 6878 - DNA, 20 bp, synthetic construct
  misc_feature 1..20: note = Description of Artificial Sequence: Synthetic oligonucleotide
  misc_feature 1..20: note = Target: FXN; (+) strand; PAM type: NNGRRT; PAM sequence: TAGGGT
  source 1..20: mol_type = other DNA
tgtaggtaggattaaaagac

SEQ ID NO: 6879 - DNA, 20 bp, synthetic construct
  misc_feature 1..20: note = Description of Artificial Sequence: Synthetic oligonucleotide
  misc_feature 1..20: note = Target: FXN; (+) strand; PAM type: NNGRRT; PAM sequence: CTGGGT
  source 1..20: mol_type = other DNA
tcacgccactgcactccagc

SEQ ID NO: 6880 - DNA, 20 bp, synthetic construct
  misc_feature 1..20: note = Description of Artificial Sequence: Synthetic oligonucleotide
  misc_feature 1..20: note = Target: FXN; (+) strand; PAM type: NNGRRT; PAM sequence: ATGGAT
  source 1..20: mol_type = other DNA
agagcgagactctgtcatag

SEQ ID NO: 6881 - DNA, 20 bp, synthetic construct
  misc_feature 1..20: note = Description of Artificial Sequence: Synthetic oligonucleotide
  misc_feature 1..20: note = Target: FXN; (+) strand; PAM type: NNGRRT; PAM sequence: ATGGAT
  source 1..20: mol_type = other DNA
cgagactctgtcatagatgg

SEQ ID NO: 6882 - DNA, 20 bp, synthetic construct
  misc_feature 1..20: note = Description of Artificial Sequence: Synthetic oligonucleotide
  misc_feature 1..20: note = Target: FXN; (+) strand; PAM type: NNGRRT; PAM sequence: ATGGAT
  source 1..20: mol_type = other DNA
actctgtcatagatggatgg

SEQ ID NO: 6883 - DNA, 20 bp, synthetic construct
  misc_feature 1..20: note = Description of Artificial Sequence: Synthetic oligonucleotide
  misc_feature 1..20: note = Target: FXN; (+) strand; PAM type: NNGRRT; PAM sequence: ATGGAT
  source 1..20: mol_type = other DNA
tgtcatagatggatggatgg

SEQ ID NO: 6884 - DNA, 20 bp, synthetic construct
  misc_feature 1..20: note = Description of Artificial Sequence: Synthetic oligonucleotide
  misc_feature 1..20: note = Target: FXN; (+) strand; PAM type: NNGRRT; PAM sequence: ATGGAT
  source 1..20: mol_type = other DNA
atagatggatggatggatgg

SEQ ID NO: 6885 - DNA, 20 bp, synthetic construct
  misc_feature 1..20: note = Description of Artificial Sequence: Synthetic oligonucleotide
  misc_feature 1..20: note = Target: FXN; (+) strand; PAM type: NNGRRT; PAM sequence: ATGGAT
  source 1..20: mol_type = other DNA
atggatggatggatggatgg

SEQ ID NO: 6886 - DNA, 20 bp, synthetic construct
  misc_feature 1..20: note = Description of Artificial Sequence: Synthetic oligonucleotide
  misc_feature 1..20: note = Target: FXN; (+) strand; PAM type: NNGRRT; PAM sequence: ATGGAT
  source 1..20: mol_type = other DNA
atggatggatggatggatgg

SEQ ID NO: 6887 - DNA, 20 bp, synthetic construct
  misc_feature 1..20: note = Description of Artificial Sequence: Synthetic oligonucleotide
  misc_feature 1..20: note = Target: FXN; (+) strand; PAM type: NNGRRT; PAM sequence: ATGGAT
  source 1..20: mol_type = other DNA
atggatggatggatggatgg

SEQ ID NO: 6888 - DNA, 20 bp, synthetic construct
  misc_feature 1..20: note = Description of Artificial Sequence: Synthetic oligonucleotide
  misc_feature 1..20: note = Target: FXN; (+) strand; PAM type: NNGRRT; PAM sequence: ATGGAT
  source 1..20: mol_type = other DNA
atggatggatggatggatgg

SEQ ID NO: 6889 - DNA, 20 bp, synthetic construct
  misc_feature 1..20: note = Description of Artificial Sequence: Synthetic oligonucleotide
  misc_feature 1..20: note = Target: FXN; (+) strand; PAM type: NNGRRT; PAM sequence: CTGGAT
  source 1..20: mol_type = other DNA
atagatagatagatagatag

SEQ ID NO: 6890 - DNA, 20 bp, synthetic construct
  misc_feature 1..20: note = Description of Artificial Sequence: Synthetic oligonucleotide
  misc_feature 1..20: note = Target: FXN; (+) strand; PAM type: NNGRRT; PAM sequence: GTGGAT
  source 1..20: mol_type = other DNA
agcctcattttccagcttca

SEQ ID NO: 6891 - DNA, 20 bp, synthetic construct
  misc_feature 1..20: note = Description of Artificial Sequence: Synthetic oligonucleotide
  misc_feature 1..20: note = Target: FXN; (+) strand; PAM type: NNGRRT; PAM sequence: CTGAGT
  source 1..20: mol_type = other DNA
aaggcaaatcagagaggggc

SEQ ID NO: 6892 - DNA, 20 bp, synthetic construct
  misc_feature 1..20: note = Description of Artificial Sequence: Synthetic oligonucleotide
  misc_feature 1..20: note = Target: FXN; (+) strand; PAM type: NNGRRT; PAM sequence: AGGGAT
  source 1..20: mol_type = other DNA
tagacccgtagttcttcagt

SEQ ID NO: 6893 - DNA, 20 bp, synthetic construct
  misc_feature 1..20: note = Description of Artificial Sequence: Synthetic oligonucleotide
  misc_feature 1..20: note = Target: FXN; (+) strand; PAM type: NNGRRT; PAM sequence: TGGGGT
  source 1..20: mol_type = other DNA
ctgctcctgtgagacagtga

SEQ ID NO: 6894 - DNA, 20 bp, synthetic construct
  misc_feature 1..20: note = Description of Artificial Sequence: Synthetic oligonucleotide
  misc_feature 1..20: note = Target: FXN; (+) strand; PAM type: NNGRRT; PAM sequence: TCGGGT
  source 1..20: mol_type = other DNA
tgagacagtgatggggtagg

SEQ ID NO: 6895 - DNA, 20 bp, synthetic construct
  misc_feature 1..20: note = Description of Artificial Sequence: Synthetic oligonucleotide
  misc_feature 1..20: note = Target: FXN; (+) strand; PAM type: NNGRRT; PAM sequence: TGGGAT
  source 1..20: mol_type = other DNA
atatttttgaaaagctcacc

SEQ ID NO: 6896 - DNA, 20 bp, synthetic construct
  misc_feature 1..20: note = Description of Artificial Sequence: Synthetic oligonucleotide
  misc_feature 1..20: note = Target: FXN; (+) strand; PAM type: NNGRRT; PAM sequence: TGGGGT
  source 1..20: mol_type = other DNA
gagattttgattacttggtc

SEQ ID NO: 6897 - DNA, 20 bp, synthetic construct
  misc_feature 1..20: note = Description of Artificial Sequence: Synthetic oligonucleotide
  misc_feature 1..20: note = Target: FXN; (+) strand; PAM type: NNGRRT; PAM sequence: TGGGAT
  source 1..20: mol_type = other DNA
gcatgacctgggcagggcac

SEQ ID NO: 6898 - DNA, 20 bp, synthetic construct
  misc_feature 1..20: note = Description of Artificial Sequence: Synthetic oligonucleotide
  misc_feature 1..20: note = Target: FXN; (+) strand; PAM type: NNGRRT; PAM sequence: AGGAGT
  source 1..20: mol_type = other DNA
gagaacttgtttttttttga

SEQ ID NO: 6899 - DNA, 20 bp, synthetic construct
  misc_feature 1..20: note = Description of Artificial Sequence: Synthetic oligonucleotide
  misc_feature 1..20: note = Target: FXN; (+) strand; PAM type: NNGRRT; PAM sequence: TGGAGT
  source 1..20: mol_type = other DNA
tctcactctgtcacccaggc

SEQ ID NO: 6900 - DNA, 20 bp, synthetic construct
  misc_feature 1..20: note = Description of Artificial Sequence: Synthetic oligonucleotide
  misc_feature 1..20: note = Target: FXN; (+) strand; PAM type: NNGRRT; PAM sequence: CTGGGT
  source 1..20: mol_type = other DNA
tcggctcactgctccgcttc

SEQ ID NO: 6901 - DNA, 20 bp, synthetic construct
  misc_feature 1..20: note = Description of Artificial Sequence: Synthetic oligonucleotide
  misc_feature 1..20: note = Target: FXN; (+) strand; PAM type: NNGRRT; PAM sequence: CCGAGT
  source 1..20: mol_type = other DNA
agttctcctgcctcagcctc

SEQ ID NO: 6902 - DNA, 20 bp, synthetic construct
  misc_feature 1..20: note = Description of Artificial Sequence: Synthetic oligonucleotide
  misc_feature 1..20: note = Target: FXN; (+) strand; PAM type: NNGRRT; PAM sequence: TGGGAT
  source 1..20: mol_type = other DNA
gcctcagcctcccgagtagc

SEQ ID NO: 6903 - DNA, 20 bp, synthetic construct
  misc_feature 1..20: note = Description of Artificial Sequence: Synthetic oligonucleotide
  misc_feature 1..20: note = Target: FXN; (+) strand; PAM type: NNGRRT; PAM sequence: CGGGGT
  source 1..20: mol_type = other DNA
tttttgcattttagtaaaga

SEQ ID NO: 6904 - DNA, 20 bp, synthetic construct
  misc_feature 1..20: note = Description of Artificial Sequence: Synthetic oligonucleotide
  misc_feature 1..20: note = Target: FXN; (+) strand; PAM type: NNGRRT; PAM sequence: TGGGAT
  source 1..20: mol_type = other DNA
ccatcagccttccaaagttt

SEQ ID NO: 6905 - DNA, 20 bp, synthetic construct
  misc_feature 1..20: note = Description of Artificial Sequence: Synthetic oligonucleotide
  misc_feature 1..20: note = Target: FXN; (+) strand; PAM type: NNGRRT; PAM sequence: CTGAGT
  source 1..20: mol_type = other DNA
ccggcctggtgtgagaactt

SEQ ID NO: 6906 - DNA, 20 bp, synthetic construct
  misc_feature 1..20: note = Description of Artificial Sequence: Synthetic oligonucleotide
  misc_feature 1..20: note = Target: FXN; (+) strand; PAM type: NNGRRT; PAM sequence: TTGGAT
  source 1..20: mol_type = other DNA
ctggtgtgagaacttctgag

SEQ ID NO: 6907 - DNA, 20 bp, synthetic construct
  misc_feature 1..20: note = Description of Artificial Sequence: Synthetic oligonucleotide
  misc_feature 1..20: note = Target: FXN; (+) strand; PAM type: NNGRRT; PAM sequence: AAGGGT
  source 1..20: mol_type = other DNA
accaggtggcagatttgggc

SEQ ID NO: 6908 - DNA, 20 bp, synthetic construct
  misc_feature 1..20: note = Description of Artificial Sequence: Synthetic oligonucleotide
  misc_feature 1..20: note = Target: FXN; (+) strand; PAM type: NNGRRT; PAM sequence: TTGGGT
  source 1..20: mol_type = other DNA
atttgggcaagggtctgcct

SEQ ID NO: 6909 - DNA, 20 bp, synthetic construct
  misc_feature 1..20: note = Description of Artificial Sequence: Synthetic oligonucleotide
  misc_feature 1..20: note = Target: FXN; (+) strand; PAM type: NNGRRT; PAM sequence: TAGAAT
  source 1..20: mol_type = other DNA
caagggtctgcctttgggtt

SEQ ID NO: 6910 - DNA, 20 bp, synthetic construct
  misc_feature 1..20: note = Description of Artificial Sequence: Synthetic oligonucleotide
  misc_feature 1..20: note = Target: FXN; (+) strand; PAM type: NNGRRT; PAM sequence: CTGGGT
  source 1..20: mol_type = other DNA
aatccctcaaagatggtttt

SEQ ID NO: 6911 - DNA, 20 bp, synthetic construct
  misc_feature 1..20: note = Description of Artificial Sequence: Synthetic oligonucleotide
  misc_feature 1..20: note = Target: FXN; (+) strand; PAM type: NNGRRT; PAM sequence: CAGAGT
  source 1..20: mol_type = other DNA
tgtttgtttgttttttgaga

SEQ ID NO: 6912 - DNA, 20 bp, synthetic construct
  misc_feature 1..20: note = Description of Artificial Sequence: Synthetic oligonucleotide
  misc_feature 1..20: note = Target: FXN; (+) strand; PAM type: NNGRRT; PAM sequence: TGGAGT
  source 1..20: mol_type = other DNA
tctccctctgttattcagcc

SEQ ID NO: 6913 - DNA, 20 bp, synthetic construct
  misc_feature 1..20: note = Description of Artificial Sequence: Synthetic oligonucleotide
  misc_feature 1..20: note = Target: FXN; (+) strand; PAM type: NNGRRT; PAM sequence: TCGGGT
  source 1..20: mol_type = other DNA
ctcactgcaacctctgcctc

SEQ ID NO: 6914 - DNA, 20 bp, synthetic construct
  misc_feature 1..20: note = Description of Artificial Sequence: Synthetic oligonucleotide
  misc_feature 1..20: note = Target: FXN; (+) strand; PAM type: NNGRRT; PAM sequence: TGGAAT
  source 1..20: mol_type = other DNA
gcctcaacctcccaagtagc

SEQ ID NO: 6915 - DNA, 20 bp, synthetic construct
  misc_feature 1..20: note = Description of Artificial Sequence: Synthetic oligonucleotide
  misc_feature 1..20: note = Target: FXN; (+) strand; PAM type: NNGRRT; PAM sequence: TAGGAT
  source 1..20: mol_type = other DNA
acctcagcctcccaaagtgc

SEQ ID NO: 6916 - DNA, 20 bp, synthetic construct
  misc_feature 1..20: note = Description of Artificial Sequence: Synthetic oligonucleotide
  misc_feature 1..20: note = Target: FXN; (+) strand; PAM type: NNGRRT; PAM sequence: TTGGAT
  source 1..20: mol_type = other DNA
aatgtcacgaagcgtgcatt

SEQ ID NO: 6917 - DNA, 20 bp, synthetic construct
  misc_feature 1..20: note = Description of Artificial Sequence: Synthetic oligonucleotide
  misc_feature 1..20: note = Target: FXN; (+) strand; PAM type: NNGRRT; PAM sequence: TGGAAT
  source 1..20: mol_type = other DNA
gtgcattttggattcaatca

SEQ ID NO: 6918 - DNA, 20 bp, synthetic construct
  misc_feature 1..20: note = Description of Artificial Sequence: Synthetic oligonucleotide
  misc_feature 1..20: note = Target: FXN; (+) strand; PAM type: NNGRRT; PAM sequence: CTGAAT
  source 1..20: mol_type = other DNA
tggaaattgcagcgggagca

SEQ ID NO: 6919 - DNA, 20 bp, synthetic construct
  misc_feature 1..20: note = Description of Artificial Sequence: Synthetic oligonucleotide
  misc_feature 1..20: note = Target: FXN; (+) strand; PAM type: NNGRRT; PAM sequence: GGGAAT
  source 1..20: mol_type = other DNA
cctgactataaggacagtga

SEQ ID NO: 6920 - DNA, 20 bp, synthetic construct
  misc_feature 1..20: note = Description of Artificial Sequence: Synthetic oligonucleotide
  misc_feature 1..20: note = Target: FXN; (+) strand; PAM type: NNGRRT; PAM sequence: AAGGAT
  source 1..20: mol_type = other DNA
aaaggagcaatggagcaggg

SEQ ID NO: 6921 - DNA, 20 bp, synthetic construct
  misc_feature 1..20: note = Description of Artificial Sequence: Synthetic oligonucleotide
  misc_feature 1..20: note = Target: FXN; (+) strand; PAM type: NNGRRT; PAM sequence: TTGAAT
  source 1..20: mol_type = other DNA
agcaatggagcagggaagga

SEQ ID NO: 6922 - DNA, 20 bp, synthetic construct
  misc_feature 1..20: note = Description of Artificial Sequence: Synthetic oligonucleotide
  misc_feature 1..20: note = Target: FXN; (+) strand; PAM type: NNGRRT; PAM sequence: GGGAGT
  source 1..20: mol_type = other DNA
cacagcctgatcagaggtgg

SEQ ID NO: 6923 - DNA, 20 bp, synthetic construct
  misc_feature 1..20: note = Description of Artificial Sequence: Synthetic oligonucleotide
  misc_feature 1..20: note = Target: FXN; (+) strand; PAM type: NNGRRT; PAM sequence: TAGGAT
  source 1..20: mol_type = other DNA
agtcatgaaacctgttttta

SEQ ID NO: 6924 - DNA, 20 bp, synthetic construct
  misc_feature 1..20: note = Description of Artificial Sequence: Synthetic oligonucleotide
  misc_feature 1..20: note = Target: FXN; (+) strand; PAM type: NNGRRT; PAM sequence: CAGAGT
  source 1..20: mol_type = other DNA
tagtgaagccccagtttgac

SEQ ID NO: 6925 - DNA, 20 bp, synthetic construct
  misc_feature 1..20: note = Description of Artificial Sequence: Synthetic oligonucleotide
  misc_feature 1..20: note = Target: FXN; (+) strand; PAM type: NNGRRT; PAM sequence: ATGAAT
  source 1..20: mol_type = other DNA
gtttgaccagagtactttgc

SEQ ID NO: 6926 - DNA, 20 bp, synthetic construct
  misc_feature 1..20: note = Description of Artificial Sequence: Synthetic oligonucleotide
  misc_feature 1..20: note = Target: FXN; (+) strand; PAM type: NNGRRT; PAM sequence: TTGAGT
  source 1..20: mol_type = other DNA
cttcttcttttttttttttt

SEQ ID NO: 6927 - DNA, 20 bp, synthetic construct
  misc_feature 1..20: note = Description of Artificial Sequence: Synthetic oligonucleotide
  misc_feature 1..20: note = Target: FXN; (+) strand; PAM type: NNGRRT; PAM sequence: TGGAGT
  source 1..20: mol_type = other DNA
cctagctctgtcacccaggc

SEQ ID NO: 6928 - DNA, 20 bp, synthetic construct
  misc_feature 1..20: note = Description of Artificial Sequence: Synthetic oligonucleotide
  misc_feature 1..20: note = Target: FXN; (+) strand; PAM type: NNGRRT; PAM sequence: CTGAGT
  source 1..20: mol_type = other DNA
gattctcccgcctcaacctc

SEQ ID NO: 6929 - DNA, 20 bp, synthetic construct
  misc_feature 1..20: note = Description of Artificial Sequence: Synthetic oligonucleotide
  misc_feature 1..20: note = Target: FXN; (+) strand; PAM type: NNGRRT; PAM sequence: TGGGAT
  source 1..20: mol_type = other DNA
gcctcaacctcctgagtagc

SEQ ID NO: 6930 - DNA, 20 bp, synthetic construct
  misc_feature 1..20: note = Description of Artificial Sequence: Synthetic oligonucleotide
  misc_feature 1..20: note = Target: FXN; (+) strand; PAM type: NNGRRT; PAM sequence: TGGGGT
  source 1..20: mol_type = other DNA
ttttgtatttttagtagaaa

SEQ ID NO: 6931 - DNA, 20 bp, synthetic construct
  misc_feature 1..20: note = Description of Artificial Sequence: Synthetic oligonucleotide
  misc_feature 1..20: note = Target: FXN; (+) strand; PAM type: NNGRRT; PAM sequence: CTGGGT
  source 1..20: mol_type = other DNA
cgcctcagcctcctaaagtg

SEQ ID NO: 6932 - DNA, 20 bp, synthetic construct
  misc_feature 1..20: note = Description of Artificial Sequence: Synthetic oligonucleotide
  misc_feature 1..20: note = Target: FXN; (+) strand; PAM type: NNGRRT; PAM sequence: TGGAGT
  source 1..20: mol_type = other DNA
cctcgctctgtcacccaggc

SEQ ID NO: 6933 - DNA, 20 bp, synthetic construct
  misc_feature 1..20: note = Description of Artificial Sequence: Synthetic oligonucleotide
  misc_feature 1..20: note = Target: FXN; (+) strand; PAM type: NNGRRT; PAM sequence: ATGGGT
  source 1..20: mol_type = other DNA
ctaattattttattttattt

SEQ ID NO: 6934 - DNA, 20 bp, synthetic construct
  misc_feature 1..20: note = Description of Artificial Sequence: Synthetic oligonucleotide
  misc_feature 1..20: note = Target: FXN; (+) strand; PAM type: NNGRRT; PAM sequence: CGGGAT
  source 1..20: mol_type = other DNA
acctcggcctcccaaagcac

SEQ ID NO: 6935 - DNA, 20 bp, synthetic construct
  misc_feature 1..20: note = Description of Artificial Sequence: Synthetic oligonucleotide
  misc_feature 1..20: note = Target: FXN; (+) strand; PAM type: NNGRRT; PAM sequence: GAGGGT
  source 1..20: mol_type = other DNA
aaaggaggactatttctaaa

SEQ ID NO: 6936 - DNA, 20 bp, synthetic construct
  misc_feature 1..20: note = Description of Artificial Sequence: Synthetic oligonucleotide
  misc_feature 1..20: note = Target: FXN; (+) strand; PAM type: NNGRRT; PAM sequence: ATGAAT
  source 1..20: mol_type = other DNA
caagaaggggcaaagggaac

SEQ ID NO: 6937 - DNA, 20 bp, synthetic construct
  misc_feature 1..20: note = Description of Artificial Sequence: Synthetic oligonucleotide
  misc_feature 1..20: note = Target: FXN; (+) strand; PAM type: NNGRRT; PAM sequence: GAGGAT
  source 1..20: mol_type = other DNA
acatattcaacagattatgg

SEQ ID NO: 6938 - DNA, 20 bp, synthetic construct
  misc_feature 1..20: note = Description of Artificial Sequence: Synthetic oligonucleotide
  misc_feature 1..20: note = Target: FXN; (+) strand; PAM type: NNGRRT; PAM sequence: ATGAAT
  source 1..20: mol_type = other DNA
aacagattatgggaggatct

SEQ ID NO: 6939 - DNA, 20 bp, synthetic construct
  misc_feature 1..20: note = Description of Artificial Sequence: Synthetic oligonucleotide
  misc_feature 1..20: note = Target: FXN; (+) strand; PAM type: NNGRRT; PAM sequence: GAGGAT
  source 1..20: mol_type = other DNA
tctatgaatattcacaaagg

SEQ ID NO: 6940 - DNA, 20 bp, synthetic construct
  misc_feature 1..20: note = Description of Artificial Sequence: Synthetic oligonucleotide
  misc_feature 1..20: note = Target: FXN; (+) strand; PAM type: NNGRRT; PAM sequence: ATGAAT
  source 1..20: mol_type = other DNA
tattcacaaagggaggatct

SEQ ID NO: 6941 - DNA, 20 bp, synthetic construct
  misc_feature 1..20: note = Description of Artificial Sequence: Synthetic oligonucleotide
  misc_feature 1..20: note = Target: FXN; (+) strand; PAM type: NNGRRT; PAM sequence: TGGAGT
  source 1..20: mol_type = other DNA
tctatgaatatgcacacatg

SEQ ID NO: 6942 - DNA, 20 bp, synthetic construct
  misc_feature 1..20: note = Description of Artificial Sequence: Synthetic oligonucleotide
  misc_feature 1..20: note = Target: FXN; (+) strand; PAM type: NNGRRT; PAM sequence: GGGAGT
  source 1..20: mol_type = other DNA
caggagcatcacttaagact

SEQ ID NO: 6943 - DNA, 20 bp, synthetic construct
  misc_feature 1..20: note = Description of Artificial Sequence: Synthetic oligonucleotide
  misc_feature 1..20: note = Target: FXN; (+) strand; PAM type: NNGRRT; PAM sequence: CAGGAT
  source 1..20: mol_type = other DNA
tcgcaccactgttctccagc

SEQ ID NO: 6944 - DNA, 20 bp, synthetic construct
  misc_feature 1..20: note = Description of Artificial Sequence: Synthetic oligonucleotide
  misc_feature 1..20: note = Target: FXN; (+) strand; PAM type: NNGRRT; PAM sequence: AGGAAT
  source 1..20: mol_type = other DNA
gtggtcagtggttatcagga

SEQ ID NO: 6945 - DNA, 20 bp, synthetic construct
  misc_feature 1..20: note = Description of Artificial Sequence: Synthetic oligonucleotide
  misc_feature 1..20: note = Target: FXN; (+) strand; PAM type: NNGRRT; PAM sequence: CAGAAT
  source 1..20: mol_type = other DNA
aaaccactaaaaaggaaggg

SEQ ID NO: 6946 - DNA, 20 bp, synthetic construct
  misc_feature 1..20: note = Description of Artificial Sequence: Synthetic oligonucleotide
  misc_feature 1..20: note = Target: FXN; (+) strand; PAM type: NNGRRT; PAM sequence: ATGAGT
  source 1..20: mol_type = other DNA
aggaagggcagaattaggtg

SEQ ID NO: 6947 - DNA, 20 bp, synthetic construct
  misc_feature 1..20: note = Description of Artificial Sequence: Synthetic oligonucleotide
  misc_feature 1..20: note = Target: FXN; (+) strand; PAM type: NNGRRT; PAM sequence: GTGAGT
  source 1..20: mol_type = other DNA
gagttgataccagtggtgaa

SEQ ID NO: 6948 - DNA, 20 bp, synthetic construct
  misc_feature 1..20: note = Description of Artificial Sequence: Synthetic oligonucleotide
  misc_feature 1..20: note = Target: FXN; (+) strand; PAM type: NNGRRT; PAM sequence: TGGAGT
  source 1..20: mol_type = other DNA
ttttttttttctttttgaga

SEQ ID NO: 6949 - DNA, 20 bp, synthetic construct
  misc_feature 1..20: note = Description of Artificial Sequence: Synthetic oligonucleotide
  misc_feature 1..20: note = Target: FXN; (+) strand; PAM type: NNGRRT; PAM sequence: TGGAGT
  source 1..20: mol_type = other DNA
tcttgctctgttgcccaggc

SEQ ID NO: 6950 - DNA, 20 bp, synthetic construct
  misc_feature 1..20: note = Description of Artificial Sequence: Synthetic oligonucleotide
  misc_feature 1..20: note = Target: FXN; (+) strand; PAM type: NNGRRT; PAM sequence: CTGGGT
  source 1..20: mol_type = other DNA
ctcatcgcaacctccacctc

SEQ ID NO: 6951 - DNA, 20 bp, synthetic construct
  misc_feature 1..20: note = Description of Artificial Sequence: Synthetic oligonucleotide
  misc_feature 1..20: note = Target: FXN; (+) strand; PAM type: NNGRRT; PAM sequence: CCGAGT
  source 1..20: mol_type = other DNA
gattctcttgcctcagcctc

SEQ ID NO: 6952 - DNA, 20 bp, synthetic construct
  misc_feature 1..20: note = Description of Artificial Sequence: Synthetic oligonucleotide
  misc_feature 1..20: note = Target: FXN; (+) strand; PAM type: NNGRRT; PAM sequence: TGGGAT
  source 1..20: mol_type = other DNA
gcctcagcctcccgagtagc

SEQ ID NO: 6953 - DNA, 20 bp, synthetic construct
  misc_feature 1..20: note = Description of Artificial Sequence: Synthetic oligonucleotide
  misc_feature 1..20: note = Target: FXN; (+) strand; PAM type: NNGRRT; PAM sequence: CTGGGT
  source 1..20: mol_type = other DNA
ttttatatttttagtagaga

SEQ ID NO: 6954 - DNA, 20 bp, synthetic construct
  misc_feature 1..20: note = Description of Artificial Sequence: Synthetic oligonucleotide
  misc_feature 1..20: note = Target: FXN; (+) strand; PAM type: NNGRRT; PAM sequence: TGGGAT
  source 1..20: mol_type = other DNA
gctttggcctcccaaagtgc

SEQ ID NO: 6955 - DNA, 20 bp, synthetic construct
  misc_feature 1..20: note = Description of Artificial Sequence: Synthetic oligonucleotide
  misc_feature 1..20: note = Target: FXN; (+) strand; PAM type: NNGRRT; PAM sequence: TGGGAT
  source 1..20: mol_type = other DNA
tacaggcagctccaaagtgc

SEQ ID NO: 6956 - DNA, 20 bp, synthetic construct
  misc_feature 1..20: note = Description of Artificial Sequence: Synthetic oligonucleotide
  misc_feature 1..20: note = Target: FXN; (+) strand; PAM type: NNGRRT; PAM sequence: GGGAAT
  source 1..20: mol_type = other DNA
aaactaatggcagttaggga

SEQ ID NO: 6957 - DNA, 20 bp, synthetic construct
  misc_feature 1..20: note = Description of Artificial Sequence: Synthetic oligonucleotide
  misc_feature 1..20: note = Target: FXN; (+) strand; PAM type: NNGRRT; PAM sequence: ACGAGT
  source 1..20: mol_type = other DNA
gcagttagggagggaataga

SEQ ID NO: 6958 - DNA, 20 bp, synthetic construct
  misc_feature 1..20: note = Description of Artificial Sequence: Synthetic oligonucleotide
  misc_feature 1..20: note = Target: FXN; (+) strand; PAM type: NNGRRT; PAM sequence: TTGAGT
  source 1..20: mol_type = other DNA
cttggccaaaagatagtttg

SEQ ID NO: 6959 - DNA, 20 bp, synthetic construct
  misc_feature 1..20: note = Description of Artificial Sequence: Synthetic oligonucleotide
  misc_feature 1..20: note = Target: FXN; (+) strand; PAM type: NNGRRT; PAM sequence: TAGAAT
  source 1..20: mol_type = other DNA
tgttgagtcagttgggagct

SEQ ID NO: 6960 - DNA, 20 bp, synthetic construct
  misc_feature 1..20: note = Description of Artificial Sequence: Synthetic oligonucleotide
  misc_feature 1..20: note = Target: FXN; (+) strand; PAM type: NNGRRT; PAM sequence: TTGAAT
  source 1..20: mol_type = other DNA
tgtttttatttctcacatca

SEQ ID NO: 6961 - DNA, 20 bp, synthetic construct
  misc_feature 1..20: note = Description of Artificial Sequence: Synthetic oligonucleotide
  misc_feature 1..20: note = Target: FXN; (+) strand; PAM type: NNGRRT; PAM sequence: GTGGGT
  source 1..20: mol_type = other DNA
aaaaccttctgctcccagta

SEQ ID NO: 6962 - DNA, 20 bp, synthetic construct
  misc_feature 1..20: note = Description of Artificial Sequence: Synthetic oligonucleotide
  misc_feature 1..20: note = Target: FXN; (+) strand; PAM type: NNGRRT; PAM sequence: TTGAGT
  source 1..20: mol_type = other DNA
ttctagccaattcatatacc

SEQ ID NO: 6963 - DNA, 20 bp, synthetic construct
  misc_feature 1..20: note = Description of Artificial Sequence: Synthetic oligonucleotide
  misc_feature 1..20: note = Target: FXN; (+) strand; PAM type: NNGRRT; PAM sequence: TAGAGT
  source 1..20: mol_type = other DNA
gaaatgctaactctgtaccc

SEQ ID NO: 6964 - DNA, 20 bp, synthetic construct
  misc_feature 1..20: note = Description of Artificial Sequence: Synthetic oligonucleotide
  misc_feature 1..20: note = Target: FXN; (+) strand; PAM type: NNGRRT; PAM sequence: ATGAAT
  source 1..20: mol_type = other DNA
ctaactctgtaccctagagt

SEQ ID NO: 6965 - DNA, 20 bp, synthetic construct
  misc_feature 1..20: note = Description of Artificial Sequence: Synthetic oligonucleotide
  misc_feature 1..20: note = Target: FXN; (+) strand; PAM type: NNGRRT; PAM sequence: TAGAGT
  source 1..20: mol_type = other DNA
ctagagtatgaattcctgat

SEQ ID NO: 6966 - DNA, 20 bp, synthetic construct
  misc_feature 1..20: note = Description of Artificial Sequence: Synthetic oligonucleotide
  misc_feature 1..20: note = Target: FXN; (+) strand; PAM type: NNGRRT; PAM sequence: CTGAGT
  source 1..20: mol_type = other DNA
cagctaccacctataacaca

SEQ ID NO: 6967 - DNA, 20 bp, synthetic construct
  misc_feature 1..20: note = Description of Artificial Sequence: Synthetic oligonucleotide
  misc_feature 1..20: note = Target: FXN; (+) strand; PAM type: NNGRRT; PAM sequence: TGGAGT
  source 1..20: mol_type = other DNA
tctgttcttttttctctctg

SEQ ID NO: 6968 - DNA, 20 bp, synthetic construct
  misc_feature 1..20: note = Description of Artificial Sequence: Synthetic oligonucleotide
  misc_feature 1..20: note = Target: FXN; (+) strand; PAM type: NNGRRT; PAM sequence: GTGGAT
  source 1..20: mol_type = other DNA
tcaagtggtccaggtaacag

SEQ ID NO: 6969 - DNA, 20 bp, synthetic construct
  misc_feature 1..20: note = Description of Artificial Sequence: Synthetic oligonucleotide
  misc_feature 1..20: note = Target: FXN; (+) strand; PAM type: NNGRRT; PAM sequence: TGGAGT
  source 1..20: mol_type = other DNA
ctcttgtcactaggcagctg

SEQ ID NO: 6970 - DNA, 20 bp, synthetic construct
  misc_feature 1..20: note = Description of Artificial Sequence: Synthetic oligonucleotide
  misc_feature 1..20: note = Target: FXN; (+) strand; PAM type: NNGRRT; PAM sequence: TAGAGT
  source 1..20: mol_type = other DNA
aaaatctgcctggagactgt

SEQ ID NO: 6971 - DNA, 20 bp, synthetic construct
  misc_feature 1..20: note = Description of Artificial Sequence: Synthetic oligonucleotide
  misc_feature 1..20: note = Target: FXN; (+) strand; PAM type: NNGRRT; PAM sequence: TGGAGT
  source 1..20: mol_type = other DNA
gacctcttttttttcccagg

SEQ ID NO: 6972 - DNA, 20 bp, synthetic construct
  misc_feature 1..20: note = Description of Artificial Sequence: Synthetic oligonucleotide
  misc_feature 1..20: note = Target: FXN; (+) strand; PAM type: NNGRRT; PAM sequence: AAGGAT
  source 1..20: mol_type = other DNA
ggcatcttagatattttaat

SEQ ID NO: 6973 - DNA, 20 bp, synthetic construct
  misc_feature 1..20: note = Description of Artificial Sequence: Synthetic oligonucleotide
  misc_feature 1..20: note = Target: FXN; (+) strand; PAM type: NNGRRT; PAM sequence: GAGGGT
  source 1..20: mol_type = other DNA
catattactgtcttagaact

SEQ ID NO: 6974 - DNA, 20 bp, synthetic construct
  misc_feature 1..20: note = Description of Artificial Sequence: Synthetic oligonucleotide
  misc_feature 1..20: note = Target: FXN; (+) strand; PAM type: NNGRRT; PAM sequence: TTGGAT
  source 1..20: mol_type = other DNA
ctgagggttcttcatctttt

SEQ ID NO: 6975 - DNA, 20 bp, synthetic construct
  misc_feature 1..20: note = Description of Artificial Sequence: Synthetic oligonucleotide
  misc_feature 1..20: note = Target: FXN; (+) strand; PAM type: NNGRRT; PAM sequence: AAGAAT
  source 1..20: mol_type = other DNA
ttggatcaggacctccctct

SEQ ID NO: 6976 - DNA, 20 bp, synthetic construct
  misc_feature 1..20: note = Description of Artificial Sequence: Synthetic oligonucleotide
  misc_feature 1..20: note = Target: FXN; (+) strand; PAM type: NNGRRT; PAM sequence: CAGAGT
  source 1..20: mol_type = other DNA
aaaaactttaaacaaattaa

SEQ ID NO: 6977 - DNA, 20 bp, synthetic construct
  misc_feature 1..20: note = Description of Artificial Sequence: Synthetic oligonucleotide
  misc_feature 1..20: note = Target: FXN; (+) strand; PAM type: NNGRRT; PAM sequence: AAGAAT
  source 1..20: mol_type = other DNA
taacagagttttattcagca

SEQ ID NO: 6978 - DNA, 20 bp, synthetic construct
  misc_feature 1..20: note = Description of Artificial Sequence: Synthetic oligonucleotide
  misc_feature 1..20: note = Target: FXN; (+) strand; PAM type: NNGRRT; PAM sequence: CAGAAT
  source 1..20: mol_type = other DNA
taaatcgggaaggctgcaac

SEQ ID NO: 6979 - DNA, 20 bp, synthetic construct
  misc_feature 1..20: note = Description of Artificial Sequence: Synthetic oligonucleotide
  misc_feature 1..20: note = Target: FXN; (+) strand; PAM type: NNGRRT; PAM sequence: GAGGAT
  source 1..20: mol_type = other DNA
cggtgtgccacgtggttgga

SEQ ID NO: 6980 - DNA, 20 bp, synthetic construct
  misc_feature 1..20: note = Description of Artificial Sequence: Synthetic oligonucleotide
  misc_feature 1..20: note = Target: FXN; (+) strand; PAM type: NNGRRT; PAM sequence: TAGGAT
  source 1..20: mol_type = other DNA
ccacgtggttggagaggatt

SEQ ID NO: 6981 - DNA, 20 bp, synthetic construct
  misc_feature 1..20: note = Description of Artificial Sequence: Synthetic oligonucleotide
  misc_feature 1..20: note = Target: FXN; (+) strand; PAM type: NNGRRT; PAM sequence: GAGAAT
  source 1..20: mol_type = other DNA
tacttgggaggctgaggcag

SEQ ID NO: 6982 - DNA, 20 bp, synthetic construct
  misc_feature 1..20: note = Description of Artificial Sequence: Synthetic oligonucleotide
  misc_feature 1..20: note = Target: FXN; (+) strand; PAM type: NNGRRT; PAM sequence: CAGGAT
  source 1..20: mol_type = other DNA
aggcggagcttgcagtgagc

SEQ ID NO: 6983 - DNA, 20 bp, synthetic construct
  misc_feature 1..20: note = Description of Artificial Sequence: Synthetic oligonucleotide
  misc_feature 1..20: note = Target: FXN; (+) strand; PAM type: NNGRRT; PAM sequence: AAGAGT
  source 1..20: mol_type = other DNA
caaaactcggtgattggtac

SEQ ID NO: 6984 - DNA, 20 bp, synthetic construct
  misc_feature 1..20: note = Description of Artificial Sequence: Synthetic oligonucleotide
  misc_feature 1..20: note = Target: FXN; (+) strand; PAM type: NNGRRT; PAM sequence: AGGAGT
  source 1..20: mol_type = other DNA
acacttaagttaacatactc

SEQ ID NO: 6985 - DNA, 20 bp, synthetic construct
  misc_feature 1..20: note = Description of Artificial Sequence: Synthetic oligonucleotide
  misc_feature 1..20: note = Target: FXN; (+) strand; PAM type: NNGRRT; PAM sequence: TGGAGT
  source 1..20: mol_type = other DNA
tctcactctgtcacccaggc

SEQ ID NO: 6986 - DNA, 20 bp, synthetic construct
  misc_feature 1..20: note = Description of Artificial Sequence: Synthetic oligonucleotide
  misc_feature 1..20: note = Target: FXN; (+) strand; PAM type: NNGRRT; PAM sequence: AGGGAT
  source 1..20: mol_type = other DNA
accaccacctcctgggctca

SEQ ID NO: 6987 - DNA, 20 bp, synthetic construct
  misc_feature 1..20: note = Description of Artificial Sequence: Synthetic oligonucleotide
  misc_feature 1..20: note = Target: FXN; (+) strand; PAM type: NNGRRT; PAM sequence: CCGAGT
  source 1..20: mol_type = other DNA
gattctcttgcctcagtctc

SEQ ID NO: 6988 - DNA, 20 bp, synthetic construct
  misc_feature 1..20: note = Description of Artificial Sequence: Synthetic oligonucleotide
  misc_feature 1..20: note = Target: FXN; (+) strand; PAM type: NNGRRT; PAM sequence: TGGGAT
  source 1..20: mol_type = other DNA
gcctcagtctcccgagtaac

SEQ ID NO: 6989 - DNA, 20 bp, synthetic construct
  misc_feature 1..20: note = Description of Artificial Sequence: Synthetic oligonucleotide
  misc_feature 1..20: note = Target: FXN; (+) strand; PAM type: NNGRRT; PAM sequence: TGGGGT
  source 1..20: mol_type = other DNA
ttttgtatttttagtagaga

SEQ ID NO: 6990 - DNA, 20 bp, synthetic construct
  misc_feature 1..20: note = Description of Artificial Sequence: Synthetic oligonucleotide
  misc_feature 1..20: note = Target: FXN; (+) strand; PAM type: NNGRRT; PAM sequence: GTGAGT
  source 1..20: mol_type = other DNA
aaagtgctggcattagaggt

SEQ ID NO: 6991 - DNA, 20 bp, synthetic construct
  misc_feature 1..20: note = Description of Artificial Sequence: Synthetic oligonucleotide
  misc_feature 1..20: note = Target: FXN; (+) strand; PAM type: NNGRRT; PAM sequence: TTGGAT
  source 1..20: mol_type = other DNA
cccagtgaggcaccatctca

SEQ ID NO: 6992 - DNA, 20 bp, synthetic construct
  misc_feature 1..20: note = Description of Artificial Sequence: Synthetic oligonucleotide
  misc_feature 1..20: note = Target: FXN; (+) strand; PAM type: NNGRRT; PAM sequence: AAGGAT
  source 1..20: mol_type = other DNA
tctcattggatatggagaca

SEQ ID NO: 6993 - DNA, 20 bp, synthetic construct
  misc_feature 1..20: note = Description of Artificial Sequence: Synthetic oligonucleotide
  misc_feature 1..20: note = Target: FXN; (+) strand; PAM type: NNGRRT; PAM sequence: CTGGAT
  source 1..20: mol_type = other DNA
aaaggatctggcttagcatc

SEQ ID NO: 6994 - DNA, 20 bp, synthetic construct
  misc_feature 1..20: note = Description of Artificial Sequence: Synthetic oligonucleotide
  misc_feature 1..20: note = Target: FXN; (+) strand; PAM type: NNGRRT; PAM sequence: AAGAGT
  source 1..20: mol_type = other DNA
tggatttgtattttctttcc

SEQ ID NO: 6995 - DNA, 20 bp, synthetic construct
  misc_feature 1..20: note = Description of Artificial Sequence: Synthetic oligonucleotide
  misc_feature 1..20: note = Target: FXN; (+) strand; PAM type: NNGRRT; PAM sequence: ATGAGT
  source 1..20: mol_type = other DNA
gcagtttcctcagctatgag

SEQ ID NO: 6996 - DNA, 20 bp, synthetic construct
  misc_feature 1..20: note = Description of Artificial Sequence: Synthetic oligonucleotide
  misc_feature 1..20: note = Target: FXN; (+) strand; PAM type: NNGRRT; PAM sequence: GAGGAT
  source 1..20: mol_type = other DNA
tcctctcttcagatttataa

SEQ ID NO: 6997 - DNA, 20 bp, synthetic construct
  misc_feature 1..20: note = Description of Artificial Sequence: Synthetic oligonucleotide
  misc_feature 1..20: note = Target: FXN; (+) strand; PAM type: NNGRRT; PAM sequence: ATGGGT
  source 1..20: mol_type = other DNA
attgctatttttgctcctac

SEQ ID NO: 6998 - DNA, 20 bp, synthetic construct
  misc_feature 1..20: note = Description of Artificial Sequence: Synthetic oligonucleotide
  misc_feature 1..20: note = Target: FXN; (+) strand; PAM type: NNGRRT; PAM sequence: AGGAGT
  source 1..20: mol_type = other DNA
tagggctgatcttgactagg

SEQ ID NO: 6999 - DNA, 20 bp, synthetic construct
  misc_feature 1..20: note = Description of Artificial Sequence: Synthetic oligonucleotide
  misc_feature 1..20: note = Target: FXN; (+) strand; PAM type: NNGRRT; PAM sequence: GCGGAT
  source 1..20: mol_type = other DNA
actttgggaggccaaggcgg

SEQ ID NO: 7000 - DNA, 20 bp, synthetic construct
  misc_feature 1..20: note = Description of Artificial Sequence: Synthetic oligonucleotide
  misc_feature 1..20: note = Target: FXN; (+) strand; PAM type: NNGRRT; PAM sequence: GAGAAT
  source 1..20: mol_type = other DNA
tactcgggaagctgaggcag

SEQ ID NO: 7001 - DNA, 20 bp, synthetic construct
  misc_feature 1..20: note = Description of Artificial Sequence: Synthetic oligonucleotide
  misc_feature 1..20: note = Target: FXN; (+) strand; PAM type: NNGRRT; PAM sequence: CTGGGT
  source 1..20: mol_type = other DNA
tcgagccactgcactctagc

SEQ ID NO: 7002 - DNA, 20 bp, synthetic construct
  misc_feature 1..20: note = Description of Artificial Sequence: Synthetic oligonucleotide
  misc_feature 1..20: note = Target: FXN; (+) strand; PAM type: NNGRRT; PAM sequence: AGGAAT
  source 1..20: mol_type = other DNA
aaatagactcagattgtcta

SEQ ID NO: 7003 - DNA, 20 bp, synthetic construct
  misc_feature 1..20: note = Description of Artificial Sequence: Synthetic oligonucleotide
  misc_feature 1..20: note = Target: FXN; (+) strand; PAM type: NNGRRT; PAM sequence: AAGAAT
  source 1..20: mol_type = other DNA
tagtcagttccaaaagcatt

SEQ ID NO: 7004 - DNA, 20 bp, synthetic construct
  misc_feature 1..20: note = Description of Artificial Sequence: Synthetic oligonucleotide
  misc_feature 1..20: note = Target: FXN; (+) strand; PAM type: NNGRRT; PAM sequence: TGGGGT
  source 1..20: mol_type = other DNA
ggtgggaggaagttgagcat

SEQ ID NO: 7005 - DNA, 20 bp, synthetic construct
  misc_feature 1..20: note = Description of Artificial Sequence: Synthetic oligonucleotide
  misc_feature 1..20: note = Target: FXN; (+) strand; PAM type: NNGRRT; PAM sequence: AGGGAT
  source 1..20: mol_type = other DNA
acaaatgtcctttttgcagg

SEQ ID NO: 7006 - DNA, 20 bp, synthetic construct
  misc_feature 1..20: note = Description of Artificial Sequence: Synthetic oligonucleotide
  misc_feature 1..20: note = Target: FXN; (+) strand; PAM type: NNGRRT; PAM sequence: CTGAAT
  source 1..20: mol_type = other DNA
aagcaagcagtcaggcagct

SEQ ID NO: 7007 - DNA, 20 bp, synthetic construct
  misc_feature 1..20: note = Description of Artificial Sequence: Synthetic oligonucleotide
  misc_feature 1..20: note = Target: FXN; (+) strand; PAM type: NNGRRT; PAM sequence: AGGGGT
  source 1..20: mol_type = other DNA
cgaggcaatgggacccacag

SEQ ID NO: 7008 - DNA, 20 bp, synthetic construct
  misc_feature 1..20: note = Description of Artificial Sequence: Synthetic oligonucleotide
  misc_feature 1..20: note = Target: FXN; (+) strand; PAM type: NNGRRT; PAM sequence: CAGGGT
  source 1..20: mol_type = other DNA
tgggacccacagaggggtag

SEQ ID NO: 7009 - DNA, 20 bp, synthetic construct
  misc_feature 1..20: note = Description of Artificial Sequence: Synthetic oligonucleotide
  misc_feature 1..20: note = Target: FXN; (+) strand; PAM type: NNGRRT; PAM sequence: GTGAGT
  source 1..20: mol_type = other DNA
agaggggtagcagggtagag

SEQ ID NO: 7010 - DNA, 20 bp, synthetic construct
  misc_feature 1..20: note = Description of Artificial Sequence: Synthetic oligonucleotide
  misc_feature 1..20: note = Target: FXN; (+) strand; PAM type: NNGRRT; PAM sequence: GTGGGT
  source 1..20: mol_type = other DNA
gggtagcagggtagaggtga

SEQ ID NO: 7011 - DNA, 20 bp, synthetic construct
  misc_feature 1..20: note = Description of Artificial Sequence: Synthetic oligonucleotide
  misc_feature 1..20: note = Target: FXN; (+) strand; PAM type: NNGRRT; PAM sequence: GGGGGT
  source 1..20: mol_type = other DNA
tgactgcagagaaggtgcca

SEQ ID NO: 7012 - DNA, 20 bp, synthetic construct
  misc_feature 1..20: note = Description of Artificial Sequence: Synthetic oligonucleotide
  misc_feature 1..20: note = Target: FXN; (+) strand; PAM type: NNGRRT; PAM sequence: AAGAGT
  source 1..20: mol_type = other DNA
tattaatatgccctttgaaa

SEQ ID NO: 7013 - DNA, 20 bp, synthetic construct
  misc_feature 1..20: note = Description of Artificial Sequence: Synthetic oligonucleotide
  misc_feature 1..20: note = Target: FXN; (+) strand; PAM type: NNGRRT; PAM sequence: TGGAGT
  source 1..20: mol_type = other DNA
aaaaagagtggcctgatacc

SEQ ID NO: 7014 - DNA, 20 bp, synthetic construct
  misc_feature 1..20: note = Description of Artificial Sequence: Synthetic oligonucleotide
  misc_feature 1..20: note = Target: FXN; (+) strand; PAM type: NNGRRT; PAM sequence: CTGAGT
  source 1..20: mol_type = other DNA
atctgcccctagttcttgcc

SEQ ID NO: 7015 - DNA, 20 bp, synthetic construct
  misc_feature 1..20: note = Description of Artificial Sequence: Synthetic oligonucleotide
  misc_feature 1..20: note = Target: FXN; (+) strand; PAM type: NNGRRT; PAM sequence: CTGGAT
  source 1..20: mol_type = other DNA
tcagtcctctgccctttctg

SEQ ID NO: 7016 - DNA, 20 bp, synthetic construct
  misc_feature 1..20: note = Description of Artificial Sequence: Synthetic oligonucleotide
  misc_feature 1..20: note = Target: FXN; (+) strand; PAM type: NNGRRT; PAM sequence: TAGGGT
  source 1..20: mol_type = other DNA
tggattgtggccccccagta

SEQ ID NO: 7017 - DNA, 20 bp, synthetic construct
  misc_feature 1..20: note = Description of Artificial Sequence: Synthetic oligonucleotide
  misc_feature 1..20: note = Target: FXN; (+) strand; PAM type: NNGRRT; PAM sequence: TAGGGT
  source 1..20: mol_type = other DNA
tattattatactttaagtgt

SEQ ID NO: 7018 - DNA, 20 bp, synthetic construct
  misc_feature 1..20: note = Description of Artificial Sequence: Synthetic oligonucleotide
  misc_feature 1..20: note = Target: FXN; (+) strand; PAM type: NNGRRT; PAM sequence: CAGAGT
  source 1..20: mol_type = other DNA
ctccaccccacaacagtccc

SEQ ID NO: 7019 - DNA, 20 bp, synthetic construct
  misc_feature 1..20: note = Description of Artificial Sequence: Synthetic oligonucleotide
  misc_feature 1..20: note = Target: FXN; (+) strand; PAM type: NNGRRT; PAM sequence: ATGAGT
  source 1..20: mol_type = other DNA
tcattgttcagttcccacct

SEQ ID NO: 7020 - DNA, 20 bp, synthetic construct
  misc_feature 1..20: note = Description of Artificial Sequence: Synthetic oligonucleotide
  misc_feature 1..20: note = Target: FXN; (+) strand; PAM type: NNGRRT; PAM sequence: GAGAAT
  source 1..20: mol_type = other DNA
ttcagttcccacctatgagt

SEQ ID NO: 7021 - DNA, 20 bp, synthetic construct
  misc_feature 1..20: note = Description of Artificial Sequence: Synthetic oligonucleotide
  misc_feature 1..20: note = Target: FXN; (+) strand; PAM type: NNGRRT; PAM sequence: GAGAAT
  source 1..20: mol_type = other DNA
tgttcttgcgatagtttact

SEQ ID NO: 7022 - DNA, 20 bp, synthetic construct
  misc_feature 1..20: note = Description of Artificial Sequence: Synthetic oligonucleotide
  misc_feature 1..20: note = Target: FXN; (+) strand; PAM type: NNGRRT; PAM sequence: TTGGAT
  source 1..20: mol_type = other DNA
cttaatccagtctatcattg

SEQ ID NO: 7023 - DNA, 20 bp, synthetic construct
  misc_feature 1..20: note = Description of Artificial Sequence: Synthetic oligonucleotide
  misc_feature 1..20: note = Target: FXN; (+) strand; PAM type: NNGRRT; PAM sequence: AGGAGT
  source 1..20: mol_type = other DNA
tttataaaactctgtatgag

SEQ ID NO: 7024 - DNA, 20 bp, synthetic construct
  misc_feature 1..20: note = Description of Artificial Sequence: Synthetic oligonucleotide
  misc_feature 1..20: note = Target: FXN; (+) strand; PAM type: NNGRRT; PAM sequence: ACGGGT
  source 1..20: mol_type = other DNA
aggagtgggaaatagtatta

SEQ ID NO: 7025 - DNA, 20 bp, synthetic construct
  misc_feature 1..20: note = Description of Artificial Sequence: Synthetic oligonucleotide
  misc_feature 1..20: note = Target: FXN; (+) strand; PAM type: NNGRRT; PAM sequence: CGGGGT
  source 1..20: mol_type = other DNA
ggaaatagtattaacgggtg

SEQ ID NO: 7026 - DNA, 20 bp, synthetic construct
  misc_feature 1..20: note = Description of Artificial Sequence: Synthetic oligonucleotide
  misc_feature 1..20: note = Target: FXN; (+) strand; PAM type: NNGRRT; PAM sequence: TGGAAT
  source 1..20: mol_type = other DNA
tttgggacaatggaaatagc

SEQ ID NO: 7027 - DNA, 20 bp, synthetic construct
  misc_feature 1..20: note = Description of Artificial Sequence: Synthetic oligonucleotide
  misc_feature 1..20: note = Target: FXN; (+) strand; PAM type: NNGRRT; PAM sequence: CTGAAT
  source 1..20: mol_type = other DNA
ttgtgaaatactaaaaactc

SEQ ID NO: 7028 - DNA, 20 bp, synthetic construct
  misc_feature 1..20: note = Description of Artificial Sequence: Synthetic oligonucleotide
  misc_feature 1..20: note = Target: FXN; (+) strand; PAM type: NNGRRT; PAM sequence: GTGAAT
  source 1..20: mol_type = other DNA
ggtgcgcaccaccacaccca

SEQ ID NO: 7029 - DNA, 20 bp, synthetic construct
  misc_feature 1..20: note = Description of Artificial Sequence: Synthetic oligonucleotide
  misc_feature 1..20: note = Target: FXN; (+) strand; PAM type: NNGRRT; PAM sequence: CAGGAT
  source 1..20: mol_type = other DNA
tccttgggctcccgaagtgc

SEQ ID NO: 7030 - DNA, 20 bp, synthetic construct
  misc_feature 1..20: note = Description of Artificial Sequence: Synthetic oligonucleotide
  misc_feature 1..20: note = Target: FXN; (+) strand; PAM type: NNGRRT; PAM sequence: ATGAGT
  source 1..20: mol_type = other DNA
cgaagtgccaggatacaagc

SEQ ID NO: 7031 - DNA, 20 bp, synthetic construct
  misc_feature 1..20: note = Description of Artificial Sequence: Synthetic oligonucleotide
  misc_feature 1..20: note = Target: FXN; (+) strand; PAM type: NNGRRT; PAM sequence: ATGGGT
  source 1..20: mol_type = other DNA
gtcataccaaaacagtaaaa

SEQ ID NO: 7032 - DNA, 20 bp, synthetic construct
  misc_feature 1..20: note = Description of Artificial Sequence: Synthetic oligonucleotide
  misc_feature 1..20: note = Target: FXN; (+) strand; PAM type: NNGRRT; PAM sequence: TGGGAT
  source 1..20: mol_type = other DNA
caggtggttactaagggcta

SEQ ID NO: 7033 - DNA, 20 bp, synthetic construct
  misc_feature 1..20: note = Description of Artificial Sequence: Synthetic oligonucleotide
  misc_feature 1..20: note = Target: FXN; (+) strand; PAM type: NNGRRT; PAM sequence: TAGAGT
  source 1..20: mol_type = other DNA
aaattagtgtctaatgggca

SEQ ID NO: 7034 - DNA, 20 bp, synthetic construct
  misc_feature 1..20: note = Description of Artificial Sequence: Synthetic oligonucleotide
  misc_feature 1..20: note = Target: FXN; (+) strand; PAM type: NNGRRT; PAM sequence: TAGAGT
  source 1..20: mol_type = other DNA
tgttacaaggtgaaaagttc

SEQ ID NO: 7035 - DNA, 20 bp, synthetic construct
  misc_feature 1..20: note = Description of Artificial Sequence: Synthetic oligonucleotide
  misc_feature 1..20: note = Target: FXN; (+) strand; PAM type: NNGRRT; PAM sequence: GTGAAT
  source 1..20: mol_type = other DNA
gagttatgctgcccagcagt

SEQ ID NO: 7036 - DNA, 20 bp, synthetic construct
  misc_feature 1..20: note = Description of Artificial Sequence: Synthetic oligonucleotide
  misc_feature 1..20: note = Target: FXN; (+) strand; PAM type: NNGRRT; PAM sequence: CCGAGT
  source 1..20: mol_type = other DNA
taaaaaaaaaaaaaatgggg

SEQ ID NO: 7037 - DNA, 20 bp, synthetic construct
  misc_feature 1..20: note = Description of Artificial Sequence: Synthetic oligonucleotide
  misc_feature 1..20: note = Target: FXN; (+) strand; PAM type: NNGRRT; PAM sequence: GAGGAT
  source 1..20: mol_type = other DNA
actttgggaggccgaggtag

SEQ ID NO: 7038 - DNA, 20 bp, synthetic construct
  misc_feature 1..20: note = Description of Artificial Sequence: Synthetic oligonucleotide
  misc_feature 1..20: note = Target: FXN; (+) strand; PAM type: NNGRRT; PAM sequence: CTGAGT
  source 1..20: mol_type = other DNA
cagctctctggaggcaggga

SEQ ID NO: 7039 - DNA, 20 bp, synthetic construct
  misc_feature 1..20: note = Description of Artificial Sequence: Synthetic oligonucleotide
  misc_feature 1..20: note = Target: FXN; (+) strand; PAM type: NNGRRT; PAM sequence: GAGGAT
  source 1..20: mol_type = other DNA
tggaggcagggactgagtca

SEQ ID NO: 7040 - DNA, 20 bp, synthetic construct
  misc_feature 1..20: note = Description of Artificial Sequence: Synthetic oligonucleotide
  misc_feature 1..20: note = Target: FXN; (+) strand; PAM type: NNGRRT; PAM sequence: AGGGGT
  source 1..20: mol_type = other DNA
tcagaggatcacttgagcat

SEQ ID NO: 7041 - DNA, 20 bp, synthetic construct
  misc_feature 1..20: note = Description of Artificial Sequence: Synthetic oligonucleotide
  misc_feature 1..20: note = Target: FXN; (+) strand; PAM type: NNGRRT; PAM sequence: GAGAGT
  source 1..20: mol_type = other DNA
aaaactggcagctgatacct

SEQ ID NO: 7042 - DNA, 20 bp, synthetic construct
  misc_feature 1..20: note = Description of Artificial Sequence: Synthetic oligonucleotide
  misc_feature 1..20: note = Target: FXN; (+) strand; PAM type: NNGRRT; PAM sequence: GTGAAT
  source 1..20: mol_type = other DNA
ctggcagctgatacctgaga

SEQ ID NO: 7043 - DNA, 20 bp, synthetic construct
  misc_feature 1..20: note = Description of Artificial Sequence: Synthetic oligonucleotide
  misc_feature 1..20: note = Target: FXN; (+) strand; PAM type: NNGRRT; PAM sequence: TGGGAT
  source 1..20: mol_type = other DNA
tatcttttatcgctggttaa

SEQ ID NO: 7044 - DNA, 20 bp, synthetic construct
  misc_feature 1..20: note = Description of Artificial Sequence: Synthetic oligonucleotide
  misc_feature 1..20: note = Target: FXN; (+) strand; PAM type: NNGRRT; PAM sequence: GAGAAT
  source 1..20: mol_type = other DNA
tcgctggttaatgggattga

SEQ ID NO: 7045 - DNA, 20 bp, synthetic construct
  misc_feature 1..20: note = Description of Artificial Sequence: Synthetic oligonucleotide
  misc_feature 1..20: note = Target: FXN; (+) strand; PAM type: NNGRRT; PAM sequence: CTGGAT
  source 1..20: mol_type = other DNA
gtctttggacccacagagac

SEQ ID NO: 7046 - DNA, 20 bp, synthetic construct
  misc_feature 1..20: note = Description of Artificial Sequence: Synthetic oligonucleotide
  misc_feature 1..20: note = Target: FXN; (+) strand; PAM type: NNGRRT; PAM sequence: CTGAGT
  source 1..20: mol_type = other DNA
aagattagctctgccaatta

SEQ ID NO: 7047 - DNA, 20 bp, synthetic construct
  misc_feature 1..20: note = Description of Artificial Sequence: Synthetic oligonucleotide
  misc_feature 1..20: note = Target: FXN; (+) strand; PAM type: NNGRRT; PAM sequence: TGGAAT
  source 1..20: mol_type = other DNA
gttttcctcatctgtgaaac

SEQ ID NO: 7048 - DNA, 20 bp, synthetic construct
  misc_feature 1..20: note = Description of Artificial Sequence: Synthetic oligonucleotide
  misc_feature 1..20: note = Target: FXN; (+) strand; PAM type: NNGRRT; PAM sequence: ATGAAT
  source 1..20: mol_type = other DNA
tcatctgtgaaactggaata

SEQ ID NO: 7049 - DNA, 20 bp, synthetic construct
  misc_feature 1..20: note = Description of Artificial Sequence: Synthetic oligonucleotide
  misc_feature 1..20: note = Target: FXN; (+) strand; PAM type: NNGRRT; PAM sequence: CCGAGT
  source 1..20: mol_type = other DNA
caagcctggcacagtaggaa

SEQ ID NO: 7050 - DNA, 20 bp, synthetic construct
  misc_feature 1..20: note = Description of Artificial Sequence: Synthetic oligonucleotide
  misc_feature 1..20: note = Target: FXN; (+) strand; PAM type: NNGRRT; PAM sequence: TTGAAT
  source 1..20: mol_type = other DNA
tcatttctatacatttgttt

SEQ ID NO: 7051 - DNA, 20 bp, synthetic construct
  misc_feature 1..20: note = Description of Artificial Sequence: Synthetic oligonucleotide
  misc_feature 1..20: note = Target: FXN; (+) strand; PAM type: NNGRRT; PAM sequence: TGGAAT
  source 1..20: mol_type = other DNA
ttattattgttactaccctc

SEQ ID NO: 7052 - DNA, 20 bp, synthetic construct
  misc_feature 1..20: note = Description of Artificial Sequence: Synthetic oligonucleotide
  misc_feature 1..20: note = Target: FXN; (+) strand; PAM type: NNGRRT; PAM sequence: TTGGGT
  source 1..20: mol_type = other DNA
tttcaataactctttgtttt

SEQ ID NO: 7053 - DNA, 20 bp, synthetic construct
  misc_feature 1..20: note = Description of Artificial Sequence: Synthetic oligonucleotide
  misc_feature 1..20: note = Target: FXN; (+) strand; PAM type: NNGRRT; PAM sequence: CAGGAT
  source 1..20: mol_type = other DNA
gttttgctttgcttttgaga

SEQ ID NO: 7054 - DNA, 20 bp, synthetic construct
  misc_feature 1..20: note = Description of Artificial Sequence: Synthetic oligonucleotide
  misc_feature 1..20: note = Target: FXN; (+) strand; PAM type: NNGRRT; PAM sequence: CAGGGT
  source 1..20: mol_type = other DNA
ttttgcatttttagtagaga

SEQ ID NO: 7055 - DNA, 20 bp, synthetic construct
  misc_feature 1..20: note = Description of Artificial Sequence: Synthetic oligonucleotide
  misc_feature 1..20: note = Target: FXN; (+) strand; PAM type: NNGRRT; PAM sequence: TGGAAT
  source 1..20: mol_type = other DNA
gcctcggcctcccaaagtgc

SEQ ID NO: 7056 - DNA, 20 bp, synthetic construct
  misc_feature 1..20: note = Description of Artificial Sequence: Synthetic oligonucleotide
  misc_feature 1..20: note = Target: FXN; (+) strand; PAM type: NNGRRT; PAM sequence: AAGAAT
  source 1..20: mol_type = other DNA
tgtttgcaaaagtgtgttat

SEQ ID NO: 7057 - DNA, 20 bp, synthetic construct
  misc_feature 1..20: note = Description of Artificial Sequence: Synthetic oligonucleotide
  misc_feature 1..20: note = Target: FXN; (+) strand; PAM type: NNGRRT; PAM sequence: TTGGAT
  source 1..20: mol_type = other DNA
aatcattcagagcctctcga

SEQ ID NO: 7058 - DNA, 20 bp, synthetic construct
  misc_feature 1..20: note = Description of Artificial Sequence: Synthetic oligonucleotide
  misc_feature 1..20: note = Target: FXN; (+) strand; PAM type: NNGRRT; PAM sequence: TAGAAT
  source 1..20: mol_type = other DNA
tctcgattggatggaggctc

SEQ ID NO: 7059 - DNA, 20 bp, synthetic construct
  misc_feature 1..20: note = Description of Artificial Sequence: Synthetic oligonucleotide
  misc_feature 1..20: note = Target: FXN; (+) strand; PAM type: NNGRRT; PAM sequence: AAGAGT
  source 1..20: mol_type = other DNA
gtaaaggactcttttgttga

SEQ ID NO: 7060 - DNA, 20 bp, synthetic construct
  misc_feature 1..20: note = Description of Artificial Sequence: Synthetic oligonucleotide
  misc_feature 1..20: note = Target: FXN; (+) strand; PAM type: NNGRRT; PAM sequence: AAGAAT
  source 1..20: mol_type = other DNA
atgcaccaactagtcttttg

SEQ ID NO: 7061 - DNA, 20 bp, synthetic construct
  misc_feature 1..20: note = Description of Artificial Sequence: Synthetic oligonucleotide
  misc_feature 1..20: note = Target: FXN; (+) strand; PAM type: NNGRRT; PAM sequence: AGGAGT
  source 1..20: mol_type = other DNA
agagaaaaataaagccttgg

SEQ ID NO: 7062 - DNA, 20 bp, synthetic construct
  misc_feature 1..20: note = Description of Artificial Sequence: Synthetic oligonucleotide
  misc_feature 1..20: note = Target: FXN; (+) strand; PAM type: NNGRRT; PAM sequence: AAGAGT
  source 1..20: mol_type = other DNA
aagcttgttagatgcgtggg

SEQ ID NO: 7063 - DNA, 20 bp, synthetic construct
  misc_feature 1..20: note = Description of Artificial Sequence: Synthetic oligonucleotide
  misc_feature 1..20: note = Target: FXN; (+) strand; PAM type: NNGRRT; PAM sequence: TGGAGT
  source 1..20: mol_type = other DNA
tggaaataaaaaacttcatc

SEQ ID NO: 7064 - DNA, 20 bp, synthetic construct
  misc_feature 1..20: note = Description of Artificial Sequence: Synthetic oligonucleotide
  misc_feature 1..20: note = Target: FXN; (+) strand; PAM type: NNGRRT; PAM sequence: TTGAGT
  source 1..20: mol_type = other DNA
agacttgtcatgtctgatgt

SEQ ID NO: 7065 - DNA, 20 bp, synthetic construct
  misc_feature 1..20: note = Description of Artificial Sequence: Synthetic oligonucleotide
  misc_feature 1..20: note = Target: FXN; (+) strand; PAM type: NNGRRT; PAM sequence: TAGAGT
  source 1..20: mol_type = other DNA
gagttgacgtggtactctaa

SEQ ID NO: 7066 - DNA, 20 bp, synthetic construct
  misc_feature 1..20: note = Description of Artificial Sequence: Synthetic oligonucleotide
  misc_feature 1..20: note = Target: FXN; (+) strand; PAM type: NNGRRT; PAM sequence: TAGAGT
  source 1..20: mol_type = other DNA
acgtggtactctaatagagt

SEQ ID NO: 7067 - DNA, 20 bp, synthetic construct
  misc_feature 1..20: note = Description of Artificial Sequence: Synthetic oligonucleotide
  misc_feature 1..20: note = Target: FXN; (+) strand; PAM type: NNGRRT; PAM sequence: TAGAGT
  source 1..20: mol_type = other DNA
tttttttccacctaatcccc

SEQ ID NO: 7068 - DNA, 20 bp, synthetic construct
  misc_feature 1..20: note = Description of Artificial Sequence: Synthetic oligonucleotide
  misc_feature 1..20: note = Target: FXN; (+) strand; PAM type: NNGRRT; PAM sequence: CTGGGT
  source 1..20: mol_type = other DNA
gtggtgtcttaactgtcaaa

SEQ ID NO: 7069 - DNA, 20 bp, synthetic construct
  misc_feature 1..20: note = Description of Artificial Sequence: Synthetic oligonucleotide
  misc_feature 1..20: note = Target: FXN; (+) strand; PAM type: NNGRRT; PAM sequence: GAGGAT
  source 1..20: mol_type = other DNA
actttgagaggctgaggtag

SEQ ID NO: 7070 - DNA, 20 bp, synthetic construct
  misc_feature 1..20: note = Description of Artificial Sequence: Synthetic oligonucleotide
  misc_feature 1..20: note = Target: FXN; (+) strand; PAM type: NNGRRT; PAM sequence: AGGAGT
  source 1..20: mol_type = other DNA
taggaggatcacttgaggac

SEQ ID NO: 7071 - DNA, 20 bp, synthetic construct
  misc_feature 1..20: note = Description of Artificial Sequence: Synthetic oligonucleotide
  misc_feature 1..20: note = Target: FXN; (+) strand; PAM type: NNGRRT; PAM sequence: GTGAGT
  source 1..20: mol_type = other DNA
gaaccatcctgggcaacata

SEQ ID NO: 7072 - DNA, 20 bp, synthetic construct
  misc_feature 1..20: note = Description of Artificial Sequence: Synthetic oligonucleotide
  misc_feature 1..20: note = Target: FXN; (+) strand; PAM type: NNGRRT; PAM sequence: CTGGGT
  source 1..20: mol_type = other DNA
aaataaaaataaagtcacag

SEQ ID NO: 7073 - DNA, 20 bp, synthetic construct
  misc_feature 1..20: note = Description of Artificial Sequence: Synthetic oligonucleotide
  misc_feature 1..20: note = Target: FXN; (+) strand; PAM type: NNGRRT; PAM sequence: GTGGAT
  source 1..20: mol_type = other DNA
actttgggaggccaaggcct

SEQ ID NO: 7074 - DNA, 20 bp, synthetic construct
  misc_feature 1..20: note = Description of Artificial Sequence: Synthetic oligonucleotide
  misc_feature 1..20: note = Target: FXN; (+) strand; PAM type: NNGRRT; PAM sequence: AGGAGT
  source 1..20: mol_type = other DNA
cctgtggatcacttgagctc

SEQ ID NO: 7075 - DNA, 20 bp, synthetic construct
  misc_feature 1..20: note = Description of Artificial Sequence: Synthetic oligonucleotide
  misc_feature 1..20: note = Target: FXN; (+) strand; PAM type: NNGRRT; PAM sequence: TTGGAT
  source 1..20: mol_type = other DNA
aacttctccctgctgacaat

SEQ ID NO: 7076 - DNA, 20 bp, synthetic construct
  misc_feature 1..20: note = Description of Artificial Sequence: Synthetic oligonucleotide
  misc_feature 1..20: note = Target: FXN; (+) strand; PAM type: NNGRRT; PAM sequence: CAGGAT
  source 1..20: mol_type = other DNA
tggatactgtaagcaggcat

SEQ ID NO: 7077 - DNA, 20 bp, synthetic construct
  misc_feature 1..20: note = Description of Artificial Sequence: Synthetic oligonucleotide
  misc_feature 1..20: note = Target: FXN; (+) strand; PAM type: NNGRRT; PAM sequence: GTGAGT
  source 1..20: mol_type = other DNA
tcaggatattaagatctgaa

SEQ ID NO: 7078 - DNA, 20 bp, synthetic construct
  misc_feature 1..20: note = Description of Artificial Sequence: Synthetic oligonucleotide
  misc_feature 1..20: note = Target: FXN; (+) strand; PAM type: NNGRRT; PAM sequence: AAGGGT
  source 1..20: mol_type = other DNA
tgttttgagcctctcaggta

SEQ ID NO: 7079 - DNA, 20 bp, synthetic construct
  misc_feature 1..20: note = Description of Artificial Sequence: Synthetic oligonucleotide
  misc_feature 1..20: note = Target: FXN; (+) strand; PAM type: NNGRRT; PAM sequence: TTGAAT
  source 1..20: mol_type = other DNA
cctctcaggtaaagggttat

SEQ ID NO: 7080 - DNA, 20 bp, synthetic construct
  misc_feature 1..20: note = Description of Artificial Sequence: Synthetic oligonucleotide
  misc_feature 1..20: note = Target: FXN; (+) strand; PAM type: NNGRRT; PAM sequence: TGGGGT
  source 1..20: mol_type = other DNA
tttgaattccctttgcaggt

SEQ ID NO: 7081 - DNA, 20 bp, synthetic construct
  misc_feature 1..20: note = Description of Artificial Sequence: Synthetic oligonucleotide
  misc_feature 1..20: note = Target: FXN; (+) strand; PAM type: NNGRRT; PAM sequence: TAGAGT
  source 1..20: mol_type = other DNA
tgtgtaccctgtggaggtgg

SEQ ID NO: 7082 - DNA, 20 bp, synthetic construct
  misc_feature 1..20: note = Description of Artificial Sequence: Synthetic oligonucleotide
  misc_feature 1..20: note = Target: FXN; (+) strand; PAM type: NNGRRT; PAM sequence: AGGAAT
  source 1..20: mol_type = other DNA
ttgatgtgctttcaatctag

SEQ ID NO: 7083 - DNA, 20 bp, synthetic construct
  misc_feature 1..20: note = Description of Artificial Sequence: Synthetic oligonucleotide
  misc_feature 1..20: note = Target: FXN; (+) strand; PAM type: NNGRRT; PAM sequence: GTGAAT
  source 1..20: mol_type = other DNA
ccaaagagagcatgttgact

SEQ ID NO: 7084 - DNA, 20 bp, synthetic construct
  misc_feature 1..20: note = Description of Artificial Sequence: Synthetic oligonucleotide
  misc_feature 1..20: note = Target: FXN; (+) strand; PAM type: NNGRRT; PAM sequence: TAGAAT
  source 1..20: mol_type = other DNA
agggccagataaaactagca

SEQ ID NO: 7085 - DNA, 20 bp, synthetic construct
  misc_feature 1..20: note = Description of Artificial Sequence: Synthetic oligonucleotide
  misc_feature 1..20: note = Target: FXN; (+) strand; PAM type: NNGRRT; PAM sequence: CAGAAT
  source 1..20: mol_type = other DNA
gtgatctctaatgctttgtt

SEQ ID NO: 7086 - DNA, 20 bp, synthetic construct
  misc_feature 1..20: note = Description of Artificial Sequence: Synthetic oligonucleotide
  misc_feature 1..20: note = Target: FXN; (+) strand; PAM type: NNGRRT; PAM sequence: TAGAGT
  source 1..20: mol_type = other DNA
ctttcatccaagaagtgtgc

SEQ ID NO: 7087 - DNA, 20 bp, synthetic construct
  misc_feature 1..20: note = Description of Artificial Sequence: Synthetic oligonucleotide
  misc_feature 1..20: note = Target: FXN; (+) strand; PAM type: NNGRRT; PAM sequence: GAGGAT
  source 1..20: mol_type = other DNA
agttagtgtgctggaggttg

SEQ ID NO: 7088 - DNA, 20 bp, synthetic construct
  misc_feature 1..20: note = Description of Artificial Sequence: Synthetic oligonucleotide
  misc_feature 1..20: note = Target: FXN; (+) strand; PAM type: NNGRRT; PAM sequence: GTGGAT
  source 1..20: mol_type = other DNA
ttcatctccgggggaacgaa

SEQ ID NO: 7089 - DNA, 20 bp, synthetic construct
  misc_feature 1..20: note = Description of Artificial Sequence: Synthetic oligonucleotide
  misc_feature 1..20: note = Target: FXN; (+) strand; PAM type: NNGRRT; PAM sequence: GGGGAT
  source 1..20: mol_type = other DNA
tcggtccagcgatcactttt

SEQ ID NO: 7090 - DNA, 20 bp, synthetic construct
  misc_feature 1..20: note = Description of Artificial Sequence: Synthetic oligonucleotide
  misc_feature 1..20: note = Target: FXN; (+) strand; PAM type: NNGRRT; PAM sequence: GGGAAT
  source 1..20: mol_type = other DNA
ctagctgtgttcagaagcat

SEQ ID NO: 7091 - DNA, 20 bp, synthetic construct
  misc_feature 1..20: note = Description of Artificial Sequence: Synthetic oligonucleotide
  misc_feature 1..20: note = Target: FXN; (+) strand; PAM type: NNGRRT; PAM sequence: CTGGGT
  source 1..20: mol_type = other DNA
ggggacggggcaggttgaga

SEQ ID NO: 7092 - DNA, 20 bp, synthetic construct
  misc_feature 1..20: note = Description of Artificial Sequence: Synthetic oligonucleotide
  misc_feature 1..20: note = Target: FXN; (+) strand; PAM type: NNGRRT; PAM sequence: CAGAGT
  source 1..20: mol_type = other DNA
tgcgccgtttccggcagatc

SEQ ID NO: 7093 - DNA, 20 bp, synthetic construct
  misc_feature 1..20: note = Description of Artificial Sequence: Synthetic oligonucleotide
  misc_feature 1..20: note = Target: FXN; (+) strand; PAM type: NNGRRT; PAM sequence: CCGGAT
  source 1..20: mol_type = other DNA
cagatccagagtggccaccg

SEQ ID NO: 7094 - DNA, 20 bp, synthetic construct
  misc_feature 1..20: note = Description of Artificial Sequence: Synthetic oligonucleotide
  misc_feature 1..20: note = Target: FXN; (+) strand; PAM type: NNGRRT; PAM sequence: GGGAGT
  source 1..20: mol_type = other DNA
cagagtggccaccgccggat

SEQ ID NO: 7095 - DNA, 20 bp, synthetic construct
  misc_feature 1..20: note = Description of Artificial Sequence: Synthetic oligonucleotide
  misc_feature 1..20: note = Target: FXN; (+) strand; PAM type: NNGRRT; PAM sequence: GGGGAT
  source 1..20: mol_type = other DNA
caagacggcagctcccagcg

SEQ ID NO: 7096 - DNA, 20 bp, synthetic construct
  misc_feature 1..20: note = Description of Artificial Sequence: Synthetic oligonucleotide
  misc_feature 1..20: note = Target: FXN; (+) strand; PAM type: NNGRRT; PAM sequence: CCGAGT
  source 1..20: mol_type = other DNA
ctcccagcgggggatggagg

SEQ ID NO: 7097 - DNA, 20 bp, synthetic construct
  misc_feature 1..20: note = Description of Artificial Sequence: Synthetic oligonucleotide
  misc_feature 1..20: note = Target: FXN; (+) strand; PAM type: NNGRRT; PAM sequence: CAGGAT
  source 1..20: mol_type = other DNA
gtctgctggtcactggaggc

SEQ ID NO: 7098 - DNA, 20 bp, synthetic construct
  misc_feature 1..20: note = Description of Artificial Sequence: Synthetic oligonucleotide
  misc_feature 1..20: note = Target: FXN; (+) strand; PAM type: NNGRRT; PAM sequence: CGGGGT
  source 1..20: mol_type = other DNA
cctgctgcccacacagactg

SEQ ID NO: 7099 - DNA, 20 bp, synthetic construct
  misc_feature 1..20: note = Description of Artificial Sequence: Synthetic oligonucleotide
  misc_feature 1..20: note = Target: FXN; (+) strand; PAM type: NNGRRT; PAM sequence: CAGGAT
  source 1..20: mol_type = other DNA
tagctgtacctgcgaaggca

SEQ ID NO: 7100 - DNA, 20 bp, synthetic construct
  misc_feature 1..20: note = Description of Artificial Sequence: Synthetic oligonucleotide
  misc_feature 1..20: note = Target: FXN; (+) strand; PAM type: NNGRRT; PAM sequence: TTGAGT
  source 1..20: mol_type = other DNA
atcaacaataaagatcatcc

SEQ ID NO: 7101 - DNA, 20 bp, synthetic construct
  misc_feature 1..20: note = Description of Artificial Sequence: Synthetic oligonucleotide
  misc_feature 1..20: note = Target: FXN; (+) strand; PAM type: NNGRRT; PAM sequence: TAGGGT
  source 1..20: mol_type = other DNA
cttgagtctgctttgaaaag

SEQ ID NO: 7102 - DNA, 20 bp, synthetic construct
  misc_feature 1..20: note = Description of Artificial Sequence: Synthetic oligonucleotide
  misc_feature 1..20: note = Target: FXN; (+) strand; PAM type: NNGRRT; PAM sequence: AAGGGT
  source 1..20: mol_type = other DNA
tggaggggctttaaagcaag

SEQ ID NO: 7103 - DNA, 20 bp, synthetic construct
  misc_feature 1..20: note = Description of Artificial Sequence: Synthetic oligonucleotide
  misc_feature 1..20: note = Target: FXN; (+) strand; PAM type: NNGRRT; PAM sequence: GTGAAT
  source 1..20: mol_type = other DNA
acttactcttattcacagat

SEQ ID NO: 7104 - DNA, 20 bp, synthetic construct
  misc_feature 1..20: note = Description of Artificial Sequence: Synthetic oligonucleotide
  misc_feature 1..20: note = Target: FXN; (+) strand; PAM type: NNGRRT; PAM sequence: CAGAAT
  source 1..20: mol_type = other DNA
gaaagtgacatgtcctaagt

SEQ ID NO: 7105 - DNA, 20 bp, synthetic construct
  misc_feature 1..20: note = Description of Artificial Sequence: Synthetic oligonucleotide
  misc_feature 1..20: note = Target: FXN; (+) strand; PAM type: NNGRRT; PAM sequence: TAGAGT
  source 1..20: mol_type = other DNA
tgacatgtcctaagtcagaa

SEQ ID NO: 7106 - DNA, 20 bp, synthetic construct
  misc_feature 1..20: note = Description of Artificial Sequence: Synthetic oligonucleotide
  misc_feature 1..20: note = Target: FXN; (+) strand; PAM type: NNGRRT; PAM sequence: GAGGAT
  source 1..20: mol_type = other DNA
aggccaccatgctaccctga

SEQ ID NO: 7107 - DNA, 20 bp, synthetic construct
  misc_feature 1..20: note = Description of Artificial Sequence: Synthetic oligonucleotide
  misc_feature 1..20: note = Target: FXN; (+) strand; PAM type: NNGRRT; PAM sequence: TGGAGT
  source 1..20: mol_type = other DNA
ctgtagggccaggtggagcc

SEQ ID NO: 7108 - DNA, 20 bp, synthetic construct
  misc_feature 1..20: note = Description of Artificial Sequence: Synthetic oligonucleotide
  misc_feature 1..20: note = Target: FXN; (+) strand; PAM type: NNGRRT; PAM sequence: TGGGGT
  source 1..20: mol_type = other DNA
ggacacaattttctagaaca

SEQ ID NO: 7109 - DNA, 20 bp, synthetic construct
  misc_feature 1..20: note = Description of Artificial Sequence: Synthetic oligonucleotide
  misc_feature 1..20: note = Target: FXN; (+) strand; PAM type: NNGRRT; PAM sequence: CAGGGT
  source 1..20: mol_type = other DNA
gtttgagacggaacacccca

SEQ ID NO: 7110 - DNA, 20 bp, synthetic construct
  misc_feature 1..20: note = Description of Artificial Sequence: Synthetic oligonucleotide
  misc_feature 1..20: note = Target: FXN; (+) strand; PAM type: NNGRRT; PAM sequence: CCGAGT
  source 1..20: mol_type = other DNA
acggaacaccccacagggtt

SEQ ID NO: 7111 - DNA, 20 bp, synthetic construct
  misc_feature 1..20: note = Description of Artificial Sequence: Synthetic oligonucleotide
  misc_feature 1..20: note = Target: FXN; (+) strand; PAM type: NNGRRT; PAM sequence: CAGAAT
  source 1..20: mol_type = other DNA
gcggcagtgctagtgatgtg

SEQ ID NO: 7112 - DNA, 20 bp, synthetic construct
  misc_feature 1..20: note = Description of Artificial Sequence: Synthetic oligonucleotide
  misc_feature 1..20: note = Target: FXN; (+) strand; PAM type: NNGRRT; PAM sequence: CTGGGT
  source 1..20: mol_type = other DNA
ccaaggaacctataaatacc

SEQ ID NO: 7113 - DNA, 20 bp, synthetic construct
  misc_feature 1..20: note = Description of Artificial Sequence: Synthetic oligonucleotide
  misc_feature 1..20: note = Target: FXN; (+) strand; PAM type: NNGRRT; PAM sequence: GAGAAT
  source 1..20: mol_type = other DNA
agatgacaagctgagaaggg

SEQ ID NO: 7114 - DNA, 20 bp, synthetic construct
  misc_feature 1..20: note = Description of Artificial Sequence: Synthetic oligonucleotide
  misc_feature 1..20: note = Target: FXN; (+) strand; PAM type: NNGRRT; PAM sequence: GAGGGT
  source 1..20: mol_type = other DNA
ttgctccaaaccctctgttc

SEQ ID NO: 7115 - DNA, 20 bp, synthetic construct
  misc_feature 1..20: note = Description of Artificial Sequence: Synthetic oligonucleotide
  misc_feature 1..20: note = Target: FXN; (+) strand; PAM type: NNGRRT; PAM sequence: CCGAGT
  source 1..20: mol_type = other DNA
agcaggcctcctgaacttcc

SEQ ID NO: 7116 - DNA, 20 bp, synthetic construct
  misc_feature 1..20: note = Description of Artificial Sequence: Synthetic oligonucleotide
  misc_feature 1..20: note = Target: FXN; (+) strand; PAM type: NNGRRT; PAM sequence: GAGGAT
  source 1..20: mol_type = other DNA
atgcttcacagcaccatgga

SEQ ID NO: 7117 - DNA, 20 bp, synthetic construct
  misc_feature 1..20: note = Description of Artificial Sequence: Synthetic oligonucleotide
  misc_feature 1..20: note = Target: FXN; (+) strand; PAM type: NNGRRT; PAM sequence: CTGAAT
  source 1..20: mol_type = other DNA
aggggcaaactgcagactat

SEQ ID NO: 7118 - DNA, 20 bp, synthetic construct
  misc_feature 1..20: note = Description of Artificial Sequence: Synthetic oligonucleotide
  misc_feature 1..20: note = Target: FXN; (+) strand; PAM type: NNGRRT; PAM sequence: GCGGAT
  source 1..20: mol_type = other DNA
actttgggaggccaaggcag

SEQ ID NO: 7119 - DNA, 20 bp, synthetic construct
  misc_feature 1..20: note = Description of Artificial Sequence: Synthetic oligonucleotide
  misc_feature 1..20: note = Target: FXN; (+) strand; PAM type: NNGRRT; PAM sequence: AGGAGT
  source 1..20: mol_type = other DNA
caggcggatcacttgaggtc

SEQ ID NO: 7120 - DNA, 20 bp, synthetic construct
  misc_feature 1..20: note = Description of Artificial Sequence: Synthetic oligonucleotide
  misc_feature 1..20: note = Target: FXN; (+) strand; PAM type: NNGRRT; PAM sequence: GAGAAT
  source 1..20: mol_type = other DNA
tgcttgggagactgagacag

SEQ ID NO: 7121 - DNA, 20 bp, synthetic construct
  misc_feature 1..20: note = Description of Artificial Sequence: Synthetic oligonucleotide
  misc_feature 1..20: note = Target: FXN; (+) strand; PAM type: NNGRRT; PAM sequence: CAGAGT
  source 1..20: mol_type = other DNA
cagcactccatcctgggcga

SEQ ID NO: 7122 - DNA, 20 bp, synthetic construct
  misc_feature 1..20: note = Description of Artificial Sequence: Synthetic oligonucleotide
  misc_feature 1..20: note = Target: FXN; (+) strand; PAM type: NNGRRT; PAM sequence: AGGAAT
  source 1..20: mol_type = other DNA
gaagaaggaaaggccaaggc

SEQ ID NO: 7123 - DNA, 20 bp, synthetic construct
  misc_feature 1..20: note = Description of Artificial Sequence: Synthetic oligonucleotide
  misc_feature 1..20: note = Target: FXN; (+) strand; PAM type: NNGRRT; PAM sequence: ATGAAT
  source 1..20: mol_type = other DNA
aggcaggaatgaaacaggcc

SEQ ID NO: 7124 - DNA, 20 bp, synthetic construct
  misc_feature 1..20: note = Description of Artificial Sequence: Synthetic oligonucleotide
  misc_feature 1..20: note = Target: FXN; (+) strand; PAM type: NNGRRT; PAM sequence: TGGAGT
  source 1..20: mol_type = other DNA
atgaaacaggccatgaatgt

SEQ ID NO: 7125 - DNA, 20 bp, synthetic construct
  misc_feature 1..20: note = Description of Artificial Sequence: Synthetic oligonucleotide
  misc_feature 1..20: note = Target: FXN; (+) strand; PAM type: NNGRRT; PAM sequence: GTGAGT
  source 1..20: mol_type = other DNA
cctcgtgctaagcggctact

SEQ ID NO: 7126 - DNA, 20 bp, synthetic construct
  misc_feature 1..20: note = Description of Artificial Sequence: Synthetic oligonucleotide
  misc_feature 1..20: note = Target: FXN; (+) strand; PAM type: NNGRRT; PAM sequence: CTGAAT
  source 1..20: mol_type = other DNA
actttctgacactcaccccg

SEQ ID NO: 7127 - DNA, 20 bp, synthetic construct
  misc_feature 1..20: note = Description of Artificial Sequence: Synthetic oligonucleotide
  misc_feature 1..20: note = Target: FXN; (+) strand; PAM type: NNGRRT; PAM sequence: AAGGGT
  source 1..20: mol_type = other DNA
tgaatgtcctgcctctgctc

SEQ ID NO: 7128 - DNA, 20 bp, synthetic construct
  misc_feature 1..20: note = Description of Artificial Sequence: Synthetic oligonucleotide
  misc_feature 1..20: note = Target: FXN; (+) strand; PAM type: NNGRRT; PAM sequence: AGGAGT
  source 1..20: mol_type = other DNA
gtccctctgaagaaatccaa

SEQ ID NO: 7129 - DNA, 20 bp, synthetic construct
  misc_feature 1..20: note = Description of Artificial Sequence: Synthetic oligonucleotide
  misc_feature 1..20: note = Target: FXN; (+) strand; PAM type: NNGRRT; PAM sequence: GAGAGT
  source 1..20: mol_type = other DNA
ccaaaggagtaaagagcttg

SEQ ID NO: 7130 - DNA, 20 bp, synthetic construct
  misc_feature 1..20: note = Description of Artificial Sequence: Synthetic oligonucleotide
  misc_feature 1..20: note = Target: FXN; (+) strand; PAM type: NNGRRT; PAM sequence: TAGGGT
  source 1..20: mol_type = other DNA
gcttggagagtaggcctctg

SEQ ID NO: 7131 - DNA, 20 bp, synthetic construct
  misc_feature 1..20: note = Description of Artificial Sequence: Synthetic oligonucleotide
  misc_feature 1..20: note = Target: FXN; (+) strand; PAM type: NNGRRT; PAM sequence: GGGAGT
  source 1..20: mol_type = other DNA
aaacgtgatgaggccatagc

SEQ ID NO: 7132 - DNA, 20 bp, synthetic construct
  misc_feature 1..20: note = Description of Artificial Sequence: Synthetic oligonucleotide
  misc_feature 1..20: note = Target: FXN; (+) strand; PAM type: NNGRRT; PAM sequence: GAGGAT
  source 1..20: mol_type = other DNA
catagcgggagtccacggag

SEQ ID NO: 7133 - DNA, 20 bp, synthetic construct
  misc_feature 1..20: note = Description of Artificial Sequence: Synthetic oligonucleotide
  misc_feature 1..20: note = Target: FXN; (+) strand; PAM type: NNGRRT; PAM sequence: AGGAAT
  source 1..20: mol_type = other DNA
gatggcccaaaacctggccc

SEQ ID NO: 7134 - DNA, 20 bp, synthetic construct
  misc_feature 1..20: note = Description of Artificial Sequence: Synthetic oligonucleotide
  misc_feature 1..20: note = Target: FXN; (+) strand; PAM type: NNGRRT; PAM sequence: AGGAGT
  source 1..20: mol_type = other DNA
caggcagatggcttgagctc

SEQ ID NO: 7135 - DNA, 20 bp, synthetic construct
  misc_feature 1..20: note = Description of Artificial Sequence: Synthetic oligonucleotide
  misc_feature 1..20: note = Target: FXN; (+) strand; PAM type: NNGRRT; PAM sequence: CCGGGT
  source 1..20: mol_type = other DNA
accaaaaatacaaaaattag

SEQ ID NO: 7136 - DNA, 20 bp, synthetic construct
  misc_feature 1..20: note = Description of Artificial Sequence: Synthetic oligonucleotide
  misc_feature 1..20: note = Target: FXN; (+) strand; PAM type: NNGRRT; PAM sequence: AAGGAT
  source 1..20: mol_type = other DNA
tactcaggaggctgaggtgg

SEQ ID NO: 7137 - DNA, 20 bp, synthetic construct
  misc_feature 1..20: note = Description of Artificial Sequence: Synthetic oligonucleotide
  misc_feature 1..20: note = Target: FXN; (+) strand; PAM type: NNGRRT; PAM sequence: CTGAGT
  source 1..20: mol_type = other DNA
ggctgaggtggaaggattgc

SEQ ID NO: 7138 - DNA, 20 bp, synthetic construct
  misc_feature 1..20: note = Description of Artificial Sequence: Synthetic oligonucleotide
  misc_feature 1..20: note = Target: FXN; (+) strand; PAM type: NNGRRT; PAM sequence: CTGGGT
  source 1..20: mol_type = other DNA
tcacaccactgcactccagc

SEQ ID NO: 7139 - DNA, 20 bp, synthetic construct
  misc_feature 1..20: note = Description of Artificial Sequence: Synthetic oligonucleotide
  misc_feature 1..20: note = Target: FXN; (+) strand; PAM type: NNGRRT; PAM sequence: GAGAGT
  source 1..20: mol_type = other DNA
agggccgccgtgtccattga

SEQ ID NO: 7140 - DNA, 20 bp, synthetic construct
  misc_feature 1..20: note = Description of Artificial Sequence: Synthetic oligonucleotide
  misc_feature 1..20: note = Target: FXN; (+) strand; PAM type: NNGRRT; PAM sequence: TTGGAT
  source 1..20: mol_type = other DNA
gcaggtaacgatgcgagggc

SEQ ID NO: 7141 - DNA, 20 bp, synthetic construct
  misc_feature 1..20: note = Description of Artificial Sequence: Synthetic oligonucleotide
  misc_feature 1..20: note = Target: FXN; (+) strand; PAM type: NNGRRT; PAM sequence: CTGGGT
  source 1..20: mol_type = other DNA
tgattctgttttccctgtac

SEQ ID NO: 7142 - DNA, 20 bp, synthetic construct
  misc_feature 1..20: note = Description of Artificial Sequence: Synthetic oligonucleotide
  misc_feature 1..20: note = Target: FXN; (+) strand; PAM type: NNGRRT; PAM sequence: CTGAAT
  source 1..20: mol_type = other DNA
gttttccctgtacctgggtc

SEQ ID NO: 7143 - DNA, 20 bp, synthetic construct
  misc_feature 1..20: note = Description of Artificial Sequence: Synthetic oligonucleotide
  misc_feature 1..20: note = Target: FXN; (+) strand; PAM type: NNGRRT; PAM sequence: TAGGAT
  source 1..20: mol_type = other DNA
tgaagtttgattgatagcat

SEQ ID NO: 7144 - DNA, 20 bp, synthetic construct
  misc_feature 1..20: note = Description of Artificial Sequence: Synthetic oligonucleotide
  misc_feature 1..20: note = Target: FXN; (+) strand; PAM type: NNGRRT; PAM sequence: TGGGGT
  source 1..20: mol_type = other DNA
aataattttttttgtcaaca

SEQ ID NO: 7145 - DNA, 20 bp, synthetic construct
  misc_feature 1..20: note = Description of Artificial Sequence: Synthetic oligonucleotide
  misc_feature 1..20: note = Target: FXN; (+) strand; PAM type: NNGRRT; PAM sequence: TGGGGT
  source 1..20: mol_type = other DNA
acatcagcctcccaaagtgc

SEQ ID NO: 7146 - DNA, 20 bp, synthetic construct
  misc_feature 1..20: note = Description of Artificial Sequence: Synthetic oligonucleotide
  misc_feature 1..20: note = Target: FXN; (+) strand; PAM type: NNGRRT; PAM sequence: ATGGGT
  source 1..20: mol_type = other DNA
cctcccaaagtgctggggtt

SEQ ID NO: 7147 - DNA, 20 bp, synthetic construct
  misc_feature 1..20: note = Description of Artificial Sequence: Synthetic oligonucleotide
  misc_feature 1..20: note = Target: FXN; (+) strand; PAM type: NNGRRT; PAM sequence: CAGAAT
  source 1..20: mol_type = other DNA
tgcgcaccctgaggaggttg

SEQ ID NO: 7148 - DNA, 20 bp, synthetic construct
  misc_feature 1..20: note = Description of Artificial Sequence: Synthetic oligonucleotide
  misc_feature 1..20: note = Target: FXN; (+) strand; PAM type: NNGRRT; PAM sequence: GAGAAT
  source 1..20: mol_type = other DNA
gaggaggttgcagaataaag

SEQ ID NO: 7149 - DNA, 20 bp, synthetic construct
  misc_feature 1..20: note = Description of Artificial Sequence: Synthetic oligonucleotide
  misc_feature 1..20: note = Target: FXN; (+) strand; PAM type: NNGRRT; PAM sequence: AGGGGT
  source 1..20: mol_type = other DNA
gagcacctcaggcagtgtgg

SEQ ID NO: 7150 - DNA, 20 bp, synthetic construct
  misc_feature 1..20: note = Description of Artificial Sequence: Synthetic oligonucleotide
  misc_feature 1..20: note = Target: FXN; (+) strand; PAM type: NNGRRT; PAM sequence: CAGAGT
  source 1..20: mol_type = other DNA
tggcaacccgatagcagtat

SEQ ID NO: 7151 - DNA, 20 bp, synthetic construct
  misc_feature 1..20: note = Description of Artificial Sequence: Synthetic oligonucleotide
  misc_feature 1..20: note = Target: FXN; (+) strand; PAM type: NNGRRT; PAM sequence: AGGAAT
  source 1..20: mol_type = other DNA
cagcatttggttgataatgc

SEQ ID NO: 7152 - DNA, 20 bp, synthetic construct
  misc_feature 1..20: note = Description of Artificial Sequence: Synthetic oligonucleotide
  misc_feature 1..20: note = Target: FXN; (+) strand; PAM type: NNGRRT; PAM sequence: TTGAGT
  source 1..20: mol_type = other DNA
agtctttggaaaagccctcc

SEQ ID NO: 7153 - DNA, 20 bp, synthetic construct
  misc_feature 1..20: note = Description of Artificial Sequence: Synthetic oligonucleotide
  misc_feature 1..20: note = Target: FXN; (+) strand; PAM type: NNGRRT; PAM sequence: CAGGGT
  source 1..20: mol_type = other DNA
cactctgttcttacctccat

SEQ ID NO: 7154 - DNA, 20 bp, synthetic construct
  misc_feature 1..20: note = Description of Artificial Sequence: Synthetic oligonucleotide
  misc_feature 1..20: note = Target: FXN; (+) strand; PAM type: NNGRRT; PAM sequence: TGGAAT
  source 1..20: mol_type = other DNA
tccatgaggccatgaggaag

SEQ ID NO: 7155 - DNA, 20 bp, synthetic construct
  misc_feature 1..20: note = Description of Artificial Sequence: Synthetic oligonucleotide
  misc_feature 1..20: note = Target: FXN; (+) strand; PAM type: NNGRRT; PAM sequence: ACGAAT
  source 1..20: mol_type = other DNA
ccagcctccgatctgtccac

SEQ ID NO: 7156 - DNA, 20 bp, synthetic construct
  misc_feature 1..20: note = Description of Artificial Sequence: Synthetic oligonucleotide
  misc_feature 1..20: note = Target: FXN; (+) strand; PAM type: NNGRRT; PAM sequence: CTGGAT
  source 1..20: mol_type = other DNA
cgtgcatgtgccattattca

SEQ ID NO: 7157 - DNA, 20 bp, synthetic construct
  misc_feature 1..20: note = Description of Artificial Sequence: Synthetic oligonucleotide
  misc_feature 1..20: note = Target: FXN; (+) strand; PAM type: NNGRRT; PAM sequence: GTGGAT
  source 1..20: mol_type = other DNA
attcactggatgagcttgag

SEQ ID NO: 7158 - DNA, 20 bp, synthetic construct
  misc_feature 1..20: note = Description of Artificial Sequence: Synthetic oligonucleotide
  misc_feature 1..20: note = Target: FXN; (+) strand; PAM type: NNGRRT; PAM sequence: ATGAAT
  source 1..20: mol_type = other DNA
cccaccaggctctcaatgtc

SEQ ID NO: 7159 - DNA, 20 bp, synthetic construct
  misc_feature 1..20: note = Description of Artificial Sequence: Synthetic oligonucleotide
  misc_feature 1..20: note = Target: FXN; (+) strand; PAM type: NNGRRT; PAM sequence: CTGAAT
  source 1..20: mol_type = other DNA
tcaatgtcatgaatttaaca

SEQ ID NO: 7160 - DNA, 20 bp, synthetic construct
  misc_feature 1..20: note = Description of Artificial Sequence: Synthetic oligonucleotide
  misc_feature 1..20: note = Target: FXN; (+) strand; PAM type: NNGRRT; PAM sequence: TGGGGT
  source 1..20: mol_type = other DNA
ataatagtttaggtgattgc

SEQ ID NO: 7161 - DNA, 20 bp, synthetic construct
  misc_feature 1..20: note = Description of Artificial Sequence: Synthetic oligonucleotide
  misc_feature 1..20: note = Target: FXN; (+) strand; PAM type: NNGRRT; PAM sequence: AGGAAT
  source 1..20: mol_type = other DNA
gctggggtgctaggagagga

SEQ ID NO: 7162 - DNA, 20 bp, synthetic construct
  misc_feature 1..20: note = Description of Artificial Sequence: Synthetic oligonucleotide
  misc_feature 1..20: note = Target: FXN; (+) strand; PAM type: NNGRRT; PAM sequence: GGGAAT
  source 1..20: mol_type = other DNA
tgctaggagaggaaggaatg

SEQ ID NO: 7163 - DNA, 20 bp, synthetic construct
  misc_feature 1..20: note = Description of Artificial Sequence: Synthetic oligonucleotide
  misc_feature 1..20: note = Target: FXN; (+) strand; PAM type: NNGRRT; PAM sequence: ATGGGT
  source 1..20: mol_type = other DNA
gaatggggaataactgttta

SEQ ID NO: 7164 - DNA, 20 bp, synthetic construct
  misc_feature 1..20: note = Description of Artificial Sequence: Synthetic oligonucleotide
  misc_feature 1..20: note = Target: FXN; (+) strand; PAM type: NNGRRT; PAM sequence: GTGGGT
  source 1..20: mol_type = other DNA
atagttggccttgtgtatct

SEQ ID NO: 7165 - DNA, 20 bp, synthetic construct
  misc_feature 1..20: note = Description of Artificial Sequence: Synthetic oligonucleotide
  misc_feature 1..20: note = Target: FXN; (+) strand; PAM type: NNGRRT; PAM sequence: GTGGAT
  source 1..20: mol_type = other DNA
cacatctgattcaaccaacc

SEQ ID NO: 7166 - DNA, 20 bp, synthetic construct
  misc_feature 1..20: note = Description of Artificial Sequence: Synthetic oligonucleotide
  misc_feature 1..20: note = Target: FXN; (+) strand; PAM type: NNGRRT; PAM sequence: AAGGAT
  source 1..20: mol_type = other DNA
agatgacttaaagcatacag

SEQ ID NO: 7167 - DNA, 20 bp, synthetic construct
  misc_feature 1..20: note = Description of Artificial Sequence: Synthetic oligonucleotide
  misc_feature 1..20: note = Target: FXN; (+) strand; PAM type: NNGRRT; PAM sequence: TTGAGT
  source 1..20: mol_type = other DNA
taccatttcatatcagggac

SEQ ID NO: 7168 - DNA, 20 bp, synthetic construct
  misc_feature 1..20: note = Description of Artificial Sequence: Synthetic oligonucleotide
  misc_feature 1..20: note = Target: FXN; (+) strand; PAM type: NNGRRT; PAM sequence: ACGGAT
  source 1..20: mol_type = other DNA
tatcagggacttgagtaccc

SEQ ID NO: 7169 - DNA, 20 bp, synthetic construct
  misc_feature 1..20: note = Description of Artificial Sequence: Synthetic oligonucleotide
  misc_feature 1..20: note = Target: FXN; (+) strand; PAM type: NNGRRT; PAM sequence: ATGGAT
  source 1..20: mol_type = other DNA
gatcctggaaccccttccct

SEQ ID NO: 7170 - DNA, 20 bp, synthetic construct
  misc_feature 1..20: note = Description of Artificial Sequence: Synthetic oligonucleotide
  misc_feature 1..20: note = Target: FXN; (+) strand; PAM type: NNGRRT; PAM sequence: CTGGGT
  source 1..20: mol_type = other DNA
gataccaaggaacaacagca

SEQ ID NO: 7171 - DNA, 20 bp, synthetic construct
  misc_feature 1..20: note = Description of Artificial Sequence: Synthetic oligonucleotide
  misc_feature 1..20: note = Target: FXN; (+) strand; PAM type: NNGRRT; PAM sequence: TGGGGT
  source 1..20: mol_type = other DNA
aacagcactgggtctccttt

SEQ ID NO: 7172 - DNA, 20 bp, synthetic construct
  misc_feature 1..20: note = Description of Artificial Sequence: Synthetic oligonucleotide
  misc_feature 1..20: note = Target: FXN; (+) strand; PAM type: NNGRRT; PAM sequence: GTGAAT
  source 1..20: mol_type = other DNA
ttaaatggttaatgtgttat

SEQ ID NO: 7173 - DNA, 20 bp, synthetic construct
  misc_feature 1..20: note = Description of Artificial Sequence: Synthetic oligonucleotide
  misc_feature 1..20: note = Target: FXN; (+) strand; PAM type: NNGRRT; PAM sequence: AAGGGT
  source 1..20: mol_type = other DNA
atacctggagacttatcagt

SEQ ID NO: 7174 - DNA, 20 bp, synthetic construct
  misc_feature 1..20: note = Description of Artificial Sequence: Synthetic oligonucleotide
  misc_feature 1..20: note = Target: FXN; (+) strand; PAM type: NNGRRT; PAM sequence: GAGAAT
  source 1..20: mol_type = other DNA
caaatgttttttcaggtttt

SEQ ID NO: 7175 - DNA, 20 bp, synthetic construct
  misc_feature 1..20: note = Description of Artificial Sequence: Synthetic oligonucleotide
  misc_feature 1..20: note = Target: FXN; (+) strand; PAM type: NNGRRT; PAM sequence: TGGAAT
  source 1..20: mol_type = other DNA
caggttttgagaatcattct

SEQ ID NO: 7176 - DNA, 20 bp, synthetic construct
  misc_feature 1..20: note = Description of Artificial Sequence: Synthetic oligonucleotide
  misc_feature 1..20: note = Target: FXN; (+) strand; PAM type: NNGRRT; PAM sequence: TGGAAT
  source 1..20: mol_type = other DNA
tttcttgggggcagcatttg

SEQ ID NO: 7177 - DNA, 20 bp, synthetic construct
  misc_feature 1..20: note = Description of Artificial Sequence: Synthetic oligonucleotide
  misc_feature 1..20: note = Target: FXN; (+) strand; PAM type: NNGRRT; PAM sequence: TGGAAT
  source 1..20: mol_type = other DNA
tcatctgaagggctgtgctg

SEQ ID NO: 7178 - DNA, 20 bp, synthetic construct
  misc_feature 1..20: note = Description of Artificial Sequence: Synthetic oligonucleotide
  misc_feature 1..20: note = Target: FXN; (+) strand; PAM type: NNGRRT; PAM sequence: CTGGGT
  source 1..20: mol_type = other DNA
tatgactggactgggaaaaa

SEQ ID NO: 7179 - DNA, 20 bp, synthetic construct
  misc_feature 1..20: note = Description of Artificial Sequence: Synthetic oligonucleotide
  misc_feature 1..20: note = Target: FXN; (+) strand; PAM type: NNGRRT; PAM sequence: AAGAAT
  source 1..20: mol_type = other DNA
atgtgtcacagctctgtaga

SEQ ID NO: 7180 - DNA, 20 bp, synthetic construct
  misc_feature 1..20: note = Description of Artificial Sequence: Synthetic oligonucleotide
  misc_feature 1..20: note = Target: FXN; (+) strand; PAM type: NNGRRT; PAM sequence: TTGGAT
  source 1..20: mol_type = other DNA
taatttctatggaagatttt

SEQ ID NO: 7181 - DNA, 20 bp, synthetic construct
  misc_feature 1..20: note = Description of Artificial Sequence: Synthetic oligonucleotide
  misc_feature 1..20: note = Target: FXN; (+) strand; PAM type: NNGRRT; PAM sequence: TCGGAT
  source 1..20: mol_type = other DNA
atggaagattttttggattg

SEQ ID NO: 7182 - DNA, 20 bp, synthetic construct
  misc_feature 1..20: note = Description of Artificial Sequence: Synthetic oligonucleotide
  misc_feature 1..20: note = Target: FXN; (+) strand; PAM type: NNGRRT; PAM sequence: CTGAAT
  source 1..20: mol_type = other DNA
ataatgtcttatgcctatac

SEQ ID NO: 7183 - DNA, 20 bp, synthetic construct
  misc_feature 1..20: note = Description of Artificial Sequence: Synthetic oligonucleotide
  misc_feature 1..20: note = Target: FXN; (+) strand; PAM type: NNGRRT; PAM sequence: ATGAAT
  source 1..20: mol_type = other DNA
gaaaaattccaggagggaaa

SEQ ID NO: 7184 - DNA, 20 bp, synthetic construct
  misc_feature 1..20: note = Description of Artificial Sequence: Synthetic oligonucleotide
  misc_feature 1..20: note = Target: FXN; (+) strand; PAM type: NNGRRT; PAM sequence: AAGGAT
  source 1..20: mol_type = other DNA
tcttcactcttcattctttg

SEQ ID NO: 7185 - DNA, 20 bp, synthetic construct
  misc_feature 1..20: note = Description of Artificial Sequence: Synthetic oligonucleotide
  misc_feature 1..20: note = Target: FXN; (+) strand; PAM type: NNGRRT; PAM sequence: AAGGGT
  source 1..20: mol_type = other DNA
tctccaaatgagacacatta

SEQ ID NO: 7186 - DNA, 20 bp, synthetic construct
  misc_feature 1..20: note = Description of Artificial Sequence: Synthetic oligonucleotide
  misc_feature 1..20: note = Target: FXN; (+) strand; PAM type: NNGRRT; PAM sequence: CTGGGT
  source 1..20: mol_type = other DNA
ctgccaaggtgtggcctgca

SEQ ID NO: 7187 - DNA, 20 bp, synthetic construct
  misc_feature 1..20: note = Description of Artificial Sequence: Synthetic oligonucleotide
  misc_feature 1..20: note = Target: FXN; (+) strand; PAM type: NNGRRT; PAM sequence: TGGAAT
  source 1..20: mol_type = other DNA
tttcaatttaaaggttagta

SEQ ID NO: 7188 - DNA, 20 bp, synthetic construct
  misc_feature 1..20: note = Description of Artificial Sequence: Synthetic oligonucleotide
  misc_feature 1..20: note = Target: FXN; (+) strand; PAM type: NNGRRT; PAM sequence: AAGAAT
  source 1..20: mol_type = other DNA
agtatggaatcagctgctac

SEQ ID NO: 7189 - DNA, 20 bp, synthetic construct
  misc_feature 1..20: note = Description of Artificial Sequence: Synthetic oligonucleotide
  misc_feature 1..20: note = Target: FXN; (+) strand; PAM type: NNGRRT; PAM sequence: CTGAGT
  source 1..20: mol_type = other DNA
aaaaaagccgttttcatgag

SEQ ID NO: 7190 - DNA, 20 bp, synthetic construct
  misc_feature 1..20: note = Description of Artificial Sequence: Synthetic oligonucleotide
  misc_feature 1..20: note = Target: FXN; (+) strand; PAM type: NNGRRT; PAM sequence: GAGAAT
  source 1..20: mol_type = other DNA
cttccccatctgttaaatga

SEQ ID NO: 7191 - DNA, 20 bp, synthetic construct
  misc_feature 1..20: note = Description of Artificial Sequence: Synthetic oligonucleotide
  misc_feature 1..20: note = Target: FXN; (+) strand; PAM type: NNGRRT; PAM sequence: TAGAGT
  source 1..20: mol_type = other DNA
ccatctgttaaatgagagaa

SEQ ID NO: 7192 - DNA, 20 bp, synthetic construct
  misc_feature 1..20: note = Description of Artificial Sequence: Synthetic oligonucleotide
  misc_feature 1..20: note = Target: FXN; (+) strand; PAM type: NNGRRT; PAM sequence: TTGGGT
  source 1..20: mol_type = other DNA
aggctagttctaattcccta

SEQ ID NO: 7193 - DNA, 20 bp, synthetic construct
  misc_feature 1..20: note = Description of Artificial Sequence: Synthetic oligonucleotide
  misc_feature 1..20: note = Target: FXN; (+) strand; PAM type: NNGRRT; PAM sequence: GGGGAT
  source 1..20: mol_type = other DNA
attccctattgggtagatga

SEQ ID NO: 7194 - DNA, 20 bp, synthetic construct
  misc_feature 1..20: note = Description of Artificial Sequence: Synthetic oligonucleotide
  misc_feature 1..20: note = Target: FXN; (+) strand; PAM type: NNGRRT; PAM sequence: TTGAAT
  source 1..20: mol_type = other DNA
ttgccctatcgtgatttcag

SEQ ID NO: 7195 - DNA, 20 bp, synthetic construct
  misc_feature 1..20: note = Description of Artificial Sequence: Synthetic oligonucleotide
  misc_feature 1..20: note = Target: FXN; (+) strand; PAM type: NNGRRT; PAM sequence: GTGGGT
  source 1..20: mol_type = other DNA
cagcacttttggaggccaag

SEQ ID NO: 7196 - DNA, 20 bp, synthetic construct
  misc_feature 1..20: note = Description of Artificial Sequence: Synthetic oligonucleotide
  misc_feature 1..20: note = Target: FXN; (+) strand; PAM type: NNGRRT; PAM sequence: GTGGAT
  source 1..20: mol_type = other DNA
acttttggaggccaaggtgg

SEQ ID NO: 7197 - DNA, 20 bp, synthetic construct
  misc_feature 1..20: note = Description of Artificial Sequence: Synthetic oligonucleotide
  misc_feature 1..20: note = Target: FXN; (+) strand; PAM type: NNGRRT; PAM sequence: AGGAGT
  source 1..20: mol_type = other DNA
tgggtggatcacctgaggtc

SEQ ID NO: 7198 - DNA, 20 bp, synthetic construct
  misc_feature 1..20: note = Description of Artificial Sequence: Synthetic oligonucleotide
  misc_feature 1..20: note = Target: FXN; (+) strand; PAM type: NNGRRT; PAM sequence: AAGAAT
  source 1..20: mol_type = other DNA
tacttgggaggctgaagcgg

SEQ ID NO: 7199 - DNA, 20 bp, synthetic construct
  misc_feature 1..20: note = Description of Artificial Sequence: Synthetic oligonucleotide
  misc_feature 1..20: note = Target: FXN; (+) strand; PAM type: NNGRRT; PAM sequence: CTGGGT
  source 1..20: mol_type = other DNA
tcgtgccattgcactgtaac

SEQ ID NO: 7200 - DNA, 20 bp, synthetic construct
  misc_feature 1..20: note = Description of Artificial Sequence: Synthetic oligonucleotide
  misc_feature 1..20: note = Target: FXN; (+) strand; PAM type: NNGRRT; PAM sequence: CTGGGT
  source 1..20: mol_type = other DNA
catcctttattgtaccctta

SEQ ID NO: 7201 - DNA, 20 bp, synthetic construct
  misc_feature 1..20: note = Description of Artificial Sequence: Synthetic oligonucleotide
  misc_feature 1..20: note = Target: FXN; (+) strand; PAM type: NNGRRT; PAM sequence: AAGGAT
  source 1..20: mol_type = other DNA
tattattttcttacttaaag

SEQ ID NO: 7202 - DNA, 20 bp, synthetic construct
  misc_feature 1..20: note = Description of Artificial Sequence: Synthetic oligonucleotide
  misc_feature 1..20: note = Target: FXN; (+) strand; PAM type: NNGRRT; PAM sequence: GAGAAT
  source 1..20: mol_type = other DNA
tactcaggaggctgagacgg

SEQ ID NO: 7203 - DNA, 20 bp, synthetic construct
  misc_feature 1..20: note = Description of Artificial Sequence: Synthetic oligonucleotide
  misc_feature 1..20: note = Target: FXN; (+) strand; PAM type: NNGRRT; PAM sequence: GTGAGT
  source 1..20: mol_type = other DNA
cccaggcggaggaggttaca

SEQ ID NO: 7204 - DNA, 20 bp, synthetic construct
  misc_feature 1..20: note = Description of Artificial Sequence: Synthetic oligonucleotide
  misc_feature 1..20: note = Target: FXN; (+) strand; PAM type: NNGRRT; PAM sequence: GAGGGT
  source 1..20: mol_type = other DNA
gtctcaaaaaaaaaaaaaag

SEQ ID NO: 7205 - DNA, 20 bp, synthetic construct
  misc_feature 1..20: note = Description of Artificial Sequence: Synthetic oligonucleotide
  misc_feature 1..20: note = Target: FXN; (+) strand; PAM type: NNGRRT; PAM sequence: ATGGGT
  source 1..20: mol_type = other DNA
atgtagcaaaggcttttcca

SEQ ID NO: 7206 - DNA, 20 bp, synthetic construct
  misc_feature 1..20: note = Description of Artificial Sequence: Synthetic oligonucleotide
  misc_feature 1..20: note = Target: FXN; (+) strand; PAM type: NNGRRT; PAM sequence: GTGAAT
  source 1..20: mol_type = other DNA
agcaaaggcttttccaatgg

SEQ ID NO: 7207 - DNA, 20 bp, synthetic construct
  misc_feature 1..20: note = Description of Artificial Sequence: Synthetic oligonucleotide
  misc_feature 1..20: note = Target: FXN; (+) strand; PAM type: NNGRRT; PAM sequence: GAGGAT
  source 1..20: mol_type = other DNA
tgcacaggaggctgagacag

SEQ ID NO: 7208 - DNA, 20 bp, synthetic construct
  misc_feature 1..20: note = Description of Artificial Sequence: Synthetic oligonucleotide
  misc_feature 1..20: note = Target: FXN; (+) strand; PAM type: NNGRRT; PAM sequence: AGGAAT
  source 1..20: mol_type = other DNA
caggaggattgcttgaagcc

SEQ ID NO: 7209 - DNA, 20 bp, synthetic construct
  misc_feature 1..20: note = Description of Artificial Sequence: Synthetic oligonucleotide
  misc_feature 1..20: note = Target: FXN; (+) strand; PAM type: NNGRRT; PAM sequence: TTGAGT
  source 1..20: mol_type = other DNA
ttctgaaataaaattatttt

SEQ ID NO: 7210 - DNA, 20 bp, synthetic construct
  misc_feature 1..20: note = Description of Artificial Sequence: Synthetic oligonucleotide
  misc_feature 1..20: note = Target: FXN; (+) strand; PAM type: NNGRRT; PAM sequence: AGGAAT
  source 1..20: mol_type = other DNA
tgacatgaaagtggaagtta

SEQ ID NO: 7211 - DNA, 20 bp, synthetic construct
  misc_feature 1..20: note = Description of Artificial Sequence: Synthetic oligonucleotide
  misc_feature 1..20: note = Target: FXN; (+) strand; PAM type: NNGRRT; PAM sequence: TGGGGT
  source 1..20: mol_type = other DNA
ttaaggaatctgggctctta

SEQ ID NO: 7212 - DNA, 20 bp, synthetic construct
  misc_feature 1..20: note = Description of Artificial Sequence: Synthetic oligonucleotide
  misc_feature 1..20: note = Target: FXN; (+) strand; PAM type: NNGRRT; PAM sequence: AGGAGT
  source 1..20: mol_type = other DNA
caagtgtatcacctgaggtc

SEQ ID NO: 7213 - DNA, 20 bp, synthetic construct
  misc_feature 1..20: note = Description of Artificial Sequence: Synthetic oligonucleotide
  misc_feature 1..20: note = Target: FXN; (+) strand; PAM type: NNGRRT; PAM sequence: GAGAAT
  source 1..20: mol_type = other DNA
tactcaggaggctgaggcag

SEQ ID NO: 7214 - DNA, 20 bp, synthetic construct
  misc_feature 1..20: note = Description of Artificial Sequence: Synthetic oligonucleotide
  misc_feature 1..20: note = Target: FXN; (+) strand; PAM type: NNGRRT; PAM sequence: GGGGGT
  source 1..20: mol_type = other DNA
aggagaatcgctgtaacctg

SEQ ID NO: 7215 - DNA, 20 bp, synthetic construct
  misc_feature 1..20: note = Description of Artificial Sequence: Synthetic oligonucleotide
  misc_feature 1..20: note = Target: FXN; (+) strand; PAM type: NNGRRT; PAM sequence: AAGAAT
  source 1..20: mol_type = other DNA
acatgaacagcagccagggg

SEQ ID NO: 7216 - DNA, 20 bp, synthetic construct
  misc_feature 1..20: note = Description of Artificial Sequence: Synthetic oligonucleotide
  misc_feature 1..20: note = Target: FXN; (+) strand; PAM type: NNGRRT; PAM sequence: AAGGAT
  source 1..20: mol_type = other DNA
gtggtccagtcatccatgtg

SEQ ID NO: 7217 - DNA, 20 bp, synthetic construct
  misc_feature 1..20: note = Description of Artificial Sequence: Synthetic oligonucleotide
  misc_feature 1..20: note = Target: FXN; (+) strand; PAM type: NNGRRT; PAM sequence: ATGAGT
  source 1..20: mol_type = other DNA
tccagtcatccatgtgaagg

SEQ ID NO: 7218 - DNA, 20 bp, synthetic construct
  misc_feature 1..20: note = Description of Artificial Sequence: Synthetic oligonucleotide
  misc_feature 1..20: note = Target: FXN; (+) strand; PAM type: NNGRRT; PAM sequence: AGGAAT
  source 1..20: mol_type = other DNA
gtaacatactggaggaggtg

SEQ ID NO: 7219 - DNA, 20 bp, synthetic construct
  misc_feature 1..20: note = Description of Artificial Sequence: Synthetic oligonucleotide
  misc_feature 1..20: note = Target: FXN; (+) strand; PAM type: NNGRRT; PAM sequence: CAGGAT
  source 1..20: mol_type = other DNA
cccctttctattttttgaga

SEQ ID NO: 7220 - DNA, 20 bp, synthetic construct
  misc_feature 1..20: note = Description of Artificial Sequence: Synthetic oligonucleotide
  misc_feature 1..20: note = Target: FXN; (+) strand; PAM type: NNGRRT; PAM sequence: TGGGGT
  source 1..20: mol_type = other DNA
ttgtgtattttttgtagaga

SEQ ID NO: 7221 - DNA, 20 bp, synthetic construct
  misc_feature 1..20: note = Description of Artificial Sequence: Synthetic oligonucleotide
  misc_feature 1..20: note = Target: FXN; (+) strand; PAM type: NNGRRT; PAM sequence: TGGGAT
  source 1..20: mol_type = other DNA
gcctcgtcctcccaagatgc

SEQ ID NO: 7222 - DNA, 20 bp, synthetic construct
  misc_feature 1..20: note = Description of Artificial Sequence: Synthetic oligonucleotide
  misc_feature 1..20: note = Target: FXN; (+) strand; PAM type: NNGRRT; PAM sequence: TTGAGT
  source 1..20: mol_type = other DNA
tttctattatttttaccttc

SEQ ID NO: 7223 - DNA, 20 bp, synthetic construct
  misc_feature 1..20: note = Description of Artificial Sequence: Synthetic oligonucleotide
  misc_feature 1..20: note = Target: FXN; (+) strand; PAM type: NNGRRT; PAM sequence: GTGGGT
  source 1..20: mol_type = other DNA
tattatttttaccttcttga

SEQ ID NO: 7224 - DNA, 20 bp, synthetic construct
  misc_feature 1..20: note = Description of Artificial Sequence: Synthetic oligonucleotide
  misc_feature 1..20: note = Target: FXN; (+) strand; PAM type: NNGRRT; PAM sequence: TGGAAT
  source 1..20: mol_type = other DNA
gcatgacttatttagctctc

SEQ ID NO: 7225 - DNA, 20 bp, synthetic construct
  misc_feature 1..20: note = Description of Artificial Sequence: Synthetic oligonucleotide
  misc_feature 1..20: note = Target: FXN; (+) strand; PAM type: NNGRRT; PAM sequence: AGGAAT
  source 1..20: mol_type = other DNA
gctctctggaattacaaaga

SEQ ID NO: 7226 - DNA, 20 bp, synthetic construct
  misc_feature 1..20: note = Description of Artificial Sequence: Synthetic oligonucleotide
  misc_feature 1..20: note = Target: FXN; (+) strand; PAM type: NNGRRT; PAM sequence: CTGGGT
  source 1..20: mol_type = other DNA
tgaggtgtgtaaaagagaac

SEQ ID NO: 7227 - DNA, 20 bp, synthetic construct
  misc_feature 1..20: note = Description of Artificial Sequence: Synthetic oligonucleotide
  misc_feature 1..20: note = Target: FXN; (+) strand; PAM type: NNGRRT; PAM sequence: TTGAAT
  source 1..20: mol_type = other DNA
gtaaaagagaacctgggttt

SEQ ID NO: 7228 - DNA, 20 bp, synthetic construct
  misc_feature 1..20: note = Description of Artificial Sequence: Synthetic oligonucleotide
  misc_feature 1..20: note = Target: FXN; (+) strand; PAM type: NNGRRT; PAM sequence: TAGAAT
  source 1..20: mol_type = other DNA
gggtttttgaatcacaaatt

SEQ ID NO: 7229 - DNA, 20 bp, synthetic construct
  misc_feature 1..20: note = Description of Artificial Sequence: Synthetic oligonucleotide
  misc_feature 1..20: note = Target: FXN; (+) strand; PAM type: NNGRRT; PAM sequence: ATGGAT
  source 1..20: mol_type = other DNA
tggaggacttctcccaaaat

SEQ ID NO: 7230 - DNA, 20 bp, synthetic construct
  misc_feature 1..20: note = Description of Artificial Sequence: Synthetic oligonucleotide
  misc_feature 1..20: note = Target: FXN; (+) strand; PAM type: NNGRRT; PAM sequence: TGGAGT
  source 1..20: mol_type = other DNA
aagacccatgttcatagtga

SEQ ID NO: 7231 - DNA, 20 bp, synthetic construct
  misc_feature 1..20: note = Description of Artificial Sequence: Synthetic oligonucleotide
  misc_feature 1..20: note = Target: FXN; (+) strand; PAM type: NNGRRT; PAM sequence: TTGGAT
  source 1..20: mol_type = other DNA
taattttagtccgtgtccag

SEQ ID NO: 7232 - DNA, 20 bp, synthetic construct
  misc_feature 1..20: note = Description of Artificial Sequence: Synthetic oligonucleotide
  misc_feature 1..20: note = Target: FXN; (+) strand; PAM type: NNGRRT; PAM sequence: ACGAGT
  source 1..20: mol_type = other DNA
aatttatgctgttcaaaacg

SEQ ID NO: 7233 - DNA, 20 bp, synthetic construct
  misc_feature 1..20: note = Description of Artificial Sequence: Synthetic oligonucleotide
  misc_feature 1..20: note = Target: FXN; (+) strand; PAM type: NNGRRT; PAM sequence: TAGAGT
  source 1..20: mol_type = other DNA
cgagttcatgactttgtgta

SEQ ID NO: 7234 - DNA, 20 bp, synthetic construct
  misc_feature 1..20: note = Description of Artificial Sequence: Synthetic oligonucleotide
  misc_feature 1..20: note = Target: FXN; (+) strand; PAM type: NNGRRT; PAM sequence: CAGAGT
  source 1..20: mol_type = other DNA
atgccttttcttttttgaga

SEQ ID NO: 7235 - DNA, 20 bp, synthetic construct
  misc_feature 1..20: note = Description of Artificial Sequence: Synthetic oligonucleotide
  misc_feature 1..20: note = Target: FXN; (+) strand; PAM type: NNGRRT; PAM sequence: TGGAGT
  source 1..20: mol_type = other DNA
tcttgctctgtcacccaggc

SEQ ID NO: 7236 - DNA, 20 bp, synthetic construct
  misc_feature 1..20: note = Description of Artificial Sequence: Synthetic oligonucleotide
  misc_feature 1..20: note = Target: FXN; (+) strand; PAM type: NNGRRT; PAM sequence: CTGGGT
  source 1..20: mol_type = other DNA
ctcactacaacctccgcctc

SEQ ID NO: 7237 - DNA, 20 bp, synthetic construct
  misc_feature 1..20: note = Description of Artificial Sequence: Synthetic oligonucleotide
  misc_feature 1..20: note = Target: FXN; (+) strand; PAM type: NNGRRT; PAM sequence: CCGAGT
  source 1..20: mol_type = other DNA
caattctctgcctcagcctc

SEQ ID NO: 7238 - DNA, 20 bp, synthetic construct
  misc_feature 1..20: note = Description of Artificial Sequence: Synthetic oligonucleotide
  misc_feature 1..20: note = Target: FXN; (+) strand; PAM type: NNGRRT; PAM sequence: TGGGAT
  source 1..20: mol_type = other DNA
gcctcagcctcccgagtagc

SEQ ID NO: 7239 - DNA, 20 bp, synthetic construct
  misc_feature 1..20: note = Description of Artificial Sequence: Synthetic oligonucleotide
  misc_feature 1..20: note = Target: FXN; (+) strand; PAM type: NNGRRT; PAM sequence: CGGGGT
  source 1..20: mol_type = other DNA
ttttgtatttttagtagaga

SEQ ID NO: 7240 - DNA, 20 bp, synthetic construct
  misc_feature 1..20: note = Description of Artificial Sequence: Synthetic oligonucleotide
  misc_feature 1..20: note = Target: FXN; (+) strand; PAM type: NNGRRT; PAM sequence: TGGGAT
  source 1..20: mol_type = other DNA
gcctccgcctcccaaagtgc

SEQ ID NO: 7241 - DNA, 20 bp, synthetic construct
  misc_feature 1..20: note = Description of Artificial Sequence: Synthetic oligonucleotide
  misc_feature 1..20: note = Target: FXN; (+) strand; PAM type: NNGRRT; PAM sequence: TGGAGT
  source 1..20: mol_type = other DNA
tcttaattagccaggacact

SEQ ID NO: 7242 - DNA, 20 bp, synthetic construct
  misc_feature 1..20: note = Description of Artificial Sequence: Synthetic oligonucleotide
  misc_feature 1..20: note = Target: FXN; (+) strand; PAM type: NNGRRT; PAM sequence: TGGAAT
  source 1..20: mol_type = other DNA
tacctgatcagtggcccctt

SEQ ID NO: 7243 - DNA, 20 bp, synthetic construct
  misc_feature 1..20: note = Description of Artificial Sequence: Synthetic oligonucleotide
  misc_feature 1..20: note = Target: FXN; (+) strand; PAM type: NNGRRT; PAM sequence: CAGAAT
  source 1..20: mol_type = other DNA
ccctgcatccgctacagaga

SEQ ID NO: 7244 - DNA, 20 bp, synthetic construct
  misc_feature 1..20: note = Description of Artificial Sequence: Synthetic oligonucleotide
  misc_feature 1..20: note = Target: FXN; (+) strand; PAM type: NNGRRT; PAM sequence: AGGAAT
  source 1..20: mol_type = other DNA
ttctctggctgtatagttta

SEQ ID NO: 7245 - DNA, 20 bp, synthetic construct
  misc_feature 1..20: note = Description of Artificial Sequence: Synthetic oligonucleotide
  misc_feature 1..20: note = Target: FXN; (+) strand; PAM type: NNGRRT; PAM sequence: GTGGAT
  source 1..20: mol_type = other DNA
actttgagaggctgaggcag

SEQ ID NO: 7246 - DNA, 20 bp, synthetic construct
  misc_feature 1..20: note = Description of Artificial Sequence: Synthetic oligonucleotide
  misc_feature 1..20: note = Target: FXN; (+) strand; PAM type: NNGRRT; PAM sequence: AGGAGT
  source 1..20: mol_type = other DNA
caggtggatcacctgaggtt

SEQ ID NO: 7247 - DNA, 20 bp, synthetic construct
  misc_feature 1..20: note = Description of Artificial Sequence: Synthetic oligonucleotide
  misc_feature 1..20: note = Target: FXN; (+) strand; PAM type: NNGRRT; PAM sequence: GAGAAT
  source 1..20: mol_type = other DNA
tactcgggaggctgaggcag

SEQ ID NO: 7248 - DNA, 20 bp, synthetic construct
  misc_feature 1..20: note = Description of Artificial Sequence: Synthetic oligonucleotide
  misc_feature 1..20: note = Target: FXN; (+) strand; PAM type: NNGRRT; PAM sequence: CTGGGT
  source 1..20: mol_type = other DNA
ggcaggagaattgcttgaac

SEQ ID NO: 7249 - DNA, 20 bp, synthetic construct
  misc_feature 1..20: note = Description of Artificial Sequence: Synthetic oligonucleotide
  misc_feature 1..20: note = Target: FXN; (+) strand; PAM type: NNGRRT; PAM sequence: CTGGGT
  source 1..20: mol_type = other DNA
ttacaccactgcactccagc

SEQ ID NO: 7250 - DNA, 20 bp, synthetic construct
  misc_feature 1..20: note = Description of Artificial Sequence: Synthetic oligonucleotide
  misc_feature 1..20: note = Target: FXN; (+) strand; PAM type: NNGRRT; PAM sequence: ATGAGT
  source 1..20: mol_type = other DNA
ctcaaaagtaatagaaacag

SEQ ID NO: 7251 - DNA, 20 bp, synthetic construct
  misc_feature 1..20: note = Description of Artificial Sequence: Synthetic oligonucleotide
  misc_feature 1..20: note = Target: FXN; (+) strand; PAM type: NNGRRT; PAM sequence: TGGAGT
  source 1..20: mol_type = other DNA
gtaatagaaacagatgagtt

SEQ ID NO: 7252 - DNA, 20 bp, synthetic construct
  misc_feature 1..20: note = Description of Artificial Sequence: Synthetic oligonucleotide
  misc_feature 1..20: note = Target: FXN; (+) strand; PAM type: NNGRRT; PAM sequence: CAGGAT
  source 1..20: mol_type = other DNA
gaaacagatgagtttggagt

SEQ ID NO: 7253 - DNA, 20 bp, synthetic construct
  misc_feature 1..20: note = Description of Artificial Sequence: Synthetic oligonucleotide
  misc_feature 1..20: note = Target: FXN; (+) strand; PAM type: NNGRRT; PAM sequence: GTGAAT
  source 1..20: mol_type = other DNA
gattataactacaatgtgaa

SEQ ID NO: 7254 - DNA, 20 bp, synthetic construct
  misc_feature 1..20: note = Description of Artificial Sequence: Synthetic oligonucleotide
  misc_feature 1..20: note = Target: FXN; (+) strand; PAM type: NNGRRT; PAM sequence: TGGGAT
  source 1..20: mol_type = other DNA
gcatagccacctgatcctgc

SEQ ID NO: 7255 - DNA, 20 bp, synthetic construct
  misc_feature 1..20: note = Description of Artificial Sequence: Synthetic oligonucleotide
  misc_feature 1..20: note = Target: FXN; (+) strand; PAM type: NNGRRT; PAM sequence: CAGGGT
  source 1..20: mol_type = other DNA
tcatctagctacacagtctc

SEQ ID NO: 7256 - DNA, 20 bp, synthetic construct
  misc_feature 1..20: note = Description of Artificial Sequence: Synthetic oligonucleotide
  misc_feature 1..20: note = Target: FXN; (+) strand; PAM type: NNGRRT; PAM sequence: GGGGGT
  source 1..20: mol_type = other DNA
attccccacatctctgcctg

SEQ ID NO: 7257 - DNA, 20 bp, synthetic construct
  misc_feature 1..20: note = Description of Artificial Sequence: Synthetic oligonucleotide
  misc_feature 1..20: note = Target: FXN; (+) strand; PAM type: NNGRRT; PAM sequence: CTGGAT
  source 1..20: mol_type = other DNA
ctcctccactcagcctctgc

SEQ ID NO: 7258 - DNA, 20 bp, synthetic construct
  misc_feature 1..20: note = Description of Artificial Sequence: Synthetic oligonucleotide
  misc_feature 1..20: note = Target: FXN; (+) strand; PAM type: NNGRRT; PAM sequence: AAGAGT
  source 1..20: mol_type = other DNA
ctctaaataaccccaactcc

SEQ ID NO: 7259 - DNA, 20 bp, synthetic construct
  misc_feature 1..20: note = Description of Artificial Sequence: Synthetic oligonucleotide
  misc_feature 1..20: note = Target: FXN; (+) strand; PAM type: NNGRRT; PAM sequence: AAGAAT
  source 1..20: mol_type = other DNA
aagaaatataaattttacag

SEQ ID NO: 7260 - DNA, 20 bp, synthetic construct
  misc_feature 1..20: note = Description of Artificial Sequence: Synthetic oligonucleotide
  misc_feature 1..20: note = Target: FXN; (+) strand; PAM type: NNGRRT; PAM sequence: GAGGGT
  source 1..20: mol_type = other DNA
gaagaatggttggaggtggg

SEQ ID NO: 7261 - DNA, 20 bp, synthetic construct
  misc_feature 1..20: note = Description of Artificial Sequence: Synthetic oligonucleotide
  misc_feature 1..20: note = Target: FXN; (+) strand; PAM type: NNGRRT; PAM sequence: CGGAGT
  source 1..20: mol_type = other DNA
ggaggtggggagggtgtcca

SEQ ID NO: 7262 - DNA, 20 bp, synthetic construct
  misc_feature 1..20: note = Description of Artificial Sequence: Synthetic oligonucleotide
  misc_feature 1..20: note = Target: FXN; (+) strand; PAM type: NNGRRT; PAM sequence: GTGAGT
  source 1..20: mol_type = other DNA
gtggggagggtgtccacgga

SEQ ID NO: 7263 - DNA, 20 bp, synthetic construct
  misc_feature 1..20: note = Description of Artificial Sequence: Synthetic oligonucleotide
  misc_feature 1..20: note = Target: FXN; (-) strand; PAM type: NNNNGHTT; PAM sequence: TATAGTTT
  source 1..20: mol_type = other DNA
actgtgggaggaatttagtg

SEQ ID NO: 7264 - DNA, 20 bp, synthetic construct
  misc_feature 1..20: note = Description of Artificial Sequence: Synthetic oligonucleotide
  misc_feature 1..20: note = Target: FXN; (-) strand; PAM type: NNNNGHTT; PAM sequence: TCTTGCTT
  source 1..20: mol_type = other DNA
atttagcttggctgactcca

SEQ ID NO: 7265 - DNA, 20 bp, synthetic construct
  misc_feature 1..20: note = Description of Artificial Sequence: Synthetic oligonucleotide
  misc_feature 1..20: note = Target: FXN; (-) strand; PAM type: NNNNGHTT; PAM sequence: TTTAGCTT
  source 1..20: mol_type = other DNA
ggttatgacagtgagagaaa

SEQ ID NO: 7266 - DNA, 20 bp, synthetic construct
  misc_feature 1..20: note = Description of Artificial Sequence: Synthetic oligonucleotide
  misc_feature 1..20: note = Target: FXN; (-) strand; PAM type: NNNNGHTT; PAM sequence: TCTTGTTT
  source 1..20: mol_type = other DNA
tatagcctttagagagtcat

SEQ ID NO: 7267 - DNA, 20 bp, synthetic construct
  misc_feature 1..20: note = Description of Artificial Sequence: Synthetic oligonucleotide
  misc_feature 1..20: note = Target: FXN; (-) strand; PAM type: NNNNGHTT; PAM sequence: TCTTGCTT
  source 1..20: mol_type = other DNA
ctcttgtacaaaaatactct

SEQ ID NO: 7268 - DNA, 20 bp, synthetic construct
  misc_feature 1..20: note = Description of Artificial Sequence: Synthetic oligonucleotide
  misc_feature 1..20: note = Target: FXN; (-) strand; PAM type: NNNNGHTT; PAM sequence: GGGAGCTT
  source 1..20: mol_type = other DNA
tctgtgatctgacagattaa

SEQ ID NO: 7269 - DNA, 20 bp, synthetic construct
  misc_feature 1..20: note = Description of Artificial Sequence: Synthetic oligonucleotide
  misc_feature 1..20: note = Target: FXN; (-) strand; PAM type: NNNNGHTT; PAM sequence: GACAGATT
  source 1..20: mol_type = other DNA
tagcttttgatctgtgatct

SEQ ID NO: 7270 - DNA, 20 bp, synthetic construct
  misc_feature 1..20: note = Description of Artificial Sequence: Synthetic oligonucleotide
  misc_feature 1..20: note = Target: FXN; (-) strand; PAM type: NNNNGHTT; PAM sequence: GATAGCTT
  source 1..20: mol_type = other DNA
gggtcccttgggcagtgtgt

SEQ ID NO: 7271 - DNA, 20 bp, synthetic construct
  misc_feature 1..20: note = Description of Artificial Sequence: Synthetic oligonucleotide
  misc_feature 1..20: note = Target: FXN; (-) strand; PAM type: NNNNGHTT; PAM sequence: TTTGGATT
  source 1..20: mol_type = other DNA
agtggccagaaaaaaggagg

SEQ ID NO: 7272 - DNA, 20 bp, synthetic construct
  misc_feature 1..20: note = Description of Artificial Sequence: Synthetic oligonucleotide
  misc_feature 1..20: note = Target: FXN; (-) strand; PAM type: NNNNGHTT; PAM sequence: GGAGGTTT
  source 1..20: mol_type = other DNA
gtttcagtggccagaaaaaa

SEQ ID NO: 7273 - DNA, 20 bp, synthetic construct
  misc_feature 1..20: note = Description of Artificial Sequence: Synthetic oligonucleotide
  misc_feature 1..20: note = Target: FXN; (-) strand; PAM type: NNNNGHTT; PAM sequence: GAACGTTT
  source 1..20: mol_type = other DNA
tagataatgaactaattatt

SEQ ID NO: 7274 - DNA, 20 bp, synthetic construct
  misc_feature 1..20: note = Description of Artificial Sequence: Synthetic oligonucleotide
  misc_feature 1..20: note = Target: FXN; (-) strand; PAM type: NNNNGHTT; PAM sequence: TATAGATT
  source 1..20: mol_type = other DNA
atacatcaccttaatattaa

SEQ ID NO: 7275 - DNA, 20 bp, synthetic construct
  misc_feature 1..20: note = Description of Artificial Sequence: Synthetic oligonucleotide
  misc_feature 1..20: note = Target: FXN; (-) strand; PAM type: NNNNGHTT; PAM sequence: GACTGATT
  source 1..20: mol_type = other DNA
aacagctgtttgtcccagga

SEQ ID NO: 7276 - DNA, 20 bp, synthetic construct
  misc_feature 1..20: note = Description of Artificial Sequence: Synthetic oligonucleotide
  misc_feature 1..20: note = Target: FXN; (-) strand; PAM type: NNNNGHTT; PAM sequence: AGCTGTTT
  source 1..20: mol_type = other DNA
tataatgagggaagagaaac

SEQ ID NO: 7277 - DNA, 20 bp, synthetic construct
  misc_feature 1..20: note = Description of Artificial Sequence: Synthetic oligonucleotide
  misc_feature 1..20: note = Target: FXN; (-) strand; PAM type: NNNNGHTT; PAM sequence: GAGAGATT
  source 1..20: mol_type = other DNA
ttgcttggattgattggtaa

SEQ ID NO: 7278 - DNA, 20 bp, synthetic construct
  misc_feature 1..20: note = Description of Artificial Sequence: Synthetic oligonucleotide
  misc_feature 1..20: note = Target: FXN; (-) strand; PAM type: NNNNGHTT; PAM sequence: GATTGATT
  source 1..20: mol_type = other DNA
aatcccactgcatttgcttg

SEQ ID NO: 7279 - DNA, 20 bp, synthetic construct
  misc_feature 1..20: note = Description of Artificial Sequence: Synthetic oligonucleotide
  misc_feature 1..20: note = Target: FXN; (-) strand; PAM type: NNNNGHTT; PAM sequence: CTTGGATT
  source 1..20: mol_type = other DNA
aagaaatcccactgcatttg

SEQ ID NO: 7280 - DNA, 20 bp, synthetic construct
  misc_feature 1..20: note = Description of Artificial Sequence: Synthetic oligonucleotide
  misc_feature 1..20: note = Target: FXN; (-) strand; PAM type: NNNNGHTT; PAM sequence: ATTTGCTT
  source 1..20: mol_type = other DNA
gggaaaagaaatcccactgc

SEQ ID NO: 7281 - DNA, 20 bp, synthetic construct
  misc_feature 1..20: note = Description of Artificial Sequence: Synthetic oligonucleotide
  misc_feature 1..20: note = Target: FXN; (-) strand; PAM type: NNNNGHTT; PAM sequence: CTATGATT
  source 1..20: mol_type = other DNA
tcctgggcttcagctcagtg

SEQ ID NO: 7282 - DNA, 20 bp, synthetic construct
  misc_feature 1..20: note = Description of Artificial Sequence: Synthetic oligonucleotide
  misc_feature 1..20: note = Target: FXN; (-) strand; PAM type: NNNNGHTT; PAM sequence: CTGGGCTT
  source 1..20: mol_type = other DNA
tcactcattcttgcttagtc

SEQ ID NO: 7283 - DNA, 20 bp, synthetic construct
  misc_feature 1..20: note = Description of Artificial Sequence: Synthetic oligonucleotide
  misc_feature 1..20: note = Target: FXN; (-) strand; PAM type: NNNNGHTT; PAM sequence: TCTTGCTT
  source 1..20: mol_type = other DNA
gtctccaaattctcactcat

SEQ ID NO: 7284 - DNA, 20 bp, synthetic construct
  misc_feature 1..20: note = Description of Artificial Sequence: Synthetic oligonucleotide
  misc_feature 1..20: note = Target: FXN; (-) strand; PAM type: NNNNGHTT; PAM sequence: TCCTGTTT
  source 1..20: mol_type = other DNA
agtgatattctttgttggcc

SEQ ID NO: 7285 - DNA, 20 bp, synthetic construct
  misc_feature 1..20: note = Description of Artificial Sequence: Synthetic oligonucleotide
  misc_feature 1..20: note = Target: FXN; (-) strand; PAM type: NNNNGHTT; PAM sequence: TCCTGTTT
  source 1..20: mol_type = other DNA
tgcaatgtaattgttagttt

SEQ ID NO: 7286 - DNA, 20 bp, synthetic construct
  misc_feature 1..20: note = Description of Artificial Sequence: Synthetic oligonucleotide
  misc_feature 1..20: note = Target: FXN; (-) strand; PAM type: NNNNGHTT; PAM sequence: GTTAGTTT
  source 1..20: mol_type = other DNA
ccacagcctgcaatgtaatt

SEQ ID NO: 7287 - DNA, 20 bp, synthetic construct
  misc_feature 1..20: note = Description of Artificial Sequence: Synthetic oligonucleotide
  misc_feature 1..20: note = Target: FXN; (-) strand; PAM type: NNNNGHTT; PAM sequence: CTCTGTTT
  source 1..20: mol_type = other DNA
ggtgtgccttaggtacctct

SEQ ID NO: 7288 - DNA, 20 bp, synthetic construct
  misc_feature 1..20: note = Description of Artificial Sequence: Synthetic oligonucleotide
  misc_feature 1..20: note = Target: FXN; (-) strand; PAM type: NNNNGHTT; PAM sequence: GTATGTTT
  source 1..20: mol_type = other DNA
gttttcatagctttaatcca

SEQ ID NO: 7289 - DNA, 20 bp, synthetic construct
  misc_feature 1..20: note = Description of Artificial Sequence: Synthetic oligonucleotide
  misc_feature 1..20: note = Target: FXN; (-) strand; PAM type: NNNNGHTT; PAM sequence: CATAGCTT
  source 1..20: mol_type = other DNA
ctgggcagaaaagatgtttt

SEQ ID NO: 7290 - DNA, 20 bp, synthetic construct
  misc_feature 1..20: note = Description of Artificial Sequence: Synthetic oligonucleotide
  misc_feature 1..20: note = Target: FXN; (-) strand; PAM type: NNNNGHTT; PAM sequence: AGATGTTT
  source 1..20: mol_type = other DNA
acagaatctctgggcagaaa

SEQ ID NO: 7291 - DNA, 20 bp, synthetic construct
  misc_feature 1..20: note = Description of Artificial Sequence: Synthetic oligonucleotide
  misc_feature 1..20: note = Target: FXN; (-) strand; PAM type: NNNNGHTT; PAM sequence: TCATGTTT
  source 1..20: mol_type = other DNA
ctgacactgaggaccagcca

SEQ ID NO: 7292 - DNA, 20 bp, synthetic construct
  misc_feature 1..20: note = Description of Artificial Sequence: Synthetic oligonucleotide
  misc_feature 1..20: note = Target: FXN; (-) strand; PAM type: NNNNGHTT; PAM sequence: GGCTGATT
  source 1..20: mol_type = other DNA
aggtgtgcataaccacacct

SEQ ID NO: 7293 - DNA, 20 bp, synthetic construct
  misc_feature 1..20: note = Description of Artificial Sequence: Synthetic oligonucleotide
  misc_feature 1..20: note = Target: FXN; (-) strand; PAM type: NNNNGHTT; PAM sequence: GTTTGTTT
  source 1..20: mol_type = other DNA
ttttttttttttgggttttt

SEQ ID NO: 7294 - DNA, 20 bp, synthetic construct
  misc_feature 1..20: note = Description of Artificial Sequence: Synthetic oligonucleotide
  misc_feature 1..20: note = Target: FXN; (-) strand; PAM type: NNNNGHTT; PAM sequence: TTTTGTTT
  source 1..20: mol_type = other DNA
tcttttttttttttttgggt

SEQ ID NO: 7295 - DNA, 20 bp, synthetic construct
  misc_feature 1..20: note = Description of Artificial Sequence: Synthetic oligonucleotide
  misc_feature 1..20: note = Target: FXN; (-) strand; PAM type: NNNNGHTT; PAM sequence: TTGGGTTT
  source 1..20: mol_type = other DNA
tctctctctttttttttttt

SEQ ID NO: 7296 - DNA, 20 bp, synthetic construct
  misc_feature 1..20: note = Description of Artificial Sequence: Synthetic oligonucleotide
  misc_feature 1..20: note = Target: FXN; (-) strand; PAM type: NNNNGHTT; PAM sequence: TGCTGCTT
  source 1..20: mol_type = other DNA
ccaacagggtactgcagaag

SEQ ID NO: 7297 - DNA, 20 bp, synthetic construct
  misc_feature 1..20: note = Description of Artificial Sequence: Synthetic oligonucleotide
  misc_feature 1..20: note = Target: FXN; (-) strand; PAM type: NNNNGHTT; PAM sequence: TCGGGTTT
  source 1..20: mol_type = other DNA
ctattctcctcccttcgaat

SEQ ID NO: 7298 - DNA, 20 bp, synthetic construct
  misc_feature 1..20: note = Description of Artificial Sequence: Synthetic oligonucleotide
  misc_feature 1..20: note = Target: FXN; (-) strand; PAM type: NNNNGHTT; PAM sequence: TGCTGTTT
  source 1..20: mol_type = other DNA
aatatttgtcacatgtcata

SEQ ID NO: 7299 - DNA, 20 bp, synthetic construct
  misc_feature 1..20: note = Description of Artificial Sequence: Synthetic oligonucleotide
  misc_feature 1..20: note = Target: FXN; (-) strand; PAM type: NNNNGHTT; PAM sequence: GGAAGATT
  source 1..20: mol_type = other DNA
tccatccctttgcctggtat

SEQ ID NO: 7300 - DNA, 20 bp, synthetic construct
  misc_feature 1..20: note = Description of Artificial Sequence: Synthetic oligonucleotide
  misc_feature 1..20: note = Target: FXN; (-) strand; PAM type: NNNNGHTT; PAM sequence: TGATGCTT
  source 1..20: mol_type = other DNA
tttgtagttcctagaacaag

SEQ ID NO: 7301 - DNA, 20 bp, synthetic construct
  misc_feature 1..20: note = Description of Artificial Sequence: Synthetic oligonucleotide
  misc_feature 1..20: note = Target: FXN; (-) strand; PAM type: NNNNGHTT; PAM sequence: CTTTGCTT
  source 1..20: mol_type = other DNA
attgggaggcatctagacat

SEQ ID NO: 7302 - DNA, 20 bp, synthetic construct
  misc_feature 1..20: note = Description of Artificial Sequence: Synthetic oligonucleotide
  misc_feature 1..20: note = Target: FXN; (-) strand; PAM type: NNNNGHTT; PAM sequence: CTCTGCTT
  source 1..20: mol_type = other DNA
atgtgaatctaaccatagcc

SEQ ID NO: 7303 - DNA, 20 bp, synthetic construct
  misc_feature 1..20: note = Description of Artificial Sequence: Synthetic oligonucleotide
  misc_feature 1..20: note = Target: FXN; (-) strand; PAM type: NNNNGHTT; PAM sequence: TAAAGTTT
  source 1..20: mol_type = other DNA
caggtgattctaatgtgctt

SEQ ID NO: 7304 - DNA, 20 bp, synthetic construct
  misc_feature 1..20: note = Description of Artificial Sequence: Synthetic oligonucleotide
  misc_feature 1..20: note = Target: FXN; (-) strand; PAM type: NNNNGHTT; PAM sequence: ATGTGCTT
  source 1..20: mol_type = other DNA
aagacctccaggtgattcta

SEQ ID NO: 7305 - DNA, 20 bp, synthetic construct
  misc_feature 1..20: note = Description of Artificial Sequence: Synthetic oligonucleotide
  misc_feature 1..20: note = Target: FXN; (-) strand; PAM type: NNNNGHTT; PAM sequence: AGGTGATT
  source 1..20: mol_type = other DNA
catggtttaacaagacctcc

SEQ ID NO: 7306 - DNA, 20 bp, synthetic construct
  misc_feature 1..20: note = Description of Artificial Sequence: Synthetic oligonucleotide
  misc_feature 1..20: note = Target: FXN; (-) strand; PAM type: NNNNGHTT; PAM sequence: CATGGTTT
  source 1..20: mol_type = other DNA
ggtttcaaggcccagcaatc

SEQ ID NO: 7307 - DNA, 20 bp, synthetic construct
  misc_feature 1..20: note = Description of Artificial Sequence: Synthetic oligonucleotide
  misc_feature 1..20: note = Target: FXN; (-) strand; PAM type: NNNNGHTT; PAM sequence: TGGGGTTT
  source 1..20: mol_type = other DNA
atctactgaatcagaatctc

SEQ ID NO: 7308 - DNA, 20 bp, synthetic construct
  misc_feature 1..20: note = Description of Artificial Sequence: Synthetic oligonucleotide
  misc_feature 1..20: note = Target: FXN; (-) strand; PAM type: NNNNGHTT; PAM sequence: CTATGATT
  source 1..20: mol_type = other DNA
tgataggatttatcagaggg

SEQ ID NO: 7309 - DNA, 20 bp, synthetic construct
  misc_feature 1..20: note = Description of Artificial Sequence: Synthetic oligonucleotide
  misc_feature 1..20: note = Target: FXN; (-) strand; PAM type: NNNNGHTT; PAM sequence: ATAGGATT
  source 1..20: mol_type = other DNA
tctgccattaggatattttg

SEQ ID NO: 7310 - DNA, 20 bp, synthetic construct
  misc_feature 1..20: note = Description of Artificial Sequence: Synthetic oligonucleotide
  misc_feature 1..20: note = Target: FXN; (-) strand; PAM type: NNNNGHTT; PAM sequence: GGTTGCTT
  source 1..20: mol_type = other DNA
actgtagctgttcctctctt

SEQ ID NO: 7311 - DNA, 20 bp, synthetic construct
  misc_feature 1..20: note = Description of Artificial Sequence: Synthetic oligonucleotide
  misc_feature 1..20: note = Target: FXN; (-) strand; PAM type: NNNNGHTT; PAM sequence: GAAGGCTT
  source 1..20: mol_type = other DNA
aatagcatatcagagaagac

SEQ ID NO: 7312 - DNA, 20 bp, synthetic construct
  misc_feature 1..20: note = Description of Artificial Sequence: Synthetic oligonucleotide
  misc_feature 1..20: note = Target: FXN; (-) strand; PAM type: NNNNGHTT; PAM sequence: GCATGCTT
  source 1..20: mol_type = other DNA
tgctacatcattattagcta

SEQ ID NO: 7313 - DNA, 20 bp, synthetic construct
  misc_feature 1..20: note = Description of Artificial Sequence: Synthetic oligonucleotide
  misc_feature 1..20: note = Target: FXN; (-) strand; PAM type: NNNNGHTT; PAM sequence: CTGAGATT
  source 1..20: mol_type = other DNA
cgcctcggccgcccaaagtg

SEQ ID NO: 7314 - DNA, 20 bp, synthetic construct
  misc_feature 1..20: note = Description of Artificial Sequence: Synthetic oligonucleotide
  misc_feature 1..20: note = Target: FXN; (-) strand; PAM type: NNNNGHTT; PAM sequence: TGGGGTTT
  source 1..20: mol_type = other DNA
ttttgtatttttagtagaga

SEQ ID NO: 7315 - DNA, 20 bp, synthetic construct
  misc_feature 1..20: note = Description of Artificial Sequence: Synthetic oligonucleotide
  misc_feature 1..20: note = Target: FXN; (-) strand; PAM type: NNNNGHTT; PAM sequence: CTGGGATT
  source 1..20: mol_type = other DNA
tgtctcagcctccagagtag

SEQ ID NO: 7316 - DNA, 20 bp, synthetic construct
  misc_feature 1..20: note = Description of Artificial Sequence: Synthetic oligonucleotide
  misc_feature 1..20: note = Target: FXN; (-) strand; PAM type: NNNNGHTT; PAM sequence: AAGAGATT
  source 1..20: mol_type = other DNA
aatctccacctcctgggttc

SEQ ID NO: 7317 - DNA, 20 bp, synthetic construct
  misc_feature 1..20: note = Description of Artificial Sequence: Synthetic oligonucleotide
  misc_feature 1..20: note = Target: FXN; (-) strand; PAM type: NNNNGHTT; PAM sequence: TCTTGCTT
  source 1..20: mol_type = other DNA
tattattatttgagacagag

SEQ ID NO: 7318 - DNA, 20 bp, synthetic construct
  misc_feature 1..20: note = Description of Artificial Sequence: Synthetic oligonucleotide
  misc_feature 1..20: note = Target: FXN; (-) strand; PAM type: NNNNGHTT; PAM sequence: TAGTGTTT
  source 1..20: mol_type = other DNA
agcccataggcatcaaaggg

SEQ ID NO: 7319 - DNA, 20 bp, synthetic construct
  misc_feature 1..20: note = Description of Artificial Sequence: Synthetic oligonucleotide
  misc_feature 1..20: note = Target: FXN; (-) strand; PAM type: NNNNGHTT; PAM sequence: CCAAGATT
  source 1..20: mol_type = other DNA
ctatccagtccaaaattctg

SEQ ID NO: 7320 - DNA, 20 bp, synthetic construct
  misc_feature 1..20: note = Description of Artificial Sequence: Synthetic oligonucleotide
  misc_feature 1..20: note = Target: FXN; (-) strand; PAM type: NNNNGHTT; PAM sequence: TTTTGATT
  source 1..20: mol_type = other DNA
tgcaaagtatctggagatgc

SEQ ID NO: 7321 - DNA, 20 bp, synthetic construct
  misc_feature 1..20: note = Description of Artificial Sequence: Synthetic oligonucleotide
  misc_feature 1..20: note = Target: FXN; (-) strand; PAM type: NNNNGHTT; PAM sequence: AGATGCTT
  source 1..20: mol_type = other DNA
tccccctgcaaagtatctgg

SEQ ID NO: 7322 - DNA, 20 bp, synthetic construct
  misc_feature 1..20: note = Description of Artificial Sequence: Synthetic oligonucleotide
  misc_feature 1..20: note = Target: FXN; (-) strand; PAM type: NNNNGHTT; PAM sequence: AGCTGCTT
  source 1..20: mol_type = other DNA
gtgtttaattaattctaggc

SEQ ID NO: 7323 - DNA, 20 bp, synthetic construct
  misc_feature 1..20: note = Description of Artificial Sequence: Synthetic oligonucleotide
  misc_feature 1..20: note = Target: FXN; (-) strand; PAM type: NNNNGHTT; PAM sequence: CTGTGTTT
  source 1..20: mol_type = other DNA
tctggatgagagacatcctt

SEQ ID NO: 7324 - DNA, 20 bp, synthetic construct
  misc_feature 1..20: note = Description of Artificial Sequence: Synthetic oligonucleotide
  misc_feature 1..20: note = Target: FXN; (-) strand; PAM type: NNNNGHTT; PAM sequence: ATCTGATT
  source 1..20: mol_type = other DNA
aatagggtggaggaggtggg

SEQ ID NO: 7325 - DNA, 20 bp, synthetic construct
  misc_feature 1..20: note = Description of Artificial Sequence: Synthetic oligonucleotide
  misc_feature 1..20: note = Target: FXN; (-) strand; PAM type: NNNNGHTT; PAM sequence: GGGAGATT
  source 1..20: mol_type = other DNA
aacaggtgtgagtgttgagt

SEQ ID NO: 7326 - DNA, 20 bp, synthetic construct
  misc_feature 1..20: note = Description of Artificial Sequence: Synthetic oligonucleotide
  misc_feature 1..20: note = Target: FXN; (-) strand; PAM type: NNNNGHTT; PAM sequence: ACATGTTT
  source 1..20: mol_type = other DNA
tttgtgaatcgtgaagagag

SEQ ID NO: 7327 - DNA, 20 bp, synthetic construct
  misc_feature 1..20: note = Description of Artificial Sequence: Synthetic oligonucleotide
  misc_feature 1..20: note = Target: FXN; (-) strand; PAM type: NNNNGHTT; PAM sequence: CTATGATT
  source 1..20: mol_type = other DNA
gagctcaaggctgcagtgag

SEQ ID NO: 7328 - DNA, 20 bp, synthetic construct
  misc_feature 1..20: note = Description of Artificial Sequence: Synthetic oligonucleotide
  misc_feature 1..20: note = Target: FXN; (-) strand; PAM type: NNNNGHTT; PAM sequence: ATATGCTT
  source 1..20: mol_type = other DNA
aagttttcttcacattttat

SEQ ID NO: 7329 - DNA, 20 bp, synthetic construct
  misc_feature 1..20: note = Description of Artificial Sequence: Synthetic oligonucleotide
  misc_feature 1..20: note = Target: FXN; (-) strand; PAM type: NNNNGHTT; PAM sequence: GAAAGTTT
  source 1..20: mol_type = other DNA
tacaaagggatgcaaattgt

SEQ ID NO: 7330 - DNA, 20 bp, synthetic construct
  misc_feature 1..20: note = Description of Artificial Sequence: Synthetic oligonucleotide
  misc_feature 1..20: note = Target: FXN; (-) strand; PAM type: NNNNGHTT; PAM sequence: GATAGATT
  source 1..20: mol_type = other DNA
accgtgccttgcctattgtt

SEQ ID NO: 7331 - DNA, 20 bp, synthetic construct
  misc_feature 1..20: note = Description of Artificial Sequence: Synthetic oligonucleotide
  misc_feature 1..20: note = Target: FXN; (-) strand; PAM type: NNNNGHTT; PAM sequence: GGGGGTTT
  source 1..20: mol_type = other DNA
ttttgtattttttgtagaaa

SEQ ID NO: 7332 - DNA, 20 bp, synthetic construct
  misc_feature 1..20: note = Description of Artificial Sequence: Synthetic oligonucleotide
  misc_feature 1..20: note = Target: FXN; (-) strand; PAM type: NNNNGHTT; PAM sequence: GCTAGTTT
  source 1..20: mol_type = other DNA
ggtgtgcaccaccacaccca

SEQ ID NO: 7333 - DNA, 20 bp, synthetic construct
  misc_feature 1..20: note = Description of Artificial Sequence: Synthetic oligonucleotide
  misc_feature 1..20: note = Target: FXN; (-) strand; PAM type: NNNNGHTT; PAM sequence: CCTGGCTT
  source 1..20: mol_type = other DNA
ctggagtgcagtggtgtggt

SEQ ID NO: 7334 - DNA, 20 bp, synthetic construct
  misc_feature 1..20: note = Description of Artificial Sequence: Synthetic oligonucleotide
  misc_feature 1..20: note = Target: FXN; (-) strand; PAM type: NNNNGHTT; PAM sequence: GTTTGTTT
  source 1..20: mol_type = other DNA
tccacccgcctcatttattt

SEQ ID NO: 7335 - DNA, 20 bp, synthetic construct
  misc_feature 1..20: note = Description of Artificial Sequence: Synthetic oligonucleotide
  misc_feature 1..20: note = Target: FXN; (-) strand; PAM type: NNNNGHTT; PAM sequence: ATTTGTTT
  source 1..20: mol_type = other DNA
gtgatccacccgcctcattt

SEQ ID NO: 7336 - DNA, 20 bp, synthetic construct
  misc_feature 1..20: note = Description of Artificial Sequence: Synthetic oligonucleotide
  misc_feature 1..20: note = Target: FXN; (-) strand; PAM type: NNNNGHTT; PAM sequence: ACGGGTTT
  source 1..20: mol_type = other DNA
tttttttttttttagtagag

SEQ ID NO: 7337 - DNA, 20 bp, synthetic construct
  misc_feature 1..20: note = Description of Artificial Sequence: Synthetic oligonucleotide
  misc_feature 1..20: note = Target: FXN; (-) strand; PAM type: NNNNGHTT; PAM sequence: CCCGGTTT
  source 1..20: mol_type = other DNA
gctcactgcaagctctgcct

SEQ ID NO: 7338 - DNA, 20 bp, synthetic construct
  misc_feature 1..20: note = Description of Artificial Sequence: Synthetic oligonucleotide
  misc_feature 1..20: note = Target: FXN; (-) strand; PAM type: NNNNGHTT; PAM sequence: GATTGATT
  source 1..20: mol_type = other DNA
atagattttattgattgatt

SEQ ID NO: 7339 - DNA, 20 bp, synthetic construct
  misc_feature 1..20: note = Description of Artificial Sequence: Synthetic oligonucleotide
  misc_feature 1..20: note = Target: FXN; (-) strand; PAM type: NNNNGHTT; PAM sequence: GATTGATT
  source 1..20: mol_type = other DNA
gttaatagattttattgatt

SEQ ID NO: 7340 - DNA, 20 bp, synthetic construct
  misc_feature 1..20: note = Description of Artificial Sequence: Synthetic oligonucleotide
  misc_feature 1..20: note = Target: FXN; (-) strand; PAM type: NNNNGHTT; PAM sequence: GATTGATT
  source 1..20: mol_type = other DNA
tattgttaatagattttatt

SEQ ID NO: 7341 - DNA, 20 bp, synthetic construct
  misc_feature 1..20: note = Description of Artificial Sequence: Synthetic oligonucleotide
  misc_feature 1..20: note = Target: FXN; (-) strand; PAM type: NNNNGHTT; PAM sequence: TATTGATT
  source 1..20: mol_type = other DNA
taaatattgttaatagattt

SEQ ID NO: 7342 - DNA, 20 bp, synthetic construct
  misc_feature 1..20: note = Description of Artificial Sequence: Synthetic oligonucleotide
  misc_feature 1..20: note = Target: FXN; (-) strand; PAM type: NNNNGHTT; PAM sequence: AATAGATT
  source 1..20: mol_type = other DNA
agtgcacaataaatattgtt

SEQ ID NO: 7343 - DNA, 20 bp, synthetic construct
  misc_feature 1..20: note = Description of Artificial Sequence: Synthetic oligonucleotide
  misc_feature 1..20: note = Target: FXN; (-) strand; PAM type: NNNNGHTT; PAM sequence: TAAAGTTT
  source 1..20: mol_type = other DNA
ataaaatgagttaagccctg

SEQ ID NO: 7344 - DNA, 20 bp, synthetic construct
  misc_feature 1..20: note = Description of Artificial Sequence: Synthetic oligonucleotide
  misc_feature 1..20: note = Target: FXN; (-) strand; PAM type: NNNNGHTT; PAM sequence: ATAGGATT
  source 1..20: mol_type = other DNA
tttataaaagttcctacttc

SEQ ID NO: 7345 - DNA, 20 bp, synthetic construct
  misc_feature 1..20: note = Description of Artificial Sequence: Synthetic oligonucleotide
  misc_feature 1..20: note = Target: FXN; (-) strand; PAM type: NNNNGHTT; PAM sequence: ATGCGTTT
  source 1..20: mol_type = other DNA
ctctgtgccttgtttataaa

SEQ ID NO: 7346 - DNA, 20 bp, synthetic construct
  misc_feature 1..20: note = Description of Artificial Sequence: Synthetic oligonucleotide
  misc_feature 1..20: note = Target: FXN; (-) strand; PAM type: NNNNGHTT; PAM sequence: CCTTGTTT
  source 1..20: mol_type = other DNA
agttaattaacctctctgtg

SEQ ID NO: 7347 - DNA, 20 bp, synthetic construct
  misc_feature 1..20: note = Description of Artificial Sequence: Synthetic oligonucleotide
  misc_feature 1..20: note = Target: FXN; (-) strand; PAM type: NNNNGHTT; PAM sequence: ATGGGTTT
  source 1..20: mol_type = other DNA
gaggctgcttggccgccggt

SEQ ID NO: 7348 - DNA, 20 bp, synthetic construct
  misc_feature 1..20: note = Description of Artificial Sequence: Synthetic oligonucleotide
  misc_feature 1..20: note = Target: FXN; (-) strand; PAM type: NNNNGHTT; PAM sequence: GGCTGCTT
  source 1..20: mol_type = other DNA
tgggtgcatgcacaaattga

SEQ ID NO: 7349 - DNA, 20 bp, synthetic construct
  misc_feature 1..20: note = Description of Artificial Sequence: Synthetic oligonucleotide
  misc_feature 1..20: note = Target: FXN; (-) strand; PAM type: NNNNGHTT; PAM sequence: CGCCGCTT
  source 1..20: mol_type = other DNA
gagactgcagcctggtggcc

SEQ ID NO: 7350 - DNA, 20 bp, synthetic construct
  misc_feature 1..20: note = Description of Artificial Sequence: Synthetic oligonucleotide
  misc_feature 1..20: note = Target: FXN; (-) strand; PAM type: NNNNGHTT; PAM sequence: GCCTGCTT
  source 1..20: mol_type = other DNA
gcatttaacaaaaatggaga

SEQ ID NO: 7351 - DNA, 20 bp, synthetic construct
  misc_feature 1..20: note = Description of Artificial Sequence: Synthetic oligonucleotide
  misc_feature 1..20: note = Target: FXN; (-) strand; PAM type: NNNNGHTT; PAM sequence: CCCAGCTT
  source 1..20: mol_type = other DNA
ttagacctcaggaagaactt

SEQ ID NO: 7352 - DNA, 20 bp, synthetic construct
  misc_feature 1..20: note = Description of Artificial Sequence: Synthetic oligonucleotide
  misc_feature 1..20: note = Target: FXN; (-) strand; PAM type: NNNNGHTT; PAM sequence: GGCCGCTT
  source 1..20: mol_type = other DNA
accagagaagggagttgcaa

SEQ ID NO: 7353 - DNA, 20 bp, synthetic construct
  misc_feature 1..20: note = Description of Artificial Sequence: Synthetic oligonucleotide
  misc_feature 1..20: note = Target: FXN; (-) strand; PAM type: NNNNGHTT; PAM sequence: GAAAGTTT
  source 1..20: mol_type = other DNA
tctagctattctgcagctct

SEQ ID NO: 7354 - DNA, 20 bp, synthetic construct
  misc_feature 1..20: note = Description of Artificial Sequence: Synthetic oligonucleotide
  misc_feature 1..20: note = Target: FXN; (-) strand; PAM type: NNNNGHTT; PAM sequence: GTCAGTTT
  source 1..20: mol_type = other DNA
gaatctggaataaaggtcgg

SEQ ID NO: 7355 - DNA, 20 bp, synthetic construct
  misc_feature 1..20: note = Description of Artificial Sequence: Synthetic oligonucleotide
  misc_feature 1..20: note = Target: FXN; (-) strand; PAM type: NNNNGHTT; PAM sequence: TTGGGTTT
  source 1..20: mol_type = other DNA
ctcatccccacagccattct

SEQ ID NO: 7356 - DNA, 20 bp, synthetic construct
  misc_feature 1..20: note = Description of Artificial Sequence: Synthetic oligonucleotide
  misc_feature 1..20: note = Target: FXN; (-) strand; PAM type: NNNNGHTT; PAM sequence: TATGGCTT
  source 1..20: mol_type = other DNA
actccggagagcaacacaaa

SEQ ID NO: 7357 - DNA, 20 bp, synthetic construct
  misc_feature 1..20: note = Description of Artificial Sequence: Synthetic oligonucleotide
  misc_feature 1..20: note = Target: FXN; (-) strand; PAM type: NNNNGHTT; PAM sequence: CAAAGTTT
  source 1..20: mol_type = other DNA
taagcactggcaaccaatcc

SEQ ID NO: 7358 - DNA, 20 bp, synthetic construct
  misc_feature 1..20: note = Description of Artificial Sequence: Synthetic oligonucleotide
  misc_feature 1..20: note = Target: FXN; (-) strand; PAM type: NNNNGHTT; PAM sequence: CTGAGATT
  source 1..20: mol_type = other DNA
ttcctaggcctcccaaagtg

SEQ ID NO: 7359 - DNA, 20 bp, synthetic construct
  misc_feature 1..20: note = Description of Artificial Sequence: Synthetic oligonucleotide
  misc_feature 1..20: note = Target: FXN; (-) strand; PAM type: NNNNGHTT; PAM sequence: CTGGGTTT
  source 1..20: mol_type = other DNA
tttgtattttttagtagata

SEQ ID NO: 7360 - DNA, 20 bp, synthetic construct
  misc_feature 1..20: note = Description of Artificial Sequence: Synthetic oligonucleotide
  misc_feature 1..20: note = Target: FXN; (-) strand; PAM type: NNNNGHTT; PAM sequence: CTGGGATT
  source 1..20: mol_type = other DNA
tgccgcagcctctggagtag

SEQ ID NO: 7361 - DNA, 20 bp, synthetic construct
  misc_feature 1..20: note = Description of Artificial Sequence: Synthetic oligonucleotide
  misc_feature 1..20: note = Target: FXN; (-) strand; PAM type: NNNNGHTT; PAM sequence: AAGCGATT
  source 1..20: mol_type = other DNA
aacctctgcctcccgggctc

SEQ ID NO: 7362 - DNA, 20 bp, synthetic construct
  misc_feature 1..20: note = Description of Artificial Sequence: Synthetic oligonucleotide
  misc_feature 1..20: note = Target: FXN; (-) strand; PAM type: NNNNGHTT; PAM sequence: CTTGGCTT
  source 1..20: mol_type = other DNA
gccggagtgcattgggcgat

SEQ ID NO: 7363 - DNA, 20 bp, synthetic construct
  misc_feature 1..20: note = Description of Artificial Sequence: Synthetic oligonucleotide
  misc_feature 1..20: note = Target: FXN; (-) strand; PAM type: NNNNGHTT; PAM sequence: GTCTGCTT
  source 1..20: mol_type = other DNA
acagaagccaagtaataaat

SEQ ID NO: 7364 - DNA, 20 bp, synthetic construct
  misc_feature 1..20: note = Description of Artificial Sequence: Synthetic oligonucleotide
  misc_feature 1..20: note = Target: FXN; (-) strand; PAM type: NNNNGHTT; PAM sequence: GTGTGTTT
  source 1..20: mol_type = other DNA
gggcggcagcgccaagttgg

SEQ ID NO: 7365 - DNA, 20 bp, synthetic construct
  misc_feature 1..20: note = Description of Artificial Sequence: Synthetic oligonucleotide
  misc_feature 1..20: note = Target: FXN; (-) strand; PAM type: NNNNGHTT; PAM sequence: ATGTGATT
  source 1..20: mol_type = other DNA
ggaacagacaggttaaacaa

SEQ ID NO: 7366 - DNA, 20 bp, synthetic construct
  misc_feature 1..20: note = Description of Artificial Sequence: Synthetic oligonucleotide
  misc_feature 1..20: note = Target: FXN; (-) strand; PAM type: NNNNGHTT; PAM sequence: CAGGGCTT
  source 1..20: mol_type = other DNA
tagggtcaatccaggacagt

SEQ ID NO: 7367 - DNA, 20 bp, synthetic construct
  misc_feature 1..20: note = Description of Artificial Sequence: Synthetic oligonucleotide
  misc_feature 1..20: note = Target: FXN; (-) strand; PAM type: NNNNGHTT; PAM sequence: GGGAGCTT
  source 1..20: mol_type = other DNA
gatgaattttggagaccagg

SEQ ID NO: 7368 - DNA, 20 bp, synthetic construct
  misc_feature 1..20: note = Description of Artificial Sequence: Synthetic oligonucleotide
  misc_feature 1..20: note = Target: FXN; (-) strand; PAM type: NNNNGHTT; PAM sequence: CTCAGTTT
  source 1..20: mol_type = other DNA
ggaagaggccttcaagtgaa

SEQ ID NO: 7369 - DNA, 20 bp, synthetic construct
  misc_feature 1..20: note = Description of Artificial Sequence: Synthetic oligonucleotide
  misc_feature 1..20: note = Target: FXN; (-) strand; PAM type: NNNNGHTT; PAM sequence: AGCTGCTT
  source 1..20: mol_type = other DNA
ccattctgtttctgttgaac

SEQ ID NO: 7370 - DNA, 20 bp, synthetic construct
  misc_feature 1..20: note = Description of Artificial Sequence: Synthetic oligonucleotide
  misc_feature 1..20: note = Target: FXN; (-) strand; PAM type: NNNNGHTT; PAM sequence: TTCTGTTT
  source 1..20: mol_type = other DNA
aattatgtgtgtggctccca

SEQ ID NO: 7371 - DNA, 20 bp, synthetic construct
  misc_feature 1..20: note = Description of Artificial Sequence: Synthetic oligonucleotide
  misc_feature 1..20: note = Target: FXN; (-) strand; PAM type: NNNNGHTT; PAM sequence: AAATGATT
  source 1..20: mol_type = other DNA
ttgaataaatatattgttga

SEQ ID NO: 7372 - DNA, 20 bp, synthetic construct
  misc_feature 1..20: note = Description of Artificial Sequence: Synthetic oligonucleotide
  misc_feature 1..20: note = Target: FXN; (-) strand; PAM type: NNNNGHTT; PAM sequence: TACTGATT
  source 1..20: mol_type = other DNA
ctcattactgatttttaaaa

SEQ ID NO: 7373 - DNA, 20 bp, synthetic construct
  misc_feature 1..20: note = Description of Artificial Sequence: Synthetic oligonucleotide
  misc_feature 1..20: note = Target: FXN; (-) strand; PAM type: NNNNGHTT; PAM sequence: TACTGATT
  source 1..20: mol_type = other DNA
gccaccgtgcctggtctcat

SEQ ID NO: 7374 - DNA, 20 bp, synthetic construct
  misc_feature 1..20: note = Description of Artificial Sequence: Synthetic oligonucleotide
  misc_feature 1..20: note = Target: FXN; (-) strand; PAM type: NNNNGHTT; PAM sequence: CTGGGATT
  source 1..20: mol_type = other DNA
cgcctcggcctcccaaagtc

SEQ ID NO: 7375 - DNA, 20 bp, synthetic construct
  misc_feature 1..20: note = Description of Artificial Sequence: Synthetic oligonucleotide
  misc_feature 1..20: note = Target: FXN; (-) strand; PAM type: NNNNGHTT; PAM sequence: TGGGGTTT
  source 1..20: mol_type = other DNA
gagctagtttttagtagaga

SEQ ID NO: 7376 - DNA, 20 bp, synthetic construct
  misc_feature 1..20: note = Description of Artificial Sequence: Synthetic oligonucleotide
  misc_feature 1..20: note = Target: FXN; (-) strand; PAM type: NNNNGHTT; PAM sequence: GCTAGTTT
  source 1..20: mol_type = other DNA
ggcacccaccaccatgctga

SEQ ID NO: 7377 - DNA, 20 bp, synthetic construct
  misc_feature 1..20: note = Description of Artificial Sequence: Synthetic oligonucleotide
  misc_feature 1..20: note = Target: FXN; (-) strand; PAM type: NNNNGHTT; PAM sequence: AAGTGATT
  source 1..20: mol_type = other DNA
aacctctgcctcctgggctc

SEQ ID NO: 7378 - DNA, 20 bp, synthetic construct
  misc_feature 1..20: note = Description of Artificial Sequence: Synthetic oligonucleotide
  misc_feature 1..20: note = Target: FXN; (-) strand; PAM type: NNNNGHTT; PAM sequence: TACTGATT
  source 1..20: mol_type = other DNA
gagtatgcaagatatcttat

SEQ ID NO: 7379 - DNA, 20 bp, synthetic construct
  misc_feature 1..20: note = Description of Artificial Sequence: Synthetic oligonucleotide
  misc_feature 1..20: note = Target: FXN; (-) strand; PAM type: NNNNGHTT; PAM sequence: GTGTGTTT
  source 1..20: mol_type = other DNA
ccagcctaggagacatttaa

SEQ ID NO: 7380 - DNA, 20 bp, synthetic construct
  misc_feature 1..20: note = Description of Artificial Sequence: Synthetic oligonucleotide
  misc_feature 1..20: note = Target: FXN; (-) strand; PAM type: NNNNGHTT; PAM sequence: CTGGGATT
  source 1..20: mol_type = other DNA
catctcagcctcccaaagtg

SEQ ID NO: 7381 - DNA, 20 bp, synthetic construct
  misc_feature 1..20: note = Description of Artificial Sequence: Synthetic oligonucleotide
  misc_feature 1..20: note = Target: FXN; (-) strand; PAM type: NNNNGHTT; PAM sequence: CGGGGTTT
  source 1..20: mol_type = other DNA
ttttgtatttttagtagaga

SEQ ID NO: 7382 - DNA, 20 bp, synthetic construct
  misc_feature 1..20: note = Description of Artificial Sequence: Synthetic oligonucleotide
  misc_feature 1..20: note = Target: FXN; (-) strand; PAM type: NNNNGHTT; PAM sequence: CTGGGATT
  source 1..20: mol_type = other DNA
tgcctcagcctcctgagtag

SEQ ID NO: 7383 - DNA, 20 bp, synthetic construct
  misc_feature 1..20: note = Description of Artificial Sequence: Synthetic oligonucleotide
  misc_feature 1..20: note = Target: FXN; (-) strand; PAM type: NNNNGHTT; PAM sequence: CCTGGATT
  source 1..20: mol_type = other DNA
gtggctaatgggactgagga

SEQ ID NO: 7384 - DNA, 20 bp, synthetic construct
  misc_feature 1..20: note = Description of Artificial Sequence: Synthetic oligonucleotide
  misc_feature 1..20: note = Target: FXN; (-) strand; PAM type: NNNNGHTT; PAM sequence: TGTGGATT
  source 1..20: mol_type = other DNA
gtgcttttaaaagccgtttc

SEQ ID NO: 7385 - DNA, 20 bp, synthetic construct
  misc_feature 1..20: note = Description of Artificial Sequence: Synthetic oligonucleotide
  misc_feature 1..20: note = Target: FXN; (-) strand; PAM type: NNNNGHTT; PAM sequence: AGCCGTTT
  source 1..20: mol_type = other DNA
tgtggggctgtgcttttaaa

SEQ ID NO: 7386 - DNA, 20 bp, synthetic construct
  misc_feature 1..20: note = Description of Artificial Sequence: Synthetic oligonucleotide
  misc_feature 1..20: note = Target: FXN; (-) strand; PAM type: NNNNGHTT; PAM sequence: CTGTGCTT
  source 1..20: mol_type = other DNA
tggggctgggggctgtgggg

SEQ ID NO: 7387 - DNA, 20 bp, synthetic construct
  misc_feature 1..20: note = Description of Artificial Sequence: Synthetic oligonucleotide
  misc_feature 1..20: note = Target: FXN; (-) strand; PAM type: NNNNGHTT; PAM sequence: CCCAGTTT
  source 1..20: mol_type = other DNA
attttttaccatataaattg

SEQ ID NO: 7388 - DNA, 20 bp, synthetic construct
  misc_feature 1..20: note = Description of Artificial Sequence: Synthetic oligonucleotide
  misc_feature 1..20: note = Target: FXN; (-) strand; PAM type: NNNNGHTT; PAM sequence: TTAGGCTT
  source 1..20: mol_type = other DNA
tatcatgggagtgaaactag

SEQ ID NO: 7389 - DNA, 20 bp, synthetic construct
  misc_feature 1..20: note = Description of Artificial Sequence: Synthetic oligonucleotide
  misc_feature 1..20: note = Target: FXN; (-) strand; PAM type: NNNNGHTT; PAM sequence: CATAGATT
  source 1..20: mol_type = other DNA
caataatggattaatccatt

SEQ ID NO: 7390 - DNA, 20 bp, synthetic construct
  misc_feature 1..20: note = Description of Artificial Sequence: Synthetic oligonucleotide
  misc_feature 1..20: note = Target: FXN; (-) strand; PAM type: NNNNGHTT; PAM sequence: AATGGATT
  source 1..20: mol_type = other DNA
atgaaggttcttccctcaat

SEQ ID NO: 7391 - DNA, 20 bp, synthetic construct
  misc_feature 1..20: note = Description of Artificial Sequence: Synthetic oligonucleotide
  misc_feature 1..20: note = Target: FXN; (-) strand; PAM type: NNNNGHTT; PAM sequence: GAATGTTT
  source 1..20: mol_type = other DNA
gagacagcatgctatggttt

SEQ ID NO: 7392 - DNA, 20 bp, synthetic construct
  misc_feature 1..20: note = Description of Artificial Sequence: Synthetic oligonucleotide
  misc_feature 1..20: note = Target: FXN; (-) strand; PAM type: NNNNGHTT; PAM sequence: TATGGTTT
  source 1..20: mol_type = other DNA
tcatttaagagacagcatgc

SEQ ID NO: 7393 - DNA, 20 bp, synthetic construct
  misc_feature 1..20: note = Description of Artificial Sequence: Synthetic oligonucleotide
  misc_feature 1..20: note = Target: FXN; (-) strand; PAM type: NNNNGHTT; PAM sequence: AGGAGCTT
  source 1..20: mol_type = other DNA
catgcagaagtggatgccac

SEQ ID NO: 7394 - DNA, 20 bp, synthetic construct
  misc_feature 1..20: note = Description of Artificial Sequence: Synthetic oligonucleotide
  misc_feature 1..20: note = Target: FXN; (-) strand; PAM type: NNNNGHTT; PAM sequence: ACCTGCTT
  source 1..20: mol_type = other DNA
tgaaagtgagtgagggtata

SEQ ID NO: 7395 - DNA, 20 bp, synthetic construct
  misc_feature 1..20: note = Description of Artificial Sequence: Synthetic oligonucleotide
  misc_feature 1..20: note = Target: FXN; (-) strand; PAM type: NNNNGHTT; PAM sequence: AAATGATT
  source 1..20: mol_type = other DNA
aattgtctgcaagacaataa

SEQ ID NO: 7396 - DNA, 20 bp, synthetic construct
  misc_feature 1..20: note = Description of Artificial Sequence: Synthetic oligonucleotide
  misc_feature 1..20: note = Target: FXN; (-) strand; PAM type: NNNNGHTT; PAM sequence: CTGGGATT
  source 1..20: mol_type = other DNA
tgcctcggcctcccaaagtg

SEQ ID NO: 7397 - DNA, 20 bp, synthetic construct
  misc_feature 1..20: note = Description of Artificial Sequence: Synthetic oligonucleotide
  misc_feature 1..20: note = Target: FXN; (-) strand; PAM type: NNNNGHTT; PAM sequence: TGGGGTTT
  source 1..20: mol_type = other DNA
ttttgtatttttagtagaga

SEQ ID NO: 7398 - DNA, 20 bp, synthetic construct
  misc_feature 1..20: note = Description of Artificial Sequence: Synthetic oligonucleotide
  misc_feature 1..20: note = Target: FXN; (-) strand; PAM type: NNNNGHTT; PAM sequence: ATTAGTTT
  source 1..20: mol_type = other DNA
tgcagaccatagcatttatt

SEQ ID NO: 7399 - DNA, 20 bp, synthetic construct
  misc_feature 1..20: note = Description of Artificial Sequence: Synthetic oligonucleotide
  misc_feature 1..20: note = Target: FXN; (-) strand; PAM type: NNNNGHTT; PAM sequence: TTAGGTTT
  source 1..20: mol_type = other DNA
tcctaatatcactttggtga

SEQ ID NO: 7400 - DNA, 20 bp, synthetic construct
  misc_feature 1..20: note = Description of Artificial Sequence: Synthetic oligonucleotide
  misc_feature 1..20: note = Target: FXN; (-) strand; PAM type: NNNNGHTT; PAM sequence: TGGTGATT
  source 1..20: mol_type = other DNA
cccacctcctaatatcactt

SEQ ID NO: 7401 - DNA, 20 bp, synthetic construct
  misc_feature 1..20: note = Description of Artificial Sequence: Synthetic oligonucleotide
  misc_feature 1..20: note = Target: FXN; (-) strand; PAM type: NNNNGHTT; PAM sequence: GCCAGTTT
  source 1..20: mol_type = other DNA
agctttggtgtctggtgagg

SEQ ID NO: 7402 - DNA, 20 bp, synthetic construct
  misc_feature 1..20: note = Description of Artificial Sequence: Synthetic oligonucleotide
  misc_feature 1..20: note = Target: FXN; (-) strand; PAM type: NNNNGHTT; PAM sequence: AACAGCTT
  source 1..20: mol_type = other DNA
aaatccaagatcaatgcacc

SEQ ID NO: 7403 - DNA, 20 bp, synthetic construct
  misc_feature 1..20: note = Description of Artificial Sequence: Synthetic oligonucleotide
  misc_feature 1..20: note = Target: FXN; (-) strand; PAM type: NNNNGHTT; PAM sequence: ATGTGTTT
  source 1..20: mol_type = other DNA
gtggcttataaacaatagaa

SEQ ID NO: 7404 - DNA, 20 bp, synthetic construct
  misc_feature 1..20: note = Description of Artificial Sequence: Synthetic oligonucleotide
  misc_feature 1..20: note = Target: FXN; (-) strand; PAM type: NNNNGHTT; PAM sequence: GGTGGCTT
  source 1..20: mol_type = other DNA
taacaaaataccagccactg

SEQ ID NO: 7405 - DNA, 20 bp, synthetic construct
  misc_feature 1..20: note = Description of Artificial Sequence: Synthetic oligonucleotide
  misc_feature 1..20: note = Target: FXN; (-) strand; PAM type: NNNNGHTT; PAM sequence: GGCAGATT
  source 1..20: mol_type = other DNA
cgatgaacagaattcgggct

SEQ ID NO: 7406 - DNA, 20 bp, synthetic construct
  misc_feature 1..20: note = Description of Artificial Sequence: Synthetic oligonucleotide
  misc_feature 1..20: note = Target: FXN; (-) strand; PAM type: NNNNGHTT; PAM sequence: CATGGATT
  source 1..20: mol_type = other DNA
taccttgtatataagcaata

SEQ ID NO: 7407 - DNA, 20 bp, synthetic construct
  misc_feature 1..20: note = Description of Artificial Sequence: Synthetic oligonucleotide
  misc_feature 1..20: note = Target: FXN; (-) strand; PAM type: NNNNGHTT; PAM sequence: GTGTGATT
  source 1..20: mol_type = other DNA
cacctaaaggaacctggata

SEQ ID NO: 7408 - DNA, 20 bp, synthetic construct
  misc_feature 1..20: note = Description of Artificial Sequence: Synthetic oligonucleotide
  misc_feature 1..20: note = Target: FXN; (-) strand; PAM type: NNNNGHTT; PAM sequence: AGTTGATT
  source 1..20: mol_type = other DNA
accacttttggcatcaaatg

SEQ ID NO: 7409 - DNA, 20 bp, synthetic construct
  misc_feature 1..20: note = Description of Artificial Sequence: Synthetic oligonucleotide
  misc_feature 1..20: note = Target: FXN; (-) strand; PAM type: NNNNGHTT; PAM sequence: CCCAGCTT
  source 1..20: mol_type = other DNA
cctggatggccagcagggag

SEQ ID NO: 7410 - DNA, 20 bp, synthetic construct
  misc_feature 1..20: note = Description of Artificial Sequence: Synthetic oligonucleotide
  misc_feature 1..20: note = Target: FXN; (-) strand; PAM type: NNNNGHTT; PAM sequence: GATAGTTT
  source 1..20: mol_type = other DNA
atgcatttgaggaaatatta

SEQ ID NO: 7411 - DNA, 20 bp, synthetic construct
  misc_feature 1..20: note = Description of Artificial Sequence: Synthetic oligonucleotide
  misc_feature 1..20: note = Target: FXN; (-) strand; PAM type: NNNNGHTT; PAM sequence: TGAGGCTT
  source 1..20: mol_type = other DNA
catggtaggcttgcctagct

SEQ ID NO: 7412 - DNA, 20 bp, synthetic construct
  misc_feature 1..20: note = Description of Artificial Sequence: Synthetic oligonucleotide
  misc_feature 1..20: note = Target: FXN; (-) strand; PAM type: NNNNGHTT; PAM sequence: CCTAGCTT
  source 1..20: mol_type = other DNA
cacaagtcatggtaggcttg

SEQ ID NO: 7413 - DNA, 20 bp, synthetic construct
  misc_feature 1..20: note = Description of Artificial Sequence: Synthetic oligonucleotide
  misc_feature 1..20: note = Target: FXN; (-) strand; PAM type: NNNNGHTT; PAM sequence: GTAGGCTT
  source 1..20: mol_type = other DNA
cccttggaccacaagtcatg

SEQ ID NO: 7414 - DNA, 20 bp, synthetic construct
  misc_feature 1..20: note = Description of Artificial Sequence: Synthetic oligonucleotide
  misc_feature 1..20: note = Target: FXN; (-) strand; PAM type: NNNNGHTT; PAM sequence: CTGGGATT
  source 1..20: mol_type = other DNA
caccttggcctcccaaagtg

SEQ ID NO: 7415 - DNA, 20 bp, synthetic construct
  misc_feature 1..20: note = Description of Artificial Sequence: Synthetic oligonucleotide
  misc_feature 1..20: note = Target: FXN; (-) strand; PAM type: NNNNGHTT; PAM sequence: ACAGGTTT
  source 1..20: mol_type = other DNA
tttttgtgtttttaggagag

SEQ ID NO: 7416 - DNA, 20 bp, synthetic construct
  misc_feature 1..20: note = Description of Artificial Sequence: Synthetic oligonucleotide
  misc_feature 1..20: note = Target: FXN; (-) strand; PAM type: NNNNGHTT; PAM sequence: TTGTGTTT
  source 1..20: mol_type = other DNA
cctccatgcccagctaattt

SEQ ID NO: 7417 - DNA, 20 bp, synthetic construct
  misc_feature 1..20: note = Description of Artificial Sequence: Synthetic oligonucleotide
  misc_feature 1..20: note = Target: FXN; (-) strand; PAM type: NNNNGHTT; PAM sequence: CTGGGATT
  source 1..20: mol_type = other DNA
tgcctcagcctcctgagtag

SEQ ID NO: 7418 - DNA, 20 bp, synthetic construct
  misc_feature 1..20: note = Description of Artificial Sequence: Synthetic oligonucleotide
  misc_feature 1..20: note = Target: FXN; (-) strand; PAM type: NNNNGHTT; PAM sequence: AAGTGATT
  source 1..20: mol_type = other DNA
aacctccgcctcccgggttc

SEQ ID NO: 7419 - DNA, 20 bp, synthetic construct
  misc_feature 1..20: note = Description of Artificial Sequence: Synthetic oligonucleotide
  misc_feature 1..20: note = Target: FXN; (-) strand; PAM type: NNNNGHTT; PAM sequence: CTAGGCTT
  source 1..20: mol_type = other DNA
ctggaatgcagtggcacaat

SEQ ID NO: 7420 - DNA, 20 bp, synthetic construct
  misc_feature 1..20: note = Description of Artificial Sequence: Synthetic oligonucleotide
  misc_feature 1..20: note = Target: FXN; (-) strand; PAM type: NNNNGHTT; PAM sequence: CAAAGCTT
  source 1..20: mol_type = other DNA
tctgttctgcttgagggagg

SEQ ID NO: 7421 - DNA, 20 bp, synthetic construct
  misc_feature 1..20: note = Description of Artificial Sequence: Synthetic oligonucleotide
  misc_feature 1..20: note = Target: FXN; (-) strand; PAM type: NNNNGHTT; PAM sequence: TTCTGCTT
  source 1..20: mol_type = other DNA
ctaagggaggctccattctg

SEQ ID NO: 7422 - DNA, 20 bp, synthetic construct
  misc_feature 1..20: note = Description of Artificial Sequence: Synthetic oligonucleotide
  misc_feature 1..20: note = Target: FXN; (-) strand; PAM type: NNNNGHTT; PAM sequence: CTCAGTTT
  source 1..20: mol_type = other DNA
actgctaaaccttttggaac

SEQ ID NO: 7423 - DNA, 20 bp, synthetic construct
  misc_feature 1..20: note = Description of Artificial Sequence: Synthetic oligonucleotide
  misc_feature 1..20: note = Target: FXN; (-) strand; PAM type: NNNNGHTT; PAM sequence: ACCTGCTT
  source 1..20: mol_type = other DNA
tactccttgctttatattct

SEQ ID NO: 7424 - DNA, 20 bp, synthetic construct
  misc_feature 1..20: note = Description of Artificial Sequence: Synthetic oligonucleotide
  misc_feature 1..20: note = Target: FXN; (-) strand; PAM type: NNNNGHTT; PAM sequence: CCTTGCTT
  source 1..20: mol_type = other DNA
aagaaccgttgccaaatact

SEQ ID NO: 7425 - DNA, 20 bp, synthetic construct
  misc_feature 1..20: note = Description of Artificial Sequence: Synthetic oligonucleotide
  misc_feature 1..20: note = Target: FXN; (-) strand; PAM type: NNNNGHTT; PAM sequence: GGCTGTTT
  source 1..20: mol_type = other DNA
acaagtagaagtctttcttc

SEQ ID NO: 7426 - DNA, 20 bp, synthetic construct
  misc_feature 1..20: note = Description of Artificial Sequence: Synthetic oligonucleotide
  misc_feature 1..20: note = Target: FXN; (-) strand; PAM type: NNNNGHTT; PAM sequence: TAGAGATT
  source 1..20: mol_type = other DNA
tgtgtgtgtgtttaatttaa

SEQ ID NO: 7427 - DNA, 20 bp, synthetic construct
  misc_feature 1..20: note = Description of Artificial Sequence: Synthetic oligonucleotide
  misc_feature 1..20: note = Target: FXN; (-) strand; PAM type: NNNNGHTT; PAM sequence: GTGTGTTT
  source 1..20: mol_type = other DNA
ctgtttttgtttgtgtgtgt

SEQ ID NO: 7428 - DNA, 20 bp, synthetic construct
  misc_feature 1..20: note = Description of Artificial Sequence: Synthetic oligonucleotide
  misc_feature 1..20: note = Target: FXN; (-) strand; PAM type: NNNNGHTT; PAM sequence: TTTTGTTT
  source 1..20: mol_type = other DNA
gataccttcacaatagctgt

SEQ ID NO: 7429 - DNA, 20 bp, synthetic construct
  misc_feature 1..20: note = Description of Artificial Sequence: Synthetic oligonucleotide
  misc_feature 1..20: note = Target: FXN; (-) strand; PAM type: NNNNGHTT; PAM sequence: AGCTGTTT
  source 1..20: mol_type = other DNA
gtcgctgataccttcacaat

SEQ ID NO: 7430 - DNA, 20 bp, synthetic construct
  misc_feature 1..20: note = Description of Artificial Sequence: Synthetic oligonucleotide
  misc_feature 1..20: note = Target: FXN; (-) strand; PAM type: NNNNGHTT; PAM sequence: GGAAGTTT
  source 1..20: mol_type = other DNA
gaatgtggggctcacctcag

SEQ ID NO: 7431 - DNA, 20 bp, synthetic construct
  misc_feature 1..20: note = Description of Artificial Sequence: Synthetic oligonucleotide
  misc_feature 1..20: note = Target: FXN; (-) strand; PAM type: NNNNGHTT; PAM sequence: AATTGTTT
  source 1..20: mol_type = other DNA
agtctgtgcacagtggaagg

SEQ ID NO: 7432 - DNA, 20 bp, synthetic construct
  misc_feature 1..20: note = Description of Artificial Sequence: Synthetic oligonucleotide
  misc_feature 1..20: note = Target: FXN; (-) strand; PAM type: NNNNGHTT; PAM sequence: CTGGGATT
  source 1..20: mol_type = other DNA
acagacattaagtggcagag

SEQ ID NO: 7433 - DNA, 20 bp, synthetic construct
  misc_feature 1..20: note = Description of Artificial Sequence: Synthetic oligonucleotide
  misc_feature 1..20: note = Target: FXN; (-) strand; PAM type: NNNNGHTT; PAM sequence: TTGTGTTT
  source 1..20: mol_type = other DNA
cgaatgaggatcaactatag

SEQ ID NO: 7434 - DNA, 20 bp, synthetic construct
  misc_feature 1..20: note = Description of Artificial Sequence: Synthetic oligonucleotide
  misc_feature 1..20: note = Target: FXN; (-) strand; PAM type: NNNNGHTT; PAM sequence: TACTGATT
  source 1..20: mol_type = other DNA
cgaccccaaaaggctagggg

SEQ ID NO: 7435 - DNA, 20 bp, synthetic construct
  misc_feature 1..20: note = Description of Artificial Sequence: Synthetic oligonucleotide
  misc_feature 1..20: note = Target: FXN; (-) strand; PAM type: NNNNGHTT; PAM sequence: CACAGTTT
  source 1..20: mol_type = other DNA
taatcagactgtgaaaagga

SEQ ID NO: 7436 - DNA, 20 bp, synthetic construct
  misc_feature 1..20: note = Description of Artificial Sequence: Synthetic oligonucleotide
  misc_feature 1..20: note = Target: FXN; (-) strand; PAM type: NNNNGHTT; PAM sequence: CAAAGCTT
  source 1..20: mol_type = other DNA
gcaccttaactcatgcctga

SEQ ID NO: 7437 - DNA, 20 bp, synthetic construct
  misc_feature 1..20: note = Description of Artificial Sequence: Synthetic oligonucleotide
  misc_feature 1..20: note = Target: FXN; (-) strand; PAM type: NNNNGHTT; PAM sequence: CTATGATT
  source 1..20: mol_type = other DNA
gaggtagaggctgcagtgag

SEQ ID NO: 7438 - DNA, 20 bp, synthetic construct
  misc_feature 1..20: note = Description of Artificial Sequence: Synthetic oligonucleotide
  misc_feature 1..20: note = Target: FXN; (-) strand; PAM type: NNNNGHTT; PAM sequence: GATTGCTT
  source 1..20: mol_type = other DNA
tcaggaggccgaggtgggag

SEQ ID NO: 7439 - DNA, 20 bp, synthetic construct
  misc_feature 1..20: note = Description of Artificial Sequence: Synthetic oligonucleotide
  misc_feature 1..20: note = Target: FXN; (-) strand; PAM type: NNNNGHTT; PAM sequence: GGAGGATT
  source 1..20: mol_type = other DNA
ctactcaggaggccgaggtg

SEQ ID NO: 7440 - DNA, 20 bp, synthetic construct
  misc_feature 1..20: note = Description of Artificial Sequence: Synthetic oligonucleotide
  misc_feature 1..20: note = Target: FXN; (-) strand; PAM type: NNNNGHTT; PAM sequence: AATTGCTT
  source 1..20: mol_type = other DNA
tcaggaggctgaggcagaag

SEQ ID NO: 7441 - DNA, 20 bp, synthetic construct
  misc_feature 1..20: note = Description of Artificial Sequence: Synthetic oligonucleotide
  misc_feature 1..20: note = Target: FXN; (-) strand; PAM type: NNNNGHTT; PAM sequence: TGCAGTTT
  source 1..20: mol_type = other DNA
tggttcgtgcctataatctc

SEQ ID NO: 7442 - DNA, 20 bp, synthetic construct
  misc_feature 1..20: note = Description of Artificial Sequence: Synthetic oligonucleotide
  misc_feature 1..20: note = Target: FXN; (-) strand; PAM type: NNNNGHTT; PAM sequence: AAGAGTTT
  source 1..20: mol_type = other DNA
tgggaggattacttgagctc

SEQ ID NO: 7443 - DNA, 20 bp, synthetic construct
  misc_feature 1..20: note = Description of Artificial Sequence: Synthetic oligonucleotide
  misc_feature 1..20: note = Target: FXN; (-) strand; PAM type: NNNNGHTT; PAM sequence: GGAGGATT
  source 1..20: mol_type = other DNA
cactttgggaggccaaggtg

SEQ ID NO: 7444 - DNA, 20 bp, synthetic construct
  misc_feature 1..20: note = Description of Artificial Sequence: Synthetic oligonucleotide
  misc_feature 1..20: note = Target: FXN; (-) strand; PAM type: NNNNGHTT; PAM sequence: AGTTGATT
  source 1..20: mol_type = other DNA
acaccttatgtaatatatat

SEQ ID NO: 7445 - DNA, 20 bp, synthetic construct
  misc_feature 1..20: note = Description of Artificial Sequence: Synthetic oligonucleotide
  misc_feature 1..20: note = Target: FXN; (-) strand; PAM type: NNNNGHTT; PAM sequence: TTCTGTTT
  source 1..20: mol_type = other DNA
cgatcaatatataaccttat

SEQ ID NO: 7446 - DNA, 20 bp, synthetic construct
  misc_feature 1..20: note = Description of Artificial Sequence: Synthetic oligonucleotide
  misc_feature 1..20: note = Target: FXN; (-) strand; PAM type: NNNNGHTT; PAM sequence: ATCTGCTT
  source 1..20: mol_type = other DNA
cacattctacagtgttctcc

SEQ ID NO: 7447 - DNA, 20 bp, synthetic construct
  misc_feature 1..20: note = Description of Artificial Sequence: Synthetic oligonucleotide
  misc_feature 1..20: note = Target: FXN; (-) strand; PAM type: NNNNGHTT; PAM sequence: TAAGGTTT
  source 1..20: mol_type = other DNA
gggctttaagagattggtga

SEQ ID NO: 7448 - DNA, 20 bp, synthetic construct
  misc_feature 1..20: note = Description of Artificial Sequence: Synthetic oligonucleotide
  misc_feature 1..20: note = Target: FXN; (-) strand; PAM type: NNNNGHTT; PAM sequence: AAGAGATT
  source 1..20: mol_type = other DNA
ggaaggcaccgaagggcttt

SEQ ID NO: 7449 - DNA, 20 bp, synthetic construct
  misc_feature 1..20: note = Description of Artificial Sequence: Synthetic oligonucleotide
  misc_feature 1..20: note = Target: FXN; (-) strand; PAM type: NNNNGHTT; PAM sequence: AAGGGCTT
  source 1..20: mol_type = other DNA
gtcatcctgggaaggcaccg

SEQ ID NO: 7450 - DNA, 20 bp, synthetic construct
  misc_feature 1..20: note = Description of Artificial Sequence: Synthetic oligonucleotide
  misc_feature 1..20: note = Target: FXN; (-) strand; PAM type: NNNNGHTT; PAM sequence: AGTTGATT
  source 1..20: mol_type = other DNA
catccaggtgacagggtctg

SEQ ID NO: 7451 - DNA, 20 bp, synthetic construct
  misc_feature 1..20: note = Description of Artificial Sequence: Synthetic oligonucleotide
  misc_feature 1..20: note = Target: FXN; (-) strand; PAM type: NNNNGHTT; PAM sequence: TGTTGATT
  source 1..20: mol_type = other DNA
ctgcaggacagaatgtgacc

SEQ ID NO: 7452 - DNA, 20 bp, synthetic construct
  misc_feature 1..20: note = Description of Artificial Sequence: Synthetic oligonucleotide
  misc_feature 1..20: note = Target: FXN; (-) strand; PAM type: NNNNGHTT; PAM sequence: AGAAGATT
  source 1..20: mol_type = other DNA
gcagaatcctgctgaagtcc

SEQ ID NO: 7453 - DNA, 20 bp, synthetic construct
  misc_feature 1..20: note = Description of Artificial Sequence: Synthetic oligonucleotide
  misc_feature 1..20: note = Target: FXN; (-) strand; PAM type: NNNNGHTT; PAM sequence: ACCAGTTT
  source 1..20: mol_type = other DNA
gtcagctcctcaactgcacc

SEQ ID NO: 7454 - DNA, 20 bp, synthetic construct
  misc_feature 1..20: note = Description of Artificial Sequence: Synthetic oligonucleotide
  misc_feature 1..20: note = Target: FXN; (-) strand; PAM type: NNNNGHTT; PAM sequence: CCGTGTTT
  source 1..20: mol_type = other DNA
ctccctgtgtctctctaagc

SEQ ID NO: 7455 - DNA, 20 bp, synthetic construct
  misc_feature 1..20: note = Description of Artificial Sequence: Synthetic oligonucleotide
  misc_feature 1..20: note = Target: FXN; (-) strand; PAM type: NNNNGHTT; PAM sequence: CAGTGATT
  source 1..20: mol_type = other DNA
taccttcttttagtgcatta

SEQ ID NO: 7456 - DNA, 20 bp, synthetic construct
  misc_feature 1..20: note = Description of Artificial Sequence: Synthetic oligonucleotide
  misc_feature 1..20: note = Target: FXN; (-) strand; PAM type: NNNNGHTT; PAM sequence: TTAGGATT
  source 1..20: mol_type = other DNA
aagtattttaggaatatttc

SEQ ID NO: 7457 - DNA, 20 bp, synthetic construct
  misc_feature 1..20: note = Description of Artificial Sequence: Synthetic oligonucleotide
  misc_feature 1..20: note = Target: FXN; (-) strand; PAM type: NNNNGHTT; PAM sequence: CTCAGCTT
  source 1..20: mol_type = other DNA
gcctcaagtgatctgccctc

SEQ ID NO: 7458 - DNA, 20 bp, synthetic construct
  misc_feature 1..20: note = Description of Artificial Sequence: Synthetic oligonucleotide
  misc_feature 1..20: note = Target: FXN; (-) strand; PAM type: NNNNGHTT; PAM sequence: CGGGGTTT
  source 1..20: mol_type = other DNA
ttttgtatttttagtagaga

SEQ ID NO: 7459 - DNA, 20 bp, synthetic construct
  misc_feature 1..20: note = Description of Artificial Sequence: Synthetic oligonucleotide
  misc_feature 1..20: note = Target: FXN; (-) strand; PAM type: NNNNGHTT; PAM sequence: ACCCGATT
  source 1..20: mol_type = other DNA
ttacaggcacccgccaccgc

SEQ ID NO: 7460 - DNA, 20 bp, synthetic construct
  misc_feature 1..20: note = Description of Artificial Sequence: Synthetic oligonucleotide
  misc_feature 1..20: note = Target: FXN; (-) strand; PAM type: NNNNGHTT; PAM sequence: CTGGGATT
  source 1..20: mol_type = other DNA
tgcctcagcctcccgcgtag

SEQ ID NO: 7461 - DNA, 20 bp, synthetic construct
  misc_feature 1..20: note = Description of Artificial Sequence: Synthetic oligonucleotide
  misc_feature 1..20: note = Target: FXN; (-) strand; PAM type: NNNNGHTT; PAM sequence: GAGTGATT
  source 1..20: mol_type = other DNA
aacccccgcctcccgggttc

SEQ ID NO: 7462 - DNA, 20 bp, synthetic construct
  misc_feature 1..20: note = Description of Artificial Sequence: Synthetic oligonucleotide
  misc_feature 1..20: note = Target: FXN; (-) strand; PAM type: NNNNGHTT; PAM sequence: TTTTGTTT
  source 1..20: mol_type = other DNA
ttttttttttggtttttgtt

SEQ ID NO: 7463 - DNA, 20 bp, synthetic construct
  misc_feature 1..20: note = Description of Artificial Sequence: Synthetic oligonucleotide
  misc_feature 1..20: note = Target: FXN; (-) strand; PAM type: NNNNGHTT; PAM sequence: TTTTGTTT
  source 1..20: mol_type = other DNA
ctgaagtttttttttttggt

SEQ ID NO: 7464 - DNA, 20 bp, synthetic construct
  misc_feature 1..20: note = Description of Artificial Sequence: Synthetic oligonucleotide
  misc_feature 1..20: note = Target: FXN; (-) strand; PAM type: NNNNGHTT; PAM sequence: TTTGGTTT
  source 1..20: mol_type = other DNA
atcatgctgaagtttttttt

SEQ ID NO: 7465 - DNA, 20 bp, synthetic construct
  misc_feature 1..20: note = Description of Artificial Sequence: Synthetic oligonucleotide
  misc_feature 1..20: note = Target: FXN; (-) strand; PAM type: NNNNGHTT; PAM sequence: TGAAGTTT
  source 1..20: mol_type = other DNA
ttttggttaaataatcatgc

SEQ ID NO: 7466 - DNA, 20 bp, synthetic construct
  misc_feature 1..20: note = Description of Artificial Sequence: Synthetic oligonucleotide
  misc_feature 1..20: note = Target: FXN; (-) strand; PAM type: NNNNGHTT; PAM sequence: GCTAGTTT
  source 1..20: mol_type = other DNA
gctttgtacccctcacccaa

SEQ ID NO: 7467 - DNA, 20 bp, synthetic construct
  misc_feature 1..20: note = Description of Artificial Sequence: Synthetic oligonucleotide
  misc_feature 1..20: note = Target: FXN; (-) strand; PAM type: NNNNGHTT; PAM sequence: GGATGCTT
  source 1..20: mol_type = other DNA
agcacttttaaagaaaggca

SEQ ID NO: 7468 - DNA, 20 bp, synthetic construct
  misc_feature 1..20: note = Description of Artificial Sequence: Synthetic oligonucleotide
  misc_feature 1..20: note = Target: FXN; (-) strand; PAM type: NNNNGHTT; PAM sequence: TACAGCTT
  source 1..20: mol_type = other DNA
catgcccacttggccactgc

SEQ ID NO: 7469 - DNA, 20 bp, synthetic construct
  misc_feature 1..20: note = Description of Artificial Sequence: Synthetic oligonucleotide
  misc_feature 1..20: note = Target: FXN; (-) strand; PAM type: NNNNGHTT; PAM sequence: AGTAGATT
  source 1..20: mol_type = other DNA
cacagatctctccacatgac

SEQ ID NO: 7470 - DNA, 20 bp, synthetic construct
  misc_feature 1..20: note = Description of Artificial Sequence: Synthetic oligonucleotide
  misc_feature 1..20: note = Target: FXN; (-) strand; PAM type: NNNNGHTT; PAM sequence: GCAAGCTT
  source 1..20: mol_type = other DNA
caccatacattcccttcagg

SEQ ID NO: 7471 - DNA, 20 bp, synthetic construct
  misc_feature 1..20: note = Description of Artificial Sequence: Synthetic oligonucleotide
  misc_feature 1..20: note = Target: FXN; (-) strand; PAM type: NNNNGHTT; PAM sequence: CCCGGTTT
  source 1..20: mol_type = other DNA
tcttctcctctcccctggtt

SEQ ID NO: 7472 - DNA, 20 bp, synthetic construct
  misc_feature 1..20: note = Description of Artificial Sequence: Synthetic oligonucleotide
  misc_feature 1..20: note = Target: FXN; (-) strand; PAM type: NNNNGHTT; PAM sequence: TGTTGCTT
  source 1..20: mol_type = other DNA
tttctaagaaaaagggaata

SEQ ID NO: 7473 - DNA, 20 bp, synthetic construct
  misc_feature 1..20: note = Description of Artificial Sequence: Synthetic oligonucleotide
  misc_feature 1..20: note = Target: FXN; (-) strand; PAM type: NNNNGHTT; PAM sequence: CTCTGCTT
  source 1..20: mol_type = other DNA
tcaaattcatcaaatagaca

SEQ ID NO: 7474 - DNA, 20 bp, synthetic construct
  misc_feature 1..20: note = Description of Artificial Sequence: Synthetic oligonucleotide
  misc_feature 1..20: note = Target: FXN; (-) strand; PAM type: NNNNGHTT; PAM sequence: TCCAGATT
  source 1..20: mol_type = other DNA
taccctgggtggcccaaagt

SEQ ID NO: 7475 - DNA, 20 bp, synthetic construct
  misc_feature 1..20: note = Description of Artificial Sequence: Synthetic oligonucleotide
  misc_feature 1..20: note = Target: FXN; (-) strand; PAM type: NNNNGHTT; PAM sequence: AGGTGTTT
  source 1..20: mol_type = other DNA
gaagatacctatgacgtgga

SEQ ID NO: 7476 - DNA, 20 bp, synthetic construct
  misc_feature 1..20: note = Description of Artificial Sequence: Synthetic oligonucleotide
  misc_feature 1..20: note = Target: FXN; (-) strand; PAM type: NNNNGHTT; PAM sequence: CTAAGATT
  source 1..20: mol_type = other DNA
tcagtcacatggaaagatgc

SEQ ID NO: 7477 - DNA, 20 bp, synthetic construct
  misc_feature 1..20: note = Description of Artificial Sequence: Synthetic oligonucleotide
  misc_feature 1..20: note = Target: FXN; (-) strand; PAM type: NNNNGHTT; PAM sequence: AATGGATT
  source 1..20: mol_type = other DNA
caacagtaggggatgggtta

SEQ ID NO: 7478 - DNA, 20 bp, synthetic construct
  misc_feature 1..20: note = Description of Artificial Sequence: Synthetic oligonucleotide
  misc_feature 1..20: note = Target: FXN; (-) strand; PAM type: NNNNGHTT; PAM sequence: ATTGGTTT
  source 1..20: mol_type = other DNA
gagaggaggacacaaacgtt

SEQ ID NO: 7479 - DNA, 20 bp, synthetic construct
  misc_feature 1..20: note = Description of Artificial Sequence: Synthetic oligonucleotide
  misc_feature 1..20: note = Target: FXN; (-) strand; PAM type: NNNNGHTT; PAM sequence: CTGTGCTT
  source 1..20: mol_type = other DNA
aaatgccacttccagccctt

SEQ ID NO: 7480 - DNA, 20 bp, synthetic construct
  misc_feature 1..20: note = Description of Artificial Sequence: Synthetic oligonucleotide
  misc_feature 1..20: note = Target: FXN; (-) strand; PAM type: NNNNGHTT; PAM sequence: GCCGGCTT
  source 1..20: mol_type = other DNA
ctttccatggggaatgccgt

SEQ ID NO: 7481 - DNA, 20 bp, synthetic construct
  misc_feature 1..20: note = Description of Artificial Sequence: Synthetic oligonucleotide
  misc_feature 1..20: note = Target: FXN; (-) strand; PAM type: NNNNGHTT; PAM sequence: GACAGCTT
  source 1..20: mol_type = other DNA
ggtagactgtagccgtgcct

SEQ ID NO: 7482 - DNA, 20 bp, synthetic construct
  misc_feature 1..20: note = Description of Artificial Sequence: Synthetic oligonucleotide
  misc_feature 1..20: note = Target: FXN; (-) strand; PAM type: NNNNGHTT; PAM sequence: CAGGGATT
  source 1..20: mol_type = other DNA
agcctctcgagaggctgaag

SEQ ID NO: 7483 - DNA, 20 bp, synthetic construct
  misc_feature 1..20: note = Description of Artificial Sequence: Synthetic oligonucleotide
  misc_feature 1..20: note = Target: FXN; (-) strand; PAM type: NNNNGHTT; PAM sequence: GTGTGATT
  source 1..20: mol_type = other DNA
actccagcctgggtctcagg

SEQ ID NO: 7484 - DNA, 20 bp, synthetic construct
  misc_feature 1..20: note = Description of Artificial Sequence: Synthetic oligonucleotide
  misc_feature 1..20: note = Target: FXN; (-) strand; PAM type: NNNNGHTT; PAM sequence: GATTGCTT
  source 1..20: mol_type = other DNA
tcaggaggctgaggcaggag

SEQ ID NO: 7485 - DNA, 20 bp, synthetic construct
  misc_feature 1..20: note = Description of Artificial Sequence: Synthetic oligonucleotide
  misc_feature 1..20: note = Target: FXN; (-) strand; PAM type: NNNNGHTT; PAM sequence: GGAGGATT
  source 1..20: mol_type = other DNA
ctactcaggaggctgaggca

SEQ ID NO: 7486 - DNA, 20 bp, synthetic construct
  misc_feature 1..20: note = Description of Artificial Sequence: Synthetic oligonucleotide
  misc_feature 1..20: note = Target: FXN; (-) strand; PAM type: NNNNGHTT; PAM sequence: TATTGTTT
  source 1..20: mol_type = other DNA
gcattgctggtctccaatct

SEQ ID NO: 7487 - DNA, 20 bp, synthetic construct
  misc_feature 1..20: note = Description of Artificial Sequence: Synthetic oligonucleotide
  misc_feature 1..20: note = Target: FXN; (-) strand; PAM type: NNNNGHTT; PAM sequence: TAAGGCTT
  source 1..20: mol_type = other DNA
ccgcactcagccagagaagc

SEQ ID NO: 7488 - DNA, 20 bp, synthetic construct
  misc_feature 1..20: note = Description of Artificial Sequence: Synthetic oligonucleotide
  misc_feature 1..20: note = Target: FXN; (-) strand; PAM type: NNNNGHTT; PAM sequence: CAGGGTTT
  source 1..20: mol_type = other DNA
ttttgtatttttagtagaga

SEQ ID NO: 7489 - DNA, 20 bp, synthetic construct
  misc_feature 1..20: note = Description of Artificial Sequence: Synthetic oligonucleotide
  misc_feature 1..20: note = Target: FXN; (-) strand; PAM type: NNNNGHTT; PAM sequence: CTGGGATT
  source 1..20: mol_type = other DNA
tgcctcaggctcccgagtag

SEQ ID NO: 7490 - DNA, 20 bp, synthetic construct
  misc_feature 1..20: note = Description of Artificial Sequence: Synthetic oligonucleotide
  misc_feature 1..20: note = Target: FXN; (-) strand; PAM type: NNNNGHTT; PAM sequence: AAGCGATT
  source 1..20: mol_type = other DNA
agcctccatctcctgggttt

SEQ ID NO: 7491 - DNA, 20 bp, synthetic construct
  misc_feature 1..20: note = Description of Artificial Sequence: Synthetic oligonucleotide
  misc_feature 1..20: note = Target: FXN; (-) strand; PAM type: NNNNGHTT; PAM sequence: CTGGGTTT
  source 1..20: mol_type = other DNA
ctcactgcagcctccatctc

SEQ ID NO: 7492 - DNA, 20 bp, synthetic construct
  misc_feature 1..20: note = Description of Artificial Sequence: Synthetic oligonucleotide
  misc_feature 1..20: note = Target: FXN; (-) strand; PAM type: NNNNGHTT; PAM sequence: TGTTGCTT
  source 1..20: mol_type = other DNA
cctgaataccggtggcttct

SEQ ID NO: 7493 - DNA, 20 bp, synthetic construct
  misc_feature 1..20: note = Description of Artificial Sequence: Synthetic oligonucleotide
  misc_feature 1..20: note = Target: FXN; (-) strand; PAM type: NNNNGHTT; PAM sequence: GGTGGCTT
  source 1..20: mol_type = other DNA
gtagaatgttcctgaatacc

SEQ ID NO: 7494 - DNA, 20 bp, synthetic construct
  misc_feature 1..20: note = Description of Artificial Sequence: Synthetic oligonucleotide
  misc_feature 1..20: note = Target: FXN; (-) strand; PAM type: NNNNGHTT; PAM sequence: GTGTGCTT
  source 1..20: mol_type = other DNA
ctacacatggcaggtcaagg

SEQ ID NO: 7495 - DNA, 20 bp, synthetic construct
  misc_feature 1..20: note = Description of Artificial Sequence: Synthetic oligonucleotide
  misc_feature 1..20: note = Target: FXN; (-) strand; PAM type: NNNNGHTT; PAM sequence: GTGTGTTT
  source 1..20: mol_type = other DNA
gagtgagctggagagaaagg

SEQ ID NO: 7496 - DNA, 20 bp, synthetic construct
  misc_feature 1..20: note = Description of Artificial Sequence: Synthetic oligonucleotide
  misc_feature 1..20: note = Target: FXN; (-) strand; PAM type: NNNNGHTT; PAM sequence: GTGTGTTT
  source 1..20: mol_type = other DNA
agagtggttggcctgatagg

SEQ ID NO: 7497 - DNA, 20 bp, synthetic construct
  misc_feature 1..20: note = Description of Artificial Sequence: Synthetic oligonucleotide
  misc_feature 1..20: note = Target: FXN; (-) strand; PAM type: NNNNGHTT; PAM sequence: ACTGGATT
  source 1..20: mol_type = other DNA
aatgtggggaaggctacctg

SEQ ID NO: 7498 - DNA, 20 bp, synthetic construct
  misc_feature 1..20: note = Description of Artificial Sequence: Synthetic oligonucleotide
  misc_feature 1..20: note = Target: FXN; (-) strand; PAM type: NNNNGHTT; PAM sequence: TACAGATT
  source 1..20: mol_type = other DNA
tagacaattactgtaagaca

SEQ ID NO: 7499 - DNA, 20 bp, synthetic construct
  misc_feature 1..20: note = Description of Artificial Sequence: Synthetic oligonucleotide
  misc_feature 1..20: note = Target: FXN; (-) strand; PAM type: NNNNGHTT; PAM sequence: GAAAGTTT
  source 1..20: mol_type = other DNA
atcagacaactccactatct

SEQ ID NO: 7500 - DNA, 20 bp, synthetic construct
  misc_feature 1..20: note = Description of Artificial Sequence: Synthetic oligonucleotide
  misc_feature 1..20: note = Target: FXN; (-) strand; PAM type: NNNNGHTT; PAM sequence: AAGAGCTT
  source 1..20: mol_type = other DNA
attataataaacatccttgt

SEQ ID NO: 7501 - DNA, 20 bp, synthetic construct
  misc_feature 1..20: note = Description of Artificial Sequence: Synthetic oligonucleotide
  misc_feature 1..20: note = Target: FXN; (-) strand; PAM type: NNNNGHTT; PAM sequence: GTTAGTTT
  source 1..20: mol_type = other DNA
gcattatacattttaaaatg

SEQ ID NO: 7502 - DNA, 20 bp, synthetic construct
  misc_feature 1..20: note = Description of Artificial Sequence: Synthetic oligonucleotide
  misc_feature 1..20: note = Target: FXN; (-) strand; PAM type: NNNNGHTT; PAM sequence: TAGGGTTT
  source 1..20: mol_type = other DNA
ggagtgattgctaatatgaa

SEQ ID NO: 7503 - DNA, 20 bp, synthetic construct
  misc_feature 1..20: note = Description of Artificial Sequence: Synthetic oligonucleotide
  misc_feature 1..20: note = Target: FXN; (-) strand; PAM type: NNNNGHTT; PAM sequence: GAGTGATT
  source 1..20: mol_type = other DNA
tagggaaaggcggaatgggg

SEQ ID NO: 7504 - DNA, 20 bp, synthetic construct
  misc_feature 1..20: note = Description of Artificial Sequence: Synthetic oligonucleotide
  misc_feature 1..20: note = Target: FXN; (-) strand; PAM type: NNNNGHTT; PAM sequence: CTGGGTTT
  source 1..20: mol_type = other DNA
agaaagtagattagtgattg

SEQ ID NO: 7505 - DNA, 20 bp, synthetic construct
  misc_feature 1..20: note = Description of Artificial Sequence: Synthetic oligonucleotide
  misc_feature 1..20: note = Target: FXN; (-) strand; PAM type: NNNNGHTT; PAM sequence: TAGTGATT
  source 1..20: mol_type = other DNA
cacagagacagaaagtagat

SEQ ID NO: 7506 - DNA, 20 bp, synthetic construct
  misc_feature 1..20: note = Description of Artificial Sequence: Synthetic oligonucleotide
  misc_feature 1..20: note = Target: FXN; (-) strand; PAM type: NNNNGHTT; PAM sequence: AGTAGATT
  source 1..20: mol_type = other DNA
ttaaatccacagagacagaa

SEQ ID NO: 7507 - DNA, 20 bp, synthetic construct
  misc_feature 1..20: note = Description of Artificial Sequence: Synthetic oligonucleotide
  misc_feature 1..20: note = Target: FXN; (-) strand; PAM type: NNNNGHTT; PAM sequence: GTATGCTT
  source 1..20: mol_type = other DNA
ttttacaaattcatcaagct

SEQ ID NO: 7508 - DNA, 20 bp, synthetic construct
  misc_feature 1..20: note = Description of Artificial Sequence: Synthetic oligonucleotide
  misc_feature 1..20: note = Target: FXN; (-) strand; PAM type: NNNNGHTT; PAM sequence: TTGAGCTT
  source 1..20: mol_type = other DNA
ggctggtaacattctatgtc

SEQ ID NO: 7509 - DNA, 20 bp, synthetic construct
  misc_feature 1..20: note = Description of Artificial Sequence: Synthetic oligonucleotide
  misc_feature 1..20: note = Target: FXN; (-) strand; PAM type: NNNNGHTT; PAM sequence: GCTTGCTT
  source 1..20: mol_type = other DNA
tgactagaagtgagcaggca

SEQ ID NO: 7510 - DNA, 20 bp, synthetic construct
  misc_feature 1..20: note = Description of Artificial Sequence: Synthetic oligonucleotide
  misc_feature 1..20: note = Target: FXN; (-) strand; PAM type: NNNNGHTT; PAM sequence: GGCAGCTT
  source 1..20: mol_type = other DNA
ttaatgactagaagtgagca

SEQ ID NO: 7511 - DNA, 20 bp, synthetic construct
  misc_feature 1..20: note = Description of Artificial Sequence: Synthetic oligonucleotide
  misc_feature 1..20: note = Target: FXN; (-) strand; PAM type: NNNNGHTT; PAM sequence: GACAGTTT
  source 1..20: mol_type = other DNA
aacatgtttatacttaatga

SEQ ID NO: 7512 - DNA, 20 bp, synthetic construct
  misc_feature 1..20: note = Description of Artificial Sequence: Synthetic oligonucleotide
  misc_feature 1..20: note = Target: FXN; (-) strand; PAM type: NNNNGHTT; PAM sequence: ACATGTTT
  source 1..20: mol_type = other DNA
aaatacacaagtatacacaa

SEQ ID NO: 7513 - DNA, 20 bp, synthetic construct
  misc_feature 1..20: note = Description of Artificial Sequence: Synthetic oligonucleotide
  misc_feature 1..20: note = Target: FXN; (-) strand; PAM type: NNNNGHTT; PAM sequence: CGGGGTTT
  source 1..20: mol_type = other DNA
ttttgtatttttagtagaga

SEQ ID NO: 7514 - DNA, 20 bp, synthetic construct
  misc_feature 1..20: note = Description of Artificial Sequence: Synthetic oligonucleotide
  misc_feature 1..20: note = Target: FXN; (-) strand; PAM type: NNNNGHTT; PAM sequence: AATTGCTT
  source 1..20: mol_type = other DNA
tcgggaggctgaggcaggag

SEQ ID NO: 7515 - DNA, 20 bp, synthetic construct
  misc_feature 1..20: note = Description of Artificial Sequence: Synthetic oligonucleotide
  misc_feature 1..20: note = Target: FXN; (-) strand; PAM type: NNNNGHTT; PAM sequence: ACCAGCTT
  source 1..20: mol_type = other DNA
cctgaggttaggagttcgag

SEQ ID NO: 7516 - DNA, 20 bp, synthetic construct
  misc_feature 1..20: note = Description of Artificial Sequence: Synthetic oligonucleotide
  misc_feature 1..20: note = Target: FXN; (-) strand; PAM type: NNNNGHTT; PAM sequence: GAAAGATT
  source 1..20: mol_type = other DNA
ggtttatgtataatatcaaa

SEQ ID NO: 7517 - DNA, 20 bp, synthetic construct
  misc_feature 1..20: note = Description of Artificial Sequence: Synthetic oligonucleotide
  misc_feature 1..20: note = Target: FXN; (-) strand; PAM type: NNNNGHTT; PAM sequence: TGTGGTTT
  source 1..20: mol_type = other DNA
cttactgaaagacattttgg

SEQ ID NO: 7518 - DNA, 20 bp, synthetic construct
  misc_feature 1..20: note = Description of Artificial Sequence: Synthetic oligonucleotide
  misc_feature 1..20: note = Target: FXN; (-) strand; PAM type: NNNNGHTT; PAM sequence: GCAAGATT
  source 1..20: mol_type = other DNA
cttcactgtctcagaaccaa

SEQ ID NO: 7519 - DNA, 20 bp, synthetic construct
  misc_feature 1..20: note = Description of Artificial Sequence: Synthetic oligonucleotide
  misc_feature 1..20: note = Target: FXN; (-) strand; PAM type: NNNNGHTT; PAM sequence: TTTAGATT
  source 1..20: mol_type = other DNA
tattggagatttttttaata

SEQ ID NO: 7520 - DNA, 20 bp, synthetic construct
  misc_feature 1..20: note = Description of Artificial Sequence: Synthetic oligonucleotide
  misc_feature 1..20: note = Target: FXN; (-) strand; PAM type: NNNNGHTT; PAM sequence: TGGAGATT
  source 1..20: mol_type = other DNA
gaatgccatctaaaatctat

SEQ ID NO: 7521 - DNA, 20 bp, synthetic construct
  misc_feature 1..20: note = Description of Artificial Sequence: Synthetic oligonucleotide
  misc_feature 1..20: note = Target: FXN; (-) strand; PAM type: NNNNGHTT; PAM sequence: ATCAGATT
  source 1..20: mol_type = other DNA
tttatccttctaaagatatg

SEQ ID NO: 7522 - DNA, 20 bp, synthetic construct
  misc_feature 1..20: note = Description of Artificial Sequence: Synthetic oligonucleotide
  misc_feature 1..20: note = Target: FXN; (-) strand; PAM type: NNNNGHTT; PAM sequence: CACTGTTT
  source 1..20: mol_type = other DNA
tctgattcagtaaatgctat

SEQ ID NO: 7523 - DNA, 20 bp, synthetic construct
  misc_feature 1..20: note = Description of Artificial Sequence: Synthetic oligonucleotide
  misc_feature 1..20: note = Target: FXN; (-) strand; PAM type: NNNNGHTT; PAM sequence: TTCTGATT
  source 1..20: mol_type = other DNA
aaaaccccaaaaaacagtta

SEQ ID NO: 7524 - DNA, 20 bp, synthetic construct
  misc_feature 1..20: note = Description of Artificial Sequence: Synthetic oligonucleotide
  misc_feature 1..20: note = Target: FXN; (-) strand; PAM type: NNNNGHTT; PAM sequence: CTGGGCTT
  source 1..20: mol_type = other DNA
actaaaaatacaaaaattag

SEQ ID NO: 7525 - DNA, 20 bp, synthetic construct
  misc_feature 1..20: note = Description of Artificial Sequence: Synthetic oligonucleotide
  misc_feature 1..20: note = Target: FXN; (-) strand; PAM type: NNNNGHTT; PAM sequence: AGGAGTTT
  source 1..20: mol_type = other DNA
taggtggctcacctgaggtc

SEQ ID NO: 7526 - DNA, 20 bp, synthetic construct
  misc_feature 1..20: note = Description of Artificial Sequence: Synthetic oligonucleotide
  misc_feature 1..20: note = Target: FXN; (-) strand; PAM type: NNNNGHTT; PAM sequence: CCGAGATT
  source 1..20: mol_type = other DNA
gaggcggagcttgcagtgag

SEQ ID NO: 7527 - DNA, 20 bp, synthetic construct
  misc_feature 1..20: note = Description of Artificial Sequence: Synthetic oligonucleotide
  misc_feature 1..20: note = Target: FXN; (-) strand; PAM type: NNNNGHTT; PAM sequence: CGGAGCTT
  source 1..20: mol_type = other DNA
aatggcgtgaacctgggagg

SEQ ID NO: 7528 - DNA, 20 bp, synthetic construct
  misc_feature 1..20: note = Description of Artificial Sequence: Synthetic oligonucleotide
  misc_feature 1..20: note = Target: FXN; (-) strand; PAM type: NNNNGHTT; PAM sequence: TTAGGATT
  source 1..20: mol_type = other DNA
tgcctcagcttctcgaaatg

SEQ ID NO: 7529 - DNA, 20 bp, synthetic construct
  misc_feature 1..20: note = Description of Artificial Sequence: Synthetic oligonucleotide
  misc_feature 1..20: note = Target: FXN; (-) strand; PAM type: NNNNGHTT; PAM sequence: CTCAGCTT
  source 1..20: mol_type = other DNA
tcaagtgatccaccacgtgc

SEQ ID NO: 7530 - DNA, 20 bp, synthetic construct
  misc_feature 1..20: note = Description of Artificial Sequence: Synthetic oligonucleotide
  misc_feature 1..20: note = Target: FXN; (-) strand; PAM type: NNNNGHTT; PAM sequence: AAAAGTTT
  source 1..20: mol_type = other DNA
gaaaataacatgtaaaaagt

SEQ ID NO: 7531 - DNA, 20 bp, synthetic construct
  misc_feature 1..20: note = Description of Artificial Sequence: Synthetic oligonucleotide
  misc_feature 1..20: note = Target: FXN; (-) strand; PAM type: NNNNGHTT; PAM sequence: AAATGCTT
  source 1..20: mol_type = other DNA
aaacccaaaacatgattacc

SEQ ID NO: 7532 - DNA, 20 bp, synthetic construct
  misc_feature 1..20: note = Description of Artificial Sequence: Synthetic oligonucleotide
  misc_feature 1..20: note = Target: FXN; (-) strand; PAM type: NNNNGHTT; PAM sequence: ACATGATT
  source 1..20: mol_type = other DNA
gaggaagcacaaaacccaaa

SEQ ID NO: 7533 - DNA, 20 bp, synthetic construct
  misc_feature 1..20: note = Description of Artificial Sequence: Synthetic oligonucleotide
  misc_feature 1..20: note = Target: FXN; (-) strand; PAM type: NNNNGHTT; PAM sequence: CAGCGTTT
  source 1..20: mol_type = other DNA
aaaaactctgctaaagagtc

SEQ ID NO: 7534 - DNA, 20 bp, synthetic construct
  misc_feature 1..20: note = Description of Artificial Sequence: Synthetic oligonucleotide
  misc_feature 1..20: note = Target: FXN; (-) strand; PAM type: NNNNGHTT; PAM sequence: TATGGCTT
  source 1..20: mol_type = other DNA
catcatagtcctcaaacgtg

SEQ ID NO: 7535 - DNA, 20 bp, synthetic construct
  misc_feature 1..20: note = Description of Artificial Sequence: Synthetic oligonucleotide
  misc_feature 1..20: note = Target: FXN; (-) strand; PAM type: NNNNGHTT; PAM sequence: TGATGCTT
  source 1..20: mol_type = other DNA
acctacaactacatgctact

SEQ ID NO: 7536 - DNA, 20 bp, synthetic construct
  misc_feature 1..20: note = Description of Artificial Sequence: Synthetic oligonucleotide
  misc_feature 1..20: note = Target: FXN; (-) strand; PAM type: NNNNGHTT; PAM sequence: GCGTGATT
  source 1..20: mol_type = other DNA
acccaggctggagtgcagtg

SEQ ID NO: 7537 - DNA, 20 bp, synthetic construct
  misc_feature 1..20: note = Description of Artificial Sequence: Synthetic oligonucleotide
  misc_feature 1..20: note = Target: FXN; (-) strand; PAM type: NNNNGHTT; PAM sequence: TGCAGCTT
  source 1..20: mol_type = other DNA
caagcctggtagagctggac

SEQ ID NO: 7538 - DNA, 20 bp, synthetic construct
  misc_feature 1..20: note = Description of Artificial Sequence: Synthetic oligonucleotide
  misc_feature 1..20: note = Target: FXN; (-) strand; PAM type: NNNNGHTT; PAM sequence: CTCTGATT
  source 1..20: mol_type = other DNA
aaatacacactcaggcccct

SEQ ID NO: 7539 - DNA, 20 bp, synthetic construct
  misc_feature 1..20: note = Description of Artificial Sequence: Synthetic oligonucleotide
  misc_feature 1..20: note = Target: FXN; (-) strand; PAM type: NNNNGHTT; PAM sequence: TCTAGTTT
  source 1..20: mol_type = other DNA
ccctactgaagaactacggg

SEQ ID NO: 7540 - DNA, 20 bp, synthetic construct
  misc_feature 1..20: note = Description of Artificial Sequence: Synthetic oligonucleotide
  misc_feature 1..20: note = Target: FXN; (-) strand; PAM type: NNNNGHTT; PAM sequence: ATATGCTT
  source 1..20: mol_type = other DNA
cccaggtgagcttttcaaaa

SEQ ID NO: 7541 - DNA, 20 bp, synthetic construct
  misc_feature 1..20: note = Description of Artificial Sequence: Synthetic oligonucleotide
  misc_feature 1..20: note = Target: FXN; (-) strand; PAM type: NNNNGHTT; PAM sequence: GTGAGCTT
  source 1..20: mol_type = other DNA
gatacacattagaatcccag

SEQ ID NO: 7542 - DNA, 20 bp, synthetic construct
  misc_feature 1..20: note = Description of Artificial Sequence: Synthetic oligonucleotide
  misc_feature 1..20: note = Target: FXN; (-) strand; PAM type: NNNNGHTT; PAM sequence: TGGAGCTT
  source 1..20: mol_type = other DNA
ctgcatattggaatcatctg

SEQ ID NO: 7543 - DNA, 20 bp, synthetic construct
  misc_feature 1..20: note = Description of Artificial Sequence: Synthetic oligonucleotide
  misc_feature 1..20: note = Target: FXN; (-) strand; PAM type: NNNNGHTT; PAM sequence: CCGAGATT
  source 1..20: mol_type = other DNA
ccaggaagcggagcagtgag

SEQ ID NO: 7544 - DNA, 20 bp, synthetic construct
  misc_feature 1..20: note = Description of Artificial Sequence: Synthetic oligonucleotide
  misc_feature 1..20: note = Target: FXN; (-) strand; PAM type: NNNNGHTT; PAM sequence: AACTGCTT
  source 1..20: mol_type = other DNA
tcgggaggctgaggcaggag

SEQ ID NO: 7545 - DNA, 20 bp, synthetic construct
  misc_feature 1..20: note = Description of Artificial Sequence: Synthetic oligonucleotide
  misc_feature 1..20: note = Target: FXN; (-) strand; PAM type: NNNNGHTT; PAM sequence: TAATGTTT
  source 1..20: mol_type = other DNA
tggcttctaggatctggggc

SEQ ID NO: 7546 - DNA, 20 bp, synthetic construct
  misc_feature 1..20: note = Description of Artificial Sequence: Synthetic oligonucleotide
  misc_feature 1..20: note = Target: FXN; (-) strand; PAM type: NNNNGHTT; PAM sequence: CCTGGCTT
  source 1..20: mol_type = other DNA
tcgataaagaccagcacttc

SEQ ID NO: 7547 - DNA, 20 bp, synthetic construct
  misc_feature 1..20: note = Description of Artificial Sequence: Synthetic oligonucleotide
  misc_feature 1..20: note = Target: FXN; (-) strand; PAM type: NNNNGHTT; PAM sequence: GAGGGATT
  source 1..20: mol_type = other DNA
caacccagaaaaccatcttt

SEQ ID NO: 7548 - DNA, 20 bp, synthetic construct
  misc_feature 1..20: note = Description of Artificial Sequence: Synthetic oligonucleotide
  misc_feature 1..20: note = Target: FXN; (-) strand; PAM type: NNNNGHTT; PAM sequence: AACTGCTT
  source 1..20: mol_type = other DNA
ttgggaggttgaggcaggag

SEQ ID NO: 7549 - DNA, 20 bp, synthetic construct
  misc_feature 1..20: note = Description of Artificial Sequence: Synthetic oligonucleotide
  misc_feature 1..20: note = Target: FXN; (-) strand; PAM type: NNNNGHTT; PAM sequence: GGAGGATT
  source 1..20: mol_type = other DNA
cactttgggaggctgaggtg

SEQ ID NO: 7550 - DNA, 20 bp, synthetic construct
  misc_feature 1..20: note = Description of Artificial Sequence: Synthetic oligonucleotide
  misc_feature 1..20: note = Target: FXN; (-) strand; PAM type: NNNNGHTT; PAM sequence: AGAGGATT
  source 1..20: mol_type = other DNA
gtattagtcaattgccatca

SEQ ID NO: 7551 - DNA, 20 bp, synthetic construct
  misc_feature 1..20: note = Description of Artificial Sequence: Synthetic oligonucleotide
  misc_feature 1..20: note = Target: FXN; (-) strand; PAM type: NNNNGHTT; PAM sequence: GCACGCTT
  source 1..20: mol_type = other DNA
tccatgattgaatccaaaat

SEQ ID NO: 7552 - DNA, 20 bp, synthetic construct
  misc_feature 1..20: note = Description of Artificial Sequence: Synthetic oligonucleotide
  misc_feature 1..20: note = Target: FXN; (-) strand; PAM type: NNNNGHTT; PAM sequence: CCATGATT
  source 1..20: mol_type = other DNA
gctgattgtcctcaacaatt

SEQ ID NO: 7553 - DNA, 20 bp, synthetic construct
  misc_feature 1..20: note = Description of Artificial Sequence: Synthetic oligonucleotide
  misc_feature 1..20: note = Target: FXN; (-) strand; PAM type: NNNNGHTT; PAM sequence: GGCTGATT
  source 1..20: mol_type = other DNA
ttctatcgctttagtctgat

SEQ ID NO: 7554 - DNA, 20 bp, synthetic construct
  misc_feature 1..20: note = Description of Artificial Sequence: Synthetic oligonucleotide
  misc_feature 1..20: note = Target: FXN; (-) strand; PAM type: NNNNGHTT; PAM sequence: TATCGCTT
  source 1..20: mol_type = other DNA
gcaatttccaatactatttc

SEQ ID NO: 7555 - DNA, 20 bp, synthetic construct
  misc_feature 1..20: note = Description of Artificial Sequence: Synthetic oligonucleotide
  misc_feature 1..20: note = Target: FXN; (-) strand; PAM type: NNNNGHTT; PAM sequence: TCAGGCTT
  source 1..20: mol_type = other DNA
ttccctcactgtccttatag

SEQ ID NO: 7556 - DNA, 20 bp, synthetic construct
  misc_feature 1..20: note = Description of Artificial Sequence: Synthetic oligonucleotide
  misc_feature 1..20: note = Target: FXN; (-) strand; PAM type: NNNNGHTT; PAM sequence: TTTTGTTT
  source 1..20: mol_type = other DNA
tccctgctccattgctcctt

SEQ ID NO: 7557 - DNA, 20 bp, synthetic construct
  misc_feature 1..20: note = Description of Artificial Sequence: Synthetic oligonucleotide
  misc_feature 1..20: note = Target: FXN; (-) strand; PAM type: NNNNGHTT; PAM sequence: GTCAGTTT
  source 1..20: mol_type = other DNA
gtggatgctcaagttggtag

SEQ ID NO: 7558 - DNA, 20 bp, synthetic construct
  misc_feature 1..20: note = Description of Artificial Sequence: Synthetic oligonucleotide
  misc_feature 1..20: note = Target: FXN; (-) strand; PAM type: NNNNGHTT; PAM sequence: CTTGGTTT
  source 1..20: mol_type = other DNA
gggcagagtttagcctgcaa

SEQ ID NO: 7559 - DNA, 20 bp, synthetic construct
  misc_feature 1..20: note = Description of Artificial Sequence: Synthetic oligonucleotide
  misc_feature 1..20: note = Target: FXN; (-) strand; PAM type: NNNNGHTT; PAM sequence: CAGAGTTT
  source 1..20: mol_type = other DNA
tcaatgtctgcatgtgtggg

SEQ ID NO: 7560 - DNA, 20 bp, synthetic construct
  misc_feature 1..20: note = Description of Artificial Sequence: Synthetic oligonucleotide
  misc_feature 1..20: note = Target: FXN; (-) strand; PAM type: NNNNGHTT; PAM sequence: TGTAGCTT
  source 1..20: mol_type = other DNA
acaggtttcatgactgtttt

SEQ ID NO: 7561 - DNA, 20 bp, synthetic construct
  misc_feature 1..20: note = Description of Artificial Sequence: Synthetic oligonucleotide
  misc_feature 1..20: note = Target: FXN; (-) strand; PAM type: NNNNGHTT; PAM sequence: GACTGTTT
  source 1..20: mol_type = other DNA
cctataaaaacaggtttcat

SEQ ID NO: 7562 - DNA, 20 bp, synthetic construct
  misc_feature 1..20: note = Description of Artificial Sequence: Synthetic oligonucleotide
  misc_feature 1..20: note = Target: FXN; (-) strand; PAM type: NNNNGHTT; PAM sequence: ACAGGTTT
  source 1..20: mol_type = other DNA
gcttcactaatcctataaaa

SEQ ID NO: 7563 - DNA, 20 bp, synthetic construct
  misc_feature 1..20: note = Description of Artificial Sequence: Synthetic oligonucleotide
  misc_feature 1..20: note = Target: FXN; (-) strand; PAM type: NNNNGHTT; PAM sequence: TGGGGCTT
  source 1..20: mol_type = other DNA
gcaaagtactctggtcaaac

SEQ ID NO: 7564 - DNA, 20 bp, synthetic construct
  misc_feature 1..20: note = Description of Artificial Sequence: Synthetic oligonucleotide
  misc_feature 1..20: note = Target: FXN; (-) strand; PAM type: NNNNGHTT; PAM sequence: ATTTGCTT
  source 1..20: mol_type = other DNA
agctgctagaatattggcac

SEQ ID NO: 7565 - DNA, 20 bp, synthetic construct
  misc_feature 1..20: note = Description of Artificial Sequence: Synthetic oligonucleotide
  misc_feature 1..20: note = Target: FXN; (-) strand; PAM type: NNNNGHTT; PAM sequence: CTAGGCTT
  source 1..20: mol_type = other DNA
ctccagcctgggtgacagag

SEQ ID NO: 7566 - DNA, 20 bp, synthetic construct
  misc_feature 1..20: note = Description of Artificial Sequence: Synthetic oligonucleotide
  misc_feature 1..20: note = Target: FXN; (-) strand; PAM type: NNNNGHTT; PAM sequence: AATCGCTT
  source 1..20: mol_type = other DNA
tcaggaggttgaggcgggag

SEQ ID NO: 7567 - DNA, 20 bp, synthetic construct
  misc_feature 1..20: note = Description of Artificial Sequence: Synthetic oligonucleotide
  misc_feature 1..20: note = Target: FXN; (-) strand; PAM type: NNNNGHTT; PAM sequence: AGGAGTTT
  source 1..20: mol_type = other DNA
cgggtggatcacttgagatc

SEQ ID NO: 7568 - DNA, 20 bp, synthetic construct
  misc_feature 1..20: note = Description of Artificial Sequence: Synthetic oligonucleotide
  misc_feature 1..20: note = Target: FXN; (-) strand; PAM type: NNNNGHTT; PAM sequence: CTATGATT
  source 1..20: mol_type = other DNA
aagcttgaggctgcagtgag

SEQ ID NO: 7569 - DNA, 20 bp, synthetic construct
  misc_feature 1..20: note = Description of Artificial Sequence: Synthetic oligonucleotide
  misc_feature 1..20: note = Target: FXN; (-) strand; PAM type: NNNNGHTT; PAM sequence: AGAAGCTT
  source 1..20: mol_type = other DNA
tggaacgatcacttgagccc

SEQ ID NO: 7570 - DNA, 20 bp, synthetic construct
  misc_feature 1..20: note = Description of Artificial Sequence: Synthetic oligonucleotide
  misc_feature 1..20: note = Target: FXN; (-) strand; PAM type: NNNNGHTT; PAM sequence: AGGAGTTT
  source 1..20: mol_type = other DNA
tgagagaatcgcttgaggcc

SEQ ID NO: 7571 - DNA, 20 bp, synthetic construct
  misc_feature 1..20: note = Description of Artificial Sequence: Synthetic oligonucleotide
  misc_feature 1..20: note = Target: FXN; (-) strand; PAM type: NNNNGHTT; PAM sequence: AATCGCTT
  source 1..20: mol_type = other DNA
ttgggaggccgaggtgagag

SEQ ID NO: 7572 - DNA, 20 bp, synthetic construct
  misc_feature 1..20: note = Description of Artificial Sequence: Synthetic oligonucleotide
  misc_feature 1..20: note = Target: FXN; (-) strand; PAM type: NNNNGHTT; PAM sequence: CGGTGCTT
  source 1..20: mol_type = other DNA
ctggcacacacctgtaatcc

SEQ ID NO: 7573 - DNA, 20 bp, synthetic construct
  misc_feature 1..20: note = Description of Artificial Sequence: Synthetic oligonucleotide
  misc_feature 1..20: note = Target: FXN; (-) strand; PAM type: NNNNGHTT; PAM sequence: TATAGATT
  source 1..20: mol_type = other DNA
atagtcctcctttctaaatt

SEQ ID NO: 7574 - DNA, 20 bp, synthetic construct
  misc_feature 1..20: note = Description of Artificial Sequence: Synthetic oligonucleotide
  misc_feature 1..20: note = Target: FXN; (-) strand; PAM type: NNNNGHTT; PAM sequence: CTCTGCTT
  source 1..20: mol_type = other DNA
ttttcagttatggccagagg

SEQ ID NO: 7575 - DNA, 20 bp, synthetic construct
  misc_feature 1..20: note = Description of Artificial Sequence: Synthetic oligonucleotide
  misc_feature 1..20: note = Target: FXN; (-) strand; PAM type: NNNNGHTT; PAM sequence: GCTTGTTT
  source 1..20: mol_type = other DNA
ctttgccccttcttggaagt

SEQ ID NO: 7576 - DNA, 20 bp, synthetic construct
  misc_feature 1..20: note = Description of Artificial Sequence: Synthetic oligonucleotide
  misc_feature 1..20: note = Target: FXN; (-) strand; PAM type: NNNNGHTT; PAM sequence: AAGTGCTT
  source 1..20: mol_type = other DNA
ttccctttgccccttcttgg

SEQ ID NO: 7577 - DNA, 20 bp, synthetic construct
  misc_feature 1..20: note = Description of Artificial Sequence: Synthetic oligonucleotide
  misc_feature 1..20: note = Target: FXN; (-) strand; PAM type: NNNNGHTT; PAM sequence: GTATGCTT
  source 1..20: mol_type = other DNA
tcccataatctgttgaatat

SEQ ID NO: 7578 - DNA, 20 bp, synthetic construct
  misc_feature 1..20: note = Description of Artificial Sequence: Synthetic oligonucleotide
  misc_feature 1..20: note = Target: FXN; (-) strand; PAM type: NNNNGHTT; PAM sequence: GTTAGCTT
  source 1..20: mol_type = other DNA
atgggagacatgctgcacac

SEQ ID NO: 7579 - DNA, 20 bp, synthetic construct
  misc_feature 1..20: note = Description of Artificial Sequence: Synthetic oligonucleotide
  misc_feature 1..20: note = Target: FXN; (-) strand; PAM type: NNNNGHTT; PAM sequence: TTAAGTTT
  source 1..20: mol_type = other DNA
ccctgtaatacatgttagtg

SEQ ID NO: 7580 - DNA, 20 bp, synthetic construct
  misc_feature 1..20: note = Description of Artificial Sequence: Synthetic oligonucleotide
  misc_feature 1..20: note = Target: FXN; (-) strand; PAM type: NNNNGHTT; PAM sequence: TCCTGCTT
  source 1..20: mol_type = other DNA
ctcccagtcttaagtgatgc

SEQ ID NO: 7581 - DNA, 20 bp, synthetic construct
  misc_feature 1..20: note = Description of Artificial Sequence: Synthetic oligonucleotide
  misc_feature 1..20: note = Target: FXN; (-) strand; PAM type: NNNNGHTT; PAM sequence: AGTGGTTT
  source 1..20: mol_type = other DNA
taattctgcccttccttttt

SEQ ID NO: 7582 - DNA, 20 bp, synthetic construct
  misc_feature 1..20: note = Description of Artificial Sequence: Synthetic oligonucleotide
  misc_feature 1..20: note = Target: FXN; (-) strand; PAM type: NNNNGHTT; PAM sequence: GTTGGATT
  source 1..20: mol_type = other DNA
cactttgggaggccaaagca

SEQ ID NO: 7583 - DNA, 20 bp, synthetic construct
  misc_feature 1..20: note = Description of Artificial Sequence: Synthetic oligonucleotide
  misc_feature 1..20: note = Target: FXN; (-) strand; PAM type: NNNNGHTT; PAM sequence: ATTAGTTT
  source 1..20: mol_type = other DNA
ctattccctccctaactgcc

SEQ ID NO: 7584 - DNA, 20 bp, synthetic construct
  misc_feature 1..20: note = Description of Artificial Sequence: Synthetic oligonucleotide
  misc_feature 1..20: note = Target: FXN; (-) strand; PAM type: NNNNGHTT; PAM sequence: TTAAGTTT
  source 1..20: mol_type = other DNA
agagatatctaaaaaaaatt

SEQ ID NO: 7585 - DNA, 20 bp, synthetic construct
  misc_feature 1..20: note = Description of Artificial Sequence: Synthetic oligonucleotide
  misc_feature 1..20: note = Target: FXN; (-) strand; PAM type: NNNNGHTT; PAM sequence: AATTGATT
  source 1..20: mol_type = other DNA
aggttttgtcgcctggttca

SEQ ID NO: 7586 - DNA, 20 bp, synthetic construct
  misc_feature 1..20: note = Description of Artificial Sequence: Synthetic oligonucleotide
  misc_feature 1..20: note = Target: FXN; (-) strand; PAM type: NNNNGHTT; PAM sequence: GAAGGTTT
  source 1..20: mol_type = other DNA
ctgacccactactgggagca

SEQ ID NO: 7587 - DNA, 20 bp, synthetic construct
  misc_feature 1..20: note = Description of Artificial Sequence: Synthetic oligonucleotide
  misc_feature 1..20: note = Target: FXN; (-) strand; PAM type: NNNNGHTT; PAM sequence: AAATGATT
  source 1..20: mol_type = other DNA
ttaagcatttgctaattagt

SEQ ID NO: 7588 - DNA, 20 bp, synthetic construct
  misc_feature 1..20: note = Description of Artificial Sequence: Synthetic oligonucleotide
  misc_feature 1..20: note = Target: FXN; (-) strand; PAM type: NNNNGHTT; PAM sequence: TTTAGCTT
  source 1..20: mol_type = other DNA
gatggcagccactgtatagc

SEQ ID NO: 7589 - DNA, 20 bp, synthetic construct
  misc_feature 1..20: note = Description of Artificial Sequence: Synthetic oligonucleotide
  misc_feature 1..20: note = Target: FXN; (-) strand; PAM type: NNNNGHTT; PAM sequence: TATAGCTT
  source 1..20: mol_type = other DNA
actatagatggcagccactg

SEQ ID NO: 7590 - DNA, 20 bp, synthetic construct
  misc_feature 1..20: note = Description of Artificial Sequence: Synthetic oligonucleotide
  misc_feature 1..20: note = Target: FXN; (-) strand; PAM type: NNNNGHTT; PAM sequence: GAAGGCTT
  source 1..20: mol_type = other DNA
tgtctgcttggagtatctag

SEQ ID NO: 7591 - DNA, 20 bp, synthetic construct
  misc_feature 1..20: note = Description of Artificial Sequence: Synthetic oligonucleotide
  misc_feature 1..20: note = Target: FXN; (-) strand; PAM type: NNNNGHTT; PAM sequence: GTCTGCTT
  source 1..20: mol_type = other DNA
agggagaaaggaaggaccgt

SEQ ID NO: 7592 - DNA, 20 bp, synthetic construct
  misc_feature 1..20: note = Description of Artificial Sequence: Synthetic oligonucleotide
  misc_feature 1..20: note = Target: FXN; (-) strand; PAM type: NNNNGHTT; PAM sequence: GCATGTTT
  source 1..20: mol_type = other DNA
gctgagaggcatcaacgaaa

SEQ ID NO: 7593 - DNA, 20 bp, synthetic construct
  misc_feature 1..20: note = Description of Artificial Sequence: Synthetic oligonucleotide
  misc_feature 1..20: note = Target: FXN; (-) strand; PAM type: NNNNGHTT; PAM sequence: TACTGCTT
  source 1..20: mol_type = other DNA
cctcttgggtgtatctggat

SEQ ID NO: 7594 - DNA, 20 bp, synthetic construct
  misc_feature 1..20: note = Description of Artificial Sequence: Synthetic oligonucleotide
  misc_feature 1..20: note = Target: FXN; (-) strand; PAM type: NNNNGHTT; PAM sequence: TCTGGATT
  source 1..20: mol_type = other DNA
cagatgtcctcttgggtgta

SEQ ID NO: 7595 - DNA, 20 bp, synthetic construct
  misc_feature 1..20: note = Description of Artificial Sequence: Synthetic oligonucleotide
  misc_feature 1..20: note = Target: FXN; (-) strand; PAM type: NNNNGHTT; PAM sequence: GGCAGATT
  source 1..20: mol_type = other DNA
ggtgactctaacagtctcca

SEQ ID NO: 7596 - DNA, 20 bp, synthetic construct
  misc_feature 1..20: note = Description of Artificial Sequence: Synthetic oligonucleotide
  misc_feature 1..20: note = Target: FXN; (-) strand; PAM type: NNNNGHTT; PAM sequence: ATCAGATT
  source 1..20: mol_type = other DNA
ggagagggaccagagcagtc

SEQ ID NO: 7597 - DNA, 20 bp, synthetic construct
  misc_feature 1..20: note = Description of Artificial Sequence: Synthetic oligonucleotide
  misc_feature 1..20: note = Target: FXN; (-) strand; PAM type: NNNNGHTT; PAM sequence: GGAAGTTT
  source 1..20: mol_type = other DNA
tttttttaacaggtgagtat

SEQ ID NO: 7598 - DNA, 20 bp, synthetic construct
  misc_feature 1..20: note = Description of Artificial Sequence: Synthetic oligonucleotide
  misc_feature 1..20: note = Target: FXN; (-) strand; PAM type: NNNNGHTT; PAM sequence: TAAAGTTT
  source 1..20: mol_type = other DNA
taaaactctgttaatttgtt

SEQ ID NO: 7599 - DNA, 20 bp, synthetic construct
  misc_feature 1..20: note = Description of Artificial Sequence: Synthetic oligonucleotide
  misc_feature 1..20: note = Target: FXN; (-) strand; PAM type: NNNNGHTT; PAM sequence: ATTTGTTT
  source 1..20: mol_type = other DNA
tgctgaataaaactctgtta

SEQ ID NO: 7600 - DNA, 20 bp, synthetic construct
  misc_feature 1..20: note = Description of Artificial Sequence: Synthetic oligonucleotide
  misc_feature 1..20: note = Target: FXN; (-) strand; PAM type: NNNNGHTT; PAM sequence: TCCCGATT
  source 1..20: mol_type = other DNA
acctattctggttgcagcct

SEQ ID NO: 7601 - DNA, 20 bp, synthetic construct
  misc_feature 1..20: note = Description of Artificial Sequence: Synthetic oligonucleotide
  misc_feature 1..20: note = Target: FXN; (-) strand; PAM type: NNNNGHTT; PAM sequence: CTGGGATT
  source 1..20: mol_type = other DNA
cgcctcggcctcccaaagtg

SEQ ID NO: 7602 - DNA, 20 bp, synthetic construct
  misc_feature 1..20: note = Description of Artificial Sequence: Synthetic oligonucleotide
  misc_feature 1..20: note = Target: FXN; (-) strand; PAM type: NNNNGHTT; PAM sequence: CAGGGTTT
  source 1..20: mol_type = other DNA
ttttgcatttttagtagaga

SEQ ID NO: 7603 - DNA, 20 bp, synthetic construct
  misc_feature 1..20: note = Description of Artificial Sequence: Synthetic oligonucleotide
  misc_feature 1..20: note = Target: FXN; (-) strand; PAM type: NNNNGHTT; PAM sequence: CTAAGTTT
  source 1..20: mol_type = other DNA
gtgcctgccaccacgcccgg

SEQ ID NO: 7604 - DNA, 20 bp, synthetic construct
  misc_feature 1..20: note = Description of Artificial Sequence: Synthetic oligonucleotide
  misc_feature 1..20: note = Target: FXN; (-) strand; PAM type: NNNNGHTT; PAM sequence: GGCTGTTT
  source 1..20: mol_type = other DNA
caccaagctgtaaccaacct

SEQ ID NO: 7605 - DNA, 20 bp, synthetic construct
  misc_feature 1..20: note = Description of Artificial Sequence: Synthetic oligonucleotide
  misc_feature 1..20: note = Target: FXN; (-) strand; PAM type: NNNNGHTT; PAM sequence: CCAAGTTT
  source 1..20: mol_type = other DNA
aaggcggccaactgttcaaa

SEQ ID NO: 7606 - DNA, 20 bp, synthetic construct
  misc_feature 1..20: note = Description of Artificial Sequence: Synthetic oligonucleotide
  misc_feature 1..20: note = Target: FXN; (-) strand; PAM type: NNNNGHTT; PAM sequence: CCGAGTTT
  source 1..20: mol_type = other DNA
atctactcttgtaccaatca

SEQ ID NO: 7607 - DNA, 20 bp, synthetic construct
  misc_feature 1..20: note = Description of Artificial Sequence: Synthetic oligonucleotide
  misc_feature 1..20: note = Target: FXN; (-) strand; PAM type: NNNNGHTT; PAM sequence: AAGGGCTT
  source 1..20: mol_type = other DNA
cctattttgagttcggatct

SEQ ID NO: 7608 - DNA, 20 bp, synthetic construct
  misc_feature 1..20: note = Description of Artificial Sequence: Synthetic oligonucleotide
  misc_feature 1..20: note = Target: FXN; (-) strand; PAM type: NNNNGHTT; PAM sequence: TCCAGCTT
  source 1..20: mol_type = other DNA
ctcagggggctgcagacact

SEQ ID NO: 7609 - DNA, 20 bp, synthetic construct
  misc_feature 1..20: note = Description of Artificial Sequence: Synthetic oligonucleotide
  misc_feature 1..20: note = Target: FXN; (-) strand; PAM type: NNNNGHTT; PAM sequence: TTGGGATT
  source 1..20: mol_type = other DNA
tctgagcaggggtttttaac

SEQ ID NO: 7610 - DNA, 20 bp, synthetic construct
  misc_feature 1..20: note = Description of Artificial Sequence: Synthetic oligonucleotide
  misc_feature 1..20: note = Target: FXN; (-) strand; PAM type: NNNNGHTT; PAM sequence: AGGGGTTT
  source 1..20: mol_type = other DNA
aaaagatgctgcctctgagc

SEQ ID NO: 7611 - DNA, 20 bp, synthetic construct
  misc_feature 1..20: note = Description of Artificial Sequence: Synthetic oligonucleotide
  misc_feature 1..20: note = Target: FXN; (-) strand; PAM type: NNNNGHTT; PAM sequence: CTGGGATT
  source 1..20: mol_type = other DNA
cgccttggcctcccaaagtg

SEQ ID NO: 7612 - DNA, 20 bp, synthetic construct
  misc_feature 1..20: note = Description of Artificial Sequence: Synthetic oligonucleotide
  misc_feature 1..20: note = Target: FXN; (-) strand; PAM type: NNNNGHTT; PAM sequence: CGGGGTTT
  source 1..20: mol_type = other DNA
ttgtatttttttagtagaga

SEQ ID NO: 7613 - DNA, 20 bp, synthetic construct
  misc_feature 1..20: note = Description of Artificial Sequence: Synthetic oligonucleotide
  misc_feature 1..20: note = Target: FXN; (-) strand; PAM type: NNNNGHTT; PAM sequence: CTCAGCTT
  source 1..20: mol_type = other DNA
ggttcacgccattctcctgc

SEQ ID NO: 7614 - DNA, 20 bp, synthetic construct
  misc_feature 1..20: note = Description of Artificial Sequence: Synthetic oligonucleotide
  misc_feature 1..20: note = Target: FXN; (-) strand; PAM type: NNNNGHTT; PAM sequence: AGCAGTTT
  source 1..20: mol_type = other DNA
ggggaatagtcaaaatatgt

SEQ ID NO: 7615 - DNA, 20 bp, synthetic construct
  misc_feature 1..20: note = Description of Artificial Sequence: Synthetic oligonucleotide
  misc_feature 1..20: note = Target: FXN; (-) strand; PAM type: NNNNGHTT; PAM sequence: GAGGGCTT
  source 1..20: mol_type = other DNA
ctacaaatagaccagataaa

SEQ ID NO: 7616 - DNA, 20 bp, synthetic construct
  misc_feature 1..20: note = Description of Artificial Sequence: Synthetic oligonucleotide
  misc_feature 1..20: note = Target: FXN; (-) strand; PAM type: NNNNGHTT; PAM sequence: TAATGCTT
  source 1..20: mol_type = other DNA
attagttcagcagaaattct

SEQ ID NO: 7617 - DNA, 20 bp, synthetic construct
  misc_feature 1..20: note = Description of Artificial Sequence: Synthetic oligonucleotide
  misc_feature 1..20: note = Target: FXN; (-) strand; PAM type: NNNNGHTT; PAM sequence: AATAGATT
  source 1..20: mol_type = other DNA
ccaccagtctgttcactgta

SEQ ID NO: 7618 - DNA, 20 bp, synthetic construct
  misc_feature 1..20: note = Description of Artificial Sequence: Synthetic oligonucleotide
  misc_feature 1..20: note = Target: FXN; (-) strand; PAM type: NNNNGHTT; PAM sequence: GCTTGCTT
  source 1..20: mol_type = other DNA
gcattcagagctgcctgact

SEQ ID NO: 7619 - DNA, 20 bp, synthetic construct
  misc_feature 1..20: note = Description of Artificial Sequence: Synthetic oligonucleotide
  misc_feature 1..20: note = Target: FXN; (-) strand; PAM type: NNNNGHTT; PAM sequence: GACTGCTT
  source 1..20: mol_type = other DNA
ctctgcattcagagctgcct

SEQ ID NO: 7620 - DNA, 20 bp, synthetic construct
  misc_feature 1..20: note = Description of Artificial Sequence: Synthetic oligonucleotide
  misc_feature 1..20: note = Target: FXN; (-) strand; PAM type: NNNNGHTT; PAM sequence: TGGTGCTT
  source 1..20: mol_type = other DNA
ctgtgggtcccattgcctcg

SEQ ID NO: 7621 - DNA, 20 bp, synthetic construct
  misc_feature 1..20: note = Description of Artificial Sequence: Synthetic oligonucleotide
  misc_feature 1..20: note = Target: FXN; (-) strand; PAM type: NNNNGHTT; PAM sequence: GATAGCTT
  source 1..20: mol_type = other DNA
gggagggggaaggggggagg

SEQ ID NO: 7622 - DNA, 20 bp, synthetic construct
  misc_feature 1..20: note = Description of Artificial Sequence: Synthetic oligonucleotide
  misc_feature 1..20: note = Target: FXN; (-) strand; PAM type: NNNNGHTT; PAM sequence: ACTGGATT
  source 1..20: mol_type = other DNA
agctcatccaacaatgatag

SEQ ID NO: 7623 - DNA, 20 bp, synthetic construct
  misc_feature 1..20: note = Description of Artificial Sequence: Synthetic oligonucleotide
  misc_feature 1..20: note = Target: FXN; (-) strand; PAM type: NNNNGHTT; PAM sequence: CAGAGTTT
  source 1..20: mol_type = other DNA
tatttcccactcctctcata

SEQ ID NO: 7624 - DNA, 20 bp, synthetic construct
  misc_feature 1..20: note = Description of Artificial Sequence: Synthetic oligonucleotide
  misc_feature 1..20: note = Target: FXN; (-) strand; PAM type: NNNNGHTT; PAM sequence: AGGAGTTT
  source 1..20: mol_type = other DNA
ttcttaaaactgtataattc

SEQ ID NO: 7625 - DNA, 20 bp, synthetic construct
  misc_feature 1..20: note = Description of Artificial Sequence: Synthetic oligonucleotide
  misc_feature 1..20: note = Target: FXN; (-) strand; PAM type: NNNNGHTT; PAM sequence: AAAAGTTT
  source 1..20: mol_type = other DNA
tctctcaaaaacaaataaat

SEQ ID NO: 7626 - DNA, 20 bp, synthetic construct
  misc_feature 1..20: note = Description of Artificial Sequence: Synthetic oligonucleotide
  misc_feature 1..20: note = Target: FXN; (-) strand; PAM type: NNNNGHTT; PAM sequence: CAGAGATT
  source 1..20: mol_type = other DNA
tgggagaatcgcttgagcct

SEQ ID NO: 7627 - DNA, 20 bp, synthetic construct
  misc_feature 1..20: note = Description of Artificial Sequence: Synthetic oligonucleotide
  misc_feature 1..20: note = Target: FXN; (-) strand; PAM type: NNNNGHTT; PAM sequence: AATCGCTT
  source 1..20: mol_type = other DNA
ttggtaggctgaggtgggag

SEQ ID NO: 7628 - DNA, 20 bp, synthetic construct
  misc_feature 1..20: note = Description of Artificial Sequence: Synthetic oligonucleotide
  misc_feature 1..20: note = Target: FXN; (-) strand; PAM type: NNNNGHTT; PAM sequence: CCTTGTTT
  source 1..20: mol_type = other DNA
gactgggcaacatggtaaaa

SEQ ID NO: 7629 - DNA, 20 bp, synthetic construct
  misc_feature 1..20: note = Description of Artificial Sequence: Synthetic oligonucleotide
  misc_feature 1..20: note = Target: FXN; (-) strand; PAM type: NNNNGHTT; PAM sequence: GATCGCTT
  source 1..20: mol_type = other DNA
tcgggagcccaaggagggag

SEQ ID NO: 7630 - DNA, 20 bp, synthetic construct
  misc_feature 1..20: note = Description of Artificial Sequence: Synthetic oligonucleotide
  misc_feature 1..20: note = Target: FXN; (-) strand; PAM type: NNNNGHTT; PAM sequence: TCATGCTT
  source 1..20: mol_type = other DNA
ctgaggctgcatgtggtgac

SEQ ID NO: 7631 - DNA, 20 bp, synthetic construct
  misc_feature 1..20: note = Description of Artificial Sequence: Synthetic oligonucleotide
  misc_feature 1..20: note = Target: FXN; (-) strand; PAM type: NNNNGHTT; PAM sequence: AAAAGTTT
  source 1..20: mol_type = other DNA
tgactatatttcatttattt

SEQ ID NO: 7632 - DNA, 20 bp, synthetic construct
  misc_feature 1..20: note = Description of Artificial Sequence: Synthetic oligonucleotide
  misc_feature 1..20: note = Target: FXN; (-) strand; PAM type: NNNNGHTT; PAM sequence: TACTGTTT
  source 1..20: mol_type = other DNA
tttttcctgaaacccatttt

SEQ ID NO: 7633 - DNA, 20 bp, synthetic construct
  misc_feature 1..20: note = Description of Artificial Sequence: Synthetic oligonucleotide
  misc_feature 1..20: note = Target: FXN; (-) strand; PAM type: NNNNGHTT; PAM sequence: GTTTGTTT
  source 1..20: mol_type = other DNA
tgggattatacaatacgtaa

SEQ ID NO: 7634 - DNA, 20 bp, synthetic construct
  misc_feature 1..20: note = Description of Artificial Sequence: Synthetic oligonucleotide
  misc_feature 1..20: note = Target: FXN; (-) strand; PAM type: NNNNGHTT; PAM sequence: GTAAGTTT
  source 1..20: mol_type = other DNA
gggctgggattatacaatac

SEQ ID NO: 7635 - DNA, 20 bp, synthetic construct
  misc_feature 1..20: note = Description of Artificial Sequence: Synthetic oligonucleotide
  misc_feature 1..20: note = Target: FXN; (-) strand; PAM type: NNNNGHTT; PAM sequence: CTGGGATT
  source 1..20: mol_type = other DNA
gaaagcattttttaaaaggg

SEQ ID NO: 7636 - DNA, 20 bp, synthetic construct
  misc_feature 1..20: note = Description of Artificial Sequence: Synthetic oligonucleotide
  misc_feature 1..20: note = Target: FXN; (-) strand; PAM type: NNNNGHTT; PAM sequence: GCCAGTTT
  source 1..20: mol_type = other DNA
tgtccttttatgagttgact

SEQ ID NO: 7637 - DNA, 20 bp, synthetic construct
  misc_feature 1..20: note = Description of Artificial Sequence: Synthetic oligonucleotide
  misc_feature 1..20: note = Target: FXN; (-) strand; PAM type: NNNNGHTT; PAM sequence: CTGTGATT
  source 1..20: mol_type = other DNA
atacatttatggtggtgttt

SEQ ID NO: 7638 - DNA, 20 bp, synthetic construct
  misc_feature 1..20: note = Description of Artificial Sequence: Synthetic oligonucleotide
  misc_feature 1..20: note = Target: FXN; (-) strand; PAM type: NNNNGHTT; PAM sequence: TGGTGTTT
  source 1..20: mol_type = other DNA
taaaaattatacatttatgg

SEQ ID NO: 7639 - DNA, 20 bp, synthetic construct
  misc_feature 1..20: note = Description of Artificial Sequence: Synthetic oligonucleotide
  misc_feature 1..20: note = Target: FXN; (-) strand; PAM type: NNNNGHTT; PAM sequence: AGATGTTT
  source 1..20: mol_type = other DNA
tatgattttgactaaaaaaa

SEQ ID NO: 7640 - DNA, 20 bp, synthetic construct
  misc_feature 1..20: note = Description of Artificial Sequence: Synthetic oligonucleotide
  misc_feature 1..20: note = Target: FXN; (-) strand; PAM type: NNNNGHTT; PAM sequence: CTATGATT
  source 1..20: mol_type = other DNA
cacctgtctactttctattt

SEQ ID NO: 7641 - DNA, 20 bp, synthetic construct
  misc_feature 1..20: note = Description of Artificial Sequence: Synthetic oligonucleotide
  misc_feature 1..20: note = Target: FXN; (-) strand; PAM type: NNNNGHTT; PAM sequence: CTGGGATT
  source 1..20: mol_type = other DNA
tacctcggcctcccaaagtg

SEQ ID NO: 7642 - DNA, 20 bp, synthetic construct
  misc_feature 1..20: note = Description of Artificial Sequence: Synthetic oligonucleotide
  misc_feature 1..20: note = Target: FXN; (-) strand; PAM type: NNNNGHTT; PAM sequence: GCTGGTTT
  source 1..20: mol_type = other DNA
ggtctcgctatattgaccag

SEQ ID NO: 7643 - DNA, 20 bp, synthetic construct
  misc_feature 1..20: note = Description of Artificial Sequence: Synthetic oligonucleotide
  misc_feature 1..20: note = Target: FXN; (-) strand; PAM type: NNNNGHTT; PAM sequence: GTTTGTTT
  source 1..20: mol_type = other DNA
tcagctgccagtttttgttt

SEQ ID NO: 7644 - DNA, 20 bp, synthetic construct
  misc_feature 1..20: note = Description of Artificial Sequence: Synthetic oligonucleotide
  misc_feature 1..20: note = Target: FXN; (-) strand; PAM type: NNNNGHTT; PAM sequence: GTTTGTTT
  source 1..20: mol_type = other DNA
ggtatcagctgccagttttt

SEQ ID NO: 7645 - DNA, 20 bp, synthetic construct
  misc_feature 1..20: note = Description of Artificial Sequence: Synthetic oligonucleotide
  misc_feature 1..20: note = Target: FXN; (-) strand; PAM type: NNNNGHTT; PAM sequence: TTTTGTTT
  source 1..20: mol_type = other DNA
ctcaggtatcagctgccagt

SEQ ID NO: 7646 - DNA, 20 bp, synthetic construct
  misc_feature 1..20: note = Description of Artificial Sequence: Synthetic oligonucleotide
  misc_feature 1..20: note = Target: FXN; (-) strand; PAM type: NNNNGHTT; PAM sequence: GCCAGTTT
  source 1..20: mol_type = other DNA
ttcactctcaggtatcagct

SEQ ID NO: 7647 - DNA, 20 bp, synthetic construct
  misc_feature 1..20: note = Description of Artificial Sequence: Synthetic oligonucleotide
  misc_feature 1..20: note = Target: FXN; (-) strand; PAM type: NNNNGHTT; PAM sequence: TCCAGTTT
  source 1..20: mol_type = other DNA
ttggcggtaggattcattat

SEQ ID NO: 7648 - DNA, 20 bp, synthetic construct
  misc_feature 1..20: note = Description of Artificial Sequence: Synthetic oligonucleotide
  misc_feature 1..20: note = Target: FXN; (-) strand; PAM type: NNNNGHTT; PAM sequence: GTAGGATT
  source 1..20: mol_type = other DNA
cttgactacaattgttggcg

SEQ ID NO: 7649 - DNA, 20 bp, synthetic construct
  misc_feature 1..20: note = Description of Artificial Sequence: Synthetic oligonucleotide
  misc_feature 1..20: note = Target: FXN; (-) strand; PAM type: NNNNGHTT; PAM sequence: AATTGTTT
  source 1..20: mol_type = other DNA
ggtgtttggcactttgtgta

SEQ ID NO: 7650 - DNA, 20 bp, synthetic construct
  misc_feature 1..20: note = Description of Artificial Sequence: Synthetic oligonucleotide
  misc_feature 1..20: note = Target: FXN; (-) strand; PAM type: NNNNGHTT; PAM sequence: TGGTGTTT
  source 1..20: mol_type = other DNA
ggttcctactgtgccaggct

SEQ ID NO: 7651 - DNA, 20 bp, synthetic construct
  misc_feature 1..20: note = Description of Artificial Sequence: Synthetic oligonucleotide
  misc_feature 1..20: note = Target: FXN; (-) strand; PAM type: NNNNGHTT; PAM sequence: CCAGGCTT
  source 1..20: mol_type = other DNA
tttactcggttcctactgtg

SEQ ID NO: 7652 - DNA, 20 bp, synthetic construct
  misc_feature 1..20: note = Description of Artificial Sequence: Synthetic oligonucleotide
  misc_feature 1..20: note = Target: FXN; (-) strand; PAM type: NNNNGHTT; PAM sequence: TTCTGATT
  source 1..20: mol_type = other DNA
ttttttaaaataacatcttt

SEQ ID NO: 7653 - DNA, 20 bp, synthetic construct
  misc_feature 1..20: note = Description of Artificial Sequence: Synthetic oligonucleotide
  misc_feature 1..20: note = Target: FXN; (-) strand; PAM type: NNNNGHTT; PAM sequence: GATGGCTT
  source 1..20: mol_type = other DNA
ttgggaggccgaggcaggca

SEQ ID NO: 7654 - DNA, 20 bp, synthetic construct
  misc_feature 1..20: note = Description of Artificial Sequence: Synthetic oligonucleotide
  misc_feature 1..20: note = Target: FXN; (-) strand; PAM type: NNNNGHTT; PAM sequence: GAATGATT
  source 1..20: mol_type = other DNA
ccatccaatcgagaggctct

SEQ ID NO: 7655 - DNA, 20 bp, synthetic construct
  misc_feature 1..20: note = Description of Artificial Sequence: Synthetic oligonucleotide
  misc_feature 1..20: note = Target: FXN; (-) strand; PAM type: NNNNGHTT; PAM sequence: CAAGGCTT
  source 1..20: mol_type = other DNA
aagcttctcagatactcctc

SEQ ID NO: 7656 - DNA, 20 bp, synthetic construct
  misc_feature 1..20: note = Description of Artificial Sequence: Synthetic oligonucleotide
  misc_feature 1..20: note = Target: FXN; (-) strand; PAM type: NNNNGHTT; PAM sequence: ACAAGCTT
  source 1..20: mol_type = other DNA
agactcttcccacgcatcta

SEQ ID NO: 7657 - DNA, 20 bp, synthetic construct
  misc_feature 1..20: note = Description of Artificial Sequence: Synthetic oligonucleotide
  misc_feature 1..20: note = Target: FXN; (-) strand; PAM type: NNNNGHTT; PAM sequence: TGAAGTTT
  source 1..20: mol_type = other DNA
tagaaggcagaaactccaga

SEQ ID NO: 7658 - DNA, 20 bp, synthetic construct
  misc_feature 1..20: note = Description of Artificial Sequence: Synthetic oligonucleotide
  misc_feature 1..20: note = Target: FXN; (-) strand; PAM type: NNNNGHTT; PAM sequence: ATTAGCTT
  source 1..20: mol_type = other DNA
tttgcttgtcttaggagagc

SEQ ID NO: 7659 - DNA, 20 bp, synthetic construct
  misc_feature 1..20: note = Description of Artificial Sequence: Synthetic oligonucleotide
  misc_feature 1..20: note = Target: FXN; (-) strand; PAM type: NNNNGHTT; PAM sequence: CTTTGCTT
  source 1..20: mol_type = other DNA
ggaagtatgcaaaccatctg

SEQ ID NO: 7660 - DNA, 20 bp, synthetic construct
  misc_feature 1..20: note = Description of Artificial Sequence: Synthetic oligonucleotide
  misc_feature 1..20: note = Target: FXN; (-) strand; PAM type: NNNNGHTT; PAM sequence: ATCTGCTT
  source 1..20: mol_type = other DNA
ggtaaggaagtatgcaaacc

SEQ ID NO: 7661 - DNA, 20 bp, synthetic construct
  misc_feature 1..20: note = Description of Artificial Sequence: Synthetic oligonucleotide
  misc_feature 1..20: note = Target: FXN; (-) strand; PAM type: NNNNGHTT; PAM sequence: GCTGGTTT
  source 1..20: mol_type = other DNA
tggtgctggcatctgggact

SEQ ID NO: 7662 - DNA, 20 bp, synthetic construct
  misc_feature 1..20: note = Description of Artificial Sequence: Synthetic oligonucleotide
  misc_feature 1..20: note = Target: FXN; (-) strand; PAM type: NNNNGHTT; PAM sequence: TAGAGCTT
  source 1..20: mol_type = other DNA
cataatgatgttgtatctca

SEQ ID NO: 7663 - DNA, 20 bp, synthetic construct
  misc_feature 1..20: note = Description of Artificial Sequence: Synthetic oligonucleotide
  misc_feature 1..20: note = Target: FXN; (-) strand; PAM type: NNNNGHTT; PAM sequence: ATAGGATT
  source 1..20: mol_type = other DNA
gctttgctttcagaatcaga

SEQ ID NO: 7664 - DNA, 20 bp, synthetic construct
  misc_feature 1..20: note = Description of Artificial Sequence: Synthetic oligonucleotide
  misc_feature 1..20: note = Target: FXN; (-) strand; PAM type: NNNNGHTT; PAM sequence: CTTTGCTT
  source 1..20: mol_type = other DNA
aggagtttgtgtaggaagag

SEQ ID NO: 7665 - DNA, 20 bp, synthetic construct
  misc_feature 1..20: note = Description of Artificial Sequence: Synthetic oligonucleotide
  misc_feature 1..20: note = Target: FXN; (-) strand; PAM type: NNNNGHTT; PAM sequence: AAGAGCTT
  source 1..20: mol_type = other DNA
gaaataggagtttgtgtagg

SEQ ID NO: 7666 - DNA, 20 bp, synthetic construct
  misc_feature 1..20: note = Description of Artificial Sequence: Synthetic oligonucleotide
  misc_feature 1..20: note = Target: FXN; (-) strand; PAM type: NNNNGHTT; PAM sequence: AGGAGTTT
  source 1..20: mol_type = other DNA
gtcttttagtatttagaaat

SEQ ID NO: 7667 - DNA, 20 bp, synthetic construct
  misc_feature 1..20: note = Description of Artificial Sequence: Synthetic oligonucleotide
  misc_feature 1..20: note = Target: FXN; (-) strand; PAM type: NNNNGHTT; PAM sequence: TCATGTTT
  source 1..20: mol_type = other DNA
agcactttgtcatcattgct

SEQ ID NO: 7668 - DNA, 20 bp, synthetic construct
  misc_feature 1..20: note = Description of Artificial Sequence: Synthetic oligonucleotide
  misc_feature 1..20: note = Target: FXN; (-) strand; PAM type: NNNNGHTT; PAM sequence: CATTGCTT
  source 1..20: mol_type = other DNA
aaaagttagcactttgtcat

SEQ ID NO: 7669 - DNA, 20 bp, synthetic construct
  misc_feature 1..20: note = Description of Artificial Sequence: Synthetic oligonucleotide
  misc_feature 1..20: note = Target: FXN; (-) strand; PAM type: NNNNGHTT; PAM sequence: AGGGGATT
  source 1..20: mol_type = other DNA
gacagttaagacaccactct

SEQ ID NO: 7670 - DNA, 20 bp, synthetic construct
  misc_feature 1..20: note = Description of Artificial Sequence: Synthetic oligonucleotide
  misc_feature 1..20: note = Target: FXN; (-) strand; PAM type: NNNNGHTT; PAM sequence: CCCAGTTT
  source 1..20: mol_type = other DNA
cataggttcctagatctcca

SEQ ID NO: 7671 - DNA, 20 bp, synthetic construct
  misc_feature 1..20: note = Description of Artificial Sequence: Synthetic oligonucleotide
  misc_feature 1..20: note = Target: FXN; (-) strand; PAM type: NNNNGHTT; PAM sequence: GTCTGCTT
  source 1..20: mol_type = other DNA
gccagatttgcttgtttggc

SEQ ID NO: 7672 - DNA, 20 bp, synthetic construct
  misc_feature 1..20: note = Description of Artificial Sequence: Synthetic oligonucleotide
  misc_feature 1..20: note = Target: FXN; (-) strand; PAM type: NNNNGHTT; PAM sequence: GCTTGTTT
  source 1..20: mol_type = other DNA
tggagaagatagccagattt

SEQ ID NO: 7673 - DNA, 20 bp, synthetic construct
  misc_feature 1..20: note = Description of Artificial Sequence: Synthetic oligonucleotide
  misc_feature 1..20: note = Target: FXN; (-) strand; PAM type: NNNNGHTT; PAM sequence: ATTTGCTT
  source 1..20: mol_type = other DNA
tggatggagaagatagccag

SEQ ID NO: 7674 - DNA, 20 bp, synthetic construct
  misc_feature 1..20: note = Description of Artificial Sequence: Synthetic oligonucleotide
  misc_feature 1..20: note = Target: FXN; (-) strand; PAM type: NNNNGHTT; PAM sequence: GCCAGATT
  source 1..20: mol_type = other DNA
atacctggatggagaagata

SEQ ID NO: 7675 - DNA, 20 bp, synthetic construct
  misc_feature 1..20: note = Description of Artificial Sequence: Synthetic oligonucleotide
  misc_feature 1..20: note = Target: FXN; (-) strand; PAM type: NNNNGHTT; PAM sequence: TTGGGATT
  source 1..20: mol_type = other DNA
tacctcagcctctcaaagtg

SEQ ID NO: 7676 - DNA, 20 bp, synthetic construct
  misc_feature 1..20: note = Description of Artificial Sequence: Synthetic oligonucleotide
  misc_feature 1..20: note = Target: FXN; (-) strand; PAM type: NNNNGHTT; PAM sequence: CTGGGATT
  source 1..20: mol_type = other DNA
ggccttggcctcccaaagtg

SEQ ID NO: 7677 - DNA, 20 bp, synthetic construct
  misc_feature 1..20: note = Description of Artificial Sequence: Synthetic oligonucleotide
  misc_feature 1..20: note = Target: FXN; (-) strand; PAM type: NNNNGHTT; PAM sequence: TGGGGCTT
  source 1..20: mol_type = other DNA
ttttatatttttagtagagg

SEQ ID NO: 7678 - DNA, 20 bp, synthetic construct
  misc_feature 1..20: note = Description of Artificial Sequence: Synthetic oligonucleotide
  misc_feature 1..20: note = Target: FXN; (-) strand; PAM type: NNNNGHTT; PAM sequence: GCCTGCTT
  source 1..20: mol_type = other DNA
tcagatcttaatatcctgat

SEQ ID NO: 7679 - DNA, 20 bp, synthetic construct
  misc_feature 1..20: note = Description of Artificial Sequence: Synthetic oligonucleotide
  misc_feature 1..20: note = Target: FXN; (-) strand; PAM type: NNNNGHTT; PAM sequence: GCTGGATT
  source 1..20: mol_type = other DNA
aatagaggaaaactgtctag

SEQ ID NO: 7680 - DNA, 20 bp, synthetic construct
  misc_feature 1..20: note = Description of Artificial Sequence: Synthetic oligonucleotide
  misc_feature 1..20: note = Target: FXN; (-) strand; PAM type: NNNNGHTT; PAM sequence: AGTAGCTT
  source 1..20: mol_type = other DNA
tcaaacgctacaaggtcaaa

SEQ ID NO: 7681 - DNA, 20 bp, synthetic construct
  misc_feature 1..20: note = Description of Artificial Sequence: Synthetic oligonucleotide
  misc_feature 1..20: note = Target: FXN; (-) strand; PAM type: NNNNGHTT; PAM sequence: ACTTGCTT
  source 1..20: mol_type = other DNA
caagtagaggtcaaacttta

SEQ ID NO: 7682 - DNA, 20 bp, synthetic construct
  misc_feature 1..20: note = Description of Artificial Sequence: Synthetic oligonucleotide
  misc_feature 1..20: note = Target: FXN; (-) strand; PAM type: NNNNGHTT; PAM sequence: GAGGGATT
  source 1..20: mol_type = other DNA
cacatcaatggaaaaggcag

SEQ ID NO: 7683 - DNA, 20 bp, synthetic construct
  misc_feature 1..20: note = Description of Artificial Sequence: Synthetic oligonucleotide
  misc_feature 1..20: note = Target: FXN; (-) strand; PAM type: NNNNGHTT; PAM sequence: TCTAGATT
  source 1..20: mol_type = other DNA
ccaacacaatcttttattcc

SEQ ID NO: 7684 - DNA, 20 bp, synthetic construct
  misc_feature 1..20: note = Description of Artificial Sequence: Synthetic oligonucleotide
  misc_feature 1..20: note = Target: FXN; (-) strand; PAM type: NNNNGHTT; PAM sequence: TCAGGCTT
  source 1..20: mol_type = other DNA
atgtctctccctgcatgttc

SEQ ID NO: 7685 - DNA, 20 bp, synthetic construct
  misc_feature 1..20: note = Description of Artificial Sequence: Synthetic oligonucleotide
  misc_feature 1..20: note = Target: FXN; (-) strand; PAM type: NNNNGHTT; PAM sequence: GAACGTTT
  source 1..20: mol_type = other DNA
taatgaatgactggatctga

SEQ ID NO: 7686 - DNA, 20 bp, synthetic construct
  misc_feature 1..20: note = Description of Artificial Sequence: Synthetic oligonucleotide
  misc_feature 1..20: note = Target: FXN; (-) strand; PAM type: NNNNGHTT; PAM sequence: GCTAGTTT
  source 1..20: mol_type = other DNA
agtctttcaaagaattctat

SEQ ID NO: 7687 - DNA, 20 bp, synthetic construct
  misc_feature 1..20: note = Description of Artificial Sequence: Synthetic oligonucleotide
  misc_feature 1..20: note = Target: FXN; (-) strand; PAM type: NNNNGHTT; PAM sequence: TGCTGTTT
  source 1..20: mol_type = other DNA
agaatgacagtgatttctag

SEQ ID NO: 7688 - DNA, 20 bp, synthetic construct
  misc_feature 1..20: note = Description of Artificial Sequence: Synthetic oligonucleotide
  misc_feature 1..20: note = Target: FXN; (-) strand; PAM type: NNNNGHTT; PAM sequence: CAGTGATT
  source 1..20: mol_type = other DNA
ttagggccttcctagaatga

SEQ ID NO: 7689 - DNA, 20 bp, synthetic construct
  misc_feature 1..20: note = Description of Artificial Sequence: Synthetic oligonucleotide
  misc_feature 1..20: note = Target: FXN; (-) strand; PAM type: NNNNGHTT; PAM sequence: GGACGTTT
  source 1..20: mol_type = other DNA
agtgtgtccaaatacgatat

SEQ ID NO: 7690 - DNA, 20 bp, synthetic construct
  misc_feature 1..20: note = Description of Artificial Sequence: Synthetic oligonucleotide
  misc_feature 1..20: note = Target: FXN; (-) strand; PAM type: NNNNGHTT; PAM sequence: CCATGCTT
  source 1..20: mol_type = other DNA
cagcagatctttccaaattc

SEQ ID NO: 7691 - DNA, 20 bp, synthetic construct
  misc_feature 1..20: note = Description of Artificial Sequence: Synthetic oligonucleotide
  misc_feature 1..20: note = Target: FXN; (-) strand; PAM type: NNNNGHTT; PAM sequence: GCCCGCTT
  source 1..20: mol_type = other DNA
actgagagcttgtcctcagg

SEQ ID NO: 7692 - DNA, 20 bp, synthetic construct
  misc_feature 1..20: note = Description of Artificial Sequence: Synthetic oligonucleotide
  misc_feature 1..20: note = Target: FXN; (-) strand; PAM type: NNNNGHTT; PAM sequence: GAGAGCTT
  source 1..20: mol_type = other DNA
ccacttcccacagaagcact

SEQ ID NO: 7693 - DNA, 20 bp, synthetic construct
  misc_feature 1..20: note = Description of Artificial Sequence: Synthetic oligonucleotide
  misc_feature 1..20: note = Target: FXN; (-) strand; PAM type: NNNNGHTT; PAM sequence: AGGGGTTT
  source 1..20: mol_type = other DNA
acaacctcctgctcctctac

SEQ ID NO: 7694 - DNA, 20 bp, synthetic construct
  misc_feature 1..20: note = Description of Artificial Sequence: Synthetic oligonucleotide
  misc_feature 1..20: note = Target: FXN; (-) strand; PAM type: NNNNGHTT; PAM sequence: AACAGCTT
  source 1..20: mol_type = other DNA
tgaggctttgatattgacac

SEQ ID NO: 7695 - DNA, 20 bp, synthetic construct
  misc_feature 1..20: note = Description of Artificial Sequence: Synthetic oligonucleotide
  misc_feature 1..20: note = Target: FXN; (-) strand; PAM type: NNNNGHTT; PAM sequence: TGAGGCTT
  source 1..20: mol_type = other DNA
tgttgttgttgttgttgttt

SEQ ID NO: 7696 - DNA, 20 bp, synthetic construct
  misc_feature 1..20: note = Description of Artificial Sequence: Synthetic oligonucleotide
  misc_feature 1..20: note = Target: FXN; (-) strand; PAM type: NNNNGHTT; PAM sequence: TGTTGTTT
  source 1..20: mol_type = other DNA
catgtttttgttgttgttgt

SEQ ID NO: 7697 - DNA, 20 bp, synthetic construct
  misc_feature 1..20: note = Description of Artificial Sequence: Synthetic oligonucleotide
  misc_feature 1..20: note = Target: FXN; (-) strand; PAM type: NNNNGHTT; PAM sequence: TCATGTTT
  source 1..20: mol_type = other DNA
gatctttattgttgataatt

SEQ ID NO: 7698 - DNA, 20 bp, synthetic construct
  misc_feature 1..20: note = Description of Artificial Sequence: Synthetic oligonucleotide
  misc_feature 1..20: note = Target: FXN; (-) strand; PAM type: NNNNGHTT; PAM sequence: TCTTGCTT
  source 1..20: mol_type = other DNA
agtaagtgggtaaagaccct

SEQ ID NO: 7699 - DNA, 20 bp, synthetic construct
  misc_feature 1..20: note = Description of Artificial Sequence: Synthetic oligonucleotide
  misc_feature 1..20: note = Target: FXN; (-) strand; PAM type: NNNNGHTT; PAM sequence: CCCTGTTT
  source 1..20: mol_type = other DNA
agaggctaagtcattttggg

SEQ ID NO: 7700 - DNA, 20 bp, synthetic construct
  misc_feature 1..20: note = Description of Artificial Sequence: Synthetic oligonucleotide
  misc_feature 1..20: note = Target: FXN; (-) strand; PAM type: NNNNGHTT; PAM sequence: CTGTGTTT
  source 1..20: mol_type = other DNA
tgagctccttgaagatggga

SEQ ID NO: 7701 - DNA, 20 bp, synthetic construct
  misc_feature 1..20: note = Description of Artificial Sequence: Synthetic oligonucleotide
  misc_feature 1..20: note = Target: FXN; (-) strand; PAM type: NNNNGHTT; PAM sequence: GCTAGATT
  source 1..20: mol_type = other DNA
acaaagagtctgtctccctt

SEQ ID NO: 7702 - DNA, 20 bp, synthetic construct
  misc_feature 1..20: note = Description of Artificial Sequence: Synthetic oligonucleotide
  misc_feature 1..20: note = Target: FXN; (-) strand; PAM type: NNNNGHTT; PAM sequence: TCAAGCTT
  source 1..20: mol_type = other DNA
tctgaggctcgttaccaatt

SEQ ID NO: 7703 - DNA, 20 bp, synthetic construct
  misc_feature 1..20: note = Description of Artificial Sequence: Synthetic oligonucleotide
  misc_feature 1..20: note = Target: FXN; (-) strand; PAM type: NNNNGHTT; PAM sequence: CCCTGATT
  source 1..20: mol_type = other DNA
catgttctagaaaattgtgt

SEQ ID NO: 7704 - DNA, 20 bp, synthetic construct
  misc_feature 1..20: note = Description of Artificial Sequence: Synthetic oligonucleotide
  misc_feature 1..20: note = Target: FXN; (-) strand; PAM type: NNNNGHTT; PAM sequence: CTAAGATT
  source 1..20: mol_type = other DNA
taggttccttggcactagtc

SEQ ID NO: 7705 - DNA, 20 bp, synthetic construct
  misc_feature 1..20: note = Description of Artificial Sequence: Synthetic oligonucleotide
  misc_feature 1..20: note = Target: FXN; (-) strand; PAM type: NNNNGHTT; PAM sequence: CTCAGCTT
  source 1..20: mol_type = other DNA
cttgggccgattctcccctt

SEQ ID NO: 7706 - DNA, 20 bp, synthetic construct
  misc_feature 1..20: note = Description of Artificial Sequence: Synthetic oligonucleotide
  misc_feature 1..20: note = Target: FXN; (-) strand; PAM type: NNNNGHTT; PAM sequence: GGCCGATT
  source 1..20: mol_type = other DNA
tttctgtggatctcaccttg

SEQ ID NO: 7707 - DNA, 20 bp, synthetic construct
  misc_feature 1..20: note = Description of Artificial Sequence: Synthetic oligonucleotide
  misc_feature 1..20: note = Target: FXN; (-) strand; PAM type: NNNNGHTT; PAM sequence: GAGGGTTT
  source 1..20: mol_type = other DNA
tcatttggaaccctcgaaca

SEQ ID NO: 7708 - DNA, 20 bp, synthetic construct
  misc_feature 1..20: note = Description of Artificial Sequence: Synthetic oligonucleotide
  misc_feature 1..20: note = Target: FXN; (-) strand; PAM type: NNNNGHTT; PAM sequence: TCATGCTT
  source 1..20: mol_type = other DNA
aagttcaggaggcctgcttt

SEQ ID NO: 7709 - DNA, 20 bp, synthetic construct
  misc_feature 1..20: note = Description of Artificial Sequence: Synthetic oligonucleotide
  misc_feature 1..20: note = Target: FXN; (-) strand; PAM type: NNNNGHTT; PAM sequence: GCCTGCTT
  source 1..20: mol_type = other DNA
cactcggggaagttcaggag

SEQ ID NO: 7710 - DNA, 20 bp, synthetic construct
  misc_feature 1..20: note = Description of Artificial Sequence: Synthetic oligonucleotide
  misc_feature 1..20: note = Target: FXN; (-) strand; PAM type: NNNNGHTT; PAM sequence: TGCAGTTT
  source 1..20: mol_type = other DNA
gtgccgtcattcagatagtc

SEQ ID NO: 7711 - DNA, 20 bp, synthetic construct
  misc_feature 1..20: note = Description of Artificial Sequence: Synthetic oligonucleotide
  misc_feature 1..20: note = Target: FXN; (-) strand; PAM type: NNNNGHTT; PAM sequence: TGCGGTTT
  source 1..20: mol_type = other DNA
atttcttggtcaggcagctc

SEQ ID NO: 7712 - DNA, 20 bp, synthetic construct
  misc_feature 1..20: note = Description of Artificial Sequence: Synthetic oligonucleotide
  misc_feature 1..20: note = Target: FXN; (-) strand; PAM type: NNNNGHTT; PAM sequence: CATTGCTT
  source 1..20: mol_type = other DNA
ccttcttcttcgcctgcaag

SEQ ID NO: 7713 - DNA, 20 bp, synthetic construct
  misc_feature 1..20: note = Description of Artificial Sequence: Synthetic oligonucleotide
  misc_feature 1..20: note = Target: FXN; (-) strand; PAM type: NNNNGHTT; PAM sequence: CTGGGATT
  source 1..20: mol_type = other DNA
tgccttggcctcccaaagtg

SEQ ID NO: 7714 - DNA, 20 bp, synthetic construct
  misc_feature 1..20: note = Description of Artificial Sequence: Synthetic oligonucleotide
  misc_feature 1..20: note = Target: FXN; (-) strand; PAM type: NNNNGHTT; PAM sequence: CAGGGTTT
  source 1..20: mol_type = other DNA
ttttgtatttttagtagaga

SEQ ID NO: 7715 - DNA, 20 bp, synthetic construct
  misc_feature 1..20: note = Description of Artificial Sequence: Synthetic oligonucleotide
  misc_feature 1..20: note = Target: FXN; (-) strand; PAM type: NNNNGHTT; PAM sequence: CTGGGATT
  source 1..20: mol_type = other DNA
tgtctcagtctcccaagcag

SEQ ID NO: 7716 - DNA, 20 bp, synthetic construct
  misc_feature 1..20: note = Description of Artificial Sequence: Synthetic oligonucleotide
  misc_feature 1..20: note = Target: FXN; (-) strand; PAM type: NNNNGHTT; PAM sequence: GCACGATT
  source 1..20: mol_type = other DNA
gcccaggatggagtgctgtg

SEQ ID NO: 7717 - DNA, 20 bp, synthetic construct
  misc_feature 1..20: note = Description of Artificial Sequence: Synthetic oligonucleotide
  misc_feature 1..20: note = Target: FXN; (-) strand; PAM type: NNNNGHTT; PAM sequence: GCCTGTTT
  source 1..20: mol_type = other DNA
gcttcactccaacattcatg

SEQ ID NO: 7718 - DNA, 20 bp, synthetic construct
  misc_feature 1..20: note = Description of Artificial Sequence: Synthetic oligonucleotide
  misc_feature 1..20: note = Target: FXN; (-) strand; PAM type: NNNNGHTT; PAM sequence: AGTTGCTT
  source 1..20: mol_type = other DNA
ccgcttagcacgaggaggcc

SEQ ID NO: 7719 - DNA, 20 bp, synthetic construct
  misc_feature 1..20: note = Description of Artificial Sequence: Synthetic oligonucleotide
  misc_feature 1..20: note = Target: FXN; (-) strand; PAM type: NNNNGHTT; PAM sequence: AGCCGCTT
  source 1..20: mol_type = other DNA
gagtggaaagaactcacagt

SEQ ID NO: 7720 - DNA, 20 bp, synthetic construct
  misc_feature 1..20: note = Description of Artificial Sequence: Synthetic oligonucleotide
  misc_feature 1..20: note = Target: FXN; (-) strand; PAM type: NNNNGHTT; PAM sequence: TCTGGTTT
  source 1..20: mol_type = other DNA
gaagcggggagaccaccatg

SEQ ID NO: 7721 - DNA, 20 bp, synthetic construct
  misc_feature 1..20: note = Description of Artificial Sequence: Synthetic oligonucleotide
  misc_feature 1..20: note = Target: FXN; (-) strand; PAM type: NNNNGHTT; PAM sequence: TTTGGATT
  source 1..20: mol_type = other DNA
ctctccaagctctttactcc

SEQ ID NO: 7722 - DNA, 20 bp, synthetic construct
  misc_feature 1..20: note = Description of Artificial Sequence: Synthetic oligonucleotide
  misc_feature 1..20: note = Target: FXN; (-) strand; PAM type: NNNNGHTT; PAM sequence: TCACGTTT
  source 1..20: mol_type = other DNA
ggactcccgctatggcctca

SEQ ID NO: 7723 - DNA, 20 bp, synthetic construct
  misc_feature 1..20: note = Description of Artificial Sequence: Synthetic oligonucleotide
  misc_feature 1..20: note = Target: FXN; (-) strand; PAM type: NNNNGHTT; PAM sequence: CCTTGCTT
  source 1..20: mol_type = other DNA
gtggttcaagttttcatgca

SEQ ID NO: 7724 - DNA, 20 bp, synthetic construct
  misc_feature 1..20: note = Description of Artificial Sequence: Synthetic oligonucleotide
  misc_feature 1..20: note = Target: FXN; (-) strand; PAM type: NNNNGHTT; PAM sequence: TCAAGTTT
  source 1..20: mol_type = other DNA
atgggtgtgacacatgtggt

SEQ ID NO: 7725 - DNA, 20 bp, synthetic construct
  misc_feature 1..20: note = Description of Artificial Sequence: Synthetic oligonucleotide
  misc_feature 1..20: note = Target: FXN; (-) strand; PAM type: NNNNGHTT; PAM sequence: CCAGGTTT
  source 1..20: mol_type = other DNA
gtctttcttcaattcctggg

SEQ ID NO: 7726 - DNA, 20 bp, synthetic construct
  misc_feature 1..20: note = Description of Artificial Sequence: Synthetic oligonucleotide
  misc_feature 1..20: note = Target: FXN; (-) strand; PAM type: NNNNGHTT; PAM sequence: CCGTGCTT
  source 1..20: mol_type = other DNA
aggattacaggtgtgagcta

SEQ ID NO: 7727 - DNA, 20 bp, synthetic construct
  misc_feature 1..20: note = Description of Artificial Sequence: Synthetic oligonucleotide
  misc_feature 1..20: note = Target: FXN; (-) strand; PAM type: NNNNGHTT; PAM sequence: CTAGGATT
  source 1..20: mol_type = other DNA
tgcgtcagcttcccaaagtg

SEQ ID NO: 7728 - DNA, 20 bp, synthetic construct
  misc_feature 1..20: note = Description of Artificial Sequence: Synthetic oligonucleotide
  misc_feature 1..20: note = Target: FXN; (-) strand; PAM type: NNNNGHTT; PAM sequence: GTCAGCTT
  source 1..20: mol_type = other DNA
agctcaagccatctgcctgc

SEQ ID NO: 7729 - DNA, 20 bp, synthetic construct
  misc_feature 1..20: note = Description of Artificial Sequence: Synthetic oligonucleotide
  misc_feature 1..20: note = Target: FXN; (-) strand; PAM type: NNNNGHTT; PAM sequence: CGGGGTTT
  source 1..20: mol_type = other DNA
ttttgtatttttggtagaga

SEQ ID NO: 7730 - DNA, 20 bp, synthetic construct
  misc_feature 1..20: note = Description of Artificial Sequence: Synthetic oligonucleotide
  misc_feature 1..20: note = Target: FXN; (-) strand; PAM type: NNNNGHTT; PAM sequence: GGCCGTTT
  source 1..20: mol_type = other DNA
gcggccctccagccttcctg

SEQ ID NO: 7731 - DNA, 20 bp, synthetic construct
  misc_feature 1..20: note = Description of Artificial Sequence: Synthetic oligonucleotide
  misc_feature 1..20: note = Target: FXN; (-) strand; PAM type: NNNNGHTT; PAM sequence: GCTGGTTT
  source 1..20: mol_type = other DNA
ggaacttggtctcatggtca

SEQ ID NO: 7732 - DNA, 20 bp, synthetic construct
  misc_feature 1..20: note = Description of Artificial Sequence: Synthetic oligonucleotide
  misc_feature 1..20: note = Target: FXN; (-) strand; PAM type: NNNNGHTT; PAM sequence: TGGTGTTT
  source 1..20: mol_type = other DNA
ttaaaggcagcagcactggc

SEQ ID NO: 7733 - DNA, 20 bp, synthetic construct
  misc_feature 1..20: note = Description of Artificial Sequence: Synthetic oligonucleotide
  misc_feature 1..20: note = Target: FXN; (-) strand; PAM type: NNNNGHTT; PAM sequence: AAGTGCTT
  source 1..20: mol_type = other DNA
attaacaagagatcagtcaa

SEQ ID NO: 7734 - DNA, 20 bp, synthetic construct
  misc_feature 1..20: note = Description of Artificial Sequence: Synthetic oligonucleotide
  misc_feature 1..20: note = Target: FXN; (-) strand; PAM type: NNNNGHTT; PAM sequence: ACGAGTTT
  source 1..20: mol_type = other DNA
tgggaggattgcttgaagcc

SEQ ID NO: 7735 - DNA, 20 bp, synthetic construct
  misc_feature 1..20: note = Description of Artificial Sequence: Synthetic oligonucleotide
  misc_feature 1..20: note = Target: FXN; (-) strand; PAM type: NNNNGHTT; PAM sequence: GATTGCTT
  source 1..20: mol_type = other DNA
ttgggaggctgatgtgggag

SEQ ID NO: 7736 - DNA, 20 bp, synthetic construct
  misc_feature 1..20: note = Description of Artificial Sequence: Synthetic oligonucleotide
  misc_feature 1..20: note = Target: FXN; (-) strand; PAM type: NNNNGHTT; PAM sequence: GGAGGATT
  source 1..20: mol_type = other DNA
cactttgggaggctgatgtg

SEQ ID NO: 7737 - DNA, 20 bp, synthetic construct
  misc_feature 1..20: note = Description of Artificial Sequence: Synthetic oligonucleotide
  misc_feature 1..20: note = Target: FXN; (-) strand; PAM type: NNNNGHTT; PAM sequence: TGCTGATT
  source 1..20: mol_type = other DNA
cgcaaggtgggaggtaagac

SEQ ID NO: 7738 - DNA, 20 bp, synthetic construct
  misc_feature 1..20: note = Description of Artificial Sequence: Synthetic oligonucleotide
  misc_feature 1..20: note = Target: FXN; (-) strand; PAM type: NNNNGHTT; PAM sequence: TGGGGCTT
  source 1..20: mol_type = other DNA
ctgcattatcaaccaaatgc

SEQ ID NO: 7739 - DNA, 20 bp, synthetic construct
  misc_feature 1..20: note = Description of Artificial Sequence: Synthetic oligonucleotide
  misc_feature 1..20: note = Target: FXN; (-) strand; PAM type: NNNNGHTT; PAM sequence: CAAGGATT
  source 1..20: mol_type = other DNA
agcttgggcaataaaagtat

SEQ ID NO: 7740 - DNA, 20 bp, synthetic construct
  misc_feature 1..20: note = Description of Artificial Sequence: Synthetic oligonucleotide
  misc_feature 1..20: note = Target: FXN; (-) strand; PAM type: NNNNGHTT; PAM sequence: GGAAGCTT
  source 1..20: mol_type = other DNA
aggatgaggtcaccaggaag

SEQ ID NO: 7741 - DNA, 20 bp, synthetic construct
  misc_feature 1..20: note = Description of Artificial Sequence: Synthetic oligonucleotide
  misc_feature 1..20: note = Target: FXN; (-) strand; PAM type: NNNNGHTT; PAM sequence: GAGGGCTT
  source 1..20: mol_type = other DNA
agtctgcctgagcactcaag

SEQ ID NO: 7742 - DNA, 20 bp, synthetic construct
  misc_feature 1..20: note = Description of Artificial Sequence: Synthetic oligonucleotide
  misc_feature 1..20: note = Target: FXN; (-) strand; PAM type: NNNNGHTT; PAM sequence: GGATGATT
  source 1..20: mol_type = other DNA
ccacttcctcatggcctcat

SEQ ID NO: 7743 - DNA, 20 bp, synthetic construct
  misc_feature 1..20: note = Description of Artificial Sequence: Synthetic oligonucleotide
  misc_feature 1..20: note = Target: FXN; (-) strand; PAM type: NNNNGHTT; PAM sequence: GCTGGCTT
  source 1..20: mol_type = other DNA
ttcgtgtggacagatcggag

SEQ ID NO: 7744 - DNA, 20 bp, synthetic construct
  misc_feature 1..20: note = Description of Artificial Sequence: Synthetic oligonucleotide
  misc_feature 1..20: note = Target: FXN; (-) strand; PAM type: NNNNGHTT; PAM sequence: CGTTGCTT
  source 1..20: mol_type = other DNA
agtgaataatggcacatgca

SEQ ID NO: 7745 - DNA, 20 bp, synthetic construct
  misc_feature 1..20: note = Description of Artificial Sequence: Synthetic oligonucleotide
  misc_feature 1..20: note = Target: FXN; (-) strand; PAM type: NNNNGHTT; PAM sequence: TTTTGTTT
  source 1..20: mol_type = other DNA
ttttatttgtatcatttttg

SEQ ID NO: 7746 - DNA, 20 bp, synthetic construct
  misc_feature 1..20: note = Description of Artificial Sequence: Synthetic oligonucleotide
  misc_feature 1..20: note = Target: FXN; (-) strand; PAM type: NNNNGHTT; PAM sequence: TTTTGTTT
  source 1..20: mol_type = other DNA
ttggtttttatttgtatcat

SEQ ID NO: 7747 - DNA, 20 bp, synthetic construct
  misc_feature 1..20: note = Description of Artificial Sequence: Synthetic oligonucleotide
  misc_feature 1..20: note = Target: FXN; (-) strand; PAM type: NNNNGHTT; PAM sequence: ATTGGTTT
  source 1..20: mol_type = other DNA
atgctgttaatagttgttat

SEQ ID NO: 7748 - DNA, 20 bp, synthetic construct
  misc_feature 1..20: note = Description of Artificial Sequence: Synthetic oligonucleotide
  misc_feature 1..20: note = Target: FXN; (-) strand; PAM type: NNNNGHTT; PAM sequence: TCCAGATT
  source 1..20: mol_type = other DNA
tctgtatgctttaagtcatc

SEQ ID NO: 7749 - DNA, 20 bp, synthetic construct
  misc_feature 1..20: note = Description of Artificial Sequence: Synthetic oligonucleotide
  misc_feature 1..20: note = Target: FXN; (-) strand; PAM type: NNNNGHTT; PAM sequence: GTATGCTT
  source 1..20: mol_type = other DNA
taacctaggcacatccttct

SEQ ID NO: 7750 - DNA, 20 bp, synthetic construct
  misc_feature 1..20: note = Description of Artificial Sequence: Synthetic oligonucleotide
  misc_feature 1..20: note = Target: FXN; (-) strand; PAM type: NNNNGHTT; PAM sequence: CCTAGCTT
  source 1..20: mol_type = other DNA
ttgtgcaaccactacctctg

SEQ ID NO: 7751 - DNA, 20 bp, synthetic construct
  misc_feature 1..20: note = Description of Artificial Sequence: Synthetic oligonucleotide
  misc_feature 1..20: note = Target: FXN; (-) strand; PAM type: NNNNGHTT; PAM sequence: CAGTGTTT
  source 1..20: mol_type = other DNA
tgatacctgctatgctggag

SEQ ID NO: 7752 - DNA, 20 bp, synthetic construct
  misc_feature 1..20: note = Description of Artificial Sequence: Synthetic oligonucleotide
  misc_feature 1..20: note = Target: FXN; (-) strand; PAM type: NNNNGHTT; PAM sequence: TCCAGCTT
  source 1..20: mol_type = other DNA
ccaggtatcacactttgatc

SEQ ID NO: 7753 - DNA, 20 bp, synthetic construct
  misc_feature 1..20: note = Description of Artificial Sequence: Synthetic oligonucleotide
  misc_feature 1..20: note = Target: FXN; (-) strand; PAM type: NNNNGHTT; PAM sequence: GAATGATT
  source 1..20: mol_type = other DNA
atcttctggaacaattccaa

SEQ ID NO: 7754 - DNA, 20 bp, synthetic construct
  misc_feature 1..20: note = Description of Artificial Sequence: Synthetic oligonucleotide
  misc_feature 1..20: note = Target: FXN; (-) strand; PAM type: NNNNGHTT; PAM sequence: CACTGATT
  source 1..20: mol_type = other DNA
gcacagcccttcagatgaac

SEQ ID NO: 7755 - DNA, 20 bp, synthetic construct
  misc_feature 1..20: note = Description of Artificial Sequence: Synthetic oligonucleotide
  misc_feature 1..20: note = Target: FXN; (-) strand; PAM type: NNNNGHTT; PAM sequence: TAACGCTT
  source 1..20: mol_type = other DNA
agtttttcccagtccagtca

SEQ ID NO: 7756 - DNA, 20 bp, synthetic construct
  misc_feature 1..20: note = Description of Artificial Sequence: Synthetic oligonucleotide
  misc_feature 1..20: note = Target: FXN; (-) strand; PAM type: NNNNGHTT; PAM sequence: CCCAGTTT
  source 1..20: mol_type = other DNA
cacgccgtcgtgggagtaca

SEQ ID NO: 7757 - DNA, 20 bp, synthetic construct
  misc_feature 1..20: note = Description of Artificial Sequence: Synthetic oligonucleotide
  misc_feature 1..20: note = Target: FXN; (-) strand; PAM type: NNNNGHTT; PAM sequence: TAAGGCTT
  source 1..20: mol_type = other DNA
gacaagtccagtttggtttt

SEQ ID NO: 7758 - DNA, 20 bp, synthetic construct
  misc_feature 1..20: note = Description of Artificial Sequence: Synthetic oligonucleotide
  misc_feature 1..20: note = Target: FXN; (-) strand; PAM type: NNNNGHTT; PAM sequence: TTTGGTTT
  source 1..20: mol_type = other DNA
gccaaggaagacaagtccag

SEQ ID NO: 7759 - DNA, 20 bp, synthetic construct
  misc_feature 1..20: note = Description of Artificial Sequence: Synthetic oligonucleotide
  misc_feature 1..20: note = Target: FXN; (-) strand; PAM type: NNNNGHTT; PAM sequence: TCCAGTTT
  source 1..20: mol_type = other DNA
aataggccaaggaagacaag

SEQ ID NO: 7760 - DNA, 20 bp, synthetic construct
  misc_feature 1..20: note = Description of Artificial Sequence: Synthetic oligonucleotide
  misc_feature 1..20: note = Target: FXN; (-) strand; PAM type: NNNNGHTT; PAM sequence: GATAGCTT
  source 1..20: mol_type = other DNA
tgaagctggggtcttggcct

SEQ ID NO: 7761 - DNA, 20 bp, synthetic construct
  misc_feature 1..20: note = Description of Artificial Sequence: Synthetic oligonucleotide
  misc_feature 1..20: note = Target: FXN; (-) strand; PAM type: NNNNGHTT; PAM sequence: TTTTGCTT
  source 1..20: mol_type = other DNA
ggaatttttccttcttatta

SEQ ID NO: 7762 - DNA, 20 bp, synthetic construct
  misc_feature 1..20: note = Description of Artificial Sequence: Synthetic oligonucleotide
  misc_feature 1..20: note = Target: FXN; (-) strand; PAM type: NNNNGHTT; PAM sequence: AAGTGCTT
  source 1..20: mol_type = other DNA
ttcaatgctaaagagctcag

SEQ ID NO: 7763 - DNA, 20 bp, synthetic construct
  misc_feature 1..20: note = Description of Artificial Sequence: Synthetic oligonucleotide
  misc_feature 1..20: note = Target: FXN; (-) strand; PAM type: NNNNGHTT; PAM sequence: AGTTGCTT
  source 1..20: mol_type = other DNA
agaaatgatcttcccgtgtg

SEQ ID NO: 7764 - DNA, 20 bp, synthetic construct
  misc_feature 1..20: note = Description of Artificial Sequence: Synthetic oligonucleotide
  misc_feature 1..20: note = Target: FXN; (-) strand; PAM type: NNNNGHTT; PAM sequence: AGCTGATT
  source 1..20: mol_type = other DNA
attttttgcattcttgtagc

SEQ ID NO: 7765 - DNA, 20 bp, synthetic construct
  misc_feature 1..20: note = Description of Artificial Sequence: Synthetic oligonucleotide
  misc_feature 1..20: note = Target: FXN; (-) strand; PAM type: NNNNGHTT; PAM sequence: GGAAGATT
  source 1..20: mol_type = other DNA
tttcctcttttcttgtcttt

SEQ ID NO: 7766 - DNA, 20 bp, synthetic construct
  misc_feature 1..20: note = Description of Artificial Sequence: Synthetic oligonucleotide
  misc_feature 1..20: note = Target: FXN; (-) strand; PAM type: NNNNGHTT; PAM sequence: AACGGCTT
  source 1..20: mol_type = other DNA
tacatcactcagctcatgaa

SEQ ID NO: 7767 - DNA, 20 bp, synthetic construct
  misc_feature 1..20: note = Description of Artificial Sequence: Synthetic oligonucleotide
  misc_feature 1..20: note = Target: FXN; (-) strand; PAM type: NNNNGHTT; PAM sequence: TTTTGTTT
  source 1..20: mol_type = other DNA
gcacctcctcagctccatga

SEQ ID NO: 7768 - DNA, 20 bp, synthetic construct
  misc_feature 1..20: note = Description of Artificial Sequence: Synthetic oligonucleotide
  misc_feature 1..20: note = Target: FXN; (-) strand; PAM type: NNNNGHTT; PAM sequence: CCATGATT
  source 1..20: mol_type = other DNA
tacaaggcacctcctcagct

SEQ ID NO: 7769 - DNA, 20 bp, synthetic construct
  misc_feature 1..20: note = Description of Artificial Sequence: Synthetic oligonucleotide
  misc_feature 1..20: note = Target: FXN; (-) strand; PAM type: NNNNGHTT; PAM sequence: TCATGTTT
  source 1..20: mol_type = other DNA
tccttcctttatctgcccct

SEQ ID NO: 7770 - DNA, 20 bp, synthetic construct
  misc_feature 1..20: note = Description of Artificial Sequence: Synthetic oligonucleotide
  misc_feature 1..20: note = Target: FXN; (-) strand; PAM type: NNNNGHTT; PAM sequence: GGTTGCTT
  source 1..20: mol_type = other DNA
gaattagaactagcctgtta

SEQ ID NO: 7771 - DNA, 20 bp, synthetic construct
  misc_feature 1..20: note = Description of Artificial Sequence: Synthetic oligonucleotide
  misc_feature 1..20: note = Target: FXN; (-) strand; PAM type: NNNNGHTT; PAM sequence: TATAGCTT
  source 1..20: mol_type = other DNA
accaataacaatgtttccta

SEQ ID NO: 7772 - DNA, 20 bp, synthetic construct
  misc_feature 1..20: note = Description of Artificial Sequence: Synthetic oligonucleotide
  misc_feature 1..20: note = Target: FXN; (-) strand; PAM type: NNNNGHTT; PAM sequence: CAATGTTT
  source 1..20: mol_type = other DNA
cgatagggcaacaccaataa

SEQ ID NO: 7773 - DNA, 20 bp, synthetic construct
  misc_feature 1..20: note = Description of Artificial Sequence: Synthetic oligonucleotide
  misc_feature 1..20: note = Target: FXN; (-) strand; PAM type: NNNNGHTT; PAM sequence: CTGGGATT
  source 1..20: mol_type = other DNA
caccttggcctccaaaagtg

SEQ ID NO: 7774 - DNA, 20 bp, synthetic construct
  misc_feature 1..20: note = Description of Artificial Sequence: Synthetic oligonucleotide
  misc_feature 1..20: note = Target: FXN; (-) strand; PAM type: NNNNGHTT; PAM sequence: CGGGGTTT
  source 1..20: mol_type = other DNA
ttttgtatttttagtagaga

SEQ ID NO: 7775 - DNA, 20 bp, synthetic construct
  misc_feature 1..20: note = Description of Artificial Sequence: Synthetic oligonucleotide
  misc_feature 1..20: note = Target: FXN; (-) strand; PAM type: NNNNGHTT; PAM sequence: CTGGGATT
  source 1..20: mol_type = other DNA
cgcttcagcctcccaagtag

SEQ ID NO: 7776 - DNA, 20 bp, synthetic construct
  misc_feature 1..20: note = Description of Artificial Sequence: Synthetic oligonucleotide
  misc_feature 1..20: note = Target: FXN; (-) strand; PAM type: NNNNGHTT; PAM sequence: TTCCGCTT
  source 1..20: mol_type = other DNA
cctctgggttcaagcgattc

SEQ ID NO: 7777 - DNA, 20 bp, synthetic construct
  misc_feature 1..20: note = Description of Artificial Sequence: Synthetic oligonucleotide
  misc_feature 1..20: note = Target: FXN; (-) strand; PAM type: NNNNGHTT; PAM sequence: AAGCGATT
  source 1..20: mol_type = other DNA
caacctccacctctgggttc

SEQ ID NO: 7778 - DNA, 20 bp, synthetic construct
  misc_feature 1..20: note = Description of Artificial Sequence: Synthetic oligonucleotide
  misc_feature 1..20: note = Target: FXN; (-) strand; PAM type: NNNNGHTT; PAM sequence: CAGAGTTT
  source 1..20: mol_type = other DNA
ttgttattattattttgaga

SEQ ID NO: 7779 - DNA, 20 bp, synthetic construct
  misc_feature 1..20: note = Description of Artificial Sequence: Synthetic oligonucleotide
  misc_feature 1..20: note = Target: FXN; (-) strand; PAM type: NNNNGHTT; PAM sequence: ATACGATT
  source 1..20: mol_type = other DNA
aaatgaggtaatgtggtata

SEQ ID NO: 7780 - DNA, 20 bp, synthetic construct
  misc_feature 1..20: note = Description of Artificial Sequence: Synthetic oligonucleotide
  misc_feature 1..20: note = Target: FXN; (-) strand; PAM type: NNNNGHTT; PAM sequence: TGTTGCTT
  source 1..20: mol_type = other DNA
attttaatgtcctggaggct

SEQ ID NO: 7781 - DNA, 20 bp, synthetic construct
  misc_feature 1..20: note = Description of Artificial Sequence: Synthetic oligonucleotide
  misc_feature 1..20: note = Target: FXN; (-) strand; PAM type: NNNNGHTT; PAM sequence: GGAGGCTT
  source 1..20: mol_type = other DNA
tgcatgaattttaatgtcct

SEQ ID NO: 7782 - DNA, 20 bp, synthetic construct
  misc_feature 1..20: note = Description of Artificial Sequence: Synthetic oligonucleotide
  misc_feature 1..20: note = Target: FXN; (-) strand; PAM type: NNNNGHTT; PAM sequence: CTGGGATT
  source 1..20: mol_type = other DNA
cgtctcagcctcctgagtac

SEQ ID NO: 7783 - DNA, 20 bp, synthetic construct
  misc_feature 1..20: note = Description of Artificial Sequence: Synthetic oligonucleotide
  misc_feature 1..20: note = Target: FXN; (-) strand; PAM type: NNNNGHTT; PAM sequence: ATGTGTTT
  source 1..20: mol_type = other DNA
tcccagcttgacttaatgga

SEQ ID NO: 7784 - DNA, 20 bp, synthetic construct
  misc_feature 1..20: note = Description of Artificial Sequence: Synthetic oligonucleotide
  misc_feature 1..20: note = Target: FXN; (-) strand; PAM type: NNNNGHTT; PAM sequence: CCCAGCTT
  source 1..20: mol_type = other DNA
tataggtatatgccactgct

SEQ ID NO: 7785 - DNA, 20 bp, synthetic construct
  misc_feature 1..20: note = Description of Artificial Sequence: Synthetic oligonucleotide
  misc_feature 1..20: note = Target: FXN; (-) strand; PAM type: NNNNGHTT; PAM sequence: CCTGGCTT
  source 1..20: mol_type = other DNA
gcccaggctgatctccaatt

SEQ ID NO: 7786 - DNA, 20 bp, synthetic construct
  misc_feature 1..20: note = Description of Artificial Sequence: Synthetic oligonucleotide
  misc_feature 1..20: note = Target: FXN; (-) strand; PAM type: NNNNGHTT; PAM sequence: ATAGGTTT
  source 1..20: mol_type = other DNA
tttatactgttttattatta

SEQ ID NO: 7787 - DNA, 20 bp, synthetic construct
  misc_feature 1..20: note = Description of Artificial Sequence: Synthetic oligonucleotide
  misc_feature 1..20: note = Target: FXN; (-) strand; PAM type: NNNNGHTT; PAM sequence: TACTGTTT
  source 1..20: mol_type = other DNA
acctatttagcttttgttta

SEQ ID NO: 7788 - DNA, 20 bp, synthetic construct
  misc_feature 1..20: note = Description of Artificial Sequence: Synthetic oligonucleotide
  misc_feature 1..20: note = Target: FXN; (-) strand; PAM type: NNNNGHTT; PAM sequence: TTTTGTTT
  source 1..20: mol_type = other DNA
aaatattttacctatttagc

SEQ ID NO: 7789 - DNA, 20 bp, synthetic construct
  misc_feature 1..20: note = Description of Artificial Sequence: Synthetic oligonucleotide
  misc_feature 1..20: note = Target: FXN; (-) strand; PAM type: NNNNGHTT; PAM sequence: TTTAGCTT
  source 1..20: mol_type = other DNA
cagaaaaaatattttaccta

SEQ ID NO: 7790 - DNA, 20 bp, synthetic construct
  misc_feature 1..20: note = Description of Artificial Sequence: Synthetic oligonucleotide
  misc_feature 1..20: note = Target: FXN; (-) strand; PAM type: NNNNGHTT; PAM sequence: CCCAGATT
  source 1..20: mol_type = other DNA
ccacaaggaccccataagag

SEQ ID NO: 7791 - DNA, 20 bp, synthetic construct
  misc_feature 1..20: note = Description of Artificial Sequence: Synthetic oligonucleotide
  misc_feature 1..20: note = Target: FXN; (-) strand; PAM type: NNNNGHTT; PAM sequence: CTGGGATT
  source 1..20: mol_type = other DNA
tgcctcagcctcccaaagtg

SEQ ID NO: 7792 - DNA, 20 bp, synthetic construct
  misc_feature 1..20: note = Description of Artificial Sequence: Synthetic oligonucleotide
  misc_feature 1..20: note = Target: FXN; (-) strand; PAM type: NNNNGHTT; PAM sequence: ACGGGATT
  source 1..20: mol_type = other DNA
ttttaatatttttagtagag

SEQ ID NO: 7793 - DNA, 20 bp, synthetic construct
  misc_feature 1..20: note = Description of Artificial Sequence: Synthetic oligonucleotide
  misc_feature 1..20: note = Target: FXN; (-) strand; PAM type: NNNNGHTT; PAM sequence: CAGCGATT
  source 1..20: mol_type = other DNA
aacctccaccccccaggtta

SEQ ID NO: 7794 - DNA, 20 bp, synthetic construct
  misc_feature 1..20: note = Description of Artificial Sequence: Synthetic oligonucleotide
  misc_feature 1..20: note = Target: FXN; (-) strand; PAM type: NNNNGHTT; PAM sequence: ATGTGTTT
  source 1..20: mol_type = other DNA
tcttcccctggctgctgttc

SEQ ID NO: 7795 - DNA, 20 bp, synthetic construct
  misc_feature 1..20: note = Description of Artificial Sequence: Synthetic oligonucleotide
  misc_feature 1..20: note = Target: FXN; (-) strand; PAM type: NNNNGHTT; PAM sequence: TTTTGATT
  source 1..20: mol_type = other DNA
gtttgcttgacagaatatga

SEQ ID NO: 7796 - DNA, 20 bp, synthetic construct
  misc_feature 1..20: note = Description of Artificial Sequence: Synthetic oligonucleotide
  misc_feature 1..20: note = Target: FXN; (-) strand; PAM type: NNNNGHTT; PAM sequence: ATATGATT
  source 1..20: mol_type = other DNA
tttccagtttgcttgacaga

SEQ ID NO: 7797 - DNA, 20 bp, synthetic construct
  misc_feature 1..20: note = Description of Artificial Sequence: Synthetic oligonucleotide
  misc_feature 1..20: note = Target: FXN; (-) strand; PAM type: NNNNGHTT; PAM sequence: GTTTGCTT
  source 1..20: mol_type = other DNA
cacacagtggtacttttcca

SEQ ID NO: 7798 - DNA, 20 bp, synthetic construct
  misc_feature 1..20: note = Description of Artificial Sequence: Synthetic oligonucleotide
  misc_feature 1..20: note = Target: FXN; (-) strand; PAM type: NNNNGHTT; PAM sequence: TCCAGTTT
  source 1..20: mol_type = other DNA
ggtacacacagtggtacttt

SEQ ID NO: 7799 - DNA, 20 bp, synthetic construct
  misc_feature 1..20: note = Description of Artificial Sequence: Synthetic oligonucleotide
  misc_feature 1..20: note = Target: FXN; (-) strand; PAM type: NNNNGHTT; PAM sequence: CTAAGATT
  source 1..20: mol_type = other DNA
aaaggggaaaaaaaagtttt

SEQ ID NO: 7800 - DNA, 20 bp, synthetic construct
  misc_feature 1..20: note = Description of Artificial Sequence: Synthetic oligonucleotide
  misc_feature 1..20: note = Target: FXN; (-) strand; PAM type: NNNNGHTT; PAM sequence: AAAAGTTT
  source 1..20: mol_type = other DNA
aaaaaatagaaaggggaaaa

SEQ ID NO: 7801 - DNA, 20 bp, synthetic construct
  misc_feature 1..20: note = Description of Artificial Sequence: Synthetic oligonucleotide
  misc_feature 1..20: note = Target: FXN; (-) strand; PAM type: NNNNGHTT; PAM sequence: CTTTGATT
  source 1..20: mol_type = other DNA
gaggtcgaggctgccatgag

SEQ ID NO: 7802 - DNA, 20 bp, synthetic construct
  misc_feature 1..20: note = Description of Artificial Sequence: Synthetic oligonucleotide
  misc_feature 1..20: note = Target: FXN; (-) strand; PAM type: NNNNGHTT; PAM sequence: ATGAGCTT
  source 1..20: mol_type = other DNA
ccagggaggtcgaggctgcc

SEQ ID NO: 7803 - DNA, 20 bp, synthetic construct
  misc_feature 1..20: note = Description of Artificial Sequence: Synthetic oligonucleotide
  misc_feature 1..20: note = Target: FXN; (-) strand; PAM type: NNNNGHTT; PAM sequence: GGAGGATT
  source 1..20: mol_type = other DNA
tatggaggtgcacacctgtg

SEQ ID NO: 7804 - DNA, 20 bp, synthetic construct
  misc_feature 1..20: note = Description of Artificial Sequence: Synthetic oligonucleotide
  misc_feature 1..20: note = Target: FXN; (-) strand; PAM type: NNNNGHTT; PAM sequence: AAAAGCTT
  source 1..20: mol_type = other DNA
aagaaggtaaaaataataga

SEQ ID NO: 7805 - DNA, 20 bp, synthetic construct
  misc_feature 1..20: note = Description of Artificial Sequence: Synthetic oligonucleotide
  misc_feature 1..20: note = Target: FXN; (-) strand; PAM type: NNNNGHTT; PAM sequence: TTGTGATT
  source 1..20: mol_type = other DNA
gtttcgattaaattctaaat

SEQ ID NO: 7806 - DNA, 20 bp, synthetic construct
  misc_feature 1..20: note = Description of Artificial Sequence: Synthetic oligonucleotide
  misc_feature 1..20: note = Target: FXN; (-) strand; PAM type: NNNNGHTT; PAM sequence: TTTCGATT
  source 1..20: mol_type = other DNA
caaacaagtaagaggcagag

SEQ ID NO: 7807 - DNA, 20 bp, synthetic construct
  misc_feature 1..20: note = Description of Artificial Sequence: Synthetic oligonucleotide
  misc_feature 1..20: note = Target: FXN; (-) strand; PAM type: NNNNGHTT; PAM sequence: CAGAGTTT
  source 1..20: mol_type = other DNA
gtctacaaacaagtaagagg

SEQ ID NO: 7808 - DNA, 20 bp, synthetic construct
  misc_feature 1..20: note = Description of Artificial Sequence: Synthetic oligonucleotide
  misc_feature 1..20: note = Target: FXN; (-) strand; PAM type: NNNNGHTT; PAM sequence: TATAGATT
  source 1..20: mol_type = other DNA
catgttagatatctccattt

SEQ ID NO: 7809 - DNA, 20 bp, synthetic construct
  misc_feature 1..20: note = Description of Artificial Sequence: Synthetic oligonucleotide
  misc_feature 1..20: note = Target: FXN; (-) strand; PAM type: NNNNGHTT; PAM sequence: TTGTGCTT
  source 1..20: mol_type = other DNA
gagtacttctcacatcagga

SEQ ID NO: 7810 - DNA, 20 bp, synthetic construct
  misc_feature 1..20: note = Description of Artificial Sequence: Synthetic oligonucleotide
  misc_feature 1..20: note = Target: FXN; (-) strand; PAM type: NNNNGHTT; PAM sequence: TCAGGATT
  source 1..20: mol_type = other DNA
tgaactgagtacttctcaca

SEQ ID NO: 7811 - DNA, 20 bp, synthetic construct
  misc_feature 1..20: note = Description of Artificial Sequence: Synthetic oligonucleotide
  misc_feature 1..20: note = Target: FXN; (-) strand; PAM type: NNNNGHTT; PAM sequence: TTTTGATT
  source 1..20: mol_type = other DNA
gaagttaagtaaactgagta

SEQ ID NO: 7812 - DNA, 20 bp, synthetic construct
  misc_feature 1..20: note = Description of Artificial Sequence: Synthetic oligonucleotide
  misc_feature 1..20: note = Target: FXN; (-) strand; PAM type: NNNNGHTT; PAM sequence: AATAGTTT
  source 1..20: mol_type = other DNA
tcaaattttaaattggctaa

SEQ ID NO: 7813 - DNA, 20 bp, synthetic construct
  misc_feature 1..20: note = Description of Artificial Sequence: Synthetic oligonucleotide
  misc_feature 1..20: note = Target: FXN; (-) strand; PAM type: NNNNGHTT; PAM sequence: AAGCGATT
  source 1..20: mol_type = other DNA
gtgtgtaccttggaagcgta

SEQ ID NO: 7814 - DNA, 20 bp, synthetic construct
  misc_feature 1..20: note = Description of Artificial Sequence: Synthetic oligonucleotide
  misc_feature 1..20: note = Target: FXN; (-) strand; PAM type: NNNNGHTT; PAM sequence: TTTAGTTT
  source 1..20: mol_type = other DNA
ccttgctggcatgtagctgt

SEQ ID NO: 7815 - DNA, 20 bp, synthetic construct
  misc_feature 1..20: note = Description of Artificial Sequence: Synthetic oligonucleotide
  misc_feature 1..20: note = Target: FXN; (-) strand; PAM type: NNNNGHTT; PAM sequence: AGCTGTTT
  source 1..20: mol_type = other DNA
tttctcccttgctggcatgt

SEQ ID NO: 7816 - DNA, 20 bp, synthetic construct
  misc_feature 1..20: note = Description of Artificial Sequence: Synthetic oligonucleotide
  misc_feature 1..20: note = Target: FXN; (-) strand; PAM type: NNNNGHTT; PAM sequence: CGTCGTTT
  source 1..20: mol_type = other DNA
tatacacaaagtcatgaact

SEQ ID NO: 7817 - DNA, 20 bp, synthetic construct
  misc_feature 1..20: note = Description of Artificial Sequence: Synthetic oligonucleotide
  misc_feature 1..20: note = Target: FXN; (-) strand; PAM type: NNNNGHTT; PAM sequence: AATTGCTT
  source 1..20: mol_type = other DNA
ctcgggaggctgaggcagag

SEQ ID NO: 7818 - DNA, 20 bp, synthetic construct
  misc_feature 1..20: note = Description of Artificial Sequence: Synthetic oligonucleotide
  misc_feature 1..20: note = Target: FXN; (-) strand; PAM type: NNNNGHTT; PAM sequence: GGTGGATT
  source 1..20: mol_type = other DNA
cactttgggaggcggaggca

SEQ ID NO: 7819 - DNA, 20 bp, synthetic construct
  misc_feature 1..20: note = Description of Artificial Sequence: Synthetic oligonucleotide
  misc_feature 1..20: note = Target: FXN; (-) strand; PAM type: NNNNGHTT; PAM sequence: CAAAGATT
  source 1..20: mol_type = other DNA
cctggctaattaagataaac

SEQ ID NO: 7820 - DNA, 20 bp, synthetic construct
  misc_feature 1..20: note = Description of Artificial Sequence: Synthetic oligonucleotide
  misc_feature 1..20: note = Target: FXN; (-) strand; PAM type: NNNNGHTT; PAM sequence: CTGAGTTT
  source 1..20: mol_type = other DNA
gatgcagggatataagtgag

SEQ ID NO: 7821 - DNA, 20 bp, synthetic construct
  misc_feature 1..20: note = Description of Artificial Sequence: Synthetic oligonucleotide
  misc_feature 1..20: note = Target: FXN; (-) strand; PAM type: NNNNGHTT; PAM sequence: CTTGGATT
  source 1..20: mol_type = other DNA
gagaagatggaacatatgag

SEQ ID NO: 7822 - DNA, 20 bp, synthetic construct
  misc_feature 1..20: note = Description of Artificial Sequence: Synthetic oligonucleotide
  misc_feature 1..20: note = Target: FXN; (-) strand; PAM type: NNNNGHTT; PAM sequence: ATGAGCTT
  source 1..20: mol_type = other DNA
agccagagaagatggaacat

SEQ ID NO: 7823 - DNA, 20 bp, synthetic construct
  misc_feature 1..20: note = Description of Artificial Sequence: Synthetic oligonucleotide
  misc_feature 1..20: note = Target: FXN; (-) strand; PAM type: NNNNGHTT; PAM sequence: TGATGTTT
  source 1..20: mol_type = other DNA
ccaattttactgctgggtgc

SEQ ID NO: 7824 - DNA, 20 bp, synthetic construct
  misc_feature 1..20: note = Description of Artificial Sequence: Synthetic oligonucleotide
  misc_feature 1..20: note = Target: FXN; (-) strand; PAM type: NNNNGHTT; PAM sequence: CTGGGATT
  source 1..20: mol_type = other DNA
tgcctcagcctctcaaagtg

SEQ ID NO: 7825 - DNA, 20 bp, synthetic construct
  misc_feature 1..20: note = Description of Artificial Sequence: Synthetic oligonucleotide
  misc_feature 1..20: note = Target: FXN; (-) strand; PAM type: NNNNGHTT; PAM sequence: CGGGGTTT
  source 1..20: mol_type = other DNA
ttttgtatttttagtagagg

SEQ ID NO: 7826 - DNA, 20 bp, synthetic construct
  misc_feature 1..20: note = Description of Artificial Sequence: Synthetic oligonucleotide
  misc_feature 1..20: note = Target: FXN; (-) strand; PAM type: NNNNGHTT; PAM sequence: TGGAGTTT
  source 1..20: mol_type = other DNA
cgggaattacatttttttaa

SEQ ID NO: 7827 - DNA, 20 bp, synthetic construct
  misc_feature 1..20: note = Description of Artificial Sequence: Synthetic oligonucleotide
  misc_feature 1..20: note = Target: FXN; (-) strand; PAM type: NNNNGHTT; PAM sequence: TAGGGTTT
  source 1..20: mol_type = other DNA
tttaaagtttttctttctct

SEQ ID NO: 7828 - DNA, 20 bp, synthetic construct
  misc_feature 1..20: note = Description of Artificial Sequence: Synthetic oligonucleotide
  misc_feature 1..20: note = Target: FXN; (-) strand; PAM type: NNNNGHTT; PAM sequence: TAAAGTTT
  source 1..20: mol_type = other DNA
ttttgagctttggagggatt

SEQ ID NO: 7829 - DNA, 20 bp, synthetic construct
  misc_feature 1..20: note = Description of Artificial Sequence: Synthetic oligonucleotide
  misc_feature 1..20: note = Target: FXN; (-) strand; PAM type: NNNNGHTT; PAM sequence: GAGGGATT
  source 1..20: mol_type = other DNA
tctattacttttgagctttg

SEQ ID NO: 7830 - DNA, 20 bp, synthetic construct
  misc_feature 1..20: note = Description of Artificial Sequence: Synthetic oligonucleotide
  misc_feature 1..20: note = Target: FXN; (-) strand; PAM type: NNNNGHTT; PAM sequence: TTGAGCTT
  source 1..20: mol_type = other DNA
ctcatctgtttctattactt

SEQ ID NO: 7831 - DNA, 20 bp, synthetic construct
  misc_feature 1..20: note = Description of Artificial Sequence: Synthetic oligonucleotide
  misc_feature 1..20: note = Target: FXN; (-) strand; PAM type: NNNNGHTT; PAM sequence: ATCTGTTT
  source 1..20: mol_type = other DNA
gaaatcctgactccaaactc

SEQ ID NO: 7832 - DNA, 20 bp, synthetic construct
  misc_feature 1..20: note = Description of Artificial Sequence: Synthetic oligonucleotide
  misc_feature 1..20: note = Target: FXN; (-) strand; PAM type: NNNNGHTT; PAM sequence: GACGGTTT
  source 1..20: mol_type = other DNA
gatcaggtggctatgctctg

SEQ ID NO: 7833 - DNA, 20 bp, synthetic construct
  misc_feature 1..20: note = Description of Artificial Sequence: Synthetic oligonucleotide
  misc_feature 1..20: note = Target: FXN; (-) strand; PAM type: NNNNGHTT; PAM sequence: GGATGTTT
  source 1..20: mol_type = other DNA
caggagagggcagatttaag

SEQ ID NO: 7834 - DNA, 20 bp, synthetic construct
  misc_feature 1..20: note = Description of Artificial Sequence: Synthetic oligonucleotide
  misc_feature 1..20: note = Target: FXN; (-) strand; PAM type: NNNNGHTT; PAM sequence: GGCAGATT
  source 1..20: mol_type = other DNA
actggggacgggcaggagag

SEQ ID NO: 7835 - DNA, 20 bp, synthetic construct
  misc_feature 1..20: note = Description of Artificial Sequence: Synthetic oligonucleotide
  misc_feature 1..20: note = Target: FXN; (-) strand; PAM type: NNNNGHTT; PAM sequence: GAAAGCTT
  source 1..20: mol_type = other DNA
agacaagagattgcctttct

SEQ ID NO: 7836 - DNA, 20 bp, synthetic construct
  misc_feature 1..20: note = Description of Artificial Sequence: Synthetic oligonucleotide
  misc_feature 1..20: note = Target: FXN; (-) strand; PAM type: NNNNGHTT; PAM sequence: AAGAGATT
  source 1..20: mol_type = other DNA
cctgcttaggttttacagac

SEQ ID NO: 7837 - DNA, 20 bp, synthetic construct
  misc_feature 1..20: note = Description of Artificial Sequence: Synthetic oligonucleotide
  misc_feature 1..20: note = Target: FXN; (-) strand; PAM type: NNNNGHTT; PAM sequence: TTAGGTTT
  source 1..20: mol_type = other DNA
aaacttggccttggtcctgc

SEQ ID NO: 7838 - DNA, 20 bp, synthetic construct
  misc_feature 1..20: note = Description of Artificial Sequence: Synthetic oligonucleotide
  misc_feature 1..20: note = Target: FXN; (-) strand; PAM type: NNNNGHTT; PAM sequence: TCCTGCTT
  source 1..20: mol_type = other DNA
gctaagaaacttggccttgg

SEQ ID NO: 7839 - DNA, 20 bp, synthetic construct
  misc_feature 1..20: note = Description of Artificial Sequence: Synthetic oligonucleotide
  misc_feature 1..20: note = Target: FXN; (-) strand; PAM type: NNNNGHTT; PAM sequence: TTGGGATT
  source 1..20: mol_type = other DNA
acacttagggatctggggat

SEQ ID NO: 7840 - DNA, 20 bp, synthetic construct
  misc_feature 1..20: note = Description of Artificial Sequence: Synthetic oligonucleotide
  misc_feature 1..20: note = Target: FXN; (-) strand; PAM type: NNNNGHTT; PAM sequence: TGGGGATT
  source 1..20: mol_type = other DNA
gcacagcacacttagggatc

SEQ ID NO: 7841 - DNA, 20 bp, synthetic construct
  misc_feature 1..20: note = Description of Artificial Sequence: Synthetic oligonucleotide
  misc_feature 1..20: note = Target: FXN; (-) strand; PAM type: NNNNGHTT; PAM sequence: AGGAGTTT
  source 1..20: mol_type = other DNA
aggcagaggctgagtggagg

SEQ ID NO: 7842 - DNA, 20 bp, synthetic construct
  misc_feature 1..20: note = Description of Artificial Sequence: Synthetic oligonucleotide
  misc_feature 1..20: note = Target: FXN; (-) strand; PAM type: NNNNGHTT; PAM sequence: TAGAGTTT
  source 1..20: mol_type = other DNA
ctcttggagttggggttatt

SEQ ID NO: 7843 - DNA, 20 bp, synthetic construct
  misc_feature 1..20: note = Description of Artificial Sequence: Synthetic oligonucleotide
  misc_feature 1..20: note = Target: FXN; (-) strand; PAM type: NNNNGHTT; PAM sequence: TCAAGTTT
  source 1..20: mol_type = other DNA
taaaaatgtccttaggaggt

SEQ ID NO: 7844 - DNA, 20 bp, synthetic construct
  misc_feature 1..20: note = Description of Artificial Sequence: Synthetic oligonucleotide
  misc_feature 1..20: note = Target: FXN; (+) strand; PAM type: NNNNGHTT; PAM sequence: GTTAGCTT
  source 1..20: mol_type = other DNA
tacactaaattcctcccaca

SEQ ID NO: 7845 - DNA, 20 bp, synthetic construct
  misc_feature 1..20: note = Description of Artificial Sequence: Synthetic oligonucleotide
  misc_feature 1..20: note = Target: FXN; (+) strand; PAM type: NNNNGHTT; PAM sequence: GGTGGTTT
  source 1..20: mol_type = other DNA
actgtcataacctttacaaa

SEQ ID NO: 7846 - DNA, 20 bp, synthetic construct
  misc_feature 1..20: note = Description of Artificial Sequence: Synthetic oligonucleotide
  misc_feature 1..20: note = Target: FXN; (+) strand; PAM type: NNNNGHTT; PAM sequence: ACATGCTT
  source 1..20: mol_type = other DNA
ggctatatttcagatacatc

SEQ ID NO: 7847 - DNA, 20 bp, synthetic construct
  misc_feature 1..20: note = Description of Artificial Sequence: Synthetic oligonucleotide
  misc_feature 1..20: note = Target: FXN; (+) strand; PAM type: NNNNGHTT; PAM sequence: ACATGTTT
  source 1..20: mol_type = other DNA
gttcattatctacatcattc

SEQ ID NO: 7848 - DNA, 20 bp, synthetic construct
  misc_feature 1..20: note = Description of Artificial Sequence: Synthetic oligonucleotide
  misc_feature 1..20: note = Target: FXN; (+) strand; PAM type: NNNNGHTT; PAM sequence: TATTGATT
  source 1..20: mol_type = other DNA
atatttattgactttggaat

SEQ ID NO: 7849 - DNA, 20 bp, synthetic construct
  misc_feature 1..20: note = Description of Artificial Sequence: Synthetic oligonucleotide
  misc_feature 1..20: note = Target: FXN; (+) strand; PAM type: NNNNGHTT; PAM sequence: TGTGGATT
  source 1..20: mol_type = other DNA
tatcaaattgcattccagag

SEQ ID NO: 7850 - DNA, 20 bp, synthetic construct
  misc_feature 1..20: note = Description of Artificial Sequence: Synthetic oligonucleotide
  misc_feature 1..20: note = Target: FXN; (+) strand; PAM type: NNNNGHTT; PAM sequence: AGCTGTTT
  source 1..20: mol_type = other DNA
atcagtctcctgggacaaac

SEQ ID NO: 7851 - DNA, 20 bp, synthetic construct
  misc_feature 1..20: note = Description of Artificial Sequence: Synthetic oligonucleotide
  misc_feature 1..20: note = Target: FXN; (+) strand; PAM type: NNNNGHTT; PAM sequence: GTGGGATT
  source 1..20: mol_type = other DNA
aatcaatccaagcaaatgca

SEQ ID NO: 7852 - DNA, 20 bp, synthetic construct
  misc_feature 1..20: note = Description of Artificial Sequence: Synthetic oligonucleotide
  misc_feature 1..20: note = Target: FXN; (+) strand; PAM type: NNNNGHTT; PAM sequence: TAAGGTTT
  source 1..20: mol_type = other DNA
tgagtgagaatttggagact

SEQ ID NO: 7853 - DNA, 20 bp, synthetic construct
  misc_feature 1..20: note = Description of Artificial Sequence: Synthetic oligonucleotide
  misc_feature 1..20: note = Target: FXN; (+) strand; PAM type: NNNNGHTT; PAM sequence: AGAGGATT
  source 1..20: mol_type = other DNA
cttaaggtttggtcatctgt

SEQ ID NO: 7854 - DNA, 20 bp, synthetic construct
  misc_feature 1..20: note = Description of Artificial Sequence: Synthetic oligonucleotide
  misc_feature 1..20: note = Target: FXN; (+) strand; PAM type: NNNNGHTT; PAM sequence: TTGGGTTT
  source 1..20: mol_type = other DNA
gtttggtcatctgtagagga

SEQ ID NO: 7855 - DNA, 20 bp, synthetic construct
  misc_feature 1..20: note = Description of Artificial Sequence: Synthetic oligonucleotide
  misc_feature 1..20: note = Target: FXN; (+) strand; PAM type: NNNNGHTT; PAM sequence: TCTTGTTT
  source 1..20: mol_type = other DNA
ctgtagaggattgggttttg

SEQ ID NO: 7856 - DNA, 20 bp, synthetic construct
  misc_feature 1..20: note = Description of Artificial Sequence: Synthetic oligonucleotide
  misc_feature 1..20: note = Target: FXN; (+) strand; PAM type: NNNNGHTT; PAM sequence: TTTTGTTT
  source 1..20: mol_type = other DNA
gaggattgggttttgtcttg

SEQ ID NO: 7857 - DNA, 20 bp, synthetic construct
  misc_feature 1..20: note = Description of Artificial Sequence: Synthetic oligonucleotide
  misc_feature 1..20: note = Target: FXN; (+) strand; PAM type: NNNNGHTT; PAM sequence: TTTTGTTT
  source 1..20: mol_type = other DNA
tgggttttgtcttgttttgt

SEQ ID NO: 7858 - DNA, 20 bp, synthetic construct
  misc_feature 1..20: note = Description of Artificial Sequence: Synthetic oligonucleotide
  misc_feature 1..20: note = Target: FXN; (+) strand; PAM type: NNNNGHTT; PAM sequence: CAAGGTTT
  source 1..20: mol_type = other DNA
gtttttgttttggtgtcctg

SEQ ID NO: 7859 - DNA, 20 bp, synthetic construct
  misc_feature 1..20: note = Description of Artificial Sequence: Synthetic oligonucleotide
  misc_feature 1..20: note = Target: FXN; (+) strand; PAM type: NNNNGHTT; PAM sequence: CAGTGATT
  source 1..20: mol_type = other DNA
ttaccccattcccttagcaa

SEQ ID NO: 7860 - DNA, 20 bp, synthetic construct
  misc_feature 1..20: note = Description of Artificial Sequence: Synthetic oligonucleotide
  misc_feature 1..20: note = Target: FXN; (+) strand; PAM type: NNNNGHTT; PAM sequence: GAAAGTTT
  source 1..20: mol_type = other DNA
aggcacacctgtgggaatat

SEQ ID NO: 7861 - DNA, 20 bp, synthetic construct
  misc_feature 1..20: note = Description of Artificial Sequence: Synthetic oligonucleotide
  misc_feature 1..20: note = Target: FXN; (+) strand; PAM type: NNNNGHTT; PAM sequence: TTTGGTTT
  source 1..20: mol_type = other DNA
cacctgtgggaatatgaaag

SEQ ID NO: 7862 - DNA, 20 bp, synthetic construct
  misc_feature 1..20: note = Description of Artificial Sequence: Synthetic oligonucleotide
  misc_feature 1..20: note = Target: FXN; (+) strand; PAM type: NNNNGHTT; PAM sequence: AAAGGATT
  source 1..20: mol_type = other DNA
tatgaaagtttggtttcata

SEQ ID NO: 7863 - DNA, 20 bp, synthetic construct
  misc_feature 1..20: note = Description of Artificial Sequence: Synthetic oligonucleotide
  misc_feature 1..20: note = Target: FXN; (+) strand; PAM type: NNNNGHTT; PAM sequence: ACTGGATT
  source 1..20: mol_type = other DNA
taataaattacctaaaacat

SEQ ID NO: 7864 - DNA, 20 bp, synthetic construct
  misc_feature 1..20: note = Description of Artificial Sequence: Synthetic oligonucleotide
  misc_feature 1..20: note = Target: FXN; (+) strand; PAM type: NNNNGHTT; PAM sequence: CAGAGATT
  source 1..20: mol_type = other DNA
atgaaaacatcttttctgcc

SEQ ID NO: 7865 - DNA, 20 bp, synthetic construct
  misc_feature 1..20: note = Description of Artificial Sequence: Synthetic oligonucleotide
  misc_feature 1..20: note = Target: FXN; (+) strand; PAM type: NNNNGHTT; PAM sequence: CCTTGTTT
  source 1..20: mol_type = other DNA
catggaacacataaggcata

SEQ ID NO: 7866 - DNA, 20 bp, synthetic construct
  misc_feature 1..20: note = Description of Artificial Sequence: Synthetic oligonucleotide
  misc_feature 1..20: note = Target: FXN; (+) strand; PAM type: NNNNGHTT; PAM sequence: TAAGGATT
  source 1..20: mol_type = other DNA
tgtttctgctccatgatgtc

SEQ ID NO: 7867 - DNA, 20 bp, synthetic construct
  misc_feature 1..20: note = Description of Artificial Sequence: Synthetic oligonucleotide
  misc_feature 1..20: note = Target: FXN; (+) strand; PAM type: NNNNGHTT; PAM sequence: CATTGTTT
  source 1..20: mol_type = other DNA
gggggcctcagctctctcta

SEQ ID NO: 7868 - DNA, 20 bp, synthetic construct
  misc_feature 1..20: note = Description of Artificial Sequence: Synthetic oligonucleotide
  misc_feature 1..20: note = Target: FXN; (+) strand; PAM type: NNNNGHTT; PAM sequence: GCTAGTTT
  source 1..20: mol_type = other DNA
tacattgtttctctactttg

SEQ ID NO: 7869 - DNA, 20 bp, synthetic construct
  misc_feature 1..20: note = Description of Artificial Sequence: Synthetic oligonucleotide
  misc_feature 1..20: note = Target: FXN; (+) strand; PAM type: NNNNGHTT; PAM sequence: TTTGGATT
  source 1..20: mol_type = other DNA
tgtttctctactttggctag

SEQ ID NO: 7870 - DNA, 20 bp, synthetic construct
  misc_feature 1..20: note = Description of Artificial Sequence: Synthetic oligonucleotide
  misc_feature 1..20: note = Target: FXN; (+) strand; PAM type: NNNNGHTT; PAM sequence: GGTTGCTT
  source 1..20: mol_type = other DNA
tttgggaggctgaggtggga

SEQ ID NO: 7871 - DNA, 20 bp, synthetic construct
  misc_feature 1..20: note = Description of Artificial Sequence: Synthetic oligonucleotide
  misc_feature 1..20: note = Target: FXN; (+) strand; PAM type: NNNNGHTT; PAM sequence: ACTTGATT
  source 1..20: mol_type = other DNA
gaggctgaggcaggaggatc

SEQ ID NO: 7872 - DNA, 20 bp, synthetic construct
  misc_feature 1..20: note = Description of Artificial Sequence: Synthetic oligonucleotide
  misc_feature 1..20: note = Target: FXN; (+) strand; PAM type: NNNNGHTT; PAM sequence: CTCTGTTT
  source 1..20: mol_type = other DNA
gcctgggtaacagaatgaga

SEQ ID NO: 7873 - DNA, 20 bp, synthetic construct
  misc_feature 1..20: note = Description of Artificial Sequence: Synthetic oligonucleotide
  misc_feature 1..20: note = Target: FXN; (+) strand; PAM type: NNNNGHTT; PAM sequence: AATAGCTT
  source 1..20: mol_type = other DNA
cacttgttctaggaactaca

SEQ ID NO: 7874 - DNA, 20 bp, synthetic construct
  misc_feature 1..20: note = Description of Artificial Sequence: Synthetic oligonucleotide
  misc_feature 1..20: note = Target: FXN; (+) strand; PAM type: NNNNGHTT; PAM sequence: GAGAGCTT
  source 1..20: mol_type = other DNA
gggagagctaaggtgggcaa

SEQ ID NO: 7875 - DNA, 20 bp, synthetic construct
  misc_feature 1..20: note = Description of Artificial Sequence: Synthetic oligonucleotide
  misc_feature 1..20: note = Target: FXN; (+) strand; PAM type: NNNNGHTT; PAM sequence: GTTAGATT
  source 1..20: mol_type = other DNA
ggtgaaagcagagggctatg

SEQ ID NO: 7876 - DNA, 20 bp, synthetic construct
  misc_feature 1..20: note = Description of Artificial Sequence: Synthetic oligonucleotide
  misc_feature 1..20: note = Target: FXN; (+) strand; PAM type: NNNNGHTT; PAM sequence: TTGAGATT
  source 1..20: mol_type = other DNA
ggctatggttagattcacat

SEQ ID NO: 7877 - DNA, 20 bp, synthetic construct
  misc_feature 1..20: note = Description of Artificial Sequence: Synthetic oligonucleotide
  misc_feature 1..20: note = Target: FXN; (+) strand; PAM type: NNNNGHTT; PAM sequence: TTTAGATT
  source 1..20: mol_type = other DNA
ggttagattcacatttgaga

SEQ ID NO: 7878 - DNA, 20 bp, synthetic construct
  misc_feature 1..20: note = Description of Artificial Sequence: Synthetic oligonucleotide
  misc_feature 1..20: note = Target: FXN; (+) strand; PAM type: NNNNGHTT; PAM sequence: TTTAGATT
  source 1..20: mol_type = other DNA
tcacatttgagatttagatt

SEQ ID NO: 7879 - DNA, 20 bp, synthetic construct
  misc_feature 1..20: note = Description of Artificial Sequence: Synthetic oligonucleotide
  misc_feature 1..20: note = Target: FXN; (+) strand; PAM type: NNNNGHTT; PAM sequence: ACTGGCTT
  source 1..20: mol_type = other DNA
aaaatgatcaccctggtgac

SEQ ID NO: 7880 - DNA, 20 bp, synthetic construct
  misc_feature 1..20: note = Description of Artificial Sequence: Synthetic oligonucleotide
  misc_feature 1..20: note = Target: FXN; (+) strand; PAM type: NNNNGHTT; PAM sequence: CAGTGCTT
  source 1..20: mol_type = other DNA
gcccaaggcctatgctacca

SEQ ID NO: 7881 - DNA, 20 bp, synthetic construct
  misc_feature 1..20: note = Description of Artificial Sequence: Synthetic oligonucleotide
  misc_feature 1..20: note = Target: FXN; (+) strand; PAM type: NNNNGHTT; PAM sequence: CATGGATT
  source 1..20: mol_type = other DNA
acctggaggtcttgttaaac

SEQ ID NO: 7882 - DNA, 20 bp, synthetic construct
  misc_feature 1..20: note = Description of Artificial Sequence: Synthetic oligonucleotide
  misc_feature 1..20: note = Target: FXN; (+) strand; PAM type: NNNNGHTT; PAM sequence: CAGAGATT
  source 1..20: mol_type = other DNA
attgctgggccttgaaaccc

SEQ ID NO: 7883 - DNA, 20 bp, synthetic construct
  misc_feature 1..20: note = Description of Artificial Sequence: Synthetic oligonucleotide
  misc_feature 1..20: note = Target: FXN; (+) strand; PAM type: NNNNGHTT; PAM sequence: TTCTGATT
  source 1..20: mol_type = other DNA
gggccttgaaaccccagaga

SEQ ID NO: 7884 - DNA, 20 bp, synthetic construct
  misc_feature 1..20: note = Description of Artificial Sequence: Synthetic oligonucleotide
  misc_feature 1..20: note = Target: FXN; (+) strand; PAM type: NNNNGHTT; PAM sequence: ACAAGTTT
  source 1..20: mol_type = other DNA
cctgagaatttgtatttcta

SEQ ID NO: 7885 - DNA, 20 bp, synthetic construct
  misc_feature 1..20: note = Description of Artificial Sequence: Synthetic oligonucleotide
  misc_feature 1..20: note = Target: FXN; (+) strand; PAM type: NNNNGHTT; PAM sequence: CCCAGCTT
  source 1..20: mol_type = other DNA
ctttgcccacgccacggtgc

SEQ ID NO: 7886 - DNA, 20 bp, synthetic construct
  misc_feature 1..20: note = Description of Artificial Sequence: Synthetic oligonucleotide
  misc_feature 1..20: note = Target: FXN; (+) strand; PAM type: NNNNGHTT; PAM sequence: GCCTGATT
  source 1..20: mol_type = other DNA
cccagcttcttaccaagtgt

SEQ ID NO: 7887 - DNA, 20 bp, synthetic construct
  misc_feature 1..20: note = Description of Artificial Sequence: Synthetic oligonucleotide
  misc_feature 1..20: note = Target: FXN; (+) strand; PAM type: NNNNGHTT; PAM sequence: TGGAGATT
  source 1..20: mol_type = other DNA
aatctcttgaacccaggagg

SEQ ID NO: 7888 - DNA, 20 bp, synthetic construct
  misc_feature 1..20: note = Description of Artificial Sequence: Synthetic oligonucleotide
  misc_feature 1..20: note = Target: FXN; (+) strand; PAM type: NNNNGHTT; PAM sequence: TGCAGCTT
  source 1..20: mol_type = other DNA
ataataataataactaatga

SEQ ID NO: 7889 - DNA, 20 bp, synthetic construct
  misc_feature 1..20: note = Description of Artificial Sequence: Synthetic oligonucleotide
  misc_feature 1..20: note = Target: FXN; (+) strand; PAM type: NNNNGHTT; PAM sequence: TATGGTTT
  source 1..20: mol_type = other DNA
atgcctatgggctctccctt

SEQ ID NO: 7890 - DNA, 20 bp, synthetic construct
  misc_feature 1..20: note = Description of Artificial Sequence: Synthetic oligonucleotide
  misc_feature 1..20: note = Target: FXN; (+) strand; PAM type: NNNNGHTT; PAM sequence: GAGGGCTT
  source 1..20: mol_type = other DNA
tctccctttatggtttcaag

SEQ ID NO: 7891 - DNA, 20 bp, synthetic construct
  misc_feature 1..20: note = Description of Artificial Sequence: Synthetic oligonucleotide
  misc_feature 1..20: note = Target: FXN; (+) strand; PAM type: NNNNGHTT; PAM sequence: GGATGTTT
  source 1..20: mol_type = other DNA
gggctgtcctgcacatcaca

SEQ ID NO: 7892 - DNA, 20 bp, synthetic construct
  misc_feature 1..20: note = Description of Artificial Sequence: Synthetic oligonucleotide
  misc_feature 1..20: note = Target: FXN; (+) strand; PAM type: NNNNGHTT; PAM sequence: AAATGATT
  source 1..20: mol_type = other DNA
ccagatactttgcaggggga

SEQ ID NO: 7893 - DNA, 20 bp, synthetic construct
  misc_feature 1..20: note = Description of Artificial Sequence: Synthetic oligonucleotide
  misc_feature 1..20: note = Target: FXN; (+) strand; PAM type: NNNNGHTT; PAM sequence: CCTTGATT
  source 1..20: mol_type = other DNA
cacttcttccatgaatactt

SEQ ID NO: 7894 - DNA, 20 bp, synthetic construct
  misc_feature 1..20: note = Description of Artificial Sequence: Synthetic oligonucleotide
  misc_feature 1..20: note = Target: FXN; (+) strand; PAM type: NNNNGHTT; PAM sequence: GTTAGTTT
  source 1..20: mol_type = other DNA
cccactcaacactcacacct

SEQ ID NO: 7895 - DNA, 20 bp, synthetic construct
  misc_feature 1..20: note = Description of Artificial Sequence: Synthetic oligonucleotide
  misc_feature 1..20: note = Target: FXN; (+) strand; PAM type: NNNNGHTT; PAM sequence: TCACGATT
  source 1..20: mol_type = other DNA
gtatgtaaacatgtctctct

SEQ ID NO: 7896 - DNA, 20 bp, synthetic construct
  misc_feature 1..20: note = Description of Artificial Sequence: Synthetic oligonucleotide
  misc_feature 1..20: note = Target: FXN; (+) strand; PAM type: NNNNGHTT; PAM sequence: AGTGGCTT
  source 1..20: mol_type = other DNA
tctctcttcacgattcacaa

SEQ ID NO: 7897 - DNA, 20 bp, synthetic construct
  misc_feature 1..20: note = Description of Artificial Sequence: Synthetic oligonucleotide
  misc_feature 1..20: note = Target: FXN; (+) strand; PAM type: NNNNGHTT; PAM sequence: GATCGTTT
  source 1..20: mol_type = other DNA
ttgtgaggcccaggcgggca

SEQ ID NO: 7898 - DNA, 20 bp, synthetic construct
  misc_feature 1..20: note = Description of Artificial Sequence: Synthetic oligonucleotide
  misc_feature 1..20: note = Target: FXN; (+) strand; PAM type: NNNNGHTT; PAM sequence: GACTGCTT
  source 1..20: mol_type = other DNA
ttggaaggctgaaatgggaa

SEQ ID NO: 7899 - DNA, 20 bp, synthetic construct
  misc_feature 1..20: note = Description of Artificial Sequence: Synthetic oligonucleotide
  misc_feature 1..20: note = Target: FXN; (+) strand; PAM type: NNNNGHTT; PAM sequence: CAGAGCTT
  source 1..20: mol_type = other DNA
aatggcgtgaaaccgggagg

SEQ ID NO: 7900 - DNA, 20 bp, synthetic construct
  misc_feature 1..20: note = Description of Artificial Sequence: Synthetic oligonucleotide
  misc_feature 1..20: note = Target: FXN; (+) strand; PAM type: NNNNGHTT; PAM sequence: CAGGGCTT
  source 1..20: mol_type = other DNA
cctgtccaaaaaaaacttta

SEQ ID NO: 7901 - DNA, 20 bp, synthetic construct
  misc_feature 1..20: note = Description of Artificial Sequence: Synthetic oligonucleotide
  misc_feature 1..20: note = Target: FXN; (+) strand; PAM type: NNNNGHTT; PAM sequence: TACAGATT
  source 1..20: mol_type = other DNA
cagctaggaagtgggcagag

SEQ ID NO: 7902 - DNA, 20 bp, synthetic construct
  misc_feature 1..20: note = Description of Artificial Sequence: Synthetic oligonucleotide
  misc_feature 1..20: note = Target: FXN; (+) strand; PAM type: NNNNGHTT; PAM sequence: TCCTGTTT
  source 1..20: mol_type = other DNA
gacagcagctcccaagttcc

SEQ ID NO: 7903 - DNA, 20 bp, synthetic construct
  misc_feature 1..20: note = Description of Artificial Sequence: Synthetic oligonucleotide
  misc_feature 1..20: note = Target: FXN; (+) strand; PAM type: NNNNGHTT; PAM sequence: CCGTGCTT
  source 1..20: mol_type = other DNA
tcaggggtcctggttgcact

SEQ ID NO: 7904 - DNA, 20 bp, synthetic construct
  misc_feature 1..20: note = Description of Artificial Sequence: Synthetic oligonucleotide
  misc_feature 1..20: note = Target: FXN; (+) strand; PAM type: NNNNGHTT; PAM sequence: ACTGGCTT
  source 1..20: mol_type = other DNA
gttctcccggttgcatttac

SEQ ID NO: 7905 - DNA, 20 bp, synthetic construct
  misc_feature 1..20: note = Description of Artificial Sequence: Synthetic oligonucleotide
  misc_feature 1..20: note = Target: FXN; (+) strand; PAM type: NNNNGHTT; PAM sequence: TTCTGCTT
  source 1..20: mol_type = other DNA
ccggttgcatttacactggc

SEQ ID NO: 7906 - DNA, 20 bp, synthetic construct
  misc_feature 1..20: note = Description of Artificial Sequence: Synthetic oligonucleotide
  misc_feature 1..20: note = Target: FXN; (+) strand; PAM type: NNNNGHTT; PAM sequence: CCATGCTT
  source 1..20: mol_type = other DNA
cgaggggtgtgcggctgtct

SEQ ID NO: 7907 - DNA, 20 bp, synthetic construct
  misc_feature 1..20: note = Description of Artificial Sequence: Synthetic oligonucleotide
  misc_feature 1..20: note = Target: FXN; (+) strand; PAM type: NNNNGHTT; PAM sequence: ACTTGTTT
  source 1..20: mol_type = other DNA
cttgtcacttctctgcgata

SEQ ID NO: 7908 - DNA, 20 bp, synthetic construct
  misc_feature 1..20: note = Description of Artificial Sequence: Synthetic oligonucleotide
  misc_feature 1..20: note = Target: FXN; (+) strand; PAM type: NNNNGHTT; PAM sequence: GTGTGTTT
  source 1..20: mol_type = other DNA
atagcgtgtgtgttgtgtgt

SEQ ID NO: 7909 - DNA, 20 bp, synthetic construct
  misc_feature 1..20: note = Description of Artificial Sequence: Synthetic oligonucleotide
  misc_feature 1..20: note = Target: FXN; (+) strand; PAM type: NNNNGHTT; PAM sequence: GCTGGATT
  source 1..20: mol_type = other DNA
gcacacctaatattttcaag

SEQ ID NO: 7910 - DNA, 20 bp, synthetic construct
  misc_feature 1..20: note = Description of Artificial Sequence: Synthetic oligonucleotide
  misc_feature 1..20: note = Target: FXN; (+) strand; PAM type: NNNNGHTT; PAM sequence: AAATGCTT
  source 1..20: mol_type = other DNA
aggctggatttttttgaacg

SEQ ID NO: 7911 - DNA, 20 bp, synthetic construct
  misc_feature 1..20: note = Description of Artificial Sequence: Synthetic oligonucleotide
  misc_feature 1..20: note = Target: FXN; (+) strand; PAM type: NNNNGHTT; PAM sequence: CCTGGCTT
  source 1..20: mol_type = other DNA
atagctagagcagcaggggc

SEQ ID NO: 7912 - DNA, 20 bp, synthetic construct
  misc_feature 1..20: note = Description of Artificial Sequence: Synthetic oligonucleotide
  misc_feature 1..20: note = Target: FXN; (+) strand; PAM type: NNNNGHTT; PAM sequence: TCCAGATT
  source 1..20: mol_type = other DNA
gaaactgacccgacctttat

SEQ ID NO: 7913 - DNA, 20 bp, synthetic construct
  misc_feature 1..20: note = Description of Artificial Sequence: Synthetic oligonucleotide
  misc_feature 1..20: note = Target: FXN; (+) strand; PAM type: NNNNGHTT; PAM sequence: GGGGGATT
  source 1..20: mol_type = other DNA
ccgcagagctgtgtgacctt

SEQ ID NO: 7914 - DNA, 20 bp, synthetic construct
  misc_feature 1..20: note = Description of Artificial Sequence: Synthetic oligonucleotide
  misc_feature 1..20: note = Target: FXN; (+) strand; PAM type: NNNNGHTT; PAM sequence: CGTGGCTT
  source 1..20: mol_type = other DNA
ttcccctaacctctctgaga

SEQ ID NO: 7915 - DNA, 20 bp, synthetic construct
  misc_feature 1..20: note = Description of Artificial Sequence: Synthetic oligonucleotide
  misc_feature 1..20: note = Target: FXN; (+) strand; PAM type: NNNNGHTT; PAM sequence: CTTTGTTT
  source 1..20: mol_type = other DNA
ctaacctctctgagacgtgg

SEQ ID NO: 7916 - DNA, 20 bp, synthetic construct
  misc_feature 1..20: note = Description of Artificial Sequence: Synthetic oligonucleotide
  misc_feature 1..20: note = Target: FXN; (+) strand; PAM type: NNNNGHTT; PAM sequence: TGAGGATT
  source 1..20: mol_type = other DNA
cccattttgcggacctggtg

SEQ ID NO: 7917 - DNA, 20 bp, synthetic construct
  misc_feature 1..20: note = Description of Artificial Sequence: Synthetic oligonucleotide
  misc_feature 1..20: note = Target: FXN; (+) strand; PAM type: NNNNGHTT; PAM sequence: CACGGCTT
  source 1..20: mol_type = other DNA
aatatctgacccagttacgc

SEQ ID NO: 7918 - DNA, 20 bp, synthetic construct
  misc_feature 1..20: note = Description of Artificial Sequence: Synthetic oligonucleotide
  misc_feature 1..20: note = Target: FXN; (+) strand; PAM type: NNNNGHTT; PAM sequence: GGAAGATT
  source 1..20: mol_type = other DNA
aagaatggctgtggggatga

SEQ ID NO: 7919 - DNA, 20 bp, synthetic construct
  misc_feature 1..20: note = Description of Artificial Sequence: Synthetic oligonucleotide
  misc_feature 1..20: note = Target: FXN; (+) strand; PAM type: NNNNGHTT; PAM sequence: GGGTGTTT
  source 1..20: mol_type = other DNA
gatgccaaggaagtggtaga

SEQ ID NO: 7920 - DNA, 20 bp, synthetic construct
  misc_feature 1..20: note = Description of Artificial Sequence: Synthetic oligonucleotide
  misc_feature 1..20: note = Target: FXN; (+) strand; PAM type: NNNNGHTT; PAM sequence: CGGAGTTT
  source 1..20: mol_type = other DNA
gccatatttgtgttgctctc

SEQ ID NO: 7921 - DNA, 20 bp, synthetic construct
  misc_feature 1..20: note = Description of Artificial Sequence: Synthetic oligonucleotide
  misc_feature 1..20: note = Target: FXN; (+) strand; PAM type: NNNNGHTT; PAM sequence: TTAGGCTT
  source 1..20: mol_type = other DNA
tgctctccggagtttgtact

SEQ ID NO: 7922 - DNA, 20 bp, synthetic construct
  misc_feature 1..20: note = Description of Artificial Sequence: Synthetic oligonucleotide
  misc_feature 1..20: note = Target: FXN; (+) strand; PAM type: NNNNGHTT; PAM sequence: TTGTGTTT
  source 1..20: mol_type = other DNA
cacgtgttatttggcccaca

SEQ ID NO: 7923 - DNA, 20 bp, synthetic construct
  misc_feature 1..20: note = Description of Artificial Sequence: Synthetic oligonucleotide
  misc_feature 1..20: note = Target: FXN; (+) strand; PAM type: NNNNGHTT; PAM sequence: TTGGGATT
  source 1..20: mol_type = other DNA
acattgtgtttgaagaaact

SEQ ID NO: 7924 - DNA, 20 bp, synthetic construct
  misc_feature 1..20: note = Description of Artificial Sequence: Synthetic oligonucleotide
  misc_feature 1..20: note = Target: FXN; (+) strand; PAM type: NNNNGHTT; PAM sequence: CAGTGCTT
  source 1..20: mol_type = other DNA
gaaactttgggattggttgc

SEQ ID NO: 7925 - DNA, 20 bp, synthetic construct
  misc_feature 1..20: note = Description of Artificial Sequence: Synthetic oligonucleotide
  misc_feature 1..20: note = Target: FXN; (+) strand; PAM type: NNNNGHTT; PAM sequence: AATGGATT
  source 1..20: mol_type = other DNA
ttaaaagttaggacttagaa

SEQ ID NO: 7926 - DNA, 20 bp, synthetic construct
  misc_feature 1..20: note = Description of Artificial Sequence: Synthetic oligonucleotide
  misc_feature 1..20: note = Target: FXN; (+) strand; PAM type: NNNNGHTT; PAM sequence: AATCGCTT
  source 1..20: mol_type = other DNA
tccagaggctgcggcaggag

SEQ ID NO: 7927 - DNA, 20 bp, synthetic construct
  misc_feature 1..20: note = Description of Artificial Sequence: Synthetic oligonucleotide
  misc_feature 1..20: note = Target: FXN; (+) strand; PAM type: NNNNGHTT; PAM sequence: AATGGATT
  source 1..20: mol_type = other DNA
taaataaaaataaaaaataa

SEQ ID NO: 7928 - DNA, 20 bp, synthetic construct
  misc_feature 1..20: note = Description of Artificial Sequence: Synthetic oligonucleotide
  misc_feature 1..20: note = Target: FXN; (+) strand; PAM type: NNNNGHTT; PAM sequence: CTTGGCTT
  source 1..20: mol_type = other DNA
aggaaagcagacatttatta

SEQ ID NO: 7929 - DNA, 20 bp, synthetic construct
  misc_feature 1..20: note = Description of Artificial Sequence: Synthetic oligonucleotide
  misc_feature 1..20: note = Target: FXN; (+) strand; PAM type: NNNNGHTT; PAM sequence: TTGGGCTT
  source 1..20: mol_type = other DNA
actatctgagctgccacgta

SEQ ID NO: 7930 - DNA, 20 bp, synthetic construct
  misc_feature 1..20: note = Description of Artificial Sequence: Synthetic oligonucleotide
  misc_feature 1..20: note = Target: FXN; (+) strand; PAM type: NNNNGHTT; PAM sequence: TTGTGTTT
  source 1..20: mol_type = other DNA
agcatgggttgtcagcagag

SEQ ID NO: 7931 - DNA, 20 bp, synthetic construct
  misc_feature 1..20: note = Description of Artificial Sequence: Synthetic oligonucleotide
  misc_feature 1..20: note = Target: FXN; (+) strand; PAM type: NNNNGHTT; PAM sequence: TTTTGTTT
  source 1..20: mol_type = other DNA
gggttgtcagcagagttgtg

SEQ ID NO: 7932 - DNA, 20 bp, synthetic construct
  misc_feature 1..20: note = Description of Artificial Sequence: Synthetic oligonucleotide
  misc_feature 1..20: note = Target: FXN; (+) strand; PAM type: NNNNGHTT; PAM sequence: TTTTGTTT
  source 1..20: mol_type = other DNA
gtcagcagagttgtgttttg

SEQ ID NO: 7933 - DNA, 20 bp, synthetic construct
  misc_feature 1..20: note = Description of Artificial Sequence: Synthetic oligonucleotide
  misc_feature 1..20: note = Target: FXN; (+) strand; PAM type: NNNNGHTT; PAM sequence: CAGAGTTT
  source 1..20: mol_type = other DNA
tttgttttgtttttttgaga

SEQ ID NO: 7934 - DNA, 20 bp, synthetic construct
  misc_feature 1..20: note = Description of Artificial Sequence: Synthetic oligonucleotide
  misc_feature 1..20: note = Target: FXN; (+) strand; PAM type: NNNNGHTT; PAM sequence: AAGTGATT
  source 1..20: mol_type = other DNA
aacctctgcctcctgggttc

SEQ ID NO: 7935 - DNA, 20 bp, synthetic construct
  misc_feature 1..20: note = Description of Artificial Sequence: Synthetic oligonucleotide
  misc_feature 1..20: note = Target: FXN; (+) strand; PAM type: NNNNGHTT; PAM sequence: CTGGGATT
  source 1..20: mol_type = other DNA
tgcctcagcctcccgagtag

SEQ ID NO: 7936 - DNA, 20 bp, synthetic construct
  misc_feature 1..20: note = Description of Artificial Sequence: Synthetic oligonucleotide
  misc_feature 1..20: note = Target: FXN; (+) strand; PAM type: NNNNGHTT; PAM sequence: GACAGATT
  source 1..20: mol_type = other DNA
aattttgtatttttagtaga

SEQ ID NO: 7937 - DNA, 20 bp, synthetic construct
  misc_feature 1..20: note = Description of Artificial Sequence: Synthetic oligonucleotide
  misc_feature 1..20: note = Target: FXN; (+) strand; PAM type: NNNNGHTT; PAM sequence: CAGAGTTT
  source 1..20: mol_type = other DNA
ccaccgcgtctggccatcag

SEQ ID NO: 7938 - DNA, 20 bp, synthetic construct
  misc_feature 1..20: note = Description of Artificial Sequence: Synthetic oligonucleotide
  misc_feature 1..20: note = Target: FXN; (+) strand; PAM type: NNNNGHTT; PAM sequence: TACAGTTT
  source 1..20: mol_type = other DNA
aggagaatgacaagaggtgg

SEQ ID NO: 7939 - DNA, 20 bp, synthetic construct
  misc_feature 1..20: note = Description of Artificial Sequence: Synthetic oligonucleotide
  misc_feature 1..20: note = Target: FXN; (+) strand; PAM type: NNNNGHTT; PAM sequence: CTGGGTTT
  source 1..20: mol_type = other DNA
tgccgcccaggaggtggaca

SEQ ID NO: 7940 - DNA, 20 bp, synthetic construct
  misc_feature 1..20: note = Description of Artificial Sequence: Synthetic oligonucleotide
  misc_feature 1..20: note = Target: FXN; (+) strand; PAM type: NNNNGHTT; PAM sequence: ATTTGTTT
  source 1..20: mol_type = other DNA
ttctatactgaattaatcac

SEQ ID NO: 7941 - DNA, 20 bp, synthetic construct
  misc_feature 1..20: note = Description of Artificial Sequence: Synthetic oligonucleotide
  misc_feature 1..20: note = Target: FXN; (+) strand; PAM type: NNNNGHTT; PAM sequence: TCCTGTTT
  source 1..20: mol_type = other DNA
agtggcaactggggccacca

SEQ ID NO: 7942 - DNA, 20 bp, synthetic construct
  misc_feature 1..20: note = Description of Artificial Sequence: Synthetic oligonucleotide
  misc_feature 1..20: note = Target: FXN; (+) strand; PAM type: NNNNGHTT; PAM sequence: CCTGGATT
  source 1..20: mol_type = other DNA
tattttaaagccctgactgt

SEQ ID NO: 7943 - DNA, 20 bp, synthetic construct
  misc_feature 1..20: note = Description of Artificial Sequence: Synthetic oligonucleotide
  misc_feature 1..20: note = Target: FXN; (+) strand; PAM type: NNNNGHTT; PAM sequence: CCAAGATT
  source 1..20: mol_type = other DNA
gaggcagaggttgcagtgag

SEQ ID NO: 7944 - DNA, 20 bp, synthetic construct
  misc_feature 1..20: note = Description of Artificial Sequence: Synthetic oligonucleotide
  misc_feature 1..20: note = Target: FXN; (+) strand; PAM type: NNNNGHTT; PAM sequence: GGGGGATT
  source 1..20: mol_type = other DNA
ttgcagtgagccaagatttt

SEQ ID NO: 7945 - DNA, 20 bp, synthetic construct
  misc_feature 1..20: note = Description of Artificial Sequence: Synthetic oligonucleotide
  misc_feature 1..20: note = Target: FXN; (+) strand; PAM type: NNNNGHTT; PAM sequence: AGGAGTTT
  source 1..20: mol_type = other DNA
tgggcggatcacctgaggtc

SEQ ID NO: 7946 - DNA, 20 bp, synthetic construct
  misc_feature 1..20: note = Description of Artificial Sequence: Synthetic oligonucleotide
  misc_feature 1..20: note = Target: FXN; (+) strand; PAM type: NNNNGHTT; PAM sequence: AATTGCTT
  source 1..20: mol_type = other DNA
tcaggaggctgaggcaggat

SEQ ID NO: 7947 - DNA, 20 bp, synthetic construct
  misc_feature 1..20: note = Description of Artificial Sequence: Synthetic oligonucleotide
  misc_feature 1..20: note = Target: FXN; (+) strand; PAM type: NNNNGHTT; PAM sequence: AACGGCTT
  source 1..20: mol_type = other DNA
cagaaccaagaatccacaga

SEQ ID NO: 7948 - DNA, 20 bp, synthetic construct
  misc_feature 1..20: note = Description of Artificial Sequence: Synthetic oligonucleotide
  misc_feature 1..20: note = Target: FXN; (+) strand; PAM type: NNNNGHTT; PAM sequence: CTCTGATT
  source 1..20: mol_type = other DNA
tacctggaggctgggaagga

SEQ ID NO: 7949 - DNA, 20 bp, synthetic construct
  misc_feature 1..20: note = Description of Artificial Sequence: Synthetic oligonucleotide
  misc_feature 1..20: note = Target: FXN; (+) strand; PAM type: NNNNGHTT; PAM sequence: CTATGTTT
  source 1..20: mol_type = other DNA
ctctgattccacgaggcagc

SEQ ID NO: 7950 - DNA, 20 bp, synthetic construct
  misc_feature 1..20: note = Description of Artificial Sequence: Synthetic oligonucleotide
  misc_feature 1..20: note = Target: FXN; (+) strand; PAM type: NNNNGHTT; PAM sequence: TAACGTTT
  source 1..20: mol_type = other DNA
tgtgacaggggctgcatctt

SEQ ID NO: 7951 - DNA, 20 bp, synthetic construct
  misc_feature 1..20: note = Description of Artificial Sequence: Synthetic oligonucleotide
  misc_feature 1..20: note = Target: FXN; (+) strand; PAM type: NNNNGHTT; PAM sequence: GACAGCTT
  source 1..20: mol_type = other DNA
gtttcctcttaaatactgga

SEQ ID NO: 7952 - DNA, 20 bp, synthetic construct
  misc_feature 1..20: note = Description of Artificial Sequence: Synthetic oligonucleotide
  misc_feature 1..20: note = Target: FXN; (+) strand; PAM type: NNNNGHTT; PAM sequence: TAACGTTT
  source 1..20: mol_type = other DNA
atgtgacggggctgcgtctt

SEQ ID NO: 7953 - DNA, 20 bp, synthetic construct
  misc_feature 1..20: note = Description of Artificial Sequence: Synthetic oligonucleotide
  misc_feature 1..20: note = Target: FXN; (+) strand; PAM type: NNNNGHTT; PAM sequence: GACAGCTT
  source 1..20: mol_type = other DNA
gtttcctcttaaataccgga

SEQ ID NO: 7954 - DNA, 20 bp, synthetic construct
  misc_feature 1..20: note = Description of Artificial Sequence: Synthetic oligonucleotide
  misc_feature 1..20: note = Target: FXN; (+) strand; PAM type: NNNNGHTT; PAM sequence: GGATGTTT
  source 1..20: mol_type = other DNA
gcttcgagaaggagataact

SEQ ID NO: 7955 - DNA, 20 bp, synthetic construct
  misc_feature 1..20: note = Description of Artificial Sequence: Synthetic oligonucleotide
  misc_feature 1..20: note = Target: FXN; (+) strand; PAM type: NNNNGHTT; PAM sequence: TGTTGCTT
  source 1..20: mol_type = other DNA
atgtttcttagtccattttc

SEQ ID NO: 7956 - DNA, 20 bp, synthetic construct
  misc_feature 1..20: note = Description of Artificial Sequence: Synthetic oligonucleotide
  misc_feature 1..20: note = Target: FXN; (+) strand; PAM type: NNNNGHTT; PAM sequence: ACTAGTTT
  source 1..20: mol_type = other DNA
ttcttttcttataaagccta

SEQ ID NO: 7957 - DNA, 20 bp, synthetic construct
  misc_feature 1..20: note = Description of Artificial Sequence: Synthetic oligonucleotide
  misc_feature 1..20: note = Target: FXN; (+) strand; PAM type: NNNNGHTT; PAM sequence: AATGGATT
  source 1..20: mol_type = other DNA
tgataacccattaatctatg

SEQ ID NO: 7958 - DNA, 20 bp, synthetic construct
  misc_feature 1..20: note = Description of Artificial Sequence: Synthetic oligonucleotide
  misc_feature 1..20: note = Target: FXN; (+) strand; PAM type: NNNNGHTT; PAM sequence: CACCGCTT
  source 1..20: mol_type = other DNA
aagaaccttcatgacccagt

SEQ ID NO: 7959 - DNA, 20 bp, synthetic construct
  misc_feature 1..20: note = Description of Artificial Sequence: Synthetic oligonucleotide
  misc_feature 1..20: note = Target: FXN; (+) strand; PAM type: NNNNGHTT; PAM sequence: TTAAGTTT
  source 1..20: mol_type = other DNA
caatactgccacatcgggaa

SEQ ID NO: 7960 - DNA, 20 bp, synthetic construct
  misc_feature 1..20: note = Description of Artificial Sequence: Synthetic oligonucleotide
  misc_feature 1..20: note = Target: FXN; (+) strand; PAM type: NNNNGHTT; PAM sequence: ATGAGTTT
  source 1..20: mol_type = other DNA
atcgggaattaagtttcaac

SEQ ID NO: 7961 - DNA, 20 bp, synthetic construct
  misc_feature 1..20: note = Description of Artificial Sequence: Synthetic oligonucleotide
  misc_feature 1..20: note = Target: FXN; (+) strand; PAM type: NNNNGHTT; PAM sequence: GGCAGCTT
  source 1..20: mol_type = other DNA
atccacttctgcatgccttg

SEQ ID NO: 7962 - DNA, 20 bp, synthetic construct
  misc_feature 1..20: note = Description of Artificial Sequence: Synthetic oligonucleotide
  misc_feature 1..20: note = Target: FXN; (+) strand; PAM type: NNNNGHTT; PAM sequence: TTTGGCTT
  source 1..20: mol_type = other DNA
cacctgtgatcctatgacct

SEQ ID NO: 7963 - DNA, 20 bp, synthetic construct
  misc_feature 1..20: note = Description of Artificial Sequence: Synthetic oligonucleotide
  misc_feature 1..20: note = Target: FXN; (+) strand; PAM type: NNNNGHTT; PAM sequence: ACAAGTTT
  source 1..20: mol_type = other DNA
ttgtcttgcagacaatttac

SEQ ID NO: 7964 - DNA, 20 bp, synthetic construct
  misc_feature 1..20: note = Description of Artificial Sequence: Synthetic oligonucleotide
  misc_feature 1..20: note = Target: FXN; (+) strand; PAM type: NNNNGHTT; PAM sequence: CAGAGCTT
  source 1..20: mol_type = other DNA
aatggcgtgaacccgggagg

SEQ ID NO: 7965 - DNA, 20 bp, synthetic construct
  misc_feature 1..20: note = Description of Artificial Sequence: Synthetic oligonucleotide
  misc_feature 1..20: note = Target: FXN; (+) strand; PAM type: NNNNGHTT; PAM sequence: TACTGCTT
  source 1..20: mol_type = other DNA
aataaataaataaatattta

SEQ ID NO: 7966 - DNA, 20 bp, synthetic construct
  misc_feature 1..20: note = Description of Artificial Sequence: Synthetic oligonucleotide
  misc_feature 1..20: note = Target: FXN; (+) strand; PAM type: NNNNGHTT; PAM sequence: GCATGTTT
  source 1..20: mol_type = other DNA
aataataaatgctatggtct

SEQ ID NO: 7967 - DNA, 20 bp, synthetic construct
  misc_feature 1..20: note = Description of Artificial Sequence: Synthetic oligonucleotide
  misc_feature 1..20: note = Target: FXN; (+) strand; PAM type: NNNNGHTT; PAM sequence: ATATGATT
  source 1..20: mol_type = other DNA
gaggtatgagggtggagccc

SEQ ID NO: 7968 - DNA, 20 bp, synthetic construct
  misc_feature 1..20: note = Description of Artificial Sequence: Synthetic oligonucleotide
  misc_feature 1..20: note = Target: FXN; (+) strand; PAM type: NNNNGHTT; PAM sequence: TTGGGATT
  source 1..20: mol_type = other DNA
tgagggtggagcccatatga

SEQ ID NO: 7969 - DNA, 20 bp, synthetic construct
  misc_feature 1..20: note = Description of Artificial Sequence: Synthetic oligonucleotide
  misc_feature 1..20: note = Target: FXN; (+) strand; PAM type: NNNNGHTT; PAM sequence: CTTGGATT
  source 1..20: mol_type = other DNA
aaagctgttggtgcattgat

SEQ ID NO: 7970 - DNA, 20 bp, synthetic construct
  misc_feature 1..20: note = Description of Artificial Sequence: Synthetic oligonucleotide
  misc_feature 1..20: note = Target: FXN; (+) strand; PAM type: NNNNGHTT; PAM sequence: TATTGTTT
  source 1..20: mol_type = other DNA
gactctaagaaacacatttc

SEQ ID NO: 7971 - DNA, 20 bp, synthetic construct
  misc_feature 1..20: note = Description of Artificial Sequence: Synthetic oligonucleotide
  misc_feature 1..20: note = Target: FXN; (+) strand; PAM type: NNNNGHTT; PAM sequence: ATTTGTTT
  source 1..20: mol_type = other DNA
acaccaggttaagagataga

SEQ ID NO: 7972 - DNA, 20 bp, synthetic construct
  misc_feature 1..20: note = Description of Artificial Sequence: Synthetic oligonucleotide
  misc_feature 1..20: note = Target: FXN; (+) strand; PAM type: NNNNGHTT; PAM sequence: TAGAGTTT
  source 1..20: mol_type = other DNA
tcatcgtaccctccttttct

SEQ ID NO: 7973 - DNA, 20 bp, synthetic construct
  misc_feature 1..20: note = Description of Artificial Sequence: Synthetic oligonucleotide
  misc_feature 1..20: note = Target: FXN; (+) strand; PAM type: NNNNGHTT; PAM sequence: TATTGCTT
  source 1..20: mol_type = other DNA
tgtatctcccccaatccatg

SEQ ID NO: 7974 - DNA, 20 bp, synthetic construct
  misc_feature 1..20: note = Description of Artificial Sequence: Synthetic oligonucleotide
  misc_feature 1..20: note = Target: FXN; (+) strand; PAM type: NNNNGHTT; PAM sequence: TATGGCTT
  source 1..20: mol_type = other DNA
ttctgctgtatctgttctgc

SEQ ID NO: 7975 - DNA, 20 bp, synthetic construct
  misc_feature 1..20: note = Description of Artificial Sequence: Synthetic oligonucleotide
  misc_feature 1..20: note = Target: FXN; (+) strand; PAM type: NNNNGHTT; PAM sequence: CACTGTTT
  source 1..20: mol_type = other DNA
ggcttgccccttttgttcaa

SEQ ID NO: 7976 - DNA, 20 bp, synthetic construct
  misc_feature 1..20: note = Description of Artificial Sequence: Synthetic oligonucleotide
  misc_feature 1..20: note = Target: FXN; (+) strand; PAM type: NNNNGHTT; PAM sequence: GGTTGATT
  source 1..20: mol_type = other DNA
ggttcctttaggtgacattt

SEQ ID NO: 7977 - DNA, 20 bp, synthetic construct
  misc_feature 1..20: note = Description of Artificial Sequence: Synthetic oligonucleotide
  misc_feature 1..20: note = Target: FXN; (+) strand; PAM type: NNNNGHTT; PAM sequence: TCCTGATT
  source 1..20: mol_type = other DNA
cctcccctgcgaggtatggg

SEQ ID NO: 7978 - DNA, 20 bp, synthetic construct
  misc_feature 1..20: note = Description of Artificial Sequence: Synthetic oligonucleotide
  misc_feature 1..20: note = Target: FXN; (+) strand; PAM type: NNNNGHTT; PAM sequence: TGTGGTTT
  source 1..20: mol_type = other DNA
ctgattcactcttcaagtgc

SEQ ID NO: 7979 - DNA, 20 bp, synthetic construct
  misc_feature 1..20: note = Description of Artificial Sequence: Synthetic oligonucleotide
  misc_feature 1..20: note = Target: FXN; (+) strand; PAM type: NNNNGHTT; PAM sequence: CAATGATT
  source 1..20: mol_type = other DNA
agtccttaccagggggtagg

SEQ ID NO: 7980 - DNA, 20 bp, synthetic construct
  misc_feature 1..20: note = Description of Artificial Sequence: Synthetic oligonucleotide
  misc_feature 1..20: note = Target: FXN; (+) strand; PAM type: NNNNGHTT; PAM sequence: GGTGGCTT
  source 1..20: mol_type = other DNA
agagggagacatggctgcca

SEQ ID NO: 7981 - DNA, 20 bp, synthetic construct
  misc_feature 1..20: note = Description of Artificial Sequence: Synthetic oligonucleotide
  misc_feature 1..20: note = Target: FXN; (+) strand; PAM type: NNNNGHTT; PAM sequence: GGTGGCTT
  source 1..20: mol_type = other DNA
cactcatcatggccaggtgc

SEQ ID NO: 7982 - DNA, 20 bp, synthetic construct
  misc_feature 1..20: note = Description of Artificial Sequence: Synthetic oligonucleotide
  misc_feature 1..20: note = Target: FXN; (+) strand; PAM type: NNNNGHTT; PAM sequence: CCTAGATT
  source 1..20: mol_type = other DNA
gaggcggaggttgcaataag

SEQ ID NO: 7983 - DNA, 20 bp, synthetic construct
  misc_feature 1..20: note = Description of Artificial Sequence: Synthetic oligonucleotide
  misc_feature 1..20: note = Target: FXN; (+) strand; PAM type: NNNNGHTT; PAM sequence: CCAAGCTT
  source 1..20: mol_type = other DNA
tcatcctatgaccttgacct

SEQ ID NO: 7984 - DNA, 20 bp, synthetic construct
  misc_feature 1..20: note = Description of Artificial Sequence: Synthetic oligonucleotide
  misc_feature 1..20: note = Target: FXN; (+) strand; PAM type: NNNNGHTT; PAM sequence: GGAAGTTT
  source 1..20: mol_type = other DNA
agcctcccttaggcagaggc

SEQ ID NO: 7985 - DNA, 20 bp, synthetic construct
  misc_feature 1..20: note = Description of Artificial Sequence: Synthetic oligonucleotide
  misc_feature 1..20: note = Target: FXN; (+) strand; PAM type: NNNNGHTT; PAM sequence: TCTTGTTT
  source 1..20: mol_type = other DNA
tacttggggtatttctgttc

SEQ ID NO: 7986 - DNA, 20 bp, synthetic construct
  misc_feature 1..20: note = Description of Artificial Sequence: Synthetic oligonucleotide
  misc_feature 1..20: note = Target: FXN; (+) strand; PAM type: NNNNGHTT; PAM sequence: TGAGGTTT
  source 1..20: mol_type = other DNA
ttgttttatgctcacggttg

SEQ ID NO: 7987 - DNA, 20 bp, synthetic construct
  misc_feature 1..20: note = Description of Artificial Sequence: Synthetic oligonucleotide
  misc_feature 1..20: note = Target: FXN; (+) strand; PAM type: NNNNGHTT; PAM sequence: AAAGGTTT
  source 1..20: mol_type = other DNA
aggagtaaactgaggttcca

SEQ ID NO: 7988 - DNA, 20 bp, synthetic construct
  misc_feature 1..20: note = Description of Artificial Sequence: Synthetic oligonucleotide
  misc_feature 1..20: note = Target: FXN; (+) strand; PAM type: NNNNGHTT; PAM sequence: TTATGATT
  source 1..20: mol_type = other DNA
tatttggcaacggttctttt

SEQ ID NO: 7989 - DNA, 20 bp, synthetic construct
  misc_feature 1..20: note = Description of Artificial Sequence: Synthetic oligonucleotide
  misc_feature 1..20: note = Target: FXN; (+) strand; PAM type: NNNNGHTT; PAM sequence: TAAGGTTT
  source 1..20: mol_type = other DNA
gtatcagcgactaagacaac

SEQ ID NO: 7990 - DNA, 20 bp, synthetic construct
  misc_feature 1..20: note = Description of Artificial Sequence: Synthetic oligonucleotide
  misc_feature 1..20: note = Target: FXN; (+) strand; PAM type: NNNNGHTT; PAM sequence: GGATGTTT
  source 1..20: mol_type = other DNA
attctcagacacttttcctt

SEQ ID NO: 7991 - DNA, 20 bp, synthetic construct
  misc_feature 1..20: note = Description of Artificial Sequence: Synthetic oligonucleotide
  misc_feature 1..20: note = Target: FXN; (+) strand; PAM type: NNNNGHTT; PAM sequence: CACTGCTT
  source 1..20: mol_type = other DNA
ttttccttggatgttttgag

SEQ ID NO: 7992 - DNA, 20 bp, synthetic construct
  misc_feature 1..20: note = Description of Artificial Sequence: Synthetic oligonucleotide
  misc_feature 1..20: note = Target: FXN; (+) strand; PAM type: NNNNGHTT; PAM sequence: GACAGCTT
  source 1..20: mol_type = other DNA
gtgcacagactctggggcca

SEQ ID NO: 7993 - DNA, 20 bp, synthetic construct
  misc_feature 1..20: note = Description of Artificial Sequence: Synthetic oligonucleotide
  misc_feature 1..20: note = Target: FXN; (+) strand; PAM type: NNNNGHTT; PAM sequence: GTCAGTTT
  source 1..20: mol_type = other DNA
ggcaagttaccctttggtgc

SEQ ID NO: 7994 - DNA, 20 bp, synthetic construct
  misc_feature 1..20: note = Description of Artificial Sequence: Synthetic oligonucleotide
  misc_feature 1..20: note = Target: FXN; (+) strand; PAM type: NNNNGHTT; PAM sequence: GGTCGTTT
  source 1..20: mol_type = other DNA
cagtacccctagccttttgg

SEQ ID NO: 7995 - DNA, 20 bp, synthetic construct
  misc_feature 1..20: note = Description of Artificial Sequence: Synthetic oligonucleotide
  misc_feature 1..20: note = Target: FXN; (+) strand; PAM type: NNNNGHTT; PAM sequence: GTCTGATT
  source 1..20: mol_type = other DNA
taaactgtgtccttttcaca

SEQ ID NO: 7996 - DNA, 20 bp, synthetic construct
  misc_feature 1..20: note = Description of Artificial Sequence: Synthetic oligonucleotide
  misc_feature 1..20: note = Target: FXN; (+) strand; PAM type: NNNNGHTT; PAM sequence: CCATGTTT
  source 1..20: mol_type = other DNA
ttttcacagtctgattagtg

SEQ ID NO: 7997 - DNA, 20 bp, synthetic construct
  misc_feature 1..20: note = Description of Artificial Sequence: Synthetic oligonucleotide
  misc_feature 1..20: note = Target: FXN; (+) strand; PAM type: NNNNGHTT; PAM sequence: TTCAGATT
  source 1..20: mol_type = other DNA
gtctgattagtgccatgttt

SEQ ID NO: 7998 - DNA, 20 bp, synthetic construct
  misc_feature 1..20: note = Description of Artificial Sequence: Synthetic oligonucleotide
  misc_feature 1..20: note = Target: FXN; (+) strand; PAM type: NNNNGHTT; PAM sequence: TTATGCTT
  source 1..20: mol_type = other DNA
gtgccatgtttttcagattt

SEQ ID NO: 7999 - DNA, 20 bp, synthetic construct
  misc_feature 1..20: note = Description of Artificial Sequence: Synthetic oligonucleotide
  misc_feature 1..20: note = Target: FXN; (+) strand; PAM type: NNNNGHTT; PAM sequence: CAAAGTTT
  source 1..20: mol_type = other DNA
aattgtctccaagtgtagtg

SEQ ID NO: 8000 - DNA, 20 bp, synthetic construct
  misc_feature 1..20: note = Description of Artificial Sequence: Synthetic oligonucleotide
  misc_feature 1..20: note = Target: FXN; (+) strand; PAM type: NNNNGHTT; PAM sequence: AGAAGCTT
  source 1..20: mol_type = other DNA
agagaaaatgcatgtgttag

SEQ ID NO: 8001 - DNA, 20 bp, synthetic construct
  misc_feature 1..20: note = Description of Artificial Sequence: Synthetic oligonucleotide
  misc_feature 1..20: note = Target: FXN; (+) strand; PAM type: NNNNGHTT; PAM sequence: TGTTGTTT
  source 1..20: mol_type = other DNA
atcaattaatttgttgttgt

SEQ ID NO: 8002 - DNA, 20 bp, synthetic construct
  misc_feature 1..20: note = Description of Artificial Sequence: Synthetic oligonucleotide
  misc_feature 1..20: note = Target: FXN; (+) strand; PAM type: NNNNGHTT; PAM sequence: TAATGTTT
  source 1..20: mol_type = other DNA
tacaccccaccacacccaga

SEQ ID NO: 8003 - DNA, 20 bp, synthetic construct
  misc_feature 1..20: note = Description of Artificial Sequence: Synthetic oligonucleotide
  misc_feature 1..20: note = Target: FXN; (+) strand; PAM type: NNNNGHTT; PAM sequence: CCCGGATT
  source 1..20: mol_type = other DNA
gctcactgcaacctccacct

SEQ ID NO: 8004 - DNA, 20 bp, synthetic construct
  misc_feature 1..20: note = Description of Artificial Sequence: Synthetic oligonucleotide
  misc_feature 1..20: note = Target: FXN; (+) strand; PAM type: NNNNGHTT; PAM sequence: CACAGATT
  source 1..20: mol_type = other DNA
tgcctcagcctcctgagtag

SEQ ID NO: 8005 - DNA, 20 bp, synthetic construct
  misc_feature 1..20: note = Description of Artificial Sequence: Synthetic oligonucleotide
  misc_feature 1..20: note = Target: FXN; (+) strand; PAM type: NNNNGHTT; PAM sequence: TTGTGTTT
  source 1..20: mol_type = other DNA
tcatcacgccttgctaattt

SEQ ID NO: 8006 - DNA, 20 bp, synthetic construct
  misc_feature 1..20: note = Description of Artificial Sequence: Synthetic oligonucleotide
  misc_feature 1..20: note = Target: FXN; (+) strand; PAM type: NNNNGHTT; PAM sequence: CGGGGTTT
  source 1..20: mol_type = other DNA
ttttgtgtttttagtagagg

SEQ ID NO: 8007 - DNA, 20 bp, synthetic construct
  misc_feature 1..20: note = Description of Artificial Sequence: Synthetic oligonucleotide
  misc_feature 1..20: note = Target: FXN; (+) strand; PAM type: NNNNGHTT; PAM sequence: CAGAGATT
  source 1..20: mol_type = other DNA
cgcctccgcctcccaaactg

SEQ ID NO: 8008 - DNA, 20 bp, synthetic construct
  misc_feature 1..20: note = Description of Artificial Sequence: Synthetic oligonucleotide
  misc_feature 1..20: note = Target: FXN; (+) strand; PAM type: NNNNGHTT; PAM sequence: TCATGTTT
  source 1..20: mol_type = other DNA
acgaaccacaatgcccggcc

SEQ ID NO: 8009 - DNA, 20 bp, synthetic construct
  misc_feature 1..20: note = Description of Artificial Sequence: Synthetic oligonucleotide
  misc_feature 1..20: note = Target: FXN; (+) strand; PAM type: NNNNGHTT; PAM sequence: CGGGGATT
  source 1..20: mol_type = other DNA
caccttggcctcccaaagtg

SEQ ID NO: 8010 - DNA, 20 bp, synthetic construct
  misc_feature 1..20: note = Description of Artificial Sequence: Synthetic oligonucleotide
  misc_feature 1..20: note = Target: FXN; (+) strand; PAM type: NNNNGHTT; PAM sequence: GATCGATT
  source 1..20: mol_type = other DNA
cagaaataaggttatatatt

SEQ ID NO: 8011 - DNA, 20 bp, synthetic construct
  misc_feature 1..20: note = Description of Artificial Sequence: Synthetic oligonucleotide
  misc_feature 1..20: note = Target: FXN; (+) strand; PAM type: NNNNGHTT; PAM sequence: AGCAGCTT
  source 1..20: mol_type = other DNA
ttggtaacaatgttgtgacc

SEQ ID NO: 8012 - DNA, 20 bp, synthetic construct
  misc_feature 1..20: note = Description of Artificial Sequence: Synthetic oligonucleotide
  misc_feature 1..20: note = Target: FXN; (+) strand; PAM type: NNNNGHTT; PAM sequence: GAGTGTTT
  source 1..20: mol_type = other DNA
ctataaataatttgctcgtt

SEQ ID NO: 8013 - DNA, 20 bp, synthetic construct
  misc_feature 1..20: note = Description of Artificial Sequence: Synthetic oligonucleotide
  misc_feature 1..20: note = Target: FXN; (+) strand; PAM type: NNNNGHTT; PAM sequence: ACAGGATT
  source 1..20: mol_type = other DNA
gtaataagagtacgtccctc

SEQ ID NO: 8014 - DNA, 20 bp, synthetic construct
  misc_feature 1..20: note = Description of Artificial Sequence: Synthetic oligonucleotide
  misc_feature 1..20: note = Target: FXN; (+) strand; PAM type: NNNNGHTT; PAM sequence: ATGTGTTT
  source 1..20: mol_type = other DNA
cctctcacttcttcagagac

SEQ ID NO: 8015 - DNA, 20 bp, synthetic construct
  misc_feature 1..20: note = Description of Artificial Sequence: Synthetic oligonucleotide
  misc_feature 1..20: note = Target: FXN; (+) strand; PAM type: NNNNGHTT; PAM sequence: GCCCGTTT
  source 1..20: mol_type = other DNA
tccccatccactgtccccca

SEQ ID NO: 8016 - DNA, 20 bp, synthetic construct
  misc_feature 1..20: note = Description of Artificial Sequence: Synthetic oligonucleotide
  misc_feature 1..20: note = Target: FXN; (+) strand; PAM type: NNNNGHTT; PAM sequence: CTGAGTTT
  source 1..20: mol_type = other DNA
tgccttctgccttctctttt

SEQ ID NO: 8017 - DNA, 20 bp, synthetic construct
  misc_feature 1..20: note = Description of Artificial Sequence: Synthetic oligonucleotide
  misc_feature 1..20: note = Target: FXN; (+) strand; PAM type: NNNNGHTT; PAM sequence: GTCTGATT
  source 1..20: mol_type = other DNA
cttgtgccccagtggctctt

SEQ ID NO: 8018 - DNA, 20 bp, synthetic construct
  misc_feature 1..20: note = Description of Artificial Sequence: Synthetic oligonucleotide
  misc_feature 1..20: note = Target: FXN; (+) strand; PAM type: NNNNGHTT; PAM sequence: GCAGGATT
  source 1..20: mol_type = other DNA
gccaaatcttctggacttca

SEQ ID NO: 8019 - DNA, 20 bp, synthetic construct
  misc_feature 1..20: note = Description of Artificial Sequence: Synthetic oligonucleotide
  misc_feature 1..20: note = Target: FXN; (+) strand; PAM type: NNNNGHTT; PAM sequence: ACAGGATT
  source 1..20: mol_type = other DNA
accactagccacatgtggcc

SEQ ID NO: 8020 - DNA, 20 bp, synthetic construct
  misc_feature 1..20: note = Description of Artificial Sequence: Synthetic oligonucleotide
  misc_feature 1..20: note = Target: FXN; (+) strand; PAM type: NNNNGHTT; PAM sequence: TGTGGCTT
  source 1..20: mol_type = other DNA
tttaaatgtaaatagctacg

SEQ ID NO: 8021 - DNA, 20 bp, synthetic construct
  misc_feature 1..20: note = Description of Artificial Sequence: Synthetic oligonucleotide
  misc_feature 1..20: note = Target: FXN; (+) strand; PAM type: NNNNGHTT; PAM sequence: ACGGGCTT
  source 1..20: mol_type = other DNA
tggctagcctattggaaaac

SEQ ID NO: 8022 - DNA, 20 bp, synthetic construct
  misc_feature 1..20: note = Description of Artificial Sequence: Synthetic oligonucleotide
  misc_feature 1..20: note = Target: FXN; (+) strand; PAM type: NNNNGHTT; PAM sequence: GCATGATT
  source 1..20: mol_type = other DNA
aaccaaaaaaaaaaacttca

SEQ ID NO: 8023 - DNA, 20 bp, synthetic construct
  misc_feature 1..20: note = Description of Artificial Sequence: Synthetic oligonucleotide
  misc_feature 1..20: note = Target: FXN; (+) strand; PAM type: NNNNGHTT; PAM sequence: ACTAGCTT
  source 1..20: mol_type = other DNA
aaaagtgaatttactccgaa

SEQ ID NO: 8024 - DNA, 20 bp, synthetic construct
  misc_feature 1..20: note = Description of Artificial Sequence: Synthetic oligonucleotide
  misc_feature 1..20: note = Target: FXN; (+) strand; PAM type: NNNNGHTT; PAM sequence: TGCTGCTT
  source 1..20: mol_type = other DNA
atcctgcctttctttaaaag

SEQ ID NO: 8025 - DNA, 20 bp, synthetic construct
  misc_feature 1..20: note = Description of Artificial Sequence: Synthetic oligonucleotide
  misc_feature 1..20: note = Target: FXN; (+) strand; PAM type: NNNNGHTT; PAM sequence: GCATGCTT
  source 1..20: mol_type = other DNA
ctgtagcagtggccaagtgg

SEQ ID NO: 8026 - DNA, 20 bp, synthetic construct
  misc_feature 1..20: note = Description of Artificial Sequence: Synthetic oligonucleotide
  misc_feature 1..20: note = Target: FXN; (+) strand; PAM type: NNNNGHTT; PAM sequence: ATGGGTTT
  source 1..20: mol_type = other DNA
ctggaggtgaaagttccgtg

SEQ ID NO: 8027 - DNA, 20 bp, synthetic construct
  misc_feature 1..20: note = Description of Artificial Sequence: Synthetic oligonucleotide
  misc_feature 1..20: note = Target: FXN; (+) strand; PAM type: NNNNGHTT; PAM sequence: GTTTGCTT
  source 1..20: mol_type = other DNA
aggtgaaagttccgtgatgg

SEQ ID NO: 8028 - DNA, 20 bp, synthetic construct
  misc_feature 1..20: note = Description of Artificial Sequence: Synthetic oligonucleotide
  misc_feature 1..20: note = Target: FXN; (+) strand; PAM type: NNNNGHTT; PAM sequence: AAAAGCTT
  source 1..20: mol_type = other DNA
ctggaagagcatacagttag

SEQ ID NO: 8029 - DNA, 20 bp, synthetic construct
  misc_feature 1..20: note = Description of Artificial Sequence: Synthetic oligonucleotide
  misc_feature 1..20: note = Target: FXN; (+) strand; PAM type: NNNNGHTT; PAM sequence: TTTGGCTT
  source 1..20: mol_type = other DNA
atagtaacgtacttcttaac

SEQ ID NO: 8030 - DNA, 20 bp, synthetic construct
  misc_feature 1..20: note = Description of Artificial Sequence: Synthetic oligonucleotide
  misc_feature 1..20: note = Target: FXN; (+) strand; PAM type: NNNNGHTT; PAM sequence: ACCAGATT
  source 1..20: mol_type = other DNA
ttcgaaccaacgtggcctca

SEQ ID NO: 8031 - DNA, 20 bp, synthetic construct
  misc_feature 1..20: note = Description of Artificial Sequence: Synthetic oligonucleotide
  misc_feature 1..20: note = Target: FXN; (+) strand; PAM type: NNNNGHTT; PAM sequence: CCTGGTTT
  source 1..20: mol_type = other DNA
ccctgcctctcccattagaa

SEQ ID NO: 8032 - DNA, 20 bp, synthetic construct
  misc_feature 1..20: note = Description of Artificial Sequence: Synthetic oligonucleotide
  misc_feature 1..20: note = Target: FXN; (+) strand; PAM type: NNNNGHTT; PAM sequence: ATTAGATT
  source 1..20: mol_type = other DNA
attatttttaatgaaatagt

SEQ ID NO: 8033 - DNA, 20 bp, synthetic construct
  misc_feature 1..20: note = Description of Artificial Sequence: Synthetic oligonucleotide
  misc_feature 1..20: note = Target: FXN; (+) strand; PAM type: NNNNGHTT; PAM sequence: GGTTGTTT
  source 1..20: mol_type = other DNA
cccctactgttggacattca

SEQ ID NO: 8034 - DNA, 20 bp, synthetic construct
  misc_feature 1..20: note = Description of Artificial Sequence: Synthetic oligonucleotide
  misc_feature 1..20: note = Target: FXN; (+) strand; PAM type: NNNNGHTT; PAM sequence: CAGAGTTT
  source 1..20: mol_type = other DNA
ttggacattcaggttgtttc

SEQ ID NO: 8035 - DNA, 20 bp, synthetic construct
  misc_feature 1..20: note = Description of Artificial Sequence: Synthetic oligonucleotide
  misc_feature 1..20: note = Target: FXN; (+) strand; PAM type: NNNNGHTT; PAM sequence: TAACGTTT
  source 1..20: mol_type = other DNA
tatttaatagctcaaaccaa

SEQ ID NO: 8036 - DNA, 20 bp, synthetic construct
  misc_feature 1..20: note = Description of Artificial Sequence: Synthetic oligonucleotide
  misc_feature 1..20: note = Target: FXN; (+) strand; PAM type: NNNNGHTT; PAM sequence: TCCAGCTT
  source 1..20: mol_type = other DNA
gaattaggaactacactcat

SEQ ID NO: 8037 - DNA, 20 bp, synthetic construct
  misc_feature 1..20: note = Description of Artificial Sequence: Synthetic oligonucleotide
  misc_feature 1..20: note = Target: FXN; (+) strand; PAM type: NNNNGHTT; PAM sequence: TCCAGTTT
  source 1..20: mol_type = other DNA
gaactacactcattccagct

SEQ ID NO: 8038 - DNA, 20 bp, synthetic construct
  misc_feature 1..20: note = Description of Artificial Sequence: Synthetic oligonucleotide
  misc_feature 1..20: note = Target: FXN; (+) strand; PAM type: NNNNGHTT; PAM sequence: CCAAGATT
  source 1..20: mol_type = other DNA
caccacagccacctccgagt

SEQ ID NO: 8039 - DNA, 20 bp, synthetic construct
  misc_feature 1..20: note = Description of Artificial Sequence: Synthetic oligonucleotide
  misc_feature 1..20: note = Target: FXN; (+) strand; PAM type: NNNNGHTT; PAM sequence: CCCAGCTT
  source 1..20: mol_type = other DNA
tgacatgcagtctcctctct

SEQ ID NO: 8040 - DNA, 20 bp, synthetic construct
  misc_feature 1..20: note = Description of Artificial Sequence: Synthetic oligonucleotide
  misc_feature 1..20: note = Target: FXN; (+) strand; PAM type: NNNNGHTT; PAM sequence: AATGGCTT
  source 1..20: mol_type = other DNA
tcctctctcccagctttagg

SEQ ID NO: 8041 - DNA, 20 bp, synthetic construct
  misc_feature 1..20: note = Description of Artificial Sequence: Synthetic oligonucleotide
  misc_feature 1..20: note = Target: FXN; (+) strand; PAM type: NNNNGHTT; PAM sequence: CCCTGCTT
  source 1..20: mol_type = other DNA
gagcatgttcctccacaaat

SEQ ID NO: 8042 - DNA, 20 bp, synthetic construct
  misc_feature 1..20: note = Description of Artificial Sequence: Synthetic oligonucleotide
  misc_feature 1..20: note = Target: FXN; (+) strand; PAM type: NNNNGHTT; PAM sequence: AACAGTTT
  source 1..20: mol_type = other DNA
acagcccacttcctgctaat

SEQ ID NO: 8043 - DNA, 20 bp, synthetic construct
  misc_feature 1..20: note = Description of Artificial Sequence: Synthetic oligonucleotide
  misc_feature 1..20: note = Target: FXN; (+) strand; PAM type: NNNNGHTT; PAM sequence: GGGTGTTT
  source 1..20: mol_type = other DNA
taacagtttggggttccaca

SEQ ID NO: 8044 - DNA, 20 bp, synthetic construct
  misc_feature 1..20: note = Description of Artificial Sequence: Synthetic oligonucleotide
  misc_feature 1..20: note = Target: FXN; (+) strand; PAM type: NNNNGHTT; PAM sequence: CGGGGTTT
  source 1..20: mol_type = other DNA
ttttgtatttttagtaaaga

SEQ ID NO: 8045 - DNA, 20 bp, synthetic construct
  misc_feature 1..20: note = Description of Artificial Sequence: Synthetic oligonucleotide
  misc_feature 1..20: note = Target: FXN; (+) strand; PAM type: NNNNGHTT; PAM sequence: CTGGGATT
  source 1..20: mol_type = other DNA
cgcctcggcctcccaaagtg

SEQ ID NO: 8046 - DNA, 20 bp, synthetic construct
  misc_feature 1..20: note = Description of Artificial Sequence: Synthetic oligonucleotide
  misc_feature 1..20: note = Target: FXN; (+) strand; PAM type: NNNNGHTT; PAM sequence: GTAGGCTT
  source 1..20: mol_type = other DNA
agactcatttttctttgaga

SEQ ID NO: 8047 - DNA, 20 bp, synthetic construct
  misc_feature 1..20: note = Description of Artificial Sequence: Synthetic oligonucleotide
  misc_feature 1..20: note = Target: FXN; (+) strand; PAM type: NNNNGHTT; PAM sequence: GTAGGCTT
  source 1..20: mol_type = other DNA
agagtaggcttttcccaaaa

SEQ ID NO: 8048 - DNA, 20 bp, synthetic construct
  misc_feature 1..20: note = Description of Artificial Sequence: Synthetic oligonucleotide
  misc_feature 1..20: note = Target: FXN; (+) strand; PAM type: NNNNGHTT; PAM sequence: ATAAGATT
  source 1..20: mol_type = other DNA
ccttgaagtcaagttaaaca

SEQ ID NO: 8049 - DNA, 20 bp, synthetic construct
  misc_feature 1..20: note = Description of Artificial Sequence: Synthetic oligonucleotide
  misc_feature 1..20: note = Target: FXN; (+) strand; PAM type: NNNNGHTT; PAM sequence: CCTGGTTT
  source 1..20: mol_type = other DNA
gagaccagcaatgccctcag

SEQ ID NO: 8050 - DNA, 20 bp, synthetic construct
  misc_feature 1..20: note = Description of Artificial Sequence: Synthetic oligonucleotide
  misc_feature 1..20: note = Target: FXN; (+) strand; PAM type: NNNNGHTT; PAM sequence: CCTTGTTT
  source 1..20: mol_type = other DNA
ttttgcagcaggactgagtc

SEQ ID NO: 8051 - DNA, 20 bp, synthetic construct
  misc_feature 1..20: note = Description of Artificial Sequence: Synthetic oligonucleotide
  misc_feature 1..20: note = Target: FXN; (+) strand; PAM type: NNNNGHTT; PAM sequence: CTTAGCTT
  source 1..20: mol_type = other DNA
aagtctttgctgttcaaagc

SEQ ID NO: 8052 - DNA, 20 bp, synthetic construct
  misc_feature 1..20: note = Description of Artificial Sequence: Synthetic oligonucleotide
  misc_feature 1..20: note = Target: FXN; (+) strand; PAM type: NNNNGHTT; PAM sequence: AATCGCTT
  source 1..20: mol_type = other DNA
tcgggagcctgaggcaggag

SEQ ID NO: 8053 - DNA, 20 bp, synthetic construct
  misc_feature 1..20: note = Description of Artificial Sequence: Synthetic oligonucleotide
  misc_feature 1..20: note = Target: FXN; (+) strand; PAM type: NNNNGHTT; PAM sequence: CTTAGATT
  source 1..20: mol_type = other DNA
aaaaaagaaaaaaaaaaggc

SEQ ID NO: 8054 - DNA, 20 bp, synthetic construct
  misc_feature 1..20: note = Description of Artificial Sequence: Synthetic oligonucleotide
  misc_feature 1..20: note = Target: FXN; (+) strand; PAM type: NNNNGHTT; PAM sequence: CCACGTTT
  source 1..20: mol_type = other DNA
tagattctccctttgacttt

SEQ ID NO: 8055 - DNA, 20 bp, synthetic construct
  misc_feature 1..20: note = Description of Artificial Sequence: Synthetic oligonucleotide
  misc_feature 1..20: note = Target: FXN; (+) strand; PAM type: NNNNGHTT; PAM sequence: CCTGGCTT
  source 1..20: mol_type = other DNA
tgctccatttcattccatct

SEQ ID NO: 8056 - DNA, 20 bp, synthetic construct
  misc_feature 1..20: note = Description of Artificial Sequence: Synthetic oligonucleotide
  misc_feature 1..20: note = Target: FXN; (+) strand; PAM type: NNNNGHTT; PAM sequence: CTCAGATT
  source 1..20: mol_type = other DNA
gccctccaggttatctgaga

SEQ ID NO: 8057 - DNA, 20 bp, synthetic construct
  misc_feature 1..20: note = Description of Artificial Sequence: Synthetic oligonucleotide
  misc_feature 1..20: note = Target: FXN; (+) strand; PAM type: NNNNGHTT; PAM sequence: GAGGGCTT
  source 1..20: mol_type = other DNA
atctgagactcagatttcca

SEQ ID NO: 8058 - DNA, 20 bp, synthetic construct
  misc_feature 1..20: note = Description of Artificial Sequence: Synthetic oligonucleotide
  misc_feature 1..20: note = Target: FXN; (+) strand; PAM type: NNNNGHTT; PAM sequence: GCATGTTT
  source 1..20: mol_type = other DNA
tcaaagaggcactgcatgct

SEQ ID NO: 8059 - DNA, 20 bp, synthetic construct
  misc_feature 1..20: note = Description of Artificial Sequence: Synthetic oligonucleotide
  misc_feature 1..20: note = Target: FXN; (+) strand; PAM type: NNNNGHTT; PAM sequence: TGAGGTTT
  source 1..20: mol_type = other DNA
ggcactgcatgctgcatgtt

SEQ ID NO: 8060 - DNA, 20 bp, synthetic construct
  misc_feature 1..20: note = Description of Artificial Sequence: Synthetic oligonucleotide
  misc_feature 1..20: note = Target: FXN; (+) strand; PAM type: NNNNGHTT; PAM sequence: TTTTGCTT
  source 1..20: mol_type = other DNA
gcatgctgcatgtttgaggt

SEQ ID NO: 8061 - DNA, 20 bp, synthetic construct
  misc_feature 1..20: note = Description of Artificial Sequence: Synthetic oligonucleotide
  misc_feature 1..20: note = Target: FXN; (+) strand; PAM type: NNNNGHTT; PAM sequence: CTCGGCTT
  source 1..20: mol_type = other DNA
tggtggcatccatttccagc

SEQ ID NO: 8062 - DNA, 20 bp, synthetic construct
  misc_feature 1..20: note = Description of Artificial Sequence: Synthetic oligonucleotide
  misc_feature 1..20: note = Target: FXN; (+) strand; PAM type: NNNNGHTT; PAM sequence: TGCTGCTT
  source 1..20: mol_type = other DNA
tcctcccccagcagactctc

SEQ ID NO: 8063 - DNA, 20 bp, synthetic construct
  misc_feature 1..20: note = Description of Artificial Sequence: Synthetic oligonucleotide
  misc_feature 1..20: note = Target: FXN; (+) strand; PAM type: NNNNGHTT; PAM sequence: GCCCGCTT
  source 1..20: mol_type = other DNA
ctgccatgtgtaggaagaca

SEQ ID NO: 8064 - DNA, 20 bp, synthetic construct
  misc_feature 1..20: note = Description of Artificial Sequence: Synthetic oligonucleotide
  misc_feature 1..20: note = Target: FXN; (+) strand; PAM type: NNNNGHTT; PAM sequence: TTACGTTT
  source 1..20: mol_type = other DNA
gtataaagtcggttgtgtcc

SEQ ID NO: 8065 - DNA, 20 bp, synthetic construct
  misc_feature 1..20: note = Description of Artificial Sequence: Synthetic oligonucleotide
  misc_feature 1..20: note = Target: FXN; (+) strand; PAM type: NNNNGHTT; PAM sequence: GGATGTTT
  source 1..20: mol_type = other DNA
gggcacaaaagctcttacaa

SEQ ID NO: 8066 - DNA, 20 bp, synthetic construct
  misc_feature 1..20: note = Description of Artificial Sequence: Synthetic oligonucleotide
  misc_feature 1..20: note = Target: FXN; (+) strand; PAM type: NNNNGHTT; PAM sequence: AAGGGTTT
  source 1..20: mol_type = other DNA
cattttaaaatgtataatgc

SEQ ID NO: 8067 - DNA, 20 bp, synthetic construct
  misc_feature 1..20: note = Description of Artificial Sequence: Synthetic oligonucleotide
  misc_feature 1..20: note = Target: FXN; (+) strand; PAM type: NNNNGHTT; PAM sequence: ACAAGATT
  source 1..20: mol_type = other DNA
caagggtttttagtatattc

SEQ ID NO: 8068 - DNA, 20 bp, synthetic construct
  misc_feature 1..20: note = Description of Artificial Sequence: Synthetic oligonucleotide
  misc_feature 1..20: note = Target: FXN; (+) strand; PAM type: NNNNGHTT; PAM sequence: TGTGGATT
  source 1..20: mol_type = other DNA
actaatctactttctgtctc

SEQ ID NO: 8069 - DNA, 20 bp, synthetic construct
  misc_feature 1..20: note = Description of Artificial Sequence: Synthetic oligonucleotide
  misc_feature 1..20: note = Target: FXN; (+) strand; PAM type: NNNNGHTT; PAM sequence: TACAGCTT
  source 1..20: mol_type = other DNA
aatgtatctagtcacaagca

SEQ ID NO: 8070 - DNA, 20 bp, synthetic construct
  misc_feature 1..20: note = Description of Artificial Sequence: Synthetic oligonucleotide
  misc_feature 1..20: note = Target: FXN; (+) strand; PAM type: NNNNGHTT; PAM sequence: TTCTGATT
  source 1..20: mol_type = other DNA
ttaacccttcagagtaacta

SEQ ID NO: 8071 - DNA, 20 bp, synthetic construct
  misc_feature 1..20: note = Description of Artificial Sequence: Synthetic oligonucleotide
  misc_feature 1..20: note = Target: FXN; (+) strand; PAM type: NNNNGHTT; PAM sequence: CATAGATT
  source 1..20: mol_type = other DNA
actattctgattaccaatag

SEQ ID NO: 8072 - DNA, 20 bp, synthetic construct
  misc_feature 1..20: note = Description of Artificial Sequence: Synthetic oligonucleotide
  misc_feature 1..20: note = Target: FXN; (+) strand; PAM type: NNNNGHTT; PAM sequence: TGTTGTTT
  source 1..20: mol_type = other DNA
tagcatagattagttctgcc

SEQ ID NO: 8073 - DNA, 20 bp, synthetic construct
  misc_feature 1..20: note = Description of Artificial Sequence: Synthetic oligonucleotide
  misc_feature 1..20: note = Target: FXN; (+) strand; PAM type: NNNNGHTT; PAM sequence: ACATGTTT
  source 1..20: mol_type = other DNA
aactgtctcattaagtataa

SEQ ID NO: 8074 - DNA, 20 bp, synthetic construct
  misc_feature 1..20: note = Description of Artificial Sequence: Synthetic oligonucleotide
  misc_feature 1..20: note = Target: FXN; (+) strand; PAM type: NNNNGHTT; PAM sequence: TGATGTTT
  source 1..20: mol_type = other DNA
tgtatttctttctatcacaa

SEQ ID NO: 8075 - DNA, 20 bp, synthetic construct
  misc_feature 1..20: note = Description of Artificial Sequence: Synthetic oligonucleotide
  misc_feature 1..20: note = Target: FXN; (+) strand; PAM type: NNNNGHTT; PAM sequence: GTGAGATT
  source 1..20: mol_type = other DNA
tttctatcacaatgatgttt

SEQ ID NO: 8076 - DNA, 20 bp, synthetic construct
  misc_feature 1..20: note = Description of Artificial Sequence: Synthetic oligonucleotide
  misc_feature 1..20: note = Target: FXN; (+) strand; PAM type: NNNNGHTT; PAM sequence: GGCAGTTT
  source 1..20: mol_type = other DNA
atattacaaaggaatacttg

SEQ ID NO: 8077 - DNA, 20 bp, synthetic construct
  misc_feature 1..20: note = Description of Artificial Sequence: Synthetic oligonucleotide
  misc_feature 1..20: note = Target: FXN; (+) strand; PAM type: NNNNGHTT; PAM sequence: TCCAGTTT
  source 1..20: mol_type = other DNA
aaaggaatacttgggcagtt

SEQ ID NO: 8078 - DNA, 20 bp, synthetic construct
  misc_feature 1..20: note = Description of Artificial Sequence: Synthetic oligonucleotide
  misc_feature 1..20: note = Target: FXN; (+) strand; PAM type: NNNNGHTT; PAM sequence: CGGAGCTT
  source 1..20: mol_type = other DNA
aatggcgtgaacccgggagg

SEQ ID NO: 8079 - DNA, 20 bp, synthetic construct
  misc_feature 1..20: note = Description of Artificial Sequence: Synthetic oligonucleotide
  misc_feature 1..20: note = Target: FXN; (+) strand; PAM type: NNNNGHTT; PAM sequence: GCTTGCTT
  source 1..20: mol_type = other DNA
gcgtgaacccgggaggcgga

SEQ ID NO: 8080 - DNA, 20 bp, synthetic construct
  misc_feature 1..20: note = Description of Artificial Sequence: Synthetic oligonucleotide
  misc_feature 1..20: note = Target: FXN; (+) strand; PAM type: NNNNGHTT; PAM sequence: AACAGTTT
  source 1..20: mol_type = other DNA
aactttagtagatactgtcc

SEQ ID NO: 8081 - DNA, 20 bp, synthetic construct
  misc_feature 1..20: note = Description of Artificial Sequence: Synthetic oligonucleotide
  misc_feature 1..20: note = Target: FXN; (+) strand; PAM type: NNNNGHTT; PAM sequence: AAGTGATT
  source 1..20: mol_type = other DNA
tactgtccaacagttttcca

SEQ ID NO: 8082 - DNA, 20 bp, synthetic construct
  misc_feature 1..20: note = Description of Artificial Sequence: Synthetic oligonucleotide
  misc_feature 1..20: note = Target: FXN; (+) strand; PAM type: NNNNGHTT; PAM sequence: AGTTGCTT
  source 1..20: mol_type = other DNA
cagcagtatctgaaaagtct

SEQ ID NO: 8083 - DNA, 20 bp, synthetic construct
  misc_feature 1..20: note = Description of Artificial Sequence: Synthetic oligonucleotide
  misc_feature 1..20: note = Target: FXN; (+) strand; PAM type: NNNNGHTT; PAM sequence: TGGAGTTT
  source 1..20: mol_type = other DNA
ctctttttttttttttgaga

SEQ ID NO: 8084 - DNA, 20 bp, synthetic construct
  misc_feature 1..20: note = Description of Artificial Sequence: Synthetic oligonucleotide
  misc_feature 1..20: note = Target: FXN; (+) strand; PAM type: NNNNGHTT; PAM sequence: CTGGGATT
  source 1..20: mol_type = other DNA
tgcctcagcctcccgagtag

SEQ ID NO: 8085 - DNA, 20 bp, synthetic construct
  misc_feature 1..20: note = Description of Artificial Sequence: Synthetic oligonucleotide
  misc_feature 1..20: note = Target: FXN; (+) strand; PAM type: NNNNGHTT; PAM sequence: CAGGGTTT
  source 1..20: mol_type = other DNA
ttttgtatttttagtagaga

SEQ ID NO: 8086 - DNA, 20 bp, synthetic construct
  misc_feature 1..20: note = Description of Artificial Sequence: Synthetic oligonucleotide
  misc_feature 1..20: note = Target: FXN; (+) strand; PAM type: NNNNGHTT; PAM sequence: CTGGGATT
  source 1..20: mol_type = other DNA
cgcctcggcctcccgaagtg

SEQ ID NO: 8087 - DNA, 20 bp, synthetic construct
  misc_feature 1..20: note = Description of Artificial Sequence: Synthetic oligonucleotide
  misc_feature 1..20: note = Target: FXN; (+) strand; PAM type: NNNNGHTT; PAM sequence: CAGGGTTT
  source 1..20: mol_type = other DNA
attttattttactttaaaga

SEQ ID NO: 8088 - DNA, 20 bp, synthetic construct
  misc_feature 1..20: note = Description of Artificial Sequence: Synthetic oligonucleotide
  misc_feature 1..20: note = Target: FXN; (+) strand; PAM type: NNNNGHTT; PAM sequence: CTCAGATT
  source 1..20: mol_type = other DNA
agagacggggtctctgttgt

SEQ ID NO: 8089 - DNA, 20 bp, synthetic construct
  misc_feature 1..20: note = Description of Artificial Sequence: Synthetic oligonucleotide
  misc_feature 1..20: note = Target: FXN; (+) strand; PAM type: NNNNGHTT; PAM sequence: ATTAGATT
  source 1..20: mol_type = other DNA
tttagatacagaaaattcta

SEQ ID NO: 8090 - DNA, 20 bp, synthetic construct
  misc_feature 1..20: note = Description of Artificial Sequence: Synthetic oligonucleotide
  misc_feature 1..20: note = Target: FXN; (+) strand; PAM type: NNNNGHTT; PAM sequence: TCTTGCTT
  source 1..20: mol_type = other DNA
gaacacaaaatacaggtgaa

SEQ ID NO: 8091 - DNA, 20 bp, synthetic construct
  misc_feature 1..20: note = Description of Artificial Sequence: Synthetic oligonucleotide
  misc_feature 1..20: note = Target: FXN; (+) strand; PAM type: NNNNGHTT; PAM sequence: AATAGATT
  source 1..20: mol_type = other DNA
taaatattaaaaaaatctcc

SEQ ID NO: 8092 - DNA, 20 bp, synthetic construct
  misc_feature 1..20: note = Description of Artificial Sequence: Synthetic oligonucleotide
  misc_feature 1..20: note = Target: FXN; (+) strand; PAM type: NNNNGHTT; PAM sequence: AACTGTTT
  source 1..20: mol_type = other DNA
agcatttactgaatcagaat

SEQ ID NO: 8093 - DNA, 20 bp, synthetic construct
  misc_feature 1..20: note = Description of Artificial Sequence: Synthetic oligonucleotide
  misc_feature 1..20: note = Target: FXN; (+) strand; PAM type: NNNNGHTT; PAM sequence: TGGGGTTT
  source 1..20: mol_type = other DNA
gaatcagaataactgttttt

SEQ ID NO: 8094 - DNA, 20 bp, synthetic construct
  misc_feature 1..20: note = Description of Artificial Sequence: Synthetic oligonucleotide
  misc_feature 1..20: note = Target: FXN; (+) strand; PAM type: NNNNGHTT; PAM sequence: CGGAGTTT
  source 1..20: mol_type = other DNA
ttttggggttttctttgaga

SEQ ID NO: 8095 - DNA, 20 bp, synthetic construct
  misc_feature 1..20: note = Description of Artificial Sequence: Synthetic oligonucleotide
  misc_feature 1..20: note = Target: FXN; (+) strand; PAM type: NNNNGHTT; PAM sequence: CCTGGATT
  source 1..20: mol_type = other DNA
gctcactgcaacctccgccc

SEQ ID NO: 8096 - DNA, 20 bp, synthetic construct
  misc_feature 1..20: note = Description of Artificial Sequence: Synthetic oligonucleotide
  misc_feature 1..20: note = Target: FXN; (+) strand; PAM type: NNNNGHTT; PAM sequence: AAGAGATT
  source 1..20: mol_type = other DNA
aacctccgccccctggattc

SEQ ID NO: 8097 - DNA, 20 bp, synthetic construct
  misc_feature 1..20: note = Description of Artificial Sequence: Synthetic oligonucleotide
  misc_feature 1..20: note = Target: FXN; (+) strand; PAM type: NNNNGHTT; PAM sequence: CTGGGATT
  source 1..20: mol_type = other DNA
tgcctcagcctcccgagtag

SEQ ID NO: 8098 - DNA, 20 bp, synthetic construct
  misc_feature 1..20: note = Description of Artificial Sequence: Synthetic oligonucleotide
  misc_feature 1..20: note = Target: FXN; (+) strand; PAM type: NNNNGHTT; PAM sequence: CGAGGTTT
  source 1..20: mol_type = other DNA
ttttgtatttttagtagagg

SEQ ID NO: 8099 - DNA, 20 bp, synthetic construct
  misc_feature 1..20: note = Description of Artificial Sequence: Synthetic oligonucleotide
  misc_feature 1..20: note = Target: FXN; (+) strand; PAM type: NNNNGHTT; PAM sequence: CTAGGATT
  source 1..20: mol_type = other DNA
cgcctcagcctcccaaaatg

SEQ ID NO: 8100 - DNA, 20 bp, synthetic construct
  misc_feature 1..20: note = Description of Artificial Sequence: Synthetic oligonucleotide
  misc_feature 1..20: note = Target: FXN; (+) strand; PAM type: NNNNGHTT; PAM sequence: CGGGGTTT
  source 1..20: mol_type = other DNA
ctcattgcaacctccacctc

SEQ ID NO: 8101 - DNA, 20 bp, synthetic construct
  misc_feature 1..20: note = Description of Artificial Sequence: Synthetic oligonucleotide
  misc_feature 1..20: note = Target: FXN; (+) strand; PAM type: NNNNGHTT; PAM sequence: CAGTGATT
  source 1..20: mol_type = other DNA
aacctccacctccggggttt

SEQ ID NO: 8102 - DNA, 20 bp, synthetic construct
  misc_feature 1..20: note = Description of Artificial Sequence: Synthetic oligonucleotide
  misc_feature 1..20: note = Target: FXN; (+) strand; PAM type: NNNNGHTT; PAM sequence: CAGGGTTT
  source 1..20: mol_type = other DNA
ttttgtatttttagtagaga

SEQ ID NO: 8103 - DNA, 20 bp, synthetic construct
  misc_feature 1..20: note = Description of Artificial Sequence: Synthetic oligonucleotide
  misc_feature 1..20: note = Target: FXN; (+) strand; PAM type: NNNNGHTT; PAM sequence: GCTAGTTT
  source 1..20: mol_type = other DNA
ggttttgccatattggcctg

SEQ ID NO: 8104 - DNA, 20 bp, synthetic construct
  misc_feature 1..20: note = Description of Artificial Sequence: Synthetic oligonucleotide
  misc_feature 1..20: note = Target: FXN; (+) strand; PAM type: NNNNGHTT; PAM sequence: CTGGGATT
  source 1..20: mol_type = other DNA
tacctcggcctccgaaagtc

SEQ ID NO: 8105 - DNA, 20 bp, synthetic construct
  misc_feature 1..20: note = Description of Artificial Sequence: Synthetic oligonucleotide
  misc_feature 1..20: note = Target: FXN; (+) strand; PAM type: NNNNGHTT; PAM sequence: GCCTGCTT
  source 1..20: mol_type = other DNA
tgcctctgggaatgggggct

SEQ ID NO: 8106 - DNA, 20 bp, synthetic construct
  misc_feature 1..20: note = Description of Artificial Sequence: Synthetic oligonucleotide
  misc_feature 1..20: note = Target: FXN; (+) strand; PAM type: NNNNGHTT; PAM sequence: TGCTGTTT
  source 1..20: mol_type = other DNA
tctttctgtaaccccttctg

SEQ ID NO: 8107 - DNA, 20 bp, synthetic construct
  misc_feature 1..20: note = Description of Artificial Sequence: Synthetic oligonucleotide
  misc_feature 1..20: note = Target: FXN; (+) strand; PAM type: NNNNGHTT; PAM sequence: CGGGGTTT
  source 1..20: mol_type = other DNA
ttttgtattttcagtagaga

SEQ ID NO: 8108 - DNA, 20 bp, synthetic construct
  misc_feature 1..20: note = Description of Artificial Sequence: Synthetic oligonucleotide
  misc_feature 1..20: note = Target: FXN; (+) strand; PAM type: NNNNGHTT; PAM sequence: CTGGGATT
  source 1..20: mol_type = other DNA
tgcctcggcctcccagagtg

SEQ ID NO: 8109 - DNA, 20 bp, synthetic construct
  misc_feature 1..20: note = Description of Artificial Sequence: Synthetic oligonucleotide
  misc_feature 1..20: note = Target: FXN; (+) strand; PAM type: NNNNGHTT; PAM sequence: TCATGTTT
  source 1..20: mol_type = other DNA
aaaatggaagcatttggtaa

SEQ ID NO: 8110 - DNA, 20 bp, synthetic construct
  misc_feature 1..20: note = Description of Artificial Sequence: Synthetic oligonucleotide
  misc_feature 1..20: note = Target: FXN; (+) strand; PAM type: NNNNGHTT; PAM sequence: TTGGGTTT
  source 1..20: mol_type = other DNA
aagcatttggtaatcatgtt

SEQ ID NO: 8111 - DNA, 20 bp, synthetic construct
  misc_feature 1..20: note = Description of Artificial Sequence: Synthetic oligonucleotide
  misc_feature 1..20: note = Target: FXN; (+) strand; PAM type: NNNNGHTT; PAM sequence: TTGTGCTT
  source 1..20: mol_type = other DNA
tggtaatcatgttttgggtt

SEQ ID NO: 8112 - DNA, 20 bp, synthetic construct
  misc_feature 1..20: note = Description of Artificial Sequence: Synthetic oligonucleotide
  misc_feature 1..20: note = Target: FXN; (+) strand; PAM type: NNNNGHTT; PAM sequence: CAGAGTTT
  source 1..20: mol_type = other DNA
ggaaacgctggactctttag

SEQ ID NO: 8113 - DNA, 20 bp, synthetic construct
  misc_feature 1..20: note = Description of Artificial Sequence: Synthetic oligonucleotide
  misc_feature 1..20: note = Target: FXN; (+) strand; PAM type: NNNNGHTT; PAM sequence: ACACGTTT
  source 1..20: mol_type = other DNA
agaccttgcagacaagccat

SEQ ID NO: 8114 - DNA, 20 bp, synthetic construct
  misc_feature 1..20: note = Description of Artificial Sequence: Synthetic oligonucleotide
  misc_feature 1..20: note = Target: FXN; (+) strand; PAM type: NNNNGHTT; PAM sequence: TTCTGTTT
  source 1..20: mol_type = other DNA
cctcttgacttcttttattt

SEQ ID NO: 8115 - DNA, 20 bp, synthetic construct
  misc_feature 1..20: note = Description of Artificial Sequence: Synthetic oligonucleotide
  misc_feature 1..20: note = Target: FXN; (+) strand; PAM type: NNNNGHTT; PAM sequence: GTAGGATT
  source 1..20: mol_type = other DNA
caagtagcatgtagttgtag

SEQ ID NO: 8116 - DNA, 20 bp, synthetic construct
  misc_feature 1..20: note = Description of Artificial Sequence: Synthetic oligonucleotide
  misc_feature 1..20: note = Target: FXN; (+) strand; PAM type: NNNNGHTT; PAM sequence: CTAGGCTT
  source 1..20: mol_type = other DNA
ataagatagataagacaaga

SEQ ID NO: 8117 - DNA, 20 bp, synthetic construct
  misc_feature 1..20: note = Description of Artificial Sequence: Synthetic oligonucleotide
  misc_feature 1..20: note = Target: FXN; (+) strand; PAM type: NNNNGHTT; PAM sequence: CCAGGCTT
  source 1..20: mol_type = other DNA
caagctgcagtccagctcta

SEQ ID NO: 8118 - DNA, 20 bp, synthetic construct
  misc_feature 1..20: note = Description of Artificial Sequence: Synthetic oligonucleotide
  misc_feature 1..20: note = Target: FXN; (+) strand; PAM type: NNNNGHTT; PAM sequence: TCCAGCTT
  source 1..20: mol_type = other DNA
agcctctctgagcctcattt

SEQ ID NO: 8119 - DNA, 20 bp, synthetic construct
  misc_feature 1..20: note = Description of Artificial Sequence: Synthetic oligonucleotide
  misc_feature 1..20: note = Target: FXN; (+) strand; PAM type: NNNNGHTT; PAM sequence: TTTAGATT
  source 1..20: mol_type = other DNA
agataactgcccaaaagtta

SEQ ID NO: 8120 - DNA, 20 bp, synthetic construct
  misc_feature 1..20: note = Description of Artificial Sequence: Synthetic oligonucleotide
  misc_feature 1..20: note = Target: FXN; (+) strand; PAM type: NNNNGHTT; PAM sequence: CTGGGATT
  source 1..20: mol_type = other DNA
catatttttgaaaagctcac

SEQ ID NO: 8121 - DNA, 20 bp, synthetic construct
  misc_feature 1..20: note = Description of Artificial Sequence: Synthetic oligonucleotide
  misc_feature 1..20: note = Target: FXN; (+) strand; PAM type: NNNNGHTT; PAM sequence: TAGAGATT
  source 1..20: mol_type = other DNA
gtatccctaggtcttattcc

SEQ ID NO: 8122 - DNA, 20 bp, synthetic construct
  misc_feature 1..20: note = Description of Artificial Sequence: Synthetic oligonucleotide
  misc_feature 1..20: note = Target: FXN; (+) strand; PAM type: NNNNGHTT; PAM sequence: TTTTGATT
  source 1..20: mol_type = other DNA
ctaggtcttattcctagaga

SEQ ID NO: 8123 - DNA, 20 bp, synthetic construct
  misc_feature 1..20: note = Description of Artificial Sequence: Synthetic oligonucleotide
  misc_feature 1..20: note = Target: FXN; (+) strand; PAM type: NNNNGHTT; PAM sequence: CTGGGATT
  source 1..20: mol_type = other DNA
ggcatgacctgggcagggca

SEQ ID NO: 8124 - DNA, 20 bp, synthetic construct
  misc_feature 1..20: note = Description of Artificial Sequence: Synthetic oligonucleotide
  misc_feature 1..20: note = Target: FXN; (+) strand; PAM type: NNNNGHTT; PAM sequence: AGATGATT
  source 1..20: mol_type = other DNA
ctgggatttttaagctccac

SEQ ID NO: 8125 - DNA, 20 bp, synthetic construct
  misc_feature 1..20: note = Description of Artificial Sequence: Synthetic oligonucleotide
  misc_feature 1..20: note = Target: FXN; (+) strand; PAM type: NNNNGHTT; PAM sequence: ACTTGTTT
  source 1..20: mol_type = other DNA
aatatgcagctagtatgaga

SEQ ID NO: 8126 - DNA, 20 bp, synthetic construct
  misc_feature 1..20: note = Description of Artificial Sequence: Synthetic oligonucleotide
  misc_feature 1..20: note = Target: FXN; (+) strand; PAM type: NNNNGHTT; PAM sequence: CTCCGCTT
  source 1..20: mol_type = other DNA
ggcgcaatctcggctcactg

SEQ ID NO: 8127 - DNA, 20 bp, synthetic construct
  misc_feature 1..20: note = Description of Artificial Sequence: Synthetic oligonucleotide
  misc_feature 1..20: note = Target: FXN; (+) strand; PAM type: NNNNGHTT; PAM sequence: CTGGGATT
  source 1..20: mol_type = other DNA
tgcctcagcctcccgagtag

SEQ ID NO: 8128 - DNA, 20 bp, synthetic construct
  misc_feature 1..20: note = Description of Artificial Sequence: Synthetic oligonucleotide
  misc_feature 1..20: note = Target: FXN; (+) strand; PAM type: NNNNGHTT; PAM sequence: CGGGGTTT
  source 1..20: mol_type = other DNA
tttttgcattttagtaaaga

SEQ ID NO: 8129 - DNA, 20 bp, synthetic construct
  misc_feature 1..20: note = Description of Artificial Sequence: Synthetic oligonucleotide
  misc_feature 1..20: note = Target: FXN; (+) strand; PAM type: NNNNGHTT; PAM sequence: CAAAGTTT
  source 1..20: mol_type = other DNA
gtccacccccatcagccttc

SEQ ID NO: 8130 - DNA, 20 bp, synthetic construct
  misc_feature 1..20: note = Description of Artificial Sequence: Synthetic oligonucleotide
  misc_feature 1..20: note = Target: FXN; (+) strand; PAM type: NNNNGHTT; PAM sequence: GGCAGATT
  source 1..20: mol_type = other DNA
ttatcgactggccaccaggt

SEQ ID NO: 8131 - DNA, 20 bp, synthetic construct
  misc_feature 1..20: note = Description of Artificial Sequence: Synthetic oligonucleotide
  misc_feature 1..20: note = Target: FXN; (+) strand; PAM type: NNNNGHTT; PAM sequence: TTGGGTTT
  source 1..20: mol_type = other DNA
atttgggcaagggtctgcct

SEQ ID NO: 8132 - DNA, 20 bp, synthetic construct
  misc_feature 1..20: note = Description of Artificial Sequence: Synthetic oligonucleotide
  misc_feature 1..20: note = Target: FXN; (+) strand; PAM type: NNNNGHTT; PAM sequence: TATTGCTT
  source 1..20: mol_type = other DNA
tctgcctttgggtttagaat

SEQ ID NO: 8133 - DNA, 20 bp, synthetic construct
  misc_feature 1..20: note = Description of Artificial Sequence: Synthetic oligonucleotide
  misc_feature 1..20: note = Target: FXN; (+) strand; PAM type: NNNNGHTT; PAM sequence: GATGGTTT
  source 1..20: mol_type = other DNA
gtgggagaaaatccctcaaa

SEQ ID NO: 8134 - DNA, 20 bp, synthetic construct
  misc_feature 1..20: note = Description of Artificial Sequence: Synthetic oligonucleotide
  misc_feature 1..20: note = Target: FXN; (+) strand; PAM type: NNNNGHTT; PAM sequence: GTTGGTTT
  source 1..20: mol_type = other DNA
aaagatggttttctgggttg

SEQ ID NO: 8135 - DNA, 20 bp, synthetic construct
  misc_feature 1..20: note = Description of Artificial Sequence: Synthetic oligonucleotide
  misc_feature 1..20: note = Target: FXN; (+) strand; PAM type: NNNNGHTT; PAM sequence: GTTTGTTT
  source 1..20: mol_type = other DNA
atggttttctgggttggttg

SEQ ID NO: 8136 - DNA, 20 bp, synthetic construct
  misc_feature 1..20: note = Description of Artificial Sequence: Synthetic oligonucleotide
  misc_feature 1..20: note = Target: FXN; (+) strand; PAM type: NNNNGHTT; PAM sequence: GTCTGTTT
  source 1..20: mol_type = other DNA
ctgggttggttggtttgttt

SEQ ID NO: 8137 - DNA, 20 bp, synthetic construct
  misc_feature 1..20: note = Description of Artificial Sequence: Synthetic oligonucleotide
  misc_feature 1..20: note = Target: FXN; (+) strand; PAM type: NNNNGHTT; PAM sequence: GTTTGTTT
  source 1..20: mol_type = other DNA
gttggttggtttgtttgtct

SEQ ID NO: 8138 - DNA, 20 bp, synthetic construct
  misc_feature 1..20: note = Description of Artificial Sequence: Synthetic oligonucleotide
  misc_feature 1..20: note = Target: FXN; (+) strand; PAM type: NNNNGHTT; PAM sequence: GTTTGTTT
  source 1..20: mol_type = other DNA
gttggtttgtttgtctgttt

SEQ ID NO: 8139 - DNA, 20 bp, synthetic construct
  misc_feature 1..20: note = Description of Artificial Sequence: Synthetic oligonucleotide
  misc_feature 1..20: note = Target: FXN; (+) strand; PAM type: NNNNGHTT; PAM sequence: CAGTGTTT
  source 1..20: mol_type = other DNA
ttttgtatttttagtagaga

SEQ ID NO: 8140 - DNA, 20 bp, synthetic construct
  misc_feature 1..20: note = Description of Artificial Sequence: Synthetic oligonucleotide
  misc_feature 1..20: note = Target: FXN; (+) strand; PAM type: NNNNGHTT; PAM sequence: GCTGGTTT
  source 1..20: mol_type = other DNA
tgtttcaccacgttggccag

SEQ ID NO: 8141 - DNA, 20 bp, synthetic construct
  misc_feature 1..20: note = Description of Artificial Sequence: Synthetic oligonucleotide
  misc_feature 1..20: note = Target: FXN; (+) strand; PAM type: NNNNGHTT; PAM sequence: CTAGGATT
  source 1..20: mol_type = other DNA
cacctcagcctcccaaagtg

SEQ ID NO: 8142 - DNA, 20 bp, synthetic construct
  misc_feature 1..20: note = Description of Artificial Sequence: Synthetic oligonucleotide
  misc_feature 1..20: note = Target: FXN; (+) strand; PAM type: NNNNGHTT; PAM sequence: TTTGGATT
  source 1..20: mol_type = other DNA
aaatgtcacgaagcgtgcat

SEQ ID NO: 8143 - DNA, 20 bp, synthetic construct
  misc_feature 1..20: note = Description of Artificial Sequence: Synthetic oligonucleotide
  misc_feature 1..20: note = Target: FXN; (+) strand; PAM type: NNNNGHTT; PAM sequence: GAAGGATT
  source 1..20: mol_type = other DNA
aaaaggagcaatggagcagg

SEQ ID NO: 8144 - DNA, 20 bp, synthetic construct
  misc_feature 1..20: note = Description of Artificial Sequence: Synthetic oligonucleotide
  misc_feature 1..20: note = Target: FXN; (+) strand; PAM type: NNNNGHTT; PAM sequence: AGTAGATT
  source 1..20: mol_type = other DNA
gaaggattgaatgcctttca

SEQ ID NO: 8145 - DNA, 20 bp, synthetic construct
  misc_feature 1..20: note = Description of Artificial Sequence: Synthetic oligonucleotide
  misc_feature 1..20: note = Target: FXN; (+) strand; PAM type: NNNNGHTT; PAM sequence: CAGGGCTT
  source 1..20: mol_type = other DNA
aaaatgcagtagtgcctggg

SEQ ID NO: 8146 - DNA, 20 bp, synthetic construct
  misc_feature 1..20: note = Description of Artificial Sequence: Synthetic oligonucleotide
  misc_feature 1..20: note = Target: FXN; (+) strand; PAM type: NNNNGHTT; PAM sequence: AAGTGCTT
  source 1..20: mol_type = other DNA
agtgcctgggcagggcttta

SEQ ID NO: 8147 - DNA, 20 bp, synthetic construct
  misc_feature 1..20: note = Description of Artificial Sequence: Synthetic oligonucleotide
  misc_feature 1..20: note = Target: FXN; (+) strand; PAM type: NNNNGHTT; PAM sequence: GGCTGCTT
  source 1..20: mol_type = other DNA
caggcagccctagagggccg

SEQ ID NO: 8148 - DNA, 20 bp, synthetic construct
  misc_feature 1..20: note = Description of Artificial Sequence: Synthetic oligonucleotide
  misc_feature 1..20: note = Target: FXN; (+) strand; PAM type: NNNNGHTT; PAM sequence: CATTGATT
  source 1..20: mol_type = other DNA
actctgcccacacatgcaga

SEQ ID NO: 8149 - DNA, 20 bp, synthetic construct
  misc_feature 1..20: note = Description of Artificial Sequence: Synthetic oligonucleotide
  misc_feature 1..20: note = Target: FXN; (+) strand; PAM type: NNNNGHTT; PAM sequence: ACCTGTTT
  source 1..20: mol_type = other DNA
gctacaaaaacagtcatgaa

SEQ ID NO: 8150 - DNA, 20 bp, synthetic construct
  misc_feature 1..20: note = Description of Artificial Sequence: Synthetic oligonucleotide
  misc_feature 1..20: note = Target: FXN; (+) strand; PAM type: NNNNGHTT; PAM sequence: ATAGGATT
  source 1..20: mol_type = other DNA
cagtcatgaaacctgttttt

SEQ ID NO: 8151 - DNA, 20 bp, synthetic construct
  misc_feature 1..20: note = Description of Artificial Sequence: Synthetic oligonucleotide
  misc_feature 1..20: note = Target: FXN; (+) strand; PAM type: NNNNGHTT; PAM sequence: CCCAGTTT
  source 1..20: mol_type = other DNA
ttttataggattagtgaagc

SEQ ID NO: 8152 - DNA, 20 bp, synthetic construct
  misc_feature 1..20: note = Description of Artificial Sequence: Synthetic oligonucleotide
  misc_feature 1..20: note = Target: FXN; (+) strand; PAM type: NNNNGHTT; PAM sequence: GAATGTTT
  source 1..20: mol_type = other DNA
ttgaccagagtactttgcat

SEQ ID NO: 8153 - DNA, 20 bp, synthetic construct
  misc_feature 1..20: note = Description of Artificial Sequence: Synthetic oligonucleotide
  misc_feature 1..20: note = Target: FXN; (+) strand; PAM type: NNNNGHTT; PAM sequence: CTGCGTTT
  source 1..20: mol_type = other DNA
atgtgccaatattctagcag

SEQ ID NO: 8154 - DNA, 20 bp, synthetic construct
  misc_feature 1..20: note = Description of Artificial Sequence: Synthetic oligonucleotide
  misc_feature 1..20: note = Target: FXN; (+) strand; PAM type: NNNNGHTT; PAM sequence: TTTGGTTT
  source 1..20: mol_type = other DNA
ccaatattctagcagctgcg

SEQ ID NO: 8155 - DNA, 20 bp, synthetic construct
  misc_feature 1..20: note = Description of Artificial Sequence: Synthetic oligonucleotide
  misc_feature 1..20: note = Target: FXN; (+) strand; PAM type: NNNNGHTT; PAM sequence: AAGCGATT
  source 1..20: mol_type = other DNA
aacctctgcctcccaggttc

SEQ ID NO: 8156 - DNA, 20 bp, synthetic construct
  misc_feature 1..20: note = Description of Artificial Sequence: Synthetic oligonucleotide
  misc_feature 1..20: note = Target: FXN; (+) strand; PAM type: NNNNGHTT; PAM sequence: CTGGGATT
  source 1..20: mol_type = other DNA
cgcctcaacctcctgagtag

SEQ ID NO: 8157 - DNA, 20 bp, synthetic construct
  misc_feature 1..20: note = Description of Artificial Sequence: Synthetic oligonucleotide
  misc_feature 1..20: note = Target: FXN; (+) strand; PAM type: NNNNGHTT; PAM sequence: CTAAGTTT
  source 1..20: mol_type = other DNA
acatgtaccacaatacaggg

SEQ ID NO: 8158 - DNA, 20 bp, synthetic construct
  misc_feature 1..20: note = Description of Artificial Sequence: Synthetic oligonucleotide
  misc_feature 1..20: note = Target: FXN; (+) strand; PAM type: NNNNGHTT; PAM sequence: TGGGGTTT
  source 1..20: mol_type = other DNA
ttttgtatttttagtagaaa

SEQ ID NO: 8159 - DNA, 20 bp, synthetic construct
  misc_feature 1..20: note = Description of Artificial Sequence: Synthetic oligonucleotide
  misc_feature 1..20: note = Target: FXN; (+) strand; PAM type: NNNNGHTT; PAM sequence: TTTGGTTT
  source 1..20: mol_type = other DNA
gcacctggcaaaagtcatct

SEQ ID NO: 8160 - DNA, 20 bp, synthetic construct
  misc_feature 1..20: note = Description of Artificial Sequence: Synthetic oligonucleotide
  misc_feature 1..20: note = Target: FXN; (+) strand; PAM type: NNNNGHTT; PAM sequence: TCAAGCTT
  source 1..20: mol_type = other DNA
aatcatagctcactgcagcc

SEQ ID NO: 8161 - DNA, 20 bp, synthetic construct
  misc_feature 1..20: note = Description of Artificial Sequence: Synthetic oligonucleotide
  misc_feature 1..20: note = Target: FXN; (+) strand; PAM type: NNNNGHTT; PAM sequence: CTATGTTT
  source 1..20: mol_type = other DNA
tattttatttatgggtctcg

SEQ ID NO: 8162 - DNA, 20 bp, synthetic construct
  misc_feature 1..20: note = Description of Artificial Sequence: Synthetic oligonucleotide
  misc_feature 1..20: note = Target: FXN; (+) strand; PAM type: NNNNGHTT; PAM sequence: AAGCGATT
  source 1..20: mol_type = other DNA
ggtctcaaactcctggcctc

SEQ ID NO: 8163 - DNA, 20 bp, synthetic construct
  misc_feature 1..20: note = Description of Artificial Sequence: Synthetic oligonucleotide
  misc_feature 1..20: note = Target: FXN; (+) strand; PAM type: NNNNGHTT; PAM sequence: CCGGGATT
  source 1..20: mol_type = other DNA
cacctcggcctcccaaagca

SEQ ID NO: 8164 - DNA, 20 bp, synthetic construct
  misc_feature 1..20: note = Description of Artificial Sequence: Synthetic oligonucleotide
  misc_feature 1..20: note = Target: FXN; (+) strand; PAM type: NNNNGHTT; PAM sequence: AACAGATT
  source 1..20: mol_type = other DNA
gtagctaagcatacatattc

SEQ ID NO: 8165 - DNA, 20 bp, synthetic construct
  misc_feature 1..20: note = Description of Artificial Sequence: Synthetic oligonucleotide
  misc_feature 1..20: note = Target: FXN; (+) strand; PAM type: NNNNGHTT; PAM sequence: AAGTGATT
  source 1..20: mol_type = other DNA
aacctccacctcctgggttc

SEQ ID NO: 8166 - DNA, 20 bp, synthetic construct
  misc_feature 1..20: note = Description of Artificial Sequence: Synthetic oligonucleotide
  misc_feature 1..20: note = Target: FXN; (+) strand; PAM type: NNNNGHTT; PAM sequence: CTGGGATT
  source 1..20: mol_type = other DNA
tgcctcagcctcccgagtag

SEQ ID NO: 8167 - DNA, 20 bp, synthetic construct
  misc_feature 1..20: note = Description of Artificial Sequence: Synthetic oligonucleotide
  misc_feature 1..20: note = Target: FXN; (+) strand; PAM type: NNNNGHTT; PAM sequence: CTGGGTTT
  source 1..20: mol_type = other DNA
ttttatatttttagtagaga

SEQ ID NO: 8168 - DNA, 20 bp, synthetic construct
  misc_feature 1..20: note = Description of Artificial Sequence: Synthetic oligonucleotide
  misc_feature 1..20: note = Target: FXN; (+) strand; PAM type: NNNNGHTT; PAM sequence: AACTGCTT
  source 1..20: mol_type = other DNA
ctcctgacctcaggtaatcc

SEQ ID NO: 8169 - DNA, 20 bp, synthetic construct
  misc_feature 1..20: note = Description of Artificial Sequence: Synthetic oligonucleotide
  misc_feature 1..20: note = Target: FXN; (+) strand; PAM type: NNNNGHTT; PAM sequence: CTGGGATT
  source 1..20: mol_type = other DNA
tgctttggcctcccaaagtg

SEQ ID NO: 8170 - DNA, 20 bp, synthetic construct
  misc_feature 1..20: note = Description of Artificial Sequence: Synthetic oligonucleotide
  misc_feature 1..20: note = Target: FXN; (+) strand; PAM type: NNNNGHTT; PAM sequence: CTGGGATT
  source 1..20: mol_type = other DNA
ttacaggcagctccaaagtg

SEQ ID NO: 8171 - DNA, 20 bp, synthetic construct
  misc_feature 1..20: note = Description of Artificial Sequence: Synthetic oligonucleotide
  misc_feature 1..20: note = Target: FXN; (+) strand; PAM type: NNNNGHTT; PAM sequence: GCTAGTTT
  source 1..20: mol_type = other DNA
gaaataatttttttgaaagg

SEQ ID NO: 8172 - DNA, 20 bp, synthetic construct
  misc_feature 1..20: note = Description of Artificial Sequence: Synthetic oligonucleotide
  misc_feature 1..20: note = Target: FXN; (+) strand; PAM type: NNNNGHTT; PAM sequence: TCCTGTTT
  source 1..20: mol_type = other DNA
tagggagggaatagaacgag

SEQ ID NO: 8173 - DNA, 20 bp, synthetic construct
  misc_feature 1..20: note = Description of Artificial Sequence: Synthetic oligonucleotide
  misc_feature 1..20: note = Target: FXN; (+) strand; PAM type: NNNNGHTT; PAM sequence: GATAGTTT
  source 1..20: mol_type = other DNA
tgggctccccttggccaaaa

SEQ ID NO: 8174 - DNA, 20 bp, synthetic construct
  misc_feature 1..20: note = Description of Artificial Sequence: Synthetic oligonucleotide
  misc_feature 1..20: note = Target: FXN; (+) strand; PAM type: NNNNGHTT; PAM sequence: GGGAGCTT
  source 1..20: mol_type = other DNA
gatagtttgttgagtcagtt

SEQ ID NO: 8175 - DNA, 20 bp, synthetic construct
  misc_feature 1..20: note = Description of Artificial Sequence: Synthetic oligonucleotide
  misc_feature 1..20: note = Target: FXN; (+) strand; PAM type: NNNNGHTT; PAM sequence: TTTTGTTT
  source 1..20: mol_type = other DNA
agtcagttgggagcttagaa

SEQ ID NO: 8176 - DNA, 20 bp, synthetic construct
  misc_feature 1..20: note = Description of Artificial Sequence: Synthetic oligonucleotide
  misc_feature 1..20: note = Target: FXN; (+) strand; PAM type: NNNNGHTT; PAM sequence: TCCTGATT
  source 1..20: mol_type = other DNA
agtagtgggtcagagaacct

SEQ ID NO: 8177 - DNA, 20 bp, synthetic construct
  misc_feature 1..20: note = Description of Artificial Sequence: Synthetic oligonucleotide
  misc_feature 1..20: note = Target: FXN; (+) strand; PAM type: NNNNGHTT; PAM sequence: CTGAGATT
  source 1..20: mol_type = other DNA
gaaccttcctgattcctgcc

SEQ ID NO: 8178 - DNA, 20 bp, synthetic construct
  misc_feature 1..20: note = Description of Artificial Sequence: Synthetic oligonucleotide
  misc_feature 1..20: note = Target: FXN; (+) strand; PAM type: NNNNGHTT; PAM sequence: GTAGGCTT
  source 1..20: mol_type = other DNA
ctgaagacaacattaggcta

SEQ ID NO: 8179 - DNA, 20 bp, synthetic construct
  misc_feature 1..20: note = Description of Artificial Sequence: Synthetic oligonucleotide
  misc_feature 1..20: note = Target: FXN; (+) strand; PAM type: NNNNGHTT; PAM sequence: TCCAGATT
  source 1..20: mol_type = other DNA
aacattaggctagtaggctt

SEQ ID NO: 8180 - DNA, 20 bp, synthetic construct
  misc_feature 1..20: note = Description of Artificial Sequence: Synthetic oligonucleotide
  misc_feature 1..20: note = Target: FXN; (+) strand; PAM type: NNNNGHTT; PAM sequence: AAATGCTT
  source 1..20: mol_type = other DNA
caaatcatttactaattagc

SEQ ID NO: 8181 - DNA, 20 bp, synthetic construct
  misc_feature 1..20: note = Description of Artificial Sequence: Synthetic oligonucleotide
  misc_feature 1..20: note = Target: FXN; (+) strand; PAM type: NNNNGHTT; PAM sequence: TGTAGATT
  source 1..20: mol_type = other DNA
ctaattagcaaatgcttaag

SEQ ID NO: 8182 - DNA, 20 bp, synthetic construct
  misc_feature 1..20: note = Description of Artificial Sequence: Synthetic oligonucleotide
  misc_feature 1..20: note = Target: FXN; (+) strand; PAM type: NNNNGHTT; PAM sequence: TATAGTTT
  source 1..20: mol_type = other DNA
gctatacagtggctgccatc

SEQ ID NO: 8183 - DNA, 20 bp, synthetic construct
  misc_feature 1..20: note = Description of Artificial Sequence: Synthetic oligonucleotide
  misc_feature 1..20: note = Target: FXN; (+) strand; PAM type: NNNNGHTT; PAM sequence: TTGTGATT
  source 1..20: mol_type = other DNA
ctgccatctatagtttggac

SEQ ID NO: 8184 - DNA, 20 bp, synthetic construct
  misc_feature 1..20: note = Description of Artificial Sequence: Synthetic oligonucleotide
  misc_feature 1..20: note = Target: FXN; (+) strand; PAM type: NNNNGHTT; PAM sequence: TCCTGATT
  source 1..20: mol_type = other DNA
ctgtaccctagagtatgaat

SEQ ID NO: 8185 - DNA, 20 bp, synthetic construct
  misc_feature 1..20: note = Description of Artificial Sequence: Synthetic oligonucleotide
  misc_feature 1..20: note = Target: FXN; (+) strand; PAM type: NNNNGHTT; PAM sequence: TCATGTTT
  source 1..20: mol_type = other DNA
tgctaactaatttatgtatt

SEQ ID NO: 8186 - DNA, 20 bp, synthetic construct
  misc_feature 1..20: note = Description of Artificial Sequence: Synthetic oligonucleotide
  misc_feature 1..20: note = Target: FXN; (+) strand; PAM type: NNNNGHTT; PAM sequence: TTGAGCTT
  source 1..20: mol_type = other DNA
atgtttgataatattattac

SEQ ID NO: 8187 - DNA, 20 bp, synthetic construct
  misc_feature 1..20: note = Description of Artificial Sequence: Synthetic oligonucleotide
  misc_feature 1..20: note = Target: FXN; (+) strand; PAM type: NNNNGHTT; PAM sequence: TATTGATT
  source 1..20: mol_type = other DNA
catagtagggacttaataaa

SEQ ID NO: 8188 - DNA, 20 bp, synthetic construct
  misc_feature 1..20: note = Description of Artificial Sequence: Synthetic oligonucleotide
  misc_feature 1..20: note = Target: FXN; (+) strand; PAM type: NNNNGHTT; PAM sequence: ACATGCTT
  source 1..20: mol_type = other DNA
gtaaatgagacttttccaaa

SEQ ID NO: 8189 - DNA, 20 bp, synthetic construct
  misc_feature 1..20: note = Description of Artificial Sequence: Synthetic oligonucleotide
  misc_feature 1..20: note = Target: FXN; (+) strand; PAM type: NNNNGHTT; PAM sequence: AGTGGCTT
  source 1..20: mol_type = other DNA
tctgtggagtgggagactta

SEQ ID NO: 8190 - DNA, 20 bp, synthetic construct
  misc_feature 1..20: note = Description of Artificial Sequence: Synthetic oligonucleotide
  misc_feature 1..20: note = Target: FXN; (+) strand; PAM type: NNNNGHTT; PAM sequence: TAAGGATT
  source 1..20: mol_type = other DNA
tggcatcttagatattttaa

SEQ ID NO: 8191 - DNA, 20 bp, synthetic construct
  misc_feature 1..20: note = Description of Artificial Sequence: Synthetic oligonucleotide
  misc_feature 1..20: note = Target: FXN; (+) strand; PAM type: NNNNGHTT; PAM sequence: ATTTGCTT
  source 1..20: mol_type = other DNA
tcttagatattttaataagg

SEQ ID NO: 8192 - DNA, 20 bp, synthetic construct
  misc_feature 1..20: note = Description of Artificial Sequence: Synthetic oligonucleotide
  misc_feature 1..20: note = Target: FXN; (+) strand; PAM type: NNNNGHTT; PAM sequence: CAGAGTTT
  source 1..20: mol_type = other DNA
aaaaactttaaacaaattaa

SEQ ID NO: 8193 - DNA, 20 bp, synthetic construct
  misc_feature 1..20: note = Description of Artificial Sequence: Synthetic oligonucleotide
  misc_feature 1..20: note = Target: FXN; (+) strand; PAM type: NNNNGHTT; PAM sequence: GAATGATT
  source 1..20: mol_type = other DNA
acagagttttattcagcaaa

SEQ ID NO: 8194 - DNA, 20 bp, synthetic construct
  misc_feature 1..20: note = Description of Artificial Sequence: Synthetic oligonucleotide
  misc_feature 1..20: note = Target: FXN; (+) strand; PAM type: NNNNGHTT; PAM sequence: AGAGGATT
  source 1..20: mol_type = other DNA
acggtgtgccacgtggttgg

SEQ ID NO: 8195 - DNA, 20 bp, synthetic construct
  misc_feature 1..20: note = Description of Artificial Sequence: Synthetic oligonucleotide
  misc_feature 1..20: note = Target: FXN; (+) strand; PAM type: NNNNGHTT; PAM sequence: TTAGGATT
  source 1..20: mol_type = other DNA
gccacgtggttggagaggat

SEQ ID NO: 8196 - DNA, 20 bp, synthetic construct
  misc_feature 1..20: note = Description of Artificial Sequence: Synthetic oligonucleotide
  misc_feature 1..20: note = Target: FXN; (+) strand; PAM type: NNNNGHTT; PAM sequence: CGGAGCTT
  source 1..20: mol_type = other DNA
aatggtgtgaacctgggagg

SEQ ID NO: 8197 - DNA, 20 bp, synthetic construct
  misc_feature 1..20: note = Description of Artificial Sequence: Synthetic oligonucleotide
  misc_feature 1..20: note = Target: FXN; (+) strand; PAM type: NNNNGHTT; PAM sequence: TACAGCTT
  source 1..20: mol_type = other DNA
acagaaacagccaggttggt

SEQ ID NO: 8198 - DNA, 20 bp, synthetic construct
  misc_feature 1..20: note = Description of Artificial Sequence: Synthetic oligonucleotide
  misc_feature 1..20: note = Target: FXN; (+) strand; PAM type: NNNNGHTT; PAM sequence: TGGTGTTT
  source 1..20: mol_type = other DNA
cagccaggttggttacagct

SEQ ID NO: 8199 - DNA, 20 bp, synthetic construct
  misc_feature 1..20: note = Description of Artificial Sequence: Synthetic oligonucleotide
  misc_feature 1..20: note = Target: FXN; (+) strand; PAM type: NNNNGHTT; PAM sequence: CTTGGTTT
  source 1..20: mol_type = other DNA
agcttggtgtttgccttaaa

SEQ ID NO: 8200 - DNA, 20 bp, synthetic construct
  misc_feature 1..20: note = Description of Artificial Sequence: Synthetic oligonucleotide
  misc_feature 1..20: note = Target: FXN; (+) strand; PAM type: NNNNGHTT; PAM sequence: CTTTGATT
  source 1..20: mol_type = other DNA
tggtttgaacagttggccgc

SEQ ID NO: 8201 - DNA, 20 bp, synthetic construct
  misc_feature 1..20: note = Description of Artificial Sequence: Synthetic oligonucleotide
  misc_feature 1..20: note = Target: FXN; (+) strand; PAM type: NNNNGHTT; PAM sequence: CGGTGATT
  source 1..20: mol_type = other DNA
gcctttgattagccaaaact

SEQ ID NO: 8202 - DNA, 20 bp, synthetic construct
  misc_feature 1..20: note = Description of Artificial Sequence: Synthetic oligonucleotide
  misc_feature 1..20: note = Target: FXN; (+) strand; PAM type: NNNNGHTT; PAM sequence: AGTAGATT
  source 1..20: mol_type = other DNA
aactcggtgattggtacaag

SEQ ID NO: 8203 - DNA, 20 bp, synthetic construct
  misc_feature 1..20: note = Description of Artificial Sequence: Synthetic oligonucleotide
  misc_feature 1..20: note = Target: FXN; (+) strand; PAM type: NNNNGHTT; PAM sequence: GGCAGTTT
  source 1..20: mol_type = other DNA
gaactcaaaataggtaagga

SEQ ID NO: 8204 - DNA, 20 bp, synthetic construct
  misc_feature 1..20: note = Description of Artificial Sequence: Synthetic oligonucleotide
  misc_feature 1..20: note = Target: FXN; (+) strand; PAM type: NNNNGHTT; PAM sequence: TCCAGCTT
  source 1..20: mol_type = other DNA
aacatactcaggagtaccat

SEQ ID NO: 8205 - DNA, 20 bp, synthetic construct
  misc_feature 1..20: note = Description of Artificial Sequence: Synthetic oligonucleotide
  misc_feature 1..20: note = Target: FXN; (+) strand; PAM type: NNNNGHTT; PAM sequence: AAGGGATT
  source 1..20: mol_type = other DNA
aaccaccacctcctgggctc

SEQ ID NO: 8206 - DNA, 20 bp, synthetic construct
  misc_feature 1..20: note = Description of Artificial Sequence: Synthetic oligonucleotide
  misc_feature 1..20: note = Target: FXN; (+) strand; PAM type: NNNNGHTT; PAM sequence: CTGGGATT
  source 1..20: mol_type = other DNA
tgcctcagtctcccgagtaa

SEQ ID NO: 8207 - DNA, 20 bp, synthetic construct
  misc_feature 1..20: note = Description of Artificial Sequence: Synthetic oligonucleotide
  misc_feature 1..20: note = Target: FXN; (+) strand; PAM type: NNNNGHTT; PAM sequence: TGGGGTTT
  source 1..20: mol_type = other DNA
ttttgtatttttagtagaga

SEQ ID NO: 8208 - DNA, 20 bp, synthetic construct
  misc_feature 1..20: note = Description of Artificial Sequence: Synthetic oligonucleotide
  misc_feature 1..20: note = Target: FXN; (+) strand; PAM type: NNNNGHTT; PAM sequence: TCTGGCTT
  source 1..20: mol_type = other DNA
ttggatatggagacaaagga

SEQ ID NO: 8209 - DNA, 20 bp, synthetic construct
  misc_feature 1..20: note = Description of Artificial Sequence: Synthetic oligonucleotide
  misc_feature 1..20: note = Target: FXN; (+) strand; PAM type: NNNNGHTT; PAM sequence: CCTGGATT
  source 1..20: mol_type = other DNA
caaaggatctggcttagcat

SEQ ID NO: 8210 - DNA, 20 bp, synthetic construct
  misc_feature 1..20: note = Description of Artificial Sequence: Synthetic oligonucleotide
  misc_feature 1..20: note = Target: FXN; (+) strand; PAM type: NNNNGHTT; PAM sequence: TGCAGTTT
  source 1..20: mol_type = other DNA
gatatctaacttttgcgagc

SEQ ID NO: 8211 - DNA, 20 bp, synthetic construct
  misc_feature 1..20: note = Description of Artificial Sequence: Synthetic oligonucleotide
  misc_feature 1..20: note = Target: FXN; (+) strand; PAM type: NNNNGHTT; PAM sequence: TTCAGATT
  source 1..20: mol_type = other DNA
agtgacattaacctcctctc

SEQ ID NO: 8212 - DNA, 20 bp, synthetic construct
  misc_feature 1..20: note = Description of Artificial Sequence: Synthetic oligonucleotide
  misc_feature 1..20: note = Target: FXN; (+) strand; PAM type: NNNNGHTT; PAM sequence: CAGAGCTT
  source 1..20: mol_type = other DNA
aatggcgtgaacccgggagg

SEQ ID NO: 8213 - DNA, 20 bp, synthetic construct
  misc_feature 1..20: note = Description of Artificial Sequence: Synthetic oligonucleotide
  misc_feature 1..20: note = Target: FXN; (+) strand; PAM type: NNNNGHTT; PAM sequence: CTCAGATT
  source 1..20: mol_type = other DNA
atgcacactcccaaaataga

SEQ ID NO: 8214 - DNA, 20 bp, synthetic construct
  misc_feature 1..20: note = Description of Artificial Sequence: Synthetic oligonucleotide
  misc_feature 1..20: note = Target: FXN; (+) strand; PAM type: NNNNGHTT; PAM sequence: GCTAGTTT
  source 1..20: mol_type = other DNA
atttctgctgaactaatgca

SEQ ID NO: 8215 - DNA, 20 bp, synthetic construct
  misc_feature 1..20: note = Description of Artificial Sequence: Synthetic oligonucleotide
  misc_feature 1..20: note = Target: FXN; (+) strand; PAM type: NNNNGHTT; PAM sequence: AATAGTTT
  source 1..20: mol_type = other DNA
tgtcaccactttccttccaa

SEQ ID NO: 8216 - DNA, 20 bp, synthetic construct
  misc_feature 1..20: note = Description of Artificial Sequence: Synthetic oligonucleotide
  misc_feature 1..20: note = Target: FXN; (+) strand; PAM type: NNNNGHTT; PAM sequence: TGGGGTTT
  source 1..20: mol_type = other DNA
ggtgggaggaagttgagcat

SEQ ID NO: 8217 - DNA, 20 bp, synthetic construct
  misc_feature 1..20: note = Description of Artificial Sequence: Synthetic oligonucleotide
  misc_feature 1..20: note = Target: FXN; (+) strand; PAM type: NNNNGHTT; PAM sequence: AGGTGCTT
  source 1..20: mol_type = other DNA
agacagatctcctgctgcta

SEQ ID NO: 8218 - DNA, 20 bp, synthetic construct
  misc_feature 1..20: note = Description of Artificial Sequence: Synthetic oligonucleotide
  misc_feature 1..20: note = Target: FXN; (+) strand; PAM type: NNNNGHTT; PAM sequence: AATAGCTT
  source 1..20: mol_type = other DNA
agaaggtgccagggggtgaa

SEQ ID NO: 8219 - DNA, 20 bp, synthetic construct
  misc_feature 1..20: note = Description of Artificial Sequence: Synthetic oligonucleotide
  misc_feature 1..20: note = Target: FXN; (+) strand; PAM type: NNNNGHTT; PAM sequence: ATTTGCTT
  source 1..20: mol_type = other DNA
ggagctagaagggctctcac

SEQ ID NO: 8220 - DNA, 20 bp, synthetic construct
  misc_feature 1..20: note = Description of Artificial Sequence: Synthetic oligonucleotide
  misc_feature 1..20: note = Target: FXN; (+) strand; PAM type: NNNNGHTT; PAM sequence: AAAAGATT
  source 1..20: mol_type = other DNA
cctgatacctggagtcactc

SEQ ID NO: 8221 - DNA, 20 bp, synthetic construct
  misc_feature 1..20: note = Description of Artificial Sequence: Synthetic oligonucleotide
  misc_feature 1..20: note = Target: FXN; (+) strand; PAM type: NNNNGHTT; PAM sequence: TTTGGCTT
  source 1..20: mol_type = other DNA
tccgataggaaaaagtcaat

SEQ ID NO: 8222 - DNA, 20 bp, synthetic construct
  misc_feature 1..20: note = Description of Artificial Sequence: Synthetic oligonucleotide
  misc_feature 1..20: note = Target: FXN; (+) strand; PAM type: NNNNGHTT; PAM sequence: CCCTGATT
  source 1..20: mol_type = other DNA
tcagtggttgcatgtgcacc

SEQ ID NO: 8223 - DNA, 20 bp, synthetic construct
  misc_feature 1..20: note = Description of Artificial Sequence: Synthetic oligonucleotide
  misc_feature 1..20: note = Target: FXN; (+) strand; PAM type: NNNNGHTT; PAM sequence: GCTGGATT
  source 1..20: mol_type = other DNA
ctcagtcctctgccctttct

SEQ ID NO: 8224 - DNA, 20 bp, synthetic construct
  misc_feature 1..20: note = Description of Artificial Sequence: Synthetic oligonucleotide
  misc_feature 1..20: note = Target: FXN; (+) strand; PAM type: NNNNGHTT; PAM sequence: CAATGATT
  source 1..20: mol_type = other DNA
ccacaaagagaacaaattac

SEQ ID NO: 8225 - DNA, 20 bp, synthetic construct
  misc_feature 1..20: note = Description of Artificial Sequence: Synthetic oligonucleotide
  misc_feature 1..20: note = Target: FXN; (+) strand; PAM type: NNNNGHTT; PAM sequence: TGTTGATT
  source 1..20: mol_type = other DNA
acaaattaccaatgattgtg

SEQ ID NO: 8226 - DNA, 20 bp, synthetic construct
  misc_feature 1..20: note = Description of Artificial Sequence: Synthetic oligonucleotide
  misc_feature 1..20: note = Target: FXN; (+) strand; PAM type: NNNNGHTT; PAM sequence: CAGTGTTT
  source 1..20: mol_type = other DNA
cacctatgagtgagaatatg

SEQ ID NO: 8227 - DNA, 20 bp, synthetic construct
  misc_feature 1..20: note = Description of Artificial Sequence: Synthetic oligonucleotide
  misc_feature 1..20: note = Target: FXN; (+) strand; PAM type: NNNNGHTT; PAM sequence: GTTTGATT
  source 1..20: mol_type = other DNA
tatgagtgagaatatgcagt

SEQ ID NO: 8228 - DNA, 20 bp, synthetic construct
  misc_feature 1..20: note = Description of Artificial Sequence: Synthetic oligonucleotide
  misc_feature 1..20: note = Target: FXN; (+) strand; PAM type: NNNNGHTT; PAM sequence: GATAGTTT
  source 1..20: mol_type = other DNA
gtttgattttttgttcttgc

SEQ ID NO: 8229 - DNA, 20 bp, synthetic construct
  misc_feature 1..20: note = Description of Artificial Sequence: Synthetic oligonucleotide
  misc_feature 1..20: note = Target: FXN; (+) strand; PAM type: NNNNGHTT; PAM sequence: TGATGATT
  source 1..20: mol_type = other DNA
ttgcgatagtttactgagaa

SEQ ID NO: 8230 - DNA, 20 bp, synthetic construct
  misc_feature 1..20: note = Description of Artificial Sequence: Synthetic oligonucleotide
  misc_feature 1..20: note = Target: FXN; (+) strand; PAM type: NNNNGHTT; PAM sequence: TCCAGTTT
  source 1..20: mol_type = other DNA
gtttactgagaatgatgatt

SEQ ID NO: 8231 - DNA, 20 bp, synthetic construct
  misc_feature 1..20: note = Description of Artificial Sequence: Synthetic oligonucleotide
  misc_feature 1..20: note = Target: FXN; (+) strand; PAM type: NNNNGHTT; PAM sequence: CGGGGTTT
  source 1..20: mol_type = other DNA
ggaaatagtattaacgggtg

SEQ ID NO: 8232 - DNA, 20 bp, synthetic construct
  misc_feature 1..20: note = Description of Artificial Sequence: Synthetic oligonucleotide
  misc_feature 1..20: note = Target: FXN; (+) strand; PAM type: NNNNGHTT; PAM sequence: TGATGTTT
  source 1..20: mol_type = other DNA
tagctggaattagatagtgg

SEQ ID NO: 8233 - DNA, 20 bp, synthetic construct
  misc_feature 1..20: note = Description of Artificial Sequence: Synthetic oligonucleotide
  misc_feature 1..20: note = Target: FXN; (+) strand; PAM type: NNNNGHTT; PAM sequence: TACAGTTT
  source 1..20: mol_type = other DNA
tactaaaaactcctgaatta

SEQ ID NO: 8234 - DNA, 20 bp, synthetic construct
  misc_feature 1..20: note = Description of Artificial Sequence: Synthetic oligonucleotide
  misc_feature 1..20: note = Target: FXN; (+) strand; PAM type: NNNNGHTT; PAM sequence: ATTTGTTT
  source 1..20: mol_type = other DNA
gttttaagaaacttttattt

SEQ ID NO: 8235 - DNA, 20 bp, synthetic construct
  misc_feature 1..20: note = Description of Artificial Sequence: Synthetic oligonucleotide
  misc_feature 1..20: note = Target: FXN; (+) strand; PAM type: NNNNGHTT; PAM sequence: AAGCGATT
  source 1..20: mol_type = other DNA
agcctcaatctctgaggctc

SEQ ID NO: 8236 - DNA, 20 bp, synthetic construct
  misc_feature 1..20: note = Description of Artificial Sequence: Synthetic oligonucleotide
  misc_feature 1..20: note = Target: FXN; (+) strand; PAM type: NNNNGHTT; PAM sequence: CAAGGTTT
  source 1..20: mol_type = other DNA
tttgtaattttttgtaaaaa

SEQ ID NO: 8237 - DNA, 20 bp, synthetic construct
  misc_feature 1..20: note = Description of Artificial Sequence: Synthetic oligonucleotide
  misc_feature 1..20: note = Target: FXN; (+) strand; PAM type: NNNNGHTT; PAM sequence: CTCAGTTT
  source 1..20: mol_type = other DNA
catgagtcaccacatgcagc

SEQ ID NO: 8238 - DNA, 20 bp, synthetic construct
  misc_feature 1..20: note = Description of Artificial Sequence: Synthetic oligonucleotide
  misc_feature 1..20: note = Target: FXN; (+) strand; PAM type: NNNNGHTT; PAM sequence: ATGGGTTT
  source 1..20: mol_type = other DNA
gtcataccaaaacagtaaaa

SEQ ID NO: 8239 - DNA, 20 bp, synthetic construct
  misc_feature 1..20: note = Description of Artificial Sequence: Synthetic oligonucleotide
  misc_feature 1..20: note = Target: FXN; (+) strand; PAM type: NNNNGHTT; PAM sequence: AAATGTTT
  source 1..20: mol_type = other DNA
aaaatgggtttcaggaaaaa

SEQ ID NO: 8240 - DNA, 20 bp, synthetic construct
  misc_feature 1..20: note = Description of Artificial Sequence: Synthetic oligonucleotide
  misc_feature 1..20: note = Target: FXN; (+) strand; PAM type: NNNNGHTT; PAM sequence: AAATGCTT
  source 1..20: mol_type = other DNA
ataatcccagcccttttaaa

SEQ ID NO: 8241 - DNA, 20 bp, synthetic construct
  misc_feature 1..20: note = Description of Artificial Sequence: Synthetic oligonucleotide
  misc_feature 1..20: note = Target: FXN; (+) strand; PAM type: NNNNGHTT; PAM sequence: TTATGATT
  source 1..20: mol_type = other DNA
actcataaaaggacaaatac

SEQ ID NO: 8242 - DNA, 20 bp, synthetic construct
  misc_feature 1..20: note = Description of Artificial Sequence: Synthetic oligonucleotide
  misc_feature 1..20: note = Target: FXN; (+) strand; PAM type: NNNNGHTT; PAM sequence: TAGAGTTT
  source 1..20: mol_type = other DNA
aaattagtgtctaatgggca

SEQ ID NO: 8243 - DNA, 20 bp, synthetic construct
  misc_feature 1..20: note = Description of Artificial Sequence: Synthetic oligonucleotide
  misc_feature 1..20: note = Target: FXN; (+) strand; PAM type: NNNNGHTT; PAM sequence: ATGTGCTT
  source 1..20: mol_type = other DNA
aatatggtaaatttagcgtt

SEQ ID NO: 8244 - DNA, 20 bp, synthetic construct
  misc_feature 1..20: note = Description of Artificial Sequence: Synthetic oligonucleotide
  misc_feature 1..20: note = Target: FXN; (+) strand; PAM type: NNNNGHTT; PAM sequence: AGAAGTTT
  source 1..20: mol_type = other DNA
taggaggatcacttgaggcc

SEQ ID NO: 8245 - DNA, 20 bp, synthetic construct
  misc_feature 1..20: note = Description of Artificial Sequence: Synthetic oligonucleotide
  misc_feature 1..20: note = Target: FXN; (+) strand; PAM type: NNNNGHTT; PAM sequence: AGGGGTTT
  source 1..20: mol_type = other DNA
tcagaggatcacttgagcat

SEQ ID NO: 8246 - DNA, 20 bp, synthetic construct
  misc_feature 1..20: note = Description of Artificial Sequence: Synthetic oligonucleotide
  misc_feature 1..20: note = Target: FXN; (+) strand; PAM type: NNNNGHTT; PAM sequence: ATGGGATT
  source 1..20: mol_type = other DNA
atatcttttatcgctggtta

SEQ ID NO: 8247 - DNA, 20 bp, synthetic construct
  misc_feature 1..20: note = Description of Artificial Sequence: Synthetic oligonucleotide
  misc_feature 1..20: note = Target: FXN; (+) strand; PAM type: NNNNGHTT; PAM sequence: GAATGCTT
  source 1..20: mol_type = other DNA
gctggttaatgggattgaga

SEQ ID NO: 8248 - DNA, 20 bp, synthetic construct
  misc_feature 1..20: note = Description of Artificial Sequence: Synthetic oligonucleotide
  misc_feature 1..20: note = Target: FXN; (+) strand; PAM type: NNNNGHTT; PAM sequence: CCTGGATT
  source 1..20: mol_type = other DNA
tgtctttggacccacagaga

SEQ ID NO: 8249 - DNA, 20 bp, synthetic construct
  misc_feature 1..20: note = Description of Artificial Sequence: Synthetic oligonucleotide
  misc_feature 1..20: note = Target: FXN; (+) strand; PAM type: NNNNGHTT; PAM sequence: TTAAGATT
  source 1..20: mol_type = other DNA
ggacccacagagacctggat

SEQ ID NO: 8250 - DNA, 20 bp, synthetic construct
  misc_feature 1..20: note = Description of Artificial Sequence: Synthetic oligonucleotide
  misc_feature 1..20: note = Target: FXN; (+) strand; PAM type: NNNNGHTT; PAM sequence: CTCTGTTT
  source 1..20: mol_type = other DNA
gagtactctttactatgaac

SEQ ID NO: 8251 - DNA, 20 bp, synthetic construct
  misc_feature 1..20: note = Description of Artificial Sequence: Synthetic oligonucleotide
  misc_feature 1..20: note = Target: FXN; (+) strand; PAM type: NNNNGHTT; PAM sequence: ATTTGTTT
  source 1..20: mol_type = other DNA
cgtctccatcatttctatac

SEQ ID NO: 8252 - DNA, 20 bp, synthetic construct
  misc_feature 1..20: note = Description of Artificial Sequence: Synthetic oligonucleotide
  misc_feature 1..20: note = Target: FXN; (+) strand; PAM type: NNNNGHTT; PAM sequence: CTTTGTTT
  source 1..20: mol_type = other DNA
cctctggaatttcaataact

SEQ ID NO: 8253 - DNA, 20 bp, synthetic construct
  misc_feature 1..20: note = Description of Artificial Sequence: Synthetic oligonucleotide
  misc_feature 1..20: note = Target: FXN; (+) strand; PAM type: NNNNGHTT; PAM sequence: TTGGGTTT
  source 1..20: mol_type = other DNA
tttcaataactctttgtttt

SEQ ID NO: 8254 - DNA, 20 bp, synthetic construct
  misc_feature 1..20: note = Description of Artificial Sequence: Synthetic oligonucleotide
  misc_feature 1..20: note = Target: FXN; (+) strand; PAM type: NNNNGHTT; PAM sequence: TTTTGTTT
  source 1..20: mol_type = other DNA
aactctttgttttttgggtt

SEQ ID NO: 8255 - DNA, 20 bp, synthetic construct
  misc_feature 1..20: note = Description of Artificial Sequence: Synthetic oligonucleotide
  misc_feature 1..20: note = Target: FXN; (+) strand; PAM type: NNNNGHTT; PAM sequence: TTTTGTTT
  source 1..20: mol_type = other DNA
tttgttttttgggttttttg

SEQ ID NO: 8256 - DNA, 20 bp, synthetic construct
  misc_feature 1..20: note = Description of Artificial Sequence: Synthetic oligonucleotide
  misc_feature 1..20: note = Target: FXN; (+) strand; PAM type: NNNNGHTT; PAM sequence: TTTTGCTT
  source 1..20: mol_type = other DNA
tttttgggttttttgttttg

SEQ ID NO: 8257 - DNA, 20 bp, synthetic construct
  misc_feature 1..20: note = Description of Artificial Sequence: Synthetic oligonucleotide
  misc_feature 1..20: note = Target: FXN; (+) strand; PAM type: NNNNGHTT; PAM sequence: CTTTGCTT
  source 1..20: mol_type = other DNA
gggttttttgttttgttttg

SEQ ID NO: 8258 - DNA, 20 bp, synthetic construct
  misc_feature 1..20: note = Description of Artificial Sequence: Synthetic oligonucleotide
  misc_feature 1..20: note = Target: FXN; (+) strand; PAM type: NNNNGHTT; PAM sequence: CAGGGTTT
  source 1..20: mol_type = other DNA
ttttgcatttttagtagaga

SEQ ID NO: 8259 - DNA, 20 bp, synthetic construct
  misc_feature 1..20: note = Description of Artificial Sequence: Synthetic oligonucleotide
  misc_feature 1..20: note = Target: FXN; (+) strand; PAM type: NNNNGHTT; PAM sequence: CTGTGTTT
  source 1..20: mol_type = other DNA
tgcctggcctaaatagctct

SEQ ID NO: 8260 - DNA, 20 bp, synthetic construct
  misc_feature 1..20: note = Description of Artificial Sequence: Synthetic oligonucleotide
  misc_feature 1..20: note = Target: FXN; (+) strand; PAM type: NNNNGHTT; PAM sequence: TCTCGATT
  source 1..20: mol_type = other DNA
tataagaatcattcagagcc

SEQ ID NO: 8261 - DNA, 20 bp, synthetic construct
  misc_feature 1..20: note = Description of Artificial Sequence: Synthetic oligonucleotide
  misc_feature 1..20: note = Target: FXN; (+) strand; PAM type: NNNNGHTT; PAM sequence: GCAGGCTT
  source 1..20: mol_type = other DNA
catgcacaagatggggaaca

SEQ ID NO: 8262 - DNA, 20 bp, synthetic construct
  misc_feature 1..20: note = Description of Artificial Sequence: Synthetic oligonucleotide
  misc_feature 1..20: note = Target: FXN; (+) strand; PAM type: NNNNGHTT; PAM sequence: CCCTGCTT
  source 1..20: mol_type = other DNA
atggggaacagcaggcttcc

SEQ ID NO: 8263 - DNA, 20 bp, synthetic construct
  misc_feature 1..20: note = Description of Artificial Sequence: Synthetic oligonucleotide
  misc_feature 1..20: note = Target: FXN; (+) strand; PAM type: NNNNGHTT; PAM sequence: AGCTGTTT
  source 1..20: mol_type = other DNA
atacagagaactagccctgt

SEQ ID NO: 8264 - DNA, 20 bp, synthetic construct
  misc_feature 1..20: note = Description of Artificial Sequence: Synthetic oligonucleotide
  misc_feature 1..20: note = Target: FXN; (+) strand; PAM type: NNNNGHTT; PAM sequence: GAGTGTTT
  source 1..20: mol_type = other DNA
aaaggactcttttgttgaaa

SEQ ID NO: 8265 - DNA, 20 bp, synthetic construct
  misc_feature 1..20: note = Description of Artificial Sequence: Synthetic oligonucleotide
  misc_feature 1..20: note = Target: FXN; (+) strand; PAM type: NNNNGHTT; PAM sequence: AGAAGCTT
  source 1..20: mol_type = other DNA
aagccttggaggagtatctg

SEQ ID NO: 8266 - DNA, 20 bp, synthetic construct
  misc_feature 1..20: note = Description of Artificial Sequence: Synthetic oligonucleotide
  misc_feature 1..20: note = Target: FXN; (+) strand; PAM type: NNNNGHTT; PAM sequence: TGGAGTTT
  source 1..20: mol_type = other DNA
tggaaataaaaaacttcatc

SEQ ID NO: 8267 - DNA, 20 bp, synthetic construct
  misc_feature 1..20: note = Description of Artificial Sequence: Synthetic oligonucleotide
  misc_feature 1..20: note = Target: FXN; (+) strand; PAM type: NNNNGHTT; PAM sequence: GATGGTTT
  source 1..20: mol_type = other DNA
ctcctaagacaagcaaagca

SEQ ID NO: 8268 - DNA, 20 bp, synthetic construct
  misc_feature 1..20: note = Description of Artificial Sequence: Synthetic oligonucleotide
  misc_feature 1..20: note = Target: FXN; (+) strand; PAM type: NNNNGHTT; PAM sequence: TGATGTTT
  source 1..20: mol_type = other DNA
tgtaatagacttgtcatgtc

SEQ ID NO: 8269 - DNA, 20 bp, synthetic construct
  misc_feature 1..20: note = Description of Artificial Sequence: Synthetic oligonucleotide
  misc_feature 1..20: note = Target: FXN; (+) strand; PAM type: NNNNGHTT; PAM sequence: CCGAGCTT
  source 1..20: mol_type = other DNA
gagacaggtcacttaactct

SEQ ID NO: 8270 - DNA, 20 bp, synthetic construct
  misc_feature 1..20: note = Description of Artificial Sequence: Synthetic oligonucleotide
  misc_feature 1..20: note = Target: FXN; (+) strand; PAM type: NNNNGHTT; PAM sequence: TTATGATT
  source 1..20: mol_type = other DNA
ctctatgagatacaacatca

SEQ ID NO: 8271 - DNA, 20 bp, synthetic construct
  misc_feature 1..20: note = Description of Artificial Sequence: Synthetic oligonucleotide
  misc_feature 1..20: note = Target: FXN; (+) strand; PAM type: NNNNGHTT; PAM sequence: TTCTGATT
  source 1..20: mol_type = other DNA
catcattatgattaatccta

SEQ ID NO: 8272 - DNA, 20 bp, synthetic construct
  misc_feature 1..20: note = Description of Artificial Sequence: Synthetic oligonucleotide
  misc_feature 1..20: note = Target: FXN; (+) strand; PAM type: NNNNGHTT; PAM sequence: TCTTGTTT
  source 1..20: mol_type = other DNA
atgacaaagtgctaactttt

SEQ ID NO: 8273 - DNA, 20 bp, synthetic construct
  misc_feature 1..20: note = Description of Artificial Sequence: Synthetic oligonucleotide
  misc_feature 1..20: note = Target: FXN; (+) strand; PAM type: NNNNGHTT; PAM sequence: TTATGCTT
  source 1..20: mol_type = other DNA
tttttcttgttttaatttct

SEQ ID NO: 8274 - DNA, 20 bp, synthetic construct
  misc_feature 1..20: note = Description of Artificial Sequence: Synthetic oligonucleotide
  misc_feature 1..20: note = Target: FXN; (+) strand; PAM type: NNNNGHTT; PAM sequence: GCAGGCTT
  source 1..20: mol_type = other DNA
aaataaagtcacagctgggt

SEQ ID NO: 8275 - DNA, 20 bp, synthetic construct
  misc_feature 1..20: note = Description of Artificial Sequence: Synthetic oligonucleotide
  misc_feature 1..20: note = Target: FXN; (+) strand; PAM type: NNNNGHTT; PAM sequence: AGGAGTTT
  source 1..20: mol_type = other DNA
cctgtggatcacttgagctc

SEQ ID NO: 8276 - DNA, 20 bp, synthetic construct
  misc_feature 1..20: note = Description of Artificial Sequence: Synthetic oligonucleotide
  misc_feature 1..20: note = Target: FXN; (+) strand; PAM type: NNNNGHTT; PAM sequence: AAAAGTTT
  source 1..20: mol_type = other DNA
gcctgtctcattctcagtag

SEQ ID NO: 8277 - DNA, 20 bp, synthetic construct
  misc_feature 1..20: note = Description of Artificial Sequence: Synthetic oligonucleotide
  misc_feature 1..20: note = Target: FXN; (+) strand; PAM type: NNNNGHTT; PAM sequence: AGTAGCTT
  source 1..20: mol_type = other DNA
ggatattaagatctgaagtg

SEQ ID NO: 8278 - DNA, 20 bp, synthetic construct
  misc_feature 1..20: note = Description of Artificial Sequence: Synthetic oligonucleotide
  misc_feature 1..20: note = Target: FXN; (+) strand; PAM type: NNNNGHTT; PAM sequence: GACAGTTT
  source 1..20: mol_type = other DNA
acttttccaaatccagccta

SEQ ID NO: 8279 - DNA, 20 bp, synthetic construct
  misc_feature 1..20: note = Description of Artificial Sequence: Synthetic oligonucleotide
  misc_feature 1..20: note = Target: FXN; (+) strand; PAM type: NNNNGHTT; PAM sequence: TAGCGTTT
  source 1..20: mol_type = other DNA
agaagctacttttgaccttg

SEQ ID NO: 8280 - DNA, 20 bp, synthetic construct
  misc_feature 1..20: note = Description of Artificial Sequence: Synthetic oligonucleotide
  misc_feature 1..20: note = Target: FXN; (+) strand; PAM type: NNNNGHTT; PAM sequence: TAAAGTTT
  source 1..20: mol_type = other DNA
actttgtcttcaaagcaagt

SEQ ID NO: 8281 - DNA, 20 bp, synthetic construct
  misc_feature 1..20: note = Description of Artificial Sequence: Synthetic oligonucleotide
  misc_feature 1..20: note = Target: FXN; (+) strand; PAM type: NNNNGHTT; PAM sequence: ACTTGTTT
  source 1..20: mol_type = other DNA
caagttaaagtttgacctct

SEQ ID NO: 8282 - DNA, 20 bp, synthetic construct
  misc_feature 1..20: note = Description of Artificial Sequence: Synthetic oligonucleotide
  misc_feature 1..20: note = Target: FXN; (+) strand; PAM type: NNNNGHTT; PAM sequence: ATGTGCTT
  source 1..20: mol_type = other DNA
ccctcctgccttttccattg

SEQ ID NO: 8283 - DNA, 20 bp, synthetic construct
  misc_feature 1..20: note = Description of Artificial Sequence: Synthetic oligonucleotide
  misc_feature 1..20: note = Target: FXN; (+) strand; PAM type: NNNNGHTT; PAM sequence: AAAAGATT
  source 1..20: mol_type = other DNA
tgctttcaatctagaggaat

SEQ ID NO: 8284 - DNA, 20 bp, synthetic construct
  misc_feature 1..20: note = Description of Artificial Sequence: Synthetic oligonucleotide
  misc_feature 1..20: note = Target: FXN; (+) strand; PAM type: NNNNGHTT; PAM sequence: TAATGCTT
  source 1..20: mol_type = other DNA
atttattattctgtgatctc

SEQ ID NO: 8285 - DNA, 20 bp, synthetic construct
  misc_feature 1..20: note = Description of Artificial Sequence: Synthetic oligonucleotide
  misc_feature 1..20: note = Target: FXN; (+) strand; PAM type: NNNNGHTT; PAM sequence: GTGTGTTT
  source 1..20: mol_type = other DNA
tgctttgttcagaataaata

SEQ ID NO: 8286 - DNA, 20 bp, synthetic construct
  misc_feature 1..20: note = Description of Artificial Sequence: Synthetic oligonucleotide
  misc_feature 1..20: note = Target: FXN; (+) strand; PAM type: NNNNGHTT; PAM sequence: CACAGATT
  source 1..20: mol_type = other DNA
attctaggaaggccctaatt

SEQ ID NO: 8287 - DNA, 20 bp, synthetic construct
  misc_feature 1..20: note = Description of Artificial Sequence: Synthetic oligonucleotide
  misc_feature 1..20: note = Target: FXN; (+) strand; PAM type: NNNNGHTT; PAM sequence: ATTGGTTT
  source 1..20: mol_type = other DNA
ggccctaattcacagattgt

SEQ ID NO: 8288 - DNA, 20 bp, synthetic construct
  misc_feature 1..20: note = Description of Artificial Sequence: Synthetic oligonucleotide
  misc_feature 1..20: note = Target: FXN; (+) strand; PAM type: NNNNGHTT; PAM sequence: GGAGGATT
  source 1..20: mol_type = other DNA
cagttagtgtgctggaggtt

SEQ ID NO: 8289 - DNA, 20 bp, synthetic construct
  misc_feature 1..20: note = Description of Artificial Sequence: Synthetic oligonucleotide
  misc_feature 1..20: note = Target: FXN; (+) strand; PAM type: NNNNGHTT; PAM sequence: CTGTGCTT
  source 1..20: mol_type = other DNA
gtcattcttcctgaccctgg

SEQ ID NO: 8290 - DNA, 20 bp, synthetic construct
  misc_feature 1..20: note = Description of Artificial Sequence: Synthetic oligonucleotide
  misc_feature 1..20: note = Target: FXN; (+) strand; PAM type: NNNNGHTT; PAM sequence: AGTGGCTT
  source 1..20: mol_type = other DNA
agcgatcacttttggggatc

SEQ ID NO: 8291 - DNA, 20 bp, synthetic construct
  misc_feature 1..20: note = Description of Artificial Sequence: Synthetic oligonucleotide
  misc_feature 1..20: note = Target: FXN; (+) strand; PAM type: NNNNGHTT; PAM sequence: TGCCGTTT
  source 1..20: mol_type = other DNA
ttggaaagatctgctgagca

SEQ ID NO: 8292 - DNA, 20 bp, synthetic construct
  misc_feature 1..20: note = Description of Artificial Sequence: Synthetic oligonucleotide
  misc_feature 1..20: note = Target: FXN; (+) strand; PAM type: NNNNGHTT; PAM sequence: CGCCGTTT
  source 1..20: mol_type = other DNA
tcaggcccctccccttcctg

SEQ ID NO: 8293 - DNA, 20 bp, synthetic construct
  misc_feature 1..20: note = Description of Artificial Sequence: Synthetic oligonucleotide
  misc_feature 1..20: note = Target: FXN; (+) strand; PAM type: NNNNGHTT; PAM sequence: CAGTGCTT
  source 1..20: mol_type = other DNA
gggccctgaggacaagctct

SEQ ID NO: 8294 - DNA, 20 bp, synthetic construct
  misc_feature 1..20: note = Description of Artificial Sequence: Synthetic oligonucleotide
  misc_feature 1..20: note = Target: FXN; (+) strand; PAM type: NNNNGHTT; PAM sequence: ACAGGATT
  source 1..20: mol_type = other DNA
gtagctgtacctgcgaaggc

SEQ ID NO: 8295 - DNA, 20 bp, synthetic construct
  misc_feature 1..20: note = Description of Artificial Sequence: Synthetic oligonucleotide
  misc_feature 1..20: note = Target: FXN; (+) strand; PAM type: NNNNGHTT; PAM sequence: CGCAGTTT
  source 1..20: mol_type = other DNA
aggattccgcgggaagatcc

SEQ ID NO: 8296 - DNA, 20 bp, synthetic construct
  misc_feature 1..20: note = Description of Artificial Sequence: Synthetic oligonucleotide
  misc_feature 1..20: note = Target: FXN; (+) strand; PAM type: NNNNGHTT; PAM sequence: CATTGTTT
  source 1..20: mol_type = other DNA
ccgcagtttcgggccgtcgt

SEQ ID NO: 8297 - DNA, 20 bp, synthetic construct
  misc_feature 1..20: note = Description of Artificial Sequence: Synthetic oligonucleotide
  misc_feature 1..20: note = Target: FXN; (+) strand; PAM type: NNNNGHTT; PAM sequence: AAAAGATT
  source 1..20: mol_type = other DNA
agtccccatactctctgtgg

SEQ ID NO: 8298 - DNA, 20 bp, synthetic construct
  misc_feature 1..20: note = Description of Artificial Sequence: Synthetic oligonucleotide
  misc_feature 1..20: note = Target: FXN; (+) strand; PAM type: NNNNGHTT; PAM sequence: GTCTGCTT
  source 1..20: mol_type = other DNA
acaataaagatcatccttga

SEQ ID NO: 8299 - DNA, 20 bp, synthetic construct
  misc_feature 1..20: note = Description of Artificial Sequence: Synthetic oligonucleotide
  misc_feature 1..20: note = Target: FXN; (+) strand; PAM type: NNNNGHTT; PAM sequence: CTCAGCTT
  source 1..20: mol_type = other DNA
aaatgctccattcaccactc

SEQ ID NO: 8300 - DNA, 20 bp, synthetic construct
  misc_feature 1..20: note = Description of Artificial Sequence: Synthetic oligonucleotide
  misc_feature 1..20: note = Target: FXN; (+) strand; PAM type: NNNNGHTT; PAM sequence: TTCTGCTT
  source 1..20: mol_type = other DNA
tccattcaccactcctcagc

SEQ ID NO: 8301 - DNA, 20 bp, synthetic construct
  misc_feature 1..20: note = Description of Artificial Sequence: Synthetic oligonucleotide
  misc_feature 1..20: note = Target: FXN; (+) strand; PAM type: NNNNGHTT; PAM sequence: TCTGGTTT
  source 1..20: mol_type = other DNA
accactcctcagcttctgct

SEQ ID NO: 8302 - DNA, 20 bp, synthetic construct
  misc_feature 1..20: note = Description of Artificial Sequence: Synthetic oligonucleotide
  misc_feature 1..20: note = Target: FXN; (+) strand; PAM type: NNNNGHTT; PAM sequence: AGGGGCTT
  source 1..20: mol_type = other DNA
ttcagaggtctctgtattgg

SEQ ID NO: 8303 - DNA, 20 bp, synthetic construct
  misc_feature 1..20: note = Description of Artificial Sequence: Synthetic oligonucleotide
  misc_feature 1..20: note = Target: FXN; (+) strand; PAM type: NNNNGHTT; PAM sequence: CCGGGCTT
  source 1..20: mol_type = other DNA
cagactctttgtaggtggga

SEQ ID NO: 8304 - DNA, 20 bp, synthetic construct
  misc_feature 1..20: note = Description of Artificial Sequence: Synthetic oligonucleotide
  misc_feature 1..20: note = Target: FXN; (+) strand; PAM type: NNNNGHTT; PAM sequence: GGAAGCTT
  source 1..20: mol_type = other DNA
cgggcttccctgcagcagaa

SEQ ID NO: 8305 - DNA, 20 bp, synthetic construct
  misc_feature 1..20: note = Description of Artificial Sequence: Synthetic oligonucleotide
  misc_feature 1..20: note = Target: FXN; (+) strand; PAM type: NNNNGHTT; PAM sequence: CCCTGCTT
  source 1..20: mol_type = other DNA
gacacggggctatgacctgg

SEQ ID NO: 8306 - DNA, 20 bp, synthetic construct
  misc_feature 1..20: note = Description of Artificial Sequence: Synthetic oligonucleotide
  misc_feature 1..20: note = Target: FXN; (+) strand; PAM type: NNNNGHTT; PAM sequence: TTCTGTTT
  source 1..20: mol_type = other DNA
attgcataaataatgtcact

SEQ ID NO: 8307 - DNA, 20 bp, synthetic construct
  misc_feature 1..20: note = Description of Artificial Sequence: Synthetic oligonucleotide
  misc_feature 1..20: note = Target: FXN; (+) strand; PAM type: NNNNGHTT; PAM sequence: CCTTGTTT
  source 1..20: mol_type = other DNA
ttctacaatgactgatgggc

SEQ ID NO: 8308 - DNA, 20 bp, synthetic construct
  misc_feature 1..20: note = Description of Artificial Sequence: Synthetic oligonucleotide
  misc_feature 1..20: note = Target: FXN; (+) strand; PAM type: NNNNGHTT; PAM sequence: TTTTGTTT
  source 1..20: mol_type = other DNA
aatgactgatgggcccttgt

SEQ ID NO: 8309 - DNA, 20 bp, synthetic construct
  misc_feature 1..20: note = Description of Artificial Sequence: Synthetic oligonucleotide
  misc_feature 1..20: note = Target: FXN; (+) strand; PAM type: NNNNGHTT; PAM sequence: TGGTGATT
  source 1..20: mol_type = other DNA
acaccccacagggttccgag

SEQ ID NO: 8310 - DNA, 20 bp, synthetic construct
  misc_feature 1..20: note = Description of Artificial Sequence: Synthetic oligonucleotide
  misc_feature 1..20: note = Target: FXN; (+) strand; PAM type: NNNNGHTT; PAM sequence: CCTTGATT
  source 1..20: mol_type = other DNA
tgaccatgccagaggccagt

SEQ ID NO: 8311 - DNA, 20 bp, synthetic construct
  misc_feature 1..20: note = Description of Artificial Sequence: Synthetic oligonucleotide
  misc_feature 1..20: note = Target: FXN; (+) strand; PAM type: NNNNGHTT; PAM sequence: GTTAGTTT
  source 1..20: mol_type = other DNA
gtcctcgtgtcaggacctag

SEQ ID NO: 8312 - DNA, 20 bp, synthetic construct
  misc_feature 1..20: note = Description of Artificial Sequence: Synthetic oligonucleotide
  misc_feature 1..20: note = Target: FXN; (+) strand; PAM type: NNNNGHTT; PAM sequence: GCATGCTT
  source 1..20: mol_type = other DNA
actgatgcaaagtgcgtcct

SEQ ID NO: 8313 - DNA, 20 bp, synthetic construct
  misc_feature 1..20: note = Description of Artificial Sequence: Synthetic oligonucleotide
  misc_feature 1..20: note = Target: FXN; (+) strand; PAM type: NNNNGHTT; PAM sequence: CAATGCTT
  source 1..20: mol_type = other DNA
aagaaattgcgagacagaag

SEQ ID NO: 8314 - DNA, 20 bp, synthetic construct
  misc_feature 1..20: note = Description of Artificial Sequence: Synthetic oligonucleotide
  misc_feature 1..20: note = Target: FXN; (+) strand; PAM type: NNNNGHTT; PAM sequence: AGGAGTTT
  source 1..20: mol_type = other DNA
caggcggatcacttgaggtc

SEQ ID NO: 8315 - DNA, 20 bp, synthetic construct
  misc_feature 1..20: note = Description of Artificial Sequence: Synthetic oligonucleotide
  misc_feature 1..20: note = Target: FXN; (+) strand; PAM type: NNNNGHTT; PAM sequence: AGCTGCTT
  source 1..20: mol_type = other DNA
tggcaggcacctgtaatccc

SEQ ID NO: 8316 - DNA, 20 bp, synthetic construct
  misc_feature 1..20: note = Description of Artificial Sequence: Synthetic oligonucleotide
  misc_feature 1..20: note = Target: FXN; (+) strand; PAM type: NNNNGHTT; PAM sequence: AATTGCTT
  source 1..20: mol_type = other DNA
ttgggagactgagacaggag

SEQ ID NO: 8317 - DNA, 20 bp, synthetic construct
  misc_feature 1..20: note = Description of Artificial Sequence: Synthetic oligonucleotide
  misc_feature 1..20: note = Target: FXN; (+) strand; PAM type: NNNNGHTT; PAM sequence: CCCCGCTT
  source 1..20: mol_type = other DNA
gaaaccagacatggtggtct

SEQ ID NO: 8318 - DNA, 20 bp, synthetic construct
  misc_feature 1..20: note = Description of Artificial Sequence: Synthetic oligonucleotide
  misc_feature 1..20: note = Target: FXN; (+) strand; PAM type: NNNNGHTT; PAM sequence: AAGAGCTT
  source 1..20: mol_type = other DNA
tgaagaaatccaaaggagta

SEQ ID NO: 8319 - DNA, 20 bp, synthetic construct
  misc_feature 1..20: note = Description of Artificial Sequence: Synthetic oligonucleotide
  misc_feature 1..20: note = Target: FXN; (+) strand; PAM type: NNNNGHTT; PAM sequence: GATGGCTT
  source 1..20: mol_type = other DNA
ttgggaagctgacgcaggca

SEQ ID NO: 8320 - DNA, 20 bp, synthetic construct
  misc_feature 1..20: note = Description of Artificial Sequence: Synthetic oligonucleotide
  misc_feature 1..20: note = Target: FXN; (+) strand; PAM type: NNNNGHTT; PAM sequence: GAAGGATT
  source 1..20: mol_type = other DNA
ctactcaggaggctgaggtg

SEQ ID NO: 8321 - DNA, 20 bp, synthetic construct
  misc_feature 1..20: note = Description of Artificial Sequence: Synthetic oligonucleotide
  misc_feature 1..20: note = Target: FXN; (+) strand; PAM type: NNNNGHTT; PAM sequence: GAGGGCTT
  source 1..20: mol_type = other DNA
agggaggcaggtaacgatgc

SEQ ID NO: 8322 - DNA, 20 bp, synthetic construct
  misc_feature 1..20: note = Description of Artificial Sequence: Synthetic oligonucleotide
  misc_feature 1..20: note = Target: FXN; (+) strand; PAM type: NNNNGHTT; PAM sequence: GCTGGTTT
  source 1..20: mol_type = other DNA
ggcttggatgcagaacacca

SEQ ID NO: 8323 - DNA, 20 bp, synthetic construct
  misc_feature 1..20: note = Description of Artificial Sequence: Synthetic oligonucleotide
  misc_feature 1..20: note = Target: FXN; (+) strand; PAM type: NNNNGHTT; PAM sequence: GTTTGATT
  source 1..20: mol_type = other DNA
tggatgcagaacaccagctg

SEQ ID NO: 8324 - DNA, 20 bp, synthetic construct
  misc_feature 1..20: note = Description of Artificial Sequence: Synthetic oligonucleotide
  misc_feature 1..20: note = Target: FXN; (+) strand; PAM type: NNNNGHTT; PAM sequence: TTCTGTTT
  source 1..20: mol_type = other DNA
cagaacaccagctggtttga

SEQ ID NO: 8325 - DNA, 20 bp, synthetic construct
  misc_feature 1..20: note = Description of Artificial Sequence: Synthetic oligonucleotide
  misc_feature 1..20: note = Target: FXN; (+) strand; PAM type: NNNNGHTT; PAM sequence: TGAAGTTT
  source 1..20: mol_type = other DNA
gatgctgcagttgctcttat

SEQ ID NO: 8326 - DNA, 20 bp, synthetic construct
  misc_feature 1..20: note = Description of Artificial Sequence: Synthetic oligonucleotide
  misc_feature 1..20: note = Target: FXN; (+) strand; PAM type: NNNNGHTT; PAM sequence: GTTTGATT
  source 1..20: mol_type = other DNA
ctgcagttgctcttattgaa

SEQ ID NO: 8327 - DNA, 20 bp, synthetic construct
  misc_feature 1..20: note = Description of Artificial Sequence: Synthetic oligonucleotide
  misc_feature 1..20: note = Target: FXN; (+) strand; PAM type: NNNNGHTT; PAM sequence: GGTTGTTT
  source 1..20: mol_type = other DNA
ggcactatttttcaaataaa

SEQ ID NO: 8328 - DNA, 20 bp, synthetic construct
  misc_feature 1..20: note = Description of Artificial Sequence: Synthetic oligonucleotide
  misc_feature 1..20: note = Target: FXN; (+) strand; PAM type: NNNNGHTT; PAM sequence: TTTTGTTT
  source 1..20: mol_type = other DNA
gttgtttaatataaaaaaaa

SEQ ID NO: 8329 - DNA, 20 bp, synthetic construct
  misc_feature 1..20: note = Description of Artificial Sequence: Synthetic oligonucleotide
  misc_feature 1..20: note = Target: FXN; (+) strand; PAM type: NNNNGHTT; PAM sequence: TTCTGATT
  source 1..20: mol_type = other DNA
tatctttcatctggctgcat

SEQ ID NO: 8330 - DNA, 20 bp, synthetic construct
  misc_feature 1..20: note = Description of Artificial Sequence: Synthetic oligonucleotide
  misc_feature 1..20: note = Target: FXN; (+) strand; PAM type: NNNNGHTT; PAM sequence: TTTTGTTT
  source 1..20: mol_type = other DNA
catctggctgcatttctgat

SEQ ID NO: 8331 - DNA, 20 bp, synthetic construct
  misc_feature 1..20: note = Description of Artificial Sequence: Synthetic oligonucleotide
  misc_feature 1..20: note = Target: FXN; (+) strand; PAM type: NNNNGHTT; PAM sequence: TTTTGTTT
  source 1..20: mol_type = other DNA
ggctgcatttctgatttttg

SEQ ID NO: 8332 - DNA, 20 bp, synthetic construct
  misc_feature 1..20: note = Description of Artificial Sequence: Synthetic oligonucleotide
  misc_feature 1..20: note = Target: FXN; (+) strand; PAM type: NNNNGHTT; PAM sequence: CGTGGCTT
  source 1..20: mol_type = other DNA
gcctaggttggtctgaaact

SEQ ID NO: 8333 - DNA, 20 bp, synthetic construct
  misc_feature 1..20: note = Description of Artificial Sequence: Synthetic oligonucleotide
  misc_feature 1..20: note = Target: FXN; (+) strand; PAM type: NNNNGHTT; PAM sequence: GCCTGTTT
  source 1..20: mol_type = other DNA
gggtgtgagccactgcagca

SEQ ID NO: 8334 - DNA, 20 bp, synthetic construct
  misc_feature 1..20: note = Description of Artificial Sequence: Synthetic oligonucleotide
  misc_feature 1..20: note = Target: FXN; (+) strand; PAM type: NNNNGHTT; PAM sequence: TTTTGTTT
  source 1..20: mol_type = other DNA
ccactgcagcagcctgtttt

SEQ ID NO: 8335 - DNA, 20 bp, synthetic construct
  misc_feature 1..20: note = Description of Artificial Sequence: Synthetic oligonucleotide
  misc_feature 1..20: note = Target: FXN; (+) strand; PAM type: NNNNGHTT; PAM sequence: GTTTGTTT
  source 1..20: mol_type = other DNA
tgcagcagcctgtttttttt

SEQ ID NO: 8336 - DNA, 20 bp, synthetic construct
  misc_feature 1..20: note = Description of Artificial Sequence: Synthetic oligonucleotide
  misc_feature 1..20: note = Target: FXN; (+) strand; PAM type: NNNNGHTT; PAM sequence: GTTTGTTT
  source 1..20: mol_type = other DNA
gcagcctgttttttttgttt

SEQ ID NO: 8337 - DNA, 20 bp, synthetic construct
  misc_feature 1..20: note = Description of Artificial Sequence: Synthetic oligonucleotide
  misc_feature 1..20: note = Target: FXN; (+) strand; PAM type: NNNNGHTT; PAM sequence: ACAAGTTT
  source 1..20: mol_type = other DNA
tgtttgttttttttaatttg

SEQ ID NO: 8338 - DNA, 20 bp, synthetic construct
  misc_feature 1..20: note = Description of Artificial Sequence: Synthetic oligonucleotide
  misc_feature 1..20: note = Target: FXN; (+) strand; PAM type: NNNNGHTT; PAM sequence: TTGGGCTT
  source 1..20: mol_type = other DNA
tagggccaaggggacggtcc

SEQ ID NO: 8339 - DNA, 20 bp, synthetic construct
  misc_feature 1..20: note = Description of Artificial Sequence: Synthetic oligonucleotide
  misc_feature 1..20: note = Target: FXN; (+) strand; PAM type: NNNNGHTT; PAM sequence: TGTGGTTT
  source 1..20: mol_type = other DNA
gggacggtccttgggcttgg

SEQ ID NO: 8340 - DNA, 20 bp, synthetic construct
  misc_feature 1..20: note = Description of Artificial Sequence: Synthetic oligonucleotide
  misc_feature 1..20: note = Target: FXN; (+) strand; PAM type: NNNNGHTT; PAM sequence: GATGGTTT
  source 1..20: mol_type = other DNA
agtccttttcctgtgaccct

SEQ ID NO: 8341 - DNA, 20 bp, synthetic construct
  misc_feature 1..20: note = Description of Artificial Sequence: Synthetic oligonucleotide
  misc_feature 1..20: note = Target: FXN; (+) strand; PAM type: NNNNGHTT; PAM sequence: CCAAGCTT
  source 1..20: mol_type = other DNA
atccttgatacttttattgc

SEQ ID NO: 8342 - DNA, 20 bp, synthetic construct
  misc_feature 1..20: note = Description of Artificial Sequence: Synthetic oligonucleotide
  misc_feature 1..20: note = Target: FXN; (+) strand; PAM type: NNNNGHTT; PAM sequence: ATGAGCTT
  source 1..20: mol_type = other DNA
catgtgccattattcactgg

SEQ ID NO: 8343 - DNA, 20 bp, synthetic construct
  misc_feature 1..20: note = Description of Artificial Sequence: Synthetic oligonucleotide
  misc_feature 1..20: note = Target: FXN; (+) strand; PAM type: NNNNGHTT; PAM sequence: ATATGTTT
  source 1..20: mol_type = other DNA
ttaacactgaattaagaaaa

SEQ ID NO: 8344 - DNA, 20 bp, synthetic construct
  misc_feature 1..20: note = Description of Artificial Sequence: Synthetic oligonucleotide
  misc_feature 1..20: note = Target: FXN; (+) strand; PAM type: NNNNGHTT; PAM sequence: AATAGTTT
  source 1..20: mol_type = other DNA
gaaaaatatgttttaaaaat

SEQ ID NO: 8345 - DNA, 20 bp, synthetic construct
  misc_feature 1..20: note = Description of Artificial Sequence: Synthetic oligonucleotide
  misc_feature 1..20: note = Target: FXN; (+) strand; PAM type: NNNNGHTT; PAM sequence: AGGTGATT
  source 1..20: mol_type = other DNA
tgttttaaaaataatagttt

SEQ ID NO: 8346 - DNA, 20 bp, synthetic construct
  misc_feature 1..20: note = Description of Artificial Sequence: Synthetic oligonucleotide
  misc_feature 1..20: note = Target: FXN; (+) strand; PAM type: NNNNGHTT; PAM sequence: AACTGTTT
  source 1..20: mol_type = other DNA
gagaggaaggaatggggaat

SEQ ID NO: 8347 - DNA, 20 bp, synthetic construct
  misc_feature 1..20: note = Description of Artificial Sequence: Synthetic oligonucleotide
  misc_feature 1..20: note = Target: FXN; (+) strand; PAM type: NNNNGHTT; PAM sequence: ATCTGATT
  source 1..20: mol_type = other DNA
tgtgtatctgtgggttccac

SEQ ID NO: 8348 - DNA, 20 bp, synthetic construct
  misc_feature 1..20: note = Description of Artificial Sequence: Synthetic oligonucleotide
  misc_feature 1..20: note = Target: FXN; (+) strand; PAM type: NNNNGHTT; PAM sequence: CACGGATT
  source 1..20: mol_type = other DNA
atatcagggacttgagtacc

SEQ ID NO: 8349 - DNA, 20 bp, synthetic construct
  misc_feature 1..20: note = Description of Artificial Sequence: Synthetic oligonucleotide
  misc_feature 1..20: note = Target: FXN; (+) strand; PAM type: NNNNGHTT; PAM sequence: AGATGTTT
  source 1..20: mol_type = other DNA
gtctccttttggggtgatgc

SEQ ID NO: 8350 - DNA, 20 bp, synthetic construct
  misc_feature 1..20: note = Description of Artificial Sequence: Synthetic oligonucleotide
  misc_feature 1..20: note = Target: FXN; (+) strand; PAM type: NNNNGHTT; PAM sequence: AAATGTTT
  source 1..20: mol_type = other DNA
gagacttatcagtaagggtc

SEQ ID NO: 8351 - DNA, 20 bp, synthetic construct
  misc_feature 1..20: note = Description of Artificial Sequence: Synthetic oligonucleotide
  misc_feature 1..20: note = Target: FXN; (+) strand; PAM type: NNNNGHTT; PAM sequence: TCAGGTTT
  source 1..20: mol_type = other DNA
agtaagggtcaaatgttttt

SEQ ID NO: 8352 - DNA, 20 bp, synthetic construct
  misc_feature 1..20: note = Description of Artificial Sequence: Synthetic oligonucleotide
  misc_feature 1..20: note = Target: FXN; (+) strand; PAM type: NNNNGHTT; PAM sequence: TAGAGCTT
  source 1..20: mol_type = other DNA
gctcattttgtgttattttc

SEQ ID NO: 8353 - DNA, 20 bp, synthetic construct
  misc_feature 1..20: note = Description of Artificial Sequence: Synthetic oligonucleotide
  misc_feature 1..20: note = Target: FXN; (+) strand; PAM type: NNNNGHTT; PAM sequence: ATTTGTTT
  source 1..20: mol_type = other DNA
gtgctgtggaattactatgc

SEQ ID NO: 8354 - DNA, 20 bp, synthetic construct
  misc_feature 1..20: note = Description of Artificial Sequence: Synthetic oligonucleotide
  misc_feature 1..20: note = Target: FXN; (+) strand; PAM type: NNNNGHTT; PAM sequence: AGATGCTT
  source 1..20: mol_type = other DNA
tccttggcctattccggaaa

SEQ ID NO: 8355 - DNA, 20 bp, synthetic construct
  misc_feature 1..20: note = Description of Artificial Sequence: Synthetic oligonucleotide
  misc_feature 1..20: note = Target: FXN; (+) strand; PAM type: NNNNGHTT; PAM sequence: CCCCGTTT
  source 1..20: mol_type = other DNA
aaaagatgcttgatgcccag

SEQ ID NO: 8356 - DNA, 20 bp, synthetic construct
  misc_feature 1..20: note = Description of Artificial Sequence: Synthetic oligonucleotide
  misc_feature 1..20: note = Target: FXN; (+) strand; PAM type: NNNNGHTT; PAM sequence: CCCAGCTT
  source 1..20: mol_type = other DNA
aaaagctatcaggccaagac

SEQ ID NO: 8357 - DNA, 20 bp, synthetic construct
  misc_feature 1..20: note = Description of Artificial Sequence: Synthetic oligonucleotide
  misc_feature 1..20: note = Target: FXN; (+) strand; PAM type: NNNNGHTT; PAM sequence: GTCTGTTT
  source 1..20: mol_type = other DNA
agcttcattatgcagctgag

SEQ ID NO: 8358 - DNA, 20 bp, synthetic construct
  misc_feature 1..20: note = Description of Artificial Sequence: Synthetic oligonucleotide
  misc_feature 1..20: note = Target: FXN; (+) strand; PAM type: NNNNGHTT; PAM sequence: TGTTGTTT
  source 1..20: mol_type = other DNA
ggtctgttttttgttgttgt

SEQ ID NO: 8359 - DNA, 20 bp, synthetic construct
  misc_feature 1..20: note = Description of Artificial Sequence: Synthetic oligonucleotide
  misc_feature 1..20: note = Target: FXN; (+) strand; PAM type: NNNNGHTT; PAM sequence: TCCTGCTT
  source 1..20: mol_type = other DNA
ttgttgtttattttttttat

SEQ ID NO: 8360 - DNA, 20 bp, synthetic construct
  misc_feature 1..20: note = Description of Artificial Sequence: Synthetic oligonucleotide
  misc_feature 1..20: note = Target: FXN; (+) strand; PAM type: NNNNGHTT; PAM sequence: TTCTGATT
  source 1..20: mol_type = other DNA
cctcctaccttgcccccaag

SEQ ID NO: 8361 - DNA, 20 bp, synthetic construct
  misc_feature 1..20: note = Description of Artificial Sequence: Synthetic oligonucleotide
  misc_feature 1..20: note = Target: FXN; (+) strand; PAM type: NNNNGHTT; PAM sequence: GGAAGATT
  source 1..20: mol_type = other DNA
ttctgatttttaatttctat

SEQ ID NO: 8362 - DNA, 20 bp, synthetic construct
  misc_feature 1..20: note = Description of Artificial Sequence: Synthetic oligonucleotide
  misc_feature 1..20: note = Target: FXN; (+) strand; PAM type: NNNNGHTT; PAM sequence: TTTGGATT
  source 1..20: mol_type = other DNA
ttaatttctatggaagattt

SEQ ID NO: 8363 - DNA, 20 bp, synthetic construct
  misc_feature 1..20: note = Description of Artificial Sequence: Synthetic oligonucleotide
  misc_feature 1..20: note = Target: FXN; (+) strand; PAM type: NNNNGHTT; PAM sequence: GTCGGATT
  source 1..20: mol_type = other DNA
tatggaagattttttggatt

SEQ ID NO: 8364 - DNA, 20 bp, synthetic construct
  misc_feature 1..20: note = Description of Artificial Sequence: Synthetic oligonucleotide
  misc_feature 1..20: note = Target: FXN; (+) strand; PAM type: NNNNGHTT; PAM sequence: GAAGGATT
  source 1..20: mol_type = other DNA
gtcttcactcttcattcttt

SEQ ID NO: 8365 - DNA, 20 bp, synthetic construct
  misc_feature 1..20: note = Description of Artificial Sequence: Synthetic oligonucleotide
  misc_feature 1..20: note = Target: FXN; (+) strand; PAM type: NNNNGHTT; PAM sequence: AAATGTTT
  source 1..20: mol_type = other DNA
cacattaaagggtagcctac

SEQ ID NO: 8366 - DNA, 20 bp, synthetic construct
  misc_feature 1..20: note = Description of Artificial Sequence: Synthetic oligonucleotide
  misc_feature 1..20: note = Target: FXN; (+) strand; PAM type: NNNNGHTT; PAM sequence: TCAGGCTT
  source 1..20: mol_type = other DNA
agggtagcctacaaatgttt

SEQ ID NO: 8367 - DNA, 20 bp, synthetic construct
  misc_feature 1..20: note = Description of Artificial Sequence: Synthetic oligonucleotide
  misc_feature 1..20: note = Target: FXN; (+) strand; PAM type: NNNNGHTT; PAM sequence: TGCTGTTT
  source 1..20: mol_type = other DNA
ggttgtccagggagacctag

SEQ ID NO: 8368 - DNA, 20 bp, synthetic construct
  misc_feature 1..20: note = Description of Artificial Sequence: Synthetic oligonucleotide
  misc_feature 1..20: note = Target: FXN; (+) strand; PAM type: NNNNGHTT; PAM sequence: AGCCGTTT
  source 1..20: mol_type = other DNA
gacaagaaaagaggaaaaaa

SEQ ID NO: 8369 - DNA, 20 bp, synthetic construct
  misc_feature 1..20: note = Description of Artificial Sequence: Synthetic oligonucleotide
  misc_feature 1..20: note = Target: FXN; (+) strand; PAM type: NNNNGHTT; PAM sequence: ACAAGTTT
  source 1..20: mol_type = other DNA
aagtagttgtccctttgtgg

SEQ ID NO: 8370 - DNA, 20 bp, synthetic construct
  misc_feature 1..20: note = Description of Artificial Sequence: Synthetic oligonucleotide
  misc_feature 1..20: note = Target: FXN; (+) strand; PAM type: NNNNGHTT; PAM sequence: CTCTGCTT
  source 1..20: mol_type = other DNA
gtttcccaaattccctggac

SEQ ID NO: 8371 - DNA, 20 bp, synthetic construct
  misc_feature 1..20: note = Description of Artificial Sequence: Synthetic oligonucleotide
  misc_feature 1..20: note = Target: FXN; (+) strand; PAM type: NNNNGHTT; PAM sequence: GGTTGATT
  source 1..20: mol_type = other DNA
taaatgagagaatagagtat

SEQ ID NO: 8372 - DNA, 20 bp, synthetic construct
  misc_feature 1..20: note = Description of Artificial Sequence: Synthetic oligonucleotide
  misc_feature 1..20: note = Target: FXN; (+) strand; PAM type: NNNNGHTT; PAM sequence: AACAGTTT
  source 1..20: mol_type = other DNA
tagatgaggggatgacaaag

SEQ ID NO: 8373 - DNA, 20 bp, synthetic construct
  misc_feature 1..20: note = Description of Artificial Sequence: Synthetic oligonucleotide
  misc_feature 1..20: note = Target: FXN; (+) strand; PAM type: NNNNGHTT; PAM sequence: TCGTGATT
  source 1..20: mol_type = other DNA
ttgttattggtgttgcccta

SEQ ID NO: 8374 - DNA, 20 bp, synthetic construct
  misc_feature 1..20: note = Description of Artificial Sequence: Synthetic oligonucleotide
  misc_feature 1..20: note = Target: FXN; (+) strand; PAM type: NNNNGHTT; PAM sequence: AATCGCTT
  source 1..20: mol_type = other DNA
ttgggaggctgaagcggaag

SEQ ID NO: 8375 - DNA, 20 bp, synthetic construct
  misc_feature 1..20: note = Description of Artificial Sequence: Synthetic oligonucleotide
  misc_feature 1..20: note = Target: FXN; (+) strand; PAM type: NNNNGHTT; PAM sequence: GAAGGATT
  source 1..20: mol_type = other DNA
atattattttcttacttaaa

SEQ ID NO: 8376 - DNA, 20 bp, synthetic construct
  misc_feature 1..20: note = Description of Artificial Sequence: Synthetic oligonucleotide
  misc_feature 1..20: note = Target: FXN; (+) strand; PAM type: NNNNGHTT; PAM sequence: AATTGCTT
  source 1..20: mol_type = other DNA
tcaggaggctgagacgggag

SEQ ID NO: 8377 - DNA, 20 bp, synthetic construct
  misc_feature 1..20: note = Description of Artificial Sequence: Synthetic oligonucleotide
  misc_feature 1..20: note = Target: FXN; (+) strand; PAM type: NNNNGHTT; PAM sequence: GAGGGTTT
  source 1..20: mol_type = other DNA
gtctcaaaaaaaaaaaaaag

SEQ ID NO: 8378 - DNA, 20 bp, synthetic construct
  misc_feature 1..20: note = Description of Artificial Sequence: Synthetic oligonucleotide
  misc_feature 1..20: note = Target: FXN; (+) strand; PAM type: NNNNGHTT; PAM sequence: AGAAGTTT
  source 1..20: mol_type = other DNA
aaaaggagggtttattaatg

SEQ ID NO: 8379 - DNA, 20 bp, synthetic construct
  misc_feature 1..20: note = Description of Artificial Sequence: Synthetic oligonucleotide
  misc_feature 1..20: note = Target: FXN; (+) strand; PAM type: NNNNGHTT; PAM sequence: AAAGGCTT
  source 1..20: mol_type = other DNA
agtttgtattaatatgtagc

SEQ ID NO: 8380 - DNA, 20 bp, synthetic construct
  misc_feature 1..20: note = Description of Artificial Sequence: Synthetic oligonucleotide
  misc_feature 1..20: note = Target: FXN; (+) strand; PAM type: NNNNGHTT; PAM sequence: GGAGGATT
  source 1..20: mol_type = other DNA
ctgcacaggaggctgagaca

SEQ ID NO: 8381 - DNA, 20 bp, synthetic construct
  misc_feature 1..20: note = Description of Artificial Sequence: Synthetic oligonucleotide
  misc_feature 1..20: note = Target: FXN; (+) strand; PAM type: NNNNGHTT; PAM sequence: GATTGCTT
  source 1..20: mol_type = other DNA
acaggaggctgagacaggag

SEQ ID NO: 8382 - DNA, 20 bp, synthetic construct
  misc_feature 1..20: note = Description of Artificial Sequence: Synthetic oligonucleotide
  misc_feature 1..20: note = Target: FXN; (+) strand; PAM type: NNNNGHTT; PAM sequence: AAATGTTT
  source 1..20: mol_type = other DNA
ttattttttgagtctgatgg

SEQ ID NO: 8383 - DNA, 20 bp, synthetic construct
  misc_feature 1..20: note = Description of Artificial Sequence: Synthetic oligonucleotide
  misc_feature 1..20: note = Target: FXN; (+) strand; PAM type: NNNNGHTT; PAM sequence: ACATGTTT
  source 1..20: mol_type = other DNA
gagaaaataaataacatcat

SEQ ID NO: 8384 - DNA, 20 bp, synthetic construct
  misc_feature 1..20: note = Description of Artificial Sequence: Synthetic oligonucleotide
  misc_feature 1..20: note = Target: FXN; (+) strand; PAM type: NNNNGHTT; PAM sequence: ATGTGTTT
  source 1..20: mol_type = other DNA
ataacatcatacatgtttgt

SEQ ID NO: 8385 - DNA, 20 bp, synthetic construct
  misc_feature 1..20: note = Description of Artificial Sequence: Synthetic oligonucleotide
  misc_feature 1..20: note = Target: FXN; (+) strand; PAM type: NNNNGHTT; PAM sequence: TCTTGCTT
  source 1..20: mol_type = other DNA
catgtttgtatgtgtttgca

SEQ ID NO: 8386 - DNA, 20 bp, synthetic construct
  misc_feature 1..20: note = Description of Artificial Sequence: Synthetic oligonucleotide
  misc_feature 1..20: note = Target: FXN; (+) strand; PAM type: NNNNGHTT; PAM sequence: GAAAGTTT
  source 1..20: mol_type = other DNA
gtttgcatcttgcttctact

SEQ ID NO: 8387 - DNA, 20 bp, synthetic construct
  misc_feature 1..20: note = Description of Artificial Sequence: Synthetic oligonucleotide
  misc_feature 1..20: note = Target: FXN; (+) strand; PAM type: NNNNGHTT; PAM sequence: ATTGGTTT
  source 1..20: mol_type = other DNA
tcattttacatatagctcta

SEQ ID NO: 8388 - DNA, 20 bp, synthetic construct
  misc_feature 1..20: note = Description of Artificial Sequence: Synthetic oligonucleotide
  misc_feature 1..20: note = Target: FXN; (+) strand; PAM type: NNNNGHTT; PAM sequence: GTTTGATT
  source 1..20: mol_type = other DNA
tttacatatagctctaattg

SEQ ID NO: 8389 - DNA, 20 bp, synthetic construct
  misc_feature 1..20: note = Description of Artificial Sequence: Synthetic oligonucleotide
  misc_feature 1..20: note = Target: FXN; (+) strand; PAM type: NNNNGHTT; PAM sequence: ATGAGTTT
  source 1..20: mol_type = other DNA
tccagtcatccatgtgaagg

SEQ ID NO: 8390 - DNA, 20 bp, synthetic construct
  misc_feature 1..20: note = Description of Artificial Sequence: Synthetic oligonucleotide
  misc_feature 1..20: note = Target: FXN; (+) strand; PAM type: NNNNGHTT; PAM sequence: CTGGGCTT
  source 1..20: mol_type = other DNA
tcatggcagcctcgacctcc

SEQ ID NO: 8391 - DNA, 20 bp, synthetic construct
  misc_feature 1..20: note = Description of Artificial Sequence: Synthetic oligonucleotide
  misc_feature 1..20: note = Target: FXN; (+) strand; PAM type: NNNNGHTT; PAM sequence: TGGGGTTT
  source 1..20: mol_type = other DNA
ttgtgtattttttgtagaga

SEQ ID NO: 8392 - DNA, 20 bp, synthetic construct
  misc_feature 1..20: note = Description of Artificial Sequence: Synthetic oligonucleotide
  misc_feature 1..20: note = Target: FXN; (+) strand; PAM type: NNNNGHTT; PAM sequence: CTGGGATT
  source 1..20: mol_type = other DNA
tgcctcgtcctcccaagatg

SEQ ID NO: 8393 - DNA, 20 bp, synthetic construct
  misc_feature 1..20: note = Description of Artificial Sequence: Synthetic oligonucleotide
  misc_feature 1..20: note = Target: FXN; (+) strand; PAM type: NNNNGHTT; PAM sequence: GAAAGCTT
  source 1..20: mol_type = other DNA
tgtgccacaggtgttcatca

SEQ ID NO: 8394 - DNA, 20 bp, synthetic construct
  misc_feature 1..20: note = Description of Artificial Sequence: Synthetic oligonucleotide
  misc_feature 1..20: note = Target: FXN; (+) strand; PAM type: NNNNGHTT; PAM sequence: CTGGGTTT
  source 1..20: mol_type = other DNA
tgaggtgtgtaaaagagaac

SEQ ID NO: 8395 - DNA, 20 bp, synthetic construct
  misc_feature 1..20: note = Description of Artificial Sequence: Synthetic oligonucleotide
  misc_feature 1..20: note = Target: FXN; (+) strand; PAM type: NNNNGHTT; PAM sequence: ACTTGTTT
  source 1..20: mol_type = other DNA
taatcgaaactctgcctctt

SEQ ID NO: 8396 - DNA, 20 bp, synthetic construct
  misc_feature 1..20: note = Description of Artificial Sequence: Synthetic oligonucleotide
  misc_feature 1..20: note = Target: FXN; (+) strand; PAM type: NNNNGHTT; PAM sequence: TCATGTTT
  source 1..20: mol_type = other DNA
tgtagacactgacagtggcc

SEQ ID NO: 8397 - DNA, 20 bp, synthetic construct
  misc_feature 1..20: note = Description of Artificial Sequence: Synthetic oligonucleotide
  misc_feature 1..20: note = Target: FXN; (+) strand; PAM type: NNNNGHTT; PAM sequence: CTCAGTTT
  source 1..20: mol_type = other DNA
ccttgaacttaatcaaaata

SEQ ID NO: 8398 - DNA, 20 bp, synthetic construct
  misc_feature 1..20: note = Description of Artificial Sequence: Synthetic oligonucleotide
  misc_feature 1..20: note = Target: FXN; (+) strand; PAM type: NNNNGHTT; PAM sequence: ATTAGATT
  source 1..20: mol_type = other DNA
ctcagtttacttaacttcgt

SEQ ID NO: 8399 - DNA, 20 bp, synthetic construct
  misc_feature 1..20: note = Description of Artificial Sequence: Synthetic oligonucleotide
  misc_feature 1..20: note = Target: FXN; (+) strand; PAM type: NNNNGHTT; PAM sequence: TTCTGATT
  source 1..20: mol_type = other DNA
ttacttaacttcgtattaga

SEQ ID NO: 8400 - DNA, 20 bp, synthetic construct
  misc_feature 1..20: note = Description of Artificial Sequence: Synthetic oligonucleotide
  misc_feature 1..20: note = Target: FXN; (+) strand; PAM type: NNNNGHTT; PAM sequence: CCATGCTT
  source 1..20: mol_type = other DNA
accatttatcgtgtgcctta

SEQ ID NO: 8401 - DNA, 20 bp, synthetic construct
  misc_feature 1..20: note = Description of Artificial Sequence: Synthetic oligonucleotide
  misc_feature 1..20: note = Target: FXN; (+) strand; PAM type: NNNNGHTT; PAM sequence: GACAGTTT
  source 1..20: mol_type = other DNA
ttttagccaatttaaaattt

SEQ ID NO: 8402 - DNA, 20 bp, synthetic construct
  misc_feature 1..20: note = Description of Artificial Sequence: Synthetic oligonucleotide
  misc_feature 1..20: note = Target: FXN; (+) strand; PAM type: NNNNGHTT; PAM sequence: ATAGGTTT
  source 1..20: mol_type = other DNA
ttgacagtttgcattaaatt

SEQ ID NO: 8403 - DNA, 20 bp, synthetic construct
  misc_feature 1..20: note = Description of Artificial Sequence: Synthetic oligonucleotide
  misc_feature 1..20: note = Target: FXN; (+) strand; PAM type: NNNNGHTT; PAM sequence: ATATGCTT
  source 1..20: mol_type = other DNA
cattaaattataggtttaca

SEQ ID NO: 8404 - DNA, 20 bp, synthetic construct
  misc_feature 1..20: note = Description of Artificial Sequence: Synthetic oligonucleotide
  misc_feature 1..20: note = Target: FXN; (+) strand; PAM type: NNNNGHTT; PAM sequence: AGATGCTT
  source 1..20: mol_type = other DNA
tacctgccccaaattctgac

SEQ ID NO: 8405 - DNA, 20 bp, synthetic construct
  misc_feature 1..20: note = Description of Artificial Sequence: Synthetic oligonucleotide
  misc_feature 1..20: note = Target: FXN; (+) strand; PAM type: NNNNGHTT; PAM sequence: TGGAGTTT
  source 1..20: mol_type = other DNA
aagacccatgttcatagtga

SEQ ID NO: 8406 - DNA, 20 bp, synthetic construct
  misc_feature 1..20: note = Description of Artificial Sequence: Synthetic oligonucleotide
  misc_feature 1..20: note = Target: FXN; (+) strand; PAM type: NNNNGHTT; PAM sequence: AATCGCTT
  source 1..20: mol_type = other DNA
atgcaaggttgccaaggaaa

SEQ ID NO: 8407 - DNA, 20 bp, synthetic construct
  misc_feature 1..20: note = Description of Artificial Sequence: Synthetic oligonucleotide
  misc_feature 1..20: note = Target: FXN; (+) strand; PAM type: NNNNGHTT; PAM sequence: TTACGCTT
  source 1..20: mol_type = other DNA
gttgccaaggaaaaatcgct

SEQ ID NO: 8408 - DNA, 20 bp, synthetic construct
  misc_feature 1..20: note = Description of Artificial Sequence: Synthetic oligonucleotide
  misc_feature 1..20: note = Target: FXN; (+) strand; PAM type: NNNNGHTT; PAM sequence: GTTGGATT
  source 1..20: mol_type = other DNA
gtaattttagtccgtgtcca

SEQ ID NO: 8409 - DNA, 20 bp, synthetic construct
  misc_feature 1..20: note = Description of Artificial Sequence: Synthetic oligonucleotide
  misc_feature 1..20: note = Target: FXN; (+) strand; PAM type: NNNNGHTT; PAM sequence: CAAAGTTT
  source 1..20: mol_type = other DNA
ggagaaaggggaaggagggg

SEQ ID NO: 8410 - DNA, 20 bp, synthetic construct
  misc_feature 1..20: note = Description of Artificial Sequence: Synthetic oligonucleotide
  misc_feature 1..20: note = Target: FXN; (+) strand; PAM type: NNNNGHTT; PAM sequence: CTGGGATT
  source 1..20: mol_type = other DNA
tgcctcagcctcccgagtag

SEQ ID NO: 8411 - DNA, 20 bp, synthetic construct
  misc_feature 1..20: note = Description of Artificial Sequence: Synthetic oligonucleotide
  misc_feature 1..20: note = Target: FXN; (+) strand; PAM type: NNNNGHTT; PAM sequence: CGGGGTTT
  source 1..20: mol_type = other DNA
ttttgtatttttagtagaga

SEQ ID NO: 8412 - DNA, 20 bp, synthetic construct
  misc_feature 1..20: note = Description of Artificial Sequence: Synthetic oligonucleotide
  misc_feature 1..20: note = Target: FXN; (+) strand; PAM type: NNNNGHTT; PAM sequence: CTGGGATT
  source 1..20: mol_type = other DNA
tgcctccgcctcccaaagtg

SEQ ID NO: 8413 - DNA, 20 bp, synthetic construct
  misc_feature 1..20: note = Description of Artificial Sequence: Synthetic oligonucleotide
  misc_feature 1..20: note = Target: FXN; (+) strand; PAM type: NNNNGHTT; PAM sequence: TTTGGTTT
  source 1..20: mol_type = other DNA
gccagaaatgccttctaatc

SEQ ID NO: 8414 - DNA, 20 bp, synthetic construct
  misc_feature 1..20: note = Description of Artificial Sequence: Synthetic oligonucleotide
  misc_feature 1..20: note = Target: FXN; (+) strand; PAM type: NNNNGHTT; PAM sequence: TATAGTTT
  source 1..20: mol_type = other DNA
tgttccatcttctctggctg

SEQ ID NO: 8415 - DNA, 20 bp, synthetic construct
  misc_feature 1..20: note = Description of Artificial Sequence: Synthetic oligonucleotide
  misc_feature 1..20: note = Target: FXN; (+) strand; PAM type: NNNNGHTT; PAM sequence: AACAGATT
  source 1..20: mol_type = other DNA
taaggaatggaaggcaccag

SEQ ID NO: 8416 - DNA, 20 bp, synthetic construct
  misc_feature 1..20: note = Description of Artificial Sequence: Synthetic oligonucleotide
  misc_feature 1..20: note = Target: FXN; (+) strand; PAM type: NNNNGHTT; PAM sequence: AAATGTTT
  source 1..20: mol_type = other DNA
gcaccagaacagatttattg

SEQ ID NO: 8417 - DNA, 20 bp, synthetic construct
  misc_feature 1..20: note = Description of Artificial Sequence: Synthetic oligonucleotide
  misc_feature 1..20: note = Target: FXN; (+) strand; PAM type: NNNNGHTT; PAM sequence: TGAAGATT
  source 1..20: mol_type = other DNA
ttattgaaatgtttattagc

SEQ ID NO: 8418 - DNA, 20 bp, synthetic construct
  misc_feature 1..20: note = Description of Artificial Sequence: Synthetic oligonucleotide
  misc_feature 1..20: note = Target: FXN; (+) strand; PAM type: NNNNGHTT; PAM sequence: CAAAGATT
  source 1..20: mol_type = other DNA
ccagcagtaaaattggctct

SEQ ID NO: 8419 - DNA, 20 bp, synthetic construct
  misc_feature 1..20: note = Description of Artificial Sequence: Synthetic oligonucleotide
  misc_feature 1..20: note = Target: FXN; (+) strand; PAM type: NNNNGHTT; PAM sequence: TTGTGTTT
  source 1..20: mol_type = other DNA
gaagggcctctgctgtccac

SEQ ID NO: 8420 - DNA, 20 bp, synthetic construct
  misc_feature 1..20: note = Description of Artificial Sequence: Synthetic oligonucleotide
  misc_feature 1..20: note = Target: FXN; (+) strand; PAM type: NNNNGHTT; PAM sequence: AATTGTTT
  source 1..20: mol_type = other DNA
aacgccacatcttgacctca

SEQ ID NO: 8421 - DNA, 20 bp, synthetic construct
  misc_feature 1..20: note = Description of Artificial Sequence: Synthetic oligonucleotide
  misc_feature 1..20: note = Target: FXN; (+) strand; PAM type: NNNNGHTT; PAM sequence: AATTGCTT
  source 1..20: mol_type = other DNA
tcgggaggctgaggcaggag

SEQ ID NO: 8422 - DNA, 20 bp, synthetic construct
  misc_feature 1..20: note = Description of Artificial Sequence: Synthetic oligonucleotide
  misc_feature 1..20: note = Target: FXN; (+) strand; PAM type: NNNNGHTT; PAM sequence: CCGAGATT
  source 1..20: mol_type = other DNA
gtggtggaggttgcagtgag

SEQ ID NO: 8423 - DNA, 20 bp, synthetic construct
  misc_feature 1..20: note = Description of Artificial Sequence: Synthetic oligonucleotide
  misc_feature 1..20: note = Target: FXN; (+) strand; PAM type: NNNNGHTT; PAM sequence: CTGAGATT
  source 1..20: mol_type = other DNA
accgcactctatgatgctag

SEQ ID NO: 8424 - DNA, 20 bp, synthetic construct
  misc_feature 1..20: note = Description of Artificial Sequence: Synthetic oligonucleotide
  misc_feature 1..20: note = Target: FXN; (+) strand; PAM type: NNNNGHTT; PAM sequence: AATGGCTT
  source 1..20: mol_type = other DNA
ctgagatttttccaaaagaa

SEQ ID NO: 8425 - DNA, 20 bp, synthetic construct
  misc_feature 1..20: note = Description of Artificial Sequence: Synthetic oligonucleotide
  misc_feature 1..20: note = Target: FXN; (+) strand; PAM type: NNNNGHTT; PAM sequence: ATGAGTTT
  source 1..20: mol_type = other DNA
ctcaaaagtaatagaaacag

SEQ ID NO: 8426 - DNA, 20 bp, synthetic construct
  misc_feature 1..20: note = Description of Artificial Sequence: Synthetic oligonucleotide
  misc_feature 1..20: note = Target: FXN; (+) strand; PAM type: NNNNGHTT; PAM sequence: TCAGGATT
  source 1..20: mol_type = other DNA
agaaacagatgagtttggag

SEQ ID NO: 8427 - DNA, 20 bp, synthetic construct
  misc_feature 1..20: note = Description of Artificial Sequence: Synthetic oligonucleotide
  misc_feature 1..20: note = Target: FXN; (+) strand; PAM type: NNNNGHTT; PAM sequence: GTAAGATT
  source 1..20: mol_type = other DNA
tttggagtcaggatttctct

SEQ ID NO: 8428 - DNA, 20 bp, synthetic construct
  misc_feature 1..20: note = Description of Artificial Sequence: Synthetic oligonucleotide
  misc_feature 1..20: note = Target: FXN; (+) strand; PAM type: NNNNGHTT; PAM sequence: CAGAGATT
  source 1..20: mol_type = other DNA
tctccaggtgccactgttga

SEQ ID NO: 8429 - DNA, 20 bp, synthetic construct
  misc_feature 1..20: note = Description of Artificial Sequence: Synthetic oligonucleotide
  misc_feature 1..20: note = Target: FXN; (+) strand; PAM type: NNNNGHTT; PAM sequence: CTGGGATT
  source 1..20: mol_type = other DNA
agcatagccacctgatcctg

SEQ ID NO: 8430 - DNA, 20 bp, synthetic construct
  misc_feature 1..20: note = Description of Artificial Sequence: Synthetic oligonucleotide
  misc_feature 1..20: note = Target: FXN; (+) strand; PAM type: NNNNGHTT; PAM sequence: GAAAGTTT
  source 1..20: mol_type = other DNA
gtccatcagcagttcccctt

SEQ ID NO: 8431 - DNA, 20 bp, synthetic construct
  misc_feature 1..20: note = Description of Artificial Sequence: Synthetic oligonucleotide
  misc_feature 1..20: note = Target: FXN; (+) strand; PAM type: NNNNGHTT; PAM sequence: AGGAGCTT
  source 1..20: mol_type = other DNA
tttttcacctgcatttttgc

SEQ ID NO: 8432 - DNA, 20 bp, synthetic construct
  misc_feature 1..20: note = Description of Artificial Sequence: Synthetic oligonucleotide
  misc_feature 1..20: note = Target: FXN; (+) strand; PAM type: NNNNGHTT; PAM sequence: GTAAGCTT
  source 1..20: mol_type = other DNA
ctagctacacagtctccagg

SEQ ID NO: 8433 - DNA, 20 bp, synthetic construct
  misc_feature 1..20: note = Description of Artificial Sequence: Synthetic oligonucleotide
  misc_feature 1..20: note = Target: FXN; (+) strand; PAM type: NNNNGHTT; PAM sequence: CCAAGTTT
  source 1..20: mol_type = other DNA
aaacctaagcaggaccaagg

SEQ ID NO: 8434 - DNA, 20 bp, synthetic construct
  misc_feature 1..20: note = Description of Artificial Sequence: Synthetic oligonucleotide
  misc_feature 1..20: note = Target: FXN; (+) strand; PAM type: NNNNGHTT; PAM sequence: ATGTGCTT
  source 1..20: mol_type = other DNA
caagtttcttagcctgaaaa

SEQ ID NO: 8435 - DNA, 20 bp, synthetic construct
  misc_feature 1..20: note = Description of Artificial Sequence: Synthetic oligonucleotide
  misc_feature 1..20: note = Target: FXN; (+) strand; PAM type: NNNNGHTT; PAM sequence: TTATGCTT
  source 1..20: mol_type = other DNA
ggcactgactctacatataa

SEQ ID NO: 8436 - DNA, 20 bp, synthetic construct
  misc_feature 1..20: note = Description of Artificial Sequence: Synthetic oligonucleotide
  misc_feature 1..20: note = Target: FXN; (+) strand; PAM type: NNNNGHTT; PAM sequence: TGCTGTTT
  source 1..20: mol_type = other DNA
tggctctcagacttggccag

SEQ ID NO: 8437 - DNA, 20 bp, synthetic construct
  misc_feature 1..20: note = Description of Artificial Sequence: Synthetic oligonucleotide
  misc_feature 1..20: note = Target: FXN; (+) strand; PAM type: NNNNGHTT; PAM sequence: GGTAGATT
  source 1..20: mol_type = other DNA
ccccacatctctgcctgggg

SEQ ID NO: 8438 - DNA, 20 bp, synthetic construct
  misc_feature 1..20: note = Description of Artificial Sequence: Synthetic oligonucleotide
  misc_feature 1..20: note = Target: FXN; (+) strand; PAM type: NNNNGHTT; PAM sequence: CCTTGATT
  source 1..20: mol_type = other DNA
ctcagcctctgcctggatgc

SEQ ID NO: 8439 - DNA, 20 bp, synthetic construct
  misc_feature 1..20: note = Description of Artificial Sequence: Synthetic oligonucleotide
  misc_feature 1..20: note = Target: FXN; (+) strand; PAM type: NNNNGHTT; PAM sequence: CCATGTTT
  source 1..20: mol_type = other DNA
tgttccatgtcctcagcata

SEQ ID NO: 8440 - DNA, 20 bp, synthetic construct
  misc_feature 1..20: note = Description of Artificial Sequence: Synthetic oligonucleotide
  misc_feature 1..20: note = Target: FXN; (+) strand; PAM type: NNNNGHTT; PAM sequence: CCCTGCTT
  source 1..20: mol_type = other DNA
actgacctaccatgtgtcac

SEQ ID NO: 8441 - DNA, 20 bp, synthetic construct
  misc_feature 1..20: note = Description of Artificial Sequence: Synthetic oligonucleotide
  misc_feature 1..20: note = Target: FXN; (+) strand; PAM type: NNNNGHTT; PAM sequence: ATATGTTT
  source 1..20: mol_type = other DNA
caaataaatgtgttataatt

SEQ ID NO: 8442 - DNA, 20 bp, synthetic construct
  misc_feature 1..20: note = Description of Artificial Sequence: Synthetic oligonucleotide
  misc_feature 1..20: note = Target: FXN; (-) strand; PAM type: NRG; PAM sequence: AAG
  source 1..20: mol_type = other DNA
gtatagtttcactttgaagc

SEQ ID NO: 8443 - DNA, 20 bp, synthetic construct
  misc_feature 1..20: note = Description of Artificial Sequence: Synthetic oligonucleotide
  misc_feature 1..20: note = Target: FXN; (-) strand; PAM type: NRG; PAM sequence: AAG
  source 1..20: mol_type = other DNA
tagtgtatagtttcactttg

SEQ ID NO: 8444 - DNA, 20 bp, synthetic construct
  misc_feature 1..20: note = Description of Artificial Sequence: Synthetic oligonucleotide
  misc_feature 1..20: note = Target: FXN; (-) strand; PAM type: NRG; PAM sequence: TAG
  source 1..20: mol_type = other DNA
tgtgggaggaatttagtgta

SEQ ID NO: 8445 - DNA, 20 bp, synthetic construct
  misc_feature 1..20: note = Description of Artificial Sequence: Synthetic oligonucleotide
  misc_feature 1..20: note = Target: FXN; (-) strand; PAM type: NRG; PAM sequence: TAG
  source 1..20: mol_type = other DNA
agctaactgtgggaggaatt

SEQ ID NO: 8446 - DNA, 20 bp, synthetic construct
  misc_feature 1..20: note = Description of Artificial Sequence: Synthetic oligonucleotide
  misc_feature 1..20: note = Target: FXN; (-) strand; PAM type: NRG; PAM sequence: AGG
  source 1..20: mol_type = other DNA
cacgccaagctaactgtggg

SEQ ID NO: 8447 - DNA, 20 bp, synthetic construct
  misc_feature 1..20: note = Description of Artificial Sequence: Synthetic oligonucleotide
  misc_feature 1..20: note = Target: FXN; (-) strand; PAM type: NRG; PAM sequence: GAG
  source 1..20: mol_type = other DNA
ccacgccaagctaactgtgg

SEQ ID NO: 8448 - DNA, 20 bp, synthetic construct
  misc_feature 1..20: note = Description of Artificial Sequence: Synthetic oligonucleotide
  misc_feature 1..20: note = Target: FXN; (-) strand; PAM type: NRG; PAM sequence: GGG
  source 1..20: mol_type = other DNA
ggccacgccaagctaactgt

SEQ ID NO: 8449 - DNA, 20 bp, synthetic construct
  misc_feature 1..20: note = Description of Artificial Sequence: Synthetic oligonucleotide
  misc_feature 1..20: note = Target: FXN; (-) strand; PAM type: NRG; PAM sequence: TGG
  source 1..20: mol_type = other DNA
aggccacgccaagctaactg

SEQ ID NO: 8450 - DNA, 20 bp, synthetic construct
  misc_feature 1..20: note = Description of Artificial Sequence: Synthetic oligonucleotide
  misc_feature 1..20: note = Target: FXN; (-) strand; PAM type: NRG; PAM sequence: AAG
  source 1..20: mol_type = other DNA
catataacaaaggccacgcc

SEQ ID NO: 8451 - DNA, 20 bp, synthetic construct
  misc_feature 1..20: note = Description of Artificial Sequence: Synthetic oligonucleotide
  misc_feature 1..20: note = Target: FXN; (-) strand; PAM type: NRG; PAM sequence: AGG
  source 1..20: mol_type = other DNA
tattcctgggcatataacaa

SEQ ID NO: 8452 - DNA, 20 bp, synthetic construct
  misc_feature 1..20: note = Description of Artificial Sequence: Synthetic oligonucleotide
  misc_feature 1..20: note = Target: FXN; (-) strand; PAM type: NRG; PAM sequence: AAG
  source 1..20: mol_type = other DNA
ttattcctgggcatataaca

SEQ ID NO: 8453 - DNA, 20 bp, synthetic construct
  misc_feature 1..20: note = Description of Artificial Sequence: Synthetic oligonucleotide
  misc_feature 1..20: note = Target: FXN; (-) strand; PAM type: NRG; PAM sequence: GGG
  source 1..20: mol_type = other DNA
ggctgtcctcacttattcct

SEQ ID NO: 8454 - DNA, 20 bp, synthetic construct
  misc_feature 1..20: note = Description of Artificial Sequence: Synthetic oligonucleotide
  misc_feature 1..20: note = Target: FXN; (-) strand; PAM type: NRG; PAM sequence: TGG
  source 1..20: mol_type = other DNA
tggctgtcctcacttattcc

SEQ ID NO: 8455 - DNA, 20 bp, synthetic construct
  misc_feature 1..20: note = Description of Artificial Sequence: Synthetic oligonucleotide
  misc_feature 1..20: note = Target: FXN; (-) strand; PAM type: NRG; PAM sequence: TGG
  source 1..20: mol_type = other DNA
ttgcttctagtctcataggc

SEQ ID NO: 8456 - DNA, 20 bp, synthetic construct
  misc_feature 1..20: note = Description of Artificial Sequence: Synthetic oligonucleotide
  misc_feature 1..20: note = Target: FXN; (-) strand; PAM type: NRG; PAM sequence: AGG
  source 1..20: mol_type = other DNA
catcttgcttctagtctcat

SEQ ID NO: 8457 - DNA, 20 bp, synthetic construct
  misc_feature 1..20: note = Description of Artificial Sequence: Synthetic oligonucleotide
  misc_feature 1..20: note = Target: FXN; (-) strand; PAM type: NRG; PAM sequence: TAG
  source 1..20: mol_type = other DNA
ccatcttgcttctagtctca

SEQ ID NO: 8458 - DNA, 20 bp, synthetic construct
  misc_feature 1..20: note = Description of Artificial Sequence: Synthetic oligonucleotide
  misc_feature 1..20: note = Target: FXN; (-) strand; PAM type: NRG; PAM sequence: TAG
  source 1..20: mol_type = other DNA
ggctgactccatcttgcttc

SEQ ID NO: 8459 - DNA, 20 bp, synthetic construct
  misc_feature 1..20: note = Description of Artificial Sequence: Synthetic oligonucleotide
  misc_feature 1..20: note = Target: FXN; (-) strand; PAM type: NRG; PAM sequence: TGG
  source 1..20: mol_type = other DNA
acagtgagagaaatttagct

SEQ ID NO: 8460 - DNA, 20 bp, synthetic construct
  misc_feature 1..20: note = Description of Artificial Sequence: Synthetic oligonucleotide
  misc_feature 1..20: note = Target: FXN; (-) strand; PAM type: NRG; PAM sequence: TAG
  source 1..20: mol_type = other DNA
ttatgacagtgagagaaatt

SEQ ID NO: 8461 - DNA, 20 bp, synthetic construct
  misc_feature 1..20: note = Description of Artificial Sequence: Synthetic oligonucleotide
  misc_feature 1..20: note = Target: FXN; (-) strand; PAM type: NRG; PAM sequence: GAG
  source 1..20: mol_type = other DNA
tgtaaaggttatgacagtga

SEQ ID NO: 8462 - DNA, 20 bp, synthetic construct
  misc_feature 1..20: note = Description of Artificial Sequence: Synthetic oligonucleotide
  misc_feature 1..20: note = Target: FXN; (-) strand; PAM type: NRG; PAM sequence: GAG
  source 1..20: mol_type = other DNA
tttgtaaaggttatgacagt

SEQ ID NO: 8463 - DNA, 20 bp, synthetic construct
  misc_feature 1..20: note = Description of Artificial Sequence: Synthetic oligonucleotide
  misc_feature 1..20: note = Target: FXN; (-) strand; PAM type: NRG; PAM sequence: CAG
  source 1..20: mol_type = other DNA
cacctttgtaaaggttatga

SEQ ID NO: 8464 - DNA, 20 bp, synthetic construct
  misc_feature 1..20: note = Description of Artificial Sequence: Synthetic oligonucleotide
  misc_feature 1..20: note = Target: FXN; (-) strand; PAM type: NRG; PAM sequence: AGG
  source 1..20: mol_type = other DNA
taatgaaaccacctttgtaa

SEQ ID NO: 8465 - DNA, 20 bp, synthetic construct
  misc_feature 1..20: note = Description of Artificial Sequence: Synthetic oligonucleotide
  misc_feature 1..20: note = Target: FXN; (-) strand; PAM type: NRG; PAM sequence: AAG
  source 1..20: mol_type = other DNA
ctaatgaaaccacctttgta

SEQ ID NO: 8466 - DNA, 20 bp, synthetic construct
  misc_feature 1..20: note = Description of Artificial Sequence: Synthetic oligonucleotide
  misc_feature 1..20: note = Target: FXN; (-) strand; PAM type: NRG; PAM sequence: AGG
  source 1..20: mol_type = other DNA
agtcattcttgttttaacta

SEQ ID NO: 8467 - DNA, 20 bp, synthetic construct
  misc_feature 1..20: note = Description of Artificial Sequence: Synthetic oligonucleotide
  misc_feature 1..20: note = Target: FXN; (-) strand; PAM type: NRG; PAM sequence: AAG
  source 1..20: mol_type = other DNA
gagtcattcttgttttaact

SEQ ID NO: 8468 - DNA, 20 bp, synthetic construct
  misc_feature 1..20: note = Description of Artificial Sequence: Synthetic oligonucleotide
  misc_feature 1..20: note = Target: FXN; (-) strand; PAM type: NRG; PAM sequence: GAG
  source 1..20: mol_type = other DNA
tctgaaatatagcctttaga

SEQ ID NO: 8469 - DNA, 20 bp, synthetic construct
  misc_feature 1..20: note = Description of Artificial Sequence: Synthetic oligonucleotide
  misc_feature 1..20: note = Target: FXN; (-) strand; PAM type: NRG; PAM sequence: GAG
  source 1..20: mol_type = other DNA
tatctgaaatatagccttta

SEQ ID NO: 8470 - DNA, 20 bp, synthetic construct
  misc_feature 1..20: note = Description of Artificial Sequence: Synthetic oligonucleotide
  misc_feature 1..20: note = Target: FXN; (-) strand; PAM type: NRG; PAM sequence: TAG
  source 1..20: mol_type = other DNA
tgtatctgaaatatagcctt

SEQ ID NO: 8471 - DNA, 20 bp, synthetic construct
  misc_feature 1..20: note = Description of Artificial Sequence: Synthetic oligonucleotide
  misc_feature 1..20: note = Target: FXN; (-) strand; PAM type: NRG; PAM sequence: TAG
  source 1..20: mol_type = other DNA
catgtgatgtatctgaaata

SEQ ID NO: 8472 - DNA, 20 bp, synthetic construct
  misc_feature 1..20: note = Description of Artificial Sequence: Synthetic oligonucleotide
  misc_feature 1..20: note = Target: FXN; (-) strand; PAM type: NRG; PAM sequence: AAG
  source 1..20: mol_type = other DNA
ttgaggggacaagaggaaag

SEQ ID NO: 8473 - DNA, 20 bp, synthetic construct
  misc_feature 1..20: note = Description of Artificial Sequence: Synthetic oligonucleotide
  misc_feature 1..20: note = Target: FXN; (-) strand; PAM type: NRG; PAM sequence: AAG
  source 1..20: mol_type = other DNA
ctgttgaggggacaagagga

SEQ ID NO: 8474 - DNA, 20 bp, synthetic construct
  misc_feature 1..20: note = Description of Artificial Sequence: Synthetic oligonucleotide
  misc_feature 1..20: note = Target: FXN; (-) strand; PAM type: NRG; PAM sequence: AGG
  source 1..20: mol_type = other DNA
cttactgttgaggggacaag

SEQ ID NO: 8475 - DNA, 20 bp, synthetic construct
  misc_feature 1..20: note = Description of Artificial Sequence: Synthetic oligonucleotide
  misc_feature 1..20: note = Target: FXN; (-) strand; PAM type: NRG; PAM sequence: GAG
  source 1..20: mol_type = other DNA
gcttactgttgaggggacaa

SEQ ID NO: 8476 - DNA, 20 bp, synthetic construct
  misc_feature 1..20: note = Description of Artificial Sequence: Synthetic oligonucleotide
  misc_feature 1..20: note = Target: FXN; (-) strand; PAM type: NRG; PAM sequence: AAG
  source 1..20: mol_type = other DNA
ttgcttactgttgaggggac

SEQ ID NO: 8477 - DNA, 20 bp, synthetic construct
  misc_feature 1..20: note = Description of Artificial Sequence: Synthetic oligonucleotide
  misc_feature 1..20: note = Target: FXN; (-) strand; PAM type: NRG; PAM sequence: GGG
  source 1..20: mol_type = other DNA
tcttcttgcttactgttgag

SEQ ID NO: 8478 - DNA, 20 bp, synthetic construct
  misc_feature 1..20: note = Description of Artificial Sequence: Synthetic oligonucleotide
  misc_feature 1..20: note = Target: FXN; (-) strand; PAM type: NRG; PAM sequence: GGG
  source 1..20: mol_type = other DNA
ctcttcttgcttactgttga

SEQ ID NO: 8479 - DNA, 20 bp, synthetic construct
  misc_feature 1..20: note = Description of Artificial Sequence: Synthetic oligonucleotide
  misc_feature 1..20: note = Target: FXN; (-) strand; PAM type: NRG; PAM sequence: AGG
  source 1..20: mol_type = other DNA
actcttcttgcttactgttg

SEQ ID NO: 8480 - DNA, 20 bp, synthetic construct
  misc_feature 1..20: note = Description of Artificial Sequence: Synthetic oligonucleotide
  misc_feature 1..20: note = Target: FXN; (-) strand; PAM type: NRG; PAM sequence: GAG
  source 1..20: mol_type = other DNA
tactcttcttgcttactgtt

SEQ ID NO: 8481 - DNA, 20 bp, synthetic construct
  misc_feature 1..20: note = Description of Artificial Sequence: Synthetic oligonucleotide
  misc_feature 1..20: note = Target: FXN; (-) strand; PAM type: NRG; PAM sequence: AGG
  source 1..20: mol_type = other DNA
attaagggagcttcaggcag

SEQ ID NO: 8482 - DNA, 20 bp, synthetic construct
  misc_feature 1..20: note = Description of Artificial Sequence: Synthetic oligonucleotide
  misc_feature 1..20: note = Target: FXN; (-) strand; PAM type: NRG; PAM sequence: GAG
  source 1..20: mol_type = other DNA
gattaagggagcttcaggca

SEQ ID NO: 8483 - DNA, 20 bp, synthetic construct
  misc_feature 1..20: note = Description of Artificial Sequence: Synthetic oligonucleotide
  misc_feature 1..20: note = Target: FXN; (-) strand; PAM type: NRG; PAM sequence: CAG
  source 1..20: mol_type = other DNA
cagattaagggagcttcagg

SEQ ID NO: 8484 - DNA, 20 bp, synthetic construct
  misc_feature 1..20: note = Description of Artificial Sequence: Synthetic oligonucleotide
  misc_feature 1..20: note = Target: FXN; (-) strand; PAM type: NRG; PAM sequence: AGG
  source 1..20: mol_type = other DNA
tgacagattaagggagcttc

SEQ ID NO: 8485 - DNA, 20 bp, synthetic construct
  misc_feature 1..20: note = Description of Artificial Sequence: Synthetic oligonucleotide
  misc_feature 1..20: note = Target: FXN; (-) strand; PAM type: NRG; PAM sequence: CAG
  source 1..20: mol_type = other DNA
ctgacagattaagggagctt

SEQ ID NO: 8486 - DNA, 20 bp, synthetic construct
  misc_feature 1..20: note = Description of Artificial Sequence: Synthetic oligonucleotide
  misc_feature 1..20: note = Target: FXN; (-) strand; PAM type: NRG; PAM sequence: GAG
  source 1..20: mol_type = other DNA
tgtgatctgacagattaagg

SEQ ID NO: 8487 - DNA, 20 bp, synthetic construct
  misc_feature 1..20: note = Description of Artificial Sequence: Synthetic oligonucleotide
  misc_feature 1..20: note = Target: FXN; (-) strand; PAM type: NRG; PAM sequence: GGG
  source 1..20: mol_type = other DNA
tctgtgatctgacagattaa

SEQ ID NO: 8488 - DNA, 20 bp, synthetic construct
  misc_feature 1..20: note = Description of Artificial Sequence: Synthetic oligonucleotide
  misc_feature 1..20: note = Target: FXN; (-) strand; PAM type: NRG; PAM sequence: AGG
  source 1..20: mol_type = other DNA
atctgtgatctgacagatta

SEQ ID NO: 8489 - DNA, 20 bp, synthetic construct
  misc_feature 1..20: note = Description of Artificial Sequence: Synthetic oligonucleotide
  misc_feature 1..20: note = Target: FXN; (-) strand; PAM type: NRG; PAM sequence: AAG
  source 1..20: mol_type = other DNA
gatctgtgatctgacagatt

SEQ ID NO: 8490 - DNA, 20 bp, synthetic construct
  misc_feature 1..20: note = Description of Artificial Sequence: Synthetic oligonucleotide
  misc_feature 1..20: note = Target: FXN; (-) strand; PAM type: NRG; PAM sequence: CAG
  source 1..20: mol_type = other DNA
gcttttgatctgtgatctga

SEQ ID NO: 8491 - DNA, 20 bp, synthetic construct
  misc_feature 1..20: note = Description of Artificial Sequence: Synthetic oligonucleotide
  misc_feature 1..20: note = Target: FXN; (-) strand; PAM type: NRG; PAM sequence: TAG
  source 1..20: mol_type = other DNA
gtcccttgggcagtgtgtga

SEQ ID NO: 8492 - DNA, 20 bp, synthetic construct
  misc_feature 1..20: note = Description of Artificial Sequence: Synthetic oligonucleotide
  misc_feature 1..20: note = Target: FXN; (-) strand; PAM type: NRG; PAM sequence: CAG
  source 1..20: mol_type = other DNA
tccctttagggtcccttggg

SEQ ID NO: 8493 - DNA, 20 bp, synthetic construct
  misc_feature 1..20: note = Description of Artificial Sequence: Synthetic oligonucleotide
  misc_feature 1..20: note = Target: FXN; (-) strand; PAM type: NRG; PAM sequence: GGG
  source 1..20: mol_type = other DNA
ggctccctttagggtccctt

SEQ ID NO: 8494 - DNA, 20 bp, synthetic construct
  misc_feature 1..20: note = Description of Artificial Sequence: Synthetic oligonucleotide
  misc_feature 1..20: note = Target: FXN; (-) strand; PAM type: NRG; PAM sequence: TGG
  source 1..20: mol_type = other DNA
tggctccctttagggtccct

SEQ ID NO: 8495 - DNA, 20 bp, synthetic construct
  misc_feature 1..20: note = Description of Artificial Sequence: Synthetic oligonucleotide
  misc_feature 1..20: note = Target: FXN; (-) strand; PAM type: NRG; PAM sequence: GGG
  source 1..20: mol_type = other DNA
tctgagagtggctcccttta

SEQ ID NO: 8496 - DNA, 20 bp, synthetic construct
  misc_feature 1..20: note = Description of Artificial Sequence: Synthetic oligonucleotide
  misc_feature 1..20: note = Target: FXN; (-) strand; PAM type: NRG; PAM sequence: AGG
  source 1..20: mol_type = other DNA
ttctgagagtggctcccttt

SEQ ID NO: 8497 - DNA, 20 bp, synthetic construct
  misc_feature 1..20: note = Description of Artificial Sequence: Synthetic oligonucleotide
  misc_feature 1..20: note = Target: FXN; (-) strand; PAM type: NRG; PAM sequence: TAG
  source 1..20: mol_type = other DNA
tttctgagagtggctccctt

SEQ ID NO: 8498 - DNA, 20 bp, synthetic construct
  misc_feature 1..20: note = Description of Artificial Sequence: Synthetic oligonucleotide
  misc_feature 1..20: note = Target: FXN; (-) strand; PAM type: NRG; PAM sequence: TGG
  source 1..20: mol_type = other DNA
ttggatttattttctgagag

SEQ ID NO: 8499 - DNA, 20 bp, synthetic construct
  misc_feature 1..20: note = Description of Artificial Sequence: Synthetic oligonucleotide
  misc_feature 1..20: note = Target: FXN; (-) strand; PAM type: NRG; PAM sequence: GAG
  source 1..20: mol_type = other DNA
ggtttggatttattttctga

SEQ ID NO: 8500 - DNA, 20 bp, synthetic construct
  misc_feature 1..20: note = Description of Artificial Sequence: Synthetic oligonucleotide
  misc_feature 1..20: note = Target: FXN; (-) strand; PAM type: NRG; PAM sequence: GAG
  source 1..20: mol_type = other DNA
gaggtttggatttattttct

SEQ ID NO: 8501 - DNA, 20 bp, synthetic construct
  misc_feature 1..20: note = Description of Artificial Sequence: Synthetic oligonucleotide
  misc_feature 1..20: note = Target: FXN; (-) strand; PAM type: NRG; PAM sequence: TGG
  source 1..20: mol_type = other DNA
tggccagaaaaaaggaggtt

SEQ ID NO: 8502 - DNA, 20 bp, synthetic construct
  misc_feature 1..20: note = Description of Artificial Sequence: Synthetic oligonucleotide
  misc_feature 1..20: note = Target: FXN; (-) strand; PAM type: NRG; PAM sequence: AGG
  source 1..20: mol_type = other DNA
ttcagtggccagaaaaaagg

SEQ ID NO: 8503 - DNA, 20 bp, synthetic construct
  misc_feature 1..20: note = Description of Artificial Sequence: Synthetic oligonucleotide
  misc_feature 1..20: note = Target: FXN; (-) strand; PAM type: NRG; PAM sequence: GAG
  source 1..20: mol_type = other DNA
tttcagtggccagaaaaaag

SEQ ID NO: 8504 - DNA, 20 bp, synthetic construct
  misc_feature 1..20: note = Description of Artificial Sequence: Synthetic oligonucleotide
  misc_feature 1..20: note = Target: FXN; (-) strand; PAM type: NRG; PAM sequence: AGG
  source 1..20: mol_type = other DNA
cgtttcagtggccagaaaaa

SEQ ID NO: 8505 - DNA, 20 bp, synthetic construct
  misc_feature 1..20: note = Description of Artificial Sequence: Synthetic oligonucleotide
  misc_feature 1..20: note = Target: FXN; (-) strand; PAM type: NRG; PAM sequence: AAG
  source 1..20: mol_type = other DNA
acgtttcagtggccagaaaa

SEQ ID NO: 8506 - DNA, 20 bp, synthetic construct
  misc_feature 1..20: note = Description of Artificial Sequence: Synthetic oligonucleotide
  misc_feature 1..20: note = Target: FXN; (-) strand; PAM type: NRG; PAM sequence: CAG
  source 1..20: mol_type = other DNA
ttattgaacgtttcagtggc

SEQ ID NO: 8507 - DNA, 20 bp, synthetic construct
  misc_feature 1..20: note = Description of Artificial Sequence: Synthetic oligonucleotide
  misc_feature 1..20: note = Target: FXN; (-) strand; PAM type: NRG; PAM sequence: TGG
  source 1..20: mol_type = other DNA
ctaattattgaacgtttcag

SEQ ID NO: 8508 - DNA, 20 bp, synthetic construct
  misc_feature 1..20: note = Description of Artificial Sequence: Synthetic oligonucleotide
  misc_feature 1..20: note = Target: FXN; (-) strand; PAM type: NRG; PAM sequence: CAG
  source 1..20: mol_type = other DNA
gaactaattattgaacgttt

SEQ ID NO: 8509 - DNA, 20 bp, synthetic construct
  misc_feature 1..20: note = Description of Artificial Sequence: Synthetic oligonucleotide
  misc_feature 1..20: note = Target: FXN; (-) strand; PAM type: NRG; PAM sequence: TAG
  source 1..20: mol_type = other DNA
tattaaacatgtgaatgatg

SEQ ID NO: 8510 - DNA, 20 bp, synthetic construct
  misc_feature 1..20: note = Description of Artificial Sequence: Synthetic oligonucleotide
  misc_feature 1..20: note = Target: FXN; (-) strand; PAM type: NRG; PAM sequence: AAG
  source 1..20: mol_type = other DNA
caaagtaatcaataattcca

SEQ ID NO: 8511 - DNA, 20 bp, synthetic construct
  misc_feature 1..20: note = Description of Artificial Sequence: Synthetic oligonucleotide
  misc_feature 1..20: note = Target: FXN; (-) strand; PAM type: NRG; PAM sequence: AAG
  source 1..20: mol_type = other DNA
aattcataagatactcagca

SEQ ID NO: 8512 - DNA, 20 bp, synthetic construct
  misc_feature 1..20: note = Description of Artificial Sequence: Synthetic oligonucleotide
  misc_feature 1..20: note = Target: FXN; (-) strand; PAM type: NRG; PAM sequence: CAG
  source 1..20: mol_type = other DNA
gattaaattcataagatact

SEQ ID NO: 8513 - DNA, 20 bp, synthetic construct
  misc_feature 1..20: note = Description of Artificial Sequence: Synthetic oligonucleotide
  misc_feature 1..20: note = Target: FXN; (-) strand; PAM type: NRG; PAM sequence: AAG
  source 1..20: mol_type = other DNA
ttaatatagattaaattcat

SEQ ID NO: 8514 - DNA, 20 bp, synthetic construct
  misc_feature 1..20: note = Description of Artificial Sequence: Synthetic oligonucleotide
  misc_feature 1..20: note = Target: FXN; (-) strand; PAM type: NRG; PAM sequence: TAG
  source 1..20: mol_type = other DNA
acatcaccttaatattaata

SEQ ID NO: 8515 - DNA, 20 bp, synthetic construct
  misc_feature 1..20: note = Description of Artificial Sequence: Synthetic oligonucleotide
  misc_feature 1..20: note = Target: FXN; (-) strand; PAM type: NRG; PAM sequence: TGG
  source 1..20: mol_type = other DNA
ctagagtcaaatccacactc

SEQ ID NO: 8516 - DNA, 20 bp, synthetic construct
  misc_feature 1..20: note = Description of Artificial Sequence: Synthetic oligonucleotide
  misc_feature 1..20: note = Target: FXN; (-) strand; PAM type: NRG; PAM sequence: GAG
  source 1..20: mol_type = other DNA
ggagactgattatggcacta

SEQ ID NO: 8517 - DNA, 20 bp, synthetic construct
  misc_feature 1..20: note = Description of Artificial Sequence: Synthetic oligonucleotide
  misc_feature 1..20: note = Target: FXN; (-) strand; PAM type: NRG; PAM sequence: TAG
  source 1..20: mol_type = other DNA
caggagactgattatggcac

SEQ ID NO: 8518 - DNA, 20 bp, synthetic construct
  misc_feature 1..20: note = Description of Artificial Sequence: Synthetic oligonucleotide
  misc_feature 1..20: note = Target: FXN; (-) strand; PAM type: NRG; PAM sequence: TGG
  source 1..20: mol_type = other DNA
ttgtcccaggagactgatta

SEQ ID NO: 8519 - DNA, 20 bp, synthetic construct
  misc_feature 1..20: note = Description of Artificial Sequence: Synthetic oligonucleotide
  misc_feature 1..20: note = Target: FXN; (-) strand; PAM type: NRG; PAM sequence: GAG
  source 1..20: mol_type = other DNA
gaaacagctgtttgtcccag

SEQ ID NO: 8520 - DNA, 20 bp, synthetic construct
  misc_feature 1..20: note = Description of Artificial Sequence: Synthetic oligonucleotide
  misc_feature 1..20: note = Target: FXN; (-) strand; PAM type: NRG; PAM sequence: AGG
  source 1..20: mol_type = other DNA
gagaaacagctgtttgtccc

SEQ ID NO: 8521 - DNA, 20 bp, synthetic construct
  misc_feature 1..20: note = Description of Artificial Sequence: Synthetic oligonucleotide
  misc_feature 1..20: note = Target: FXN; (-) strand; PAM type: NRG; PAM sequence: CAG
  source 1..20: mol_type = other DNA
agagaaacagctgtttgtcc

SEQ ID NO: 8522 - DNA, 20 bp, synthetic construct
  misc_feature 1..20: note = Description of Artificial Sequence: Synthetic oligonucleotide
  misc_feature 1..20: note = Target: FXN; (-) strand; PAM type: NRG; PAM sequence: CAG
  source 1..20: mol_type = other DNA
ctataatgagggaagagaaa

SEQ ID NO: 8523 - DNA, 20 bp, synthetic construct
  misc_feature 1..20: note = Description of Artificial Sequence: Synthetic oligonucleotide
  misc_feature 1..20: note = Target: FXN; (-) strand; PAM type: NRG; PAM sequence: GAG
  source 1..20: mol_type = other DNA
ttttttctataatgagggaa

SEQ ID NO: 8524 - DNA, 20 bp, synthetic construct
  misc_feature 1..20: note = Description of Artificial Sequence: Synthetic oligonucleotide
  misc_feature 1..20: note = Target: FXN; (-) strand; PAM type: NRG; PAM sequence: AAG
  source 1..20: mol_type = other DNA
atttttttctataatgaggg

SEQ ID NO: 8525 - DNA, 20 bp, synthetic construct
  misc_feature 1..20: note = Description of Artificial Sequence: Synthetic oligonucleotide
  misc_feature 1..20: note = Target: FXN; (-) strand; PAM type: NRG; PAM sequence: GGG
  source 1..20: mol_type = other DNA
gcaatttttttctataatga

SEQ ID NO: 8526 - DNA, 20 bp, synthetic construct
  misc_feature 1..20: note = Description of Artificial Sequence: Synthetic oligonucleotide
  misc_feature 1..20: note = Target: FXN; (-) strand; PAM type: NRG; PAM sequence: AGG
  source 1..20: mol_type = other DNA
ggcaatttttttctataatg

SEQ ID NO: 8527 - DNA, 20 bp, synthetic construct
  misc_feature 1..20: note = Description of Artificial Sequence: Synthetic oligonucleotide
  misc_feature 1..20: note = Target: FXN; (-) strand; PAM type: NRG; PAM sequence: GAG
  source 1..20: mol_type = other DNA
gggcaatttttttctataat

SEQ ID NO: 8528 - DNA, 20 bp, synthetic construct
  misc_feature 1..20: note = Description of Artificial Sequence: Synthetic oligonucleotide
  misc_feature 1..20: note = Target: FXN; (-) strand; PAM type: NRG; PAM sequence: GGG
  source 1..20: mol_type = other DNA
tgttctttgacatttgccaa

SEQ ID NO: 8529 - DNA, 20 bp, synthetic construct
  misc_feature 1..20: note = Description of Artificial Sequence: Synthetic oligonucleotide
  misc_feature 1..20: note = Target: FXN; (-) strand; PAM type: NRG; PAM sequence: AGG
  source 1..20: mol_type = other DNA
atgttctttgacatttgcca

SEQ ID NO: 8530 - DNA, 20 bp, synthetic construct
  misc_feature 1..20: note = Description of Artificial Sequence: Synthetic oligonucleotide
  misc_feature 1..20: note = Target: FXN; (-) strand; PAM type: NRG; PAM sequence: AAG
  source 1..20: mol_type = other DNA
gatgttctttgacatttgcc

SEQ ID NO: 8531 - DNA, 20 bp, synthetic construct
  misc_feature 1..20: note = Description of Artificial Sequence: Synthetic oligonucleotide
  misc_feature 1..20: note = Target: FXN; (-) strand; PAM type: NRG; PAM sequence: AGG
  source 1..20: mol_type = other DNA
tggtaagagagattgataaa

SEQ ID NO: 8532 - DNA, 20 bp, synthetic construct
  misc_feature 1..20: note = Description of Artificial Sequence: Synthetic oligonucleotide
  misc_feature 1..20: note = Target: FXN; (-) strand; PAM type: NRG; PAM sequence: AAG
  source 1..20: mol_type = other DNA
ttggtaagagagattgataa

SEQ ID NO: 8533 - DNA, 20 bp, synthetic construct
  misc_feature 1..20: note = Description of Artificial Sequence: Synthetic oligonucleotide
  misc_feature 1..20: note = Target: FXN; (-) strand; PAM type: NRG; PAM sequence: GAG
  source 1..20: mol_type = other DNA
gcttggattgattggtaaga

SEQ ID NO: 8534 - DNA, 20 bp, synthetic construct
  misc_feature 1..20: note = Description of Artificial Sequence: Synthetic oligonucleotide
  misc_feature 1..20: note = Target: FXN; (-) strand; PAM type: NRG; PAM sequence: GAG
  source 1..20: mol_type = other DNA
ttgcttggattgattggtaa

SEQ ID NO: 8535 - DNA, 20 bp, synthetic construct
  misc_feature 1..20: note = Description of Artificial Sequence: Synthetic oligonucleotide
  misc_feature 1..20: note = Target: FXN; (-) strand; PAM type: NRG; PAM sequence: AAG
  source 1..20: mol_type = other DNA
atttgcttggattgattggt

SEQ ID NO: 8536 - DNA, 20 bp, synthetic construct
  misc_feature 1..20: note = Description of Artificial Sequence: Synthetic oligonucleotide
  misc_feature 1..20: note = Target: FXN; (-) strand; PAM type: NRG; PAM sequence: TGG
  source 1..20: mol_type = other DNA
ctgcatttgcttggattgat

SEQ ID NO: 8537 - DNA, 20 bp, synthetic construct
  misc_feature 1..20: note = Description of Artificial Sequence: Synthetic oligonucleotide
  misc_feature 1..20: note = Target: FXN; (-) strand; PAM type: NRG; PAM sequence: TGG
  source 1..20: mol_type = other DNA
gaaatcccactgcatttgct

SEQ ID NO: 8538 - DNA, 20 bp, synthetic construct
  misc_feature 1..20: note = Description of Artificial Sequence: Synthetic oligonucleotide
  misc_feature 1..20: note = Target: FXN; (-) strand; PAM type: NRG; PAM sequence: AAG
  source 1..20: mol_type = other DNA
gtgacttcaactctggggaa

SEQ ID NO: 8539 - DNA, 20 bp, synthetic construct
  misc_feature 1..20: note = Description of Artificial Sequence: Synthetic oligonucleotide
  misc_feature 1..20: note = Target: FXN; (-) strand; PAM type: NRG; PAM sequence: GGG
  source 1..20: mol_type = other DNA
aggaggtgacttcaactctg

SEQ ID NO: 8540 - DNA, 20 bp, synthetic construct
  misc_feature 1..20: note = Description of Artificial Sequence: Synthetic oligonucleotide
  misc_feature 1..20: note = Target: FXN; (-) strand; PAM type: NRG; PAM sequence: GGG
  source 1..20: mol_type = other DNA
caggaggtgacttcaactct

SEQ ID NO: 8541 - DNA, 20 bp, synthetic construct
  misc_feature 1..20: note = Description of Artificial Sequence: Synthetic oligonucleotide
  misc_feature 1..20: note = Target: FXN; (-) strand; PAM type: NRG; PAM sequence: TGG
  source 1..20: mol_type = other DNA
tcaggaggtgacttcaactc

SEQ ID NO: 8542 - DNA, 20 bp, synthetic construct
  misc_feature 1..20: note = Description of Artificial Sequence: Synthetic oligonucleotide
  misc_feature 1..20: note = Target: FXN; (-) strand; PAM type: NRG; PAM sequence: AGG
  source 1..20: mol_type = other DNA
agacttaacttcctgtcagg

SEQ ID NO: 8543 - DNA, 20 bp, synthetic construct
  misc_feature 1..20: note = Description of Artificial Sequence: Synthetic oligonucleotide
  misc_feature 1..20: note = Target: FXN; (-) strand; PAM type: NRG; PAM sequence: GAG
  source 1..20: mol_type = other DNA
aagacttaacttcctgtcag

SEQ ID NO: 8544 - DNA, 20 bp, synthetic construct
  misc_feature 1..20: note = Description of Artificial Sequence: Synthetic oligonucleotide
  misc_feature 1..20: note = Target: FXN; (-) strand; PAM type: NRG; PAM sequence: AGG
  source 1..20: mol_type = other DNA
taaagacttaacttcctgtc

SEQ ID NO: 8545 - DNA, 20 bp, synthetic construct
  misc_feature 1..20: note = Description of Artificial Sequence: Synthetic oligonucleotide
  misc_feature 1..20: note = Target: FXN; (-) strand; PAM type: NRG; PAM sequence: CAG
  source 1..20: mol_type = other DNA
ctaaagacttaacttcctgt

SEQ ID NO: 8546 - DNA, 20 bp, synthetic construct
  misc_feature 1..20: note = Description of Artificial Sequence: Synthetic oligonucleotide
  misc_feature 1..20: note = Target: FXN; (-) strand; PAM type: NRG; PAM sequence: AAG
  source 1..20: mol_type = other DNA
gtgctatgattcagtgccta

SEQ ID NO: 8547 - DNA, 20 bp, synthetic construct
  misc_feature 1..20: note = Description of Artificial Sequence: Synthetic oligonucleotide
  misc_feature 1..20: note = Target: FXN; (-) strand; PAM type: NRG; PAM sequence: CAG
  source 1..20: mol_type = other DNA
ttcagctcagtgctatgatt

SEQ ID NO: 8548 - DNA, 20 bp, synthetic construct
  misc_feature 1..20: note = Description of Artificial Sequence: Synthetic oligonucleotide
  misc_feature 1..20: note = Target: FXN; (-) strand; PAM type: NRG; PAM sequence: CAG
  source 1..20: mol_type = other DNA
cttagtcctgggcttcagct

SEQ ID NO: 8549 - DNA, 20 bp, synthetic construct
  misc_feature 1..20: note = Description of Artificial Sequence: Synthetic oligonucleotide
  misc_feature 1..20: note = Target: FXN; (-) strand; PAM type: NRG; PAM sequence: CAG
  source 1..20: mol_type = other DNA
tcttgcttagtcctgggctt

SEQ ID NO: 8550 - DNA, 20 bp, synthetic construct
  misc_feature 1..20: note = Description of Artificial Sequence: Synthetic oligonucleotide
  misc_feature 1..20: note = Target: FXN; (-) strand; PAM type: NRG; PAM sequence: GGG
  source 1..20: mol_type = other DNA
actcattcttgcttagtcct

SEQ ID NO: 8551 - DNA, 20 bp, synthetic construct
  misc_feature 1..20: note = Description of Artificial Sequence: Synthetic oligonucleotide
  misc_feature 1..20: note = Target: FXN; (-) strand; PAM type: NRG; PAM sequence: TGG
  source 1..20: mol_type = other DNA
cactcattcttgcttagtcc

SEQ ID NO: 8552 - DNA, 20 bp, synthetic construct
  misc_feature 1..20: note = Description of Artificial Sequence: Synthetic oligonucleotide
  misc_feature 1..20: note = Target: FXN; (-) strand; PAM type: NRG; PAM sequence: TAG
  source 1..20: mol_type = other DNA
aattctcactcattcttgct

SEQ ID NO: 8553 - DNA, 20 bp, synthetic construct
  misc_feature 1..20: note = Description of Artificial Sequence: Synthetic oligonucleotide
  misc_feature 1..20: note = Target: FXN; (-) strand; PAM type: NRG; PAM sequence: AAG
  source 1..20: mol_type = other DNA
tctacagatgaccaaacctt

SEQ ID NO: 8554 - DNA, 20 bp, synthetic construct
  misc_feature 1..20: note = Description of Artificial Sequence: Synthetic oligonucleotide
  misc_feature 1..20: note = Target: FXN; (-) strand; PAM type: NRG; PAM sequence: CAG
  source 1..20: mol_type = other DNA
agacaaaacccaatcctcta

SEQ ID NO: 8555 - DNA, 20 bp, synthetic construct
  misc_feature 1..20: note = Description of Artificial Sequence: Synthetic oligonucleotide
  misc_feature 1..20: note = Target: FXN; (-) strand; PAM type: NRG; PAM sequence: AAG
  source 1..20: mol_type = other DNA
caccaaaacaaaaacaaaac

SEQ ID NO: 8556 - DNA, 20 bp, synthetic construct
  misc_feature 1..20: note = Description of Artificial Sequence: Synthetic oligonucleotide
  misc_feature 1..20: note = Target: FXN; (-) strand; PAM type: NRG; PAM sequence: AGG
  source 1..20: mol_type = other DNA
agggcagtgagaaaccttgc

SEQ ID NO: 8557 - DNA, 20 bp, synthetic construct
  misc_feature 1..20: note = Description of Artificial Sequence: Synthetic oligonucleotide
  misc_feature 1..20: note = Target: FXN; (-) strand; PAM type: NRG; PAM sequence: CAG
  source 1..20: mol_type = other DNA
aagggcagtgagaaaccttg

SEQ ID NO: 8558 - DNA, 20 bp, synthetic construct
  misc_feature 1..20: note = Description of Artificial Sequence: Synthetic oligonucleotide
  misc_feature 1..20: note = Target: FXN; (-) strand; PAM type: NRG; PAM sequence: GAG
  source 1..20: mol_type = other DNA
attacctgatgaagggcagt

SEQ ID NO: 8559 - DNA, 20 bp, synthetic construct
  misc_feature 1..20: note = Description of Artificial Sequence: Synthetic oligonucleotide
  misc_feature 1..20: note = Target: FXN; (-) strand; PAM type: NRG; PAM sequence: CAG
  source 1..20: mol_type = other DNA
gcatattacctgatgaaggg

SEQ ID NO: 8560 - DNA, 20 bp, synthetic construct
  misc_feature 1..20: note = Description of Artificial Sequence: Synthetic oligonucleotide
  misc_feature 1..20: note = Target: FXN; (-) strand; PAM type: NRG; PAM sequence: GGG
  source 1..20: mol_type = other DNA
agggcatattacctgatgaa

SEQ ID NO: 8561 - DNA, 20 bp, synthetic construct
  misc_feature 1..20: note = Description of Artificial Sequence: Synthetic oligonucleotide
  misc_feature 1..20: note = Target: FXN; (-) strand; PAM type: NRG; PAM sequence: AGG
  source 1..20: mol_type = other DNA
cagggcatattacctgatga

SEQ ID NO: 8562 - DNA, 20 bp, synthetic construct
  misc_feature 1..20: note = Description of Artificial Sequence: Synthetic oligonucleotide
  misc_feature 1..20: note = Target: FXN; (-) strand; PAM type: NRG; PAM sequence: AAG
  source 1..20: mol_type = other DNA
acagggcatattacctgatg

SEQ ID NO: 8563 - DNA, 20 bp, synthetic construct
  misc_feature 1..20: note = Description of Artificial Sequence: Synthetic oligonucleotide
  misc_feature 1..20: note = Target: FXN; (-) strand; PAM type: NRG; PAM sequence: GGG
  source 1..20: mol_type = other DNA
aattggccagttcagggaca

SEQ ID NO: 8564 - DNA, 20 bp, synthetic construct
  misc_feature 1..20: note = Description of Artificial Sequence: Synthetic oligonucleotide
  misc_feature 1..20: note = Target: FXN; (-) strand; PAM type: NRG; PAM sequence: AGG
  source 1..20: mol_type = other DNA
caattggccagttcagggac

SEQ ID NO: 8565 - DNA, 20 bp, synthetic construct
  misc_feature 1..20: note = Description of Artificial Sequence: Synthetic oligonucleotide
  misc_feature 1..20: note = Target: FXN; (-) strand; PAM type: NRG; PAM sequence: CAG
  source 1..20: mol_type = other DNA
acaattggccagttcaggga

SEQ ID NO: 8566 - DNA, 20 bp, synthetic construct
  misc_feature 1..20: note = Description of Artificial Sequence: Synthetic oligonucleotide
  misc_feature 1..20: note = Target: FXN; (-) strand; PAM type: NRG; PAM sequence: GGG
  source 1..20: mol_type = other DNA
taacacaattggccagttca

SEQ ID NO: 8567 - DNA, 20 bp, synthetic construct
  misc_feature 1..20: note = Description of Artificial Sequence: Synthetic oligonucleotide
  misc_feature 1..20: note = Target: FXN; (-) strand; PAM type: NRG; PAM sequence: AGG
  source 1..20: mol_type = other DNA
gtaacacaattggccagttc

SEQ ID NO: 8568 - DNA, 20 bp, synthetic construct
  misc_feature 1..20: note = Description of Artificial Sequence: Synthetic oligonucleotide
  misc_feature 1..20: note = Target: FXN; (-) strand; PAM type: NRG; PAM sequence: CAG
  source 1..20: mol_type = other DNA
ggtaacacaattggccagtt

SEQ ID NO: 8569 - DNA, 20 bp, synthetic construct
  misc_feature 1..20: note = Description of Artificial Sequence: Synthetic oligonucleotide
  misc_feature 1..20: note = Target: FXN; (-) strand; PAM type: NRG; PAM sequence: CAG
  source 1..20: mol_type = other DNA
aatggggtaacacaattggc

SEQ ID NO: 8570 - DNA, 20 bp, synthetic construct
  misc_feature 1..20: note = Description of Artificial Sequence: Synthetic oligonucleotide
  misc_feature 1..20: note = Target: FXN; (-) strand; PAM type: NRG; PAM sequence: TGG
  source 1..20: mol_type = other DNA
agggaatggggtaacacaat

SEQ ID NO: 8571 - DNA, 20 bp, synthetic construct
  misc_feature 1..20: note = Description of Artificial Sequence: Synthetic oligonucleotide
  misc_feature 1..20: note = Target: FXN; (-) strand; PAM type: NRG; PAM sequence: GGG
  source 1..20: mol_type = other DNA
tcactgttgctaagggaatg

SEQ ID NO: 8572 - DNA, 20 bp, synthetic construct
  misc_feature 1..20: note = Description of Artificial Sequence: Synthetic oligonucleotide
  misc_feature 1..20: note = Target: FXN; (-) strand; PAM type: NRG; PAM sequence: GGG
  source 1..20: mol_type = other DNA
atcactgttgctaagggaat

SEQ ID NO: 8573 - DNA, 20 bp, synthetic construct
  misc_feature 1..20: note = Description of Artificial Sequence: Synthetic oligonucleotide
  misc_feature 1..20: note = Target: FXN; (-) strand; PAM type: NRG; PAM sequence: TGG
  source 1..20: mol_type = other DNA
aatcactgttgctaagggaa

SEQ ID NO: 8574 - DNA, 20 bp, synthetic construct
  misc_feature 1..20: note = Description of Artificial Sequence: Synthetic oligonucleotide
  misc_feature 1..20: note = Target: FXN; (-) strand; PAM type: NRG; PAM sequence: GGG
  source 1..20: mol_type = other DNA
gtagcaatcactgttgctaa

SEQ ID NO: 8575 - DNA, 20 bp, synthetic construct
  misc_feature 1..20: note = Description of Artificial Sequence: Synthetic oligonucleotide
  misc_feature 1..20: note = Target: FXN; (-) strand; PAM type: NRG; PAM sequence: AGG
  source 1..20: mol_type = other DNA
agtagcaatcactgttgcta

SEQ ID NO: 8576 - DNA, 20 bp, synthetic construct
  misc_feature 1..20: note = Description of Artificial Sequence: Synthetic oligonucleotide
  misc_feature 1..20: note = Target: FXN; (-) strand; PAM type: NRG; PAM sequence: AAG
  source 1..20: mol_type = other DNA
cagtagcaatcactgttgct

SEQ ID NO: 8577 - DNA, 20 bp, synthetic construct
  misc_feature 1..20: note = Description of Artificial Sequence: Synthetic oligonucleotide
  misc_feature 1..20: note = Target: FXN; (-) strand; PAM type: NRG; PAM sequence: TAG
  source 1..20: mol_type = other DNA
ttggcctcctgtttcttcag

SEQ ID NO: 8578 - DNA, 20 bp, synthetic construct
  misc_feature 1..20: note = Description of Artificial Sequence: Synthetic oligonucleotide
  misc_feature 1..20: note = Target: FXN; (-) strand; PAM type: NRG; PAM sequence: CAG
  source 1..20: mol_type = other DNA
ttgttggcctcctgtttctt

SEQ ID NO: 8579 - DNA, 20 bp, synthetic construct
  misc_feature 1..20: note = Description of Artificial Sequence: Synthetic oligonucleotide
  misc_feature 1..20: note = Target: FXN; (-) strand; PAM type: NRG; PAM sequence: TGG
  source 1..20: mol_type = other DNA
gaatgagtgatattctttgt

SEQ ID NO: 8580 - DNA, 20 bp, synthetic construct
  misc_feature 1..20: note = Description of Artificial Sequence: Synthetic oligonucleotide
  misc_feature 1..20: note = Target: FXN; (-) strand; PAM type: NRG; PAM sequence: GAG
  source 1..20: mol_type = other DNA
tagacactctactggtgaat

SEQ ID NO: 8581 - DNA, 20 bp, synthetic construct
  misc_feature 1..20: note = Description of Artificial Sequence: Synthetic oligonucleotide
  misc_feature 1..20: note = Target: FXN; (-) strand; PAM type: NRG; PAM sequence: TGG
  source 1..20: mol_type = other DNA
ctctgacatagacactctac

SEQ ID NO: 8582 - DNA, 20 bp, synthetic construct
  misc_feature 1..20: note = Description of Artificial Sequence: Synthetic oligonucleotide
  misc_feature 1..20: note = Target: FXN; (-) strand; PAM type: NRG; PAM sequence: TAG
  source 1..20: mol_type = other DNA
tttatctaatatctctgaca

SEQ ID NO: 8583 - DNA, 20 bp, synthetic construct
  misc_feature 1..20: note = Description of Artificial Sequence: Synthetic oligonucleotide
  misc_feature 1..20: note = Target: FXN; (-) strand; PAM type: NRG; PAM sequence: TAG
  source 1..20: mol_type = other DNA
acagcctgcaatgtaattgt

SEQ ID NO: 8584 - DNA, 20 bp, synthetic construct
  misc_feature 1..20: note = Description of Artificial Sequence: Synthetic oligonucleotide
  misc_feature 1..20: note = Target: FXN; (-) strand; PAM type: NRG; PAM sequence: CAG
  source 1..20: mol_type = other DNA
ggtacctctctctgtttcca

SEQ ID NO: 8585 - DNA, 20 bp, synthetic construct
  misc_feature 1..20: note = Description of Artificial Sequence: Synthetic oligonucleotide
  misc_feature 1..20: note = Target: FXN; (-) strand; PAM type: NRG; PAM sequence: AGG
  source 1..20: mol_type = other DNA
tattcccacaggtgtgcctt

SEQ ID NO: 8586 - DNA, 20 bp, synthetic construct
  misc_feature 1..20: note = Description of Artificial Sequence: Synthetic oligonucleotide
  misc_feature 1..20: note = Target: FXN; (-) strand; PAM type: NRG; PAM sequence: TAG
  source 1..20: mol_type = other DNA
atattcccacaggtgtgcct

SEQ ID NO: 8587 - DNA, 20 bp, synthetic construct
  misc_feature 1..20: note = Description of Artificial Sequence: Synthetic oligonucleotide
  misc_feature 1..20: note = Target: FXN; (-) strand; PAM type: NRG; PAM sequence: AGG
  source 1..20: mol_type = other DNA
ccaaactttcatattcccac

SEQ ID NO: 8588 - DNA, 20 bp, synthetic construct
  misc_feature 1..20: note = Description of Artificial Sequence: Synthetic oligonucleotide
  misc_feature 1..20: note = Target: FXN; (-) strand; PAM type: NRG; PAM sequence: CAG
  source 1..20: mol_type = other DNA
accaaactttcatattccca

SEQ ID NO: 8589 - DNA, 20 bp, synthetic construct
  misc_feature 1..20: note = Description of Artificial Sequence: Synthetic oligonucleotide
  misc_feature 1..20: note = Target: FXN; (-) strand; PAM type: NRG; PAM sequence: CAG
  source 1..20: mol_type = other DNA
atgtcagaggtgacttcctc

SEQ ID NO: 8590 - DNA, 20 bp, synthetic construct
  misc_feature 1..20: note = Description of Artificial Sequence: Synthetic oligonucleotide
  misc_feature 1..20: note = Target: FXN; (-) strand; PAM type: NRG; PAM sequence: AGG
  source 1..20: mol_type = other DNA
ggactcaactcaaatgtcag

SEQ ID NO: 8591 - DNA, 20 bp, synthetic construct
  misc_feature 1..20: note = Description of Artificial Sequence: Synthetic oligonucleotide
  misc_feature 1..20: note = Target: FXN; (-) strand; PAM type: NRG; PAM sequence: GAG
  source 1..20: mol_type = other DNA
aggactcaactcaaatgtca

SEQ ID NO: 8592 - DNA, 20 bp, synthetic construct
  misc_feature 1..20: note = Description of Artificial Sequence: Synthetic oligonucleotide
  misc_feature 1..20: note = Target: FXN; (-) strand; PAM type: NRG; PAM sequence: CAG
  source 1..20: mol_type = other DNA
gtaggactcaactcaaatgt

SEQ ID NO: 8593 - DNA, 20 bp, synthetic construct
  misc_feature 1..20: note = Description of Artificial Sequence: Synthetic oligonucleotide
  misc_feature 1..20: note = Target: FXN; (-) strand; PAM type: NRG; PAM sequence: AGG
  source 1..20: mol_type = other DNA
ctactttcttcatatcctgt

SEQ ID NO: 8594 - DNA, 20 bp, synthetic construct
  misc_feature 1..20: note = Description of Artificial Sequence: Synthetic oligonucleotide
  misc_feature 1..20: note = Target: FXN; (-) strand; PAM type: NRG; PAM sequence: TAG
  source 1..20: mol_type = other DNA
gctactttcttcatatcctg

SEQ ID NO: 8595 - DNA, 20 bp, synthetic construct
  misc_feature 1..20: note = Description of Artificial Sequence: Synthetic oligonucleotide
  misc_feature 1..20: note = Target: FXN; (-) strand; PAM type: NRG; PAM sequence: GGG
  source 1..20: mol_type = other DNA
gccatagtaaccggaacatg

SEQ ID NO: 8596 - DNA, 20 bp, synthetic construct
  misc_feature 1..20: note = Description of Artificial Sequence: Synthetic oligonucleotide
  misc_feature 1..20: note = Target: FXN; (-) strand; PAM type: NRG; PAM sequence: GGG
  source 1..20: mol_type = other DNA
agccatagtaaccggaacat

SEQ ID NO: 8597 - DNA, 20 bp, synthetic construct
  misc_feature 1..20: note = Description of Artificial Sequence: Synthetic oligonucleotide
  misc_feature 1..20: note = Target: FXN; (-) strand; PAM type: NRG; PAM sequence: TGG
  source 1..20: mol_type = other DNA
cagccatagtaaccggaaca

SEQ ID NO: 8598 - DNA, 20 bp, synthetic construct
  misc_feature 1..20: note = Description of Artificial Sequence: Synthetic oligonucleotide
  misc_feature 1..20: note = Target: FXN; (-) strand; PAM type: NRG; PAM sequence: CGG
  source 1..20: mol_type = other DNA
tattacacagccatagtaac

SEQ ID NO: 8599 - DNA, 20 bp, synthetic construct
  misc_feature 1..20: note = Description of Artificial Sequence: Synthetic oligonucleotide
  misc_feature 1..20: note = Target: FXN; (-) strand; PAM type: NRG; PAM sequence: TAG
  source 1..20: mol_type = other DNA
ggtaatttattacacagcca

SEQ ID NO: 8600 - DNA, 20 bp, synthetic construct
  misc_feature 1..20: note = Description of Artificial Sequence: Synthetic oligonucleotide
  misc_feature 1..20: note = Target: FXN; (-) strand; PAM type: NRG; PAM sequence: CAG
  source 1..20: mol_type = other DNA
gttttaggtaatttattaca

SEQ ID NO: 8601 - DNA, 20 bp, synthetic construct
  misc_feature 1..20: note = Description of Artificial Sequence: Synthetic oligonucleotide
  misc_feature 1..20: note = Target: FXN; (-) strand; PAM type: NRG; PAM sequence: AGG
  source 1..20: mol_type = other DNA
gctttaatccagtatgtttt

SEQ ID NO: 8602 - DNA, 20 bp, synthetic construct
  misc_feature 1..20: note = Description of Artificial Sequence: Synthetic oligonucleotide
  misc_feature 1..20: note = Target: FXN; (-) strand; PAM type: NRG; PAM sequence: TAG
  source 1..20: mol_type = other DNA
agctttaatccagtatgttt

SEQ ID NO: 8603 - DNA, 20 bp, synthetic construct
  misc_feature 1..20: note = Description of Artificial Sequence: Synthetic oligonucleotide
  misc_feature 1..20: note = Target: FXN; (-) strand; PAM type: NRG; PAM sequence: CAG
  source 1..20: mol_type = other DNA
atgttttcatagctttaatc

SEQ ID NO: 8604 - DNA, 20 bp, synthetic construct
  misc_feature 1..20: note = Description of Artificial Sequence: Synthetic oligonucleotide
  misc_feature 1..20: note = Target: FXN; (-) strand; PAM type: NRG; PAM sequence: TAG
  source 1..20: mol_type = other DNA
gggcagaaaagatgttttca

SEQ ID NO: 8605 - DNA, 20 bp, synthetic construct
  misc_feature 1..20: note = Description of Artificial Sequence: Synthetic oligonucleotide
  misc_feature 1..20: note = Target: FXN; (-) strand; PAM type: NRG; PAM sequence: AAG
  source 1..20: mol_type = other DNA
cacagaatctctgggcagaa

SEQ ID NO: 8606 - DNA, 20 bp, synthetic construct
  misc_feature 1..20: note = Description of Artificial Sequence: Synthetic oligonucleotide
  misc_feature 1..20: note = Target: FXN; (-) strand; PAM type: NRG; PAM sequence: CAG
  source 1..20: mol_type = other DNA
aggcccacagaatctctggg

SEQ ID NO: 8607 - DNA, 20 bp, synthetic construct
  misc_feature 1..20: note = Description of Artificial Sequence: Synthetic oligonucleotide
  misc_feature 1..20: note = Target: FXN; (-) strand; PAM type: NRG; PAM sequence: GGG
  source 1..20: mol_type = other DNA
ttcaggcccacagaatctct

SEQ ID NO: 8608 - DNA, 20 bp, synthetic construct
  misc_feature 1..20: note = Description of Artificial Sequence: Synthetic oligonucleotide
  misc_feature 1..20: note = Target: FXN; (-) strand; PAM type: NRG; PAM sequence: TGG
  source 1..20: mol_type = other DNA
tttcaggcccacagaatctc

SEQ ID NO: 8609 - DNA, 20 bp, synthetic construct
  misc_feature 1..20: note = Description of Artificial Sequence: Synthetic oligonucleotide
  misc_feature 1..20: note = Target: FXN; (-) strand; PAM type: NRG; PAM sequence: CAG
  source 1..20: mol_type = other DNA
ccatgtgaatttcaggccca

SEQ ID NO: 8610 - DNA, 20 bp, synthetic construct
  misc_feature 1..20: note = Description of Artificial Sequence: Synthetic oligonucleotide
  misc_feature 1..20: note = Target: FXN; (-) strand; PAM type: NRG; PAM sequence: AGG
  source 1..20: mol_type = other DNA
atgtgttccatgtgaatttc

SEQ ID NO: 8611 - DNA, 20 bp, synthetic construct
  misc_feature 1..20: note = Description of Artificial Sequence: Synthetic oligonucleotide
  misc_feature 1..20: note = Target: FXN; (-) strand; PAM type: NRG; PAM sequence: CAG
  source 1..20: mol_type = other DNA
tatgtgttccatgtgaattt

SEQ ID NO: 8612 - DNA, 20 bp, synthetic construct
  misc_feature 1..20: note = Description of Artificial Sequence: Synthetic oligonucleotide
  misc_feature 1..20: note = Target: FXN; (-) strand; PAM type: NRG; PAM sequence: AGG
  source 1..20: mol_type = other DNA
gacatcatggagcagaaaca

SEQ ID NO: 8613 - DNA, 20 bp, synthetic construct
  misc_feature 1..20: note = Description of Artificial Sequence: Synthetic oligonucleotide
  misc_feature 1..20: note = Target: FXN; (-) strand; PAM type: NRG; PAM sequence: AAG
  source 1..20: mol_type = other DNA
agacatcatggagcagaaac

SEQ ID NO: 8614 - DNA, 20 bp, synthetic construct
  misc_feature 1..20: note = Description of Artificial Sequence: Synthetic oligonucleotide
  misc_feature 1..20: note = Target: FXN; (-) strand; PAM type: NRG; PAM sequence: CAG
  source 1..20: mol_type = other DNA
aatccttagacatcatggag

SEQ ID NO: 8615 - DNA, 20 bp, synthetic construct
  misc_feature 1..20: note = Description of Artificial Sequence: Synthetic oligonucleotide
  misc_feature 1..20: note = Target: FXN; (-) strand; PAM type: NRG; PAM sequence: GAG
  source 1..20: mol_type = other DNA
ctgaatccttagacatcatg

SEQ ID NO: 8616 - DNA, 20 bp, synthetic construct
  misc_feature 1..20: note = Description of Artificial Sequence: Synthetic oligonucleotide
  misc_feature 1..20: note = Target: FXN; (-) strand; PAM type: NRG; PAM sequence: TGG
  source 1..20: mol_type = other DNA
agctgaatccttagacatca

SEQ ID NO: 8617 - DNA, 20 bp, synthetic construct
  misc_feature 1..20: note = Description of Artificial Sequence: Synthetic oligonucleotide
  misc_feature 1..20: note = Target: FXN; (-) strand; PAM type: NRG; PAM sequence: TAG
  source 1..20: mol_type = other DNA
cagtcttccagctgaatcct

SEQ ID NO: 8618 - DNA, 20 bp, synthetic construct
  misc_feature 1..20: note = Description of Artificial Sequence: Synthetic oligonucleotide
  misc_feature 1..20: note = Target: FXN; (-) strand; PAM type: NRG; PAM sequence: CAG
  source 1..20: mol_type = other DNA
cccccagcctcccagtcttc

SEQ ID NO: 8619 - DNA, 20 bp, synthetic construct
  misc_feature 1..20: note = Description of Artificial Sequence: Synthetic oligonucleotide
  misc_feature 1..20: note = Target: FXN; (-) strand; PAM type: NRG; PAM sequence: CAG
  source 1..20: mol_type = other DNA
aattccagcccccagcctcc

SEQ ID NO: 8620 - DNA, 20 bp, synthetic construct
  misc_feature 1..20: note = Description of Artificial Sequence: Synthetic oligonucleotide
  misc_feature 1..20: note = Target: FXN; (-) strand; PAM type: NRG; PAM sequence: CAG
  source 1..20: mol_type = other DNA
ttcagataaattccagcccc

SEQ ID NO: 8621 - DNA, 20 bp, synthetic construct
  misc_feature 1..20: note = Description of Artificial Sequence: Synthetic oligonucleotide
  misc_feature 1..20: note = Target: FXN; (-) strand; PAM type: NRG; PAM sequence: CAG
  source 1..20: mol_type = other DNA
gtcattcttcagataaattc

SEQ ID NO: 8622 - DNA, 20 bp, synthetic construct
  misc_feature 1..20: note = Description of Artificial Sequence: Synthetic oligonucleotide
  misc_feature 1..20: note = Target: FXN; (-) strand; PAM type: NRG; PAM sequence: CAG
  source 1..20: mol_type = other DNA
catgtaaatgagtcattctt

SEQ ID NO: 8623 - DNA, 20 bp, synthetic construct
  misc_feature 1..20: note = Description of Artificial Sequence: Synthetic oligonucleotide
  misc_feature 1..20: note = Target: FXN; (-) strand; PAM type: NRG; PAM sequence: GAG
  source 1..20: mol_type = other DNA
caaccagtagacatgtaaat

SEQ ID NO: 8624 - DNA, 20 bp, synthetic construct
  misc_feature 1..20: note = Description of Artificial Sequence: Synthetic oligonucleotide
  misc_feature 1..20: note = Target: FXN; (-) strand; PAM type: NRG; PAM sequence: TAG
  source 1..20: mol_type = other DNA
caacagccagggtcaaccag

SEQ ID NO: 8625 - DNA, 20 bp, synthetic construct
  misc_feature 1..20: note = Description of Artificial Sequence: Synthetic oligonucleotide
  misc_feature 1..20: note = Target: FXN; (-) strand; PAM type: NRG; PAM sequence: CAG
  source 1..20: mol_type = other DNA
agccaacagccagggtcaac

SEQ ID NO: 8626 - DNA, 20 bp, synthetic construct
  misc_feature 1..20: note = Description of Artificial Sequence: Synthetic oligonucleotide
  misc_feature 1..20: note = Target: FXN; (-) strand; PAM type: NRG; PAM sequence: GGG
  source 1..20: mol_type = other DNA
gccccctcagccaacagcca

SEQ ID NO: 8627 - DNA, 20 bp, synthetic construct
  misc_feature 1..20: note = Description of Artificial Sequence: Synthetic oligonucleotide
  misc_feature 1..20: note = Target: FXN; (-) strand; PAM type: NRG; PAM sequence: AGG
  source 1..20: mol_type = other DNA
ggccccctcagccaacagcc

SEQ ID NO: 8628 - DNA, 20 bp, synthetic construct
  misc_feature 1..20: note = Description of Artificial Sequence: Synthetic oligonucleotide
  misc_feature 1..20: note = Target: FXN; (-) strand; PAM type: NRG; PAM sequence: CAG
  source 1..20: mol_type = other DNA
aggccccctcagccaacagc

SEQ ID NO: 8629 - DNA, 20 bp, synthetic construct
  misc_feature 1..20: note = Description of Artificial Sequence: Synthetic oligonucleotide
  misc_feature 1..20: note = Target: FXN; (-) strand; PAM type: NRG; PAM sequence: CAG
  source 1..20: mol_type = other DNA
gctgaggccccctcagccaa

SEQ ID NO: 8630 - DNA, 20 bp, synthetic construct
  misc_feature 1..20: note = Description of Artificial Sequence: Synthetic oligonucleotide
  misc_feature 1..20: note = Target: FXN; (-) strand; PAM type: NRG; PAM sequence: CAG
  source 1..20: mol_type = other DNA
agagagagctgaggccccct

SEQ ID NO: 8631 - DNA, 20 bp, synthetic construct
  misc_feature 1..20: note = Description of Artificial Sequence: Synthetic oligonucleotide
  misc_feature 1..20: note = Target: FXN; (-) strand; PAM type: NRG; PAM sequence: AGG
  source 1..20: mol_type = other DNA
aaacaatgtagagagagctg

SEQ ID NO: 8632 - DNA, 20 bp, synthetic construct
  misc_feature 1..20: note = Description of Artificial Sequence: Synthetic oligonucleotide
  misc_feature 1..20: note = Target: FXN; (-) strand; PAM type: NRG; PAM sequence: GAG
  source 1..20: mol_type = other DNA
gaaacaatgtagagagagct

SEQ ID NO: 8633 - DNA, 20 bp, synthetic construct
  misc_feature 1..20: note = Description of Artificial Sequence: Synthetic oligonucleotide
  misc_feature 1..20: note = Target: FXN; (-) strand; PAM type: NRG; PAM sequence: GAG
  source 1..20: mol_type = other DNA
gtagagaaacaatgtagaga

SEQ ID NO: 8634 - DNA, 20 bp, synthetic construct
  misc_feature 1..20: note = Description of Artificial Sequence: Synthetic oligonucleotide
  misc_feature 1..20: note = Target: FXN; (-) strand; PAM type: NRG; PAM sequence: GAG
  source 1..20: mol_type = other DNA
aagtagagaaacaatgtaga

SEQ ID NO: 8635 - DNA, 20 bp, synthetic construct
  misc_feature 1..20: note = Description of Artificial Sequence: Synthetic oligonucleotide
  misc_feature 1..20: note = Target: FXN; (-) strand; PAM type: NRG; PAM sequence: GAG
  source 1..20: mol_type = other DNA
caaagtagagaaacaatgta

SEQ ID NO: 8636 - DNA, 20 bp, synthetic construct
  misc_feature 1..20: note = Description of Artificial Sequence: Synthetic oligonucleotide
  misc_feature 1..20: note = Target: FXN; (-) strand; PAM type: NRG; PAM sequence: TAG
  source 1..20: mol_type = other DNA
gccaaagtagagaaacaatg

SEQ ID NO: 8637 - DNA, 20 bp, synthetic construct
  misc_feature 1..20: note = Description of Artificial Sequence: Synthetic oligonucleotide
  misc_feature 1..20: note = Target: FXN; (-) strand; PAM type: NRG; PAM sequence: GAG
  source 1..20: mol_type = other DNA
aatccaaactagccaaagta

SEQ ID NO: 8638 - DNA, 20 bp, synthetic construct
  misc_feature 1..20: note = Description of Artificial Sequence: Synthetic oligonucleotide
  misc_feature 1..20: note = Target: FXN; (-) strand; PAM type: NRG; PAM sequence: TAG
  source 1..20: mol_type = other DNA
gaaatccaaactagccaaag

SEQ ID NO: 8639 - DNA, 20 bp, synthetic construct
  misc_feature 1..20: note = Description of Artificial Sequence: Synthetic oligonucleotide
  misc_feature 1..20: note = Target: FXN; (-) strand; PAM type: NRG; PAM sequence: AAG
  source 1..20: mol_type = other DNA
gaggaaatccaaactagcca

SEQ ID NO: 8640 - DNA, 20 bp, synthetic construct
  misc_feature 1..20: note = Description of Artificial Sequence: Synthetic oligonucleotide
  misc_feature 1..20: note = Target: FXN; (-) strand; PAM type: NRG; PAM sequence: TAG
  source 1..20: mol_type = other DNA
tgttttgaggaaatccaaac

SEQ ID NO: 8641 - DNA, 20 bp, synthetic construct
  misc_feature 1..20: note = Description of Artificial Sequence: Synthetic oligonucleotide
  misc_feature 1..20: note = Target: FXN; (-) strand; PAM type: NRG; PAM sequence: AGG
  source 1..20: mol_type = other DNA
ggaccagccatcatgttttg

SEQ ID NO: 8642 - DNA, 20 bp, synthetic construct
  misc_feature 1..20: note = Description of Artificial Sequence: Synthetic oligonucleotide
  misc_feature 1..20: note = Target: FXN; (-) strand; PAM type: NRG; PAM sequence: GAG
  source 1..20: mol_type = other DNA
aggaccagccatcatgtttt

SEQ ID NO: 8643 - DNA, 20 bp, synthetic construct
  misc_feature 1..20: note = Description of Artificial Sequence: Synthetic oligonucleotide
  misc_feature 1..20: note = Target: FXN; (-) strand; PAM type: NRG; PAM sequence: CAG
  source 1..20: mol_type = other DNA
gggatgctgacactgaggac

SEQ ID NO: 8644 - DNA, 20 bp, synthetic construct
  misc_feature 1..20: note = Description of Artificial Sequence: Synthetic oligonucleotide
  misc_feature 1..20: note = Target: FXN; (-) strand; PAM type: NRG; PAM sequence: AGG
  source 1..20: mol_type = other DNA
tttttgggatgctgacactg

SEQ ID NO: 8645 - DNA, 20 bp, synthetic construct
  misc_feature 1..20: note = Description of Artificial Sequence: Synthetic oligonucleotide
  misc_feature 1..20: note = Target: FXN; (-) strand; PAM type: NRG; PAM sequence: GAG
  source 1..20: mol_type = other DNA
ctttttgggatgctgacact

SEQ ID NO: 8646 - DNA, 20 bp, synthetic construct
  misc_feature 1..20: note = Description of Artificial Sequence: Synthetic oligonucleotide
  misc_feature 1..20: note = Target: FXN; (-) strand; PAM type: NRG; PAM sequence: GGG
  source 1..20: mol_type = other DNA
gtgtccggcattctcttttt

SEQ ID NO: 8647 - DNA, 20 bp, synthetic construct
  misc_feature 1..20: note = Description of Artificial Sequence: Synthetic oligonucleotide
  misc_feature 1..20: note = Target: FXN; (-) strand; PAM type: NRG; PAM sequence: TGG
  source 1..20: mol_type = other DNA
tgtgtccggcattctctttt

SEQ ID NO: 8648 - DNA, 20 bp, synthetic construct
  misc_feature 1..20: note = Description of Artificial Sequence: Synthetic oligonucleotide
  misc_feature 1..20: note = Target: FXN; (-) strand; PAM type: NRG; PAM sequence: CGG
  source 1..20: mol_type = other DNA
caggtgtgagccactgtgtc

SEQ ID NO: 8649 - DNA, 20 bp, synthetic construct
  misc_feature 1..20: note = Description of Artificial Sequence: Synthetic oligonucleotide
  misc_feature 1..20: note = Target: FXN; (-) strand; PAM type: NRG; PAM sequence: GAG
  source 1..20: mol_type = other DNA
attgctgaggttacaggtgt

SEQ ID NO: 8650 - DNA, 20 bp, synthetic construct
  misc_feature 1..20: note = Description of Artificial Sequence: Synthetic oligonucleotide
  misc_feature 1..20: note = Target: FXN; (-) strand; PAM type: NRG; PAM sequence: AGG
  source 1..20: mol_type = other DNA
tcccaaattgctgaggttac

SEQ ID NO: 8651 - DNA, 20 bp, synthetic construct
  misc_feature 1..20: note = Description of Artificial Sequence: Synthetic oligonucleotide
  misc_feature 1..20: note = Target: FXN; (-) strand; PAM type: NRG; PAM sequence: CAG
  source 1..20: mol_type = other DNA
ctcccaaattgctgaggtta

SEQ ID NO: 8652 - DNA, 20 bp, synthetic construct
  misc_feature 1..20: note = Description of Artificial Sequence: Synthetic oligonucleotide
  misc_feature 1..20: note = Target: FXN; (-) strand; PAM type: NRG; PAM sequence: AGG
  source 1..20: mol_type = other DNA
ctcagcctcccaaattgctg

SEQ ID NO: 8653 - DNA, 20 bp, synthetic construct
  misc_feature 1..20: note = Description of Artificial Sequence: Synthetic oligonucleotide
  misc_feature 1..20: note = Target: FXN; (-) strand; PAM type: NRG; PAM sequence: GAG
  source 1..20: mol_type = other DNA
cctcagcctcccaaattgct

SEQ ID NO: 8654 - DNA, 20 bp, synthetic construct
  misc_feature 1..20: note = Description of Artificial Sequence: Synthetic oligonucleotide
  misc_feature 1..20: note = Target: FXN; (-) strand; PAM type: NRG; PAM sequence: CAG
  source 1..20: mol_type = other DNA
actcaagcaacctcccacct

SEQ ID NO: 8655 - DNA, 20 bp, synthetic construct
  misc_feature 1..20: note = Description of Artificial Sequence: Synthetic oligonucleotide
  misc_feature 1..20: note = Target: FXN; (-) strand; PAM type: NRG; PAM sequence: AAG
  source 1..20: mol_type = other DNA
ggtcttgaactcctgaactc

SEQ ID NO: 8656 - DNA, 20 bp, synthetic construct
  misc_feature 1..20: note = Description of Artificial Sequence: Synthetic oligonucleotide
  misc_feature 1..20: note = Target: FXN; (-) strand; PAM type: NRG; PAM sequence: TGG
  source 1..20: mol_type = other DNA
tctcactatgttgcccaggc

SEQ ID NO: 8657 - DNA, 20 bp, synthetic construct
  misc_feature 1..20: note = Description of Artificial Sequence: Synthetic oligonucleotide
  misc_feature 1..20: note = Target: FXN; (-) strand; PAM type: NRG; PAM sequence: AGG
  source 1..20: mol_type = other DNA
agagtctcactatgttgccc

SEQ ID NO: 8658 - DNA, 20 bp, synthetic construct
  misc_feature 1..20: note = Description of Artificial Sequence: Synthetic oligonucleotide
  misc_feature 1..20: note = Target: FXN; (-) strand; PAM type: NRG; PAM sequence: CAG
  source 1..20: mol_type = other DNA
cagagtctcactatgttgcc

SEQ ID NO: 8659 - DNA, 20 bp, synthetic construct
  misc_feature 1..20: note = Description of Artificial Sequence: Synthetic oligonucleotide
  misc_feature 1..20: note = Target: FXN; (-) strand; PAM type: NRG; PAM sequence: GAG
  source 1..20: mol_type = other DNA
aaaaatttttggtagagaca

SEQ ID NO: 8660 - DNA, 20 bp, synthetic construct
  misc_feature 1..20: note = Description of Artificial Sequence: Synthetic oligonucleotide
  misc_feature 1..20: note = Target: FXN; (-) strand; PAM type: NRG; PAM sequence: CAG
  source 1..20: mol_type = other DNA
ttaaaaatttttggtagaga

SEQ ID NO: 8661 - DNA, 20 bp, synthetic construct
  misc_feature 1..20: note = Description of Artificial Sequence: Synthetic oligonucleotide
  misc_feature 1..20: note = Target: FXN; (-) strand; PAM type: NRG; PAM sequence: GAG
  source 1..20: mol_type = other DNA
aattttaaaaatttttggta

SEQ ID NO: 8662 - DNA, 20 bp, synthetic construct
  misc_feature 1..20: note = Description of Artificial Sequence: Synthetic oligonucleotide
  misc_feature 1..20: note = Target: FXN; (-) strand; PAM type: NRG; PAM sequence: TAG
  source 1..20: mol_type = other DNA
aaaattttaaaaatttttgg

SEQ ID NO: 8663 - DNA, 20 bp, synthetic construct
  misc_feature 1..20: note = Description of Artificial Sequence: Synthetic oligonucleotide
  misc_feature 1..20: note = Target: FXN; (-) strand; PAM type: NRG; PAM sequence: TGG
  source 1..20: mol_type = other DNA
tttaaaattttaaaaatttt

SEQ ID NO: 8664 - DNA, 20 bp, synthetic construct
  misc_feature 1..20: note = Description of Artificial Sequence: Synthetic oligonucleotide
  misc_feature 1..20: note = Target: FXN; (-) strand; PAM type: NRG; PAM sequence: TGG
  source 1..20: mol_type = other DNA
taggtgtgcataaccacacc

SEQ ID NO: 8665 - DNA, 20 bp, synthetic construct
  misc_feature 1..20: note = Description of Artificial Sequence: Synthetic oligonucleotide
  misc_feature 1..20: note = Target: FXN; (-) strand; PAM type: NRG; PAM sequence: AGG
  source 1..20: mol_type = other DNA
tcctaagtaactgggactat

SEQ ID NO: 8666 - DNA, 20 bp, synthetic construct
  misc_feature 1..20: note = Description of Artificial Sequence: Synthetic oligonucleotide
  misc_feature 1..20: note = Target: FXN; (-) strand; PAM type: NRG; PAM sequence: TAG
  source 1..20: mol_type = other DNA
ctcctaagtaactgggacta

SEQ ID NO: 8667 - DNA, 20 bp, synthetic construct
  misc_feature 1..20: note = Description of Artificial Sequence: Synthetic oligonucleotide
  misc_feature 1..20: note = Target: FXN; (-) strand; PAM type: NRG; PAM sequence: GGG
  source 1..20: mol_type = other DNA
cctcagcctcctaagtaact

SEQ ID NO: 8668 - DNA, 20 bp, synthetic construct
  misc_feature 1..20: note = Description of Artificial Sequence: Synthetic oligonucleotide
  misc_feature 1..20: note = Target: FXN; (-) strand; PAM type: NRG; PAM sequence: TGG
  source 1..20: mol_type = other DNA
gcctcagcctcctaagtaac

SEQ ID NO: 8669 - DNA, 20 bp, synthetic construct
  misc_feature 1..20: note = Description of Artificial Sequence: Synthetic oligonucleotide
  misc_feature 1..20: note = Target: FXN; (-) strand; PAM type: NRG; PAM sequence: AAG
  source 1..20: mol_type = other DNA
tcctcctgcctcagcctcct

SEQ ID NO: 8670 - DNA, 20 bp, synthetic construct
  misc_feature 1..20: note = Description of Artificial Sequence: Synthetic oligonucleotide
  misc_feature 1..20: note = Target: FXN; (-) strand; PAM type: NRG; PAM sequence: CAG
  source 1..20: mol_type = other DNA
atcaagtgatcctcctgcct

SEQ ID NO: 8671 - DNA, 20 bp, synthetic construct
  misc_feature 1..20: note = Description of Artificial Sequence: Synthetic oligonucleotide
  misc_feature 1..20: note = Target: FXN; (-) strand; PAM type: NRG; PAM sequence: AAG
  source 1..20: mol_type = other DNA
agccttgacctcctggaatc

SEQ ID NO: 8672 - DNA, 20 bp, synthetic construct
  misc_feature 1..20: note = Description of Artificial Sequence: Synthetic oligonucleotide
  misc_feature 1..20: note = Target: FXN; (-) strand; PAM type: NRG; PAM sequence: TGG
  source 1..20: mol_type = other DNA
tcacagcagccttgacctcc

SEQ ID NO: 8673 - DNA, 20 bp, synthetic construct
  misc_feature 1..20: note = Description of Artificial Sequence: Synthetic oligonucleotide
  misc_feature 1..20: note = Target: FXN; (-) strand; PAM type: NRG; PAM sequence: CAG
  source 1..20: mol_type = other DNA
ggtgtggtcatagctcacag

SEQ ID NO: 8674 - DNA, 20 bp, synthetic construct
  misc_feature 1..20: note = Description of Artificial Sequence: Synthetic oligonucleotide
  misc_feature 1..20: note = Target: FXN; (-) strand; PAM type: NRG; PAM sequence: CAG
  source 1..20: mol_type = other DNA
agtggtgtggtcatagctca

SEQ ID NO: 8675 - DNA, 20 bp, synthetic construct
  misc_feature 1..20: note = Description of Artificial Sequence: Synthetic oligonucleotide
  misc_feature 1..20: note = Target: FXN; (-) strand; PAM type: NRG; PAM sequence: TAG
  source 1..20: mol_type = other DNA
gaaatgcagtggtgtggtca

SEQ ID NO: 8676 - DNA, 20 bp, synthetic construct
  misc_feature 1..20: note = Description of Artificial Sequence: Synthetic oligonucleotide
  misc_feature 1..20: note = Target: FXN; (-) strand; PAM type: NRG; PAM sequence: TGG
  source 1..20: mol_type = other DNA
caggctgaaatgcagtggtg

SEQ ID NO: 8677 - DNA, 20 bp, synthetic construct
  misc_feature 1..20: note = Description of Artificial Sequence: Synthetic oligonucleotide
  misc_feature 1..20: note = Target: FXN; (-) strand; PAM type: NRG; PAM sequence: TGG
  source 1..20: mol_type = other DNA
ttacccaggctgaaatgcag

SEQ ID NO: 8678 - DNA, 20 bp, synthetic construct
  misc_feature 1..20: note = Description of Artificial Sequence: Synthetic oligonucleotide
  misc_feature 1..20: note = Target: FXN; (-) strand; PAM type: NRG; PAM sequence: CAG
  source 1..20: mol_type = other DNA
ctgttacccaggctgaaatg

SEQ ID NO: 8679 - DNA, 20 bp, synthetic construct
  misc_feature 1..20: note = Description of Artificial Sequence: Synthetic oligonucleotide
  misc_feature 1..20: note = Target: FXN; (-) strand; PAM type: NRG; PAM sequence: AGG
  source 1..20: mol_type = other DNA
agagtctcattctgttaccc

SEQ ID NO: 8680 - DNA, 20 bp, synthetic construct
  misc_feature 1..20: note = Description of Artificial Sequence: Synthetic oligonucleotide
  misc_feature 1..20: note = Target: FXN; (-) strand; PAM type: NRG; PAM sequence: CAG
  source 1..20: mol_type = other DNA
cagagtctcattctgttacc

SEQ ID NO: 8681 - DNA, 20 bp, synthetic construct
  misc_feature 1..20: note = Description of Artificial Sequence: Synthetic oligonucleotide
  misc_feature 1..20: note = Target: FXN; (-) strand; PAM type: NRG; PAM sequence: GAG
  source 1..20: mol_type = other DNA
gtttttgtttgtttgaaaca

SEQ ID NO: 8682 - DNA, 20 bp, synthetic construct
  misc_feature 1..20: note = Description of Artificial Sequence: Synthetic oligonucleotide
  misc_feature 1..20: note = Target: FXN; (-) strand; PAM type: NRG; PAM sequence: CAG
  source 1..20: mol_type = other DNA
gggtttttgtttgtttgaaa

SEQ ID NO: 8683 - DNA, 20 bp, synthetic construct
  misc_feature 1..20: note = Description of Artificial Sequence: Synthetic oligonucleotide
  misc_feature 1..20: note = Target: FXN; (-) strand; PAM type: NRG; PAM sequence: GGG
  source 1..20: mol_type = other DNA
tctctctttttttttttttt

SEQ ID NO: 8684 - DNA, 20 bp, synthetic construct
  misc_feature 1..20: note = Description of Artificial Sequence: Synthetic oligonucleotide
  misc_feature 1..20: note = Target: FXN; (-) strand; PAM type: NRG; PAM sequence: TGG
  source 1..20: mol_type = other DNA
ctctctcttttttttttttt

SEQ ID NO: 8685 - DNA, 20 bp, synthetic construct
  misc_feature 1..20: note = Description of Artificial Sequence: Synthetic oligonucleotide
  misc_feature 1..20: note = Target: FXN; (-) strand; PAM type: NRG; PAM sequence: AGG
  source 1..20: mol_type = other DNA
gcttggtgacttccaagtcc

SEQ ID NO: 8686 - DNA, 20 bp, synthetic construct
  misc_feature 1..20: note = Description of Artificial Sequence: Synthetic oligonucleotide
  misc_feature 1..20: note = Target: FXN; (-) strand; PAM type: NRG; PAM sequence: CAG
  source 1..20: mol_type = other DNA
tgcttggtgacttccaagtc

SEQ ID NO: 8687 - DNA, 20 bp, synthetic construct
  misc_feature 1..20: note = Description of Artificial Sequence: Synthetic oligonucleotide
  misc_feature 1..20: note = Target: FXN; (-) strand; PAM type: NRG; PAM sequence: AAG
  source 1..20: mol_type = other DNA
agtgctgcttggtgacttcc

SEQ ID NO: 8688 - DNA, 20 bp, synthetic construct
  misc_feature 1..20: note = Description of Artificial Sequence: Synthetic oligonucleotide
  misc_feature 1..20: note = Target: FXN; (-) strand; PAM type: NRG; PAM sequence: TGG
  source 1..20: mol_type = other DNA
ggtactgcagaagtgctgct

SEQ ID NO: 8689 - DNA, 20 bp, synthetic construct
  misc_feature 1..20: note = Description of Artificial Sequence: Synthetic oligonucleotide
  misc_feature 1..20: note = Target: FXN; (-) strand; PAM type: NRG; PAM sequence: AAG
  source 1..20: mol_type = other DNA
caaccaacagggtactgcag

SEQ ID NO: 8690 - DNA, 20 bp, synthetic construct
  misc_feature 1..20: note = Description of Artificial Sequence: Synthetic oligonucleotide
  misc_feature 1..20: note = Target: FXN; (-) strand; PAM type: NRG; PAM sequence: CAG
  source 1..20: mol_type = other DNA
ttccaaccaacagggtactg

SEQ ID NO: 8691 - DNA, 20 bp, synthetic construct
  misc_feature 1..20: note = Description of Artificial Sequence: Synthetic oligonucleotide
  misc_feature 1..20: note = Target: FXN; (-) strand; PAM type: NRG; PAM sequence: GGG
  source 1..20: mol_type = other DNA
tacaactattccaaccaaca

SEQ ID NO: 8692 - DNA, 20 bp, synthetic construct
  misc_feature 1..20: note = Description of Artificial Sequence: Synthetic oligonucleotide
  misc_feature 1..20: note = Target: FXN; (-) strand; PAM type: NRG; PAM sequence: AGG
  source 1..20: mol_type = other DNA
ctacaactattccaaccaac

SEQ ID NO: 8693 - DNA, 20 bp, synthetic construct
  misc_feature 1..20: note = Description of Artificial Sequence: Synthetic oligonucleotide
  misc_feature 1..20: note = Target: FXN; (-) strand; PAM type: NRG; PAM sequence: CAG
  source 1..20: mol_type = other DNA
gctacaactattccaaccaa

SEQ ID NO: 8694 - DNA, 20 bp, synthetic construct
  misc_feature 1..20: note = Description of Artificial Sequence: Synthetic oligonucleotide
  misc_feature 1..20: note = Target: FXN; (-) strand; PAM type: NRG; PAM sequence: GGG
  source 1..20: mol_type = other DNA
ctcccttcgaattcgggttt

SEQ ID NO: 8695 - DNA, 20 bp, synthetic construct
  misc_feature 1..20: note = Description of Artificial Sequence: Synthetic oligonucleotide
  misc_feature 1..20: note = Target: FXN; (-) strand; PAM type: NRG; PAM sequence: TGG
  source 1..20: mol_type = other DNA
cctcccttcgaattcgggtt

SEQ ID NO: 8696 - DNA, 20 bp, synthetic construct
  misc_feature 1..20: note = Description of Artificial Sequence: Synthetic oligonucleotide
  misc_feature 1..20: note = Target: FXN; (-) strand; PAM type: NRG; PAM sequence: GGG
  source 1..20: mol_type = other DNA
attctcctcccttcgaattc

SEQ ID NO: 8697 - DNA, 20 bp, synthetic construct
  misc_feature 1..20: note = Description of Artificial Sequence: Synthetic oligonucleotide
  misc_feature 1..20: note = Target: FXN; (-) strand; PAM type: NRG; PAM sequence: CGG
  source 1..20: mol_type = other DNA
tattctcctcccttcgaatt

SEQ ID NO: 8698 - DNA, 20 bp, synthetic construct
  misc_feature 1..20: note = Description of Artificial Sequence: Synthetic oligonucleotide
  misc_feature 1..20: note = Target: FXN; (-) strand; PAM type: NRG; PAM sequence: GGG
  source 1..20: mol_type = other DNA
tttgacattcctgtcaccca

SEQ ID NO: 8699 - DNA, 20 bp, synthetic construct
  misc_feature 1..20: note = Description of Artificial Sequence: Synthetic oligonucleotide
  misc_feature 1..20: note = Target: FXN; (-) strand; PAM type: NRG; PAM sequence: AGG
  source 1..20: mol_type = other DNA
ctttgacattcctgtcaccc

SEQ ID NO: 8700 - DNA, 20 bp, synthetic construct
  misc_feature 1..20: note = Description of Artificial Sequence: Synthetic oligonucleotide
  misc_feature 1..20: note = Target: FXN; (-) strand; PAM type: NRG; PAM sequence: CAG
  source 1..20: mol_type = other DNA
actttgacattcctgtcacc

SEQ ID NO: 8701 - DNA, 20 bp, synthetic construct
  misc_feature 1..20: note = Description of Artificial Sequence: Synthetic oligonucleotide
  misc_feature 1..20: note = Target: FXN; (-) strand; PAM type: NRG; PAM sequence: GGG
  source 1..20: mol_type = other DNA
tcacatgtcatatgctgttt

SEQ ID NO: 8702 - DNA, 20 bp, synthetic construct
  misc_feature 1..20: note = Description of Artificial Sequence: Synthetic oligonucleotide
  misc_feature 1..20: note = Target: FXN; (-) strand; PAM type: NRG; PAM sequence: TGG
  source 1..20: mol_type = other DNA
gtcacatgtcatatgctgtt

SEQ ID NO: 8703 - DNA, 20 bp, synthetic construct
  misc_feature 1..20: note = Description of Artificial Sequence: Synthetic oligonucleotide
  misc_feature 1..20: note = Target: FXN; (-) strand; PAM type: NRG; PAM sequence: AGG
  source 1..20: mol_type = other DNA
aagattggatcttccaaaga

SEQ ID NO: 8704 - DNA, 20 bp, synthetic construct
  misc_feature 1..20: note = Description of Artificial Sequence: Synthetic oligonucleotide
  misc_feature 1..20: note = Target: FXN; (-) strand; PAM type: NRG; PAM sequence: AAG
  source 1..20: mol_type = other DNA
gaagattggatcttccaaag

SEQ ID NO: 8705 - DNA, 20 bp, synthetic construct
  misc_feature 1..20: note = Description of Artificial Sequence: Synthetic oligonucleotide
  misc_feature 1..20: note = Target: FXN; (-) strand; PAM type: NRG; PAM sequence: AAG
  source 1..20: mol_type = other DNA
atggaagattggatcttcca

SEQ ID NO: 8706 - DNA, 20 bp, synthetic construct
  misc_feature 1..20: note = Description of Artificial Sequence: Synthetic oligonucleotide
  misc_feature 1..20: note = Target: FXN; (-) strand; PAM type: NRG; PAM sequence: TGG
  source 1..20: mol_type = other DNA
ctttgcctggtatggaagat

SEQ ID NO: 8707 - DNA, 20 bp, synthetic construct
  misc_feature 1..20: note = Description of Artificial Sequence: Synthetic oligonucleotide
  misc_feature 1..20: note = Target: FXN; (-) strand; PAM type: NRG; PAM sequence: AAG
  source 1..20: mol_type = other DNA
catccctttgcctggtatgg

SEQ ID NO: 8708 - DNA, 20 bp, synthetic construct
  misc_feature 1..20: note = Description of Artificial Sequence: Synthetic oligonucleotide
  misc_feature 1..20: note = Target: FXN; (-) strand; PAM type: NRG; PAM sequence: TGG
  source 1..20: mol_type = other DNA
ttccatccctttgcctggta

SEQ ID NO: 8709 - DNA, 20 bp, synthetic construct
  misc_feature 1..20: note = Description of Artificial Sequence: Synthetic oligonucleotide
  misc_feature 1..20: note = Target: FXN; (-) strand; PAM type: NRG; PAM sequence: TGG
  source 1..20: mol_type = other DNA
tagtcttccatccctttgcc

SEQ ID NO: 8710 - DNA, 20 bp, synthetic construct
  misc_feature 1..20: note = Description of Artificial Sequence: Synthetic oligonucleotide
  misc_feature 1..20: note = Target: FXN; (-) strand; PAM type: NRG; PAM sequence: TAG
  source 1..20: mol_type = other DNA
ctatccctcatgttgttcct

SEQ ID NO: 8711 - DNA, 20 bp, synthetic construct
  misc_feature 1..20: note = Description of Artificial Sequence: Synthetic oligonucleotide
  misc_feature 1..20: note = Target: FXN; (-) strand; PAM type: NRG; PAM sequence: TGG
  source 1..20: mol_type = other DNA
agtgatgctttttccctctc

SEQ ID NO: 8712 - DNA, 20 bp, synthetic construct
  misc_feature 1..20: note = Description of Artificial Sequence: Synthetic oligonucleotide
  misc_feature 1..20: note = Target: FXN; (-) strand; PAM type: NRG; PAM sequence: AAG
  source 1..20: mol_type = other DNA
ctatttgtagttcctagaac

SEQ ID NO: 8713 - DNA, 20 bp, synthetic construct
  misc_feature 1..20: note = Description of Artificial Sequence: Synthetic oligonucleotide
  misc_feature 1..20: note = Target: FXN; (-) strand; PAM type: NRG; PAM sequence: TAG
  source 1..20: mol_type = other DNA
ttcaagctatttgtagttcc

SEQ ID NO: 8714 - DNA, 20 bp, synthetic construct
  misc_feature 1..20: note = Description of Artificial Sequence: Synthetic oligonucleotide
  misc_feature 1..20: note = Target: FXN; (-) strand; PAM type: NRG; PAM sequence: TAG
  source 1..20: mol_type = other DNA
ttgcttcttcaagctatttg

SEQ ID NO: 8715 - DNA, 20 bp, synthetic construct
  misc_feature 1..20: note = Description of Artificial Sequence: Synthetic oligonucleotide
  misc_feature 1..20: note = Target: FXN; (-) strand; PAM type: NRG; PAM sequence: AAG
  source 1..20: mol_type = other DNA
ctagacatctttgcttcttc

SEQ ID NO: 8716 - DNA, 20 bp, synthetic construct
  misc_feature 1..20: note = Description of Artificial Sequence: Synthetic oligonucleotide
  misc_feature 1..20: note = Target: FXN; (-) strand; PAM type: NRG; PAM sequence: TAG
  source 1..20: mol_type = other DNA
tctgcatattgggaggcatc

SEQ ID NO: 8717 - DNA, 20 bp, synthetic construct
  misc_feature 1..20: note = Description of Artificial Sequence: Synthetic oligonucleotide
  misc_feature 1..20: note = Target: FXN; (-) strand; PAM type: NRG; PAM sequence: AGG
  source 1..20: mol_type = other DNA
accccactctgcatattggg

SEQ ID NO: 8718 - DNA, 20 bp, synthetic construct
  misc_feature 1..20: note = Description of Artificial Sequence: Synthetic oligonucleotide
  misc_feature 1..20: note = Target: FXN; (-) strand; PAM type: NRG; PAM sequence: GAG
  source 1..20: mol_type = other DNA
caccccactctgcatattgg

SEQ ID NO: 8719 - DNA, 20 bp, synthetic construct
  misc_feature 1..20: note = Description of Artificial Sequence: Synthetic oligonucleotide
  misc_feature 1..20: note = Target: FXN; (-) strand; PAM type: NRG; PAM sequence: GGG
  source 1..20: mol_type = other DNA
tacaccccactctgcatatt

SEQ ID NO: 8720 - DNA, 20 bp, synthetic construct
  misc_feature 1..20: note = Description of Artificial Sequence: Synthetic oligonucleotide
  misc_feature 1..20: note = Target: FXN; (-) strand; PAM type: NRG; PAM sequence: TGG
  source 1..20: mol_type = other DNA
gtacaccccactctgcatat

SEQ ID NO: 8721 - DNA, 20 bp, synthetic construct
  misc_feature 1..20: note = Description of Artificial Sequence: Synthetic oligonucleotide
  misc_feature 1..20: note = Target: FXN; (-) strand; PAM type: NRG; PAM sequence: CAG
  source 1..20: mol_type = other DNA
cttgcccaccttagctctcc

SEQ ID NO: 8722 - DNA, 20 bp, synthetic construct
  misc_feature 1..20: note = Description of Artificial Sequence: Synthetic oligonucleotide
  misc_feature 1..20: note = Target: FXN; (-) strand; PAM type: NRG; PAM sequence: TAG
  source 1..20: mol_type = other DNA
ggaagctctcttgcccacct

SEQ ID NO: 8723 - DNA, 20 bp, synthetic construct
  misc_feature 1..20: note = Description of Artificial Sequence: Synthetic oligonucleotide
  misc_feature 1..20: note = Target: FXN; (-) strand; PAM type: NRG; PAM sequence: AAG
  source 1..20: mol_type = other DNA
ctttcttagcatgacagagg

SEQ ID NO: 8724 - DNA, 20 bp, synthetic construct
  misc_feature 1..20: note = Description of Artificial Sequence: Synthetic oligonucleotide
  misc_feature 1..20: note = Target: FXN; (-) strand; PAM type: NRG; PAM sequence: AGG
  source 1..20: mol_type = other DNA
caactttcttagcatgacag

SEQ ID NO: 8725 - DNA, 20 bp, synthetic construct
  misc_feature 1..20: note = Description of Artificial Sequence: Synthetic oligonucleotide
  misc_feature 1..20: note = Target: FXN; (-) strand; PAM type: NRG; PAM sequence: GAG
  source 1..20: mol_type = other DNA
ccaactttcttagcatgaca

SEQ ID NO: 8726 - DNA, 20 bp, synthetic construct
  misc_feature 1..20: note = Description of Artificial Sequence: Synthetic oligonucleotide
  misc_feature 1..20: note = Target: FXN; (-) strand; PAM type: NRG; PAM sequence: CAG
  source 1..20: mol_type = other DNA
ttccaactttcttagcatga

SEQ ID NO: 8727 - DNA, 20 bp, synthetic construct
  misc_feature 1..20: note = Description of Artificial Sequence: Synthetic oligonucleotide
  misc_feature 1..20: note = Target: FXN; (-) strand; PAM type: NRG; PAM sequence: TAG
  source 1..20: mol_type = other DNA
aagataaattccaactttct

SEQ ID NO: 8728 - DNA, 20 bp, synthetic construct
  misc_feature 1..20: note = Description of Artificial Sequence: Synthetic oligonucleotide
  misc_feature 1..20: note = Target: FXN; (-) strand; PAM type: NRG; PAM sequence: AAG
  source 1..20: mol_type = other DNA
cctctgctttcaccaccatc

SEQ ID NO: 8729 - DNA, 20 bp, synthetic construct
  misc_feature 1..20: note = Description of Artificial Sequence: Synthetic oligonucleotide
  misc_feature 1..20: note = Target: FXN; (-) strand; PAM type: NRG; PAM sequence: TAG
  source 1..20: mol_type = other DNA
ctcaaatgtgaatctaacca

SEQ ID NO: 8730 - DNA, 20 bp, synthetic construct
  misc_feature 1..20: note = Description of Artificial Sequence: Synthetic oligonucleotide
  misc_feature 1..20: note = Target: FXN; (-) strand; PAM type: NRG; PAM sequence: GGG
  source 1..20: mol_type = other DNA
gagttaagccagtgtcacca

SEQ ID NO: 8731 - DNA, 20 bp, synthetic construct
  misc_feature 1..20: note = Description of Artificial Sequence: Synthetic oligonucleotide
  misc_feature 1..20: note = Target: FXN; (-) strand; PAM type: NRG; PAM sequence: AGG
  source 1..20: mol_type = other DNA
tgagttaagccagtgtcacc

SEQ ID NO: 8732 - DNA, 20 bp, synthetic construct
  misc_feature 1..20: note = Description of Artificial Sequence: Synthetic oligonucleotide
  misc_feature 1..20: note = Target: FXN; (-) strand; PAM type: NRG; PAM sequence: CAG
  source 1..20: mol_type = other DNA
gtgagttaagccagtgtcac

SEQ ID NO: 8733 - DNA, 20 bp, synthetic construct
  misc_feature 1..20: note = Description of Artificial Sequence: Synthetic oligonucleotide
  misc_feature 1..20: note = Target: FXN; (-) strand; PAM type: NRG; PAM sequence: CAG
  source 1..20: mol_type = other DNA
ggcaaaattgtgagttaagc

SEQ ID NO: 8734 - DNA, 20 bp, synthetic construct
  misc_feature 1..20: note = Description of Artificial Sequence: Synthetic oligonucleotide
  misc_feature 1..20: note = Target: FXN; (-) strand; PAM type: NRG; PAM sequence: AAG
  source 1..20: mol_type = other DNA
cttgggcaaaattgtgagtt

SEQ ID NO: 8735 - DNA, 20 bp, synthetic construct
  misc_feature 1..20: note = Description of Artificial Sequence: Synthetic oligonucleotide
  misc_feature 1..20: note = Target: FXN; (-) strand; PAM type: NRG; PAM sequence: GAG
  source 1..20: mol_type = other DNA
taggccttgggcaaaattgt

SEQ ID NO: 8736 - DNA, 20 bp, synthetic construct
  misc_feature 1..20: note = Description of Artificial Sequence: Synthetic oligonucleotide
  misc_feature 1..20: note = Target: FXN; (-) strand; PAM type: NRG; PAM sequence: GGG
  source 1..20: mol_type = other DNA
actgtggtagcataggcctt

SEQ ID NO: 8737 - DNA, 20 bp, synthetic construct
  misc_feature 1..20: note = Description of Artificial Sequence: Synthetic oligonucleotide
  misc_feature 1..20: note = Target: FXN; (-) strand; PAM type: NRG; PAM sequence: TGG
  source 1..20: mol_type = other DNA
cactgtggtagcataggcct

SEQ ID NO: 8738 - DNA, 20 bp, synthetic construct
  misc_feature 1..20: note = Description of Artificial Sequence: Synthetic oligonucleotide
  misc_feature 1..20: note = Target: FXN; (-) strand; PAM type: NRG; PAM sequence: AGG
  source 1..20: mol_type = other DNA
cagaagcactgtggtagcat

SEQ ID NO: 8739 - DNA, 20 bp, synthetic construct
  misc_feature 1..20: note = Description of Artificial Sequence: Synthetic oligonucleotide
  misc_feature 1..20: note = Target: FXN; (-) strand; PAM type: NRG; PAM sequence: TAG
  source 1..20: mol_type = other DNA
tcagaagcactgtggtagca

SEQ ID NO: 8740 - DNA, 20 bp, synthetic construct
  misc_feature 1..20: note = Description of Artificial Sequence: Synthetic oligonucleotide
  misc_feature 1..20: note = Target: FXN; (-) strand; PAM type: NRG; PAM sequence: TAG
  source 1..20: mol_type = other DNA
aagtttcagaagcactgtgg

SEQ ID NO: 8741 - DNA, 20 bp, synthetic construct
  misc_feature 1..20: note = Description of Artificial Sequence: Synthetic oligonucleotide
  misc_feature 1..20: note = Target: FXN; (-) strand; PAM type: NRG; PAM sequence: TGG
  source 1..20: mol_type = other DNA
ttaaagtttcagaagcactg

SEQ ID NO: 8742 - DNA, 20 bp, synthetic construct
  misc_feature 1..20: note = Description of Artificial Sequence: Synthetic oligonucleotide
  misc_feature 1..20: note = Target: FXN; (-) strand; PAM type: NRG; PAM sequence: AAG
  source 1..20: mol_type = other DNA
aatgtgctttaaagtttcag

SEQ ID NO: 8743 - DNA, 20 bp, synthetic construct
  misc_feature 1..20: note = Description of Artificial Sequence: Synthetic oligonucleotide
  misc_feature 1..20: note = Target: FXN; (-) strand; PAM type: NRG; PAM sequence: CAG
  source 1..20: mol_type = other DNA
tctaatgtgctttaaagttt

SEQ ID NO: 8744 - DNA, 20 bp, synthetic construct
  misc_feature 1..20: note = Description of Artificial Sequence: Synthetic oligonucleotide
  misc_feature 1..20: note = Target: FXN; (-) strand; PAM type: NRG; PAM sequence: AAG
  source 1..20: mol_type = other DNA
ggtgattctaatgtgcttta

SEQ ID NO: 8745 - DNA, 20 bp, synthetic construct
  misc_feature 1..20: note = Description of Artificial Sequence: Synthetic oligonucleotide
  misc_feature 1..20: note = Target: FXN; (-) strand; PAM type: NRG; PAM sequence: AGG
  source 1..20: mol_type = other DNA
catggtttaacaagacctcc

SEQ ID NO: 8746 - DNA, 20 bp, synthetic construct
  misc_feature 1..20: note = Description of Artificial Sequence: Synthetic oligonucleotide
  misc_feature 1..20: note = Target: FXN; (-) strand; PAM type: NRG; PAM sequence: CAG
  source 1..20: mol_type = other DNA
ccatggtttaacaagacctc

SEQ ID NO: 8747 - DNA, 20 bp, synthetic construct
  misc_feature 1..20: note = Description of Artificial Sequence: Synthetic oligonucleotide
  misc_feature 1..20: note = Target: FXN; (-) strand; PAM type: NRG; PAM sequence: AAG
  source 1..20: mol_type = other DNA
ccagcaatccatggtttaac

SEQ ID NO: 8748 - DNA, 20 bp, synthetic construct
  misc_feature 1..20: note = Description of Artificial Sequence: Synthetic oligonucleotide
  misc_feature 1..20: note = Target: FXN; (-) strand; PAM type: NRG; PAM sequence: TGG
  source 1..20: mol_type = other DNA
tttcaaggcccagcaatcca

SEQ ID NO: 8749 - DNA, 20 bp, synthetic construct
  misc_feature 1..20: note = Description of Artificial Sequence: Synthetic oligonucleotide
  misc_feature 1..20: note = Target: FXN; (-) strand; PAM type: NRG; PAM sequence: CAG
  source 1..20: mol_type = other DNA
atctctggggtttcaaggcc

SEQ ID NO: 8750 - DNA, 20 bp, synthetic construct
  misc_feature 1..20: note = Description of Artificial Sequence: Synthetic oligonucleotide
  misc_feature 1..20: note = Target: FXN; (-) strand; PAM type: NRG; PAM sequence: AGG
  source 1..20: mol_type = other DNA
tcagaatctctggggtttca

SEQ ID NO: 8751 - DNA, 20 bp, synthetic construct
  misc_feature 1..20: note = Description of Artificial Sequence: Synthetic oligonucleotide
  misc_feature 1..20: note = Target: FXN; (-) strand; PAM type: NRG; PAM sequence: AAG
  source 1..20: mol_type = other DNA
atcagaatctctggggtttc

SEQ ID NO: 8752 - DNA, 20 bp, synthetic construct
  misc_feature 1..20: note = Description of Artificial Sequence: Synthetic oligonucleotide
  misc_feature 1..20: note = Target: FXN; (-) strand; PAM type: NRG; PAM sequence: GGG
  source 1..20: mol_type = other DNA
ctactgaatcagaatctctg

SEQ ID NO: 8753 - DNA, 20 bp, synthetic construct
  misc_feature 1..20: note = Description of Artificial Sequence: Synthetic oligonucleotide
  misc_feature 1..20: note = Target: FXN; (-) strand; PAM type: NRG; PAM sequence: GGG
  source 1..20: mol_type = other DNA
tctactgaatcagaatctct

SEQ ID NO: 8754 - DNA, 20 bp, synthetic construct
  misc_feature 1..20: note = Description of Artificial Sequence: Synthetic oligonucleotide
  misc_feature 1..20: note = Target: FXN; (-) strand; PAM type: NRG; PAM sequence: TGG
  source 1..20: mol_type = other DNA
atctactgaatcagaatctc

SEQ ID NO: 8755 - DNA, 20 bp, synthetic construct
  misc_feature 1..20: note = Description of Artificial Sequence: Synthetic oligonucleotide
  misc_feature 1..20: note = Target: FXN; (-) strand; PAM type: NRG; PAM sequence: CAG
  source 1..20: mol_type = other DNA
ctattctcgatctactgaat

SEQ ID NO: 8756 - DNA, 20 bp, synthetic construct
  misc_feature 1..20: note = Description of Artificial Sequence: Synthetic oligonucleotide
  misc_feature 1..20: note = Target: FXN; (-) strand; PAM type: NRG; PAM sequence: AGG
  source 1..20: mol_type = other DNA
tgttagaaatacaaattctc

SEQ ID NO: 8757 - DNA, 20 bp, synthetic construct
  misc_feature 1..20: note = Description of Artificial Sequence: Synthetic oligonucleotide
  misc_feature 1..20: note = Target: FXN; (-) strand; PAM type: NRG; PAM sequence: CAG
  source 1..20: mol_type = other DNA
ttgttagaaatacaaattct

SEQ ID NO: 8758 - DNA, 20 bp, synthetic construct
  misc_feature 1..20: note = Description of Artificial Sequence: Synthetic oligonucleotide
  misc_feature 1..20: note = Target: FXN; (-) strand; PAM type: NRG; PAM sequence: TAG
  source 1..20: mol_type = other DNA
agcatcacctggaaacttgt

SEQ ID NO: 8759 - DNA, 20 bp, synthetic construct
  misc_feature 1..20: note = Description of Artificial Sequence: Synthetic oligonucleotide
  misc_feature 1..20: note = Target: FXN; (-) strand; PAM type: NRG; PAM sequence: TGG
  source 1..20: mol_type = other DNA
ccagcagcctcagcatcacc

SEQ ID NO: 8760 - DNA, 20 bp, synthetic construct
  misc_feature 1..20: note = Description of Artificial Sequence: Synthetic oligonucleotide
  misc_feature 1..20: note = Target: FXN; (-) strand; PAM type: NRG; PAM sequence: CAG
  source 1..20: mol_type = other DNA
ggtcgctgggccagcagcct

SEQ ID NO: 8761 - DNA, 20 bp, synthetic construct
  misc_feature 1..20: note = Description of Artificial Sequence: Synthetic oligonucleotide
  misc_feature 1..20: note = Target: FXN; (-) strand; PAM type: NRG; PAM sequence: CAG
  source 1..20: mol_type = other DNA
aaatgtggtcgctgggccag

SEQ ID NO: 8762 - DNA, 20 bp, synthetic construct
  misc_feature 1..20: note = Description of Artificial Sequence: Synthetic oligonucleotide
  misc_feature 1..20: note = Target: FXN; (-) strand; PAM type: NRG; PAM sequence: CAG
  source 1..20: mol_type = other DNA
atcaaatgtggtcgctgggc

SEQ ID NO: 8763 - DNA, 20 bp, synthetic construct
  misc_feature 1..20: note = Description of Artificial Sequence: Synthetic oligonucleotide
  misc_feature 1..20: note = Target: FXN; (-) strand; PAM type: NRG; PAM sequence: GGG
  source 1..20: mol_type = other DNA
gattatcaaatgtggtcgct

SEQ ID NO: 8764 - DNA, 20 bp, synthetic construct
  misc_feature 1..20: note = Description of Artificial Sequence: Synthetic oligonucleotide
  misc_feature 1..20: note = Target: FXN; (-) strand; PAM type: NRG; PAM sequence: TGG
  source 1..20: mol_type = other DNA
tgattatcaaatgtggtcgc

SEQ ID NO: 8765 - DNA, 20 bp, synthetic construct
  misc_feature 1..20: note = Description of Artificial Sequence: Synthetic oligonucleotide
  misc_feature 1..20: note = Target: FXN; (-) strand; PAM type: NRG; PAM sequence: TGG
  source 1..20: mol_type = other DNA
agggctatgattatcaaatg

SEQ ID NO: 8766 - DNA, 20 bp, synthetic construct
  misc_feature 1..20: note = Description of Artificial Sequence: Synthetic oligonucleotide
  misc_feature 1..20: note = Target: FXN; (-) strand; PAM type: NRG; PAM sequence: GGG
  source 1..20: mol_type = other DNA
ttttgataggatttatcaga

SEQ ID NO: 8767 - DNA, 20 bp, synthetic construct
  misc_feature 1..20: note = Description of Artificial Sequence: Synthetic oligonucleotide
  misc_feature 1..20: note = Target: FXN; (-) strand; PAM type: NRG; PAM sequence: AGG
  source 1..20: mol_type = other DNA
attttgataggatttatcag

SEQ ID NO: 8768 - DNA, 20 bp, synthetic construct
  misc_feature 1..20: note = Description of Artificial Sequence: Synthetic oligonucleotide
  misc_feature 1..20: note = Target: FXN; (-) strand; PAM type: NRG; PAM sequence: GAG
  source 1..20: mol_type = other DNA
tattttgataggatttatca

SEQ ID NO: 8769 - DNA, 20 bp, synthetic construct
  misc_feature 1..20: note = Description of Artificial Sequence: Synthetic oligonucleotide
  misc_feature 1..20: note = Target: FXN; (-) strand; PAM type: NRG; PAM sequence: CAG
  source 1..20: mol_type = other DNA
gatattttgataggatttat

SEQ ID NO: 8770 - DNA, 20 bp, synthetic construct
  misc_feature 1..20: note = Description of Artificial Sequence: Synthetic oligonucleotide
  misc_feature 1..20: note = Target: FXN; (-) strand; PAM type: NRG; PAM sequence: AGG
  source 1..20: mol_type = other DNA
tgccattaggatattttgat

SEQ ID NO: 8771 - DNA, 20 bp, synthetic construct
  misc_feature 1..20: note = Description of Artificial Sequence: Synthetic oligonucleotide
  misc_feature 1..20: note = Target: FXN; (-) strand; PAM type: NRG; PAM sequence: TAG
  source 1..20: mol_type = other DNA
ctgccattaggatattttga

SEQ ID NO: 8772 - DNA, 20 bp, synthetic construct
  misc_feature 1..20: note = Description of Artificial Sequence: Synthetic oligonucleotide
  misc_feature 1..20: note = Target: FXN; (-) strand; PAM type: NRG; PAM sequence: AGG
  source 1..20: mol_type = other DNA
aattcccttgctctgccatt

SEQ ID NO: 8773 - DNA, 20 bp, synthetic construct
  misc_feature 1..20: note = Description of Artificial Sequence: Synthetic oligonucleotide
  misc_feature 1..20: note = Target: FXN; (-) strand; PAM type: NRG; PAM sequence: TAG
  source 1..20: mol_type = other DNA
gaattcccttgctctgccat

SEQ ID NO: 8774 - DNA, 20 bp, synthetic construct
  misc_feature 1..20: note = Description of Artificial Sequence: Synthetic oligonucleotide
  misc_feature 1..20: note = Target: FXN; (-) strand; PAM type: NRG; PAM sequence: CAG
  source 1..20: mol_type = other DNA
tgggtaggggaggatatcac

SEQ ID NO: 8775 - DNA, 20 bp, synthetic construct
  misc_feature 1..20: note = Description of Artificial Sequence: Synthetic oligonucleotide
  misc_feature 1..20: note = Target: FXN; (-) strand; PAM type: NRG; PAM sequence: AGG
  source 1..20: mol_type = other DNA
tgtcaggttatgggtagggg

SEQ ID NO: 8776 - DNA, 20 bp, synthetic construct
  misc_feature 1..20: note = Description of Artificial Sequence: Synthetic oligonucleotide
  misc_feature 1..20: note = Target: FXN; (-) strand; PAM type: NRG; PAM sequence: GAG
  source 1..20: mol_type = other DNA
ctgtcaggttatgggtaggg

SEQ ID NO: 8777 - DNA, 20 bp, synthetic construct
  misc_feature 1..20: note = Description of Artificial Sequence: Synthetic oligonucleotide
  misc_feature 1..20: note = Target: FXN; (-) strand; PAM type: NRG; PAM sequence: GGG
  source 1..20: mol_type = other DNA
agctgtcaggttatgggtag

SEQ ID NO: 8778 - DNA, 20 bp, synthetic construct
  misc_feature 1..20: note = Description of Artificial Sequence: Synthetic oligonucleotide
  misc_feature 1..20: note = Target: FXN; (-) strand; PAM type: NRG; PAM sequence: GGG
  source 1..20: mol_type = other DNA
tagctgtcaggttatgggta

SEQ ID NO: 8779 - DNA, 20 bp, synthetic construct
  misc_feature 1..20: note = Description of Artificial Sequence: Synthetic oligonucleotide
  misc_feature 1..20: note = Target: FXN; (-) strand; PAM type: NRG; PAM sequence: AGG
  source 1..20: mol_type = other DNA
atagctgtcaggttatgggt

SEQ ID NO: 8780 - DNA, 20 bp, synthetic construct
  misc_feature 1..20: note = Description of Artificial Sequence: Synthetic oligonucleotide
  misc_feature 1..20: note = Target: FXN; (-) strand; PAM type: NRG; PAM sequence: TAG
  source 1..20: mol_type = other DNA
aatagctgtcaggttatggg

SEQ ID NO: 8781 - DNA, 20 bp, synthetic construct
  misc_feature 1..20: note = Description of Artificial Sequence: Synthetic oligonucleotide
  misc_feature 1..20: note = Target: FXN; (-) strand; PAM type: NRG; PAM sequence: GGG
  source 1..20: mol_type = other DNA
cctaatagctgtcaggttat

SEQ ID NO: 8782 - DNA, 20 bp, synthetic construct
  misc_feature 1..20: note = Description of Artificial Sequence: Synthetic oligonucleotide
  misc_feature 1..20: note = Target: FXN; (-) strand; PAM type: NRG; PAM sequence: TGG
  source 1..20: mol_type = other DNA
tcctaatagctgtcaggtta

SEQ ID NO: 8783 - DNA, 20 bp, synthetic construct
  misc_feature 1..20: note = Description of Artificial Sequence: Synthetic oligonucleotide
  misc_feature 1..20: note = Target: FXN; (-) strand; PAM type: NRG; PAM sequence: AGG
  source 1..20: mol_type = other DNA
ggcagatcctaatagctgtc

SEQ ID NO: 8784 - DNA, 20 bp, synthetic construct
  misc_feature 1..20: note = Description of Artificial Sequence: Synthetic oligonucleotide
  misc_feature 1..20: note = Target: FXN; (-) strand; PAM type: NRG; PAM sequence: CAG
  source 1..20: mol_type = other DNA
aggcagatcctaatagctgt

SEQ ID NO: 8785 - DNA, 20 bp, synthetic construct
  misc_feature 1..20: note = Description of Artificial Sequence: Synthetic oligonucleotide
  misc_feature 1..20: note = Target: FXN; (-) strand; PAM type: NRG; PAM sequence: TAG
  source 1..20: mol_type = other DNA
ctcaagtaggcagatcctaa

SEQ ID NO: 8786 - DNA, 20 bp, synthetic construct
  misc_feature 1..20: note = Description of Artificial Sequence: Synthetic oligonucleotide
  misc_feature 1..20: note = Target: FXN; (-) strand; PAM type: NRG; PAM sequence: CAG
  source 1..20: mol_type = other DNA
tgcttttagcctcaagtagg

SEQ ID NO: 8787 - DNA, 20 bp, synthetic construct
  misc_feature 1..20: note = Description of Artificial Sequence: Synthetic oligonucleotide
  misc_feature 1..20: note = Target: FXN; (-) strand; PAM type: NRG; PAM sequence: AGG
  source 1..20: mol_type = other DNA
ggttgcttttagcctcaagt

SEQ ID NO: 8788 - DNA, 20 bp, synthetic construct
  misc_feature 1..20: note = Description of Artificial Sequence: Synthetic oligonucleotide
  misc_feature 1..20: note = Target: FXN; (-) strand; PAM type: NRG; PAM sequence: TAG
  source 1..20: mol_type = other DNA
tggttgcttttagcctcaag

SEQ ID NO: 8789 - DNA, 20 bp, synthetic construct
  misc_feature 1..20: note = Description of Artificial Sequence: Synthetic oligonucleotide
  misc_feature 1..20: note = Target: FXN; (-) strand; PAM type: NRG; PAM sequence: AAG
  source 1..20: mol_type = other DNA
tcttggttgcttttagcctc

SEQ ID NO: 8790 - DNA, 20 bp, synthetic construct
  misc_feature 1..20: note = Description of Artificial Sequence: Synthetic oligonucleotide
  misc_feature 1..20: note = Target: FXN; (-) strand; PAM type: NRG; PAM sequence: TAG
  source 1..20: mol_type = other DNA
gttcctctcttggttgcttt

SEQ ID NO: 8791 - DNA, 20 bp, synthetic construct
  misc_feature 1..20: note = Description of Artificial Sequence: Synthetic oligonucleotide
  misc_feature 1..20: note = Target: FXN; (-) strand; PAM type: NRG; PAM sequence: TGG
  source 1..20: mol_type = other DNA
cactgtagctgttcctctct

SEQ ID NO: 8792 - DNA, 20 bp, synthetic construct
  misc_feature 1..20: note = Description of Artificial Sequence: Synthetic oligonucleotide
  misc_feature 1..20: note = Target: FXN; (-) strand; PAM type: NRG; PAM sequence: TAG
  source 1..20: mol_type = other DNA
agggactctgtggtacactg

SEQ ID NO: 8793 - DNA, 20 bp, synthetic construct
  misc_feature 1..20: note = Description of Artificial Sequence: Synthetic oligonucleotide
  misc_feature 1..20: note = Target: FXN; (-) strand; PAM type: NRG; PAM sequence: TGG
  source 1..20: mol_type = other DNA
aaagatgttgagggactctg

SEQ ID NO: 8794 - DNA, 20 bp, synthetic construct
  misc_feature 1..20: note = Description of Artificial Sequence: Synthetic oligonucleotide
  misc_feature 1..20: note = Target: FXN; (-) strand; PAM type: NRG; PAM sequence: GGG
  source 1..20: mol_type = other DNA
ggcgtgggcaaagatgttga

SEQ ID NO: 8795 - DNA, 20 bp, synthetic construct
  misc_feature 1..20: note = Description of Artificial Sequence: Synthetic oligonucleotide
  misc_feature 1..20: note = Target: FXN; (-) strand; PAM type: NRG; PAM sequence: AGG
  source 1..20: mol_type = other DNA
tggcgtgggcaaagatgttg

SEQ ID NO: 8796 - DNA, 20 bp, synthetic construct
  misc_feature 1..20: note = Description of Artificial Sequence: Synthetic oligonucleotide
  misc_feature 1..20: note = Target: FXN; (-) strand; PAM type: NRG; PAM sequence: GAG
  source 1..20: mol_type = other DNA
gtggcgtgggcaaagatgtt

SEQ ID NO: 8797 - DNA, 20 bp, synthetic construct
  misc_feature 1..20: note = Description of Artificial Sequence: Synthetic oligonucleotide
  misc_feature 1..20: note = Target: FXN; (-) strand; PAM type: NRG; PAM sequence: AAG
  source 1..20: mol_type = other DNA
ggggcaccgtggcgtgggca

SEQ ID NO: 8798 - DNA, 20 bp, synthetic construct
  misc_feature 1..20: note = Description of Artificial Sequence: Synthetic oligonucleotide
  misc_feature 1..20: note = Target: FXN; (-) strand; PAM type: NRG; PAM sequence: GGG
  source 1..20: mol_type = other DNA
aagctggggcaccgtggcgt

SEQ ID NO: 8799 - DNA, 20 bp, synthetic construct
  misc_feature 1..20: note = Description of Artificial Sequence: Synthetic oligonucleotide
  misc_feature 1..20: note = Target: FXN; (-) strand; PAM type: NRG; PAM sequence: TGG
  source 1..20: mol_type = other DNA
gaagctggggcaccgtggcg

SEQ ID NO: 8800 - DNA, 20 bp, synthetic construct
  misc_feature 1..20: note = Description of Artificial Sequence: Synthetic oligonucleotide
  misc_feature 1..20: note = Target: FXN; (-) strand; PAM type: NRG; PAM sequence: TGG
  source 1..20: mol_type = other DNA
ggtaagaagctggggcaccg

SEQ ID NO: 8801 - DNA, 20 bp, synthetic construct
  misc_feature 1..20: note = Description of Artificial Sequence: Synthetic oligonucleotide
  misc_feature 1..20: note = Target: FXN; (-) strand; PAM type: NRG; PAM sequence: GGG
  source 1..20: mol_type = other DNA
gcacacttggtaagaagctg

SEQ ID NO: 8802 - DNA, 20 bp, synthetic construct
  misc_feature 1..20: note = Description of Artificial Sequence: Synthetic oligonucleotide
  misc_feature 1..20: note = Target: FXN; (-) strand; PAM type: NRG; PAM sequence: GGG
  source 1..20: mol_type = other DNA
ggcacacttggtaagaagct

SEQ ID NO: 8803 - DNA, 20 bp, synthetic construct
  misc_feature 1..20: note = Description of Artificial Sequence: Synthetic oligonucleotide
  misc_feature 1..20: note = Target: FXN; (-) strand; PAM type: NRG; PAM sequence: TGG
  source 1..20: mol_type = other DNA
aggcacacttggtaagaagc

SEQ ID NO: 8804 - DNA, 20 bp, synthetic construct
  misc_feature 1..20: note = Description of Artificial Sequence: Synthetic oligonucleotide
  misc_feature 1..20: note = Target: FXN; (-) strand; PAM type: NRG; PAM sequence: AAG
  source 1..20: mol_type = other DNA
aatcaggcacacttggtaag

SEQ ID NO: 8805 - DNA, 20 bp, synthetic construct
  misc_feature 1..20: note = Description of Artificial Sequence: Synthetic oligonucleotide
  misc_feature 1..20: note = Target: FXN; (-) strand; PAM type: NRG; PAM sequence: AAG
  source 1..20: mol_type = other DNA
aggaatcaggcacacttggt

SEQ ID NO: 8806 - DNA, 20 bp, synthetic construct
  misc_feature 1..20: note = Description of Artificial Sequence: Synthetic oligonucleotide
  misc_feature 1..20: note = Target: FXN; (-) strand; PAM type: NRG; PAM sequence: TGG
  source 1..20: mol_type = other DNA
caagaggaatcaggcacact

SEQ ID NO: 8807 - DNA, 20 bp, synthetic construct
  misc_feature 1..20: note = Description of Artificial Sequence: Synthetic oligonucleotide
  misc_feature 1..20: note = Target: FXN; (-) strand; PAM type: NRG; PAM sequence: AGG
  source 1..20: mol_type = other DNA
ggaggtagtcaagaggaatc

SEQ ID NO: 8808 - DNA, 20 bp, synthetic construct
  misc_feature 1..20: note = Description of Artificial Sequence: Synthetic oligonucleotide
  misc_feature 1..20: note = Target: FXN; (-) strand; PAM type: NRG; PAM sequence: CAG
  source 1..20: mol_type = other DNA
tggaggtagtcaagaggaat

SEQ ID NO: 8809 - DNA, 20 bp, synthetic construct
  misc_feature 1..20: note = Description of Artificial Sequence: Synthetic oligonucleotide
  misc_feature 1..20: note = Target: FXN; (-) strand; PAM type: NRG; PAM sequence: AGG
  source 1..20: mol_type = other DNA
cttccttggaggtagtcaag

SEQ ID NO: 8810 - DNA, 20 bp, synthetic construct
  misc_feature 1..20: note = Description of Artificial Sequence: Synthetic oligonucleotide
  misc_feature 1..20: note = Target: FXN; (-) strand; PAM type: NRG; PAM sequence: GAG
  source 1..20: mol_type = other DNA
acttccttggaggtagtcaa

SEQ ID NO: 8811 - DNA, 20 bp, synthetic construct
  misc_feature 1..20: note = Description of Artificial Sequence: Synthetic oligonucleotide
  misc_feature 1..20: note = Target: FXN; (-) strand; PAM type: NRG; PAM sequence: AAG
  source 1..20: mol_type = other DNA
ccacttccttggaggtagtc

SEQ ID NO: 8812 - DNA, 20 bp, synthetic construct
  misc_feature 1..20: note = Description of Artificial Sequence: Synthetic oligonucleotide
  misc_feature 1..20: note = Target: FXN; (-) strand; PAM type: NRG; PAM sequence: TAG
  source 1..20: mol_type = other DNA
tttctccacttccttggagg

SEQ ID NO: 8813 - DNA, 20 bp, synthetic construct
  misc_feature 1..20: note = Description of Artificial Sequence: Synthetic oligonucleotide
  misc_feature 1..20: note = Target: FXN; (-) strand; PAM type: NRG; PAM sequence: AGG
  source 1..20: mol_type = other DNA
gtctttctccacttccttgg

SEQ ID NO: 8814 - DNA, 20 bp, synthetic construct
  misc_feature 1..20: note = Description of Artificial Sequence: Synthetic oligonucleotide
  misc_feature 1..20: note = Target: FXN; (-) strand; PAM type: NRG; PAM sequence: GAG
  source 1..20: mol_type = other DNA
tgtctttctccacttccttg

SEQ ID NO: 8815 - DNA, 20 bp, synthetic construct
  misc_feature 1..20: note = Description of Artificial Sequence: Synthetic oligonucleotide
  misc_feature 1..20: note = Target: FXN; (-) strand; PAM type: NRG; PAM sequence: TGG
  source 1..20: mol_type = other DNA
cttgtctttctccacttcct

SEQ ID NO: 8816 - DNA, 20 bp, synthetic construct
  misc_feature 1..20: note = Description of Artificial Sequence: Synthetic oligonucleotide
  misc_feature 1..20: note = Target: FXN; (-) strand; PAM type: NRG; PAM sequence: AAG
  source 1..20: mol_type = other DNA
agagaagacgaaggcttcgc

SEQ ID NO: 8817 - DNA, 20 bp, synthetic construct
  misc_feature 1..20: note = Description of Artificial Sequence: Synthetic oligonucleotide
  misc_feature 1..20: note = Target: FXN; (-) strand; PAM type: NRG; PAM sequence: AGG
  source 1..20: mol_type = other DNA
tagcatatcagagaagacga

SEQ ID NO: 8818 - DNA, 20 bp, synthetic construct
  misc_feature 1..20: note = Description of Artificial Sequence: Synthetic oligonucleotide
  misc_feature 1..20: note = Target: FXN; (-) strand; PAM type: NRG; PAM sequence: AAG
  source 1..20: mol_type = other DNA
atagcatatcagagaagacg

SEQ ID NO: 8819 - DNA, 20 bp, synthetic construct
  misc_feature 1..20: note = Description of Artificial Sequence: Synthetic oligonucleotide
  misc_feature 1..20: note = Target: FXN; (-) strand; PAM type: NRG; PAM sequence: AAG
  source 1..20: mol_type = other DNA
catagaatagcatatcagag

SEQ ID NO: 8820 - DNA, 20 bp, synthetic construct
  misc_feature 1..20: note = Description of Artificial Sequence: Synthetic oligonucleotide
  misc_feature 1..20: note = Target: FXN; (-) strand; PAM type: NRG; PAM sequence: GAG
  source 1..20: mol_type = other DNA
agacatagaatagcatatca

SEQ ID NO: 8821 - DNA, 20 bp, synthetic construct
  misc_feature 1..20: note = Description of Artificial Sequence: Synthetic oligonucleotide
  misc_feature 1..20: note = Target: FXN; (-) strand; PAM type: NRG; PAM sequence: CAG
  source 1..20: mol_type = other DNA
atagacatagaatagcatat

SEQ ID NO: 8822 - DNA, 20 bp, synthetic construct
  misc_feature 1..20: note = Description of Artificial Sequence: Synthetic oligonucleotide
  misc_feature 1..20: note = Target: FXN; (-) strand; PAM type: NRG; PAM sequence: TAG
  source 1..20: mol_type = other DNA
ccaaagaaatagacatagaa

SEQ ID NO: 8823 - DNA, 20 bp, synthetic construct
  misc_feature 1..20: note = Description of Artificial Sequence: Synthetic oligonucleotide
  misc_feature 1..20: note = Target: FXN; (-) strand; PAM type: NRG; PAM sequence: TAG
  source 1..20: mol_type = other DNA
tttggccaaagaaatagaca

SEQ ID NO: 8824 - DNA, 20 bp, synthetic construct
  misc_feature 1..20: note = Description of Artificial Sequence: Synthetic oligonucleotide
  misc_feature 1..20: note = Target: FXN; (-) strand; PAM type: NRG; PAM sequence: TAG
  source 1..20: mol_type = other DNA
catctttttggccaaagaaa

SEQ ID NO: 8825 - DNA, 20 bp, synthetic construct
  misc_feature 1..20: note = Description of Artificial Sequence: Synthetic oligonucleotide
  misc_feature 1..20: note = Target: FXN; (-) strand; PAM type: NRG; PAM sequence: AAG
  source 1..20: mol_type = other DNA
ttgccccatctttttggcca

SEQ ID NO: 8826 - DNA, 20 bp, synthetic construct
  misc_feature 1..20: note = Description of Artificial Sequence: Synthetic oligonucleotide
  misc_feature 1..20: note = Target: FXN; (-) strand; PAM type: NRG; PAM sequence: TGG
  source 1..20: mol_type = other DNA
atatcattgccccatctttt

SEQ ID NO: 8827 - DNA, 20 bp, synthetic construct
  misc_feature 1..20: note = Description of Artificial Sequence: Synthetic oligonucleotide
  misc_feature 1..20: note = Target: FXN; (-) strand; PAM type: NRG; PAM sequence: AAG
  source 1..20: mol_type = other DNA
aaatgctccagctccctgca

SEQ ID NO: 8828 - DNA, 20 bp, synthetic construct
  misc_feature 1..20: note = Description of Artificial Sequence: Synthetic oligonucleotide
  misc_feature 1..20: note = Target: FXN; (-) strand; PAM type: NRG; PAM sequence: CAG
  source 1..20: mol_type = other DNA
aaggtcactagcaaatgctc

SEQ ID NO: 8829 - DNA, 20 bp, synthetic construct
  misc_feature 1..20: note = Description of Artificial Sequence: Synthetic oligonucleotide
  misc_feature 1..20: note = Target: FXN; (-) strand; PAM type: NRG; PAM sequence: TAG
  source 1..20: mol_type = other DNA
ttctggcatagaaaggtcac

SEQ ID NO: 8830 - DNA, 20 bp, synthetic construct
  misc_feature 1..20: note = Description of Artificial Sequence: Synthetic oligonucleotide
  misc_feature 1..20: note = Target: FXN; (-) strand; PAM type: NRG; PAM sequence: AGG
  source 1..20: mol_type = other DNA
tagcaagttctggcatagaa

SEQ ID NO: 8831 - DNA, 20 bp, synthetic construct
  misc_feature 1..20: note = Description of Artificial Sequence: Synthetic oligonucleotide
  misc_feature 1..20: note = Target: FXN; (-) strand; PAM type: NRG; PAM sequence: AAG
  source 1..20: mol_type = other DNA
ttagcaagttctggcataga

SEQ ID NO: 8832 - DNA, 20 bp, synthetic construct
  misc_feature 1..20: note = Description of Artificial Sequence: Synthetic oligonucleotide
  misc_feature 1..20: note = Target: FXN; (-) strand; PAM type: NRG; PAM sequence: TAG
  source 1..20: mol_type = other DNA
atgcttagcaagttctggca

SEQ ID NO: 8833 - DNA, 20 bp, synthetic construct
  misc_feature 1..20: note = Description of Artificial Sequence: Synthetic oligonucleotide
  misc_feature 1..20: note = Target: FXN; (-) strand; PAM type: NRG; PAM sequence: TGG
  source 1..20: mol_type = other DNA
ctagcatgcttagcaagttc

SEQ ID NO: 8834 - DNA, 20 bp, synthetic construct
  misc_feature 1..20: note = Description of Artificial Sequence: Synthetic oligonucleotide
  misc_feature 1..20: note = Target: FXN; (-) strand; PAM type: NRG; PAM sequence: AAG
  source 1..20: mol_type = other DNA
tattagctagcatgcttagc

SEQ ID NO: 8835 - DNA, 20 bp, synthetic construct
  misc_feature 1..20: note = Description of Artificial Sequence: Synthetic oligonucleotide
  misc_feature 1..20: note = Target: FXN; (-) strand; PAM type: NRG; PAM sequence: TAG
  source 1..20: mol_type = other DNA
tcattattagctagcatgct

SEQ ID NO: 8836 - DNA, 20 bp, synthetic construct
  misc_feature 1..20: note = Description of Artificial Sequence: Synthetic oligonucleotide
  misc_feature 1..20: note = Target: FXN; (-) strand; PAM type: NRG; PAM sequence: TAG
  source 1..20: mol_type = other DNA
tgtgctacatcattattagc

SEQ ID NO: 8837 - DNA, 20 bp, synthetic construct
  misc_feature 1..20: note = Description of Artificial Sequence: Synthetic oligonucleotide
  misc_feature 1..20: note = Target: FXN; (-) strand; PAM type: NRG; PAM sequence: TAG
  source 1..20: mol_type = other DNA
accctgtgctacatcattat

SEQ ID NO: 8838 - DNA, 20 bp, synthetic construct
  misc_feature 1..20: note = Description of Artificial Sequence: Synthetic oligonucleotide
  misc_feature 1..20: note = Target: FXN; (-) strand; PAM type: NRG; PAM sequence: GAG
  source 1..20: mol_type = other DNA
agtgctgagattacaggcgt

SEQ ID NO: 8839 - DNA, 20 bp, synthetic construct
  misc_feature 1..20: note = Description of Artificial Sequence: Synthetic oligonucleotide
  misc_feature 1..20: note = Target: FXN; (-) strand; PAM type: NRG; PAM sequence: AGG
  source 1..20: mol_type = other DNA
gcccaaagtgctgagattac

SEQ ID NO: 8840 - DNA, 20 bp, synthetic construct
  misc_feature 1..20: note = Description of Artificial Sequence: Synthetic oligonucleotide
  misc_feature 1..20: note = Target: FXN; (-) strand; PAM type: NRG; PAM sequence: CAG
  source 1..20: mol_type = other DNA
cgcccaaagtgctgagatta

SEQ ID NO: 8841 - DNA, 20 bp, synthetic construct
  misc_feature 1..20: note = Description of Artificial Sequence: Synthetic oligonucleotide
  misc_feature 1..20: note = Target: FXN; (-) strand; PAM type: NRG; PAM sequence: GAG
  source 1..20: mol_type = other DNA
cctcggccgcccaaagtgct

SEQ ID NO: 8842 - DNA, 20 bp, synthetic construct
  misc_feature 1..20: note = Description of Artificial Sequence: Synthetic oligonucleotide
  misc_feature 1..20: note = Target: FXN; (-) strand; PAM type: NRG; PAM sequence: AAG
  source 1..20: mol_type = other DNA
ccgcccgcctcggccgccca

SEQ ID NO: 8843 - DNA, 20 bp, synthetic construct
  misc_feature 1..20: note = Description of Artificial Sequence: Synthetic oligonucleotide
  misc_feature 1..20: note = Target: FXN; (-) strand; PAM type: NRG; PAM sequence: CGG
  source 1..20: mol_type = other DNA
ctcaggtgatccgcccgcct

SEQ ID NO: 8844 - DNA, 20 bp, synthetic construct
  misc_feature 1..20: note = Description of Artificial Sequence: Synthetic oligonucleotide
  misc_feature 1..20: note = Target: FXN; (-) strand; PAM type: NRG; PAM sequence: AGG
  source 1..20: mol_type = other DNA
ggtctcgaactcctgacctc

SEQ ID NO: 8845 - DNA, 20 bp, synthetic construct
  misc_feature 1..20: note = Description of Artificial Sequence: Synthetic oligonucleotide
  misc_feature 1..20: note = Target: FXN; (-) strand; PAM type: NRG; PAM sequence: CAG
  source 1..20: mol_type = other DNA
tggtctcgaactcctgacct

SEQ ID NO: 8846 - DNA, 20 bp, synthetic construct
  misc_feature 1..20: note = Description of Artificial Sequence: Synthetic oligonucleotide
  misc_feature 1..20: note = Target: FXN; (-) strand; PAM type: NRG; PAM sequence: TGG
  source 1..20: mol_type = other DNA
tttcatcatgttggccaggc

SEQ ID NO: 8847 - DNA, 20 bp, synthetic construct
  misc_feature 1..20: note = Description of Artificial Sequence: Synthetic oligonucleotide
  misc_feature 1..20: note = Target: FXN; (-) strand; PAM type: NRG; PAM sequence: AGG
  source 1..20: mol_type = other DNA
ggggtttcatcatgttggcc

SEQ ID NO: 8848 - DNA, 20 bp, synthetic construct
  misc_feature 1..20: note = Description of Artificial Sequence: Synthetic oligonucleotide
  misc_feature 1..20: note = Target: FXN; (-) strand; PAM type: NRG; PAM sequence: CAG
  source 1..20: mol_type = other DNA
tggggtttcatcatgttggc

SEQ ID NO: 8849 - DNA, 20 bp, synthetic construct
  misc_feature 1..20: note = Description of Artificial Sequence: Synthetic oligonucleotide
  misc_feature 1..20: note = Target: FXN; (-) strand; PAM type: NRG; PAM sequence: TGG
  source 1..20: mol_type = other DNA
gagatggggtttcatcatgt

SEQ ID NO: 8850 - DNA, 20 bp, synthetic construct
  misc_feature 1..20: note = Description of Artificial Sequence: Synthetic oligonucleotide
  misc_feature 1..20: note = Target: FXN; (-) strand; PAM type: NRG; PAM sequence: GGG
  source 1..20: mol_type = other DNA
ttgtatttttagtagagatg

SEQ ID NO: 8851 - DNA, 20 bp, synthetic construct
  misc_feature 1..20: note = Description of Artificial Sequence: Synthetic oligonucleotide
  misc_feature 1..20: note = Target: FXN; (-) strand; PAM type: NRG; PAM sequence: GGG
  source 1..20: mol_type = other DNA
tttgtatttttagtagagat

SEQ ID NO: 8852 - DNA, 20 bp, synthetic construct
  misc_feature 1..20: note = Description of Artificial Sequence: Synthetic oligonucleotide
  misc_feature 1..20: note = Target: FXN; (-) strand; PAM type: NRG; PAM sequence: TGG
  source 1..20: mol_type = other DNA
ttttgtatttttagtagaga

SEQ ID NO: 8853 - DNA, 20 bp, synthetic construct
  misc_feature 1..20: note = Description of Artificial Sequence: Synthetic oligonucleotide
  misc_feature 1..20: note = Target: FXN; (-) strand; PAM type: NRG; PAM sequence: GAG
  source 1..20: mol_type = other DNA
taatttttgtatttttagta

SEQ ID NO: 8854 - DNA, 20 bp, synthetic construct
  misc_feature 1..20: note = Description of Artificial Sequence: Synthetic oligonucleotide
  misc_feature 1..20: note = Target: FXN; (-) strand; PAM type: NRG; PAM sequence: TAG
  source 1..20: mol_type = other DNA
gctaatttttgtatttttag

SEQ ID NO: 8855 - DNA, 20 bp, synthetic construct
  misc_feature 1..20: note = Description of Artificial Sequence: Synthetic oligonucleotide
  misc_feature 1..20: note = Target: FXN; (-) strand; PAM type: NRG; PAM sequence: TAG
  source 1..20: mol_type = other DNA
ctggctaatttttgtatttt

SEQ ID NO: 8856 - DNA, 20 bp, synthetic construct
  misc_feature 1..20: note = Description of Artificial Sequence: Synthetic oligonucleotide
  misc_feature 1..20: note = Target: FXN; (-) strand; PAM type: NRG; PAM sequence: TGG
  source 1..20: mol_type = other DNA
caggtgcccaccaccacgcc

SEQ ID NO: 8857 - DNA, 20 bp, synthetic construct
  misc_feature 1..20: note = Description of Artificial Sequence: Synthetic oligonucleotide
  misc_feature 1..20: note = Target: FXN; (-) strand; PAM type: NRG; PAM sequence: AGG
  source 1..20: mol_type = other DNA
tccagagtagctgggattgc

SEQ ID NO: 8858 - DNA, 20 bp, synthetic construct
  misc_feature 1..20: note = Description of Artificial Sequence: Synthetic oligonucleotide
  misc_feature 1..20: note = Target: FXN; (-) strand; PAM type: NRG; PAM sequence: CAG
  source 1..20: mol_type = other DNA
ctccagagtagctgggattg

SEQ ID NO: 8859 - DNA, 20 bp, synthetic construct
  misc_feature 1..20: note = Description of Artificial Sequence: Synthetic oligonucleotide
  misc_feature 1..20: note = Target: FXN; (-) strand; PAM type: NRG; PAM sequence: GGG
  source 1..20: mol_type = other DNA
tctcagcctccagagtagct

SEQ ID NO: 8860 - DNA, 20 bp, synthetic construct
  misc_feature 1..20: note = Description of Artificial Sequence: Synthetic oligonucleotide
  misc_feature 1..20: note = Target: FXN; (-) strand; PAM type: NRG; PAM sequence: TGG
  source 1..20: mol_type = other DNA
gtctcagcctccagagtagc

SEQ ID NO: 8861 - DNA, 20 bp, synthetic construct
  misc_feature 1..20: note = Description of Artificial Sequence: Synthetic oligonucleotide
  misc_feature 1..20: note = Target: FXN; (-) strand; PAM type: NRG; PAM sequence: TAG
  source 1..20: mol_type = other DNA
ttctgtctcagcctccagag

SEQ ID NO: 8862 - DNA, 20 bp, synthetic construct
  misc_feature 1..20: note = Description of Artificial Sequence: Synthetic oligonucleotide
  misc_feature 1..20: note = Target: FXN; (-) strand; PAM type: NRG; PAM sequence: GAG
  source 1..20: mol_type = other DNA
agattctgtctcagcctcca

SEQ ID NO: 8863 - DNA, 20 bp, synthetic construct
  misc_feature 1..20: note = Description of Artificial Sequence: Synthetic oligonucleotide
  misc_feature 1..20: note = Target: FXN; (-) strand; PAM type: NRG; PAM sequence: CAG
  source 1..20: mol_type = other DNA
agagattctgtctcagcctc

SEQ ID NO: 8864 - DNA, 20 bp, synthetic construct
  misc_feature 1..20: note = Description of Artificial Sequence: Synthetic oligonucleotide
  misc_feature 1..20: note = Target: FXN; (-) strand; PAM type: NRG; PAM sequence: CAG
  source 1..20: mol_type = other DNA
gggttcaagagattctgtct

SEQ ID NO: 8865 - DNA, 20 bp, synthetic construct
  misc_feature 1..20: note = Description of Artificial Sequence: Synthetic oligonucleotide
  misc_feature 1..20: note = Target: FXN; (-) strand; PAM type: NRG; PAM sequence: GAG
  source 1..20: mol_type = other DNA
tctccacctcctgggttcaa

SEQ ID NO: 8866 - DNA, 20 bp, synthetic construct
  misc_feature 1..20: note = Description of Artificial Sequence: Synthetic oligonucleotide
  misc_feature 1..20: note = Target: FXN; (-) strand; PAM type: NRG; PAM sequence: AAG
  source 1..20: mol_type = other DNA
aatctccacctcctgggttc

SEQ ID NO: 8867 - DNA, 20 bp, synthetic construct
  misc_feature 1..20: note = Description of Artificial Sequence: Synthetic oligonucleotide
  misc_feature 1..20: note = Target: FXN; (-) strand; PAM type: NRG; PAM sequence: GGG
  source 1..20: mol_type = other DNA
cactgcaatctccacctcct

SEQ ID NO: 8868 - DNA, 20 bp, synthetic construct
  misc_feature 1..20: note = Description of Artificial Sequence: Synthetic oligonucleotide
  misc_feature 1..20: note = Target: FXN; (-) strand; PAM type: NRG; PAM sequence: TGG
  source 1..20: mol_type = other DNA
tcactgcaatctccacctcc

SEQ ID NO: 8869 - DNA, 20 bp, synthetic construct
  misc_feature 1..20: note = Description of Artificial Sequence: Synthetic oligonucleotide
  misc_feature 1..20: note = Target: FXN; (-) strand; PAM type: NRG; PAM sequence: TGG
  source 1..20: mol_type = other DNA
ttgcccaggctggaatgcag

SEQ ID NO: 8870 - DNA, 20 bp, synthetic construct
  misc_feature 1..20: note = Description of Artificial Sequence: Synthetic oligonucleotide
  misc_feature 1..20: note = Target: FXN; (-) strand; PAM type: NRG; PAM sequence: CAG
  source 1..20: mol_type = other DNA
ttgttgcccaggctggaatg

SEQ ID NO: 8871 - DNA, 20 bp, synthetic construct
  misc_feature 1..20: note = Description of Artificial Sequence: Synthetic oligonucleotide
  misc_feature 1..20: note = Target: FXN; (-) strand; PAM type: NRG; PAM sequence: TGG
  source 1..20: mol_type = other DNA
tcttgctttgttgcccaggc

SEQ ID NO: 8872 - DNA, 20 bp, synthetic construct
  misc_feature 1..20: note = Description of Artificial Sequence: Synthetic oligonucleotide
  misc_feature 1..20: note = Target: FXN; (-) strand; PAM type: NRG; PAM sequence: AGG
  source 1..20: mol_type = other DNA
agagtcttgctttgttgccc

SEQ ID NO: 8873 - DNA, 20 bp, synthetic construct
  misc_feature 1..20: note = Description of Artificial Sequence: Synthetic oligonucleotide
  misc_feature 1..20: note = Target: FXN; (-) strand; PAM type: NRG; PAM sequence: CAG
  source 1..20: mol_type = other DNA
cagagtcttgctttgttgcc

SEQ ID NO: 8874 - DNA, 20 bp, synthetic construct
  misc_feature 1..20: note = Description of Artificial Sequence: Synthetic oligonucleotide
  misc_feature 1..20: note = Target: FXN; (-) strand; PAM type: NRG; PAM sequence: GAG
  source 1..20: mol_type = other DNA
tattattattatttgagaca

SEQ ID NO: 8875 - DNA, 20 bp, synthetic construct
  misc_feature 1..20: note = Description of Artificial Sequence: Synthetic oligonucleotide
  misc_feature 1..20: note = Target: FXN; (-) strand; PAM type: NRG; PAM sequence: CAG
  source 1..20: mol_type = other DNA
attattattattatttgaga

SEQ ID NO: 8876 - DNA, 20 bp, synthetic construct
  misc_feature 1..20: note = Description of Artificial Sequence: Synthetic oligonucleotide
  misc_feature 1..20: note = Target: FXN; (-) strand; PAM type: NRG; PAM sequence: GAG
  source 1..20: mol_type = other DNA
tattattattattattattt

SEQ ID NO: 8877 - DNA, 20 bp, synthetic construct
  misc_feature 1..20: note = Description of Artificial Sequence: Synthetic oligonucleotide
  misc_feature 1..20: note = Target: FXN; (-) strand; PAM type: NRG; PAM sequence: TAG
  source 1..20: mol_type = other DNA
gagagagaaagctgcatcat

SEQ ID NO: 8878 - DNA, 20 bp, synthetic construct
  misc_feature 1..20: note = Description of Artificial Sequence: Synthetic oligonucleotide
  misc_feature 1..20: note = Target: FXN; (-) strand; PAM type: NRG; PAM sequence: AAG
  source 1..20: mol_type = other DNA
attatatactcagagagaga

SEQ ID NO: 8879 - DNA, 20 bp, synthetic construct
  misc_feature 1..20: note = Description of Artificial Sequence: Synthetic oligonucleotide
  misc_feature 1..20: note = Target: FXN; (-) strand; PAM type: NRG; PAM sequence: GAG
  source 1..20: mol_type = other DNA
ctgcattatatactcagaga

SEQ ID NO: 8880 - DNA, 20 bp, synthetic construct
  misc_feature 1..20: note = Description of Artificial Sequence: Synthetic oligonucleotide
  misc_feature 1..20: note = Target: FXN; (-) strand; PAM type: NRG; PAM sequence: GAG
  source 1..20: mol_type = other DNA
aactgcattatatactcaga

SEQ ID NO: 8881 - DNA, 20 bp, synthetic construct
  misc_feature 1..20: note = Description of Artificial Sequence: Synthetic oligonucleotide
  misc_feature 1..20: note = Target: FXN; (-) strand; PAM type: NRG; PAM sequence: GAG
  source 1..20: mol_type = other DNA
agaactgcattatatactca

SEQ ID NO: 8882 - DNA, 20 bp, synthetic construct
  misc_feature 1..20: note = Description of Artificial Sequence: Synthetic oligonucleotide
  misc_feature 1..20: note = Target: FXN; (-) strand; PAM type: NRG; PAM sequence: CAG
  source 1..20: mol_type = other DNA
tcagaactgcattatatact

SEQ ID NO: 8883 - DNA, 20 bp, synthetic construct
  misc_feature 1..20: note = Description of Artificial Sequence: Synthetic oligonucleotide
  misc_feature 1..20: note = Target: FXN; (-) strand; PAM type: NRG; PAM sequence: CAG
  source 1..20: mol_type = other DNA
gaggcccttcctcacatcat

SEQ ID NO: 8884 - DNA, 20 bp, synthetic construct
  misc_feature 1..20: note = Description of Artificial Sequence: Synthetic oligonucleotide
  misc_feature 1..20: note = Target: FXN; (-) strand; PAM type: NRG; PAM sequence: AGG
  source 1..20: mol_type = other DNA
actctgccacaccaacagtg

SEQ ID NO: 8885 - DNA, 20 bp, synthetic construct
  misc_feature 1..20: note = Description of Artificial Sequence: Synthetic oligonucleotide
  misc_feature 1..20: note = Target: FXN; (-) strand; PAM type: NRG; PAM sequence: GAG
  source 1..20: mol_type = other DNA
gactctgccacaccaacagt

SEQ ID NO: 8886 - DNA, 20 bp, synthetic construct
  misc_feature 1..20: note = Description of Artificial Sequence: Synthetic oligonucleotide
  misc_feature 1..20: note = Target: FXN; (-) strand; PAM type: NRG; PAM sequence: CAG
  source 1..20: mol_type = other DNA
ctcagactctgccacaccaa

SEQ ID NO: 8887 - DNA, 20 bp, synthetic construct
  misc_feature 1..20: note = Description of Artificial Sequence: Synthetic oligonucleotide
  misc_feature 1..20: note = Target: FXN; (-) strand; PAM type: NRG; PAM sequence: CAG
  source 1..20: mol_type = other DNA
ttcattgccagccatggtct

SEQ ID NO: 8888 - DNA, 20 bp, synthetic construct
  misc_feature 1..20: note = Description of Artificial Sequence: Synthetic oligonucleotide
  misc_feature 1..20: note = Target: FXN; (-) strand; PAM type: NRG; PAM sequence: TGG
  source 1..20: mol_type = other DNA
agtgttttcattgccagcca

SEQ ID NO: 8889 - DNA, 20 bp, synthetic construct
  misc_feature 1..20: note = Description of Artificial Sequence: Synthetic oligonucleotide
  misc_feature 1..20: note = Target: FXN; (-) strand; PAM type: NRG; PAM sequence: CAG
  source 1..20: mol_type = other DNA
aagggtagtgttttcattgc

SEQ ID NO: 8890 - DNA, 20 bp, synthetic construct
  misc_feature 1..20: note = Description of Artificial Sequence: Synthetic oligonucleotide
  misc_feature 1..20: note = Target: FXN; (-) strand; PAM type: NRG; PAM sequence: TAG
  source 1..20: mol_type = other DNA
agcccataggcatcaaaggg

SEQ ID NO: 8891 - DNA, 20 bp, synthetic construct
  misc_feature 1..20: note = Description of Artificial Sequence: Synthetic oligonucleotide
  misc_feature 1..20: note = Target: FXN; (-) strand; PAM type: NRG; PAM sequence: GGG
  source 1..20: mol_type = other DNA
gagagcccataggcatcaaa

SEQ ID NO: 8892 - DNA, 20 bp, synthetic construct
  misc_feature 1..20: note = Description of Artificial Sequence: Synthetic oligonucleotide
  misc_feature 1..20: note = Target: FXN; (-) strand; PAM type: NRG; PAM sequence: AGG
  source 1..20: mol_type = other DNA
ggagagcccataggcatcaa

SEQ ID NO: 8893 - DNA, 20 bp, synthetic construct
  misc_feature 1..20: note = Description of Artificial Sequence: Synthetic oligonucleotide
  misc_feature 1..20: note = Target: FXN; (-) strand; PAM type: NRG; PAM sequence: AAG
  source 1..20: mol_type = other DNA
gggagagcccataggcatca

SEQ ID NO: 8894 - DNA, 20 bp, synthetic construct
  misc_feature 1..20: note = Description of Artificial Sequence: Synthetic oligonucleotide
  misc_feature 1..20: note = Target: FXN; (-) strand; PAM type: NRG; PAM sequence: AGG
  source 1..20: mol_type = other DNA
accataaagggagagcccat

SEQ ID NO: 8895 - DNA, 20 bp, synthetic construct
  misc_feature 1..20: note = Description of Artificial Sequence: Synthetic oligonucleotide
  misc_feature 1..20: note = Target: FXN; (-) strand; PAM type: NRG; PAM sequence: TAG
  source 1..20: mol_type = other DNA
aaccataaagggagagccca

SEQ ID NO: 8896 - DNA, 20 bp, synthetic construct
  misc_feature 1..20: note = Description of Artificial Sequence: Synthetic oligonucleotide
  misc_feature 1..20: note = Target: FXN; (-) strand; PAM type: NRG; PAM sequence: GAG
  source 1..20: mol_type = other DNA
tccttgaaaccataaaggga

SEQ ID NO: 8897 - DNA, 20 bp, synthetic construct
  misc_feature 1..20: note = Description of Artificial Sequence: Synthetic oligonucleotide
  misc_feature 1..20: note = Target: FXN; (-) strand; PAM type: NRG; PAM sequence: GAG
  source 1..20: mol_type = other DNA
cctccttgaaaccataaagg

SEQ ID NO: 8898 - DNA, 20 bp, synthetic construct
  misc_feature 1..20: note = Description of Artificial Sequence: Synthetic oligonucleotide
  misc_feature 1..20: note = Target: FXN; (-) strand; PAM type: NRG; PAM sequence: GGG
  source 1..20: mol_type = other DNA
gccctccttgaaaccataaa

SEQ ID NO: 8899 - DNA, 20 bp, synthetic construct
  misc_feature 1..20: note = Description of Artificial Sequence: Synthetic oligonucleotide
  misc_feature 1..20: note = Target: FXN; (-) strand; PAM type: NRG; PAM sequence: AGG
  source 1..20: mol_type = other DNA
agccctccttgaaaccataa

SEQ ID NO: 8900 - DNA, 20 bp, synthetic construct
  misc_feature 1..20: note = Description of Artificial Sequence: Synthetic oligonucleotide
  misc_feature 1..20: note = Target: FXN; (-) strand; PAM type: NRG; PAM sequence: AAG
  source 1..20: mol_type = other DNA
aagccctccttgaaaccata

SEQ ID NO: 8901 - DNA, 20 bp, synthetic construct
  misc_feature 1..20: note = Description of Artificial Sequence: Synthetic oligonucleotide
  misc_feature 1..20: note = Target: FXN; (-) strand; PAM type: NRG; PAM sequence: AAG
  source 1..20: mol_type = other DNA
aaaattctgccaagattgag

SEQ ID NO: 8902 - DNA, 20 bp, synthetic construct
  misc_feature 1..20: note = Description of Artificial Sequence: Synthetic oligonucleotide
  misc_feature 1..20: note = Target: FXN; (-) strand; PAM type: NRG; PAM sequence: GAG
  source 1..20: mol_type = other DNA
tccaaaattctgccaagatt

SEQ ID NO: 8903 - DNA, 20 bp, synthetic construct
  misc_feature 1..20: note = Description of Artificial Sequence: Synthetic oligonucleotide
  misc_feature 1..20: note = Target: FXN; (-) strand; PAM type: NRG; PAM sequence: AAG
  source 1..20: mol_type = other DNA
atccagtccaaaattctgcc

SEQ ID NO: 8904 - DNA, 20 bp, synthetic construct
  misc_feature 1..20: note = Description of Artificial Sequence: Synthetic oligonucleotide
  misc_feature 1..20: note = Target: FXN; (-) strand; PAM type: NRG; PAM sequence: CAG
  source 1..20: mol_type = other DNA
ctgtgcaacaaagaactatc

SEQ ID NO: 8905 - DNA, 20 bp, synthetic construct
  misc_feature 1..20: note = Description of Artificial Sequence: Synthetic oligonucleotide
  misc_feature 1..20: note = Target: FXN; (-) strand; PAM type: NRG; PAM sequence: AAG
  source 1..20: mol_type = other DNA
agccccccacctgtgcaaca

SEQ ID NO: 8906 - DNA, 20 bp, synthetic construct
  misc_feature 1..20: note = Description of Artificial Sequence: Synthetic oligonucleotide
  misc_feature 1..20: note = Target: FXN; (-) strand; PAM type: NRG; PAM sequence: CAG
  source 1..20: mol_type = other DNA
acatcctgtgatgtgcagga

SEQ ID NO: 8907 - DNA, 20 bp, synthetic construct
  misc_feature 1..20: note = Description of Artificial Sequence: Synthetic oligonucleotide
  misc_feature 1..20: note = Target: FXN; (-) strand; PAM type: NRG; PAM sequence: AGG
  source 1..20: mol_type = other DNA
tgaaacatcctgtgatgtgc

SEQ ID NO: 8908 - DNA, 20 bp, synthetic construct
  misc_feature 1..20: note = Description of Artificial Sequence: Synthetic oligonucleotide
  misc_feature 1..20: note = Target: FXN; (-) strand; PAM type: NRG; PAM sequence: CAG
  source 1..20: mol_type = other DNA
atgaaacatcctgtgatgtg

SEQ ID NO: 8909 - DNA, 20 bp, synthetic construct
  misc_feature 1..20: note = Description of Artificial Sequence: Synthetic oligonucleotide
  misc_feature 1..20: note = Target: FXN; (-) strand; PAM type: NRG; PAM sequence: GGG
  source 1..20: mol_type = other DNA
catctagtaggtagaggcca

SEQ ID NO: 8910 - DNA, 20 bp, synthetic construct
  misc_feature 1..20: note = Description of Artificial Sequence: Synthetic oligonucleotide
  misc_feature 1..20: note = Target: FXN; (-) strand; PAM type: NRG; PAM sequence: AGG
  source 1..20: mol_type = other DNA
gcatctagtaggtagaggcc

SEQ ID NO: 8911 - DNA, 20 bp, synthetic construct
  misc_feature 1..20: note = Description of Artificial Sequence: Synthetic oligonucleotide
  misc_feature 1..20: note = Target: FXN; (-) strand; PAM type: NRG; PAM sequence: CAG
  source 1..20: mol_type = other DNA
ggcatctagtaggtagaggc

SEQ ID NO: 8912 - DNA, 20 bp, synthetic construct
  misc_feature 1..20: note = Description of Artificial Sequence: Synthetic oligonucleotide
  misc_feature 1..20: note = Target: FXN; (-) strand; PAM type: NRG; PAM sequence: AGG
  source 1..20: mol_type = other DNA
tactggcatctagtaggtag

SEQ ID NO: 8913 - DNA, 20 bp, synthetic construct
  misc_feature 1..20: note = Description of Artificial Sequence: Synthetic oligonucleotide
  misc_feature 1..20: note = Target: FXN; (-) strand; PAM type: NRG; PAM sequence: GAG
  source 1..20: mol_type = other DNA
ctactggcatctagtaggta

SEQ ID NO: 8914 - DNA, 20 bp, synthetic construct
  misc_feature 1..20: note = Description of Artificial Sequence: Synthetic oligonucleotide
  misc_feature 1..20: note = Target: FXN; (-) strand; PAM type: NRG; PAM sequence: TAG
  source 1..20: mol_type = other DNA
ttctactggcatctagtagg

SEQ ID NO: 8915 - DNA, 20 bp, synthetic construct
  misc_feature 1..20: note = Description of Artificial Sequence: Synthetic oligonucleotide
  misc_feature 1..20: note = Target: FXN; (-) strand; PAM type: NRG; PAM sequence: AGG
  source 1..20: mol_type = other DNA
atgttctactggcatctagt

SEQ ID NO: 8916 - DNA, 20 bp, synthetic construct
  misc_feature 1..20: note = Description of Artificial Sequence: Synthetic oligonucleotide
  misc_feature 1..20: note = Target: FXN; (-) strand; PAM type: NRG; PAM sequence: TAG
  source 1..20: mol_type = other DNA
tatgttctactggcatctag

SEQ ID NO: 8917 - DNA, 20 bp, synthetic construct
  misc_feature 1..20: note = Description of Artificial Sequence: Synthetic oligonucleotide
  misc_feature 1..20: note = Target: FXN; (-) strand; PAM type: NRG; PAM sequence: TAG
  source 1..20: mol_type = other DNA
gggtatgttctactggcatc

SEQ ID NO: 8918 - DNA, 20 bp, synthetic construct
  misc_feature 1..20: note = Description of Artificial Sequence: Synthetic oligonucleotide
  misc_feature 1..20: note = Target: FXN; (-) strand; PAM type: NRG; PAM sequence: TGG
  source 1..20: mol_type = other DNA
gtggggtgggtatgttctac

SEQ ID NO: 8919 - DNA, 20 bp, synthetic construct
  misc_feature 1..20: note = Description of Artificial Sequence: Synthetic oligonucleotide
  misc_feature 1..20: note = Target: FXN; (-) strand; PAM type: NRG; PAM sequence: GGG
  source 1..20: mol_type = other DNA
acaacaggcagctgtggggt

SEQ ID NO: 8920 - DNA, 20 bp, synthetic construct
  misc_feature 1..20: note = Description of Artificial Sequence: Synthetic oligonucleotide
  misc_feature 1..20: note = Target: FXN; (-) strand; PAM type: NRG; PAM sequence: TGG
  source 1..20: mol_type = other DNA
cacaacaggcagctgtgggg

SEQ ID NO: 8921 - DNA, 20 bp, synthetic construct
  misc_feature 1..20: note = Description of Artificial Sequence: Synthetic oligonucleotide
  misc_feature 1..20: note = Target: FXN; (-) strand; PAM type: NRG; PAM sequence: GGG
  source 1..20: mol_type = other DNA
tgtcacaacaggcagctgtg

SEQ ID NO: 8922 - DNA, 20 bp, synthetic construct
  misc_feature 1..20: note = Description of Artificial Sequence: Synthetic oligonucleotide
  misc_feature 1..20: note = Target: FXN; (-) strand; PAM type: NRG; PAM sequence: GGG
  source 1..20: mol_type = other DNA
ttgtcacaacaggcagctgt

SEQ ID NO: 8923 - DNA, 20 bp, synthetic construct
  misc_feature 1..20: note = Description of Artificial Sequence: Synthetic oligonucleotide
  misc_feature 1..20: note = Target: FXN; (-) strand; PAM type: NRG; PAM sequence: TGG
  source 1..20: mol_type = other DNA
attgtcacaacaggcagctg

SEQ ID NO: 8924 - DNA, 20 bp, synthetic construct
  misc_feature 1..20: note = Description of Artificial Sequence: Synthetic oligonucleotide
  misc_feature 1..20: note = Target: FXN; (-) strand; PAM type: NRG; PAM sequence: CAG
  source 1..20: mol_type = other DNA
cttttgattgtcacaacagg

SEQ ID NO: 8925 - DNA, 20 bp, synthetic construct
  misc_feature 1..20: note = Description of Artificial Sequence: Synthetic oligonucleotide
  misc_feature 1..20: note = Target: FXN; (-) strand; PAM type: NRG; PAM sequence: AGG
  source 1..20: mol_type = other DNA
atgcttttgattgtcacaac

SEQ ID NO: 8926 - DNA, 20 bp, synthetic construct
  misc_feature 1..20: note = Description of Artificial Sequence: Synthetic oligonucleotide
  misc_feature 1..20: note = Target: FXN; (-) strand; PAM type: NRG; PAM sequence: CAG
  source 1..20: mol_type = other DNA
gatgcttttgattgtcacaa

SEQ ID NO: 8927 - DNA, 20 bp, synthetic construct
  misc_feature 1..20: note = Description of Artificial Sequence: Synthetic oligonucleotide
  misc_feature 1..20: note = Target: FXN; (-) strand; PAM type: NRG; PAM sequence: GAG
  source 1..20: mol_type = other DNA
ttccccctgcaaagtatctg

SEQ ID NO: 8928 - DNA, 20 bp, synthetic construct
  misc_feature 1..20: note = Description of Artificial Sequence: Synthetic oligonucleotide
  misc_feature 1..20: note = Target: FXN; (-) strand; PAM type: NRG; PAM sequence: TGG
  source 1..20: mol_type = other DNA
ttttccccctgcaaagtatc

SEQ ID NO: 8929 - DNA, 20 bp, synthetic construct
  misc_feature 1..20: note = Description of Artificial Sequence: Synthetic oligonucleotide
  misc_feature 1..20: note = Target: FXN; (-) strand; PAM type: NRG; PAM sequence: AAG
  source 1..20: mol_type = other DNA
gaaatcattttccccctgca

SEQ ID NO: 8930 - DNA, 20 bp, synthetic construct
  misc_feature 1..20: note = Description of Artificial Sequence: Synthetic oligonucleotide
  misc_feature 1..20: note = Target: FXN; (-) strand; PAM type: NRG; PAM sequence: GAG
  source 1..20: mol_type = other DNA
ttatgtatatgccaggcctg

SEQ ID NO: 8931 - DNA, 20 bp, synthetic construct
  misc_feature 1..20: note = Description of Artificial Sequence: Synthetic oligonucleotide
  misc_feature 1..20: note = Target: FXN; (-) strand; PAM type: NRG; PAM sequence: TGG
  source 1..20: mol_type = other DNA
tgttatgtatatgccaggcc

SEQ ID NO: 8932 - DNA, 20 bp, synthetic construct
  misc_feature 1..20: note = Description of Artificial Sequence: Synthetic oligonucleotide
  misc_feature 1..20: note = Target: FXN; (-) strand; PAM type: NRG; PAM sequence: AGG
  source 1..20: mol_type = other DNA
aatactgttatgtatatgcc

SEQ ID NO: 8933 - DNA, 20 bp, synthetic construct
  misc_feature 1..20: note = Description of Artificial Sequence: Synthetic oligonucleotide
  misc_feature 1..20: note = Target: FXN; (-) strand; PAM type: NRG; PAM sequence: CAG
  source 1..20: mol_type = other DNA
aaatactgttatgtatatgc

SEQ ID NO: 8934 - DNA, 20 bp, synthetic construct
  misc_feature 1..20: note = Description of Artificial Sequence: Synthetic oligonucleotide
  misc_feature 1..20: note = Target: FXN; (-) strand; PAM type: NRG; PAM sequence: CAG
  source 1..20: mol_type = other DNA
tgtgtttaattaattctagg

SEQ ID NO: 8935 - DNA, 20 bp, synthetic construct
  misc_feature 1..20: note = Description of Artificial Sequence: Synthetic oligonucleotide
  misc_feature 1..20: note = Target: FXN; (-) strand; PAM type: NRG; PAM sequence: AGG
  source 1..20: mol_type = other DNA
ttctgtgtttaattaattct

SEQ ID NO: 8936 - DNA, 20 bp, synthetic construct
  misc_feature 1..20: note = Description of Artificial Sequence: Synthetic oligonucleotide
  misc_feature 1..20: note = Target: FXN; (-) strand; PAM type: NRG; PAM sequence: TAG
  source 1..20: mol_type = other DNA
cttctgtgtttaattaattc

SEQ ID NO: 8937 - DNA, 20 bp, synthetic construct
  misc_feature 1..20: note = Description of Artificial Sequence: Synthetic oligonucleotide
  misc_feature 1..20: note = Target: FXN; (-) strand; PAM type: NRG; PAM sequence: GAG
  source 1..20: mol_type = other DNA
gtccagggcattctggatga

SEQ ID NO: 8938 - DNA, 20 bp, synthetic construct
  misc_feature 1..20: note = Description of Artificial Sequence: Synthetic oligonucleotide
  misc_feature 1..20: note = Target: FXN; (-) strand; PAM type: NRG; PAM sequence: GAG
  source 1..20: mol_type = other DNA
tggtccagggcattctggat

SEQ ID NO: 8939 - DNA, 20 bp, synthetic construct
  misc_feature 1..20: note = Description of Artificial Sequence: Synthetic oligonucleotide
  misc_feature 1..20: note = Target: FXN; (-) strand; PAM type: NRG; PAM sequence: TGG
  source 1..20: mol_type = other DNA
agaggtggtccagggcattc

SEQ ID NO: 8940 - DNA, 20 bp, synthetic construct
  misc_feature 1..20: note = Description of Artificial Sequence: Synthetic oligonucleotide
  misc_feature 1..20: note = Target: FXN; (-) strand; PAM type: NRG; PAM sequence: GGG
  source 1..20: mol_type = other DNA
cctatcaaagaggtggtcca

SEQ ID NO: 8941 - DNA, 20 bp, synthetic construct
  misc_feature 1..20: note = Description of Artificial Sequence: Synthetic oligonucleotide
  misc_feature 1..20: note = Target: FXN; (-) strand; PAM type: NRG; PAM sequence: AGG
  source 1..20: mol_type = other DNA
gcctatcaaagaggtggtcc

SEQ ID NO: 8942 - DNA, 20 bp, synthetic construct
  misc_feature 1..20: note = Description of Artificial Sequence: Synthetic oligonucleotide
  misc_feature 1..20: note = Target: FXN; (-) strand; PAM type: NRG; PAM sequence: CAG
  source 1..20: mol_type = other DNA
tgcctatcaaagaggtggtc

SEQ ID NO: 8943 - DNA, 20 bp, synthetic construct
  misc_feature 1..20: note = Description of Artificial Sequence: Synthetic oligonucleotide
  misc_feature 1..20: note = Target: FXN; (-) strand; PAM type: NRG; PAM sequence: TGG
  source 1..20: mol_type = other DNA
ctgattgcctatcaaagagg

SEQ ID NO: 8944 - DNA, 20 bp, synthetic construct
  misc_feature 1..20: note = Description of Artificial Sequence: Synthetic oligonucleotide
  misc_feature 1..20: note = Target: FXN; (-) strand; PAM type: NRG; PAM sequence: AGG
  source 1..20: mol_type = other DNA
gatctgattgcctatcaaag

SEQ ID NO: 8945 - DNA, 20 bp, synthetic construct
  misc_feature 1..20: note = Description of Artificial Sequence: Synthetic oligonucleotide
  misc_feature 1..20: note = Target: FXN; (-) strand; PAM type: NRG; PAM sequence: GAG
  source 1..20: mol_type = other DNA
ggatctgattgcctatcaaa

SEQ ID NO: 8946 - DNA, 20 bp, synthetic construct
  misc_feature 1..20: note = Description of Artificial Sequence: Synthetic oligonucleotide
  misc_feature 1..20: note = Target: FXN; (-) strand; PAM type: NRG; PAM sequence: AAG
  source 1..20: mol_type = other DNA
tgggatctgattgcctatca

SEQ ID NO: 8947 - DNA, 20 bp, synthetic construct
  misc_feature 1..20: note = Description of Artificial Sequence: Synthetic oligonucleotide
  misc_feature 1..20: note = Target: FXN; (-) strand; PAM type: NRG; PAM sequence: GGG
  source 1..20: mol_type = other DNA
aaaaatagggtggaggaggt

SEQ ID NO: 8948 - DNA, 20 bp, synthetic construct
  misc_feature 1..20: note = Description of Artificial Sequence: Synthetic oligonucleotide
  misc_feature 1..20: note = Target: FXN; (-) strand; PAM type: NRG; PAM sequence: TGG
  source 1..20: mol_type = other DNA
caaaaatagggtggaggagg

SEQ ID NO: 8949 - DNA, 20 bp, synthetic construct
  misc_feature 1..20: note = Description of Artificial Sequence: Synthetic oligonucleotide
  misc_feature 1..20: note = Target: FXN; (-) strand; PAM type: NRG; PAM sequence: AGG
  source 1..20: mol_type = other DNA
cttcaaaaatagggtggagg

SEQ ID NO: 8950 - DNA, 20 bp, synthetic construct
  misc_feature 1..20: note = Description of Artificial Sequence: Synthetic oligonucleotide
  misc_feature 1..20: note = Target: FXN; (-) strand; PAM type: NRG; PAM sequence: GAG
  source 1..20: mol_type = other DNA
ccttcaaaaatagggtggag

SEQ ID NO: 8951 - DNA, 20 bp, synthetic construct
  misc_feature 1..20: note = Description of Artificial Sequence: Synthetic oligonucleotide
  misc_feature 1..20: note = Target: FXN; (-) strand; PAM type: NRG; PAM sequence: AGG
  source 1..20: mol_type = other DNA
ggccttcaaaaatagggtgg

SEQ ID NO: 8952 - DNA, 20 bp, synthetic construct
  misc_feature 1..20: note = Description of Artificial Sequence: Synthetic oligonucleotide
  misc_feature 1..20: note = Target: FXN; (-) strand; PAM type: NRG; PAM sequence: GAG
  source 1..20: mol_type = other DNA
gggccttcaaaaatagggtg

SEQ ID NO: 8953 - DNA, 20 bp, synthetic construct
  misc_feature 1..20: note = Description of Artificial Sequence: Synthetic oligonucleotide
  misc_feature 1..20: note = Target: FXN; (-) strand; PAM type: NRG; PAM sequence: TGG
  source 1..20: mol_type = other DNA
cagggccttcaaaaataggg

SEQ ID NO: 8954 - DNA, 20 bp, synthetic construct
  misc_feature 1..20: note = Description of Artificial Sequence: Synthetic oligonucleotide
  misc_feature 1..20: note = Target: FXN; (-) strand; PAM type: NRG; PAM sequence: GGG
  source 1..20: mol_type = other DNA
gcacagggccttcaaaaata

SEQ ID NO: 8955 - DNA, 20 bp, synthetic construct
  misc_feature 1..20: note = Description of Artificial Sequence: Synthetic oligonucleotide
  misc_feature 1..20: note = Target: FXN; (-) strand; PAM type: NRG; PAM sequence: AGG
  source 1..20: mol_type = other DNA
ggcacagggccttcaaaaat

SEQ ID NO: 8956 - DNA, 20 bp, synthetic construct
  misc_feature 1..20: note = Description of Artificial Sequence: Synthetic oligonucleotide
  misc_feature 1..20: note = Target: FXN; (-) strand; PAM type: NRG; PAM sequence: TAG
  source 1..20: mol_type = other DNA
tggcacagggccttcaaaaa

SEQ ID NO: 8957 - DNA, 20 bp, synthetic construct
  misc_feature 1..20: note = Description of Artificial Sequence: Synthetic oligonucleotide
  misc_feature 1..20: note = Target: FXN; (-) strand; PAM type: NRG; PAM sequence: GGG
  source 1..20: mol_type = other DNA
gaagaagtggtgttggcaca

SEQ ID NO: 8958 - DNA, 20 bp, synthetic construct
  misc_feature 1..20: note = Description of Artificial Sequence: Synthetic oligonucleotide
  misc_feature 1..20: note = Target: FXN; (-) strand; PAM type: NRG; PAM sequence: AGG
  source 1..20: mol_type = other DNA
ggaagaagtggtgttggcac

SEQ ID NO: 8959 - DNA, 20 bp, synthetic construct
  misc_feature 1..20: note = Description of Artificial Sequence: Synthetic oligonucleotide
  misc_feature 1..20: note = Target: FXN; (-) strand; PAM type: NRG; PAM sequence: CAG
  source 1..20: mol_type = other DNA
tggaagaagtggtgttggca

SEQ ID NO: 8960 - DNA, 20 bp, synthetic construct
  misc_feature 1..20: note = Description of Artificial Sequence: Synthetic oligonucleotide
  misc_feature 1..20: note = Target: FXN; (-) strand; PAM type: NRG; PAM sequence: TGG
  source 1..20: mol_type = other DNA
attcatggaagaagtggtgt

SEQ ID NO: 8961 - DNA, 20 bp, synthetic construct
  misc_feature 1..20: note = Description of Artificial Sequence: Synthetic oligonucleotide
  misc_feature 1..20: note = Target: FXN; (-) strand; PAM type: NRG; PAM sequence: TGG
  source 1..20: mol_type = other DNA
ggaagtattcatggaagaag

SEQ ID NO: 8962 - DNA, 20 bp, synthetic construct
  misc_feature 1..20: note = Description of Artificial Sequence: Synthetic oligonucleotide
  misc_feature 1..20: note = Target: FXN; (-) strand; PAM type: NRG; PAM sequence: AAG
  source 1..20: mol_type = other DNA
caaggaagtattcatggaag

SEQ ID NO: 8963 - DNA, 20 bp, synthetic construct
  misc_feature 1..20: note = Description of Artificial Sequence: Synthetic oligonucleotide
  misc_feature 1..20: note = Target: FXN; (-) strand; PAM type: NRG; PAM sequence: AAG
  source 1..20: mol_type = other DNA
aatcaaggaagtattcatgg

SEQ ID NO: 8964 - DNA, 20 bp, synthetic construct
  misc_feature 1..20: note = Description of Artificial Sequence: Synthetic oligonucleotide
  misc_feature 1..20: note = Target: FXN; (-) strand; PAM type: NRG; PAM sequence: TGG
  source 1..20: mol_type = other DNA
gggaatcaaggaagtattca

SEQ ID NO: 8965 - DNA, 20 bp, synthetic construct
  misc_feature 1..20: note = Description of Artificial Sequence: Synthetic oligonucleotide
  misc_feature 1..20: note = Target: FXN; (-) strand; PAM type: NRG; PAM sequence: AAG
  source 1..20: mol_type = other DNA
tagggatgggggaatcaagg

SEQ ID NO: 8966 - DNA, 20 bp, synthetic construct
  misc_feature 1..20: note = Description of Artificial Sequence: Synthetic oligonucleotide
  misc_feature 1..20: note = Target: FXN; (-) strand; PAM type: NRG; PAM sequence: AGG
  source 1..20: mol_type = other DNA
agctagggatgggggaatca

SEQ ID NO: 8967 - DNA, 20 bp, synthetic construct
  misc_feature 1..20: note = Description of Artificial Sequence: Synthetic oligonucleotide
  misc_feature 1..20: note = Target: FXN; (-) strand; PAM type: NRG; PAM sequence: AAG
  source 1..20: mol_type = other DNA
gagctagggatgggggaatc

SEQ ID NO: 8968 - DNA, 20 bp, synthetic construct
  misc_feature 1..20: note = Description of Artificial Sequence: Synthetic oligonucleotide
  misc_feature 1..20: note = Target: FXN; (-) strand; PAM type: NRG; PAM sequence: GGG
  source 1..20: mol_type = other DNA
ttatatagagctagggatgg

SEQ ID NO: 8969 - DNA, 20 bp, synthetic construct
  misc_feature 1..20: note = Description of Artificial Sequence: Synthetic oligonucleotide
  misc_feature 1..20: note = Target: FXN; (-) strand; PAM type: NRG; PAM sequence: GGG
  source 1..20: mol_type = other DNA
tttatatagagctagggatg

SEQ ID NO: 8970 - DNA, 20 bp, synthetic construct
  misc_feature 1..20: note = Description of Artificial Sequence: Synthetic oligonucleotide
  misc_feature 1..20: note = Target: FXN; (-) strand; PAM type: NRG; PAM sequence: GGG
  source 1..20: mol_type = other DNA
atttatatagagctagggat

SEQ ID NO: 8971 - DNA, 20 bp, synthetic construct
  misc_feature 1..20: note = Description of Artificial Sequence: Synthetic oligonucleotide
  misc_feature 1..20: note = Target: FXN; (-) strand; PAM type: NRG; PAM sequence: TGG
  source 1..20: mol_type = other DNA
gatttatatagagctaggga

SEQ ID NO: 8972 - DNA, 20 bp, synthetic construct
  misc_feature 1..20: note = Description of Artificial Sequence: Synthetic oligonucleotide
  misc_feature 1..20: note = Target: FXN; (-) strand; PAM type: NRG; PAM sequence: GGG
  source 1..20: mol_type = other DNA
gggagatttatatagagcta

SEQ ID NO: 8973 - DNA, 20 bp, synthetic construct
  misc_feature 1..20: note = Description of Artificial Sequence: Synthetic oligonucleotide
  misc_feature 1..20: note = Target: FXN; (-) strand; PAM type: NRG; PAM sequence: AGG
  source 1..20: mol_type = other DNA
tgggagatttatatagagct

SEQ ID NO: 8974 - DNA, 20 bp, synthetic construct
  misc_feature 1..20: note = Description of Artificial Sequence: Synthetic oligonucleotide
  misc_feature 1..20: note = Target: FXN; (-) strand; PAM type: NRG; PAM sequence: TAG
  source 1..20: mol_type = other DNA
gtgggagatttatatagagc

SEQ ID NO: 8975 - DNA, 20 bp, synthetic construct
  misc_feature 1..20: note = Description of Artificial Sequence: Synthetic oligonucleotide
  misc_feature 1..20: note = Target: FXN; (-) strand; PAM type: NRG; PAM sequence: GAG
  source 1..20: mol_type = other DNA
ttgagtgggagatttatata

SEQ ID NO: 8976 - DNA, 20 bp, synthetic construct
  misc_feature 1..20: note = Description of Artificial Sequence: Synthetic oligonucleotide
  misc_feature 1..20: note = Target: FXN; (-) strand; PAM type: NRG; PAM sequence: TAG
  source 1..20: mol_type = other DNA
tgttgagtgggagatttata

SEQ ID NO: 8977 - DNA, 20 bp, synthetic construct
  misc_feature 1..20: note = Description of Artificial Sequence: Synthetic oligonucleotide
  misc_feature 1..20: note = Target: FXN; (-) strand; PAM type: NRG; PAM sequence: GAG
  source 1..20: mol_type = other DNA
caggtgtgagtgttgagtgg

SEQ ID NO: 8978 - DNA, 20 bp, synthetic construct
  misc_feature 1..20: note = Description of Artificial Sequence: Synthetic oligonucleotide
  misc_feature 1..20: note = Target: FXN; (-) strand; PAM type: NRG; PAM sequence: GGG
  source 1..20: mol_type = other DNA
aacaggtgtgagtgttgagt

SEQ ID NO: 8979 - DNA, 20 bp, synthetic construct
  misc_feature 1..20: note = Description of Artificial Sequence: Synthetic oligonucleotide
  misc_feature 1..20: note = Target: FXN; (-) strand; PAM type: NRG; PAM sequence: TGG
  source 1..20: mol_type = other DNA
taacaggtgtgagtgttgag

SEQ ID NO: 8980 - DNA, 20 bp, synthetic construct
  misc_feature 1..20: note = Description of Artificial Sequence: Synthetic oligonucleotide
  misc_feature 1..20: note = Target: FXN; (-) strand; PAM type: NRG; PAM sequence: GAG
  source 1..20: mol_type = other DNA
aactaacaggtgtgagtgtt

SEQ ID NO: 8981 - DNA, 20 bp, synthetic construct
  misc_feature 1..20: note = Description of Artificial Sequence: Synthetic oligonucleotide
  misc_feature 1..20: note = Target: FXN; (-) strand; PAM type: NRG; PAM sequence: GAG
  source 1..20: mol_type = other DNA
gaatgtaaactaacaggtgt

SEQ ID NO: 8982 - DNA, 20 bp, synthetic construct
  misc_feature 1..20: note = Description of Artificial Sequence: Synthetic oligonucleotide
  misc_feature 1..20: note = Target: FXN; (-) strand; PAM type: NRG; PAM sequence: AGG
  source 1..20: mol_type = other DNA
caagaggaatgtaaactaac

SEQ ID NO: 8983 - DNA, 20 bp, synthetic construct
  misc_feature 1..20: note = Description of Artificial Sequence: Synthetic oligonucleotide
  misc_feature 1..20: note = Target: FXN; (-) strand; PAM type: NRG; PAM sequence: CAG
  source 1..20: mol_type = other DNA
tcaagaggaatgtaaactaa

SEQ ID NO: 8984 - DNA, 20 bp, synthetic construct
  misc_feature 1..20: note = Description of Artificial Sequence: Synthetic oligonucleotide
  misc_feature 1..20: note = Target: FXN; (-) strand; PAM type: NRG; PAM sequence: AGG
  source 1..20: mol_type = other DNA
gctaaatgacaagtgtcaag

SEQ ID NO: 8985 - DNA, 20 bp, synthetic construct
  misc_feature 1..20: note = Description of Artificial Sequence: Synthetic oligonucleotide
  misc_feature 1..20: note = Target: FXN; (-) strand; PAM type: NRG; PAM sequence: GAG
  source 1..20: mol_type = other DNA
tgctaaatgacaagtgtcaa

SEQ ID NO: 8986 - DNA, 20 bp, synthetic construct
  misc_feature 1..20: note = Description of Artificial Sequence: Synthetic oligonucleotide
  misc_feature 1..20: note = Target: FXN; (-) strand; PAM type: NRG; PAM sequence: AAG
  source 1..20: mol_type = other DNA
gatgctaaatgacaagtgtc

SEQ ID NO: 8987 - DNA, 20 bp, synthetic construct
  misc_feature 1..20: note = Description of Artificial Sequence: Synthetic oligonucleotide
  misc_feature 1..20: note = Target: FXN; (-) strand; PAM type: NRG; PAM sequence: AAG
  source 1..20: mol_type = other DNA
tacttaggatgctaaatgac

SEQ ID NO: 8988 - DNA, 20 bp, synthetic construct
  misc_feature 1..20: note = Description of Artificial Sequence: Synthetic oligonucleotide
  misc_feature 1..20: note = Target: FXN; (-) strand; PAM type: NRG; PAM sequence: AGG
  source 1..20: mol_type = other DNA
agagacatgtttacatactt

SEQ ID NO: 8989 - DNA, 20 bp, synthetic construct
  misc_feature 1..20: note = Description of Artificial Sequence: Synthetic oligonucleotide
  misc_feature 1..20: note = Target: FXN; (-) strand; PAM type: NRG; PAM sequence: TAG
  source 1..20: mol_type = other DNA
gagagacatgtttacatact

SEQ ID NO: 8990 - DNA, 20 bp, synthetic construct
  misc_feature 1..20: note = Description of Artificial Sequence: Synthetic oligonucleotide
  misc_feature 1..20: note = Target: FXN; (-) strand; PAM type: NRG; PAM sequence: GAG
  source 1..20: mol_type = other DNA
cactttgtgaatcgtgaaga

SEQ ID NO: 8991 - DNA, 20 bp, synthetic construct
  misc_feature 1..20: note = Description of Artificial Sequence: Synthetic oligonucleotide
  misc_feature 1..20: note = Target: FXN; (-) strand; PAM type: NRG; PAM sequence: GAG
  source 1..20: mol_type = other DNA
gccactttgtgaatcgtgaa

SEQ ID NO: 8992 - DNA, 20 bp, synthetic construct
  misc_feature 1..20: note = Description of Artificial Sequence: Synthetic oligonucleotide
  misc_feature 1..20: note = Target: FXN; (-) strand; PAM type: NRG; PAM sequence: AAG
  source 1..20: mol_type = other DNA
aagccactttgtgaatcgtg

SEQ ID NO: 8993 - DNA, 20 bp, synthetic construct
  misc_feature 1..20: note = Description of Artificial Sequence: Synthetic oligonucleotide
  misc_feature 1..20: note = Target: FXN; (-) strand; PAM type: NRG; PAM sequence: AAG
  source 1..20: mol_type = other DNA
aaggtactaaagttcttcca

SEQ ID NO: 8994 - DNA, 20 bp, synthetic construct
  misc_feature 1..20: note = Description of Artificial Sequence: Synthetic oligonucleotide
  misc_feature 1..20: note = Target: FXN; (-) strand; PAM type: NRG; PAM sequence: AAG
  source 1..20: mol_type = other DNA
gagaagatgggaaggtacta

SEQ ID NO: 8995 - DNA, 20 bp, synthetic construct
  misc_feature 1..20: note = Description of Artificial Sequence: Synthetic oligonucleotide
  misc_feature 1..20: note = Target: FXN; (-) strand; PAM type: NRG; PAM sequence: AGG
  source 1..20: mol_type = other DNA
ccatggcagagaagatggga

SEQ ID NO: 8996 - DNA, 20 bp, synthetic construct
  misc_feature 1..20: note = Description of Artificial Sequence: Synthetic oligonucleotide
  misc_feature 1..20: note = Target: FXN; (-) strand; PAM type: NRG; PAM sequence: AAG
  source 1..20: mol_type = other DNA
tccatggcagagaagatggg

SEQ ID NO: 8997 - DNA, 20 bp, synthetic construct
  misc_feature 1..20: note = Description of Artificial Sequence: Synthetic oligonucleotide
  misc_feature 1..20: note = Target: FXN; (-) strand; PAM type: NRG; PAM sequence: GGG
  source 1..20: mol_type = other DNA
ctttccatggcagagaagat

SEQ ID NO: 8998 - DNA, 20 bp, synthetic construct
  misc_feature 1..20: note = Description of Artificial Sequence: Synthetic oligonucleotide
  misc_feature 1..20: note = Target: FXN; (-) strand; PAM type: NRG; PAM sequence: TGG
  source 1..20: mol_type = other DNA
actttccatggcagagaaga

SEQ ID NO: 8999 - DNA, 20 bp, synthetic construct
  misc_feature 1..20: note = Description of Artificial Sequence: Synthetic oligonucleotide
  misc_feature 1..20: note = Target: FXN; (-) strand; PAM type: NRG; PAM sequence: AAG
  source 1..20: mol_type = other DNA
gtacactttccatggcagag

SEQ ID NO: 9000 - DNA, 20 bp, synthetic construct
  misc_feature 1..20: note = Description of Artificial Sequence: Synthetic oligonucleotide
  misc_feature 1..20: note = Target: FXN; (-) strand; PAM type: NRG; PAM sequence: GAG
  source 1..20: mol_type = other DNA
tgtgtacactttccatggca

SEQ ID NO: 9001 - DNA, 20 bp, synthetic construct
  misc_feature 1..20: note = Description of Artificial Sequence: Synthetic oligonucleotide
  misc_feature 1..20: note = Target: FXN; (-) strand; PAM type: NRG; PAM sequence: CAG
  source 1..20: mol_type = other DNA
gttgtgtacactttccatgg

SEQ ID NO: 9002 - DNA, 20 bp, synthetic construct
  misc_feature 1..20: note = Description of Artificial Sequence: Synthetic oligonucleotide
  misc_feature 1..20: note = Target: FXN; (-) strand; PAM type: NRG; PAM sequence: TGG
  source 1..20: mol_type = other DNA
tcagttgtgtacactttcca

SEQ ID NO: 9003 - DNA, 20 bp, synthetic construct
  misc_feature 1..20: note = Description of Artificial Sequence: Synthetic oligonucleotide
  misc_feature 1..20: note = Target: FXN; (-) strand; PAM type: NRG; PAM sequence: CAG
  source 1..20: mol_type = other DNA
cttaaaaaaaaagaaaatgt

SEQ ID NO: 9004 - DNA, 20 bp, synthetic construct
  misc_feature 1..20: note = Description of Artificial Sequence: Synthetic oligonucleotide
  misc_feature 1..20: note = Target: FXN; (-) strand; PAM type: NRG; PAM sequence: AAG
  source 1..20: mol_type = other DNA
aagatactgtcttaaaaaaa

SEQ ID NO: 9005 - DNA, 20 bp, synthetic construct
  misc_feature 1..20: note = Description of Artificial Sequence: Synthetic oligonucleotide
  misc_feature 1..20: note = Target: FXN; (-) strand; PAM type: NRG; PAM sequence: AAG
  source 1..20: mol_type = other DNA
tccagcccggccatcatagc

SEQ ID NO: 9006 - DNA, 20 bp, synthetic construct
  misc_feature 1..20: note = Description of Artificial Sequence: Synthetic oligonucleotide
  misc_feature 1..20: note = Target: FXN; (-) strand; PAM type: NRG; PAM sequence: TAG
  source 1..20: mol_type = other DNA
gcattccagcccggccatca

SEQ ID NO: 9007 - DNA, 20 bp, synthetic construct
  misc_feature 1..20: note = Description of Artificial Sequence: Synthetic oligonucleotide
  misc_feature 1..20: note = Target: FXN; (-) strand; PAM type: NRG; PAM sequence: CGG
  source 1..20: mol_type = other DNA
atagccacagcattccagcc

SEQ ID NO: 9008 - DNA, 20 bp, synthetic construct
  misc_feature 1..20: note = Description of Artificial Sequence: Synthetic oligonucleotide
  misc_feature 1..20: note = Target: FXN; (-) strand; PAM type: NRG; PAM sequence: CAG
  source 1..20: mol_type = other DNA
tgtgaatagccacagcattc

SEQ ID NO: 9009 - DNA, 20 bp, synthetic construct
  misc_feature 1..20: note = Description of Artificial Sequence: Synthetic oligonucleotide
  misc_feature 1..20: note = Target: FXN; (-) strand; PAM type: NRG; PAM sequence: CAG
  source 1..20: mol_type = other DNA
attgtgcctgtgaatagcca

SEQ ID NO: 9010 - DNA, 20 bp, synthetic construct
  misc_feature 1..20: note = Description of Artificial Sequence: Synthetic oligonucleotide
  misc_feature 1..20: note = Target: FXN; (-) strand; PAM type: NRG; PAM sequence: TAG
  source 1..20: mol_type = other DNA
gctatgattgtgcctgtgaa

SEQ ID NO: 9011 - DNA, 20 bp, synthetic construct
  misc_feature 1..20: note = Description of Artificial Sequence: Synthetic oligonucleotide
  misc_feature 1..20: note = Target: FXN; (-) strand; PAM type: NRG; PAM sequence: GAG
  source 1..20: mol_type = other DNA
tgggagctcaaggctgcagt

SEQ ID NO: 9012 - DNA, 20 bp, synthetic construct
  misc_feature 1..20: note = Description of Artificial Sequence: Synthetic oligonucleotide
  misc_feature 1..20: note = Target: FXN; (-) strand; PAM type: NRG; PAM sequence: CAG
  source 1..20: mol_type = other DNA
agcctgggagctcaaggctg

SEQ ID NO: 9013 - DNA, 20 bp, synthetic construct
  misc_feature 1..20: note = Description of Artificial Sequence: Synthetic oligonucleotide
  misc_feature 1..20: note = Target: FXN; (-) strand; PAM type: NRG; PAM sequence: AGG
  source 1..20: mol_type = other DNA
cacttgagcctgggagctca

SEQ ID NO: 9014 - DNA, 20 bp, synthetic construct
  misc_feature 1..20: note = Description of Artificial Sequence: Synthetic oligonucleotide
  misc_feature 1..20: note = Target: FXN; (-) strand; PAM type: NRG; PAM sequence: AAG
  source 1..20: mol_type = other DNA
tcacttgagcctgggagctc

SEQ ID NO: 9015 - DNA, 20 bp, synthetic construct
  misc_feature 1..20: note = Description of Artificial Sequence: Synthetic oligonucleotide
  misc_feature 1..20: note = Target: FXN; (-) strand; PAM type: NRG; PAM sequence: GAG
  source 1..20: mol_type = other DNA
ggaggatcacttgagcctgg

SEQ ID NO: 9016 - DNA, 20 bp, synthetic construct
  misc_feature 1..20: note = Description of Artificial Sequence: Synthetic oligonucleotide
  misc_feature 1..20: note = Target: FXN; (-) strand; PAM type: NRG; PAM sequence: GGG
  source 1..20: mol_type = other DNA
cgggaggatcacttgagcct

SEQ ID NO: 9017 - DNA, 20 bp, synthetic construct
  misc_feature 1..20: note = Description of Artificial Sequence: Synthetic oligonucleotide
  misc_feature 1..20: note = Target: FXN; (-) strand; PAM type: NRG; PAM sequence: TGG
  source 1..20: mol_type = other DNA
gcgggaggatcacttgagcc

SEQ ID NO: 9018 - DNA, 20 bp, synthetic construct
  misc_feature 1..20: note = Description of Artificial Sequence: Synthetic oligonucleotide
  misc_feature 1..20: note = Target: FXN; (-) strand; PAM type: NRG; PAM sequence: GAG
  source 1..20: mol_type = other DNA
ctgaggcgggaggatcactt

SEQ ID NO: 9019 - DNA, 20 bp, synthetic construct
  misc_feature 1..20: note = Description of Artificial Sequence: Synthetic oligonucleotide
  misc_feature 1..20: note = Target: FXN; (-) strand; PAM type: NRG; PAM sequence: AGG
  source 1..20: mol_type = other DNA
actcaggaggctgaggcggg

SEQ ID NO: 9020 - DNA, 20 bp, synthetic construct
  misc_feature 1..20: note = Description of Artificial Sequence: Synthetic oligonucleotide
  misc_feature 1..20: note = Target: FXN; (-) strand; PAM type: NRG; PAM sequence: GAG
  source 1..20: mol_type = other DNA
tactcaggaggctgaggcgg

SEQ ID NO: 9021 - DNA, 20 bp, synthetic construct
  misc_feature 1..20: note = Description of Artificial Sequence: Synthetic oligonucleotide
  misc_feature 1..20: note = Target: FXN; (-) strand; PAM type: NRG; PAM sequence: GGG
  source 1..20: mol_type = other DNA
gctactcaggaggctgaggc

SEQ ID NO: 9022 - DNA, 20 bp, synthetic construct
  misc_feature 1..20: note = Description of Artificial Sequence: Synthetic oligonucleotide
  misc_feature 1..20: note = Target: FXN; (-) strand; PAM type: NRG; PAM sequence: CGG
  source 1..20: mol_type = other DNA
agctactcaggaggctgagg

SEQ ID NO: 9023 - DNA, 20 bp, synthetic construct
  misc_feature 1..20: note = Description of Artificial Sequence: Synthetic oligonucleotide
  misc_feature 1..20: note = Target: FXN; (-) strand; PAM type: NRG; PAM sequence: AGG
  source 1..20: mol_type = other DNA
ctcagctactcaggaggctg

SEQ ID NO: 9024 - DNA, 20 bp, synthetic construct
  misc_feature 1..20: note = Description of Artificial Sequence: Synthetic oligonucleotide
  misc_feature 1..20: note = Target: FXN; (-) strand; PAM type: NRG; PAM sequence: GAG
  source 1..20: mol_type = other DNA
tctcagctactcaggaggct

SEQ ID NO: 9025 - DNA, 20 bp, synthetic construct
  misc_feature 1..20: note = Description of Artificial Sequence: Synthetic oligonucleotide
  misc_feature 1..20: note = Target: FXN; (-) strand; PAM type: NRG; PAM sequence: AGG
  source 1..20: mol_type = other DNA
tgtgatctcagctactcagg

SEQ ID NO: 9026 - DNA, 20 bp, synthetic construct
  misc_feature 1..20: note = Description of Artificial Sequence: Synthetic oligonucleotide
  misc_feature 1..20: note = Target: FXN; (-) strand; PAM type: NRG; PAM sequence: GAG
  source 1..20: mol_type = other DNA
ctgtgatctcagctactcag

SEQ ID NO: 9027 - DNA, 20 bp, synthetic construct
  misc_feature 1..20: note = Description of Artificial Sequence: Synthetic oligonucleotide
  misc_feature 1..20: note = Target: FXN; (-) strand; PAM type: NRG; PAM sequence: AGG
  source 1..20: mol_type = other DNA
gcctgtgatctcagctactc

SEQ ID NO: 9028 - DNA, 20 bp, synthetic construct
  misc_feature 1..20: note = Description of Artificial Sequence: Synthetic oligonucleotide
  misc_feature 1..20: note = Target: FXN; (-) strand; PAM type: NRG; PAM sequence: CAG
  source 1..20: mol_type = other DNA
tgcctgtgatctcagctact

SEQ ID NO: 9029 - DNA, 20 bp, synthetic construct
  misc_feature 1..20: note = Description of Artificial Sequence: Synthetic oligonucleotide
  misc_feature 1..20: note = Target: FXN; (-) strand; PAM type: NRG; PAM sequence: CAG
  source 1..20: mol_type = other DNA
gtagtgcatgcctgtgatct

SEQ ID NO: 9030 - DNA, 20 bp, synthetic construct
  misc_feature 1..20: note = Description of Artificial Sequence: Synthetic oligonucleotide
  misc_feature 1..20: note = Target: FXN; (-) strand; PAM type: NRG; PAM sequence: TAG
  source 1..20: mol_type = other DNA
caaatgtgagccgagtgtgg

SEQ ID NO: 9031 - DNA, 20 bp, synthetic construct
  misc_feature 1..20: note = Description of Artificial Sequence: Synthetic oligonucleotide
  misc_feature 1..20: note = Target: FXN; (-) strand; PAM type: NRG; PAM sequence: TGG
  source 1..20: mol_type = other DNA
tgtcaaatgtgagccgagtg

SEQ ID NO: 9032 - DNA, 20 bp, synthetic construct
  misc_feature 1..20: note = Description of Artificial Sequence: Synthetic oligonucleotide
  misc_feature 1..20: note = Target: FXN; (-) strand; PAM type: NRG; PAM sequence: GAG
  source 1..20: mol_type = other DNA
gaggatgtcaaatgtgagcc

SEQ ID NO: 9033 - DNA, 20 bp, synthetic construct
  misc_feature 1..20: note = Description of Artificial Sequence: Synthetic oligonucleotide
  misc_feature 1..20: note = Target: FXN; (-) strand; PAM type: NRG; PAM sequence: GAG
  source 1..20: mol_type = other DNA
ctttagaggatgtcaaatgt

SEQ ID NO: 9034 - DNA, 20 bp, synthetic construct
  misc_feature 1..20: note = Description of Artificial Sequence: Synthetic oligonucleotide
  misc_feature 1..20: note = Target: FXN; (-) strand; PAM type: NRG; PAM sequence: AGG
  source 1..20: mol_type = other DNA
acattttatatatgctttag

SEQ ID NO: 9035 - DNA, 20 bp, synthetic construct
  misc_feature 1..20: note = Description of Artificial Sequence: Synthetic oligonucleotide
  misc_feature 1..20: note = Target: FXN; (-) strand; PAM type: NRG; PAM sequence: GAG
  source 1..20: mol_type = other DNA
cacattttatatatgcttta

SEQ ID NO: 9036 - DNA, 20 bp, synthetic construct
  misc_feature 1..20: note = Description of Artificial Sequence: Synthetic oligonucleotide
  misc_feature 1..20: note = Target: FXN; (-) strand; PAM type: NRG; PAM sequence: TAG
  source 1..20: mol_type = other DNA
ttcacattttatatatgctt

SEQ ID NO: 9037 - DNA, 20 bp, synthetic construct
  misc_feature 1..20: note = Description of Artificial Sequence: Synthetic oligonucleotide
  misc_feature 1..20: note = Target: FXN; (-) strand; PAM type: NRG; PAM sequence: AAG
  source 1..20: mol_type = other DNA
caaagggatgcaaattgtga

SEQ ID NO: 9038 - DNA, 20 bp, synthetic construct
  misc_feature 1..20: note = Description of Artificial Sequence: Synthetic oligonucleotide
  misc_feature 1..20: note = Target: FXN; (-) strand; PAM type: NRG; PAM sequence: GGG
  source 1..20: mol_type = other DNA
tttctgttacatattacaaa

SEQ ID NO: 9039 - DNA, 20 bp, synthetic construct
  misc_feature 1..20: note = Description of Artificial Sequence: Synthetic oligonucleotide
  misc_feature 1..20: note = Target: FXN; (-) strand; PAM type: NRG; PAM sequence: AGG
  source 1..20: mol_type = other DNA
atttctgttacatattacaa

SEQ ID NO: 9040 - DNA, 20 bp, synthetic construct
  misc_feature 1..20: note = Description of Artificial Sequence: Synthetic oligonucleotide
  misc_feature 1..20: note = Target: FXN; (-) strand; PAM type: NRG; PAM sequence: AAG
  source 1..20: mol_type = other DNA
tatttctgttacatattaca

SEQ ID NO: 9041 - DNA, 20 bp, synthetic construct
  misc_feature 1..20: note = Description of Artificial Sequence: Synthetic oligonucleotide
  misc_feature 1..20: note = Target: FXN; (-) strand; PAM type: NRG; PAM sequence: GAG
  source 1..20: mol_type = other DNA
attgttgatagattttaaaa

SEQ ID NO: 9042 - DNA, 20 bp, synthetic construct
  misc_feature 1..20: note = Description of Artificial Sequence: Synthetic oligonucleotide
  misc_feature 1..20: note = Target: FXN; (-) strand; PAM type: NRG; PAM sequence: AAG
  source 1..20: mol_type = other DNA
ctattgttgatagattttaa

SEQ ID NO: 9043 - DNA, 20 bp, synthetic construct
  misc_feature 1..20: note = Description of Artificial Sequence: Synthetic oligonucleotide
  misc_feature 1..20: note = Target: FXN; (-) strand; PAM type: NRG; PAM sequence: TAG
  source 1..20: mol_type = other DNA
cgtgccttgcctattgttga

SEQ ID NO: 9044 - DNA, 20 bp, synthetic construct
  misc_feature 1..20: note = Description of Artificial Sequence: Synthetic oligonucleotide
  misc_feature 1..20: note = Target: FXN; (-) strand; PAM type: NRG; PAM sequence: GAG
  source 1..20: mol_type = other DNA
agtgctgagacgacaggcgt

SEQ ID NO: 9045 - DNA, 20 bp, synthetic construct
  misc_feature 1..20: note = Description of Artificial Sequence: Synthetic oligonucleotide
  misc_feature 1..20: note = Target: FXN; (-) strand; PAM type: NRG; PAM sequence: AGG
  source 1..20: mol_type = other DNA
tcacaaagtgctgagacgac

SEQ ID NO: 9046 - DNA, 20 bp, synthetic construct
  misc_feature 1..20: note = Description of Artificial Sequence: Synthetic oligonucleotide
  misc_feature 1..20: note = Target: FXN; (-) strand; PAM type: NRG; PAM sequence: CAG
  source 1..20: mol_type = other DNA
ctcacaaagtgctgagacga

SEQ ID NO: 9047 - DNA, 20 bp, synthetic construct
  misc_feature 1..20: note = Description of Artificial Sequence: Synthetic oligonucleotide
  misc_feature 1..20: note = Target: FXN; (-) strand; PAM type: NRG; PAM sequence: GAG
  source 1..20: mol_type = other DNA
cctgggcctcacaaagtgct

SEQ ID NO: 9048 - DNA, 20 bp, synthetic construct
  misc_feature 1..20: note = Description of Artificial Sequence: Synthetic oligonucleotide
  misc_feature 1..20: note = Target: FXN; (-) strand; PAM type: NRG; PAM sequence: AAG
  source 1..20: mol_type = other DNA
ctgcccgcctgggcctcaca

SEQ ID NO: 9049 - DNA, 20 bp, synthetic construct
  misc_feature 1..20: note = Description of Artificial Sequence: Synthetic oligonucleotide
  misc_feature 1..20: note = Target: FXN; (-) strand; PAM type: NRG; PAM sequence: GGG
  source 1..20: mol_type = other DNA
ctcaaacgatctgcccgcct

SEQ ID NO: 9050 - DNA, 20 bp, synthetic construct
  misc_feature 1..20: note = Description of Artificial Sequence: Synthetic oligonucleotide
  misc_feature 1..20: note = Target: FXN; (-) strand; PAM type: NRG; PAM sequence: TGG
  source 1..20: mol_type = other DNA
gctcaaacgatctgcccgcc

SEQ ID NO: 9051 - DNA, 20 bp, synthetic construct
  misc_feature 1..20: note = Description of Artificial Sequence: Synthetic oligonucleotide
  misc_feature 1..20: note = Target: FXN; (-) strand; PAM type: NRG; PAM sequence: AGG
  source 1..20: mol_type = other DNA
cagggtggtcttgaacttct

SEQ ID NO: 9052 - DNA, 20 bp, synthetic construct
  misc_feature 1..20: note = Description of Artificial Sequence: Synthetic oligonucleotide
  misc_feature 1..20: note = Target: FXN; (-) strand; PAM type: NRG; PAM sequence: TAG
  source 1..20: mol_type = other DNA
ccagggtggtcttgaacttc

SEQ ID NO: 9053 - DNA, 20 bp, synthetic construct
  misc_feature 1..20: note = Description of Artificial Sequence: Synthetic oligonucleotide
  misc_feature 1..20: note = Target: FXN; (-) strand; PAM type: NRG; PAM sequence: TGG
  source 1..20: mol_type = other DNA
tttcgctatgttgcccaggg

SEQ ID NO: 9054 - DNA, 20 bp, synthetic construct
  misc_feature 1..20: note = Description of Artificial Sequence: Synthetic oligonucleotide
  misc_feature 1..20: note = Target: FXN; (-) strand; PAM type: NRG; PAM sequence: GGG
  source 1..20: mol_type = other DNA
gggtttcgctatgttgccca

SEQ ID NO: 9055 - DNA, 20 bp, synthetic construct
  misc_feature 1..20: note = Description of Artificial Sequence: Synthetic oligonucleotide
  misc_feature 1..20: note = Target: FXN; (-) strand; PAM type: NRG; PAM sequence: AGG
  source 1..20: mol_type = other DNA
ggggtttcgctatgttgccc

SEQ ID NO: 9056 - DNA, 20 bp, synthetic construct
  misc_feature 1..20: note = Description of Artificial Sequence: Synthetic oligonucleotide
  misc_feature 1..20: note = Target: FXN; (-) strand; PAM type: NRG; PAM sequence: CAG
  source 1..20: mol_type = other DNA
gggggtttcgctatgttgcc

SEQ ID NO: 9057 - DNA, 20 bp, synthetic construct
  misc_feature 1..20: note = Description of Artificial Sequence: Synthetic oligonucleotide
  misc_feature 1..20: note = Target: FXN; (-) strand; PAM type: NRG; PAM sequence: GGG
  source 1..20: mol_type = other DNA
ttgtattttttgtagaaagg

SEQ ID NO: 9058 - DNA, 20 bp, synthetic construct
  misc_feature 1..20: note = Description of Artificial Sequence: Synthetic oligonucleotide
  misc_feature 1..20: note = Target: FXN; (-) strand; PAM type: NRG; PAM sequence: GGG
  source 1..20: mol_type = other DNA
tttgtattttttgtagaaag

SEQ ID NO: 9059 - DNA, 20 bp, synthetic construct
  misc_feature 1..20: note = Description of Artificial Sequence: Synthetic oligonucleotide
  misc_feature 1..20: note = Target: FXN; (-) strand; PAM type: NRG; PAM sequence: GGG
  source 1..20: mol_type = other DNA
ttttgtattttttgtagaaa

SEQ ID NO: 9060 - DNA, 20 bp, synthetic construct
  misc_feature 1..20: note = Description of Artificial Sequence: Synthetic oligonucleotide
  misc_feature 1..20: note = Target: FXN; (-) strand; PAM type: NRG; PAM sequence: AGG
  source 1..20: mol_type = other DNA
tttttgtattttttgtagaa

SEQ ID NO: 9061 - DNA, 20 bp, synthetic construct
  misc_feature 1..20: note = Description of Artificial Sequence: Synthetic oligonucleotide
  misc_feature 1..20: note = Target: FXN; (-) strand; PAM type: NRG; PAM sequence: AAG
  source 1..20: mol_type = other DNA
gtttttgtattttttgtaga

SEQ ID NO: 9062 - DNA, 20 bp, synthetic construct
  misc_feature 1..20: note = Description of Artificial Sequence: Synthetic oligonucleotide
  misc_feature 1..20: note = Target: FXN; (-) strand; PAM type: NRG; PAM sequence: TAG
  source 1..20: mol_type = other DNA
gctagtttttgtattttttg

SEQ ID NO: 9063 - DNA, 20 bp, synthetic construct
  misc_feature 1..20: note = Description of Artificial Sequence: Synthetic oligonucleotide
  misc_feature 1..20: note = Target: FXN; (-) strand; PAM type: NRG; PAM sequence: TAG
  source 1..20: mol_type = other DNA
tgtgcaccaccacacccagc

SEQ ID NO: 9064 - DNA, 20 bp, synthetic construct
  misc_feature 1..20: note = Description of Artificial Sequence: Synthetic oligonucleotide
  misc_feature 1..20: note = Target: FXN; (-) strand; PAM type: NRG; PAM sequence: CAG
  source 1..20: mol_type = other DNA
caggtgtgcaccaccacacc

SEQ ID NO: 9065 - DNA, 20 bp, synthetic construct
  misc_feature 1..20: note = Description of Artificial Sequence: Synthetic oligonucleotide
  misc_feature 1..20: note = Target: FXN; (-) strand; PAM type: NRG; PAM sequence: AGG
  source 1..20: mol_type = other DNA
ttccaagtagctgggactac

SEQ ID NO: 9066 - DNA, 20 bp, synthetic construct
  misc_feature 1..20: note = Description of Artificial Sequence: Synthetic oligonucleotide
  misc_feature 1..20: note = Target: FXN; (-) strand; PAM type: NRG; PAM sequence: CAG
  source 1..20: mol_type = other DNA
cttccaagtagctgggacta

SEQ ID NO: 9067 - DNA, 20 bp, synthetic construct
  misc_feature 1..20: note = Description of Artificial Sequence: Synthetic oligonucleotide
  misc_feature 1..20: note = Target: FXN; (-) strand; PAM type: NRG; PAM sequence: GGG
  source 1..20: mol_type = other DNA
tttcagccttccaagtagct

SEQ ID NO: 9068 - DNA, 20 bp, synthetic construct
  misc_feature 1..20: note = Description of Artificial Sequence: Synthetic oligonucleotide
  misc_feature 1..20: note = Target: FXN; (-) strand; PAM type: NRG; PAM sequence: TGG
  source 1..20: mol_type = other DNA
atttcagccttccaagtagc

SEQ ID NO: 9069 - DNA, 20 bp, synthetic construct
  misc_feature 1..20: note = Description of Artificial Sequence: Synthetic oligonucleotide
  misc_feature 1..20: note = Target: FXN; (-) strand; PAM type: NRG; PAM sequence: TAG
  source 1..20: mol_type = other DNA
tcccatttcagccttccaag

SEQ ID NO: 9070 - DNA, 20 bp, synthetic construct
  misc_feature 1..20: note = Description of Artificial Sequence: Synthetic oligonucleotide
  misc_feature 1..20: note = Target: FXN; (-) strand; PAM type: NRG; PAM sequence: AAG
  source 1..20: mol_type = other DNA
tcttcccatttcagccttcc

SEQ ID NO: 9071 - DNA, 20 bp, synthetic construct
  misc_feature 1..20: note = Description of Artificial Sequence: Synthetic oligonucleotide
  misc_feature 1..20: note = Target: FXN; (-) strand; PAM type: NRG; PAM sequence: CAG
  source 1..20: mol_type = other DNA
ctcaagcagtcttcccattt

SEQ ID NO: 9072 - DNA, 20 bp, synthetic construct
  misc_feature 1..20: note = Description of Artificial Sequence: Synthetic oligonucleotide
  misc_feature 1..20: note = Target: FXN; (-) strand; PAM type: NRG; PAM sequence: CAG
  source 1..20: mol_type = other DNA
ttctccctcccgggctcaag

SEQ ID NO: 9073 - DNA, 20 bp, synthetic construct
  misc_feature 1..20: note = Description of Artificial Sequence: Synthetic oligonucleotide
  misc_feature 1..20: note = Target: FXN; (-) strand; PAM type: NRG; PAM sequence: AAG
  source 1..20: mol_type = other DNA
aacttctccctcccgggctc

SEQ ID NO: 9074 - DNA, 20 bp, synthetic construct
  misc_feature 1..20: note = Description of Artificial Sequence: Synthetic oligonucleotide
  misc_feature 1..20: note = Target: FXN; (-) strand; PAM type: NRG; PAM sequence: GGG
  source 1..20: mol_type = other DNA
tactgcaacttctccctccc

SEQ ID NO: 9075 - DNA, 20 bp, synthetic construct
  misc_feature 1..20: note = Description of Artificial Sequence: Synthetic oligonucleotide
  misc_feature 1..20: note = Target: FXN; (-) strand; PAM type: NRG; PAM sequence: CGG
  source 1..20: mol_type = other DNA
ttactgcaacttctccctcc

SEQ ID NO: 9076 - DNA, 20 bp, synthetic construct
  misc_feature 1..20: note = Description of Artificial Sequence: Synthetic oligonucleotide
  misc_feature 1..20: note = Target: FXN; (-) strand; PAM type: NRG; PAM sequence: TGG
  source 1..20: mol_type = other DNA
ggagtgcagtggtgtggtcc

SEQ ID NO: 9077 - DNA, 20 bp, synthetic construct
  misc_feature 1..20: note = Description of Artificial Sequence: Synthetic oligonucleotide
  misc_feature 1..20: note = Target: FXN; (-) strand; PAM type: NRG; PAM sequence: TGG
  source 1..20: mol_type = other DNA
caggctggagtgcagtggtg

SEQ ID NO: 9078 - DNA, 20 bp, synthetic construct
  misc_feature 1..20: note = Description of Artificial Sequence: Synthetic oligonucleotide
  misc_feature 1..20: note = Target: FXN; (-) strand; PAM type: NRG; PAM sequence: TGG
  source 1..20: mol_type = other DNA
ttgcccaggctggagtgcag

SEQ ID NO: 9079 - DNA, 20 bp, synthetic construct
  misc_feature 1..20: note = Description of Artificial Sequence: Synthetic oligonucleotide
  misc_feature 1..20: note = Target: FXN; (-) strand; PAM type: NRG; PAM sequence: CAG
  source 1..20: mol_type = other DNA
ctgttgcccaggctggagtg

SEQ ID NO: 9080 - DNA, 20 bp, synthetic construct
  misc_feature 1..20: note = Description of Artificial Sequence: Synthetic oligonucleotide
  misc_feature 1..20: note = Target: FXN; (-) strand; PAM type: NRG; PAM sequence: GAG
  source 1..20: mol_type = other DNA
tcactctgttgcccaggctg

SEQ ID NO: 9081 - DNA, 20 bp, synthetic construct
  misc_feature 1..20: note = Description of Artificial Sequence: Synthetic oligonucleotide
  misc_feature 1..20: note = Target: FXN; (-) strand; PAM type: NRG; PAM sequence: TGG
  source 1..20: mol_type = other DNA
tctcactctgttgcccaggc

SEQ ID NO: 9082 - DNA, 20 bp, synthetic construct
  misc_feature 1..20: note = Description of Artificial Sequence: Synthetic oligonucleotide
  misc_feature 1..20: note = Target: FXN; (-) strand; PAM type: NRG; PAM sequence: AGG
  source 1..20: mol_type = other DNA
agagtctcactctgttgccc

SEQ ID NO: 9083 - DNA, 20 bp, synthetic construct
  misc_feature 1..20: note = Description of Artificial Sequence: Synthetic oligonucleotide
  misc_feature 1..20: note = Target: FXN; (-) strand; PAM type: NRG; PAM sequence: CAG
  source 1..20: mol_type = other DNA
cagagtctcactctgttgcc

SEQ ID NO: 9084 - DNA, 20 bp, synthetic construct
  misc_feature 1..20: note = Description of Artificial Sequence: Synthetic oligonucleotide
  misc_feature 1..20: note = Target: FXN; (-) strand; PAM type: NRG; PAM sequence: GAG
  source 1..20: mol_type = other DNA
ttatttgtttgtttgagaca

SEQ ID NO: 9085 - DNA, 20 bp, synthetic construct
  misc_feature 1..20: note = Description of Artificial Sequence: Synthetic oligonucleotide
  misc_feature 1..20: note = Target: FXN; (-) strand; PAM type: NRG; PAM sequence: CAG
  source 1..20: mol_type = other DNA
atttatttgtttgtttgaga

SEQ ID NO: 9086 - DNA, 20 bp, synthetic construct
  misc_feature 1..20: note = Description of Artificial Sequence: Synthetic oligonucleotide
  misc_feature 1..20: note = Target: FXN; (-) strand; PAM type: NRG; PAM sequence: GAG
  source 1..20: mol_type = other DNA
cctcatttatttgtttgttt

SEQ ID NO: 9087 - DNA, 20 bp, synthetic construct
  misc_feature 1..20: note = Description of Artificial Sequence: Synthetic oligonucleotide
  misc_feature 1..20: note = Target: FXN; (-) strand; PAM type: NRG; PAM sequence: TGG
  source 1..20: mol_type = other DNA
tttcaccgtgttagccagga

SEQ ID NO: 9088 - DNA, 20 bp, synthetic construct
  misc_feature 1..20: note = Description of Artificial Sequence: Synthetic oligonucleotide
  misc_feature 1..20: note = Target: FXN; (-) strand; PAM type: NRG; PAM sequence: AGG
  source 1..20: mol_type = other DNA
cgggtttcaccgtgttagcc

SEQ ID NO: 9089 - DNA, 20 bp, synthetic construct
  misc_feature 1..20: note = Description of Artificial Sequence: Synthetic oligonucleotide
  misc_feature 1..20: note = Target: FXN; (-) strand; PAM type: NRG; PAM sequence: CAG
  source 1..20: mol_type = other DNA
acgggtttcaccgtgttagc

SEQ ID NO: 9090 - DNA, 20 bp, synthetic construct
  misc_feature 1..20: note = Description of Artificial Sequence: Synthetic oligonucleotide
  misc_feature 1..20: note = Target: FXN; (-) strand; PAM type: NRG; PAM sequence: TAG
  source 1..20: mol_type = other DNA
agagacgggtttcaccgtgt

SEQ ID NO: 9091 - DNA, 20 bp, synthetic construct
  misc_feature 1..20: note = Description of Artificial Sequence: Synthetic oligonucleotide
  misc_feature 1..20: note = Target: FXN; (-) strand; PAM type: NRG; PAM sequence: GGG
  source 1..20: mol_type = other DNA
tttttttttttagtagagac

SEQ ID NO: 9092 - DNA, 20 bp, synthetic construct
  misc_feature 1..20: note = Description of Artificial Sequence: Synthetic oligonucleotide
  misc_feature 1..20: note = Target: FXN; (-) strand; PAM type: NRG; PAM sequence: CGG
  source 1..20: mol_type = other DNA
ttttttttttttagtagaga

SEQ ID NO: 9093 - DNA, 20 bp, synthetic construct
  misc_feature 1..20: note = Description of Artificial Sequence: Synthetic oligonucleotide
  misc_feature 1..20: note = Target: FXN; (-) strand; PAM type: NRG; PAM sequence: GAG
  source 1..20: mol_type = other DNA
atttttttttttttttagta

SEQ ID NO: 9094 - DNA, 20 bp, synthetic construct
  misc_feature 1..20: note = Description of Artificial Sequence: Synthetic oligonucleotide
  misc_feature 1..20: note = Target: FXN; (-) strand; PAM type: NRG; PAM sequence: TAG
  source 1..20: mol_type = other DNA
gtatttttttttttttttag

SEQ ID NO: 9095 - DNA, 20 bp, synthetic construct
  misc_feature 1..20: note = Description of Artificial Sequence: Synthetic oligonucleotide
  misc_feature 1..20: note = Target: FXN; (-) strand; PAM type: NRG; PAM sequence: TAG
  source 1..20: mol_type = other DNA
tttgtatttttttttttttt

SEQ ID NO: 9096 - DNA, 20 bp, synthetic construct
  misc_feature 1..20: note = Description of Artificial Sequence: Synthetic oligonucleotide
  misc_feature 1..20: note = Target: FXN; (-) strand; PAM type: NRG; PAM sequence: TGG
  source 1..20: mol_type = other DNA
caggcgcccgccaccatgcc

SEQ ID NO: 9097 - DNA, 20 bp, synthetic construct
  misc_feature 1..20: note = Description of Artificial Sequence: Synthetic oligonucleotide
  misc_feature 1..20: note = Target: FXN; (-) strand; PAM type: NRG; PAM sequence: AGG
  source 1..20: mol_type = other DNA
tcccgagtaactgggactac

SEQ ID NO: 9098 - DNA, 20 bp, synthetic construct
  misc_feature 1..20: note = Description of Artificial Sequence: Synthetic oligonucleotide
  misc_feature 1..20: note = Target: FXN; (-) strand; PAM type: NRG; PAM sequence: CAG
  source 1..20: mol_type = other DNA
ctcccgagtaactgggacta

SEQ ID NO: 9099 - DNA, 20 bp, synthetic construct
  misc_feature 1..20: note = Description of Artificial Sequence: Synthetic oligonucleotide
  misc_feature 1..20: note = Target: FXN; (-) strand; PAM type: NRG; PAM sequence: GGG
  source 1..20: mol_type = other DNA
cctcagcctcccgagtaact

SEQ ID NO: 9100 - DNA, 20 bp, synthetic construct
  misc_feature 1..20: note = Description of Artificial Sequence: Synthetic oligonucleotide
  misc_feature 1..20: note = Target: FXN; (-) strand; PAM type: NRG; PAM sequence: TGG
  source 1..20: mol_type = other DNA
gcctcagcctcccgagtaac

SEQ ID NO: 9101 - DNA, 20 bp, synthetic construct
  misc_feature 1..20: note = Description of Artificial Sequence: Synthetic oligonucleotide
  misc_feature 1..20: note = Target: FXN; (-) strand; PAM type: NRG; PAM sequence: GAG
  source 1..20: mol_type = other DNA
ttctcctgcctcagcctccc

SEQ ID NO: 9102 - DNA, 20 bp, synthetic construct
  misc_feature 1..20: note = Description of Artificial Sequence: Synthetic oligonucleotide
  misc_feature 1..20: note = Target: FXN; (-) strand; PAM type: NRG; PAM sequence: CAG
  source 1..20: mol_type = other DNA
ttcacgccattctcctgcct

SEQ ID NO: 9103 - DNA, 20 bp, synthetic construct
  misc_feature 1..20: note = Description of Artificial Sequence: Synthetic oligonucleotide
  misc_feature 1..20: note = Target: FXN; (-) strand; PAM type: NRG; PAM sequence: CGG
  source 1..20: mol_type = other DNA
tcactgcaagctctgcctcc

SEQ ID NO: 9104 - DNA, 20 bp, synthetic construct
  misc_feature 1..20: note = Description of Artificial Sequence: Synthetic oligonucleotide
  misc_feature 1..20: note = Target: FXN; (-) strand; PAM type: NRG; PAM sequence: AAG
  source 1..20: mol_type = other DNA
gtgcgatctcggctcactgc

SEQ ID NO: 9105 - DNA, 20 bp, synthetic construct
  misc_feature 1..20: note = Description of Artificial Sequence: Synthetic oligonucleotide
  misc_feature 1..20: note = Target: FXN; (-) strand; PAM type: NRG; PAM sequence: CGG
  source 1..20: mol_type = other DNA
ggagggcagtggtgcgatct

SEQ ID NO: 9106 - DNA, 20 bp, synthetic construct
  misc_feature 1..20: note = Description of Artificial Sequence: Synthetic oligonucleotide
  misc_feature 1..20: note = Target: FXN; (-) strand; PAM type: NRG; PAM sequence: TGG
  source 1..20: mol_type = other DNA
tcgcccaggctggagggcag

SEQ ID NO: 9107 - DNA, 20 bp, synthetic construct
  misc_feature 1..20: note = Description of Artificial Sequence: Synthetic oligonucleotide
  misc_feature 1..20: note = Target: FXN; (-) strand; PAM type: NRG; PAM sequence: CAG
  source 1..20: mol_type = other DNA
ctgtcgcccaggctggaggg

SEQ ID NO: 9108 - DNA, 20 bp, synthetic construct
  misc_feature 1..20: note = Description of Artificial Sequence: Synthetic oligonucleotide
  misc_feature 1..20: note = Target: FXN; (-) strand; PAM type: NRG; PAM sequence: GGG
  source 1..20: mol_type = other DNA
gctctgtcgcccaggctgga

SEQ ID NO: 9109 - DNA, 20 bp, synthetic construct
  misc_feature 1..20: note = Description of Artificial Sequence: Synthetic oligonucleotide
  misc_feature 1..20: note = Target: FXN; (-) strand; PAM type: NRG; PAM sequence: AGG
  source 1..20: mol_type = other DNA
cgctctgtcgcccaggctgg

SEQ ID NO: 9110 - DNA, 20 bp, synthetic construct
  misc_feature 1..20: note = Description of Artificial Sequence: Synthetic oligonucleotide
  misc_feature 1..20: note = Target: FXN; (-) strand; PAM type: NRG; PAM sequence: GAG
  source 1..20: mol_type = other DNA
tcgctctgtcgcccaggctg

SEQ ID NO: 9111 - DNA, 20 bp, synthetic construct
  misc_feature 1..20: note = Description of Artificial Sequence: Synthetic oligonucleotide
  misc_feature 1..20: note = Target: FXN; (-) strand; PAM type: NRG; PAM sequence: TGG
  source 1..20: mol_type = other DNA
tctcgctctgtcgcccaggc

SEQ ID NO: 9112 - DNA, 20 bp, synthetic construct
  misc_feature 1..20: note = Description of Artificial Sequence: Synthetic oligonucleotide
  misc_feature 1..20: note = Target: FXN; (-) strand; PAM type: NRG; PAM sequence: AGG
  source 1..20: mol_type = other DNA
ggagtctcgctctgtcgccc

SEQ ID NO: 9113 - DNA, 20 bp, synthetic construct
  misc_feature 1..20: note = Description of Artificial Sequence: Synthetic oligonucleotide
  misc_feature 1..20: note = Target: FXN; (-) strand; PAM type: NRG; PAM sequence: CAG
  source 1..20: mol_type = other DNA
cggagtctcgctctgtcgcc

SEQ ID NO: 9114 - DNA, 20 bp, synthetic construct
  misc_feature 1..20: note = Description of Artificial Sequence: Synthetic oligonucleotide
  misc_feature 1..20: note = Target: FXN; (-) strand; PAM type: NRG; PAM sequence: GAG
  source 1..20: mol_type = other DNA
ttgattgattgattgagacg

SEQ ID NO: 9115 - DNA, 20 bp, synthetic construct
  misc_feature 1..20: note = Description of Artificial Sequence: Synthetic oligonucleotide
  misc_feature 1..20: note = Target: FXN; (-) strand; PAM type: NRG; PAM sequence: CGG
  source 1..20: mol_type = other DNA
gattgattgattgattgaga

SEQ ID NO: 9116 - DNA, 20 bp, synthetic construct
  misc_feature 1..20: note = Description of Artificial Sequence: Synthetic oligonucleotide
  misc_feature 1..20: note = Target: FXN; (-) strand; PAM type: NRG; PAM sequence: GAG
  source 1..20: mol_type = other DNA
tattgattgattgattgatt

SEQ ID NO: 9117 - DNA, 20 bp, synthetic construct
  misc_feature 1..20: note = Description of Artificial Sequence: Synthetic oligonucleotide
  misc_feature 1..20: note = Target: FXN; (-) strand; PAM type: NRG; PAM sequence: TAG
  source 1..20: mol_type = other DNA
tgcacaataaatattgttaa

SEQ ID NO: 9118 - DNA, 20 bp, synthetic construct
  misc_feature 1..20: note = Description of Artificial Sequence: Synthetic oligonucleotide
  misc_feature 1..20: note = Target: FXN; (-) strand; PAM type: NRG; PAM sequence: AAG
  source 1..20: mol_type = other DNA
ggacagggcatgttcctgtt

SEQ ID NO: 9119 - DNA, 20 bp, synthetic construct
  misc_feature 1..20: note = Description of Artificial Sequence: Synthetic oligonucleotide
  misc_feature 1..20: note = Target: FXN; (-) strand; PAM type: NRG; PAM sequence: GGG
  source 1..20: mol_type = other DNA
tgtaaagttttttttggaca

SEQ ID NO: 9120 - DNA, 20 bp, synthetic construct
  misc_feature 1..20: note = Description of Artificial Sequence: Synthetic oligonucleotide
  misc_feature 1..20: note = Target: FXN; (-) strand; PAM type: NRG; PAM sequence: AGG
  source 1..20: mol_type = other DNA
ctgtaaagttttttttggac

SEQ ID NO: 9121 - DNA, 20 bp, synthetic construct
  misc_feature 1..20: note = Description of Artificial Sequence: Synthetic oligonucleotide
  misc_feature 1..20: note = Target: FXN; (-) strand; PAM type: NRG; PAM sequence: CAG
  source 1..20: mol_type = other DNA
cctgtaaagttttttttgga

SEQ ID NO: 9122 - DNA, 20 bp, synthetic construct
  misc_feature 1..20: note = Description of Artificial Sequence: Synthetic oligonucleotide
  misc_feature 1..20: note = Target: FXN; (-) strand; PAM type: NRG; PAM sequence: TGG
  source 1..20: mol_type = other DNA
aagccctgtaaagttttttt

SEQ ID NO: 9123 - DNA, 20 bp, synthetic construct
  misc_feature 1..20: note = Description of Artificial Sequence: Synthetic oligonucleotide
  misc_feature 1..20: note = Target: FXN; (-) strand; PAM type: NRG; PAM sequence: AAG
  source 1..20: mol_type = other DNA
aaaatgagttaagccctgta

SEQ ID NO: 9124 - DNA, 20 bp, synthetic construct
  misc_feature 1..20: note = Description of Artificial Sequence: Synthetic oligonucleotide
  misc_feature 1..20: note = Target: FXN; (-) strand; PAM type: NRG; PAM sequence: AAG
  source 1..20: mol_type = other DNA
tggtaaggataaaatgagtt

SEQ ID NO: 9125 - DNA, 20 bp, synthetic construct
  misc_feature 1..20: note = Description of Artificial Sequence: Synthetic oligonucleotide
  misc_feature 1..20: note = Target: FXN; (-) strand; PAM type: NRG; PAM sequence: GAG
  source 1..20: mol_type = other DNA
gattgtggtaaggataaaat

SEQ ID NO: 9126 - DNA, 20 bp, synthetic construct
  misc_feature 1..20: note = Description of Artificial Sequence: Synthetic oligonucleotide
  misc_feature 1..20: note = Target: FXN; (-) strand; PAM type: NRG; PAM sequence: AGG
  source 1..20: mol_type = other DNA
tacttcataggattgtggta

SEQ ID NO: 9127 - DNA, 20 bp, synthetic construct
  misc_feature 1..20: note = Description of Artificial Sequence: Synthetic oligonucleotide
  misc_feature 1..20: note = Target: FXN; (-) strand; PAM type: NRG; PAM sequence: AAG
  source 1..20: mol_type = other DNA
ctacttcataggattgtggt

SEQ ID NO: 9128 - DNA, 20 bp, synthetic construct
  misc_feature 1..20: note = Description of Artificial Sequence: Synthetic oligonucleotide
  misc_feature 1..20: note = Target: FXN; (-) strand; PAM type: NRG; PAM sequence: TGG
  source 1..20: mol_type = other DNA
gttcctacttcataggattg

SEQ ID NO: 9129 - DNA, 20 bp, synthetic construct
  misc_feature 1..20: note = Description of Artificial Sequence: Synthetic oligonucleotide
  misc_feature 1..20: note = Target: FXN; (-) strand; PAM type: NRG; PAM sequence: AGG
  source 1..20: mol_type = other DNA
tataaaagttcctacttcat

SEQ ID NO: 9130 - DNA, 20 bp, synthetic construct
  misc_feature 1..20: note = Description of Artificial Sequence: Synthetic oligonucleotide
  misc_feature 1..20: note = Target: FXN; (-) strand; PAM type: NRG; PAM sequence: TAG
  source 1..20: mol_type = other DNA
ttataaaagttcctacttca

SEQ ID NO: 9131 - DNA, 20 bp, synthetic construct
  misc_feature 1..20: note = Description of Artificial Sequence: Synthetic oligonucleotide
  misc_feature 1..20: note = Target: FXN; (-) strand; PAM type: NRG; PAM sequence: AAG
  source 1..20: mol_type = other DNA
ttataaaatgcgttttataa

SEQ ID NO: 9132 - DNA, 20 bp, synthetic construct
  misc_feature 1..20: note = Description of Artificial Sequence: Synthetic oligonucleotide
  misc_feature 1..20: note = Target: FXN; (-) strand; PAM type: NRG; PAM sequence: AAG
  source 1..20: mol_type = other DNA
tagctgtgtgaccagagggc

SEQ ID NO: 9133 - DNA, 20 bp, synthetic construct
  misc_feature 1..20: note = Description of Artificial Sequence: Synthetic oligonucleotide
  misc_feature 1..20: note = Target: FXN; (-) strand; PAM type: NRG; PAM sequence: GGG
  source 1..20: mol_type = other DNA
ttcctagctgtgtgaccaga

SEQ ID NO: 9134 - DNA, 20 bp, synthetic construct
  misc_feature 1..20: note = Description of Artificial Sequence: Synthetic oligonucleotide
  misc_feature 1..20: note = Target: FXN; (-) strand; PAM type: NRG; PAM sequence: AGG
  source 1..20: mol_type = other DNA
cttcctagctgtgtgaccag

SEQ ID NO: 9135 - DNA, 20 bp, synthetic construct
  misc_feature 1..20: note = Description of Artificial Sequence: Synthetic oligonucleotide
  misc_feature 1..20: note = Target: FXN; (-) strand; PAM type: NRG; PAM sequence: GAG
  source 1..20: mol_type = other DNA
acttcctagctgtgtgacca

SEQ ID NO: 9136 - DNA, 20 bp, synthetic construct
  misc_feature 1..20: note = Description of Artificial Sequence: Synthetic oligonucleotide
  misc_feature 1..20: note = Target: FXN; (-) strand; PAM type: NRG; PAM sequence: CAG
  source 1..20: mol_type = other DNA
ccacttcctagctgtgtgac

SEQ ID NO: 9137 - DNA, 20 bp, synthetic construct
  misc_feature 1..20: note = Description of Artificial Sequence: Synthetic oligonucleotide
  misc_feature 1..20: note = Target: FXN; (-) strand; PAM type: NRG; PAM sequence: TAG
  source 1..20: mol_type = other DNA
tctgtactctgcccacttcc

SEQ ID NO: 9138 - DNA, 20 bp, synthetic construct
  misc_feature 1..20: note = Description of Artificial Sequence: Synthetic oligonucleotide
  misc_feature 1..20: note = Target: FXN; (-) strand; PAM type: NRG; PAM sequence: CGG
  source 1..20: mol_type = other DNA
gggtatgtggggccaggaga

SEQ ID NO: 9139 - DNA, 20 bp, synthetic construct
  misc_feature 1..20: note = Description of Artificial Sequence: Synthetic oligonucleotide
  misc_feature 1..20: note = Target: FXN; (-) strand; PAM type: NRG; PAM sequence: GAG
  source 1..20: mol_type = other DNA
agttgggtatgtggggccag

SEQ ID NO: 9140 - DNA, 20 bp, synthetic construct
  misc_feature 1..20: note = Description of Artificial Sequence: Synthetic oligonucleotide
  misc_feature 1..20: note = Target: FXN; (-) strand; PAM type: NRG; PAM sequence: AGG
  source 1..20: mol_type = other DNA
gcagttgggtatgtggggcc

SEQ ID NO: 9141 - DNA, 20 bp, synthetic construct
  misc_feature 1..20: note = Description of Artificial Sequence: Synthetic oligonucleotide
  misc_feature 1..20: note = Target: FXN; (-) strand; PAM type: NRG; PAM sequence: CAG
  source 1..20: mol_type = other DNA
agcagttgggtatgtggggc

SEQ ID NO: 9142 - DNA, 20 bp, synthetic construct
  misc_feature 1..20: note = Description of Artificial Sequence: Synthetic oligonucleotide
  misc_feature 1..20: note = Target: FXN; (-) strand; PAM type: NRG; PAM sequence: GGG
  source 1..20: mol_type = other DNA
ttacagcagttgggtatgtg

SEQ ID NO: 9143 - DNA, 20 bp, synthetic construct
  misc_feature 1..20: note = Description of Artificial Sequence: Synthetic oligonucleotide
  misc_feature 1..20: note = Target: FXN; (-) strand; PAM type: NRG; PAM sequence: GGG
  source 1..20: mol_type = other DNA
tttacagcagttgggtatgt

SEQ ID NO: 9144 - DNA, 20 bp, synthetic construct
  misc_feature 1..20: note = Description of Artificial Sequence: Synthetic oligonucleotide
  misc_feature 1..20: note = Target: FXN; (-) strand; PAM type: NRG; PAM sequence: TGG
  source 1..20: mol_type = other DNA
gtttacagcagttgggtatg

SEQ ID NO: 9145 - DNA, 20 bp, synthetic construct
  misc_feature 1..20: note = Description of Artificial Sequence: Synthetic oligonucleotide
  misc_feature 1..20: note = Target: FXN; (-) strand; PAM type: NRG; PAM sequence: GGG
  source 1..20: mol_type = other DNA
ggtatgggtttacagcagtt

SEQ ID NO: 9146 - DNA, 20 bp, synthetic construct
  misc_feature 1..20: note = Description of Artificial Sequence: Synthetic oligonucleotide
  misc_feature 1..20: note = Target: FXN; (-) strand; PAM type: NRG; PAM sequence: TGG
  source 1..20: mol_type = other DNA
cggtatgggtttacagcagt

SEQ ID NO: 9147 - DNA, 20 bp, synthetic construct
  misc_feature 1..20: note = Description of Artificial Sequence: Synthetic oligonucleotide
  misc_feature 1..20: note = Target: FXN; (-) strand; PAM type: NRG; PAM sequence: CAG
  source 1..20: mol_type = other DNA
ccgccggtatgggtttacag

SEQ ID NO: 9148 - DNA, 20 bp, synthetic construct
  misc_feature 1..20: note = Description of Artificial Sequence: Synthetic oligonucleotide
  misc_feature 1..20: note = Target: FXN; (-) strand; PAM type: NRG; PAM sequence: CAG
  source 1..20: mol_type = other DNA
tggccgccggtatgggttta

SEQ ID NO: 9149 - DNA, 20 bp, synthetic construct
  misc_feature 1..20: note = Description of Artificial Sequence: Synthetic oligonucleotide
  misc_feature 1..20: note = Target: FXN; (-) strand; PAM type: NRG; PAM sequence: GGG
  source 1..20: mol_type = other DNA
ggctgcttggccgccggtat

SEQ ID NO: 9150 - DNA, 20 bp, synthetic construct
  misc_feature 1..20: note = Description of Artificial Sequence: Synthetic oligonucleotide
  misc_feature 1..20: note = Target: FXN; (-) strand; PAM type: NRG; PAM sequence: TGG
  source 1..20: mol_type = other DNA
aggctgcttggccgccggta

SEQ ID NO: 9151 - DNA, 20 bp, synthetic construct
  misc_feature 1..20: note = Description of Artificial Sequence: Synthetic oligonucleotide
  misc_feature 1..20: note = Target: FXN; (-) strand; PAM type: NRG; PAM sequence: CGG
  source 1..20: mol_type = other DNA
aattgaggctgcttggccgc

SEQ ID NO: 9152 - DNA, 20 bp, synthetic construct
  misc_feature 1..20: note = Description of Artificial Sequence: Synthetic oligonucleotide
  misc_feature 1..20: note = Target: FXN; (-) strand; PAM type: NRG; PAM sequence: TGG
  source 1..20: mol_type = other DNA
atgcacaaattgaggctgct

SEQ ID NO: 9153 - DNA, 20 bp, synthetic construct
  misc_feature 1..20: note = Description of Artificial Sequence: Synthetic oligonucleotide
  misc_feature 1..20: note = Target: FXN; (-) strand; PAM type: NRG; PAM sequence: AGG
  source 1..20: mol_type = other DNA
gtgggtgcatgcacaaattg

SEQ ID NO: 9154 - DNA, 20 bp, synthetic construct
  misc_feature 1..20: note = Description of Artificial Sequence: Synthetic oligonucleotide
  misc_feature 1..20: note = Target: FXN; (-) strand; PAM type: NRG; PAM sequence: GAG
  source 1..20: mol_type = other DNA
agtgggtgcatgcacaaatt

SEQ ID NO: 9155 - DNA, 20 bp, synthetic construct
  misc_feature 1..20: note = Description of Artificial Sequence: Synthetic oligonucleotide
  misc_feature 1..20: note = Target: FXN; (-) strand; PAM type: NRG; PAM sequence: GGG
  source 1..20: mol_type = other DNA
ctgctgtcttgctgggaagt

SEQ ID NO: 9156 - DNA, 20 bp, synthetic construct
  misc_feature 1..20: note = Description of Artificial Sequence: Synthetic oligonucleotide
  misc_feature 1..20: note = Target: FXN; (-) strand; PAM type: NRG; PAM sequence: TGG
  source 1..20: mol_type = other DNA
gctgctgtcttgctgggaag

SEQ ID NO: 9157 - DNA, 20 bp, synthetic construct
  misc_feature 1..20: note = Description of Artificial Sequence: Synthetic oligonucleotide
  misc_feature 1..20: note = Target: FXN; (-) strand; PAM type: NRG; PAM sequence: AAG
  source 1..20: mol_type = other DNA
ggagctgctgtcttgctggg

SEQ ID NO: 9158 - DNA, 20 bp, synthetic construct
  misc_feature 1..20: note = Description of Artificial Sequence: Synthetic oligonucleotide
  misc_feature 1..20: note = Target: FXN; (-) strand; PAM type: NRG; PAM sequence: GGG
  source 1..20: mol_type = other DNA
ttgggagctgctgtcttgct

SEQ ID NO: 9159 - DNA, 20 bp, synthetic construct
  misc_feature 1..20: note = Description of Artificial Sequence: Synthetic oligonucleotide
  misc_feature 1..20: note = Target: FXN; (-) strand; PAM type: NRG; PAM sequence: TGG
  source 1..20: mol_type = other DNA
cttgggagctgctgtcttgc

SEQ ID NO: 9160 - DNA, 20 bp, synthetic construct
  misc_feature 1..20: note = Description of Artificial Sequence: Synthetic oligonucleotide
  misc_feature 1..20: note = Target: FXN; (-) strand; PAM type: NRG; PAM sequence: GAG
  source 1..20: mol_type = other DNA
tctaaacaggaggaacttgg

SEQ ID NO: 9161 - DNA, 20 bp, synthetic construct
  misc_feature 1..20: note = Description of Artificial Sequence: Synthetic oligonucleotide
  misc_feature 1..20: note = Target: FXN; (-) strand; PAM type: NRG; PAM sequence: GGG
  source 1..20: mol_type = other DNA
attctaaacaggaggaactt

SEQ ID NO: 9162 - DNA, 20 bp, synthetic construct
  misc_feature 1..20: note = Description of Artificial Sequence: Synthetic oligonucleotide
  misc_feature 1..20: note = Target: FXN; (-) strand; PAM type: NRG; PAM sequence: TGG
  source 1..20: mol_type = other DNA
aattctaaacaggaggaact

SEQ ID NO: 9163 - DNA, 20 bp, synthetic construct
  misc_feature 1..20: note = Description of Artificial Sequence: Synthetic oligonucleotide
  misc_feature 1..20: note = Target: FXN; (-) strand; PAM type: NRG; PAM sequence: AGG
  source 1..20: mol_type = other DNA
cttctaaaattctaaacagg

SEQ ID NO: 9164 - DNA, 20 bp, synthetic construct
  misc_feature 1..20: note = Description of Artificial Sequence: Synthetic oligonucleotide
  misc_feature 1..20: note = Target: FXN; (-) strand; PAM type: NRG; PAM sequence: GAG
  source 1..20: mol_type = other DNA
gcttctaaaattctaaacag

SEQ ID NO: 9165 - DNA, 20 bp, synthetic construct
  misc_feature 1..20: note = Description of Artificial Sequence: Synthetic oligonucleotide
  misc_feature 1..20: note = Target: FXN; (-) strand; PAM type: NRG; PAM sequence: AGG
  source 1..20: mol_type = other DNA
ccgcttctaaaattctaaac

SEQ ID NO: 9166 - DNA, 20 bp, synthetic construct
  misc_feature 1..20: note = Description of Artificial Sequence: Synthetic oligonucleotide
  misc_feature 1..20: note = Target: FXN; (-) strand; PAM type: NRG; PAM sequence: CAG
  source 1..20: mol_type = other DNA
gccgcttctaaaattctaaa

SEQ ID NO: 9167 - DNA, 20 bp, synthetic construct
  misc_feature 1..20: note = Description of Artificial Sequence: Synthetic oligonucleotide
  misc_feature 1..20: note = Target: FXN; (-) strand; PAM type: NRG; PAM sequence: TGG
  source 1..20: mol_type = other DNA
caagggagactgcagcctgg

SEQ ID NO: 9168 - DNA, 20 bp, synthetic construct
  misc_feature 1..20: note = Description of Artificial Sequence: Synthetic oligonucleotide
  misc_feature 1..20: note = Target: FXN; (-) strand; PAM type: NRG; PAM sequence: TGG
  source 1..20: mol_type = other DNA
acccaagggagactgcagcc

SEQ ID NO: 9169 - DNA, 20 bp, synthetic construct
  misc_feature 1..20: note = Description of Artificial Sequence: Synthetic oligonucleotide
  misc_feature 1..20: note = Target: FXN; (-) strand; PAM type: NRG; PAM sequence: CAG
  source 1..20: mol_type = other DNA
ccctgacccaagggagactg

SEQ ID NO: 9170 - DNA, 20 bp, synthetic construct
  misc_feature 1..20: note = Description of Artificial Sequence: Synthetic oligonucleotide
  misc_feature 1..20: note = Target: FXN; (-) strand; PAM type: NRG; PAM sequence: GAG
  source 1..20: mol_type = other DNA
ccaggacccctgacccaagg

SEQ ID NO: 9171 - DNA, 20 bp, synthetic construct
  misc_feature 1..20: note = Description of Artificial Sequence: Synthetic oligonucleotide
  misc_feature 1..20: note = Target: FXN; (-) strand; PAM type: NRG; PAM sequence: GGG
  source 1..20: mol_type = other DNA
aaccaggacccctgacccaa

SEQ ID NO: 9172 - DNA, 20 bp, synthetic construct
  misc_feature 1..20: note = Description of Artificial Sequence: Synthetic oligonucleotide
  misc_feature 1..20: note = Target: FXN; (-) strand; PAM type: NRG; PAM sequence: AGG
  source 1..20: mol_type = other DNA
caaccaggacccctgaccca

SEQ ID NO: 9173 - DNA, 20 bp, synthetic construct
  misc_feature 1..20: note = Description of Artificial Sequence: Synthetic oligonucleotide
  misc_feature 1..20: note = Target: FXN; (-) strand; PAM type: NRG; PAM sequence: AAG
  source 1..20: mol_type = other DNA
gcaaccaggacccctgaccc

SEQ ID NO: 9174 - DNA, 20 bp, synthetic construct
  misc_feature 1..20: note = Description of Artificial Sequence: Synthetic oligonucleotide
  misc_feature 1..20: note = Target: FXN; (-) strand; PAM type: NRG; PAM sequence: AGG
  source 1..20: mol_type = other DNA
gcaaagcacggagtgcaacc

SEQ ID NO: 9175 - DNA, 20 bp, synthetic construct
  misc_feature 1..20: note = Description of Artificial Sequence: Synthetic oligonucleotide
  misc_feature 1..20: note = Target: FXN; (-) strand; PAM type: NRG; PAM sequence: CAG
  source 1..20: mol_type = other DNA
tgcaaagcacggagtgcaac

SEQ ID NO: 9176 - DNA, 20 bp, synthetic construct
  misc_feature 1..20: note = Description of Artificial Sequence: Synthetic oligonucleotide
  misc_feature 1..20: note = Target: FXN; (-) strand; PAM type: NRG; PAM sequence: GAG
  source 1..20: mol_type = other DNA
cctgctttgtgcaaagcacg

SEQ ID NO: 9177 - DNA, 20 bp, synthetic construct
  misc_feature 1..20: note = Description of Artificial Sequence: Synthetic oligonucleotide
  misc_feature 1..20: note = Target: FXN; (-) strand; PAM type: NRG; PAM sequence: CGG
  source 1..20: mol_type = other DNA
agcctgctttgtgcaaagca

SEQ ID NO: 9178 - DNA, 20 bp, synthetic construct
  misc_feature 1..20: note = Description of Artificial Sequence: Synthetic oligonucleotide
  misc_feature 1..20: note = Target: FXN; (-) strand; PAM type: NRG; PAM sequence: AAG
  source 1..20: mol_type = other DNA
tggagagcctgctttgtgca

SEQ ID NO: 9179 - DNA, 20 bp, synthetic construct
  misc_feature 1..20: note = Description of Artificial Sequence: Synthetic oligonucleotide
  misc_feature 1..20: note = Target: FXN; (-) strand; PAM type: NRG; PAM sequence: GAG
  source 1..20: mol_type = other DNA
gtgcatttaacaaaaatgga

SEQ ID NO: 9180 - DNA, 20 bp, synthetic construct
  misc_feature 1..20: note = Description of Artificial Sequence: Synthetic oligonucleotide
  misc_feature 1..20: note = Target: FXN; (-) strand; PAM type: NRG; PAM sequence: GAG
  source 1..20: mol_type = other DNA
tcgtgcatttaacaaaaatg

SEQ ID NO: 9181 - DNA, 20 bp, synthetic construct
  misc_feature 1..20: note = Description of Artificial Sequence: Synthetic oligonucleotide
  misc_feature 1..20: note = Target: FXN; (-) strand; PAM type: NRG; PAM sequence: TGG
  source 1..20: mol_type = other DNA
attcgtgcatttaacaaaaa

SEQ ID NO: 9182 - DNA, 20 bp, synthetic construct
  misc_feature 1..20: note = Description of Artificial Sequence: Synthetic oligonucleotide
  misc_feature 1..20: note = Target: FXN; (-) strand; PAM type: NRG; PAM sequence: TAG
  source 1..20: mol_type = other DNA
tcaggaagaacttcccagct

SEQ ID NO: 9183 - DNA, 20 bp, synthetic construct
  misc_feature 1..20: note = Description of Artificial Sequence: Synthetic oligonucleotide
  misc_feature 1..20: note = Target: FXN; (-) strand; PAM type: NRG; PAM sequence: CAG
  source 1..20: mol_type = other DNA
agacctcaggaagaacttcc

SEQ ID NO: 9184 - DNA, 20 bp, synthetic construct
  misc_feature 1..20: note = Description of Artificial Sequence: Synthetic oligonucleotide
  misc_feature 1..20: note = Target: FXN; (-) strand; PAM type: NRG; PAM sequence: AAG
  source 1..20: mol_type = other DNA
gctagaggttagacctcagg

SEQ ID NO: 9185 - DNA, 20 bp, synthetic construct
  misc_feature 1..20: note = Description of Artificial Sequence: Synthetic oligonucleotide
  misc_feature 1..20: note = Target: FXN; (-) strand; PAM type: NRG; PAM sequence: AGG
  source 1..20: mol_type = other DNA
gcagctagaggttagacctc

SEQ ID NO: 9186 - DNA, 20 bp, synthetic construct
  misc_feature 1..20: note = Description of Artificial Sequence: Synthetic oligonucleotide
  misc_feature 1..20: note = Target: FXN; (-) strand; PAM type: NRG; PAM sequence: CAG
  source 1..20: mol_type = other DNA
agcagctagaggttagacct

SEQ ID NO: 9187 - DNA, 20 bp, synthetic construct
  misc_feature 1..20: note = Description of Artificial Sequence: Synthetic oligonucleotide
  misc_feature 1..20: note = Target: FXN; (-) strand; PAM type: NRG; PAM sequence: TAG
  source 1..20: mol_type = other DNA
gtgggggagcagctagaggt

SEQ ID NO: 9188 - DNA, 20 bp, synthetic construct
  misc_feature 1..20: note = Description of Artificial Sequence: Synthetic oligonucleotide
  misc_feature 1..20: note = Target: FXN; (-) strand; PAM type: NRG; PAM sequence: AGG
  source 1..20: mol_type = other DNA
ttctgtgggggagcagctag

SEQ ID NO: 9189 - DNA, 20 bp, synthetic construct
  misc_feature 1..20: note = Description of Artificial Sequence: Synthetic oligonucleotide
  misc_feature 1..20: note = Target: FXN; (-) strand; PAM type: NRG; PAM sequence: GAG
  source 1..20: mol_type = other DNA
cttctgtgggggagcagcta

SEQ ID NO: 9190 - DNA, 20 bp, synthetic construct
  misc_feature 1..20: note = Description of Artificial Sequence: Synthetic oligonucleotide
  misc_feature 1..20: note = Target: FXN; (-) strand; PAM type: NRG; PAM sequence: TAG
  source 1..20: mol_type = other DNA
ctcttctgtgggggagcagc

SEQ ID NO: 9191 - DNA, 20 bp, synthetic construct
  misc_feature 1..20: note = Description of Artificial Sequence: Synthetic oligonucleotide
  misc_feature 1..20: note = Target: FXN; (-) strand; PAM type: NRG; PAM sequence: CAG
  source 1..20: mol_type = other DNA
ggcactcttctgtgggggag

SEQ ID NO: 9192 - DNA, 20 bp, synthetic construct
  misc_feature 1..20: note = Description of Artificial Sequence: Synthetic oligonucleotide
  misc_feature 1..20: note = Target: FXN; (-) strand; PAM type: NRG; PAM sequence: GAG
  source 1..20: mol_type = other DNA
gcaggcactcttctgtgggg

SEQ ID NO: 9193 - DNA, 20 bp, synthetic construct
  misc_feature 1..20: note = Description of Artificial Sequence: Synthetic oligonucleotide
  misc_feature 1..20: note = Target: FXN; (-) strand; PAM type: NRG; PAM sequence: GGG
  source 1..20: mol_type = other DNA
ccgcaggcactcttctgtgg

SEQ ID NO: 9194 - DNA, 20 bp, synthetic construct
  misc_feature 1..20: note = Description of Artificial Sequence: Synthetic oligonucleotide
  misc_feature 1..20: note = Target: FXN; (-) strand; PAM type: NRG; PAM sequence: GGG
  source 1..20: mol_type = other DNA
gccgcaggcactcttctgtg

SEQ ID NO: 9195 - DNA, 20 bp, synthetic construct
  misc_feature 1..20: note = Description of Artificial Sequence: Synthetic oligonucleotide
  misc_feature 1..20: note = Target: FXN; (-) strand; PAM type: NRG; PAM sequence: GGG
  source 1..20: mol_type = other DNA
ggccgcaggcactcttctgt

SEQ ID NO: 9196 - DNA, 20 bp, synthetic construct
  misc_feature 1..20: note = Description of Artificial Sequence: Synthetic oligonucleotide
  misc_feature 1..20: note = Target: FXN; (-) strand; PAM type: NRG; PAM sequence: TGG
  source 1..20: mol_type = other DNA
tggccgcaggcactcttctg

SEQ ID NO: 9197 - DNA, 20 bp, synthetic construct
  misc_feature 1..20: note = Description of Artificial Sequence: Synthetic oligonucleotide
  misc_feature 1..20: note = Target: FXN; (-) strand; PAM type: NRG; PAM sequence: AGG
  source 1..20: mol_type = other DNA
ccctggtggccactggccgc

SEQ ID NO: 9198 - DNA, 20 bp, synthetic construct
  misc_feature 1..20: note = Description of Artificial Sequence: Synthetic oligonucleotide
  misc_feature 1..20: note = Target: FXN; (-) strand; PAM type: NRG; PAM sequence: CAG
  source 1..20: mol_type = other DNA
cccctggtggccactggccg

SEQ ID NO: 9199 - DNA, 20 bp, synthetic construct
  misc_feature 1..20: note = Description of Artificial Sequence: Synthetic oligonucleotide
  misc_feature 1..20: note = Target: FXN; (-) strand; PAM type: NRG; PAM sequence: TGG
  source 1..20: mol_type = other DNA
cggcgacccctggtggccac

SEQ ID NO: 9200 - DNA, 20 bp, synthetic construct
  misc_feature 1..20: note = Description of Artificial Sequence: Synthetic oligonucleotide
  misc_feature 1..20: note = Target: FXN; (-) strand; PAM type: NRG; PAM sequence: TGG
  source 1..20: mol_type = other DNA
ggtgctgcggcgacccctgg

SEQ ID NO: 9201 - DNA, 20 bp, synthetic construct
  misc_feature 1..20: note = Description of Artificial Sequence: Synthetic oligonucleotide
  misc_feature 1..20: note = Target: FXN; (-) strand; PAM type: NRG; PAM sequence: TGG
  source 1..20: mol_type = other DNA
ctgggtgctgcggcgacccc

SEQ ID NO: 9202 - DNA, 20 bp, synthetic construct
  misc_feature 1..20: note = Description of Artificial Sequence: Synthetic oligonucleotide
  misc_feature 1..20: note = Target: FXN; (-) strand; PAM type: NRG; PAM sequence: CGG
  source 1..20: mol_type = other DNA
ccctccagcgctgggtgctg

SEQ ID NO: 9203 - DNA, 20 bp, synthetic construct
  misc_feature 1..20: note = Description of Artificial Sequence: Synthetic oligonucleotide
  misc_feature 1..20: note = Target: FXN; (-) strand; PAM type: NRG; PAM sequence: GGG
  source 1..20: mol_type = other DNA
ccgctccgccctccagcgct

SEQ ID NO: 9204 - DNA, 20 bp, synthetic construct
  misc_feature 1..20: note = Description of Artificial Sequence: Synthetic oligonucleotide
  misc_feature 1..20: note = Target: FXN; (-) strand; PAM type: NRG; PAM sequence: TGG
  source 1..20: mol_type = other DNA
cccgctccgccctccagcgc

SEQ ID NO: 9205 - DNA, 20 bp, synthetic construct
  misc_feature 1..20: note = Description of Artificial Sequence: Synthetic oligonucleotide
  misc_feature 1..20: note = Target: FXN; (-) strand; PAM type: NRG; PAM sequence: CAG
  source 1..20: mol_type = other DNA
ctgccgcccgctccgccctc

SEQ ID NO: 9206 - DNA, 20 bp, synthetic construct
  misc_feature 1..20: note = Description of Artificial Sequence: Synthetic oligonucleotide
  misc_feature 1..20: note = Target: FXN; (-) strand; PAM type: NRG; PAM sequence: GGG
  source 1..20: mol_type = other DNA
gagagtccacatgctgctcc

SEQ ID NO: 9207 - DNA, 20 bp, synthetic construct
  misc_feature 1..20: note = Description of Artificial Sequence: Synthetic oligonucleotide
  misc_feature 1..20: note = Target: FXN; (-) strand; PAM type: NRG; PAM sequence: CGG
  source 1..20: mol_type = other DNA
cgagagtccacatgctgctc

SEQ ID NO: 9208 - DNA, 20 bp, synthetic construct
  misc_feature 1..20: note = Description of Artificial Sequence: Synthetic oligonucleotide
  misc_feature 1..20: note = Target: FXN; (-) strand; PAM type: NRG; PAM sequence: GAG
  source 1..20: mol_type = other DNA
ggctactgcgcggcgcccga

SEQ ID NO: 9209 - DNA, 20 bp, synthetic construct
  misc_feature 1..20: note = Description of Artificial Sequence: Synthetic oligonucleotide
  misc_feature 1..20: note = Target: FXN; (-) strand; PAM type: NRG; PAM sequence: GAG
  source 1..20: mol_type = other DNA
ccggctactgcgcggcgccc

SEQ ID NO: 9210 - DNA, 20 bp, synthetic construct
  misc_feature 1..20: note = Description of Artificial Sequence: Synthetic oligonucleotide
  misc_feature 1..20: note = Target: FXN; (-) strand; PAM type: NRG; PAM sequence: CGG
  source 1..20: mol_type = other DNA
ccaggaggccggctactgcg

SEQ ID NO: 9211 - DNA, 20 bp, synthetic construct
  misc_feature 1..20: note = Description of Artificial Sequence: Synthetic oligonucleotide
  misc_feature 1..20: note = Target: FXN; (-) strand; PAM type: NRG; PAM sequence: CGG
  source 1..20: mol_type = other DNA
gctgggtgacgccaggaggc

SEQ ID NO: 9212 - DNA, 20 bp, synthetic construct
  misc_feature 1..20: note = Description of Artificial Sequence: Synthetic oligonucleotide
  misc_feature 1..20: note = Target: FXN; (-) strand; PAM type: NRG; PAM sequence: AGG
  source 1..20: mol_type = other DNA
ctgggctgggtgacgccagg

SEQ ID NO: 9213 - DNA, 20 bp, synthetic construct
  misc_feature 1..20: note = Description of Artificial Sequence: Synthetic oligonucleotide
  misc_feature 1..20: note = Target: FXN; (-) strand; PAM type: NRG; PAM sequence: GAG
  source 1..20: mol_type = other DNA
gctgggctgggtgacgccag

SEQ ID NO: 9214 - DNA, 20 bp, synthetic construct
  misc_feature 1..20: note = Description of Artificial Sequence: Synthetic oligonucleotide
  misc_feature 1..20: note = Target: FXN; (-) strand; PAM type: NRG; PAM sequence: AGG
  source 1..20: mol_type = other DNA
gggctgggctgggtgacgcc

SEQ ID NO: 9215 - DNA, 20 bp, synthetic construct
  misc_feature 1..20: note = Description of Artificial Sequence: Synthetic oligonucleotide
  misc_feature 1..20: note = Target: FXN; (-) strand; PAM type: NRG; PAM sequence: CAG
  source 1..20: mol_type = other DNA
tgggctgggctgggtgacgc

SEQ ID NO: 9216 - DNA, 20 bp, synthetic construct
  misc_feature 1..20: note = Description of Artificial Sequence: Synthetic oligonucleotide
  misc_feature 1..20: note = Target: FXN; (-) strand; PAM type: NRG; PAM sequence: GGG
  source 1..20: mol_type = other DNA
gtctgggcctgggctgggct

SEQ ID NO: 9217 - DNA, 20 bp, synthetic construct
  misc_feature 1..20: note = Description of Artificial Sequence: Synthetic oligonucleotide
  misc_feature 1..20: note = Target: FXN; (-) strand; PAM type: NRG; PAM sequence: TGG
  source 1..20: mol_type = other DNA
ggtctgggcctgggctgggc

SEQ ID NO: 9218 - DNA, 20 bp, synthetic construct
  misc_feature 1..20: note = Description of Artificial Sequence: Synthetic oligonucleotide
  misc_feature 1..20: note = Target: FXN; (-) strand; PAM type: NRG; PAM sequence: GGG
  source 1..20: mol_type = other DNA
tgagggtctgggcctgggct

SEQ ID NO: 9219 - DNA, 20 bp, synthetic construct
  misc_feature 1..20: note = Description of Artificial Sequence: Synthetic oligonucleotide
  misc_feature 1..20: note = Target: FXN; (-) strand; PAM type: NRG; PAM sequence: TGG
  source 1..20: mol_type = other DNA
gtgagggtctgggcctgggc

SEQ ID NO: 9220 - DNA, 20 bp, synthetic construct
  misc_feature 1..20: note = Description of Artificial Sequence: Synthetic oligonucleotide
  misc_feature 1..20: note = Target: FXN; (-) strand; PAM type: NRG; PAM sequence: GGG
  source 1..20: mol_type = other DNA
ccgggtgagggtctgggcct

SEQ ID NO: 9221 - DNA, 20 bp, synthetic construct
  misc_feature 1..20: note = Description of Artificial Sequence: Synthetic oligonucleotide
  misc_feature 1..20: note = Target: FXN; (-) strand; PAM type: NRG; PAM sequence: TGG
  source 1..20: mol_type = other DNA
cccgggtgagggtctgggcc

SEQ ID NO: 9222 - DNA, 20 bp, synthetic construct
  misc_feature 1..20: note = Description of Artificial Sequence: Synthetic oligonucleotide
  misc_feature 1..20: note = Target: FXN; (-) strand; PAM type: NRG; PAM sequence: GGG
  source 1..20: mol_type = other DNA
cgggacccgggtgagggtct

SEQ ID NO: 9223 - DNA, 20 bp, synthetic construct
  misc_feature 1..20: note = Description of Artificial Sequence: Synthetic oligonucleotide
  misc_feature 1..20: note = Target: FXN; (-) strand; PAM type: NRG; PAM sequence: TGG
  source 1..20: mol_type = other DNA
gcgggacccgggtgagggtc

SEQ ID NO: 9224 - DNA, 20 bp, synthetic construct
  misc_feature 1..20: note = Description of Artificial Sequence: Synthetic oligonucleotide
  misc_feature 1..20: note = Target: FXN; (-) strand; PAM type: NRG; PAM sequence: GGG
  source 1..20: mol_type = other DNA
cggccgcgggacccgggtga

SEQ ID NO: 9225 - DNA, 20 bp, synthetic construct
  misc_feature 1..20: note = Description of Artificial Sequence: Synthetic oligonucleotide
  misc_feature 1..20: note = Target: FXN; (-) strand; PAM type: NRG; PAM sequence: AGG
  source 1..20: mol_type = other DNA
ccggccgcgggacccgggtg

SEQ ID NO: 9226 - DNA, 20 bp, synthetic construct
  misc_feature 1..20: note = Description of Artificial Sequence: Synthetic oligonucleotide
  misc_feature 1..20: note = Target: FXN; (-) strand; PAM type: NRG; PAM sequence: GAG
  source 1..20: mol_type = other DNA
gccggccgcgggacccgggt

SEQ ID NO: 9227 - DNA, 20 bp, synthetic construct
  misc_feature 1..20: note = Description of Artificial Sequence: Synthetic oligonucleotide
  misc_feature 1..20: note = Target: FXN; (-) strand; PAM type: NRG; PAM sequence: GGG
  source 1..20: mol_type = other DNA
ctctgccggccgcgggaccc

SEQ ID NO: 9228 - DNA, 20 bp, synthetic construct
  misc_feature 1..20: note = Description of Artificial Sequence: Synthetic oligonucleotide
  misc_feature 1..20: note = Target: FXN; (-) strand; PAM type: NRG; PAM sequence: CGG
  source 1..20: mol_type = other DNA
actctgccggccgcgggacc

SEQ ID NO: 9229 - DNA, 20 bp, synthetic construct
  misc_feature 1..20: note = Description of Artificial Sequence: Synthetic oligonucleotide
  misc_feature 1..20: note = Target: FXN; (-) strand; PAM type: NRG; PAM sequence: GGG
  source 1..20: mol_type = other DNA
gggccaactctgccggccgc

SEQ ID NO: 9230 - DNA, 20 bp, synthetic construct
  misc_feature 1..20: note = Description of Artificial Sequence: Synthetic oligonucleotide
  misc_feature 1..20: note = Target: FXN; (-) strand; PAM type: NRG; PAM sequence: CGG
  source 1..20: mol_type = other DNA
ggggccaactctgccggccg

SEQ ID NO: 9231 - DNA, 20 bp, synthetic construct
  misc_feature 1..20: note = Description of Artificial Sequence: Synthetic oligonucleotide
  misc_feature 1..20: note = Target: FXN; (-) strand; PAM type: NRG; PAM sequence: CGG
  source 1..20: mol_type = other DNA
cagagtggggccaactctgc

SEQ ID NO: 9232 - DNA, 20 bp, synthetic construct
  misc_feature 1..20: note = Description of Artificial Sequence: Synthetic oligonucleotide
  misc_feature 1..20: note = Target: FXN; (-) strand; PAM type: NRG; PAM sequence: GGG
  source 1..20: mol_type = other DNA
gccacggcggccgcagagtg

SEQ ID NO: 9233 - DNA, 20 bp, synthetic construct
  misc_feature 1..20: note = Description of Artificial Sequence: Synthetic oligonucleotide
  misc_feature 1..20: note = Target: FXN; (-) strand; PAM type: NRG; PAM sequence: GGG
  source 1..20: mol_type = other DNA
ggccacggcggccgcagagt

SEQ ID NO: 9234 - DNA, 20 bp, synthetic construct
  misc_feature 1..20: note = Description of Artificial Sequence: Synthetic oligonucleotide
  misc_feature 1..20: note = Target: FXN; (-) strand; PAM type: NRG; PAM sequence: TGG
  source 1..20: mol_type = other DNA
aggccacggcggccgcagag

SEQ ID NO: 9235 - DNA, 20 bp, synthetic construct
  misc_feature 1..20: note = Description of Artificial Sequence: Synthetic oligonucleotide
  misc_feature 1..20: note = Target: FXN; (-) strand; PAM type: NRG; PAM sequence: GAG
  source 1..20: mol_type = other DNA
cgcaggccacggcggccgca

SEQ ID NO: 9236 - DNA, 20 bp, synthetic construct
  misc_feature 1..20: note = Description of Artificial Sequence: Synthetic oligonucleotide
  misc_feature 1..20: note = Target: FXN; (-) strand; PAM type: NRG; PAM sequence: CAG
  source 1..20: mol_type = other DNA
tgcgcaggccacggcggccg

SEQ ID NO: 9237 - DNA, 20 bp, synthetic construct
  misc_feature 1..20: note = Description of Artificial Sequence: Synthetic oligonucleotide
  misc_feature 1..20: note = Target: FXN; (-) strand; PAM type: NRG; PAM sequence: CGG
  source 1..20: mol_type = other DNA
tgtcggtgcgcaggccacgg

SEQ ID NO: 9238 - DNA, 20 bp, synthetic construct
  misc_feature 1..20: note = Description of Artificial Sequence: Synthetic oligonucleotide
  misc_feature 1..20: note = Target: FXN; (-) strand; PAM type: NRG; PAM sequence: CGG
  source 1..20: mol_type = other DNA
cgatgtcggtgcgcaggcca

SEQ ID NO: 9239 - DNA, 20 bp, synthetic construct
  misc_feature 1..20: note = Description of Artificial Sequence: Synthetic oligonucleotide
  misc_feature 1..20: note = Target: FXN; (-) strand; PAM type: NRG; PAM sequence: AGG
  source 1..20: mol_type = other DNA
tcgcatcgatgtcggtgcgc

SEQ ID NO: 9240 - DNA, 20 bp, synthetic construct
  misc_feature 1..20: note = Description of Artificial Sequence: Synthetic oligonucleotide
  misc_feature 1..20: note = Target: FXN; (-) strand; PAM type: NRG; PAM sequence: CAG
  source 1..20: mol_type = other DNA
gtcgcatcgatgtcggtgcg

SEQ ID NO: 9241 - DNA, 20 bp, synthetic construct
  misc_feature 1..20: note = Description of Artificial Sequence: Synthetic oligonucleotide
  misc_feature 1..20: note = Target: FXN; (-) strand; PAM type: NRG; PAM sequence: CGG
  source 1..20: mol_type = other DNA
cgtgcaggtcgcatcgatgt

SEQ ID NO: 9242 - DNA, 20 bp, synthetic construct
  misc_feature 1..20: note = Description of Artificial Sequence: Synthetic oligonucleotide
  misc_feature 1..20: note = Target: FXN; (-) strand; PAM type: NRG; PAM sequence: AGG
  source 1..20: mol_type = other DNA
tactgcgcggcggggcgtgc

SEQ ID NO: 9243 - DNA, 20 bp, synthetic construct
  misc_feature 1..20: note = Description of Artificial Sequence: Synthetic oligonucleotide
  misc_feature 1..20: note = Target: FXN; (-) strand; PAM type: NRG; PAM sequence: CAG
  source 1..20: mol_type = other DNA
ttactgcgcggcggggcgtg

SEQ ID NO: 9244 - DNA, 20 bp, synthetic construct
  misc_feature 1..20: note = Description of Artificial Sequence: Synthetic oligonucleotide
  misc_feature 1..20: note = Target: FXN; (-) strand; PAM type: NRG; PAM sequence: GGG
  source 1..20: mol_type = other DNA
cggatacttactgcgcggcg

SEQ ID NO: 9245 - DNA, 20 bp, synthetic construct
  misc_feature 1..20: note = Description of Artificial Sequence: Synthetic oligonucleotide
  misc_feature 1..20: note = Target: FXN; (-) strand; PAM type: NRG; PAM sequence: GGG
  source 1..20: mol_type = other DNA
gcggatacttactgcgcggc

SEQ ID NO: 9246 - DNA, 20 bp, synthetic construct
  misc_feature 1..20: note = Description of Artificial Sequence: Synthetic oligonucleotide
  misc_feature 1..20: note = Target: FXN; (-) strand; PAM type: NRG; PAM sequence: CGG
  source 1..20: mol_type = other DNA
cgcggatacttactgcgcgg

SEQ ID NO: 9247 - DNA, 20 bp, synthetic construct
  misc_feature 1..20: note = Description of Artificial Sequence: Synthetic oligonucleotide
  misc_feature 1..20: note = Target: FXN; (-) strand; PAM type: NRG; PAM sequence: CGG
  source 1..20: mol_type = other DNA
cggcgcggatacttactgcg

SEQ ID NO: 9248 - DNA, 20 bp, synthetic construct
  misc_feature 1..20: note = Description of Artificial Sequence: Synthetic oligonucleotide
  misc_feature 1..20: note = Target: FXN; (-) strand; PAM type: NRG; PAM sequence: CGG
  source 1..20: mol_type = other DNA
gcccgcggctgttcccggcg

SEQ ID NO: 9249 - DNA, 20 bp, synthetic construct
  misc_feature 1..20: note = Description of Artificial Sequence: Synthetic oligonucleotide
  misc_feature 1..20: note = Target: FXN; (-) strand; PAM type: NRG; PAM sequence: CGG
  source 1..20: mol_type = other DNA
gtgcggcccgcggctgttcc

SEQ ID NO: 9250 - DNA, 20 bp, synthetic construct
  misc_feature 1..20: note = Description of Artificial Sequence: Synthetic oligonucleotide
  misc_feature 1..20: note = Target: FXN; (-) strand; PAM type: NRG; PAM sequence: CGG
  source 1..20: mol_type = other DNA
ggcccgcggcgtgcggcccg

SEQ ID NO: 9251 - DNA, 20 bp, synthetic construct
  misc_feature 1..20: note = Description of Artificial Sequence: Synthetic oligonucleotide
  misc_feature 1..20: note = Target: FXN; (-) strand; PAM type: NRG; PAM sequence: CGG
  source 1..20: mol_type = other DNA
ggcgtgcggcccgcggcgtg

SEQ ID NO: 9252 - DNA, 20 bp, synthetic construct
  misc_feature 1..20: note = Description of Artificial Sequence: Synthetic oligonucleotide
  misc_feature 1..20: note = Target: FXN; (-) strand; PAM type: NRG; PAM sequence: CGG
  source 1..20: mol_type = other DNA
ggcgtgcggcgtgcggcccg

SEQ ID NO: 9253 - DNA, 20 bp, synthetic construct
  misc_feature 1..20: note = Description of Artificial Sequence: Synthetic oligonucleotide
  misc_feature 1..20: note = Target: FXN; (-) strand; PAM type: NRG; PAM sequence: CGG
  source 1..20: mol_type = other DNA
ctgcgcaggcgtgcggcgtg

SEQ ID NO: 9254 - DNA, 20 bp, synthetic construct
  misc_feature 1..20: note = Description of Artificial Sequence: Synthetic oligonucleotide
  misc_feature 1..20: note = Target: FXN; (-) strand; PAM type: NRG; PAM sequence: CGG
  source 1..20: mol_type = other DNA
cgcctccctgcgcaggcgtg

SEQ ID NO: 9255 - DNA, 20 bp, synthetic construct
  misc_feature 1..20: note = Description of Artificial Sequence: Synthetic oligonucleotide
  misc_feature 1..20: note = Target: FXN; (-) strand; PAM type: NRG; PAM sequence: AGG
  source 1..20: mol_type = other DNA
tgcgcggcgcctccctgcgc

SEQ ID NO: 9256 - DNA, 20 bp, synthetic construct
  misc_feature 1..20: note = Description of Artificial Sequence: Synthetic oligonucleotide
  misc_feature 1..20: note = Target: FXN; (-) strand; PAM type: NRG; PAM sequence: CAG
  source 1..20: mol_type = other DNA
gtgcgcggcgcctccctgcg

SEQ ID NO: 9257 - DNA, 20 bp, synthetic construct
  misc_feature 1..20: note = Description of Artificial Sequence: Synthetic oligonucleotide
  misc_feature 1..20: note = Target: FXN; (-) strand; PAM type: NRG; PAM sequence: CGG
  source 1..20: mol_type = other DNA
cggagcgaccccggcgtgcg

SEQ ID NO: 9258 - DNA, 20 bp, synthetic construct
  misc_feature 1..20: note = Description of Artificial Sequence: Synthetic oligonucleotide
  misc_feature 1..20: note = Target: FXN; (-) strand; PAM type: NRG; PAM sequence: CGG
  source 1..20: mol_type = other DNA
gcgcgtacccggagcgaccc

SEQ ID NO: 9259 - DNA, 20 bp, synthetic construct
  misc_feature 1..20: note = Description of Artificial Sequence: Synthetic oligonucleotide
  misc_feature 1..20: note = Target: FXN; (-) strand; PAM type: NRG; PAM sequence: GAG
  source 1..20: mol_type = other DNA
tagtccagcgcgcgtacccg

SEQ ID NO: 9260 - DNA, 20 bp, synthetic construct
  misc_feature 1..20: note = Description of Artificial Sequence: Synthetic oligonucleotide
  misc_feature 1..20: note = Target: FXN; (-) strand; PAM type: NRG; PAM sequence: CGG
  source 1..20: mol_type = other DNA
gctagtccagcgcgcgtacc

SEQ ID NO: 9261 - DNA, 20 bp, synthetic construct
  misc_feature 1..20: note = Description of Artificial Sequence: Synthetic oligonucleotide
  misc_feature 1..20: note = Target: FXN; (-) strand; PAM type: NRG; PAM sequence: CAG
  source 1..20: mol_type = other DNA
aggagcggggtgagctagtc

SEQ ID NO: 9262 - DNA, 20 bp, synthetic construct
  misc_feature 1..20: note = Description of Artificial Sequence: Synthetic oligonucleotide
  misc_feature 1..20: note = Target: FXN; (-) strand; PAM type: NRG; PAM sequence: TAG
  source 1..20: mol_type = other DNA
tgagaaggagcggggtgagc

SEQ ID NO: 9263 - DNA, 20 bp, synthetic construct
  misc_feature 1..20: note = Description of Artificial Sequence: Synthetic oligonucleotide
  misc_feature 1..20: note = Target: FXN; (-) strand; PAM type: NRG; PAM sequence: GAG
  source 1..20: mol_type = other DNA
gccctgagaaggagcggggt

SEQ ID NO: 9264 - DNA, 20 bp, synthetic construct
  misc_feature 1..20: note = Description of Artificial Sequence: Synthetic oligonucleotide
  misc_feature 1..20: note = Target: FXN; (-) strand; PAM type: NRG; PAM sequence: GGG
  source 1..20: mol_type = other DNA
ggccgccctgagaaggagcg

SEQ ID NO: 9265 - DNA, 20 bp, synthetic construct
  misc_feature 1..20: note = Description of Artificial Sequence: Synthetic oligonucleotide
  misc_feature 1..20: note = Target: FXN; (-) strand; PAM type: NRG; PAM sequence: GGG
  source 1..20: mol_type = other DNA
gggccgccctgagaaggagc

SEQ ID NO: 9266 - DNA, 20 bp, synthetic construct
  misc_feature 1..20: note = Description of Artificial Sequence: Synthetic oligonucleotide
  misc_feature 1..20: note = Target: FXN; (-) strand; PAM type: NRG; PAM sequence: CGG
  source 1..20: mol_type = other DNA
cgggccgccctgagaaggag

SEQ ID NO: 9267 - DNA, 20 bp, synthetic construct
  misc_feature 1..20: note = Description of Artificial Sequence: Synthetic oligonucleotide
  misc_feature 1..20: note = Target: FXN; (-) strand; PAM type: NRG; PAM sequence: GAG
  source 1..20: mol_type = other DNA
cgccgggccgccctgagaag

SEQ ID NO: 9268 - DNA, 20 bp, synthetic construct
  misc_feature 1..20: note = Description of Artificial Sequence: Synthetic oligonucleotide
  misc_feature 1..20: note = Target: FXN; (-) strand; PAM type: NRG; PAM sequence: AGG
  source 1..20: mol_type = other DNA
tccgccgggccgccctgaga

SEQ ID NO: 9269 - DNA, 20 bp, synthetic construct
  misc_feature 1..20: note = Description of Artificial Sequence: Synthetic oligonucleotide
  misc_feature 1..20: note = Target: FXN; (-) strand; PAM type: NRG; PAM sequence: AAG
  source 1..20: mol_type = other DNA
ttccgccgggccgccctgag

SEQ ID NO: 9270 - DNA, 20 bp, synthetic construct
  misc_feature 1..20: note = Description of Artificial Sequence: Synthetic oligonucleotide
  misc_feature 1..20: note = Target: FXN; (-) strand; PAM type: NRG; PAM sequence: GAG
  source 1..20: mol_type = other DNA
cgcttccgccgggccgccct

SEQ ID NO: 9271 - DNA, 20 bp, synthetic construct
  misc_feature 1..20: note = Description of Artificial Sequence: Synthetic oligonucleotide
  misc_feature 1..20: note = Target: FXN; (-) strand; PAM type: NRG; PAM sequence: GGG
  source 1..20: mol_type = other DNA
gttgcaaggccgcttccgcc

SEQ ID NO: 9272 - DNA, 20 bp, synthetic construct
  misc_feature 1..20: note = Description of Artificial Sequence: Synthetic oligonucleotide
  misc_feature 1..20: note = Target: FXN; (-) strand; PAM type: NRG; PAM sequence: CGG
  source 1..20: mol_type = other DNA
agttgcaaggccgcttccgc

SEQ ID NO: 9273 - DNA, 20 bp, synthetic construct
  misc_feature 1..20: note = Description of Artificial Sequence: Synthetic oligonucleotide
  misc_feature 1..20: note = Target: FXN; (-) strand; PAM type: NRG; PAM sequence: AGG
  source 1..20: mol_type = other DNA
aaccagagaagggagttgca

SEQ ID NO: 9274 - DNA, 20 bp, synthetic construct
  misc_feature 1..20: note = Description of Artificial Sequence: Synthetic oligonucleotide
  misc_feature 1..20: note = Target: FXN; (-) strand; PAM type: NRG; PAM sequence: AAG
  source 1..20: mol_type = other DNA
gaaccagagaagggagttgc

SEQ ID NO: 9275 - DNA, 20 bp, synthetic construct
  misc_feature 1..20: note = Description of Artificial Sequence: Synthetic oligonucleotide
  misc_feature 1..20: note = Target: FXN; (-) strand; PAM type: NRG; PAM sequence: GAG
  source 1..20: mol_type = other DNA
accgggagaaccagagaagg

SEQ ID NO: 9276 - DNA, 20 bp, synthetic construct
  misc_feature 1..20: note = Description of Artificial Sequence: Synthetic oligonucleotide
  misc_feature 1..20: note = Target: FXN; (-) strand; PAM type: NRG; PAM sequence: GGG
  source 1..20: mol_type = other DNA
caaccgggagaaccagagaa

SEQ ID NO: 9277 - DNA, 20 bp, synthetic construct
  misc_feature 1..20: note = Description of Artificial Sequence: Synthetic oligonucleotide
  misc_feature 1..20: note = Target: FXN; (-) strand; PAM type: NRG; PAM sequence: AGG
  source 1..20: mol_type = other DNA
gcaaccgggagaaccagaga

SEQ ID NO: 9278 - DNA, 20 bp, synthetic construct
  misc_feature 1..20: note = Description of Artificial Sequence: Synthetic oligonucleotide
  misc_feature 1..20: note = Target: FXN; (-) strand; PAM type: NRG; PAM sequence: AAG
  source 1..20: mol_type = other DNA
tgcaaccgggagaaccagag

SEQ ID NO: 9279 - DNA, 20 bp, synthetic construct
  misc_feature 1..20: note = Description of Artificial Sequence: Synthetic oligonucleotide
  misc_feature 1..20: note = Target: FXN; (-) strand; PAM type: NRG; PAM sequence: GAG
  source 1..20: mol_type = other DNA
aaatgcaaccgggagaacca

SEQ ID NO: 9280 - DNA, 20 bp, synthetic construct
  misc_feature 1..20: note = Description of Artificial Sequence: Synthetic oligonucleotide
  misc_feature 1..20: note = Target: FXN; (-) strand; PAM type: NRG; PAM sequence: CAG
  source 1..20: mol_type = other DNA
gtaaatgcaaccgggagaac

SEQ ID NO: 9281 - DNA, 20 bp, synthetic construct
  misc_feature 1..20: note = Description of Artificial Sequence: Synthetic oligonucleotide
  misc_feature 1..20: note = Target: FXN; (-) strand; PAM type: NRG; PAM sequence: GAG
  source 1..20: mol_type = other DNA
gccagtgtaaatgcaaccgg

SEQ ID NO: 9282 - DNA, 20 bp, synthetic construct
  misc_feature 1..20: note = Description of Artificial Sequence: Synthetic oligonucleotide
  misc_feature 1..20: note = Target: FXN; (-) strand; PAM type: NRG; PAM sequence: GGG
  source 1..20: mol_type = other DNA
aagccagtgtaaatgcaacc

SEQ ID NO: 9283 - DNA, 20 bp, synthetic construct
  misc_feature 1..20: note = Description of Artificial Sequence: Synthetic oligonucleotide
  misc_feature 1..20: note = Target: FXN; (-) strand; PAM type: NRG; PAM sequence: CGG
  source 1..20: mol_type = other DNA
gaagccagtgtaaatgcaac

SEQ ID NO: 9284 - DNA, 20 bp, synthetic construct
  misc_feature 1..20: note = Description of Artificial Sequence: Synthetic oligonucleotide
  misc_feature 1..20: note = Target: FXN; (-) strand; PAM type: NRG; PAM sequence: CAG
  source 1..20: mol_type = other DNA
ttccttcggaaagcagaagc

SEQ ID NO: 9285 - DNA, 20 bp, synthetic construct
  misc_feature 1..20: note = Description of Artificial Sequence: Synthetic oligonucleotide
  misc_feature 1..20: note = Target: FXN; (-) strand; PAM type: NRG; PAM sequence: AAG
  source 1..20: mol_type = other DNA
ccttttccttcggaaagcag

SEQ ID NO: 9286 - DNA, 20 bp, synthetic construct
  misc_feature 1..20: note = Description of Artificial Sequence: Synthetic oligonucleotide
  misc_feature 1..20: note = Target: FXN; (-) strand; PAM type: NRG; PAM sequence: CAG
  source 1..20: mol_type = other DNA
tccccttttccttcggaaag

SEQ ID NO: 9287 - DNA, 20 bp, synthetic construct
  misc_feature 1..20: note = Description of Artificial Sequence: Synthetic oligonucleotide
  misc_feature 1..20: note = Target: FXN; (-) strand; PAM type: NRG; PAM sequence: AAG
  source 1..20: mol_type = other DNA
atgtccccttttccttcgga

SEQ ID NO: 9288 - DNA, 20 bp, synthetic construct
  misc_feature 1..20: note = Description of Artificial Sequence: Synthetic oligonucleotide
  misc_feature 1..20: note = Target: FXN; (-) strand; PAM type: NRG; PAM sequence: CGG
  source 1..20: mol_type = other DNA
caaaatgtccccttttcctt

SEQ ID NO: 9289 - DNA, 20 bp, synthetic construct
  misc_feature 1..20: note = Description of Artificial Sequence: Synthetic oligonucleotide
  misc_feature 1..20: note = Target: FXN; (-) strand; PAM type: NRG; PAM sequence: AGG
  source 1..20: mol_type = other DNA
ttgacccgcagtcgcaccgc

SEQ ID NO: 9290 - DNA, 20 bp, synthetic construct
  misc_feature 1..20: note = Description of Artificial Sequence: Synthetic oligonucleotide
  misc_feature 1..20: note = Target: FXN; (-) strand; PAM type: NRG; PAM sequence: CAG
  source 1..20: mol_type = other DNA
cttgacccgcagtcgcaccg

SEQ ID NO: 9291 - DNA, 20 bp, synthetic construct
  misc_feature 1..20: note = Description of Artificial Sequence: Synthetic oligonucleotide
  misc_feature 1..20: note = Target: FXN; (-) strand; PAM type: NRG; PAM sequence: CAG
  source 1..20: mol_type = other DNA
ttcgcccgtgccttgacccg

SEQ ID NO: 9292 - DNA, 20 bp, synthetic construct
  misc_feature 1..20: note = Description of Artificial Sequence: Synthetic oligonucleotide
  misc_feature 1..20: note = Target: FXN; (-) strand; PAM type: NRG; PAM sequence: CAG
  source 1..20: mol_type = other DNA
tcggaaccggtcccctccac

SEQ ID NO: 9293 - DNA, 20 bp, synthetic construct
  misc_feature 1..20: note = Description of Artificial Sequence: Synthetic oligonucleotide
  misc_feature 1..20: note = Target: FXN; (-) strand; PAM type: NRG; PAM sequence: CGG
  source 1..20: mol_type = other DNA
agccgcacacccctcggaac

SEQ ID NO: 9294 - DNA, 20 bp, synthetic construct
  misc_feature 1..20: note = Description of Artificial Sequence: Synthetic oligonucleotide
  misc_feature 1..20: note = Target: FXN; (-) strand; PAM type: NRG; PAM sequence: CGG
  source 1..20: mol_type = other DNA
ggagacagccgcacacccct

SEQ ID NO: 9295 - DNA, 20 bp, synthetic construct
  misc_feature 1..20: note = Description of Artificial Sequence: Synthetic oligonucleotide
  misc_feature 1..20: note = Target: FXN; (-) strand; PAM type: NRG; PAM sequence: CAG
  source 1..20: mol_type = other DNA
agaagtgacaagcatggaga

SEQ ID NO: 9296 - DNA, 20 bp, synthetic construct
  misc_feature 1..20: note = Description of Artificial Sequence: Synthetic oligonucleotide
  misc_feature 1..20: note = Target: FXN; (-) strand; PAM type: NRG; PAM sequence: GAG
  source 1..20: mol_type = other DNA
gcagagaagtgacaagcatg

SEQ ID NO: 9297 - DNA, 20 bp, synthetic construct
  misc_feature 1..20: note = Description of Artificial Sequence: Synthetic oligonucleotide
  misc_feature 1..20: note = Target: FXN; (-) strand; PAM type: NRG; PAM sequence: TGG
  source 1..20: mol_type = other DNA
tcgcagagaagtgacaagca

SEQ ID NO: 9298 - DNA, 20 bp, synthetic construct
  misc_feature 1..20: note = Description of Artificial Sequence: Synthetic oligonucleotide
  misc_feature 1..20: note = Target: FXN; (-) strand; PAM type: NRG; PAM sequence: AAG
  source 1..20: mol_type = other DNA
agttatcgcagagaagtgac

SEQ ID NO: 9299 - DNA, 20 bp, synthetic construct
  misc_feature 1..20: note = Description of Artificial Sequence: Synthetic oligonucleotide
  misc_feature 1..20: note = Target: FXN; (-) strand; PAM type: NRG; PAM sequence: AAG
  source 1..20: mol_type = other DNA
tgaaacaagttatcgcagag

SEQ ID NO: 9300 - DNA, 20 bp, synthetic construct
  misc_feature 1..20: note = Description of Artificial Sequence: Synthetic oligonucleotide
  misc_feature 1..20: note = Target: FXN; (-) strand; PAM type: NRG; PAM sequence: GAG
  source 1..20: mol_type = other DNA
tactgaaacaagttatcgca

SEQ ID NO: 9301 - DNA, 20 bp, synthetic construct
  misc_feature 1..20: note = Description of Artificial Sequence: Synthetic oligonucleotide
  misc_feature 1..20: note = Target: FXN; (-) strand; PAM type: NRG; PAM sequence: CAG
  source 1..20: mol_type = other DNA
attactgaaacaagttatcg

SEQ ID NO: 9302 - DNA, 20 bp, synthetic construct
  misc_feature 1..20: note = Description of Artificial Sequence: Synthetic oligonucleotide
  misc_feature 1..20: note = Target: FXN; (-) strand; PAM type: NRG; PAM sequence: AAG
  source 1..20: mol_type = other DNA
tctattaatattactgaaac

SEQ ID NO: 9303 - DNA, 20 bp, synthetic construct
  misc_feature 1..20: note = Description of Artificial Sequence: Synthetic oligonucleotide
  misc_feature 1..20: note = Target: FXN; (-) strand; PAM type: NRG; PAM sequence: CAG
  source 1..20: mol_type = other DNA
tatgtgtatgtatatactag

SEQ ID NO: 9304 - DNA, 20 bp, synthetic construct
  misc_feature 1..20: note = Description of Artificial Sequence: Synthetic oligonucleotide
  misc_feature 1..20: note = Target: FXN; (-) strand; PAM type: NRG; PAM sequence: TAG
  source 1..20: mol_type = other DNA
cattatgtgtatgtatatac

SEQ ID NO: 9305 - DNA, 20 bp, synthetic construct
  misc_feature 1..20: note = Description of Artificial Sequence: Synthetic oligonucleotide
  misc_feature 1..20: note = Target: FXN; (-) strand; PAM type: NRG; PAM sequence: CAG
  source 1..20: mol_type = other DNA
acgctatatacagatacaca

SEQ ID NO: 9306 - DNA, 20 bp, synthetic construct
  misc_feature 1..20: note = Description of Artificial Sequence: Synthetic oligonucleotide
  misc_feature 1..20: note = Target: FXN; (-) strand; PAM type: NRG; PAM sequence: CAG
  source 1..20: mol_type = other DNA
cacaacacacacgctatata

SEQ ID NO: 9307 - DNA, 20 bp, synthetic construct
  misc_feature 1..20: note = Description of Artificial Sequence: Synthetic oligonucleotide
  misc_feature 1..20: note = Target: FXN; (-) strand; PAM type: NRG; PAM sequence: AGG
  source 1..20: mol_type = other DNA
aatccagccttgaaaatatt

SEQ ID NO: 9308 - DNA, 20 bp, synthetic construct
  misc_feature 1..20: note = Description of Artificial Sequence: Synthetic oligonucleotide
  misc_feature 1..20: note = Target: FXN; (-) strand; PAM type: NRG; PAM sequence: TAG
  source 1..20: mol_type = other DNA
aaatccagccttgaaaatat

SEQ ID NO: 9309 - DNA, 20 bp, synthetic construct
  misc_feature 1..20: note = Description of Artificial Sequence: Synthetic oligonucleotide
  misc_feature 1..20: note = Target: FXN; (-) strand; PAM type: NRG; PAM sequence: CAG
  source 1..20: mol_type = other DNA
gcatttcgttcaaaaaaatc

SEQ ID NO: 9310 - DNA, 20 bp, synthetic construct
  misc_feature 1..20: note = Description of Artificial Sequence: Synthetic oligonucleotide
  misc_feature 1..20: note = Target: FXN; (-) strand; PAM type: NRG; PAM sequence: AAG
  source 1..20: mol_type = other DNA
agtttcacctcgttccagga

SEQ ID NO: 9311 - DNA, 20 bp, synthetic construct
  misc_feature 1..20: note = Description of Artificial Sequence: Synthetic oligonucleotide
  misc_feature 1..20: note = Target: FXN; (-) strand; PAM type: NRG; PAM sequence: AGG
  source 1..20: mol_type = other DNA
tgaaagtttcacctcgttcc

SEQ ID NO: 9312 - DNA, 20 bp, synthetic construct
  misc_feature 1..20: note = Description of Artificial Sequence: Synthetic oligonucleotide
  misc_feature 1..20: note = Target: FXN; (-) strand; PAM type: NRG; PAM sequence: CAG
  source 1..20: mol_type = other DNA
ctgaaagtttcacctcgttc

SEQ ID NO: 9313 - DNA, 20 bp, synthetic construct
  misc_feature 1..20: note = Description of Artificial Sequence: Synthetic oligonucleotide
  misc_feature 1..20: note = Target: FXN; (-) strand; PAM type: NRG; PAM sequence: AAG
  source 1..20: mol_type = other DNA
tagctattctgcagctctga

SEQ ID NO: 9314 - DNA, 20 bp, synthetic construct
  misc_feature 1..20: note = Description of Artificial Sequence: Synthetic oligonucleotide
  misc_feature 1..20: note = Target: FXN; (-) strand; PAM type: NRG; PAM sequence: CAG
  source 1..20: mol_type = other DNA
ctgctgctctagctattctg

SEQ ID NO: 9315 - DNA, 20 bp, synthetic construct
  misc_feature 1..20: note = Description of Artificial Sequence: Synthetic oligonucleotide
  misc_feature 1..20: note = Target: FXN; (-) strand; PAM type: NRG; PAM sequence: TAG
  source 1..20: mol_type = other DNA
agccagggcccctgctgctc

SEQ ID NO: 9316 - DNA, 20 bp, synthetic construct
  misc_feature 1..20: note = Description of Artificial Sequence: Synthetic oligonucleotide
  misc_feature 1..20: note = Target: FXN; (-) strand; PAM type: NRG; PAM sequence: GGG
  source 1..20: mol_type = other DNA
gggtcagtttccaaaagcca

SEQ ID NO: 9317 - DNA, 20 bp, synthetic construct
  misc_feature 1..20: note = Description of Artificial Sequence: Synthetic oligonucleotide
  misc_feature 1..20: note = Target: FXN; (-) strand; PAM type: NRG; PAM sequence: AGG
  source 1..20: mol_type = other DNA
cgggtcagtttccaaaagcc

SEQ ID NO: 9318 - DNA, 20 bp, synthetic construct
  misc_feature 1..20: note = Description of Artificial Sequence: Synthetic oligonucleotide
  misc_feature 1..20: note = Target: FXN; (-) strand; PAM type: NRG; PAM sequence: CAG
  source 1..20: mol_type = other DNA
tcgggtcagtttccaaaagc

SEQ ID NO: 9319 - DNA, 20 bp, synthetic construct
  misc_feature 1..20: note = Description of Artificial Sequence: Synthetic oligonucleotide
  misc_feature 1..20: note = Target: FXN; (-) strand; PAM type: NRG; PAM sequence: AAG
  source 1..20: mol_type = other DNA
aaggtcgggtcagtttccaa

SEQ ID NO: 9320 - DNA, 20 bp, synthetic construct
  misc_feature 1..20: note = Description of Artificial Sequence: Synthetic oligonucleotide
  misc_feature 1..20: note = Target: FXN; (-) strand; PAM type: NRG; PAM sequence: CAG
  source 1..20: mol_type = other DNA
atctggaataaaggtcgggt

SEQ ID NO: 9321 - DNA, 20 bp, synthetic construct
  misc_feature 1..20: note = Description of Artificial Sequence: Synthetic oligonucleotide
  misc_feature 1..20: note = Target: FXN; (-) strand; PAM type: NRG; PAM sequence: GGG
  source 1..20: mol_type = other DNA
cagaatctggaataaaggtc

SEQ ID NO: 9322 - DNA, 20 bp, synthetic construct
  misc_feature 1..20: note = Description of Artificial Sequence: Synthetic oligonucleotide
  misc_feature 1..20: note = Target: FXN; (-) strand; PAM type: NRG; PAM sequence: CGG
  source 1..20: mol_type = other DNA
gcagaatctggaataaaggt

SEQ ID NO: 9323 - DNA, 20 bp, synthetic construct
  misc_feature 1..20: note = Description of Artificial Sequence: Synthetic oligonucleotide
  misc_feature 1..20: note = Target: FXN; (-) strand; PAM type: NRG; PAM sequence: AGG
  source 1..20: mol_type = other DNA
tggggcagaatctggaataa

SEQ ID NO: 9324 - DNA, 20 bp, synthetic construct
  misc_feature 1..20: note = Description of Artificial Sequence: Synthetic oligonucleotide
  misc_feature 1..20: note = Target: FXN; (-) strand; PAM type: NRG; PAM sequence: AAG
  source 1..20: mol_type = other DNA
gtggggcagaatctggaata

SEQ ID NO: 9325 - DNA, 20 bp, synthetic construct
  misc_feature 1..20: note = Description of Artificial Sequence: Synthetic oligonucleotide
  misc_feature 1..20: note = Target: FXN; (-) strand; PAM type: NRG; PAM sequence: TGG
  source 1..20: mol_type = other DNA
ctgcggagtggggcagaatc

SEQ ID NO: 9326 - DNA, 20 bp, synthetic construct
  misc_feature 1..20: note = Description of Artificial Sequence: Synthetic oligonucleotide
  misc_feature 1..20: note = Target: FXN; (-) strand; PAM type: NRG; PAM sequence: CAG
  source 1..20: mol_type = other DNA
cacagctctgcggagtgggg

SEQ ID NO: 9327 - DNA, 20 bp, synthetic construct
  misc_feature 1..20: note = Description of Artificial Sequence: Synthetic oligonucleotide
  misc_feature 1..20: note = Target: FXN; (-) strand; PAM type: NRG; PAM sequence: GGG
  source 1..20: mol_type = other DNA
tcacacagctctgcggagtg

SEQ ID NO: 9328 - DNA, 20 bp, synthetic construct
  misc_feature 1..20: note = Description of Artificial Sequence: Synthetic oligonucleotide
  misc_feature 1..20: note = Target: FXN; (-) strand; PAM type: NRG; PAM sequence: GGG
  source 1..20: mol_type = other DNA
gtcacacagctctgcggagt

SEQ ID NO: 9329 - DNA, 20 bp, synthetic construct
  misc_feature 1..20: note = Description of Artificial Sequence: Synthetic oligonucleotide
  misc_feature 1..20: note = Target: FXN; (-) strand; PAM type: NRG; PAM sequence: TGG
  source 1..20: mol_type = other DNA
ggtcacacagctctgcggag

SEQ ID NO: 9330 - DNA, 20 bp, synthetic construct
  misc_feature 1..20: note = Description of Artificial Sequence: Synthetic oligonucleotide
  misc_feature 1..20: note = Target: FXN; (-) strand; PAM type: NRG; PAM sequence: GAG
  source 1..20: mol_type = other DNA
caaggtcacacagctctgcg

SEQ ID NO: 9331 - DNA, 20 bp, synthetic construct
  misc_feature 1..20: note = Description of Artificial Sequence: Synthetic oligonucleotide
  misc_feature 1..20: note = Target: FXN; (-) strand; PAM type: NRG; PAM sequence: CGG
  source 1..20: mol_type = other DNA
cccaaggtcacacagctctg

SEQ ID NO: 9332 - DNA, 20 bp, synthetic construct
  misc_feature 1..20: note = Description of Artificial Sequence: Synthetic oligonucleotide
  misc_feature 1..20: note = Target: FXN; (-) strand; PAM type: NRG; PAM sequence: CAG
  source 1..20: mol_type = other DNA
gggaatcccccaaggtcaca

SEQ ID NO: 9333 - DNA, 20 bp, synthetic construct
  misc_feature 1..20: note = Description of Artificial Sequence: Synthetic oligonucleotide
  misc_feature 1..20: note = Target: FXN; (-) strand; PAM type: NRG; PAM sequence: AGG
  source 1..20: mol_type = other DNA
gaggttaggggaatccccca

SEQ ID NO: 9334 - DNA, 20 bp, synthetic construct
  misc_feature 1..20: note = Description of Artificial Sequence: Synthetic oligonucleotide
  misc_feature 1..20: note = Target: FXN; (-) strand; PAM type: NRG; PAM sequence: AAG
  source 1..20: mol_type = other DNA
agaggttaggggaatccccc

SEQ ID NO: 9335 - DNA, 20 bp, synthetic construct
  misc_feature 1..20: note = Description of Artificial Sequence: Synthetic oligonucleotide
  misc_feature 1..20: note = Target: FXN; (-) strand; PAM type: NRG; PAM sequence: GGG
  source 1..20: mol_type = other DNA
ccacgtctcagagaggttag

SEQ ID NO: 9336 - DNA, 20 bp, synthetic construct
  misc_feature 1..20: note = Description of Artificial Sequence: Synthetic oligonucleotide
  misc_feature 1..20: note = Target: FXN; (-) strand; PAM type: NRG; PAM sequence: GGG
  source 1..20: mol_type = other DNA
gccacgtctcagagaggtta

SEQ ID NO: 9337 - DNA, 20 bp, synthetic construct
  misc_feature 1..20: note = Description of Artificial Sequence: Synthetic oligonucleotide
  misc_feature 1..20: note = Target: FXN; (-) strand; PAM type: NRG; PAM sequence: AGG
  source 1..20: mol_type = other DNA
agccacgtctcagagaggtt

SEQ ID NO: 9338 - DNA, 20 bp, synthetic construct
  misc_feature 1..20: note = Description of Artificial Sequence: Synthetic oligonucleotide
  misc_feature 1..20: note = Target: FXN; (-) strand; PAM type: NRG; PAM sequence: TAG
  source 1..20: mol_type = other DNA
aagccacgtctcagagaggt

SEQ ID NO: 9339 - DNA, 20 bp, synthetic construct
  misc_feature 1..20: note = Description of Artificial Sequence: Synthetic oligonucleotide
  misc_feature 1..20: note = Target: FXN; (-) strand; PAM type: NRG; PAM sequence: AGG
  source 1..20: mol_type = other DNA
aacaaagccacgtctcagag

SEQ ID NO: 9340 - DNA, 20 bp, synthetic construct
  misc_feature 1..20: note = Description of Artificial Sequence: Synthetic oligonucleotide
  misc_feature 1..20: note = Target: FXN; (-) strand; PAM type: NRG; PAM sequence: GAG
  source 1..20: mol_type = other DNA
aaacaaagccacgtctcaga

SEQ ID NO: 9341 - DNA, 20 bp, synthetic construct
  misc_feature 1..20: note = Description of Artificial Sequence: Synthetic oligonucleotide
  misc_feature 1..20: note = Target: FXN; (-) strand; PAM type: NRG; PAM sequence: GAG
  source 1..20: mol_type = other DNA
gaaaacaaagccacgtctca

SEQ ID NO: 9342 - DNA, 20 bp, synthetic construct
  misc_feature 1..20: note = Description of Artificial Sequence: Synthetic oligonucleotide
  misc_feature 1..20: note = Target: FXN; (-) strand; PAM type: NRG; PAM sequence: CAG
  source 1..20: mol_type = other DNA
cagaaaacaaagccacgtct

SEQ ID NO: 9343 - DNA, 20 bp, synthetic construct
  misc_feature 1..20: note = Description of Artificial Sequence: Synthetic oligonucleotide
  misc_feature 1..20: note = Target: FXN; (-) strand; PAM type: NRG; PAM sequence: AAG
  source 1..20: mol_type = other DNA
tcttctccctacagaaaaca

SEQ ID NO: 9344 - DNA, 20 bp, synthetic construct
  misc_feature 1..20: note = Description of Artificial Sequence: Synthetic oligonucleotide
  misc_feature 1..20: note = Target: FXN; (-) strand; PAM type: NRG; PAM sequence: CAG
  source 1..20: mol_type = other DNA
tcacctttatcttctcccta

SEQ ID NO: 9345 - DNA, 20 bp, synthetic construct
  misc_feature 1..20: note = Description of Artificial Sequence: Synthetic oligonucleotide
  misc_feature 1..20: note = Target: FXN; (-) strand; PAM type: NRG; PAM sequence: GGG
  source 1..20: mol_type = other DNA
tcacaccaggtccgcaaaat

SEQ ID NO: 9346 - DNA, 20 bp, synthetic construct
  misc_feature 1..20: note = Description of Artificial Sequence: Synthetic oligonucleotide
  misc_feature 1..20: note = Target: FXN; (-) strand; PAM type: NRG; PAM sequence: TGG
  source 1..20: mol_type = other DNA
ctcacaccaggtccgcaaaa

SEQ ID NO: 9347 - DNA, 20 bp, synthetic construct
  misc_feature 1..20: note = Description of Artificial Sequence: Synthetic oligonucleotide
  misc_feature 1..20: note = Target: FXN; (-) strand; PAM type: NRG; PAM sequence: AGG
  source 1..20: mol_type = other DNA
tcccatttaatcctcacacc

SEQ ID NO: 9348 - DNA, 20 bp, synthetic construct
  misc_feature 1..20: note = Description of Artificial Sequence: Synthetic oligonucleotide
  misc_feature 1..20: note = Target: FXN; (-) strand; PAM type: NRG; PAM sequence: CAG
  source 1..20: mol_type = other DNA
ttcccatttaatcctcacac

SEQ ID NO: 9349 - DNA, 20 bp, synthetic construct
  misc_feature 1..20: note = Description of Artificial Sequence: Synthetic oligonucleotide
  misc_feature 1..20: note = Target: FXN; (-) strand; PAM type: NRG; PAM sequence: AAG
  source 1..20: mol_type = other DNA
ggaactaatttgaagttctg

SEQ ID NO: 9350 - DNA, 20 bp, synthetic construct
  misc_feature 1..20: note = Description of Artificial Sequence: Synthetic oligonucleotide
  misc_feature 1..20: note = Target: FXN; (-) strand; PAM type: NRG; PAM sequence: AAG
  source 1..20: mol_type = other DNA
aagaaaggggaactaatttg

SEQ ID NO: 9351 - DNA, 20 bp, synthetic construct
  misc_feature 1..20: note = Description of Artificial Sequence: Synthetic oligonucleotide
  misc_feature 1..20: note = Target: FXN; (-) strand; PAM type: NRG; PAM sequence: GGG
  source 1..20: mol_type = other DNA
taccccccaaaggaagaaag

SEQ ID NO: 9352 - DNA, 20 bp, synthetic construct
  misc_feature 1..20: note = Description of Artificial Sequence: Synthetic oligonucleotide
  misc_feature 1..20: note = Target: FXN; (-) strand; PAM type: NRG; PAM sequence: GGG
  source 1..20: mol_type = other DNA
gtaccccccaaaggaagaaa

SEQ ID NO: 9353 - DNA, 20 bp, synthetic construct
  misc_feature 1..20: note = Description of Artificial Sequence: Synthetic oligonucleotide
  misc_feature 1..20: note = Target: FXN; (-) strand; PAM type: NRG; PAM sequence: AGG
  source 1..20: mol_type = other DNA
tgtaccccccaaaggaagaa

SEQ ID NO: 9354 - DNA, 20 bp, synthetic construct
  misc_feature 1..20: note = Description of Artificial Sequence: Synthetic oligonucleotide
  misc_feature 1..20: note = Target: FXN; (-) strand; PAM type: NRG; PAM sequence: AAG
  source 1..20: mol_type = other DNA
ttgtaccccccaaaggaaga

SEQ ID NO: 9355 - DNA, 20 bp, synthetic construct
  misc_feature 1..20: note = Description of Artificial Sequence: Synthetic oligonucleotide
  misc_feature 1..20: note = Target: FXN; (-) strand; PAM type: NRG; PAM sequence: AAG
  source 1..20: mol_type = other DNA
ttctttgtaccccccaaagg

SEQ ID NO: 9356 - DNA, 20 bp, synthetic construct
  misc_feature 1..20: note = Description of Artificial Sequence: Synthetic oligonucleotide
  misc_feature 1..20: note = Target: FXN; (-) strand; PAM type: NRG; PAM sequence: AGG
  source 1..20: mol_type = other DNA
tatttctttgtaccccccaa

SEQ ID NO: 9357 - DNA, 20 bp, synthetic construct
  misc_feature 1..20: note = Description of Artificial Sequence: Synthetic oligonucleotide
  misc_feature 1..20: note = Target: FXN; (-) strand; PAM type: NRG; PAM sequence: AAG
  source 1..20: mol_type = other DNA
atatttctttgtacccccca

SEQ ID NO: 9358 - DNA, 20 bp, synthetic construct
  misc_feature 1..20: note = Description of Artificial Sequence: Synthetic oligonucleotide
  misc_feature 1..20: note = Target: FXN; (-) strand; PAM type: NRG; PAM sequence: CAG
  source 1..20: mol_type = other DNA
aagccgtggcgtaactgggt

SEQ ID NO: 9359 - DNA, 20 bp, synthetic construct
  misc_feature 1..20: note = Description of Artificial Sequence: Synthetic oligonucleotide
  misc_feature 1..20: note = Target: FXN; (-) strand; PAM type: NRG; PAM sequence: GGG
  source 1..20: mol_type = other DNA
tttcaagccgtggcgtaact

SEQ ID NO: 9360 - DNA, 20 bp, synthetic construct
  misc_feature 1..20: note = Description of Artificial Sequence: Synthetic oligonucleotide
  misc_feature 1..20: note = Target: FXN; (-) strand; PAM type: NRG; PAM sequence: TGG
  source 1..20: mol_type = other DNA
ctttcaagccgtggcgtaac

SEQ ID NO: 9361 - DNA, 20 bp, synthetic construct
  misc_feature 1..20: note = Description of Artificial Sequence: Synthetic oligonucleotide
  misc_feature 1..20: note = Target: FXN; (-) strand; PAM type: NRG; PAM sequence: TGG
  source 1..20: mol_type = other DNA
ggtttcctcctttcaagccg

SEQ ID NO: 9362 - DNA, 20 bp, synthetic construct
  misc_feature 1..20: note = Description of Artificial Sequence: Synthetic oligonucleotide
  misc_feature 1..20: note = Target: FXN; (-) strand; PAM type: NRG; PAM sequence: AAG
  source 1..20: mol_type = other DNA
tctttgggtttcctcctttc

SEQ ID NO: 9363 - DNA, 20 bp, synthetic construct
  misc_feature 1..20: note = Description of Artificial Sequence: Synthetic oligonucleotide
  misc_feature 1..20: note = Target: FXN; (-) strand; PAM type: NRG; PAM sequence: GGG
  source 1..20: mol_type = other DNA
catccccacagccattcttt

SEQ ID NO: 9364 - DNA, 20 bp, synthetic construct
  misc_feature 1..20: note = Description of Artificial Sequence: Synthetic oligonucleotide
  misc_feature 1..20: note = Target: FXN; (-) strand; PAM type: NRG; PAM sequence: TGG
  source 1..20: mol_type = other DNA
tcatccccacagccattctt

SEQ ID NO: 9365 - DNA, 20 bp, synthetic construct
  misc_feature 1..20: note = Description of Artificial Sequence: Synthetic oligonucleotide
  misc_feature 1..20: note = Target: FXN; (-) strand; PAM type: NRG; PAM sequence: CAG
  source 1..20: mol_type = other DNA
aggaatcttcctcatcccca

SEQ ID NO: 9366 - DNA, 20 bp, synthetic construct
  misc_feature 1..20: note = Description of Artificial Sequence: Synthetic oligonucleotide
  misc_feature 1..20: note = Target: FXN; (-) strand; PAM type: NRG; PAM sequence: AGG
  source 1..20: mol_type = other DNA
aataccatgtcctccccttg

SEQ ID NO: 9367 - DNA, 20 bp, synthetic construct
  misc_feature 1..20: note = Description of Artificial Sequence: Synthetic oligonucleotide
  misc_feature 1..20: note = Target: FXN; (-) strand; PAM type: NRG; PAM sequence: GAG
  source 1..20: mol_type = other DNA
aaataccatgtcctcccctt

SEQ ID NO: 9368 - DNA, 20 bp, synthetic construct
  misc_feature 1..20: note = Description of Artificial Sequence: Synthetic oligonucleotide
  misc_feature 1..20: note = Target: FXN; (-) strand; PAM type: NRG; PAM sequence: AAG
  source 1..20: mol_type = other DNA
accacttccttggcatcttc

SEQ ID NO: 9369 - DNA, 20 bp, synthetic construct
  misc_feature 1..20: note = Description of Artificial Sequence: Synthetic oligonucleotide
  misc_feature 1..20: note = Target: FXN; (-) strand; PAM type: NRG; PAM sequence: TGG
  source 1..20: mol_type = other DNA
aacaccctctaccacttcct

SEQ ID NO: 9370 - DNA, 20 bp, synthetic construct
  misc_feature 1..20: note = Description of Artificial Sequence: Synthetic oligonucleotide
  misc_feature 1..20: note = Target: FXN; (-) strand; PAM type: NRG; PAM sequence: CGG
  source 1..20: mol_type = other DNA
cttcctggcctttgcccaga

SEQ ID NO: 9371 - DNA, 20 bp, synthetic construct
  misc_feature 1..20: note = Description of Artificial Sequence: Synthetic oligonucleotide
  misc_feature 1..20: note = Target: FXN; (-) strand; PAM type: NRG; PAM sequence: CAG
  source 1..20: mol_type = other DNA
ccgccttcctggcctttgcc

SEQ ID NO: 9372 - DNA, 20 bp, synthetic construct
  misc_feature 1..20: note = Description of Artificial Sequence: Synthetic oligonucleotide
  misc_feature 1..20: note = Target: FXN; (-) strand; PAM type: NRG; PAM sequence: TGG
  source 1..20: mol_type = other DNA
gggatccccttccgccttcc

SEQ ID NO: 9373 - DNA, 20 bp, synthetic construct
  misc_feature 1..20: note = Description of Artificial Sequence: Synthetic oligonucleotide
  misc_feature 1..20: note = Target: FXN; (-) strand; PAM type: NRG; PAM sequence: GGG
  source 1..20: mol_type = other DNA
ggcgtaccagccactctgaa

SEQ ID NO: 9374 - DNA, 20 bp, synthetic construct
  misc_feature 1..20: note = Description of Artificial Sequence: Synthetic oligonucleotide
  misc_feature 1..20: note = Target: FXN; (-) strand; PAM type: NRG; PAM sequence: AGG
  source 1..20: mol_type = other DNA
cggcgtaccagccactctga

SEQ ID NO: 9375 - DNA, 20 bp, synthetic construct
  misc_feature 1..20: note = Description of Artificial Sequence: Synthetic oligonucleotide
  misc_feature 1..20: note = Target: FXN; (-) strand; PAM type: NRG; PAM sequence: AAG
  source 1..20: mol_type = other DNA
gcggcgtaccagccactctg

SEQ ID NO: 9376 - DNA, 20 bp, synthetic construct
  misc_feature 1..20: note = Description of Artificial Sequence: Synthetic oligonucleotide
  misc_feature 1..20: note = Target: FXN; (-) strand; PAM type: NRG; PAM sequence: CAG
  source 1..20: mol_type = other DNA
ccctaatacatgcggcgtac

SEQ ID NO: 9377 - DNA, 20 bp, synthetic construct
  misc_feature 1..20: note = Description of Artificial Sequence: Synthetic oligonucleotide
  misc_feature 1..20: note = Target: FXN; (-) strand; PAM type: NRG; PAM sequence: CGG
  source 1..20: mol_type = other DNA
ttcatctcccctaatacatg

SEQ ID NO: 9378 - DNA, 20 bp, synthetic construct
  misc_feature 1..20: note = Description of Artificial Sequence: Synthetic oligonucleotide
  misc_feature 1..20: note = Target: FXN; (-) strand; PAM type: NRG; PAM sequence: TGG
  source 1..20: mol_type = other DNA
acacaaatatggcttggacg

SEQ ID NO: 9379 - DNA, 20 bp, synthetic construct
  misc_feature 1..20: note = Description of Artificial Sequence: Synthetic oligonucleotide
  misc_feature 1..20: note = Target: FXN; (-) strand; PAM type: NRG; PAM sequence: TGG
  source 1..20: mol_type = other DNA
agagcaacacaaatatggct

SEQ ID NO: 9380 - DNA, 20 bp, synthetic construct
  misc_feature 1..20: note = Description of Artificial Sequence: Synthetic oligonucleotide
  misc_feature 1..20: note = Target: FXN; (-) strand; PAM type: NRG; PAM sequence: TGG
  source 1..20: mol_type = other DNA
tccggagagcaacacaaata

SEQ ID NO: 9381 - DNA, 20 bp, synthetic construct
  misc_feature 1..20: note = Description of Artificial Sequence: Synthetic oligonucleotide
  misc_feature 1..20: note = Target: FXN; (-) strand; PAM type: NRG; PAM sequence: GAG
  source 1..20: mol_type = other DNA
cctaaagtacaaactccgga

SEQ ID NO: 9382 - DNA, 20 bp, synthetic construct
  misc_feature 1..20: note = Description of Artificial Sequence: Synthetic oligonucleotide
  misc_feature 1..20: note = Target: FXN; (-) strand; PAM type: NRG; PAM sequence: GAG
  source 1..20: mol_type = other DNA
agcctaaagtacaaactccg

SEQ ID NO: 9383 - DNA, 20 bp, synthetic construct
  misc_feature 1..20: note = Description of Artificial Sequence: Synthetic oligonucleotide
  misc_feature 1..20: note = Target: FXN; (-) strand; PAM type: NRG; PAM sequence: CGG
  source 1..20: mol_type = other DNA
caagcctaaagtacaaactc

SEQ ID NO: 9384 - DNA, 20 bp, synthetic construct
  misc_feature 1..20: note = Description of Artificial Sequence: Synthetic oligonucleotide
  misc_feature 1..20: note = Target: FXN; (-) strand; PAM type: NRG; PAM sequence: AAG
  source 1..20: mol_type = other DNA
gtgtgggaagttcaagccta

SEQ ID NO: 9385 - DNA, 20 bp, synthetic construct
  misc_feature 1..20: note = Description of Artificial Sequence: Synthetic oligonucleotide
  misc_feature 1..20: note = Target: FXN; (-) strand; PAM type: NRG; PAM sequence: AAG
  source 1..20: mol_type = other DNA
ataacacgtgtgggaagttc

SEQ ID NO: 9386 - DNA, 20 bp, synthetic construct
  misc_feature 1..20: note = Description of Artificial Sequence: Synthetic oligonucleotide
  misc_feature 1..20: note = Target: FXN; (-) strand; PAM type: NRG; PAM sequence: AAG
  source 1..20: mol_type = other DNA
ggccaaataacacgtgtggg

SEQ ID NO: 9387 - DNA, 20 bp, synthetic construct
  misc_feature 1..20: note = Description of Artificial Sequence: Synthetic oligonucleotide
  misc_feature 1..20: note = Target: FXN; (-) strand; PAM type: NRG; PAM sequence: GGG
  source 1..20: mol_type = other DNA
gtgggccaaataacacgtgt

SEQ ID NO: 9388 - DNA, 20 bp, synthetic construct
  misc_feature 1..20: note = Description of Artificial Sequence: Synthetic oligonucleotide
  misc_feature 1..20: note = Target: FXN; (-) strand; PAM type: NRG; PAM sequence: TGG
  source 1..20: mol_type = other DNA
tgtgggccaaataacacgtg

SEQ ID NO: 9389 - DNA, 20 bp, synthetic construct
  misc_feature 1..20: note = Description of Artificial Sequence: Synthetic oligonucleotide
  misc_feature 1..20: note = Target: FXN; (-) strand; PAM type: NRG; PAM sequence: GGG
  source 1..20: mol_type = other DNA
agtttcttcaaacacaatgt

SEQ ID NO: 9390 - DNA, 20 bp, synthetic construct
  misc_feature 1..20: note = Description of Artificial Sequence: Synthetic oligonucleotide
  misc_feature 1..20: note = Target: FXN; (-) strand; PAM type: NRG; PAM sequence: TGG
  source 1..20: mol_type = other DNA
aagtttcttcaaacacaatg

SEQ ID NO: 9391 - DNA, 20 bp, synthetic construct
  misc_feature 1..20: note = Description of Artificial Sequence: Synthetic oligonucleotide
  misc_feature 1..20: note = Target: FXN; (-) strand; PAM type: NRG; PAM sequence: AAG
  source 1..20: mol_type = other DNA
agcactggcaaccaatccca

SEQ ID NO: 9392 - DNA, 20 bp, synthetic construct
  misc_feature 1..20: note = Description of Artificial Sequence: Synthetic oligonucleotide
  misc_feature 1..20: note = Target: FXN; (-) strand; PAM type: NRG; PAM sequence: TGG
  source 1..20: mol_type = other DNA
aagtcctaacttttaagcac

SEQ ID NO: 9393 - DNA, 20 bp, synthetic construct
  misc_feature 1..20: note = Description of Artificial Sequence: Synthetic oligonucleotide
  misc_feature 1..20: note = Target: FXN; (-) strand; PAM type: NRG; PAM sequence: AAG
  source 1..20: mol_type = other DNA
ttttctaagtcctaactttt

SEQ ID NO: 9394 - DNA, 20 bp, synthetic construct
  misc_feature 1..20: note = Description of Artificial Sequence: Synthetic oligonucleotide
  misc_feature 1..20: note = Target: FXN; (-) strand; PAM type: NRG; PAM sequence: AAG
  source 1..20: mol_type = other DNA
tgccaggaaatccattttct

SEQ ID NO: 9395 - DNA, 20 bp, synthetic construct
  misc_feature 1..20: note = Description of Artificial Sequence: Synthetic oligonucleotide
  misc_feature 1..20: note = Target: FXN; (-) strand; PAM type: NRG; PAM sequence: AGG
  source 1..20: mol_type = other DNA
atgagccaccgcgtcctgcc

SEQ ID NO: 9396 - DNA, 20 bp, synthetic construct
  misc_feature 1..20: note = Description of Artificial Sequence: Synthetic oligonucleotide
  misc_feature 1..20: note = Target: FXN; (-) strand; PAM type: NRG; PAM sequence: CAG
  source 1..20: mol_type = other DNA
catgagccaccgcgtcctgc

SEQ ID NO: 9397 - DNA, 20 bp, synthetic construct
  misc_feature 1..20: note = Description of Artificial Sequence: Synthetic oligonucleotide
  misc_feature 1..20: note = Target: FXN; (-) strand; PAM type: NRG; PAM sequence: GAG
  source 1..20: mol_type = other DNA
agtgctgagattatgggcat

SEQ ID NO: 9398 - DNA, 20 bp, synthetic construct
  misc_feature 1..20: note = Description of Artificial Sequence: Synthetic oligonucleotide
  misc_feature 1..20: note = Target: FXN; (-) strand; PAM type: NRG; PAM sequence: GGG
  source 1..20: mol_type = other DNA
tcccaaagtgctgagattat

SEQ ID NO: 9399 - DNA, 20 bp, synthetic construct
  misc_feature 1..20: note = Description of Artificial Sequence: Synthetic oligonucleotide
  misc_feature 1..20: note = Target: FXN; (-) strand; PAM type: NRG; PAM sequence: TGG
  source 1..20: mol_type = other DNA
ctcccaaagtgctgagatta

SEQ ID NO: 9400 - DNA, 20 bp, synthetic construct
  misc_feature 1..20: note = Description of Artificial Sequence: Synthetic oligonucleotide
  misc_feature 1..20: note = Target: FXN; (-) strand; PAM type: NRG; PAM sequence: GAG
  source 1..20: mol_type = other DNA
cctaggcctcccaaagtgct

SEQ ID NO: 9401 - DNA, 20 bp, synthetic construct
  misc_feature 1..20: note = Description of Artificial Sequence: Synthetic oligonucleotide
  misc_feature 1..20: note = Target: FXN; (-) strand; PAM type: NRG; PAM sequence: AAG
  source 1..20: mol_type = other DNA
ccaccttcctaggcctccca

SEQ ID NO: 9402 - DNA, 20 bp, synthetic construct
  misc_feature 1..20: note = Description of Artificial Sequence: Synthetic oligonucleotide
  misc_feature 1..20: note = Target: FXN; (-) strand; PAM type: NRG; PAM sequence: AGG
  source 1..20: mol_type = other DNA
ctcaggtgatccaccttcct

SEQ ID NO: 9403 - DNA, 20 bp, synthetic construct
  misc_feature 1..20: note = Description of Artificial Sequence: Synthetic oligonucleotide
  misc_feature 1..20: note = Target: FXN; (-) strand; PAM type: NRG; PAM sequence: TAG
  source 1..20: mol_type = other DNA
cctcaggtgatccaccttcc

SEQ ID NO: 9404 - DNA, 20 bp, synthetic construct
  misc_feature 1..20: note = Description of Artificial Sequence: Synthetic oligonucleotide
  misc_feature 1..20: note = Target: FXN; (-) strand; PAM type: NRG; PAM sequence: AGG
  source 1..20: mol_type = other DNA
agtcttgaactccggacctc

SEQ ID NO: 9405 - DNA, 20 bp, synthetic construct
  misc_feature 1..20: note = Description of Artificial Sequence: Synthetic oligonucleotide
  misc_feature 1..20: note = Target: FXN; (-) strand; PAM type: NRG; PAM sequence: CAG
  source 1..20: mol_type = other DNA
tagtcttgaactccggacct

SEQ ID NO: 9406 - DNA, 20 bp, synthetic construct
  misc_feature 1..20: note = Description of Artificial Sequence: Synthetic oligonucleotide
  misc_feature 1..20: note = Target: FXN; (-) strand; PAM type: NRG; PAM sequence: CGG
  source 1..20: mol_type = other DNA
gccaggttagtcttgaactc

SEQ ID NO: 9407 - DNA, 20 bp, synthetic construct
  misc_feature 1..20: note = Description of Artificial Sequence: Synthetic oligonucleotide
  misc_feature 1..20: note = Target: FXN; (-) strand; PAM type: NRG; PAM sequence: TAG
  source 1..20: mol_type = other DNA
tttcaccatgttggccaggt

SEQ ID NO: 9408 - DNA, 20 bp, synthetic construct
  misc_feature 1..20: note = Description of Artificial Sequence: Synthetic oligonucleotide
  misc_feature 1..20: note = Target: FXN; (-) strand; PAM type: NRG; PAM sequence: AGG
  source 1..20: mol_type = other DNA
tgggtttcaccatgttggcc

SEQ ID NO: 9409 - DNA, 20 bp, synthetic construct
  misc_feature 1..20: note = Description of Artificial Sequence: Synthetic oligonucleotide
  misc_feature 1..20: note = Target: FXN; (-) strand; PAM type: NRG; PAM sequence: CAG
  source 1..20: mol_type = other DNA
ctgggtttcaccatgttggc

SEQ ID NO: 9410 - DNA, 20 bp, synthetic construct
  misc_feature 1..20: note = Description of Artificial Sequence: Synthetic oligonucleotide
  misc_feature 1..20: note = Target: FXN; (-) strand; PAM type: NRG; PAM sequence: TGG
  source 1..20: mol_type = other DNA
gatactgggtttcaccatgt

SEQ ID NO: 9411 - DNA, 20 bp, synthetic construct
  misc_feature 1..20: note = Description of Artificial Sequence: Synthetic oligonucleotide
  misc_feature 1..20: note = Target: FXN; (-) strand; PAM type: NRG; PAM sequence: GGG
  source 1..20: mol_type = other DNA
tgtattttttagtagatact

SEQ ID NO: 9412 - DNA, 20 bp, synthetic construct
  misc_feature 1..20: note = Description of Artificial Sequence: Synthetic oligonucleotide
  misc_feature 1..20: note = Target: FXN; (-) strand; PAM type: NRG; PAM sequence: TGG
  source 1..20: mol_type = other DNA
ttgtattttttagtagatac

SEQ ID NO: 9413 - DNA, 20 bp, synthetic construct
  misc_feature 1..20: note = Description of Artificial Sequence: Synthetic oligonucleotide
  misc_feature 1..20: note = Target: FXN; (-) strand; PAM type: NRG; PAM sequence: TAG
  source 1..20: mol_type = other DNA
tttttttttgtattttttag

SEQ ID NO: 9414 - DNA, 20 bp, synthetic construct
  misc_feature 1..20: note = Description of Artificial Sequence: Synthetic oligonucleotide
  misc_feature 1..20: note = Target: FXN; (-) strand; PAM type: NRG; PAM sequence: TAG
  source 1..20: mol_type = other DNA
ttttttttttttgtattttt

SEQ ID NO: 9415 - DNA, 20 bp, synthetic construct
  misc_feature 1..20: note = Description of Artificial Sequence: Synthetic oligonucleotide
  misc_feature 1..20: note = Target: FXN; (-) strand; PAM type: NRG; PAM sequence: CGG
  source 1..20: mol_type = other DNA
caggcgcgcgacaccacgcc

SEQ ID NO: 9416 - DNA, 20 bp, synthetic construct
  misc_feature 1..20: note = Description of Artificial Sequence: Synthetic oligonucleotide
  misc_feature 1..20: note = Target: FXN; (-) strand; PAM type: NRG; PAM sequence: AGG
  source 1..20: mol_type = other DNA
tctggagtagctgggattac

SEQ ID NO: 9417 - DNA, 20 bp, synthetic construct
  misc_feature 1..20: note = Description of Artificial Sequence: Synthetic oligonucleotide
  misc_feature 1..20: note = Target: FXN; (-) strand; PAM type: NRG; PAM sequence: CAG
  source 1..20: mol_type = other DNA
ctctggagtagctgggatta

SEQ ID NO: 9418 - DNA, 20 bp, synthetic construct
  misc_feature 1..20: note = Description of Artificial Sequence: Synthetic oligonucleotide
  misc_feature 1..20: note = Target: FXN; (-) strand; PAM type: NRG; PAM sequence: GGG
  source 1..20: mol_type = other DNA
ccgcagcctctggagtagct

SEQ ID NO: 9419 - DNA, 20 bp, synthetic construct
  misc_feature 1..20: note = Description of Artificial Sequence: Synthetic oligonucleotide
  misc_feature 1..20: note = Target: FXN; (-) strand; PAM type: NRG; PAM sequence: TGG
  source 1..20: mol_type = other DNA
gccgcagcctctggagtagc

SEQ ID NO: 9420 - DNA, 20 bp, synthetic construct
  misc_feature 1..20: note = Description of Artificial Sequence: Synthetic oligonucleotide
  misc_feature 1..20: note = Target: FXN; (-) strand; PAM type: NRG; PAM sequence: TAG
  source 1..20: mol_type = other DNA
tcctgccgcagcctctggag

SEQ ID NO: 9421 - DNA, 20 bp, synthetic construct
  misc_feature 1..20: note = Description of Artificial Sequence: Synthetic oligonucleotide
  misc_feature 1..20: note = Target: FXN; (-) strand; PAM type: NRG; PAM sequence: GAG
  source 1..20: mol_type = other DNA
ttctcctgccgcagcctctg

SEQ ID NO: 9422 - DNA, 20 bp, synthetic construct
  misc_feature 1..20: note = Description of Artificial Sequence: Synthetic oligonucleotide
  misc_feature 1..20: note = Target: FXN; (-) strand; PAM type: NRG; PAM sequence: TGG
  source 1..20: mol_type = other DNA
gattctcctgccgcagcctc

SEQ ID NO: 9423 - DNA, 20 bp, synthetic construct
  misc_feature 1..20: note = Description of Artificial Sequence: Synthetic oligonucleotide
  misc_feature 1..20: note = Target: FXN; (-) strand; PAM type: NRG; PAM sequence: CAG
  source 1..20: mol_type = other DNA
ctcaagcgattctcctgccg

SEQ ID NO: 9424 - DNA, 20 bp, synthetic construct
  misc_feature 1..20: note = Description of Artificial Sequence: Synthetic oligonucleotide
  misc_feature 1..20: note = Target: FXN; (-) strand; PAM type: NRG; PAM sequence: AAG
  source 1..20: mol_type = other DNA
aacctctgcctcccgggctc

SEQ ID NO: 9425 - DNA, 20 bp, synthetic construct
  misc_feature 1..20: note = Description of Artificial Sequence: Synthetic oligonucleotide
  misc_feature 1..20: note = Target: FXN; (-) strand; PAM type: NRG; PAM sequence: GGG
  source 1..20: mol_type = other DNA
taatgcaacctctgcctccc

SEQ ID NO: 9426 - DNA, 20 bp, synthetic construct
  misc_feature 1..20: note = Description of Artificial Sequence: Synthetic oligonucleotide
  misc_feature 1..20: note = Target: FXN; (-) strand; PAM type: NRG; PAM sequence: CGG
  source 1..20: mol_type = other DNA
ttaatgcaacctctgcctcc

SEQ ID NO: 9427 - DNA, 20 bp, synthetic construct
  misc_feature 1..20: note = Description of Artificial Sequence: Synthetic oligonucleotide
  misc_feature 1..20: note = Target: FXN; (-) strand; PAM type: NRG; PAM sequence: TGG
  source 1..20: mol_type = other DNA
cggagtgcattgggcgatct

SEQ ID NO: 9428 - DNA, 20 bp, synthetic construct
  misc_feature 1..20: note = Description of Artificial Sequence: Synthetic oligonucleotide
  misc_feature 1..20: note = Target: FXN; (-) strand; PAM type: NRG; PAM sequence: GGG
  source 1..20: mol_type = other DNA
cgcccaggccggagtgcatt

SEQ ID NO: 9429 - DNA, 20 bp, synthetic construct
  misc_feature 1..20: note = Description of Artificial Sequence: Synthetic oligonucleotide
  misc_feature 1..20: note = Target: FXN; (-) strand; PAM type: NRG; PAM sequence: TGG
  source 1..20: mol_type = other DNA
tcgcccaggccggagtgcat

SEQ ID NO: 9430 - DNA, 20 bp, synthetic construct
  misc_feature 1..20: note = Description of Artificial Sequence: Synthetic oligonucleotide
  misc_feature 1..20: note = Target: FXN; (-) strand; PAM type: NRG; PAM sequence: GAG
  source 1..20: mol_type = other DNA
ttgctctgtcgcccaggccg

SEQ ID NO: 9431 - DNA, 20 bp, synthetic construct
  misc_feature 1..20: note = Description of Artificial Sequence: Synthetic oligonucleotide
  misc_feature 1..20: note = Target: FXN; (-) strand; PAM type: NRG; PAM sequence: CGG
  source 1..20: mol_type = other DNA
tcttgctctgtcgcccaggc

SEQ ID NO: 9432 - DNA, 20 bp, synthetic construct
  misc_feature 1..20: note = Description of Artificial Sequence: Synthetic oligonucleotide
  misc_feature 1..20: note = Target: FXN; (-) strand; PAM type: NRG; PAM sequence: AGG
  source 1..20: mol_type = other DNA
ggagtcttgctctgtcgccc

SEQ ID NO: 9433 - DNA, 20 bp, synthetic construct
  misc_feature 1..20: note = Description of Artificial Sequence: Synthetic oligonucleotide
  misc_feature 1..20: note = Target: FXN; (-) strand; PAM type: NRG; PAM sequence: CAG
  source 1..20: mol_type = other DNA
cggagtcttgctctgtcgcc

SEQ ID NO: 9434 - DNA, 20 bp, synthetic construct
  misc_feature 1..20: note = Description of Artificial Sequence: Synthetic oligonucleotide
  misc_feature 1..20: note = Target: FXN; (-) strand; PAM type: NRG; PAM sequence: GAG
  source 1..20: mol_type = other DNA
tattattattttttgagacg

SEQ ID NO: 9435 - DNA, 20 bp, synthetic construct
  misc_feature 1..20: note = Description of Artificial Sequence: Synthetic oligonucleotide
  misc_feature 1..20: note = Target: FXN; (-) strand; PAM type: NRG; PAM sequence: CGG
  source 1..20: mol_type = other DNA
attattattattttttgaga

SEQ ID NO: 9436 - DNA, 20 bp, synthetic construct
  misc_feature 1..20: note = Description of Artificial Sequence: Synthetic oligonucleotide
  misc_feature 1..20: note = Target: FXN; (-) strand; PAM type: NRG; PAM sequence: GAG
  source 1..20: mol_type = other DNA
atttattattattatttttt

SEQ ID NO: 9437 - DNA, 20 bp, synthetic construct
  misc_feature 1..20: note = Description of Artificial Sequence: Synthetic oligonucleotide
  misc_feature 1..20: note = Target: FXN; (-) strand; PAM type: NRG; PAM sequence: GGG
  source 1..20: mol_type = other DNA
cctatttttccagagatgct

SEQ ID NO: 9438 - DNA, 20 bp, synthetic construct
  misc_feature 1..20: note = Description of Artificial Sequence: Synthetic oligonucleotide
  misc_feature 1..20: note = Target: FXN; (-) strand; PAM type: NRG; PAM sequence: TGG
  source 1..20: mol_type = other DNA
gcctatttttccagagatgc

SEQ ID NO: 9439 - DNA, 20 bp, synthetic construct
  misc_feature 1..20: note = Description of Artificial Sequence: Synthetic oligonucleotide
  misc_feature 1..20: note = Target: FXN; (-) strand; PAM type: NRG; PAM sequence: GAG
  source 1..20: mol_type = other DNA
cacacttgcctatttttcca

SEQ ID NO: 9440 - DNA, 20 bp, synthetic construct
  misc_feature 1..20: note = Description of Artificial Sequence: Synthetic oligonucleotide
  misc_feature 1..20: note = Target: FXN; (-) strand; PAM type: NRG; PAM sequence: CAG
  source 1..20: mol_type = other DNA
gccacacttgcctatttttc

SEQ ID NO: 9441 - DNA, 20 bp, synthetic construct
  misc_feature 1..20: note = Description of Artificial Sequence: Synthetic oligonucleotide
  misc_feature 1..20: note = Target: FXN; (-) strand; PAM type: NRG; PAM sequence: TGG
  source 1..20: mol_type = other DNA
aggagatctaaggaccatca

SEQ ID NO: 9442 - DNA, 20 bp, synthetic construct
  misc_feature 1..20: note = Description of Artificial Sequence: Synthetic oligonucleotide
  misc_feature 1..20: note = Target: FXN; (-) strand; PAM type: NRG; PAM sequence: AGG
  source 1..20: mol_type = other DNA
gctttcctagaggagatcta

SEQ ID NO: 9443 - DNA, 20 bp, synthetic construct
  misc_feature 1..20: note = Description of Artificial Sequence: Synthetic oligonucleotide
  misc_feature 1..20: note = Target: FXN; (-) strand; PAM type: NRG; PAM sequence: AAG
  source 1..20: mol_type = other DNA
tgctttcctagaggagatct

SEQ ID NO: 9444 - DNA, 20 bp, synthetic construct
  misc_feature 1..20: note = Description of Artificial Sequence: Synthetic oligonucleotide
  misc_feature 1..20: note = Target: FXN; (-) strand; PAM type: NRG; PAM sequence: GAG
  source 1..20: mol_type = other DNA
aaatgtctgctttcctagag

SEQ ID NO: 9445 - DNA, 20 bp, synthetic construct
  misc_feature 1..20: note = Description of Artificial Sequence: Synthetic oligonucleotide
  misc_feature 1..20: note = Target: FXN; (-) strand; PAM type: NRG; PAM sequence: AGG
  source 1..20: mol_type = other DNA
ataaatgtctgctttcctag

SEQ ID NO: 9446 - DNA, 20 bp, synthetic construct
  misc_feature 1..20: note = Description of Artificial Sequence: Synthetic oligonucleotide
  misc_feature 1..20: note = Target: FXN; (-) strand; PAM type: NRG; PAM sequence: GAG
  source 1..20: mol_type = other DNA
aataaatgtctgctttccta

SEQ ID NO: 9447 - DNA, 20 bp, synthetic construct
  misc_feature 1..20: note = Description of Artificial Sequence: Synthetic oligonucleotide
  misc_feature 1..20: note = Target: FXN; (-) strand; PAM type: NRG; PAM sequence: TAG
  source 1..20: mol_type = other DNA
gtaataaatgtctgctttcc

SEQ ID NO: 9448 - DNA, 20 bp, synthetic construct
  misc_feature 1..20: note = Description of Artificial Sequence: Synthetic oligonucleotide
  misc_feature 1..20: note = Target: FXN; (-) strand; PAM type: NRG; PAM sequence: AAG
  source 1..20: mol_type = other DNA
tcagatagtgcacagaagcc

SEQ ID NO: 9449 - DNA, 20 bp, synthetic construct
  misc_feature 1..20: note = Description of Artificial Sequence: Synthetic oligonucleotide
  misc_feature 1..20: note = Target: FXN; (-) strand; PAM type: NRG; PAM sequence: AAG
  source 1..20: mol_type = other DNA
gcagctcagatagtgcacag

SEQ ID NO: 9450 - DNA, 20 bp, synthetic construct
  misc_feature 1..20: note = Description of Artificial Sequence: Synthetic oligonucleotide
  misc_feature 1..20: note = Target: FXN; (-) strand; PAM type: NRG; PAM sequence: CAG
  source 1..20: mol_type = other DNA
gtggcagctcagatagtgca

SEQ ID NO: 9451 - DNA, 20 bp, synthetic construct
  misc_feature 1..20: note = Description of Artificial Sequence: Synthetic oligonucleotide
  misc_feature 1..20: note = Target: FXN; (-) strand; PAM type: NRG; PAM sequence: TAG
  source 1..20: mol_type = other DNA
ccaatacgtggcagctcaga

SEQ ID NO: 9452 - DNA, 20 bp, synthetic construct
  misc_feature 1..20: note = Description of Artificial Sequence: Synthetic oligonucleotide
  misc_feature 1..20: note = Target: FXN; (-) strand; PAM type: NRG; PAM sequence: CAG
  source 1..20: mol_type = other DNA
aagcccaatacgtggcagct

SEQ ID NO: 9453 - DNA, 20 bp, synthetic construct
  misc_feature 1..20: note = Description of Artificial Sequence: Synthetic oligonucleotide
  misc_feature 1..20: note = Target: FXN; (-) strand; PAM type: NRG; PAM sequence: CAG
  source 1..20: mol_type = other DNA
ggtggaagcccaatacgtgg

SEQ ID NO: 9454 - DNA, 20 bp, synthetic construct
  misc_feature 1..20: note = Description of Artificial Sequence: Synthetic oligonucleotide
  misc_feature 1..20: note = Target: FXN; (-) strand; PAM type: NRG; PAM sequence: TGG
  source 1..20: mol_type = other DNA
aggggtggaagcccaatacg

SEQ ID NO: 9455 - DNA, 20 bp, synthetic construct
  misc_feature 1..20: note = Description of Artificial Sequence: Synthetic oligonucleotide
  misc_feature 1..20: note = Target: FXN; (-) strand; PAM type: NRG; PAM sequence: AAG
  source 1..20: mol_type = other DNA
gtccacacaggcaggggtgg

SEQ ID NO: 9456 - DNA, 20 bp, synthetic construct
  misc_feature 1..20: note = Description of Artificial Sequence: Synthetic oligonucleotide
  misc_feature 1..20: note = Target: FXN; (-) strand; PAM type: NRG; PAM sequence: TGG
  source 1..20: mol_type = other DNA
gctgtccacacaggcagggg

SEQ ID NO: 9457 - DNA, 20 bp, synthetic construct
  misc_feature 1..20: note = Description of Artificial Sequence: Synthetic oligonucleotide
  misc_feature 1..20: note = Target: FXN; (-) strand; PAM type: NRG; PAM sequence: GGG
  source 1..20: mol_type = other DNA
catgctgtccacacaggcag

SEQ ID NO: 9458 - DNA, 20 bp, synthetic construct
  misc_feature 1..20: note = Description of Artificial Sequence: Synthetic oligonucleotide
  misc_feature 1..20: note = Target: FXN; (-) strand; PAM type: NRG; PAM sequence: GGG
  source 1..20: mol_type = other DNA
ccatgctgtccacacaggca

SEQ ID NO: 9459 - DNA, 20 bp, synthetic construct
  misc_feature 1..20: note = Description of Artificial Sequence: Synthetic oligonucleotide
  misc_feature 1..20: note = Target: FXN; (-) strand; PAM type: NRG; PAM sequence: AGG
  source 1..20: mol_type = other DNA
cccatgctgtccacacaggc

SEQ ID NO: 9460 - DNA, 20 bp, synthetic construct
  misc_feature 1..20: note = Description of Artificial Sequence: Synthetic oligonucleotide
  misc_feature 1..20: note = Target: FXN; (-) strand; PAM type: NRG; PAM sequence: CAG
  source 1..20: mol_type = other DNA
acccatgctgtccacacagg

SEQ ID NO: 9461 - DNA, 20 bp, synthetic construct
  misc_feature 1..20: note = Description of Artificial Sequence: Synthetic oligonucleotide
  misc_feature 1..20: note = Target: FXN; (-) strand; PAM type: NRG; PAM sequence: AGG
  source 1..20: mol_type = other DNA
acaacccatgctgtccacac

SEQ ID NO: 9462 - DNA, 20 bp, synthetic construct
  misc_feature 1..20: note = Description of Artificial Sequence: Synthetic oligonucleotide
  misc_feature 1..20: note = Target: FXN; (-) strand; PAM type: NRG; PAM sequence: CAG
  source 1..20: mol_type = other DNA
gacaacccatgctgtccaca

SEQ ID NO: 9463 - DNA, 20 bp, synthetic construct
  misc_feature 1..20: note = Description of Artificial Sequence: Synthetic oligonucleotide
  misc_feature 1..20: note = Target: FXN; (-) strand; PAM type: NRG; PAM sequence: GGG
  source 1..20: mol_type = other DNA
ctccagcctgggcaacaaga

SEQ ID NO: 9464 - DNA, 20 bp, synthetic construct
  misc_feature 1..20: note = Description of Artificial Sequence: Synthetic oligonucleotide
  misc_feature 1..20: note = Target: FXN; (-) strand; PAM type: NRG; PAM sequence: AGG
  source 1..20: mol_type = other DNA
actccagcctgggcaacaag

SEQ ID NO: 9465 - DNA, 20 bp, synthetic construct
  misc_feature 1..20: note = Description of Artificial Sequence: Synthetic oligonucleotide
  misc_feature 1..20: note = Target: FXN; (-) strand; PAM type: NRG; PAM sequence: GAG
  source 1..20: mol_type = other DNA
cactccagcctgggcaacaa

SEQ ID NO: 9466 - DNA, 20 bp, synthetic construct
  misc_feature 1..20: note = Description of Artificial Sequence: Synthetic oligonucleotide
  misc_feature 1..20: note = Target: FXN; (-) strand; PAM type: NRG; PAM sequence: AAG
  source 1..20: mol_type = other DNA
tgcactccagcctgggcaac

SEQ ID NO: 9467 - DNA, 20 bp, synthetic construct
  misc_feature 1..20: note = Description of Artificial Sequence: Synthetic oligonucleotide
  misc_feature 1..20: note = Target: FXN; (-) strand; PAM type: NRG; PAM sequence: GGG
  source 1..20: mol_type = other DNA
gagccactgcactccagcct

SEQ ID NO: 9468 - DNA, 20 bp, synthetic construct
  misc_feature 1..20: note = Description of Artificial Sequence: Synthetic oligonucleotide
  misc_feature 1..20: note = Target: FXN; (-) strand; PAM type: NRG; PAM sequence: TGG
  source 1..20: mol_type = other DNA
tgagccactgcactccagcc

SEQ ID NO: 9469 - DNA, 20 bp, synthetic construct
  misc_feature 1..20: note = Description of Artificial Sequence: Synthetic oligonucleotide
  misc_feature 1..20: note = Target: FXN; (-) strand; PAM type: NRG; PAM sequence: CAG
  source 1..20: mol_type = other DNA
gagactgagccactgcactc

SEQ ID NO: 9470 - DNA, 20 bp, synthetic construct
  misc_feature 1..20: note = Description of Artificial Sequence: Synthetic oligonucleotide
  misc_feature 1..20: note = Target: FXN; (-) strand; PAM type: NRG; PAM sequence: GAG
  source 1..20: mol_type = other DNA
ggttgcagtgagctgagact

SEQ ID NO: 9471 - DNA, 20 bp, synthetic construct
  misc_feature 1..20: note = Description of Artificial Sequence: Synthetic oligonucleotide
  misc_feature 1..20: note = Target: FXN; (-) strand; PAM type: NRG; PAM sequence: GAG
  source 1..20: mol_type = other DNA
ggcagaggttgcagtgagct

SEQ ID NO: 9472 - DNA, 20 bp, synthetic construct
  misc_feature 1..20: note = Description of Artificial Sequence: Synthetic oligonucleotide
  misc_feature 1..20: note = Target: FXN; (-) strand; PAM type: NRG; PAM sequence: GAG
  source 1..20: mol_type = other DNA
caggaggcagaggttgcagt

SEQ ID NO: 9473 - DNA, 20 bp, synthetic construct
  misc_feature 1..20: note = Description of Artificial Sequence: Synthetic oligonucleotide
  misc_feature 1..20: note = Target: FXN; (-) strand; PAM type: NRG; PAM sequence: CAG
  source 1..20: mol_type = other DNA
aacccaggaggcagaggttg

SEQ ID NO: 9474 - DNA, 20 bp, synthetic construct
  misc_feature 1..20: note = Description of Artificial Sequence: Synthetic oligonucleotide
  misc_feature 1..20: note = Target: FXN; (-) strand; PAM type: NRG; PAM sequence: AGG
  source 1..20: mol_type = other DNA
cacttgaacccaggaggcag

SEQ ID NO: 9475 - DNA, 20 bp, synthetic construct
  misc_feature 1..20: note = Description of Artificial Sequence: Synthetic oligonucleotide
  misc_feature 1..20: note = Target: FXN; (-) strand; PAM type: NRG; PAM sequence: GAG
  source 1..20: mol_type = other DNA
tcacttgaacccaggaggca

SEQ ID NO: 9476 - DNA, 20 bp, synthetic construct
  misc_feature 1..20: note = Description of Artificial Sequence: Synthetic oligonucleotide
  misc_feature 1..20: note = Target: FXN; (-) strand; PAM type: NRG; PAM sequence: CAG
  source 1..20: mol_type = other DNA
aatcacttgaacccaggagg

SEQ ID NO: 9477 - DNA, 20 bp, synthetic construct
  misc_feature 1..20: note = Description of Artificial Sequence: Synthetic oligonucleotide
  misc_feature 1..20: note = Target: FXN; (-) strand; PAM type: NRG; PAM sequence: AGG
  source 1..20: mol_type = other DNA
gagaatcacttgaacccagg

SEQ ID NO: 9478 - DNA, 20 bp, synthetic construct
  misc_feature 1..20: note = Description of Artificial Sequence: Synthetic oligonucleotide
  misc_feature 1..20: note = Target: FXN; (-) strand; PAM type: NRG; PAM sequence: GAG
  source 1..20: mol_type = other DNA
ggagaatcacttgaacccag

SEQ ID NO: 9479 - DNA, 20 bp, synthetic construct
  misc_feature 1..20: note = Description of Artificial Sequence: Synthetic oligonucleotide
  misc_feature 1..20: note = Target: FXN; (-) strand; PAM type: NRG; PAM sequence: AGG
  source 1..20: mol_type = other DNA
caggagaatcacttgaaccc

SEQ ID NO: 9480 - DNA, 20 bp, synthetic construct
  misc_feature 1..20: note = Description of Artificial Sequence: Synthetic oligonucleotide
  misc_feature 1..20: note = Target: FXN; (-) strand; PAM type: NRG; PAM sequence: CAG
  source 1..20: mol_type = other DNA
gcaggagaatcacttgaacc

SEQ ID NO: 9481 - DNA, 20 bp, synthetic construct
  misc_feature 1..20: note = Description of Artificial Sequence: Synthetic oligonucleotide
  misc_feature 1..20: note = Target: FXN; (-) strand; PAM type: NRG; PAM sequence: GAG
  source 1..20: mol_type = other DNA
tactcgggaggctgaggcag

SEQ ID NO: 9482 - DNA, 20 bp, synthetic construct
  misc_feature 1..20: note = Description of Artificial Sequence: Synthetic oligonucleotide
  misc_feature 1..20: note = Target: FXN; (-) strand; PAM type: NRG; PAM sequence: AGG
  source 1..20: mol_type = other DNA
gctactcgggaggctgaggc

SEQ ID NO: 9483 - DNA, 20 bp, synthetic construct
  misc_feature 1..20: note = Description of Artificial Sequence: Synthetic oligonucleotide
  misc_feature 1..20: note = Target: FXN; (-) strand; PAM type: NRG; PAM sequence: CAG
  source 1..20: mol_type = other DNA
agctactcgggaggctgagg

SEQ ID NO: 9484 - DNA, 20 bp, synthetic construct
  misc_feature 1..20: note = Description of Artificial Sequence: Synthetic oligonucleotide
  misc_feature 1..20: note = Target: FXN; (-) strand; PAM type: NRG; PAM sequence: AGG
  source 1..20: mol_type = other DNA
cccagctactcgggaggctg

SEQ ID NO: 9485 - DNA, 20 bp, synthetic construct
  misc_feature 1..20: note = Description of Artificial Sequence: Synthetic oligonucleotide
  misc_feature 1..20: note = Target: FXN; (-) strand; PAM type: NRG; PAM sequence: GAG
  source 1..20: mol_type = other DNA
tcccagctactcgggaggct

SEQ ID NO: 9486 - DNA, 20 bp, synthetic construct
  misc_feature 1..20: note = Description of Artificial Sequence: Synthetic oligonucleotide
  misc_feature 1..20: note = Target: FXN; (-) strand; PAM type: NRG; PAM sequence: AGG
  source 1..20: mol_type = other DNA
gataatcccagctactcggg

SEQ ID NO: 9487 - DNA, 20 bp, synthetic construct
  misc_feature 1..20: note = Description of Artificial Sequence: Synthetic oligonucleotide
  misc_feature 1..20: note = Target: FXN; (-) strand; PAM type: NRG; PAM sequence: GAG
  source 1..20: mol_type = other DNA
cgataatcccagctactcgg

SEQ ID NO: 9488 - DNA, 20 bp, synthetic construct
  misc_feature 1..20: note = Description of Artificial Sequence: Synthetic oligonucleotide
  misc_feature 1..20: note = Target: FXN; (-) strand; PAM type: NRG; PAM sequence: GGG
  source 1..20: mol_type = other DNA
gccgataatcccagctactc

SEQ ID NO: 9489 - DNA, 20 bp, synthetic construct
  misc_feature 1..20: note = Description of Artificial Sequence: Synthetic oligonucleotide
  misc_feature 1..20: note = Target: FXN; (-) strand; PAM type: NRG; PAM sequence: CGG
  source 1..20: mol_type = other DNA
agccgataatcccagctact

SEQ ID NO: 9490 - DNA, 20 bp, synthetic construct
  misc_feature 1..20: note = Description of Artificial Sequence: Synthetic oligonucleotide
  misc_feature 1..20: note = Target: FXN; (-) strand; PAM type: NRG; PAM sequence: CAG
  source 1..20: mol_type = other DNA
acaaaattagccgataatcc

SEQ ID NO: 9491 - DNA, 20 bp, synthetic construct
  misc_feature 1..20: note = Description of Artificial Sequence: Synthetic oligonucleotide
  misc_feature 1..20: note = Target: FXN; (-) strand; PAM type: NRG; PAM sequence: TAG
  source 1..20: mol_type = other DNA
ctctactaaaaatacaaaat

SEQ ID NO: 9492 - DNA, 20 bp, synthetic construct
  misc_feature 1..20: note = Description of Artificial Sequence: Synthetic oligonucleotide
  misc_feature 1..20: note = Target: FXN; (-) strand; PAM type: NRG; PAM sequence: GAG
  source 1..20: mol_type = other DNA
agaccagcctgaccaacatg

SEQ ID NO: 9493 - DNA, 20 bp, synthetic construct
  misc_feature 1..20: note = Description of Artificial Sequence: Synthetic oligonucleotide
  misc_feature 1..20: note = Target: FXN; (-) strand; PAM type: NRG; PAM sequence: TGG
  source 1..20: mol_type = other DNA
cgagaccagcctgaccaaca

SEQ ID NO: 9494 - DNA, 20 bp, synthetic construct
  misc_feature 1..20: note = Description of Artificial Sequence: Synthetic oligonucleotide
  misc_feature 1..20: note = Target: FXN; (-) strand; PAM type: NRG; PAM sequence: CAG
  source 1..20: mol_type = other DNA
tgaggttgggagttcgagac

SEQ ID NO: 9495 - DNA, 20 bp, synthetic construct
  misc_feature 1..20: note = Description of Artificial Sequence: Synthetic oligonucleotide
  misc_feature 1..20: note = Target: FXN; (-) strand; PAM type: NRG; PAM sequence: GAG
  source 1..20: mol_type = other DNA
tcacctgaggttgggagttc

SEQ ID NO: 9496 - DNA, 20 bp, synthetic construct
  misc_feature 1..20: note = Description of Artificial Sequence: Synthetic oligonucleotide
  misc_feature 1..20: note = Target: FXN; (-) strand; PAM type: NRG; PAM sequence: GAG
  source 1..20: mol_type = other DNA
ggcggatcacctgaggttgg

SEQ ID NO: 9497 - DNA, 20 bp, synthetic construct
  misc_feature 1..20: note = Description of Artificial Sequence: Synthetic oligonucleotide
  misc_feature 1..20: note = Target: FXN; (-) strand; PAM type: NRG; PAM sequence: GGG
  source 1..20: mol_type = other DNA
tgggcggatcacctgaggtt

SEQ ID NO: 9498 - DNA, 20 bp, synthetic construct
  misc_feature 1..20: note = Description of Artificial Sequence: Synthetic oligonucleotide
  misc_feature 1..20: note = Target: FXN; (-) strand; PAM type: NRG; PAM sequence: TGG
  source 1..20: mol_type = other DNA
gtgggcggatcacctgaggt

SEQ ID NO: 9499 - DNA, 20 bp, synthetic construct
  misc_feature 1..20: note = Description of Artificial Sequence: Synthetic oligonucleotide
  misc_feature 1..20: note = Target: FXN; (-) strand; PAM type: NRG; PAM sequence: AGG
  source 1..20: mol_type = other DNA
cgaggtgggcggatcacctg

SEQ ID NO: 9500 - DNA, 20 bp, synthetic construct
  misc_feature 1..20: note = Description of Artificial Sequence: Synthetic oligonucleotide
  misc_feature 1..20: note = Target: FXN; (-) strand; PAM type: NRG; PAM sequence: GAG
  source 1..20: mol_type = other DNA
gcgaggtgggcggatcacct

SEQ ID NO: 9501 - DNA, 20 bp, synthetic construct
  misc_feature 1..20: note = Description of Artificial Sequence: Synthetic oligonucleotide
  misc_feature 1..20: note = Target: FXN; (-) strand; PAM type: NRG; PAM sequence: CGG
  source 1..20: mol_type = other DNA
ctttgggagggcgaggtggg

SEQ ID NO: 9502 - DNA, 20 bp, synthetic construct
  misc_feature 1..20: note = Description of Artificial Sequence: Synthetic oligonucleotide
  misc_feature 1..20: note = Target: FXN; (-) strand; PAM type: NRG; PAM sequence: GGG
  source 1..20: mol_type = other DNA
gcactttgggagggcgaggt

SEQ ID NO: 9503 - DNA, 20 bp, synthetic construct
  misc_feature 1..20: note = Description of Artificial Sequence: Synthetic oligonucleotide
  misc_feature 1..20: note = Target: FXN; (-) strand; PAM type: NRG; PAM sequence: TGG
  source 1..20: mol_type = other DNA
agcactttgggagggcgagg

SEQ ID NO: 9504 - DNA, 20 bp, synthetic construct
  misc_feature 1..20: note = Description of Artificial Sequence: Synthetic oligonucleotide
  misc_feature 1..20: note = Target: FXN; (-) strand; PAM type: NRG; PAM sequence: AGG
  source 1..20: mol_type = other DNA
tccagcactttgggagggcg

SEQ ID NO: 9505 - DNA, 20 bp, synthetic construct
  misc_feature 1..20: note = Description of Artificial Sequence: Synthetic oligonucleotide
  misc_feature 1..20: note = Target: FXN; (-) strand; PAM type: NRG; PAM sequence: GAG
  source 1..20: mol_type = other DNA
ttccagcactttgggagggc

SEQ ID NO: 9506 - DNA, 20 bp, synthetic construct
  misc_feature 1..20: note = Description of Artificial Sequence: Synthetic oligonucleotide
  misc_feature 1..20: note = Target: FXN; (-) strand; PAM type: NRG; PAM sequence: GGG
  source 1..20: mol_type = other DNA
gtaattccagcactttggga

SEQ ID NO: 9507 - DNA, 20 bp, synthetic construct
  misc_feature 1..20: note = Description of Artificial Sequence: Synthetic oligonucleotide
  misc_feature 1..20: note = Target: FXN; (-) strand; PAM type: NRG; PAM sequence: AGG
  source 1..20: mol_type = other DNA
tgtaattccagcactttggg

SEQ ID NO: 9508 - DNA, 20 bp, synthetic construct
  misc_feature 1..20: note = Description of Artificial Sequence: Synthetic oligonucleotide
  misc_feature 1..20: note = Target: FXN; (-) strand; PAM type: NRG; PAM sequence: GAG
  source 1..20: mol_type = other DNA
ctgtaattccagcactttgg

SEQ ID NO: 9509 - DNA, 20 bp, synthetic construct
  misc_feature 1..20: note = Description of Artificial Sequence: Synthetic oligonucleotide
  misc_feature 1..20: note = Target: FXN; (-) strand; PAM type: NRG; PAM sequence: GGG
  source 1..20: mol_type = other DNA
gcctgtaattccagcacttt

SEQ ID NO: 9510 - DNA, 20 bp, synthetic construct
  misc_feature 1..20: note = Description of Artificial Sequence: Synthetic oligonucleotide
  misc_feature 1..20: note = Target: FXN; (-) strand; PAM type: NRG; PAM sequence: TGG
  source 1..20: mol_type = other DNA
cgcctgtaattccagcactt

SEQ ID NO: 9511 - DNA, 20 bp, synthetic construct
  misc_feature 1..20: note = Description of Artificial Sequence: Synthetic oligonucleotide
  misc_feature 1..20: note = Target: FXN; (-) strand; PAM type: NRG; PAM sequence: CAG
  source 1..20: mol_type = other DNA
gtggctcacgcctgtaattc

SEQ ID NO: 9512 - DNA, 20 bp, synthetic construct
  misc_feature 1..20: note = Description of Artificial Sequence: Synthetic oligonucleotide
  misc_feature 1..20: note = Target: FXN; (-) strand; PAM type: NRG; PAM sequence: TGG
  source 1..20: mol_type = other DNA
ctgctgatggccagacgcgg

SEQ ID NO: 9513 - DNA, 20 bp, synthetic construct
  misc_feature 1..20: note = Description of Artificial Sequence: Synthetic oligonucleotide
  misc_feature 1..20: note = Target: FXN; (-) strand; PAM type: NRG; PAM sequence: CGG
  source 1..20: mol_type = other DNA
actctgctgatggccagacg

SEQ ID NO: 9514 - DNA, 20 bp, synthetic construct
  misc_feature 1..20: note = Description of Artificial Sequence: Synthetic oligonucleotide
  misc_feature 1..20: note = Target: FXN; (-) strand; PAM type: NRG; PAM sequence: CAG
  source 1..20: mol_type = other DNA
ttaaaaactctgctgatggc

SEQ ID NO: 9515 - DNA, 20 bp, synthetic construct
  misc_feature 1..20: note = Description of Artificial Sequence: Synthetic oligonucleotide
  misc_feature 1..20: note = Target: FXN; (-) strand; PAM type: NRG; PAM sequence: TGG
  source 1..20: mol_type = other DNA
taaattaaaaactctgctga

SEQ ID NO: 9516 - DNA, 20 bp, synthetic construct
  misc_feature 1..20: note = Description of Artificial Sequence: Synthetic oligonucleotide
  misc_feature 1..20: note = Target: FXN; (-) strand; PAM type: NRG; PAM sequence: AGG
  source 1..20: mol_type = other DNA
aatagcccttaacagccacc

SEQ ID NO: 9517 - DNA, 20 bp, synthetic construct
  misc_feature 1..20: note = Description of Artificial Sequence: Synthetic oligonucleotide
  misc_feature 1..20: note = Target: FXN; (-) strand; PAM type: NRG; PAM sequence: CAG
  source 1..20: mol_type = other DNA
caatagcccttaacagccac

SEQ ID NO: 9518 - DNA, 20 bp, synthetic construct
  misc_feature 1..20: note = Description of Artificial Sequence: Synthetic oligonucleotide
  misc_feature 1..20: note = Target: FXN; (-) strand; PAM type: NRG; PAM sequence: CAG
  source 1..20: mol_type = other DNA
tgtcagtcaatagcccttaa

SEQ ID NO: 9519 - DNA, 20 bp, synthetic construct
  misc_feature 1..20: note = Description of Artificial Sequence: Synthetic oligonucleotide
  misc_feature 1..20: note = Target: FXN; (-) strand; PAM type: NRG; PAM sequence: TAG
  source 1..20: mol_type = other DNA
tgggtgtgtttgtcagtcaa

SEQ ID NO: 9520 - DNA, 20 bp, synthetic construct
  misc_feature 1..20: note = Description of Artificial Sequence: Synthetic oligonucleotide
  misc_feature 1..20: note = Target: FXN; (-) strand; PAM type: NRG; PAM sequence: CAG
  source 1..20: mol_type = other DNA
gccaagttgggtgtgtttgt

SEQ ID NO: 9521 - DNA, 20 bp, synthetic construct
  misc_feature 1..20: note = Description of Artificial Sequence: Synthetic oligonucleotide
  misc_feature 1..20: note = Target: FXN; (-) strand; PAM type: NRG; PAM sequence: GGG
  source 1..20: mol_type = other DNA
ctgggcggcagcgccaagtt

SEQ ID NO: 9522 - DNA, 20 bp, synthetic construct
  misc_feature 1..20: note = Description of Artificial Sequence: Synthetic oligonucleotide
  misc_feature 1..20: note = Target: FXN; (-) strand; PAM type: NRG; PAM sequence: TGG
  source 1..20: mol_type = other DNA
cctgggcggcagcgccaagt

SEQ ID NO: 9523 - DNA, 20 bp, synthetic construct
  misc_feature 1..20: note = Description of Artificial Sequence: Synthetic oligonucleotide
  misc_feature 1..20: note = Target: FXN; (-) strand; PAM type: NRG; PAM sequence: AAG
  source 1..20: mol_type = other DNA
acctcctgggcggcagcgcc

SEQ ID NO: 9524 - DNA, 20 bp, synthetic construct
  misc_feature 1..20: note = Description of Artificial Sequence: Synthetic oligonucleotide
  misc_feature 1..20: note = Target: FXN; (-) strand; PAM type: NRG; PAM sequence: CAG
  source 1..20: mol_type = other DNA
agtgtccacctcctgggcgg

SEQ ID NO: 9525 - DNA, 20 bp, synthetic construct
  misc_feature 1..20: note = Description of Artificial Sequence: Synthetic oligonucleotide
  misc_feature 1..20: note = Target: FXN; (-) strand; PAM type: NRG; PAM sequence: CGG
  source 1..20: mol_type = other DNA
cccagtgtccacctcctggg

SEQ ID NO: 9526 - DNA, 20 bp, synthetic construct
  misc_feature 1..20: note = Description of Artificial Sequence: Synthetic oligonucleotide
  misc_feature 1..20: note = Target: FXN; (-) strand; PAM type: NRG; PAM sequence: GGG
  source 1..20: mol_type = other DNA
aaacccagtgtccacctcct

SEQ ID NO: 9527 - DNA, 20 bp, synthetic construct
  misc_feature 1..20: note = Description of Artificial Sequence: Synthetic oligonucleotide
  misc_feature 1..20: note = Target: FXN; (-) strand; PAM type: NRG; PAM sequence: TGG
  source 1..20: mol_type = other DNA
gaaacccagtgtccacctcc

SEQ ID NO: 9528 - DNA, 20 bp, synthetic construct
  misc_feature 1..20: note = Description of Artificial Sequence: Synthetic oligonucleotide
  misc_feature 1..20: note = Target: FXN; (-) strand; PAM type: NRG; PAM sequence: CAG
  source 1..20: mol_type = other DNA
taaccatctatccagaaacc

SEQ ID NO: 9529 - DNA, 20 bp, synthetic construct
  misc_feature 1..20: note = Description of Artificial Sequence: Synthetic oligonucleotide
  misc_feature 1..20: note = Target: FXN; (-) strand; PAM type: NRG; PAM sequence: CAG
  source 1..20: mol_type = other DNA
gaggttgctaaccatctatc

SEQ ID NO: 9530 - DNA, 20 bp, synthetic construct
  misc_feature 1..20: note = Description of Artificial Sequence: Synthetic oligonucleotide
  misc_feature 1..20: note = Target: FXN; (-) strand; PAM type: NRG; PAM sequence: AGG
  source 1..20: mol_type = other DNA
agaggcccagctggtgacag

SEQ ID NO: 9531 - DNA, 20 bp, synthetic construct
  misc_feature 1..20: note = Description of Artificial Sequence: Synthetic oligonucleotide
  misc_feature 1..20: note = Target: FXN; (-) strand; PAM type: NRG; PAM sequence: GAG
  source 1..20: mol_type = other DNA
aagaggcccagctggtgaca

SEQ ID NO: 9532 - DNA, 20 bp, synthetic construct
  misc_feature 1..20: note = Description of Artificial Sequence: Synthetic oligonucleotide
  misc_feature 1..20: note = Target: FXN; (-) strand; PAM type: NRG; PAM sequence: CAG
  source 1..20: mol_type = other DNA
aaaagaggcccagctggtga

SEQ ID NO: 9533 - DNA, 20 bp, synthetic construct
  misc_feature 1..20: note = Description of Artificial Sequence: Synthetic oligonucleotide
  misc_feature 1..20: note = Target: FXN; (-) strand; PAM type: NRG; PAM sequence: TGG
  source 1..20: mol_type = other DNA
tagaaaaaaagaggcccagc

SEQ ID NO: 9534 - DNA, 20 bp, synthetic construct
  misc_feature 1..20: note = Description of Artificial Sequence: Synthetic oligonucleotide
  misc_feature 1..20: note = Target: FXN; (-) strand; PAM type: NRG; PAM sequence: CAG
  source 1..20: mol_type = other DNA
agtatagaaaaaaagaggcc

SEQ ID NO: 9535 - DNA, 20 bp, synthetic construct
  misc_feature 1..20: note = Description of Artificial Sequence: Synthetic oligonucleotide
  misc_feature 1..20: note = Target: FXN; (-) strand; PAM type: NRG; PAM sequence: AGG
  source 1..20: mol_type = other DNA
aattcagtatagaaaaaaag

SEQ ID NO: 9536 - DNA, 20 bp, synthetic construct
  misc_feature 1..20: note = Description of Artificial Sequence: Synthetic oligonucleotide
  misc_feature 1..20: note = Target: FXN; (-) strand; PAM type: NRG; PAM sequence: GAG
  source 1..20: mol_type = other DNA
taattcagtatagaaaaaaa

SEQ ID NO: 9537 - DNA, 20 bp, synthetic construct
  misc_feature 1..20: note = Description of Artificial Sequence: Synthetic oligonucleotide
  misc_feature 1..20: note = Target: FXN; (-) strand; PAM type: NRG; PAM sequence: AAG
  source 1..20: mol_type = other DNA
attaattcagtatagaaaaa

SEQ ID NO: 9538 - DNA, 20 bp, synthetic construct
  misc_feature 1..20: note = Description of Artificial Sequence: Synthetic oligonucleotide
  misc_feature 1..20: note = Target: FXN; (-) strand; PAM type: NRG; PAM sequence: TAG
  source 1..20: mol_type = other DNA
caaatgtgattaattcagta

SEQ ID NO: 9539 - DNA, 20 bp, synthetic construct
  misc_feature 1..20: note = Description of Artificial Sequence: Synthetic oligonucleotide
  misc_feature 1..20: note = Target: FXN; (-) strand; PAM type: NRG; PAM sequence: CAG
  source 1..20: mol_type = other DNA
ttaaacaaatgtgattaatt

SEQ ID NO: 9540 - DNA, 20 bp, synthetic construct
  misc_feature 1..20: note = Description of Artificial Sequence: Synthetic oligonucleotide
  misc_feature 1..20: note = Target: FXN; (-) strand; PAM type: NRG; PAM sequence: AGG
  source 1..20: mol_type = other DNA
aagggaactatggaacagac

SEQ ID NO: 9541 - DNA, 20 bp, synthetic construct
  misc_feature 1..20: note = Description of Artificial Sequence: Synthetic oligonucleotide
  misc_feature 1..20: note = Target: FXN; (-) strand; PAM type: NRG; PAM sequence: CAG
  source 1..20: mol_type = other DNA
caagggaactatggaacaga

SEQ ID NO: 9542 - DNA, 20 bp, synthetic construct
  misc_feature 1..20: note = Description of Artificial Sequence: Synthetic oligonucleotide
  misc_feature 1..20: note = Target: FXN; (-) strand; PAM type: NRG; PAM sequence: CAG
  source 1..20: mol_type = other DNA
tgtgcaagggaactatggaa

SEQ ID NO: 9543 - DNA, 20 bp, synthetic construct
  misc_feature 1..20: note = Description of Artificial Sequence: Synthetic oligonucleotide
  misc_feature 1..20: note = Target: FXN; (-) strand; PAM type: NRG; PAM sequence: TGG
  source 1..20: mol_type = other DNA
caagatgtgcaagggaacta

SEQ ID NO: 9544 - DNA, 20 bp, synthetic construct
  misc_feature 1..20: note = Description of Artificial Sequence: Synthetic oligonucleotide
  misc_feature 1..20: note = Target: FXN; (-) strand; PAM type: NRG; PAM sequence: GGG
  source 1..20: mol_type = other DNA
caaatacccaagatgtgcaa

SEQ ID NO: 9545 - DNA, 20 bp, synthetic construct
  misc_feature 1..20: note = Description of Artificial Sequence: Synthetic oligonucleotide
  misc_feature 1..20: note = Target: FXN; (-) strand; PAM type: NRG; PAM sequence: AGG
  source 1..20: mol_type = other DNA
tcaaatacccaagatgtgca

SEQ ID NO: 9546 - DNA, 20 bp, synthetic construct
  misc_feature 1..20: note = Description of Artificial Sequence: Synthetic oligonucleotide
  misc_feature 1..20: note = Target: FXN; (-) strand; PAM type: NRG; PAM sequence: AAG
  source 1..20: mol_type = other DNA
ctcaaatacccaagatgtgc

SEQ ID NO: 9547 - DNA, 20 bp, synthetic construct
  misc_feature 1..20: note = Description of Artificial Sequence: Synthetic oligonucleotide
  misc_feature 1..20: note = Target: FXN; (-) strand; PAM type: NRG; PAM sequence: AAG
  source 1..20: mol_type = other DNA
acccaactcctcaaataccc

SEQ ID NO: 9548 - DNA, 20 bp, synthetic construct
  misc_feature 1..20: note = Description of Artificial Sequence: Synthetic oligonucleotide
  misc_feature 1..20: note = Target: FXN; (-) strand; PAM type: NRG; PAM sequence: CAG
  source 1..20: mol_type = other DNA
attaaacaggatggtggccc

SEQ ID NO: 9549 - DNA, 20 bp, synthetic construct
  misc_feature 1..20: note = Description of Artificial Sequence: Synthetic oligonucleotide
  misc_feature 1..20: note = Target: FXN; (-) strand; PAM type: NRG; PAM sequence: TGG
  source 1..20: mol_type = other DNA
aaaataattaaacaggatgg

SEQ ID NO: 9550 - DNA, 20 bp, synthetic construct
  misc_feature 1..20: note = Description of Artificial Sequence: Synthetic oligonucleotide
  misc_feature 1..20: note = Target: FXN; (-) strand; PAM type: NRG; PAM sequence: TGG
  source 1..20: mol_type = other DNA
tttaaaataattaaacagga

SEQ ID NO: 9551 - DNA, 20 bp, synthetic construct
  misc_feature 1..20: note = Description of Artificial Sequence: Synthetic oligonucleotide
  misc_feature 1..20: note = Target: FXN; (-) strand; PAM type: NRG; PAM sequence: AGG
  source 1..20: mol_type = other DNA
gggctttaaaataattaaac

SEQ ID NO: 9552 - DNA, 20 bp, synthetic construct
  misc_feature 1..20: note = Description of Artificial Sequence: Synthetic oligonucleotide
  misc_feature 1..20: note = Target: FXN; (-) strand; PAM type: NRG; PAM sequence: CAG
  source 1..20: mol_type = other DNA
agggctttaaaataattaaa

SEQ ID NO: 9553 - DNA, 20 bp, synthetic construct
  misc_feature 1..20: note = Description of Artificial Sequence: Synthetic oligonucleotide
  misc_feature 1..20: note = Target: FXN; (-) strand; PAM type: NRG; PAM sequence: GGG
  source 1..20: mol_type = other DNA
gggtcaatccaggacagtca

SEQ ID NO: 9554 - DNA, 20 bp, synthetic construct
  misc_feature 1..20: note = Description of Artificial Sequence: Synthetic oligonucleotide
  misc_feature 1..20: note = Target: FXN; (-) strand; PAM type: NRG; PAM sequence: AGG
  source 1..20: mol_type = other DNA
agggtcaatccaggacagtc

SEQ ID NO: 9555 - DNA, 20 bp, synthetic construct
  misc_feature 1..20: note = Description of Artificial Sequence: Synthetic oligonucleotide
  misc_feature 1..20: note = Target: FXN; (-) strand; PAM type: NRG; PAM sequence: CAG
  source 1..20: mol_type = other DNA
tagggtcaatccaggacagt

SEQ ID NO: 9556 - DNA, 20 bp, synthetic construct
  misc_feature 1..20: note = Description of Artificial Sequence: Synthetic oligonucleotide
  misc_feature 1..20: note = Target: FXN; (-) strand; PAM type: NRG; PAM sequence: CAG
  source 1..20: mol_type = other DNA
agcttagggtcaatccagga

SEQ ID NO: 9557 - DNA, 20 bp, synthetic construct
  misc_feature 1..20: note = Description of Artificial Sequence: Synthetic oligonucleotide
  misc_feature 1..20: note = Target: FXN; (-) strand; PAM type: NRG; PAM sequence: AGG
  source 1..20: mol_type = other DNA
ggggagcttagggtcaatcc

SEQ ID NO: 9558 - DNA, 20 bp, synthetic construct
  misc_feature 1..20: note = Description of Artificial Sequence: Synthetic oligonucleotide
  misc_feature 1..20: note = Target: FXN; (-) strand; PAM type: NRG; PAM sequence: CAG
  source 1..20: mol_type = other DNA
gggggagcttagggtcaatc

SEQ ID NO: 9559 - DNA, 20 bp, synthetic construct
  misc_feature 1..20: note = Description of Artificial Sequence: Synthetic oligonucleotide
  misc_feature 1..20: note = Target: FXN; (-) strand; PAM type: NRG; PAM sequence: GGG
  source 1..20: mol_type = other DNA
tggagaccagggggagctta

SEQ ID NO: 9560 - DNA, 20 bp, synthetic construct
  misc_feature 1..20: note = Description of Artificial Sequence: Synthetic oligonucleotide
  misc_feature 1..20: note = Target: FXN; (-) strand; PAM type: NRG; PAM sequence: AGG
  source 1..20: mol_type = other DNA
ttggagaccagggggagctt

SEQ ID NO: 9561 - DNA, 20 bp, synthetic construct
  misc_feature 1..20: note = Description of Artificial Sequence: Synthetic oligonucleotide
  misc_feature 1..20: note = Target: FXN; (-) strand; PAM type: NRG; PAM sequence: TAG
  source 1..20: mol_type = other DNA
tttggagaccagggggagct

SEQ ID NO: 9562 - DNA, 20 bp, synthetic construct
  misc_feature 1..20: note = Description of Artificial Sequence: Synthetic oligonucleotide
  misc_feature 1..20: note = Target: FXN; (-) strand; PAM type: NRG; PAM sequence: GAG
  source 1..20: mol_type = other DNA
tgaattttggagaccagggg

SEQ ID NO: 9563 - DNA, 20 bp, synthetic construct
  misc_feature 1..20: note = Description of Artificial Sequence: Synthetic oligonucleotide
  misc_feature 1..20: note = Target: FXN; (-) strand; PAM type: NRG; PAM sequence: GGG
  source 1..20: mol_type = other DNA
gatgaattttggagaccagg

SEQ ID NO: 9564 - DNA, 20 bp, synthetic construct
  misc_feature 1..20: note = Description of Artificial Sequence: Synthetic oligonucleotide
  misc_feature 1..20: note = Target: FXN; (-) strand; PAM type: NRG; PAM sequence: GGG
  source 1..20: mol_type = other DNA
tgatgaattttggagaccag

SEQ ID NO: 9565 - DNA, 20 bp, synthetic construct
  misc_feature 1..20: note = Description of Artificial Sequence: Synthetic oligonucleotide
  misc_feature 1..20: note = Target: FXN; (-) strand; PAM type: NRG; PAM sequence: GGG
  source 1..20: mol_type = other DNA
ctgatgaattttggagacca

SEQ ID NO: 9566 - DNA, 20 bp, synthetic construct
  misc_feature 1..20: note = Description of Artificial Sequence: Synthetic oligonucleotide
  misc_feature 1..20: note = Target: FXN; (-) strand; PAM type: NRG; PAM sequence: AGG
  source 1..20: mol_type = other DNA
tctgatgaattttggagacc

SEQ ID NO: 9567 - DNA, 20 bp, synthetic construct
  misc_feature 1..20: note = Description of Artificial Sequence: Synthetic oligonucleotide
  misc_feature 1..20: note = Target: FXN; (-) strand; PAM type: NRG; PAM sequence: CAG
  source 1..20: mol_type = other DNA
ttctgatgaattttggagac

SEQ ID NO: 9568 - DNA, 20 bp, synthetic construct
  misc_feature 1..20: note = Description of Artificial Sequence: Synthetic oligonucleotide
  misc_feature 1..20: note = Target: FXN; (-) strand; PAM type: NRG; PAM sequence: GAG
  source 1..20: mol_type = other DNA
tcagtttctgatgaattttg

SEQ ID NO: 9569 - DNA, 20 bp, synthetic construct
  misc_feature 1..20: note = Description of Artificial Sequence: Synthetic oligonucleotide
  misc_feature 1..20: note = Target: FXN; (-) strand; PAM type: NRG; PAM sequence: TGG
  source 1..20: mol_type = other DNA
actcagtttctgatgaattt

SEQ ID NO: 9570 - DNA, 20 bp, synthetic construct
  misc_feature 1..20: note = Description of Artificial Sequence: Synthetic oligonucleotide
  misc_feature 1..20: note = Target: FXN; (-) strand; PAM type: NRG; PAM sequence: CAG
  source 1..20: mol_type = other DNA
aagaggccttcaagtgaact

SEQ ID NO: 9571 - DNA, 20 bp, synthetic construct
  misc_feature 1..20: note = Description of Artificial Sequence: Synthetic oligonucleotide
  misc_feature 1..20: note = Target: FXN; (-) strand; PAM type: NRG; PAM sequence: AAG
  source 1..20: mol_type = other DNA
agggtggggaagaggccttc

SEQ ID NO: 9572 - DNA, 20 bp, synthetic construct
  misc_feature 1..20: note = Description of Artificial Sequence: Synthetic oligonucleotide
  misc_feature 1..20: note = Target: FXN; (-) strand; PAM type: NRG; PAM sequence: AGG
  source 1..20: mol_type = other DNA
tggagaaaagggtggggaag

SEQ ID NO: 9573 - DNA, 20 bp, synthetic construct
  misc_feature 1..20: note = Description of Artificial Sequence: Synthetic oligonucleotide
  misc_feature 1..20: note = Target: FXN; (-) strand; PAM type: NRG; PAM sequence: GAG
  source 1..20: mol_type = other DNA
gtggagaaaagggtggggaa

SEQ ID NO: 9574 - DNA, 20 bp, synthetic construct
  misc_feature 1..20: note = Description of Artificial Sequence: Synthetic oligonucleotide
  misc_feature 1..20: note = Target: FXN; (-) strand; PAM type: NRG; PAM sequence: AAG
  source 1..20: mol_type = other DNA
gggtggagaaaagggtgggg

SEQ ID NO: 9575 - DNA, 20 bp, synthetic construct
  misc_feature 1..20: note = Description of Artificial Sequence: Synthetic oligonucleotide
  misc_feature 1..20: note = Target: FXN; (-) strand; PAM type: NRG; PAM sequence: GGG
  source 1..20: mol_type = other DNA
aaggggtggagaaaagggtg

SEQ ID NO: 9576 - DNA, 20 bp, synthetic construct
  misc_feature 1..20: note = Description of Artificial Sequence: Synthetic oligonucleotide
  misc_feature 1..20: note = Target: FXN; (-) strand; PAM type: NRG; PAM sequence: GGG
  source 1..20: mol_type = other DNA
caaggggtggagaaaagggt

SEQ ID NO: 9577 - DNA, 20 bp, synthetic construct
  misc_feature 1..20: note = Description of Artificial Sequence: Synthetic oligonucleotide
  misc_feature 1..20: note = Target: FXN; (-) strand; PAM type: NRG; PAM sequence: TGG
  source 1..20: mol_type = other DNA
gcaaggggtggagaaaaggg

SEQ ID NO: 9578 - DNA, 20 bp, synthetic construct
  misc_feature 1..20: note = Description of Artificial Sequence: Synthetic oligonucleotide
  misc_feature 1..20: note = Target: FXN; (-) strand; PAM type: NRG; PAM sequence: GGG
  source 1..20: mol_type = other DNA
gatgcaaggggtggagaaaa

SEQ ID NO: 9579 - DNA, 20 bp, synthetic construct
  misc_feature 1..20: note = Description of Artificial Sequence: Synthetic oligonucleotide
  misc_feature 1..20: note = Target: FXN; (-) strand; PAM type: NRG; PAM sequence: AGG
  source 1..20: mol_type = other DNA
agatgcaaggggtggagaaa

SEQ ID NO: 9580 - DNA, 20 bp, synthetic construct
  misc_feature 1..20: note = Description of Artificial Sequence: Synthetic oligonucleotide
  misc_feature 1..20: note = Target: FXN; (-) strand; PAM type: NRG; PAM sequence: AAG
  source 1..20: mol_type = other DNA
tagatgcaaggggtggagaa

SEQ ID NO: 9581 - DNA, 20 bp, synthetic construct
  misc_feature 1..20: note = Description of Artificial Sequence: Synthetic oligonucleotide
  misc_feature 1..20: note = Target: FXN; (-) strand; PAM type: NRG; PAM sequence: GAG
  source 1..20: mol_type = other DNA
agaagtagatgcaaggggtg

SEQ ID NO: 9582 - DNA, 20 bp, synthetic construct
  misc_feature 1..20: note = Description of Artificial Sequence: Synthetic oligonucleotide
  misc_feature 1..20: note = Target: FXN; (-) strand; PAM type: NRG; PAM sequence: TGG
  source 1..20: mol_type = other DNA
ttagaagtagatgcaagggg

SEQ ID NO: 9583 - DNA, 20 bp, synthetic construct
  misc_feature 1..20: note = Description of Artificial Sequence: Synthetic oligonucleotide
  misc_feature 1..20: note = Target: FXN; (-) strand; PAM type: NRG; PAM sequence: GGG
  source 1..20: mol_type = other DNA
gctttagaagtagatgcaag

SEQ ID NO: 9584 - DNA, 20 bp, synthetic construct
  misc_feature 1..20: note = Description of Artificial Sequence: Synthetic oligonucleotide
  misc_feature 1..20: note = Target: FXN; (-) strand; PAM type: NRG; PAM sequence: GGG
  source 1..20: mol_type = other DNA
tgctttagaagtagatgcaa

SEQ ID NO: 9585 - DNA, 20 bp, synthetic construct
  misc_feature 1..20: note = Description of Artificial Sequence: Synthetic oligonucleotide
  misc_feature 1..20: note = Target: FXN; (-) strand; PAM type: NRG; PAM sequence: AGG
  source 1..20: mol_type = other DNA
ctgctttagaagtagatgca

SEQ ID NO: 9586 - DNA, 20 bp, synthetic construct
  misc_feature 1..20: note = Description of Artificial Sequence: Synthetic oligonucleotide
  misc_feature 1..20: note = Target: FXN; (-) strand; PAM type: NRG; PAM sequence: AAG
  source 1..20: mol_type = other DNA
gctgctttagaagtagatgc

SEQ ID NO: 9587 - DNA, 20 bp, synthetic construct
  misc_feature 1..20: note = Description of Artificial Sequence: Synthetic oligonucleotide
  misc_feature 1..20: note = Target: FXN; (-) strand; PAM type: NRG; PAM sequence: TAG
  source 1..20: mol_type = other DNA
ttgaacagctgctttagaag

SEQ ID NO: 9588 - DNA, 20 bp, synthetic construct
  misc_feature 1..20: note = Description of Artificial Sequence: Synthetic oligonucleotide
  misc_feature 1..20: note = Target: FXN; (-) strand; PAM type: NRG; PAM sequence: AAG
  source 1..20: mol_type = other DNA
ctgttgaacagctgctttag

SEQ ID NO: 9589 - DNA, 20 bp, synthetic construct
  misc_feature 1..20: note = Description of Artificial Sequence: Synthetic oligonucleotide
  misc_feature 1..20: note = Target: FXN; (-) strand; PAM type: NRG; PAM sequence: TAG
  source 1..20: mol_type = other DNA
tttctgttgaacagctgctt

SEQ ID NO: 9590 - DNA, 20 bp, synthetic construct
  misc_feature 1..20: note = Description of Artificial Sequence: Synthetic oligonucleotide
  misc_feature 1..20: note = Target: FXN; (-) strand; PAM type: NRG; PAM sequence: CAG
  source 1..20: mol_type = other DNA
cccattctgtttctgttgaa

SEQ ID NO: 9591 - DNA, 20 bp, synthetic construct
  misc_feature 1..20: note = Description of Artificial Sequence: Synthetic oligonucleotide
  misc_feature 1..20: note = Target: FXN; (-) strand; PAM type: NRG; PAM sequence: TGG
  source 1..20: mol_type = other DNA
aaaatgtagaattatgtgtg

SEQ ID NO: 9592 - DNA, 20 bp, synthetic construct
  misc_feature 1..20: note = Description of Artificial Sequence: Synthetic oligonucleotide
  misc_feature 1..20: note = Target: FXN; (-) strand; PAM type: NRG; PAM sequence: TAG
  source 1..20: mol_type = other DNA
ttctttttaactagaaaatg

SEQ ID NO: 9593 - DNA, 20 bp, synthetic construct
  misc_feature 1..20: note = Description of Artificial Sequence: Synthetic oligonucleotide
  misc_feature 1..20: note = Target: FXN; (-) strand; PAM type: NRG; PAM sequence: TAG
  source 1..20: mol_type = other DNA
gatttttttttctttttaac

SEQ ID NO: 9594 - DNA, 20 bp, synthetic construct
  misc_feature 1..20: note = Description of Artificial Sequence: Synthetic oligonucleotide
  misc_feature 1..20: note = Target: FXN; (-) strand; PAM type: NRG; PAM sequence: AGG
  source 1..20: mol_type = other DNA
gataatattttgtatgtact

SEQ ID NO: 9595 - DNA, 20 bp, synthetic construct
  misc_feature 1..20: note = Description of Artificial Sequence: Synthetic oligonucleotide
  misc_feature 1..20: note = Target: FXN; (-) strand; PAM type: NRG; PAM sequence: TAG
  source 1..20: mol_type = other DNA
tgataatattttgtatgtac

SEQ ID NO: 9596 - DNA, 20 bp, synthetic construct
  misc_feature 1..20: note = Description of Artificial Sequence: Synthetic oligonucleotide
  misc_feature 1..20: note = Target: FXN; (-) strand; PAM type: NRG; PAM sequence: TGG
  source 1..20: mol_type = other DNA
ttaaaatactgattacatgt

SEQ ID NO: 9597 - DNA, 20 bp, synthetic construct
  misc_feature 1..20: note = Description of Artificial Sequence: Synthetic oligonucleotide
  misc_feature 1..20: note = Target: FXN; (-) strand; PAM type: NRG; PAM sequence: TGG
  source 1..20: mol_type = other DNA
cagtcgtgagccaccgtgcc

SEQ ID NO: 9598 - DNA, 20 bp, synthetic construct
  misc_feature 1..20: note = Description of Artificial Sequence: Synthetic oligonucleotide
  misc_feature 1..20: note = Target: FXN; (-) strand; PAM type: NRG; PAM sequence: GAG
  source 1..20: mol_type = other DNA
agtcctgggattacagtcgt

SEQ ID NO: 9599 - DNA, 20 bp, synthetic construct
  misc_feature 1..20: note = Description of Artificial Sequence: Synthetic oligonucleotide
  misc_feature 1..20: note = Target: FXN; (-) strand; PAM type: NRG; PAM sequence: CAG
  source 1..20: mol_type = other DNA
ctcccaaagtcctgggatta

SEQ ID NO: 9600 - DNA, 20 bp, synthetic construct
  misc_feature 1..20: note = Description of Artificial Sequence: Synthetic oligonucleotide
  misc_feature 1..20: note = Target: FXN; (-) strand; PAM type: NRG; PAM sequence: GGG
  source 1..20: mol_type = other DNA
cctcggcctcccaaagtcct

SEQ ID NO: 9601 - DNA, 20 bp, synthetic construct
  misc_feature 1..20: note = Description of Artificial Sequence: Synthetic oligonucleotide
  misc_feature 1..20: note = Target: FXN; (-) strand; PAM type: NRG; PAM sequence: TGG
  source 1..20: mol_type = other DNA
gcctcggcctcccaaagtcc

SEQ ID NO: 9602 - DNA, 20 bp, synthetic construct
  misc_feature 1..20: note = Description of Artificial Sequence: Synthetic oligonucleotide
  misc_feature 1..20: note = Target: FXN; (-) strand; PAM type: NRG; PAM sequence: AAG
  source 1..20: mol_type = other DNA
ccactcgcctcggcctccca

SEQ ID NO: 9603 - DNA, 20 bp, synthetic construct
  misc_feature 1..20: note = Description of Artificial Sequence: Synthetic oligonucleotide
  misc_feature 1..20: note = Target: FXN; (-) strand; PAM type: NRG; PAM sequence: CGG
  source 1..20: mol_type = other DNA
ctcagatgatccactcgcct

SEQ ID NO: 9604 - DNA, 20 bp, synthetic construct
  misc_feature 1..20: note = Description of Artificial Sequence: Synthetic oligonucleotide
  misc_feature 1..20: note = Target: FXN; (-) strand; PAM type: NRG; PAM sequence: CAG
  source 1..20: mol_type = other DNA
tggtcttgaactcctgatct

SEQ ID NO: 9605 - DNA, 20 bp, synthetic construct
  misc_feature 1..20: note = Description of Artificial Sequence: Synthetic oligonucleotide
  misc_feature 1..20: note = Target: FXN; (-) strand; PAM type: NRG; PAM sequence: TGG
  source 1..20: mol_type = other DNA
tttcaccatgttggccaggc

SEQ ID NO: 9606 - DNA, 20 bp, synthetic construct
  misc_feature 1..20: note = Description of Artificial Sequence: Synthetic oligonucleotide
  misc_feature 1..20: note = Target: FXN; (-) strand; PAM type: NRG; PAM sequence: AGG
  source 1..20: mol_type = other DNA
ggggtttcaccatgttggcc

SEQ ID NO: 9607 - DNA, 20 bp, synthetic construct
  misc_feature 1..20: note = Description of Artificial Sequence: Synthetic oligonucleotide
  misc_feature 1..20: note = Target: FXN; (-) strand; PAM type: NRG; PAM sequence: CAG
  source 1..20: mol_type = other DNA
tggggtttcaccatgttggc

SEQ ID NO: 9608 - DNA, 20 bp, synthetic construct
  misc_feature 1..20: note = Description of Artificial Sequence: Synthetic oligonucleotide
  misc_feature 1..20: note = Target: FXN; (-) strand; PAM type: NRG; PAM sequence: TGG
  source 1..20: mol_type = other DNA
gagatggggtttcaccatgt

SEQ ID NO: 9609 - DNA, 20 bp, synthetic construct
  misc_feature 1..20: note = Description of Artificial Sequence: Synthetic oligonucleotide
  misc_feature 1..20: note = Target: FXN; (-) strand; PAM type: NRG; PAM sequence: GGG
  source 1..20: mol_type = other DNA
gctagtttttagtagagatg

SEQ ID NO: 9610 - DNA, 20 bp, synthetic construct
  misc_feature 1..20: note = Description of Artificial Sequence: Synthetic oligonucleotide
  misc_feature 1..20: note = Target: FXN; (-) strand; PAM type: NRG; PAM sequence: GGG
  source 1..20: mol_type = other DNA
agctagtttttagtagagat

SEQ ID NO: 9611 - DNA, 20 bp, synthetic construct
  misc_feature 1..20: note = Description of Artificial Sequence: Synthetic oligonucleotide
  misc_feature 1..20: note = Target: FXN; (-) strand; PAM type: NRG; PAM sequence: TGG
  source 1..20: mol_type = other DNA
gagctagtttttagtagaga

SEQ ID NO: 9612 - DNA, 20 bp, synthetic construct
  misc_feature 1..20: note = Description of Artificial Sequence: Synthetic oligonucleotide
  misc_feature 1..20: note = Target: FXN; (-) strand; PAM type: NRG; PAM sequence: GAG
  source 1..20: mol_type = other DNA
tgctgagctagtttttagta

SEQ ID NO: 9613 - DNA, 20 bp, synthetic construct
  misc_feature 1..20: note = Description of Artificial Sequence: Synthetic oligonucleotide
  misc_feature 1..20: note = Target: FXN; (-) strand; PAM type: NRG; PAM sequence: TAG
  source 1..20: mol_type = other DNA
catgctgagctagtttttag

SEQ ID NO: 9614 - DNA, 20 bp, synthetic construct
  misc_feature 1..20: note = Description of Artificial Sequence: Synthetic oligonucleotide
  misc_feature 1..20: note = Target: FXN; (-) strand; PAM type: NRG; PAM sequence: TAG
  source 1..20: mol_type = other DNA
caccatgctgagctagtttt

SEQ ID NO: 9615 - DNA, 20 bp, synthetic construct
  misc_feature 1..20: note = Description of Artificial Sequence: Synthetic oligonucleotide
  misc_feature 1..20: note = Target: FXN; (-) strand; PAM type: NRG; PAM sequence: TAG
  source 1..20: mol_type = other DNA
cacccaccaccatgctgagc

SEQ ID NO: 9616 - DNA, 20 bp, synthetic construct
  misc_feature 1..20: note = Description of Artificial Sequence: Synthetic oligonucleotide
  misc_feature 1..20: note = Target: FXN; (-) strand; PAM type: NRG; PAM sequence: GAG
  source 1..20: mol_type = other DNA
caggcacccaccaccatgct

SEQ ID NO: 9617 - DNA, 20 bp, synthetic construct
  misc_feature 1..20: note = Description of Artificial Sequence: Synthetic oligonucleotide
  misc_feature 1..20: note = Target: FXN; (-) strand; PAM type: NRG; PAM sequence: AGG
  source 1..20: mol_type = other DNA
tcccgagtagctgggactac

SEQ ID NO: 9618 - DNA, 20 bp, synthetic construct
  misc_feature 1..20: note = Description of Artificial Sequence: Synthetic oligonucleotide
  misc_feature 1..20: note = Target: FXN; (-) strand; PAM type: NRG; PAM sequence: CAG
  source 1..20: mol_type = other DNA
ctcccgagtagctgggacta

SEQ ID NO: 9619 - DNA, 20 bp, synthetic construct
  misc_feature 1..20: note = Description of Artificial Sequence: Synthetic oligonucleotide
  misc_feature 1..20: note = Target: FXN; (-) strand; PAM type: NRG; PAM sequence: GGG
  source 1..20: mol_type = other DNA
cctcagcctcccgagtagct

SEQ ID NO: 9620 - DNA, 20 bp, synthetic construct
  misc_feature 1..20: note = Description of Artificial Sequence: Synthetic oligonucleotide
  misc_feature 1..20: note = Target: FXN; (-) strand; PAM type: NRG; PAM sequence: TGG
  source 1..20: mol_type = other DNA
gcctcagcctcccgagtagc

SEQ ID NO: 9621 - DNA, 20 bp, synthetic construct
  misc_feature 1..20: note = Description of Artificial Sequence: Synthetic oligonucleotide
  misc_feature 1..20: note = Target: FXN; (-) strand; PAM type: NRG; PAM sequence: TAG
  source 1..20: mol_type = other DNA
tcatgcctcagcctcccgag

SEQ ID NO: 9622 - DNA, 20 bp, synthetic construct
  misc_feature 1..20: note = Description of Artificial Sequence: Synthetic oligonucleotide
  misc_feature 1..20: note = Target: FXN; (-) strand; PAM type: NRG; PAM sequence: GAG
  source 1..20: mol_type = other DNA
ttctcatgcctcagcctccc

SEQ ID NO: 9623 - DNA, 20 bp, synthetic construct
  misc_feature 1..20: note = Description of Artificial Sequence: Synthetic oligonucleotide
  misc_feature 1..20: note = Target: FXN; (-) strand; PAM type: NRG; PAM sequence: CAG
  source 1..20: mol_type = other DNA
ctcaagtgattctcatgcct

SEQ ID NO: 9624 - DNA, 20 bp, synthetic construct
  misc_feature 1..20: note = Description of Artificial Sequence: Synthetic oligonucleotide
  misc_feature 1..20: note = Target: FXN; (-) strand; PAM type: NRG; PAM sequence: AAG
  source 1..20: mol_type = other DNA
aacctctgcctcctgggctc

SEQ ID NO: 9625 - DNA, 20 bp, synthetic construct
  misc_feature 1..20: note = Description of Artificial Sequence: Synthetic oligonucleotide
  misc_feature 1..20: note = Target: FXN; (-) strand; PAM type: NRG; PAM sequence: GGG
  source 1..20: mol_type = other DNA
cactgcaacctctgcctcct

SEQ ID NO: 9626 - DNA, 20 bp, synthetic construct
  misc_feature 1..20: note = Description of Artificial Sequence: Synthetic oligonucleotide
  misc_feature 1..20: note = Target: FXN; (-) strand; PAM type: NRG; PAM sequence: TGG
  source 1..20: mol_type = other DNA
tcactgcaacctctgcctcc

SEQ ID NO: 9627 - DNA, 20 bp, synthetic construct
  misc_feature 1..20: note = Description of Artificial Sequence: Synthetic oligonucleotide
  misc_feature 1..20: note = Target: FXN; (-) strand; PAM type: NRG; PAM sequence: TGG
  source 1..20: mol_type = other DNA
cacagaatcccccaaaatct

SEQ ID NO: 9628 - DNA, 20 bp, synthetic construct
  misc_feature 1..20: note = Description of Artificial Sequence: Synthetic oligonucleotide
  misc_feature 1..20: note = Target: FXN; (-) strand; PAM type: NRG; PAM sequence: CAG
  source 1..20: mol_type = other DNA
ctgattttttttgtatgtca

SEQ ID NO: 9629 - DNA, 20 bp, synthetic construct
  misc_feature 1..20: note = Description of Artificial Sequence: Synthetic oligonucleotide
  misc_feature 1..20: note = Target: FXN; (-) strand; PAM type: NRG; PAM sequence: AAG
  source 1..20: mol_type = other DNA
tgagtacgaaaagagtatgc

SEQ ID NO: 9630 - DNA, 20 bp, synthetic construct
  misc_feature 1..20: note = Description of Artificial Sequence: Synthetic oligonucleotide
  misc_feature 1..20: note = Target: FXN; (-) strand; PAM type: NRG; PAM sequence: GAG
  source 1..20: mol_type = other DNA
gaagtatatgagtacgaaaa

SEQ ID NO: 9631 - DNA, 20 bp, synthetic construct
  misc_feature 1..20: note = Description of Artificial Sequence: Synthetic oligonucleotide
  misc_feature 1..20: note = Target: FXN; (-) strand; PAM type: NRG; PAM sequence: AAG
  source 1..20: mol_type = other DNA
tggaagtatatgagtacgaa

SEQ ID NO: 9632 - DNA, 20 bp, synthetic construct
  misc_feature 1..20: note = Description of Artificial Sequence: Synthetic oligonucleotide
  misc_feature 1..20: note = Target: FXN; (-) strand; PAM type: NRG; PAM sequence: GAG
  source 1..20: mol_type = other DNA
gagatatgctggaagtatat

SEQ ID NO: 9633 - DNA, 20 bp, synthetic construct
  misc_feature 1..20: note = Description of Artificial Sequence: Synthetic oligonucleotide
  misc_feature 1..20: note = Target: FXN; (-) strand; PAM type: NRG; PAM sequence: AAG
  source 1..20: mol_type = other DNA
tgtgaattgagatatgctgg

SEQ ID NO: 9634 - DNA, 20 bp, synthetic construct
  misc_feature 1..20: note = Description of Artificial Sequence: Synthetic oligonucleotide
  misc_feature 1..20: note = Target: FXN; (-) strand; PAM type: NRG; PAM sequence: TGG
  source 1..20: mol_type = other DNA
aattgtgaattgagatatgc

SEQ ID NO: 9635 - DNA, 20 bp, synthetic construct
  misc_feature 1..20: note = Description of Artificial Sequence: Synthetic oligonucleotide
  misc_feature 1..20: note = Target: FXN; (-) strand; PAM type: NRG; PAM sequence: GAG
  source 1..20: mol_type = other DNA
ttacttagaaattgtgaatt

SEQ ID NO: 9636 - DNA, 20 bp, synthetic construct
  misc_feature 1..20: note = Description of Artificial Sequence: Synthetic oligonucleotide
  misc_feature 1..20: note = Target: FXN; (-) strand; PAM type: NRG; PAM sequence: TAG
  source 1..20: mol_type = other DNA
atacagatagagcatttact

SEQ ID NO: 9637 - DNA, 20 bp, synthetic construct
  misc_feature 1..20: note = Description of Artificial Sequence: Synthetic oligonucleotide
  misc_feature 1..20: note = Target: FXN; (-) strand; PAM type: NRG; PAM sequence: GAG
  source 1..20: mol_type = other DNA
tataaaagtaaatacagata

SEQ ID NO: 9638 - DNA, 20 bp, synthetic construct
  misc_feature 1..20: note = Description of Artificial Sequence: Synthetic oligonucleotide
  misc_feature 1..20: note = Target: FXN; (-) strand; PAM type: NRG; PAM sequence: TAG
  source 1..20: mol_type = other DNA
tttataaaagtaaatacaga

SEQ ID NO: 9639 - DNA, 20 bp, synthetic construct
  misc_feature 1..20: note = Description of Artificial Sequence: Synthetic oligonucleotide
  misc_feature 1..20: note = Target: FXN; (-) strand; PAM type: NRG; PAM sequence: CAG
  source 1..20: mol_type = other DNA
gaattttataaaagtaaata

SEQ ID NO: 9640 - DNA, 20 bp, synthetic construct
  misc_feature 1..20: note = Description of Artificial Sequence: Synthetic oligonucleotide
  misc_feature 1..20: note = Target: FXN; (-) strand; PAM type: NRG; PAM sequence: AAG
  source 1..20: mol_type = other DNA
tttaattgtgaattttataa

SEQ ID NO: 9641 - DNA, 20 bp, synthetic construct
  misc_feature 1..20: note = Description of Artificial Sequence: Synthetic oligonucleotide
  misc_feature 1..20: note = Target: FXN; (-) strand; PAM type: NRG; PAM sequence: TGG
  source 1..20: mol_type = other DNA
aggagacatttaagtgtgtt

SEQ ID NO: 9642 - DNA, 20 bp, synthetic construct
  misc_feature 1..20: note = Description of Artificial Sequence: Synthetic oligonucleotide
  misc_feature 1..20: note = Target: FXN; (-) strand; PAM type: NRG; PAM sequence: AAG
  source 1..20: mol_type = other DNA
acccagcctaggagacattt

SEQ ID NO: 9643 - DNA, 20 bp, synthetic construct
  misc_feature 1..20: note = Description of Artificial Sequence: Synthetic oligonucleotide
  misc_feature 1..20: note = Target: FXN; (-) strand; PAM type: NRG; PAM sequence: GAG
  source 1..20: mol_type = other DNA
agcaaccacacccagcctag

SEQ ID NO: 9644 - DNA, 20 bp, synthetic construct
  misc_feature 1..20: note = Description of Artificial Sequence: Synthetic oligonucleotide
  misc_feature 1..20: note = Target: FXN; (-) strand; PAM type: NRG; PAM sequence: AGG
  source 1..20: mol_type = other DNA
tgagcaaccacacccagcct

SEQ ID NO: 9645 - DNA, 20 bp, synthetic construct
  misc_feature 1..20: note = Description of Artificial Sequence: Synthetic oligonucleotide
  misc_feature 1..20: note = Target: FXN; (-) strand; PAM type: NRG; PAM sequence: TAG
  source 1..20: mol_type = other DNA
gtgagcaaccacacccagcc

SEQ ID NO: 9646 - DNA, 20 bp, synthetic construct
  misc_feature 1..20: note = Description of Artificial Sequence: Synthetic oligonucleotide
  misc_feature 1..20: note = Target: FXN; (-) strand; PAM type: NRG; PAM sequence: CAG
  source 1..20: mol_type = other DNA
caggtgtgagcaaccacacc

SEQ ID NO: 9647 - DNA, 20 bp, synthetic construct
  misc_feature 1..20: note = Description of Artificial Sequence: Synthetic oligonucleotide
  misc_feature 1..20: note = Target: FXN; (-) strand; PAM type: NRG; PAM sequence: GAG
  source 1..20: mol_type = other DNA
agtgctgggattacaggtgt

SEQ ID NO: 9648 - DNA, 20 bp, synthetic construct
  misc_feature 1..20: note = Description of Artificial Sequence: Synthetic oligonucleotide
  misc_feature 1..20: note = Target: FXN; (-) strand; PAM type: NRG; PAM sequence: AGG
  source 1..20: mol_type = other DNA
tcccaaagtgctgggattac

SEQ ID NO: 9649 - DNA, 20 bp, synthetic construct
  misc_feature 1..20: note = Description of Artificial Sequence: Synthetic oligonucleotide
  misc_feature 1..20: note = Target: FXN; (-) strand; PAM type: NRG; PAM sequence: CAG
  source 1..20: mol_type = other DNA
ctcccaaagtgctgggatta

SEQ ID NO: 9650 - DNA, 20 bp, synthetic construct
  misc_feature 1..20: note = Description of Artificial Sequence: Synthetic oligonucleotide
  misc_feature 1..20: note = Target: FXN; (-) strand; PAM type: NRG; PAM sequence: GGG
  source 1..20: mol_type = other DNA
tctcagcctcccaaagtgct

SEQ ID NO: 9651 - DNA, 20 bp, synthetic construct
  misc_feature 1..20: note = Description of Artificial Sequence: Synthetic oligonucleotide
  misc_feature 1..20: note = Target: FXN; (-) strand; PAM type: NRG; PAM sequence: TGG
  source 1..20: mol_type = other DNA
atctcagcctcccaaagtgc

SEQ ID NO: 9652 - DNA, 20 bp, synthetic construct
  misc_feature 1..20: note = Description of Artificial Sequence: Synthetic oligonucleotide
  misc_feature 1..20: note = Target: FXN; (-) strand; PAM type: NRG; PAM sequence: AAG
  source 1..20: mol_type = other DNA
ccgcccatctcagcctccca

SEQ ID NO: 9653 - DNA, 20 bp, synthetic construct
  misc_feature 1..20: note = Description of Artificial Sequence: Synthetic oligonucleotide
  misc_feature 1..20: note = Target: FXN; (-) strand; PAM type: NRG; PAM sequence: CAG
  source 1..20: mol_type = other DNA
ctcaggtgatccgcccatct

SEQ ID NO: 9654 - DNA, 20 bp, synthetic construct
  misc_feature 1..20: note = Description of Artificial Sequence: Synthetic oligonucleotide
  misc_feature 1..20: note = Target: FXN; (-) strand; PAM type: NRG; PAM sequence: AGG
  source 1..20: mol_type = other DNA
ggtctcaaactcctgacctc

SEQ ID NO: 9655 - DNA, 20 bp, synthetic construct
  misc_feature 1..20: note = Description of Artificial Sequence: Synthetic oligonucleotide
  misc_feature 1..20: note = Target: FXN; (-) strand; PAM type: NRG; PAM sequence: CAG
  source 1..20: mol_type = other DNA
tggtctcaaactcctgacct

SEQ ID NO: 9656 - DNA, 20 bp, synthetic construct
  misc_feature 1..20: note = Description of Artificial Sequence: Synthetic oligonucleotide
  misc_feature 1..20: note = Target: FXN; (-) strand; PAM type: NRG; PAM sequence: TGG
  source 1..20: mol_type = other DNA
tttcaccatgttggccaggc

SEQ ID NO: 9657 - DNA, 20 bp, synthetic construct
  misc_feature 1..20: note = Description of Artificial Sequence: Synthetic oligonucleotide
  misc_feature 1..20: note = Target: FXN; (-) strand; PAM type: NRG; PAM sequence: AGG
  source 1..20: mol_type = other DNA
ggggtttcaccatgttggcc

SEQ ID NO: 9658 - DNA, 20 bp, synthetic construct
  misc_feature 1..20: note = Description of Artificial Sequence: Synthetic oligonucleotide
  misc_feature 1..20: note = Target: FXN; (-) strand; PAM type: NRG; PAM sequence: CAG
  source 1..20: mol_type = other DNA
cggggtttcaccatgttggc

SEQ ID NO: 9659 - DNA, 20 bp, synthetic construct
  misc_feature 1..20: note = Description of Artificial Sequence: Synthetic oligonucleotide
  misc_feature 1..20: note = Target: FXN; (-) strand; PAM type: NRG; PAM sequence: TGG
  source 1..20: mol_type = other DNA
gagacggggtttcaccatgt

SEQ ID NO: 9660 - DNA, 20 bp, synthetic construct
  misc_feature 1..20: note = Description of Artificial Sequence: Synthetic oligonucleotide
  misc_feature 1..20: note = Target: FXN; (-) strand; PAM type: NRG; PAM sequence: GGG
  source 1..20: mol_type = other DNA
ttgtatttttagtagagacg

SEQ ID NO: 9661 - DNA, 20 bp, synthetic construct
  misc_feature 1..20: note = Description of Artificial Sequence: Synthetic oligonucleotide
  misc_feature 1..20: note = Target: FXN; (-) strand; PAM type: NRG; PAM sequence: GGG
  source 1..20: mol_type = other DNA
tttgtatttttagtagagac

SEQ ID NO: 9662 - DNA, 20 bp, synthetic construct
  misc_feature 1..20: note = Description of Artificial Sequence: Synthetic oligonucleotide
  misc_feature 1..20: note = Target: FXN; (-) strand; PAM type: NRG; PAM sequence: CGG
  source 1..20: mol_type = other DNA
ttttgtatttttagtagaga

SEQ ID NO: 9663 - DNA, 20 bp, synthetic construct
  misc_feature 1..20: note = Description of Artificial Sequence: Synthetic oligonucleotide
  misc_feature 1..20: note = Target: FXN; (-) strand; PAM type: NRG; PAM sequence: GAG
  source 1..20: mol_type = other DNA
taatttttgtatttttagta

SEQ ID NO: 9664 - DNA, 20 bp, synthetic construct
  misc_feature 1..20: note = Description of Artificial Sequence: Synthetic oligonucleotide
  misc_feature 1..20: note = Target: FXN; (-) strand; PAM type: NRG; PAM sequence: TAG
  source 1..20: mol_type = other DNA
gctaatttttgtatttttag

SEQ ID NO: 9665 - DNA, 20 bp, synthetic construct
  misc_feature 1..20: note = Description of Artificial Sequence: Synthetic oligonucleotide
  misc_feature 1..20: note = Target: FXN; (-) strand; PAM type: NRG; PAM sequence: TAG
  source 1..20: mol_type = other DNA
ccagctaatttttgtatttt

SEQ ID NO: 9666 - DNA, 20 bp, synthetic construct
  misc_feature 1..20: note = Description of Artificial Sequence: Synthetic oligonucleotide
  misc_feature 1..20: note = Target: FXN; (-) strand; PAM type: NRG; PAM sequence: CAG
  source 1..20: mol_type = other DNA
caggtgagtgccaccacatc

SEQ ID NO: 9667 - DNA, 20 bp, synthetic construct
  misc_feature 1..20: note = Description of Artificial Sequence: Synthetic oligonucleotide
  misc_feature 1..20: note = Target: FXN; (-) strand; PAM type: NRG; PAM sequence: GAG
  source 1..20: mol_type = other DNA
gagtagctgggattacaggt

SEQ ID NO: 9668 - DNA, 20 bp, synthetic construct
  misc_feature 1..20: note = Description of Artificial Sequence: Synthetic oligonucleotide
  misc_feature 1..20: note = Target: FXN; (-) strand; PAM type: NRG; PAM sequence: AGG
  source 1..20: mol_type = other DNA
tcctgagtagctgggattac

SEQ ID NO: 9669 - DNA, 20 bp, synthetic construct
  misc_feature 1..20: note = Description of Artificial Sequence: Synthetic oligonucleotide
  misc_feature 1..20: note = Target: FXN; (-) strand; PAM type: NRG; PAM sequence: CAG
  source 1..20: mol_type = other DNA
ctcctgagtagctgggatta

SEQ ID NO: 9670 - DNA, 20 bp, synthetic construct
  misc_feature 1..20: note = Description of Artificial Sequence: Synthetic oligonucleotide
  misc_feature 1..20: note = Target: FXN; (-) strand; PAM type: NRG; PAM sequence: GGG
  source 1..20: mol_type = other DNA
cctcagcctcctgagtagct

SEQ ID NO: 9671 - DNA, 20 bp, synthetic construct
  misc_feature 1..20: note = Description of Artificial Sequence: Synthetic oligonucleotide
  misc_feature 1..20: note = Target: FXN; (-) strand; PAM type: NRG; PAM sequence: TGG
  source 1..20: mol_type = other DNA
gcctcagcctcctgagtagc

SEQ ID NO: 9672 - DNA, 20 bp, synthetic construct
  misc_feature 1..20: note = Description of Artificial Sequence: Synthetic oligonucleotide
  misc_feature 1..20: note = Target: FXN; (-) strand; PAM type: NRG; PAM sequence: TAG
  source 1..20: mol_type = other DNA
tcctgcctcagcctcctgag

SEQ ID NO: 9673 - DNA, 20 bp, synthetic construct
  misc_feature 1..20: note = Description of Artificial Sequence: Synthetic oligonucleotide
  misc_feature 1..20: note = Target: FXN; (-) strand; PAM type: NRG; PAM sequence: GAG
  source 1..20: mol_type = other DNA
ttatcctgcctcagcctcct

SEQ ID NO: 9674 - DNA, 20 bp, synthetic construct
  misc_feature 1..20: note = Description of Artificial Sequence: Synthetic oligonucleotide
  misc_feature 1..20: note = Target: FXN; (-) strand; PAM type: NRG; PAM sequence: CAG
  source 1..20: mol_type = other DNA
ttcaagcaattatcctgcct

SEQ ID NO: 9675 - DNA, 20 bp, synthetic construct
  misc_feature 1..20: note = Description of Artificial Sequence: Synthetic oligonucleotide
  misc_feature 1..20: note = Target: FXN; (-) strand; PAM type: NRG; PAM sequence: AAG
  source 1..20: mol_type = other DNA
ctccaccacctcccgggttc

SEQ ID NO: 9676 - DNA, 20 bp, synthetic construct
  misc_feature 1..20: note = Description of Artificial Sequence: Synthetic oligonucleotide
  misc_feature 1..20: note = Target: FXN; (-) strand; PAM type: NRG; PAM sequence: GGG
  source 1..20: mol_type = other DNA
tgcaacctccaccacctccc

SEQ ID NO: 9677 - DNA, 20 bp, synthetic construct
  misc_feature 1..20: note = Description of Artificial Sequence: Synthetic oligonucleotide
  misc_feature 1..20: note = Target: FXN; (-) strand; PAM type: NRG; PAM sequence: CGG
  source 1..20: mol_type = other DNA
ctgcaacctccaccacctcc

SEQ ID NO: 9678 - DNA, 20 bp, synthetic construct
  misc_feature 1..20: note = Description of Artificial Sequence: Synthetic oligonucleotide
  misc_feature 1..20: note = Target: FXN; (-) strand; PAM type: NRG; PAM sequence: CGG
  source 1..20: mol_type = other DNA
ggaaggcagtggtgcgatct

SEQ ID NO: 9679 - DNA, 20 bp, synthetic construct
  misc_feature 1..20: note = Description of Artificial Sequence: Synthetic oligonucleotide
  misc_feature 1..20: note = Target: FXN; (-) strand; PAM type: NRG; PAM sequence: TGG
  source 1..20: mol_type = other DNA
tcgcccaggttggaaggcag

SEQ ID NO: 9680 - DNA, 20 bp, synthetic construct
  misc_feature 1..20: note = Description of Artificial Sequence: Synthetic oligonucleotide
  misc_feature 1..20: note = Target: FXN; (-) strand; PAM type: NRG; PAM sequence: CAG
  source 1..20: mol_type = other DNA
ctgtcgcccaggttggaagg

SEQ ID NO: 9681 - DNA, 20 bp, synthetic construct
  misc_feature 1..20: note = Description of Artificial Sequence: Synthetic oligonucleotide
  misc_feature 1..20: note = Target: FXN; (-) strand; PAM type: NRG; PAM sequence: AGG
  source 1..20: mol_type = other DNA
gctctgtcgcccaggttgga

SEQ ID NO: 9682 - DNA, 20 bp, synthetic construct
  misc_feature 1..20: note = Description of Artificial Sequence: Synthetic oligonucleotide
  misc_feature 1..20: note = Target: FXN; (-) strand; PAM type: NRG; PAM sequence: AAG
  source 1..20: mol_type = other DNA
cgctctgtcgcccaggttgg

SEQ ID NO: 9683 - DNA, 20 bp, synthetic construct
  misc_feature 1..20: note = Description of Artificial Sequence: Synthetic oligonucleotide
  misc_feature 1..20: note = Target: FXN; (-) strand; PAM type: NRG; PAM sequence: TGG
  source 1..20: mol_type = other DNA
tctcgctctgtcgcccaggt

SEQ ID NO: 9684 - DNA, 20 bp, synthetic construct
  misc_feature 1..20: note = Description of Artificial Sequence: Synthetic oligonucleotide
  misc_feature 1..20: note = Target: FXN; (-) strand; PAM type: NRG; PAM sequence: AGG
  source 1..20: mol_type = other DNA
ggagtctcgctctgtcgccc

SEQ ID NO: 9685 - DNA, 20 bp, synthetic construct
  misc_feature 1..20: note = Description of Artificial Sequence: Synthetic oligonucleotide
  misc_feature 1..20: note = Target: FXN; (-) strand; PAM type: NRG; PAM sequence: CAG
  source 1..20: mol_type = other DNA
cggagtctcgctctgtcgcc

SEQ ID NO: 9686 - DNA, 20 bp, synthetic construct
  misc_feature 1..20: note = Description of Artificial Sequence: Synthetic oligonucleotide
  misc_feature 1..20: note = Target: FXN; (-) strand; PAM type: NRG; PAM sequence: GAG
  source 1..20: mol_type = other DNA
ttttttttttttttgagacg

SEQ ID NO: 9687 - DNA, 20 bp, synthetic construct
  misc_feature 1..20: note = Description of Artificial Sequence: Synthetic oligonucleotide
  misc_feature 1..20: note = Target: FXN; (-) strand; PAM type: NRG; PAM sequence: CGG
  source 1..20: mol_type = other DNA
ccttttttttttttttgaga

SEQ ID NO: 9688 - DNA, 20 bp, synthetic construct
  misc_feature 1..20: note = Description of Artificial Sequence: Synthetic oligonucleotide
  misc_feature 1..20: note = Target: FXN; (-) strand; PAM type: NRG; PAM sequence: GAG
  source 1..20: mol_type = other DNA
ggagcctttttttttttttt

SEQ ID NO: 9689 - DNA, 20 bp, synthetic construct
  misc_feature 1..20: note = Description of Artificial Sequence: Synthetic oligonucleotide
  misc_feature 1..20: note = Target: FXN; (-) strand; PAM type: NRG; PAM sequence: GAG
  source 1..20: mol_type = other DNA
taaagtaataaagttattag

SEQ ID NO: 9690 - DNA, 20 bp, synthetic construct
  misc_feature 1..20: note = Description of Artificial Sequence: Synthetic oligonucleotide
  misc_feature 1..20: note = Target: FXN; (-) strand; PAM type: NRG; PAM sequence: AGG
  source 1..20: mol_type = other DNA
aataaagtaataaagttatt

SEQ ID NO: 9691 - DNA, 20 bp, synthetic construct
  misc_feature 1..20: note = Description of Artificial Sequence: Synthetic oligonucleotide
  misc_feature 1..20: note = Target: FXN; (-) strand; PAM type: NRG; PAM sequence: TAG
  source 1..20: mol_type = other DNA
taataaagtaataaagttat

SEQ ID NO: 9692 - DNA, 20 bp, synthetic construct
  misc_feature 1..20: note = Description of Artificial Sequence: Synthetic oligonucleotide
  misc_feature 1..20: note = Target: FXN; (-) strand; PAM type: NRG; PAM sequence: AAG
  source 1..20: mol_type = other DNA
gaggtgataataaagtaata

SEQ ID NO: 9693 - DNA, 20 bp, synthetic construct
  misc_feature 1..20: note = Description of Artificial Sequence: Synthetic oligonucleotide
  misc_feature 1..20: note = Target: FXN; (-) strand; PAM type: NRG; PAM sequence: AAG
  source 1..20: mol_type = other DNA
aattatttgaggtgataata

SEQ ID NO: 9694 - DNA, 20 bp, synthetic construct
  misc_feature 1..20: note = Description of Artificial Sequence: Synthetic oligonucleotide
  misc_feature 1..20: note = Target: FXN; (-) strand; PAM type: NRG; PAM sequence: AGG
  source 1..20: mol_type = other DNA
catttaattttaattatttg

SEQ ID NO: 9695 - DNA, 20 bp, synthetic construct
  misc_feature 1..20: note = Description of Artificial Sequence: Synthetic oligonucleotide
  misc_feature 1..20: note = Target: FXN; (-) strand; PAM type: NRG; PAM sequence: GAG
  source 1..20: mol_type = other DNA
tcatttaattttaattattt

SEQ ID NO: 9696 - DNA, 20 bp, synthetic construct
  misc_feature 1..20: note = Description of Artificial Sequence: Synthetic oligonucleotide
  misc_feature 1..20: note = Target: FXN; (-) strand; PAM type: NRG; PAM sequence: TGG
  source 1..20: mol_type = other DNA
ggctaatgggactgaggacc

SEQ ID NO: 9697 - DNA, 20 bp, synthetic construct
  misc_feature 1..20: note = Description of Artificial Sequence: Synthetic oligonucleotide
  misc_feature 1..20: note = Target: FXN; (-) strand; PAM type: NRG; PAM sequence: AGG
  source 1..20: mol_type = other DNA
aaatgtggctaatgggactg

SEQ ID NO: 9698 - DNA, 20 bp, synthetic construct
  misc_feature 1..20: note = Description of Artificial Sequence: Synthetic oligonucleotide
  misc_feature 1..20: note = Target: FXN; (-) strand; PAM type: NRG; PAM sequence: GAG
  source 1..20: mol_type = other DNA
gaaatgtggctaatgggact

SEQ ID NO: 9699 - DNA, 20 bp, synthetic construct
  misc_feature 1..20: note = Description of Artificial Sequence: Synthetic oligonucleotide
  misc_feature 1..20: note = Target: FXN; (-) strand; PAM type: NRG; PAM sequence: GGG
  source 1..20: mol_type = other DNA
gcactagaaatgtggctaat

SEQ ID NO: 9700 - DNA, 20 bp, synthetic construct
  misc_feature 1..20: note = Description of Artificial Sequence: Synthetic oligonucleotide
  misc_feature 1..20: note = Target: FXN; (-) strand; PAM type: NRG; PAM sequence: TGG
  source 1..20: mol_type = other DNA
agcactagaaatgtggctaa

SEQ ID NO: 9701 - DNA, 20 bp, synthetic construct
  misc_feature 1..20: note = Description of Artificial Sequence: Synthetic oligonucleotide
  misc_feature 1..20: note = Target: FXN; (-) strand; PAM type: NRG; PAM sequence: TGG
  source 1..20: mol_type = other DNA
gctactgagcactagaaatg

SEQ ID NO: 9702 - DNA, 20 bp, synthetic construct
  misc_feature 1..20: note = Description of Artificial Sequence: Synthetic oligonucleotide
  misc_feature 1..20: note = Target: FXN; (-) strand; PAM type: NRG; PAM sequence: TAG
  source 1..20: mol_type = other DNA
cccccgtggctactgagcac

SEQ ID NO: 9703 - DNA, 20 bp, synthetic construct
  misc_feature 1..20: note = Description of Artificial Sequence: Synthetic oligonucleotide
  misc_feature 1..20: note = Target: FXN; (-) strand; PAM type: NRG; PAM sequence: GAG
  source 1..20: mol_type = other DNA
caccagcccccgtggctact

SEQ ID NO: 9704 - DNA, 20 bp, synthetic construct
  misc_feature 1..20: note = Description of Artificial Sequence: Synthetic oligonucleotide
  misc_feature 1..20: note = Target: FXN; (-) strand; PAM type: NRG; PAM sequence: TGG
  source 1..20: mol_type = other DNA
gtggtggtcaccagcccccg

SEQ ID NO: 9705 - DNA, 20 bp, synthetic construct
  misc_feature 1..20: note = Description of Artificial Sequence: Synthetic oligonucleotide
  misc_feature 1..20: note = Target: FXN; (-) strand; PAM type: NRG; PAM sequence: CAG
  source 1..20: mol_type = other DNA
ctgtcccatgtggtggtcac

SEQ ID NO: 9706 - DNA, 20 bp, synthetic construct
  misc_feature 1..20: note = Description of Artificial Sequence: Synthetic oligonucleotide
  misc_feature 1..20: note = Target: FXN; (-) strand; PAM type: NRG; PAM sequence: TGG
  source 1..20: mol_type = other DNA
aaatatgctgtcccatgtgg

SEQ ID NO: 9707 - DNA, 20 bp, synthetic construct
  misc_feature 1..20: note = Description of Artificial Sequence: Synthetic oligonucleotide
  misc_feature 1..20: note = Target: FXN; (-) strand; PAM type: NRG; PAM sequence: TGG
  source 1..20: mol_type = other DNA
actaaatatgctgtcccatg

SEQ ID NO: 9708 - DNA, 20 bp, synthetic construct
  misc_feature 1..20: note = Description of Artificial Sequence: Synthetic oligonucleotide
  misc_feature 1..20: note = Target: FXN; (-) strand; PAM type: NRG; PAM sequence: AGG
  source 1..20: mol_type = other DNA
agatctgagaaccaatgatc

SEQ ID NO: 9709 - DNA, 20 bp, synthetic construct
  misc_feature 1..20: note = Description of Artificial Sequence: Synthetic oligonucleotide
  misc_feature 1..20: note = Target: FXN; (-) strand; PAM type: NRG; PAM sequence: CAG
  source 1..20: mol_type = other DNA
cagatctgagaaccaatgat

SEQ ID NO: 9710 - DNA, 20 bp, synthetic construct
  misc_feature 1..20: note = Description of Artificial Sequence: Synthetic oligonucleotide
  misc_feature 1..20: note = Target: FXN; (-) strand; PAM type: NRG; PAM sequence: GAG
  source 1..20: mol_type = other DNA
tctgctgagtagccagatct

SEQ ID NO: 9711 - DNA, 20 bp, synthetic construct
  misc_feature 1..20: note = Description of Artificial Sequence: Synthetic oligonucleotide
  misc_feature 1..20: note = Target: FXN; (-) strand; PAM type: NRG; PAM sequence: CAG
  source 1..20: mol_type = other DNA
tcttggttctgctgagtagc

SEQ ID NO: 9712 - DNA, 20 bp, synthetic construct
  misc_feature 1..20: note = Description of Artificial Sequence: Synthetic oligonucleotide
  misc_feature 1..20: note = Target: FXN; (-) strand; PAM type: NRG; PAM sequence: TAG
  source 1..20: mol_type = other DNA
ggattcttggttctgctgag

SEQ ID NO: 9713 - DNA, 20 bp, synthetic construct
  misc_feature 1..20: note = Description of Artificial Sequence: Synthetic oligonucleotide
  misc_feature 1..20: note = Target: FXN; (-) strand; PAM type: NRG; PAM sequence: GAG
  source 1..20: mol_type = other DNA
tgtggattcttggttctgct

SEQ ID NO: 9714 - DNA, 20 bp, synthetic construct
  misc_feature 1..20: note = Description of Artificial Sequence: Synthetic oligonucleotide
  misc_feature 1..20: note = Target: FXN; (-) strand; PAM type: NRG; PAM sequence: TGG
  source 1..20: mol_type = other DNA
aagccgtttctgtggattct

SEQ ID NO: 9715 - DNA, 20 bp, synthetic construct
  misc_feature 1..20: note = Description of Artificial Sequence: Synthetic oligonucleotide
  misc_feature 1..20: note = Target: FXN; (-) strand; PAM type: NRG; PAM sequence: TGG
  source 1..20: mol_type = other DNA
gcttttaaaagccgtttctg

SEQ ID NO: 9716 - DNA, 20 bp, synthetic construct
  misc_feature 1..20: note = Description of Artificial Sequence: Synthetic oligonucleotide
  misc_feature 1..20: note = Target: FXN; (-) strand; PAM type: NRG; PAM sequence: AAG
  source 1..20: mol_type = other DNA
ctgtggggctgtgcttttaa

SEQ ID NO: 9717 - DNA, 20 bp, synthetic construct
  misc_feature 1..20: note = Description of Artificial Sequence: Synthetic oligonucleotide
  misc_feature 1..20: note = Target: FXN; (-) strand; PAM type: NRG; PAM sequence: GGG
  source 1..20: mol_type = other DNA
ggctggggctgggggctgtg

SEQ ID NO: 9718 - DNA, 20 bp, synthetic construct
  misc_feature 1..20: note = Description of Artificial Sequence: Synthetic oligonucleotide
  misc_feature 1..20: note = Target: FXN; (-) strand; PAM type: NRG; PAM sequence: GGG
  source 1..20: mol_type = other DNA
aggctggggctgggggctgt

SEQ ID NO: 9719 - DNA, 20 bp, synthetic construct
  misc_feature 1..20: note = Description of Artificial Sequence: Synthetic oligonucleotide
  misc_feature 1..20: note = Target: FXN; (-) strand; PAM type: NRG; PAM sequence: TGG
  source 1..20: mol_type = other DNA
aaggctggggctgggggctg

SEQ ID NO: 9720 - DNA, 20 bp, synthetic construct
  misc_feature 1..20: note = Description of Artificial Sequence: Synthetic oligonucleotide
  misc_feature 1..20: note = Target: FXN; (-) strand; PAM type: NRG; PAM sequence: GGG
  source 1..20: mol_type = other DNA
gtaggtaaggctggggctgg

SEQ ID NO: 9721 - DNA, 20 bp, synthetic construct
  misc_feature 1..20: note = Description of Artificial Sequence: Synthetic oligonucleotide
  misc_feature 1..20: note = Target: FXN; (-) strand; PAM type: NRG; PAM sequence: GGG
  source 1..20: mol_type = other DNA
ggtaggtaaggctggggctg

SEQ ID NO: 9722 - DNA, 20 bp, synthetic construct
  misc_feature 1..20: note = Description of Artificial Sequence: Synthetic oligonucleotide
  misc_feature 1..20: note = Target: FXN; (-) strand; PAM type: NRG; PAM sequence: GGG
  source 1..20: mol_type = other DNA
aggtaggtaaggctggggct

SEQ ID NO: 9723 - DNA, 20 bp, synthetic construct
  misc_feature 1..20: note = Description of Artificial Sequence: Synthetic oligonucleotide
  misc_feature 1..20: note = Target: FXN; (-) strand; PAM type: NRG; PAM sequence: TGG
  source 1..20: mol_type = other DNA
caggtaggtaaggctggggc

SEQ ID NO: 9724 - DNA, 20 bp, synthetic construct
  misc_feature 1..20: note = Description of Artificial Sequence: Synthetic oligonucleotide
  misc_feature 1..20: note = Target: FXN; (-) strand; PAM type: NRG; PAM sequence: GGG
  source 1..20: mol_type = other DNA
cctccaggtaggtaaggctg

SEQ ID NO: 9725 - DNA, 20 bp, synthetic construct
  misc_feature 1..20: note = Description of Artificial Sequence: Synthetic oligonucleotide
  misc_feature 1..20: note = Target: FXN; (-) strand; PAM type: NRG; PAM sequence: GGG
  source 1..20: mol_type = other DNA
gcctccaggtaggtaaggct

SEQ ID NO: 9726 - DNA, 20 bp, synthetic construct
  misc_feature 1..20: note = Description of Artificial Sequence: Synthetic oligonucleotide
  misc_feature 1..20: note = Target: FXN; (-) strand; PAM type: NRG; PAM sequence: TGG
  source 1..20: mol_type = other DNA
agcctccaggtaggtaaggc

SEQ ID NO: 9727 - DNA, 20 bp, synthetic construct
  misc_feature 1..20: note = Description of Artificial Sequence: Synthetic oligonucleotide
  misc_feature 1..20: note = Target: FXN; (-) strand; PAM type: NRG; PAM sequence: AGG
  source 1..20: mol_type = other DNA
tcccagcctccaggtaggta

SEQ ID NO: 9728 - DNA, 20 bp, synthetic construct
  misc_feature 1..20: note = Description of Artificial Sequence: Synthetic oligonucleotide
  misc_feature 1..20: note = Target: FXN; (-) strand; PAM type: NRG; PAM sequence: AAG
  source 1..20: mol_type = other DNA
ttcccagcctccaggtaggt

SEQ ID NO: 9729 - DNA, 20 bp, synthetic construct
  misc_feature 1..20: note = Description of Artificial Sequence: Synthetic oligonucleotide
  misc_feature 1..20: note = Target: FXN; (-) strand; PAM type: NRG; PAM sequence: AGG
  source 1..20: mol_type = other DNA
gtccttcccagcctccaggt

SEQ ID NO: 9730 - DNA, 20 bp, synthetic construct
  misc_feature 1..20: note = Description of Artificial Sequence: Synthetic oligonucleotide
  misc_feature 1..20: note = Target: FXN; (-) strand; PAM type: NRG; PAM sequence: TAG
  source 1..20: mol_type = other DNA
agtccttcccagcctccagg

SEQ ID NO: 9731 - DNA, 20 bp, synthetic construct
  misc_feature 1..20: note = Description of Artificial Sequence: Synthetic oligonucleotide
  misc_feature 1..20: note = Target: FXN; (-) strand; PAM type: NRG; PAM sequence: AGG
  source 1..20: mol_type = other DNA
cagagtccttcccagcctcc

SEQ ID NO: 9732 - DNA, 20 bp, synthetic construct
  misc_feature 1..20: note = Description of Artificial Sequence: Synthetic oligonucleotide
  misc_feature 1..20: note = Target: FXN; (-) strand; PAM type: NRG; PAM sequence: CAG
  source 1..20: mol_type = other DNA
tcagagtccttcccagcctc

SEQ ID NO: 9733 - DNA, 20 bp, synthetic construct
  misc_feature 1..20: note = Description of Artificial Sequence: Synthetic oligonucleotide
  misc_feature 1..20: note = Target: FXN; (-) strand; PAM type: NRG; PAM sequence: CAG
  source 1..20: mol_type = other DNA
cgtggaatcagagtccttcc

SEQ ID NO: 9734 - DNA, 20 bp, synthetic construct
  misc_feature 1..20: note = Description of Artificial Sequence: Synthetic oligonucleotide
  misc_feature 1..20: note = Target: FXN; (-) strand; PAM type: NRG; PAM sequence: GAG
  source 1..20: mol_type = other DNA
taggctgcctcgtggaatca

SEQ ID NO: 9735 - DNA, 20 bp, synthetic construct
  misc_feature 1..20: note = Description of Artificial Sequence: Synthetic oligonucleotide
  misc_feature 1..20: note = Target: FXN; (-) strand; PAM type: NRG; PAM sequence: CAG
  source 1..20: mol_type = other DNA
cataggctgcctcgtggaat

SEQ ID NO: 9736 - DNA, 20 bp, synthetic construct
  misc_feature 1..20: note = Description of Artificial Sequence: Synthetic oligonucleotide
  misc_feature 1..20: note = Target: FXN; (-) strand; PAM type: NRG; PAM sequence: TGG
  source 1..20: mol_type = other DNA
aaaaaacataggctgcctcg

SEQ ID NO: 9737 - DNA, 20 bp, synthetic construct
  misc_feature 1..20: note = Description of Artificial Sequence: Synthetic oligonucleotide
  misc_feature 1..20: note = Target: FXN; (-) strand; PAM type: NRG; PAM sequence: AGG
  source 1..20: mol_type = other DNA
atccctccatcaaaaaacat

SEQ ID NO: 9738 - DNA, 20 bp, synthetic construct
  misc_feature 1..20: note = Description of Artificial Sequence: Synthetic oligonucleotide
  misc_feature 1..20: note = Target: FXN; (-) strand; PAM type: NRG; PAM sequence: TAG
  source 1..20: mol_type = other DNA
catccctccatcaaaaaaca

SEQ ID NO: 9739 - DNA, 20 bp, synthetic construct
  misc_feature 1..20: note = Description of Artificial Sequence: Synthetic oligonucleotide
  misc_feature 1..20: note = Target: FXN; (-) strand; PAM type: NRG; PAM sequence: CAG
  source 1..20: mol_type = other DNA
aagaggaaacgttaaagatg

SEQ ID NO: 9740 - DNA, 20 bp, synthetic construct
  misc_feature 1..20: note = Description of Artificial Sequence: Synthetic oligonucleotide
  misc_feature 1..20: note = Target: FXN; (-) strand; PAM type: NRG; PAM sequence: AAG
  source 1..20: mol_type = other DNA
gtatttaagaggaaacgtta

SEQ ID NO: 9741 - DNA, 20 bp, synthetic construct
  misc_feature 1..20: note = Description of Artificial Sequence: Synthetic oligonucleotide
  misc_feature 1..20: note = Target: FXN; (-) strand; PAM type: NRG; PAM sequence: AGG
  source 1..20: mol_type = other DNA
agctgtctccagtatttaag

SEQ ID NO: 9742 - DNA, 20 bp, synthetic construct
  misc_feature 1..20: note = Description of Artificial Sequence: Synthetic oligonucleotide
  misc_feature 1..20: note = Target: FXN; (-) strand; PAM type: NRG; PAM sequence: GAG
  source 1..20: mol_type = other DNA
aagctgtctccagtatttaa

SEQ ID NO: 9743 - DNA, 20 bp, synthetic construct
  misc_feature 1..20: note = Description of Artificial Sequence: Synthetic oligonucleotide
  misc_feature 1..20: note = Target: FXN; (-) strand; PAM type: NRG; PAM sequence: AAG
  source 1..20: mol_type = other DNA
cgaagctgtctccagtattt

SEQ ID NO: 9744 - DNA, 20 bp, synthetic construct
  misc_feature 1..20: note = Description of Artificial Sequence: Synthetic oligonucleotide
  misc_feature 1..20: note = Target: FXN; (-) strand; PAM type: NRG; PAM sequence: CAG
  source 1..20: mol_type = other DNA
ctcctcctcgaagctgtctc

SEQ ID NO: 9745 - DNA, 20 bp, synthetic construct
  misc_feature 1..20: note = Description of Artificial Sequence: Synthetic oligonucleotide
  misc_feature 1..20: note = Target: FXN; (-) strand; PAM type: NRG; PAM sequence: AAG
  source 1..20: mol_type = other DNA
atccagttatctcctcctcg

SEQ ID NO: 9746 - DNA, 20 bp, synthetic construct
  misc_feature 1..20: note = Description of Artificial Sequence: Synthetic oligonucleotide
  misc_feature 1..20: note = Target: FXN; (-) strand; PAM type: NRG; PAM sequence: CAG
  source 1..20: mol_type = other DNA
caaatggactaagacacatc

SEQ ID NO: 9747 - DNA, 20 bp, synthetic construct
  misc_feature 1..20: note = Description of Artificial Sequence: Synthetic oligonucleotide
  misc_feature 1..20: note = Target: FXN; (-) strand; PAM type: NRG; PAM sequence: AAG
  source 1..20: mol_type = other DNA
atccctccatcaaatggact

SEQ ID NO: 9748 - DNA, 20 bp, synthetic construct
  misc_feature 1..20: note = Description of Artificial Sequence: Synthetic oligonucleotide
  misc_feature 1..20: note = Target: FXN; (-) strand; PAM type: NRG; PAM sequence: TGG
  source 1..20: mol_type = other DNA
cgtcacatccctccatcaaa

SEQ ID NO: 9749 - DNA, 20 bp, synthetic construct
  misc_feature 1..20: note = Description of Artificial Sequence: Synthetic oligonucleotide
  misc_feature 1..20: note = Target: FXN; (-) strand; PAM type: NRG; PAM sequence: CAG
  source 1..20: mol_type = other DNA
aagaggaaacgttaaagacg

SEQ ID NO: 9750 - DNA, 20 bp, synthetic construct
  misc_feature 1..20: note = Description of Artificial Sequence: Synthetic oligonucleotide
  misc_feature 1..20: note = Target: FXN; (-) strand; PAM type: NRG; PAM sequence: AAG
  source 1..20: mol_type = other DNA
gtatttaagaggaaacgtta

SEQ ID NO: 9751 - DNA, 20 bp, synthetic construct
  misc_feature 1..20: note = Description of Artificial Sequence: Synthetic oligonucleotide
  misc_feature 1..20: note = Target: FXN; (-) strand; PAM type: NRG; PAM sequence: AGG
  source 1..20: mol_type = other DNA
agctgtctccggtatttaag

SEQ ID NO: 9752 - DNA, 20 bp, synthetic construct
  misc_feature 1..20: note = Description of Artificial Sequence: Synthetic oligonucleotide
  misc_feature 1..20: note = Target: FXN; (-) strand; PAM type: NRG; PAM sequence: GAG
  source 1..20: mol_type = other DNA
aagctgtctccggtatttaa

SEQ ID NO: 9753 - DNA, 20 bp, synthetic construct
  misc_feature 1..20: note = Description of Artificial Sequence: Synthetic oligonucleotide
  misc_feature 1..20: note = Target: FXN; (-) strand; PAM type: NRG; PAM sequence: AAG
  source 1..20: mol_type = other DNA
cgaagctgtctccggtattt

SEQ ID NO: 9754 - DNA, 20 bp, synthetic construct
  misc_feature 1..20: note = Description of Artificial Sequence: Synthetic oligonucleotide
  misc_feature 1..20: note = Target: FXN; (-) strand; PAM type: NRG; PAM sequence: CGG
  source 1..20: mol_type = other DNA
ctccttctcgaagctgtctc

SEQ ID NO: 9755 - DNA, 20 bp, synthetic construct
  misc_feature 1..20: note = Description of Artificial Sequence: Synthetic oligonucleotide
  misc_feature 1..20: note = Target: FXN; (-) strand; PAM type: NRG; PAM sequence: AAG
  source 1..20: mol_type = other DNA
atccagttatctccttctcg

SEQ ID NO: 9756 - DNA, 20 bp, synthetic construct
  misc_feature 1..20: note = Description of Artificial Sequence: Synthetic oligonucleotide
  misc_feature 1..20: note = Target: FXN; (-) strand; PAM type: NRG; PAM sequence: CAG
  source 1..20: mol_type = other DNA
aaaatggactaagaaacatc

SEQ ID NO: 9757 - DNA, 20 bp, synthetic construct
  misc_feature 1..20: note = Description of Artificial Sequence: Synthetic oligonucleotide
  misc_feature 1..20: note = Target: FXN; (-) strand; PAM type: NRG; PAM sequence: AAG
  source 1..20: mol_type = other DNA
caagcaacagaaaatggact

SEQ ID NO: 9758 - DNA, 20 bp, synthetic construct
  misc_feature 1..20: note = Description of Artificial Sequence: Synthetic oligonucleotide
  misc_feature 1..20: note = Target: FXN; (-) strand; PAM type: NRG; PAM sequence: TGG
  source 1..20: mol_type = other DNA
ctgtcacaagcaacagaaaa

SEQ ID NO: 9759 - DNA, 20 bp, synthetic construct
  misc_feature 1..20: note = Description of Artificial Sequence: Synthetic oligonucleotide
  misc_feature 1..20: note = Target: FXN; (-) strand; PAM type: NRG; PAM sequence: CAG
  source 1..20: mol_type = other DNA
aggtattctgtcacaagcaa

SEQ ID NO: 9760 - DNA, 20 bp, synthetic construct
  misc_feature 1..20: note = Description of Artificial Sequence: Synthetic oligonucleotide
  misc_feature 1..20: note = Target: FXN; (-) strand; PAM type: NRG; PAM sequence: AAG
  source 1..20: mol_type = other DNA
agtttcaggtattctgtcac

SEQ ID NO: 9761 - DNA, 20 bp, synthetic construct
  misc_feature 1..20: note = Description of Artificial Sequence: Synthetic oligonucleotide
  misc_feature 1..20: note = Target: FXN; (-) strand; PAM type: NRG; PAM sequence: AGG
  source 1..20: mol_type = other DNA
catataaattgcccagtttc

SEQ ID NO: 9762 - DNA, 20 bp, synthetic construct
  misc_feature 1..20: note = Description of Artificial Sequence: Synthetic oligonucleotide
  misc_feature 1..20: note = Target: FXN; (-) strand; PAM type: NRG; PAM sequence: CAG
  source 1..20: mol_type = other DNA
ccatataaattgcccagttt

SEQ ID NO: 9763 - DNA, 20 bp, synthetic construct
  misc_feature 1..20: note = Description of Artificial Sequence: Synthetic oligonucleotide
  misc_feature 1..20: note = Target: FXN; (-) strand; PAM type: NRG; PAM sequence: CAG
  source 1..20: mol_type = other DNA
tttttaccatataaattgcc

SEQ ID NO: 9764 - DNA, 20 bp, synthetic construct
  misc_feature 1..20: note = Description of Artificial Sequence: Synthetic oligonucleotide
  misc_feature 1..20: note = Target: FXN; (-) strand; PAM type: NRG; PAM sequence: AAG
  source 1..20: mol_type = other DNA
tcagcctccagagcagtaag

SEQ ID NO: 9765 - DNA, 20 bp, synthetic construct
  misc_feature 1..20: note = Description of Artificial Sequence: Synthetic oligonucleotide
  misc_feature 1..20: note = Target: FXN; (-) strand; PAM type: NRG; PAM sequence: AAG
  source 1..20: mol_type = other DNA
ttctcagcctccagagcagt

SEQ ID NO: 9766 - DNA, 20 bp, synthetic construct
  misc_feature 1..20: note = Description of Artificial Sequence: Synthetic oligonucleotide
  misc_feature 1..20: note = Target: FXN; (-) strand; PAM type: NRG; PAM sequence: CAG
  source 1..20: mol_type = other DNA
ggacttctcagcctccagag

SEQ ID NO: 9767 - DNA, 20 bp, synthetic construct
  misc_feature 1..20: note = Description of Artificial Sequence: Synthetic oligonucleotide
  misc_feature 1..20: note = Target: FXN; (-) strand; PAM type: NRG; PAM sequence: GAG
  source 1..20: mol_type = other DNA
tttggacttctcagcctcca

SEQ ID NO: 9768 - DNA, 20 bp, synthetic construct
  misc_feature 1..20: note = Description of Artificial Sequence: Synthetic oligonucleotide
  misc_feature 1..20: note = Target: FXN; (-) strand; PAM type: NRG; PAM sequence: CAG
  source 1..20: mol_type = other DNA
actttggacttctcagcctc

SEQ ID NO: 9769 - DNA, 20 bp, synthetic construct
  misc_feature 1..20: note = Description of Artificial Sequence: Synthetic oligonucleotide
  misc_feature 1..20: note = Target: FXN; (-) strand; PAM type: NRG; PAM sequence: CAG
  source 1..20: mol_type = other DNA
ggacttgactttggacttct

SEQ ID NO: 9770 - DNA, 20 bp, synthetic construct
  misc_feature 1..20: note = Description of Artificial Sequence: Synthetic oligonucleotide
  misc_feature 1..20: note = Target: FXN; (-) strand; PAM type: NRG; PAM sequence: TGG
  source 1..20: mol_type = other DNA
agcaagaagggacttgactt

SEQ ID NO: 9771 - DNA, 20 bp, synthetic construct
  misc_feature 1..20: note = Description of Artificial Sequence: Synthetic oligonucleotide
  misc_feature 1..20: note = Target: FXN; (-) strand; PAM type: NRG; PAM sequence: GGG
  source 1..20: mol_type = other DNA
aaagtccccaccagcaagaa

SEQ ID NO: 9772 - DNA, 20 bp, synthetic construct
  misc_feature 1..20: note = Description of Artificial Sequence: Synthetic oligonucleotide
  misc_feature 1..20: note = Target: FXN; (-) strand; PAM type: NRG; PAM sequence: AGG
  source 1..20: mol_type = other DNA
caaagtccccaccagcaaga

SEQ ID NO: 9773 - DNA, 20 bp, synthetic construct
  misc_feature 1..20: note = Description of Artificial Sequence: Synthetic oligonucleotide
  misc_feature 1..20: note = Target: FXN; (-) strand; PAM type: NRG; PAM sequence: AAG
  source 1..20: mol_type = other DNA
gcaaagtccccaccagcaag

SEQ ID NO: 9774 - DNA, 20 bp, synthetic construct
  misc_feature 1..20: note = Description of Artificial Sequence: Synthetic oligonucleotide
  misc_feature 1..20: note = Target: FXN; (-) strand; PAM type: NRG; PAM sequence: AAG
  source 1..20: mol_type = other DNA
tctgcaaagtccccaccagc

SEQ ID NO: 9775 - DNA, 20 bp, synthetic construct
  misc_feature 1..20: note = Description of Artificial Sequence: Synthetic oligonucleotide
  misc_feature 1..20: note = Target: FXN; (-) strand; PAM type: NRG; PAM sequence: CAG
  source 1..20: mol_type = other DNA
atactctgcaaagtccccac

SEQ ID NO: 9776 - DNA, 20 bp, synthetic construct
  misc_feature 1..20: note = Description of Artificial Sequence: Synthetic oligonucleotide
  misc_feature 1..20: note = Target: FXN; (-) strand; PAM type: NRG; PAM sequence: AAG
  source 1..20: mol_type = other DNA
tgccgcctcaatactctgca

SEQ ID NO: 9777 - DNA, 20 bp, synthetic construct
  misc_feature 1..20: note = Description of Artificial Sequence: Synthetic oligonucleotide
  misc_feature 1..20: note = Target: FXN; (-) strand; PAM type: NRG; PAM sequence: CGG
  source 1..20: mol_type = other DNA
gccccttaccatatgacgcc

SEQ ID NO: 9778 - DNA, 20 bp, synthetic construct
  misc_feature 1..20: note = Description of Artificial Sequence: Synthetic oligonucleotide
  misc_feature 1..20: note = Target: FXN; (-) strand; PAM type: NRG; PAM sequence: CAG
  source 1..20: mol_type = other DNA
gacacctgaggtagcacact

SEQ ID NO: 9779 - DNA, 20 bp, synthetic construct
  misc_feature 1..20: note = Description of Artificial Sequence: Synthetic oligonucleotide
  misc_feature 1..20: note = Target: FXN; (-) strand; PAM type: NRG; PAM sequence: TAG
  source 1..20: mol_type = other DNA
aaagaaaaagacacctgagg

SEQ ID NO: 9780 - DNA, 20 bp, synthetic construct
  misc_feature 1..20: note = Description of Artificial Sequence: Synthetic oligonucleotide
  misc_feature 1..20: note = Target: FXN; (-) strand; PAM type: NRG; PAM sequence: AGG
  source 1..20: mol_type = other DNA
agaaaagaaaaagacacctg

SEQ ID NO: 9781 - DNA, 20 bp, synthetic construct
  misc_feature 1..20: note = Description of Artificial Sequence: Synthetic oligonucleotide
  misc_feature 1..20: note = Target: FXN; (-) strand; PAM type: NRG; PAM sequence: GAG
  source 1..20: mol_type = other DNA
aagaaaagaaaaagacacct

SEQ ID NO: 9782 - DNA, 20 bp, synthetic construct
  misc_feature 1..20: note = Description of Artificial Sequence: Synthetic oligonucleotide
  misc_feature 1..20: note = Target: FXN; (-) strand; PAM type: NRG; PAM sequence: AAG
  source 1..20: mol_type = other DNA
aggctttataagaaaagaaa

SEQ ID NO: 9783 - DNA, 20 bp, synthetic construct
  misc_feature 1..20: note = Description of Artificial Sequence: Synthetic oligonucleotide
  misc_feature 1..20: note = Target: FXN; (-) strand; PAM type: NRG; PAM sequence: AAG
  source 1..20: mol_type = other DNA
ctagttaggctttataagaa

SEQ ID NO: 9784 - DNA, 20 bp, synthetic construct
  misc_feature 1..20: note = Description of Artificial Sequence: Synthetic oligonucleotide
  misc_feature 1..20: note = Target: FXN; (-) strand; PAM type: NRG; PAM sequence: AAG
  source 1..20: mol_type = other DNA
tgaaactagttaggctttat

SEQ ID NO: 9785 - DNA, 20 bp, synthetic construct
  misc_feature 1..20: note = Description of Artificial Sequence: Synthetic oligonucleotide
  misc_feature 1..20: note = Target: FXN; (-) strand; PAM type: NRG; PAM sequence: AGG
  source 1..20: mol_type = other DNA
tcatgggagtgaaactagtt

SEQ ID NO: 9786 - DNA, 20 bp, synthetic construct
  misc_feature 1..20: note = Description of Artificial Sequence: Synthetic oligonucleotide
  misc_feature 1..20: note = Target: FXN; (-) strand; PAM type: NRG; PAM sequence: TAG
  source 1..20: mol_type = other DNA
atcatgggagtgaaactagt

SEQ ID NO: 9787 - DNA, 20 bp, synthetic construct
  misc_feature 1..20: note = Description of Artificial Sequence: Synthetic oligonucleotide
  misc_feature 1..20: note = Target: FXN; (-) strand; PAM type: NRG; PAM sequence: TAG
  source 1..20: mol_type = other DNA
ggttatcatgggagtgaaac

SEQ ID NO: 9788 - DNA, 20 bp, synthetic construct
  misc_feature 1..20: note = Description of Artificial Sequence: Synthetic oligonucleotide
  misc_feature 1..20: note = Target: FXN; (-) strand; PAM type: NRG; PAM sequence: GAG
  source 1..20: mol_type = other DNA
agattaatgggttatcatgg

SEQ ID NO: 9789 - DNA, 20 bp, synthetic construct
  misc_feature 1..20: note = Description of Artificial Sequence: Synthetic oligonucleotide
  misc_feature 1..20: note = Target: FXN; (-) strand; PAM type: NRG; PAM sequence: GGG
  source 1..20: mol_type = other DNA
atagattaatgggttatcat

SEQ ID NO: 9790 - DNA, 20 bp, synthetic construct
  misc_feature 1..20: note = Description of Artificial Sequence: Synthetic oligonucleotide
  misc_feature 1..20: note = Target: FXN; (-) strand; PAM type: NRG; PAM sequence: TGG
  source 1..20: mol_type = other DNA
catagattaatgggttatca

SEQ ID NO: 9791 - DNA, 20 bp, synthetic construct
  misc_feature 1..20: note = Description of Artificial Sequence: Synthetic oligonucleotide
  misc_feature 1..20: note = Target: FXN; (-) strand; PAM type: NRG; PAM sequence: GGG
  source 1..20: mol_type = other DNA
taatccattcatagattaat

SEQ ID NO: 9792 - DNA, 20 bp, synthetic construct
  misc_feature 1..20: note = Description of Artificial Sequence: Synthetic oligonucleotide
  misc_feature 1..20: note = Target: FXN; (-) strand; PAM type: NRG; PAM sequence: TGG
  source 1..20: mol_type = other DNA
ttaatccattcatagattaa

SEQ ID NO: 9793 - DNA, 20 bp, synthetic construct
  misc_feature 1..20: note = Description of Artificial Sequence: Synthetic oligonucleotide
  misc_feature 1..20: note = Target: FXN; (-) strand; PAM type: NRG; PAM sequence: TAG
  source 1..20: mol_type = other DNA
ataatggattaatccattca

SEQ ID NO: 9794 - DNA, 20 bp, synthetic construct
  misc_feature 1..20: note = Description of Artificial Sequence: Synthetic oligonucleotide
  misc_feature 1..20: note = Target: FXN; (-) strand; PAM type: NRG; PAM sequence: TGG
  source 1..20: mol_type = other DNA
gaaggttcttccctcaataa

SEQ ID NO: 9795 - DNA, 20 bp, synthetic construct
  misc_feature 1..20: note = Description of Artificial Sequence: Synthetic oligonucleotide
  misc_feature 1..20: note = Target: FXN; (-) strand; PAM type: NRG; PAM sequence: AGG
  source 1..20: mol_type = other DNA
aagcggtgactgggtcatga

SEQ ID NO: 9796 - DNA, 20 bp, synthetic construct
  misc_feature 1..20: note = Description of Artificial Sequence: Synthetic oligonucleotide
  misc_feature 1..20: note = Target: FXN; (-) strand; PAM type: NRG; PAM sequence: AAG
  source 1..20: mol_type = other DNA
taagcggtgactgggtcatg

SEQ ID NO: 9797 - DNA, 20 bp, synthetic construct
  misc_feature 1..20: note = Description of Artificial Sequence: Synthetic oligonucleotide
  misc_feature 1..20: note = Target: FXN; (-) strand; PAM type: NRG; PAM sequence: GGG
  source 1..20: mol_type = other DNA
ggggcctttaagcggtgact

SEQ ID NO: 9798 - DNA, 20 bp, synthetic construct
  misc_feature 1..20: note = Description of Artificial Sequence: Synthetic oligonucleotide
  misc_feature 1..20: note = Target: FXN; (-) strand; PAM type: NRG; PAM sequence: TGG
  source 1..20: mol_type = other DNA
tggggcctttaagcggtgac

SEQ ID NO: 9799 - DNA, 20 bp, synthetic construct
  misc_feature 1..20: note = Description of Artificial Sequence: Synthetic oligonucleotide
  misc_feature 1..20: note = Target: FXN; (-) strand; PAM type: NRG; PAM sequence: CGG
  source 1..20: mol_type = other DNA
tgagaggtggggcctttaag

SEQ ID NO: 9800 - DNA, 20 bp, synthetic construct
  misc_feature 1..20: note = Description of Artificial Sequence: Synthetic oligonucleotide
  misc_feature 1..20: note = Target: FXN; (-) strand; PAM type: NRG; PAM sequence: AAG
  source 1..20: mol_type = other DNA
tattgagaggtggggccttt

SEQ ID NO: 9801 - DNA, 20 bp, synthetic construct
  misc_feature 1..20: note = Description of Artificial Sequence: Synthetic oligonucleotide
  misc_feature 1..20: note = Target: FXN; (-) strand; PAM type: NRG; PAM sequence: GGG
  source 1..20: mol_type = other DNA
tgtggcagtattgagaggtg

SEQ ID NO: 9802 - DNA, 20 bp, synthetic construct
  misc_feature 1..20: note = Description of Artificial Sequence: Synthetic oligonucleotide
  misc_feature 1..20: note = Target: FXN; (-) strand; PAM type: NRG; PAM sequence: GGG
  source 1..20: mol_type = other DNA
atgtggcagtattgagaggt

SEQ ID NO: 9803 - DNA, 20 bp, synthetic construct
  misc_feature 1..20: note = Description of Artificial Sequence: Synthetic oligonucleotide
  misc_feature 1..20: note = Target: FXN; (-) strand; PAM type: NRG; PAM sequence: TGG
  source 1..20: mol_type = other DNA
gatgtggcagtattgagagg

SEQ ID NO: 9804 - DNA, 20 bp, synthetic construct
  misc_feature 1..20: note = Description of Artificial Sequence: Synthetic oligonucleotide
  misc_feature 1..20: note = Target: FXN; (-) strand; PAM type: NRG; PAM sequence: AGG
  source 1..20: mol_type = other DNA
cccgatgtggcagtattgag

SEQ ID NO: 9805 - DNA, 20 bp, synthetic construct
  misc_feature 1..20: note = Description of Artificial Sequence: Synthetic oligonucleotide
  misc_feature 1..20: note = Target: FXN; (-) strand; PAM type: NRG; PAM sequence: GAG
  source 1..20: mol_type = other DNA
tcccgatgtggcagtattga

SEQ ID NO: 9806 - DNA, 20 bp, synthetic construct
  misc_feature 1..20: note = Description of Artificial Sequence: Synthetic oligonucleotide
  misc_feature 1..20: note = Target: FXN; (-) strand; PAM type: NRG; PAM sequence: GAG
  source 1..20: mol_type = other DNA
attcccgatgtggcagtatt

SEQ ID NO: 9807 - DNA, 20 bp, synthetic construct
  misc_feature 1..20: note = Description of Artificial Sequence: Synthetic oligonucleotide
  misc_feature 1..20: note = Target: FXN; (-) strand; PAM type: NRG; PAM sequence: CAG
  source 1..20: mol_type = other DNA
aaacttaattcccgatgtgg

SEQ ID NO: 9808 - DNA, 20 bp, synthetic construct
  misc_feature 1..20: note = Description of Artificial Sequence: Synthetic oligonucleotide
  misc_feature 1..20: note = Target: FXN; (-) strand; PAM type: NRG; PAM sequence: TGG
  source 1..20: mol_type = other DNA
ttgaaacttaattcccgatg

SEQ ID NO: 9809 - DNA, 20 bp, synthetic construct
  misc_feature 1..20: note = Description of Artificial Sequence: Synthetic oligonucleotide
  misc_feature 1..20: note = Target: FXN; (-) strand; PAM type: NRG; PAM sequence: TGG
  source 1..20: mol_type = other DNA
atttaagagacagcatgcta

SEQ ID NO: 9810 - DNA, 20 bp, synthetic construct
  misc_feature 1..20: note = Description of Artificial Sequence: Synthetic oligonucleotide
  misc_feature 1..20: note = Target: FXN; (-) strand; PAM type: NRG; PAM sequence: CAG
  source 1..20: mol_type = other DNA
ttattgagtcatttaagaga

SEQ ID NO: 9811 - DNA, 20 bp, synthetic construct
  misc_feature 1..20: note = Description of Artificial Sequence: Synthetic oligonucleotide
  misc_feature 1..20: note = Target: FXN; (-) strand; PAM type: NRG; PAM sequence: GAG
  source 1..20: mol_type = other DNA
gagcttattgagtcatttaa

SEQ ID NO: 9812 - DNA, 20 bp, synthetic construct
  misc_feature 1..20: note = Description of Artificial Sequence: Synthetic oligonucleotide
  misc_feature 1..20: note = Target: FXN; (-) strand; PAM type: NRG; PAM sequence: AAG
  source 1..20: mol_type = other DNA
aggagcttattgagtcattt

SEQ ID NO: 9813 - DNA, 20 bp, synthetic construct
  misc_feature 1..20: note = Description of Artificial Sequence: Synthetic oligonucleotide
  misc_feature 1..20: note = Target: FXN; (-) strand; PAM type: NRG; PAM sequence: GAG
  source 1..20: mol_type = other DNA
ggatgccacaggagcttatt

SEQ ID NO: 9814 - DNA, 20 bp, synthetic construct
  misc_feature 1..20: note = Description of Artificial Sequence: Synthetic oligonucleotide
  misc_feature 1..20: note = Target: FXN; (-) strand; PAM type: NRG; PAM sequence: GAG
  source 1..20: mol_type = other DNA
tgcagaagtggatgccacag

SEQ ID NO: 9815 - DNA, 20 bp, synthetic construct
  misc_feature 1..20: note = Description of Artificial Sequence: Synthetic oligonucleotide
  misc_feature 1..20: note = Target: FXN; (-) strand; PAM type: NRG; PAM sequence: AGG
  source 1..20: mol_type = other DNA
catgcagaagtggatgccac

SEQ ID NO: 9816 - DNA, 20 bp, synthetic construct
  misc_feature 1..20: note = Description of Artificial Sequence: Synthetic oligonucleotide
  misc_feature 1..20: note = Target: FXN; (-) strand; PAM type: NRG; PAM sequence: CAG
  source 1..20: mol_type = other DNA
gcatgcagaagtggatgcca

SEQ ID NO: 9817 - DNA, 20 bp, synthetic construct
  misc_feature 1..20: note = Description of Artificial Sequence: Synthetic oligonucleotide
  misc_feature 1..20: note = Target: FXN; (-) strand; PAM type: NRG; PAM sequence: TGG
  source 1..20: mol_type = other DNA
ctgcccaaggcatgcagaag

SEQ ID NO: 9818 - DNA, 20 bp, synthetic construct
  misc_feature 1..20: note = Description of Artificial Sequence: Synthetic oligonucleotide
  misc_feature 1..20: note = Target: FXN; (-) strand; PAM type: NRG; PAM sequence: AAG
  source 1..20: mol_type = other DNA
aagctgcccaaggcatgcag

SEQ ID NO: 9819 - DNA, 20 bp, synthetic construct
  misc_feature 1..20: note = Description of Artificial Sequence: Synthetic oligonucleotide
  misc_feature 1..20: note = Target: FXN; (-) strand; PAM type: NRG; PAM sequence: CAG
  source 1..20: mol_type = other DNA
taaaagctgcccaaggcatg

SEQ ID NO: 9820 - DNA, 20 bp, synthetic construct
  misc_feature 1..20: note = Description of Artificial Sequence: Synthetic oligonucleotide
  misc_feature 1..20: note = Target: FXN; (-) strand; PAM type: NRG; PAM sequence: AGG
  source 1..20: mol_type = other DNA
agatgtctaaaagctgccca

SEQ ID NO: 9821 - DNA, 20 bp, synthetic construct
  misc_feature 1..20: note = Description of Artificial Sequence: Synthetic oligonucleotide
  misc_feature 1..20: note = Target: FXN; (-) strand; PAM type: NRG; PAM sequence: AAG
  source 1..20: mol_type = other DNA
cagatgtctaaaagctgccc

SEQ ID NO: 9822 - DNA, 20 bp, synthetic construct
  misc_feature 1..20: note = Description of Artificial Sequence: Synthetic oligonucleotide
  misc_feature 1..20: note = Target: FXN; (-) strand; PAM type: NRG; PAM sequence: AAG
  source 1..20: mol_type = other DNA
gaaaatggacagatgtctaa

SEQ ID NO: 9823 - DNA, 20 bp, synthetic construct
  misc_feature 1..20: note = Description of Artificial Sequence: Synthetic oligonucleotide
  misc_feature 1..20: note = Target: FXN; (-) strand; PAM type: NRG; PAM sequence: CAG
  source 1..20: mol_type = other DNA
tgtccctctaggaaaatgga

SEQ ID NO: 9824 - DNA, 20 bp, synthetic construct
  misc_feature 1..20: note = Description of Artificial Sequence: Synthetic oligonucleotide
  misc_feature 1..20: note = Target: FXN; (-) strand; PAM type: NRG; PAM sequence: TGG
  source 1..20: mol_type = other DNA
gtcttgtccctctaggaaaa

SEQ ID NO: 9825 - DNA, 20 bp, synthetic construct
  misc_feature 1..20: note = Description of Artificial Sequence: Synthetic oligonucleotide
  misc_feature 1..20: note = Target: FXN; (-) strand; PAM type: NRG; PAM sequence: AGG
  source 1..20: mol_type = other DNA
ggtggtggtcttgtccctct

SEQ ID NO: 9826 - DNA, 20 bp, synthetic construct
  misc_feature 1..20: note = Description of Artificial Sequence: Synthetic oligonucleotide
  misc_feature 1..20: note = Target: FXN; (-) strand; PAM type: NRG; PAM sequence: TAG
  source 1..20: mol_type = other DNA
aggtggtggtcttgtccctc

SEQ ID NO: 9827 - DNA, 20 bp, synthetic construct
  misc_feature 1..20: note = Description of Artificial Sequence: Synthetic oligonucleotide
  misc_feature 1..20: note = Target: FXN; (-) strand; PAM type: NRG; PAM sequence: TGG
  source 1..20: mol_type = other DNA
ggtcataggatcacaggtgg

SEQ ID NO: 9828 - DNA, 20 bp, synthetic construct
  misc_feature 1..20: note = Description of Artificial Sequence: Synthetic oligonucleotide
  misc_feature 1..20: note = Target: FXN; (-) strand; PAM type: NRG; PAM sequence: TGG
  source 1..20: mol_type = other DNA
aaaggtcataggatcacagg

SEQ ID NO: 9829 - DNA, 20 bp, synthetic construct
  misc_feature 1..20: note = Description of Artificial Sequence: Synthetic oligonucleotide
  misc_feature 1..20: note = Target: FXN; (-) strand; PAM type: NRG; PAM sequence: AGG
  source 1..20: mol_type = other DNA
ccaaaaggtcataggatcac

SEQ ID NO: 9830 - DNA, 20 bp, synthetic construct
  misc_feature 1..20: note = Description of Artificial Sequence: Synthetic oligonucleotide
  misc_feature 1..20: note = Target: FXN; (-) strand; PAM type: NRG; PAM sequence: CAG
  source 1..20: mol_type = other DNA
gccaaaaggtcataggatca

SEQ ID NO: 9831 - DNA, 20 bp, synthetic construct
  misc_feature 1..20: note = Description of Artificial Sequence: Synthetic oligonucleotide
  misc_feature 1..20: note = Target: FXN; (-) strand; PAM type: NRG; PAM sequence: AGG
  source 1..20: mol_type = other DNA
gcctaaagccaaaaggtcat

SEQ ID NO: 9832 - DNA, 20 bp, synthetic construct
  misc_feature 1..20: note = Description of Artificial Sequence: Synthetic oligonucleotide
  misc_feature 1..20: note = Target: FXN; (-) strand; PAM type: NRG; PAM sequence: TAG
  source 1..20: mol_type = other DNA
ggcctaaagccaaaaggtca

SEQ ID NO: 9833 - DNA, 20 bp, synthetic construct
  misc_feature 1..20: note = Description of Artificial Sequence: Synthetic oligonucleotide
  misc_feature 1..20: note = Target: FXN; (-) strand; PAM type: NRG; PAM sequence: AGG
  source 1..20: mol_type = other DNA
ttgttaggcctaaagccaaa

SEQ ID NO: 9834 - DNA, 20 bp, synthetic construct
  misc_feature 1..20: note = Description of Artificial Sequence: Synthetic oligonucleotide
  misc_feature 1..20: note = Target: FXN; (-) strand; PAM type: NRG; PAM sequence: AAG
  source 1..20: mol_type = other DNA
cttgttaggcctaaagccaa

SEQ ID NO: 9835 - DNA, 20 bp, synthetic construct
  misc_feature 1..20: note = Description of Artificial Sequence: Synthetic oligonucleotide
  misc_feature 1..20: note = Target: FXN; (-) strand; PAM type: NRG; PAM sequence: AAG
  source 1..20: mol_type = other DNA
taacctgcttgttaggccta

SEQ ID NO: 9836 - DNA, 20 bp, synthetic construct
  misc_feature 1..20: note = Description of Artificial Sequence: Synthetic oligonucleotide
  misc_feature 1..20: note = Target: FXN; (-) strand; PAM type: NRG; PAM sequence: AGG
  source 1..20: mol_type = other DNA
gagggtataacctgcttgtt

SEQ ID NO: 9837 - DNA, 20 bp, synthetic construct
  misc_feature 1..20: note = Description of Artificial Sequence: Synthetic oligonucleotide
  misc_feature 1..20: note = Target: FXN; (-) strand; PAM type: NRG; PAM sequence: TAG
  source 1..20: mol_type = other DNA
tgagggtataacctgcttgt

SEQ ID NO: 9838 - DNA, 20 bp, synthetic construct
  misc_feature 1..20: note = Description of Artificial Sequence: Synthetic oligonucleotide
  misc_feature 1..20: note = Target: FXN; (-) strand; PAM type: NRG; PAM sequence: GGG
  source 1..20: mol_type = other DNA
aatgatttgaaagtgagtga

SEQ ID NO: 9839 - DNA, 20 bp, synthetic construct
  misc_feature 1..20: note = Description of Artificial Sequence: Synthetic oligonucleotide
  misc_feature 1..20: note = Target: FXN; (-) strand; PAM type: NRG; PAM sequence: AGG
  source 1..20: mol_type = other DNA
aaatgatttgaaagtgagtg

SEQ ID NO: 9840 - DNA, 20 bp, synthetic construct
  misc_feature 1..20: note = Description of Artificial Sequence: Synthetic oligonucleotide
  misc_feature 1..20: note = Target: FXN; (-) strand; PAM type: NRG; PAM sequence: GAG
  source 1..20: mol_type = other DNA
aaaatgatttgaaagtgagt

SEQ ID NO: 9841 - DNA, 20 bp, synthetic construct
  misc_feature 1..20: note = Description of Artificial Sequence: Synthetic oligonucleotide
  misc_feature 1..20: note = Target: FXN; (-) strand; PAM type: NRG; PAM sequence: GAG
  source 1..20: mol_type = other DNA
aataaaaatgatttgaaagt

SEQ ID NO: 9842 - DNA, 20 bp, synthetic construct
  misc_feature 1..20: note = Description of Artificial Sequence: Synthetic oligonucleotide
  misc_feature 1..20: note = Target: FXN; (-) strand; PAM type: NRG; PAM sequence: AAG
  source 1..20: mol_type = other DNA
agacaataaaaatgatttga

SEQ ID NO: 9843 - DNA, 20 bp, synthetic construct
  misc_feature 1..20: note = Description of Artificial Sequence: Synthetic oligonucleotide
  misc_feature 1..20: note = Target: FXN; (-) strand; PAM type: NRG; PAM sequence: AAG
  source 1..20: mol_type = other DNA
aacttgtgtaaattgtctgc

SEQ ID NO: 9844 - DNA, 20 bp, synthetic construct
  misc_feature 1..20: note = Description of Artificial Sequence: Synthetic oligonucleotide
  misc_feature 1..20: note = Target: FXN; (-) strand; PAM type: NRG; PAM sequence: CAG
  source 1..20: mol_type = other DNA
gcgtgagccaccgcgcccgg

SEQ ID NO: 9845 - DNA, 20 bp, synthetic construct
  misc_feature 1..20: note = Description of Artificial Sequence: Synthetic oligonucleotide
  misc_feature 1..20: note = Target: FXN; (-) strand; PAM type: NRG; PAM sequence: CGG
  source 1..20: mol_type = other DNA
caggcgtgagccaccgcgcc

SEQ ID NO: 9846 - DNA, 20 bp, synthetic construct
  misc_feature 1..20: note = Description of Artificial Sequence: Synthetic oligonucleotide
  misc_feature 1..20: note = Target: FXN; (-) strand; PAM type: NRG; PAM sequence: GAG
  source 1..20: mol_type = other DNA
agtgctgggattacaggcgt

SEQ ID NO: 9847 - DNA, 20 bp, synthetic construct
  misc_feature 1..20: note = Description of Artificial Sequence: Synthetic oligonucleotide
  misc_feature 1..20: note = Target: FXN; (-) strand; PAM type: NRG; PAM sequence: AGG
  source 1..20: mol_type = other DNA
tcccaaagtgctgggattac

SEQ ID NO: 9848 - DNA, 20 bp, synthetic construct
  misc_feature 1..20: note = Description of Artificial Sequence: Synthetic oligonucleotide
  misc_feature 1..20: note = Target: FXN; (-) strand; PAM type: NRG; PAM sequence: CAG
  source 1..20: mol_type = other DNA
ctcccaaagtgctgggatta

SEQ ID NO: 9849 - DNA, 20 bp, synthetic construct
  misc_feature 1..20: note = Description of Artificial Sequence: Synthetic oligonucleotide
  misc_feature 1..20: note = Target: FXN; (-) strand; PAM type: NRG; PAM sequence: GGG
  source 1..20: mol_type = other DNA
cctcggcctcccaaagtgct

SEQ ID NO: 9850 - DNA, 20 bp, synthetic construct
  misc_feature 1..20: note = Description of Artificial Sequence: Synthetic oligonucleotide
  misc_feature 1..20: note = Target: FXN; (-) strand; PAM type: NRG; PAM sequence: TGG
  source 1..20: mol_type = other DNA
gcctcggcctcccaaagtgc

SEQ ID NO: 9851 - DNA, 20 bp, synthetic construct
  misc_feature 1..20: note = Description of Artificial Sequence: Synthetic oligonucleotide
  misc_feature 1..20: note = Target: FXN; (-) strand; PAM type: NRG; PAM sequence: AAG
  source 1..20: mol_type = other DNA
ccacctgcctcggcctccca

SEQ ID NO: 9852 - DNA, 20 bp, synthetic construct
  misc_feature 1..20: note = Description of Artificial Sequence: Synthetic oligonucleotide
  misc_feature 1..20: note = Target: FXN; (-) strand; PAM type: NRG; PAM sequence: CGG
  source 1..20: mol_type = other DNA
aactcgtgatccacctgcct

SEQ ID NO: 9853 - DNA, 20 bp, synthetic construct
  misc_feature 1..20: note = Description of Artificial Sequence: Synthetic oligonucleotide
  misc_feature 1..20: note = Target: FXN; (-) strand; PAM type: NRG; PAM sequence: TGG
  source 1..20: mol_type = other DNA
tttcatcgtattagccagga

SEQ ID NO: 9854 - DNA, 20 bp, synthetic construct
  misc_feature 1..20: note = Description of Artificial Sequence: Synthetic oligonucleotide
  misc_feature 1..20: note = Target: FXN; (-) strand; PAM type: NRG; PAM sequence: AGG
  source 1..20: mol_type = other DNA
ggggtttcatcgtattagcc

SEQ ID NO: 9855 - DNA, 20 bp, synthetic construct
  misc_feature 1..20: note = Description of Artificial Sequence: Synthetic oligonucleotide
  misc_feature 1..20: note = Target: FXN; (-) strand; PAM type: NRG; PAM sequence: CAG
  source 1..20: mol_type = other DNA
tggggtttcatcgtattagc

SEQ ID NO: 9856 - DNA, 20 bp, synthetic construct
  misc_feature 1..20: note = Description of Artificial Sequence: Synthetic oligonucleotide
  misc_feature 1..20: note = Target: FXN; (-) strand; PAM type: NRG; PAM sequence: TAG
  source 1..20: mol_type = other DNA
gagatggggtttcatcgtat

SEQ ID NO: 9857 - DNA, 20 bp, synthetic construct
  misc_feature 1..20: note = Description of Artificial Sequence: Synthetic oligonucleotide
  misc_feature 1..20: note = Target: FXN; (-) strand; PAM type: NRG; PAM sequence: GGG
  source 1..20: mol_type = other DNA
ttgtatttttagtagagatg

SEQ ID NO: 9858 - DNA, 20 bp, synthetic construct
  misc_feature 1..20: note = Description of Artificial Sequence: Synthetic oligonucleotide
  misc_feature 1..20: note = Target: FXN; (-) strand; PAM type: NRG; PAM sequence: GGG
  source 1..20: mol_type = other DNA
tttgtatttttagtagagat

SEQ ID NO: 9859 - DNA, 20 bp, synthetic construct
  misc_feature 1..20: note = Description of Artificial Sequence: Synthetic oligonucleotide
  misc_feature 1..20: note = Target: FXN; (-) strand; PAM type: NRG; PAM sequence: TGG
  source 1..20: mol_type = other DNA
ttttgtatttttagtagaga

SEQ ID NO: 9860 - DNA, 20 bp, synthetic construct
  misc_feature 1..20: note = Description of Artificial Sequence: Synthetic oligonucleotide
  misc_feature 1..20: note = Target: FXN; (-) strand; PAM type: NRG; PAM sequence: GAG
  source 1..20: mol_type = other DNA
aattttttgtatttttagta

SEQ ID NO: 9861 - DNA, 20 bp, synthetic construct
  misc_feature 1..20: note = Description of Artificial Sequence: Synthetic oligonucleotide
  misc_feature 1..20: note = Target: FXN; (-) strand; PAM type: NRG; PAM sequence: TAG
  source 1..20: mol_type = other DNA
ctaattttttgtatttttag

SEQ ID NO: 9862 - DNA, 20 bp, synthetic construct
  misc_feature 1..20: note = Description of Artificial Sequence: Synthetic oligonucleotide
  misc_feature 1..20: note = Target: FXN; (-) strand; PAM type: NRG; PAM sequence: TAG
  source 1..20: mol_type = other DNA
cggctaattttttgtatttt

SEQ ID NO: 9863 - DNA, 20 bp, synthetic construct
  misc_feature 1..20: note = Description of Artificial Sequence: Synthetic oligonucleotide
  misc_feature 1..20: note = Target: FXN; (-) strand; PAM type: NRG; PAM sequence: CGG
  source 1..20: mol_type = other DNA
caggcacccgtcaccacgcc

SEQ ID NO: 9864 - DNA, 20 bp, synthetic construct
  misc_feature 1..20: note = Description of Artificial Sequence: Synthetic oligonucleotide
  misc_feature 1..20: note = Target: FXN; (-) strand; PAM type: NRG; PAM sequence: AGG
  source 1..20: mol_type = other DNA
tcccgagtagtggggactac

SEQ ID NO: 9865 - DNA, 20 bp, synthetic construct
  misc_feature 1..20: note = Description of Artificial Sequence: Synthetic oligonucleotide
  misc_feature 1..20: note = Target: FXN; (-) strand; PAM type: NRG; PAM sequence: CAG
  source 1..20: mol_type = other DNA
gtcccgagtagtggggacta

SEQ ID NO: 9866 - DNA, 20 bp, synthetic construct
  misc_feature 1..20: note = Description of Artificial Sequence: Synthetic oligonucleotide
  misc_feature 1..20: note = Target: FXN; (-) strand; PAM type: NRG; PAM sequence: GGG
  source 1..20: mol_type = other DNA
cctcagcgtcccgagtagtg

SEQ ID NO: 9867 - DNA, 20 bp, synthetic construct
  misc_feature 1..20: note = Description of Artificial Sequence: Synthetic oligonucleotide
  misc_feature 1..20: note = Target: FXN; (-) strand; PAM type: NRG; PAM sequence: GGG
  source 1..20: mol_type = other DNA
gcctcagcgtcccgagtagt

SEQ ID NO: 9868 - DNA, 20 bp, synthetic construct
  misc_feature 1..20: note = Description of Artificial Sequence: Synthetic oligonucleotide
  misc_feature 1..20: note = Target: FXN; (-) strand; PAM type: NRG; PAM sequence: TGG
  source 1..20: mol_type = other DNA
tgcctcagcgtcccgagtag

SEQ ID NO: 9869 - DNA, 20 bp, synthetic construct
  misc_feature 1..20: note = Description of Artificial Sequence: Synthetic oligonucleotide
  misc_feature 1..20: note = Target: FXN; (-) strand; PAM type: NRG; PAM sequence: TAG
  source 1..20: mol_type = other DNA
tcctgcctcagcgtcccgag

SEQ ID NO: 9870 - DNA, 20 bp, synthetic construct
  misc_feature 1..20: note = Description of Artificial Sequence: Synthetic oligonucleotide
  misc_feature 1..20: note = Target: FXN; (-) strand; PAM type: NRG; PAM sequence: GAG
  source 1..20: mol_type = other DNA
ttctcctgcctcagcgtccc

SEQ ID NO: 9871 - DNA, 20 bp, synthetic construct
  misc_feature 1..20: note = Description of Artificial Sequence: Synthetic oligonucleotide
  misc_feature 1..20: note = Target: FXN; (-) strand; PAM type: NRG; PAM sequence: CAG
  source 1..20: mol_type = other DNA
ttcacgccattctcctgcct

SEQ ID NO: 9872 - DNA, 20 bp, synthetic construct
  misc_feature 1..20: note = Description of Artificial Sequence: Synthetic oligonucleotide
  misc_feature 1..20: note = Target: FXN; (-) strand; PAM type: NRG; PAM sequence: GGG
  source 1..20: mol_type = other DNA
cactgcaagctctgcctccc

SEQ ID NO: 9873 - DNA, 20 bp, synthetic construct
  misc_feature 1..20: note = Description of Artificial Sequence: Synthetic oligonucleotide
  misc_feature 1..20: note = Target: FXN; (-) strand; PAM type: NRG; PAM sequence: CGG
  source 1..20: mol_type = other DNA
tcactgcaagctctgcctcc

SEQ ID NO: 9874 - DNA, 20 bp, synthetic construct
  misc_feature 1..20: note = Description of Artificial Sequence: Synthetic oligonucleotide
  misc_feature 1..20: note = Target: FXN; (-) strand; PAM type: NRG; PAM sequence: AAG
  source 1..20: mol_type = other DNA
gcacgatctcggatcactgc

SEQ ID NO: 9875 - DNA, 20 bp, synthetic construct
  misc_feature 1..20: note = Description of Artificial Sequence: Synthetic oligonucleotide
  misc_feature 1..20: note = Target: FXN; (-) strand; PAM type: NRG; PAM sequence: CGG
  source 1..20: mol_type = other DNA
ggagtgcagtggcacgatct

SEQ ID NO: 9876 - DNA, 20 bp, synthetic construct
  misc_feature 1..20: note = Description of Artificial Sequence: Synthetic oligonucleotide
  misc_feature 1..20: note = Target: FXN; (-) strand; PAM type: NRG; PAM sequence: TGG
  source 1..20: mol_type = other DNA
tcacccaggctggagtgcag

SEQ ID NO: 9877 - DNA, 20 bp, synthetic construct
  misc_feature 1..20: note = Description of Artificial Sequence: Synthetic oligonucleotide
  misc_feature 1..20: note = Target: FXN; (-) strand; PAM type: NRG; PAM sequence: CAG
  source 1..20: mol_type = other DNA
ctgtcacccaggctggagtg

SEQ ID NO: 9878 - DNA, 20 bp, synthetic construct
  misc_feature 1..20: note = Description of Artificial Sequence: Synthetic oligonucleotide
  misc_feature 1..20: note = Target: FXN; (-) strand; PAM type: NRG; PAM sequence: GAG
  source 1..20: mol_type = other DNA
tcgctctgtcacccaggctg

SEQ ID NO: 9879 - DNA, 20 bp, synthetic construct
  misc_feature 1..20: note = Description of Artificial Sequence: Synthetic oligonucleotide
  misc_feature 1..20: note = Target: FXN; (-) strand; PAM type: NRG; PAM sequence: TGG
  source 1..20: mol_type = other DNA
tctcgctctgtcacccaggc

SEQ ID NO: 9880 - DNA, 20 bp, synthetic construct
  misc_feature 1..20: note = Description of Artificial Sequence: Synthetic oligonucleotide
  misc_feature 1..20: note = Target: FXN; (-) strand; PAM type: NRG; PAM sequence: AGG
  source 1..20: mol_type = other DNA
gcagtctcgctctgtcaccc

SEQ ID NO: 9881 - DNA, 20 bp, synthetic construct
  misc_feature 1..20: note = Description of Artificial Sequence: Synthetic oligonucleotide
  misc_feature 1..20: note = Target: FXN; (-) strand; PAM type: NRG; PAM sequence: CAG
  source 1..20: mol_type = other DNA
tgcagtctcgctctgtcacc

SEQ ID NO: 9882 - DNA, 20 bp, synthetic construct
  misc_feature 1..20: note = Description of Artificial Sequence: Synthetic oligonucleotide
  misc_feature 1..20: note = Target: FXN; (-) strand; PAM type: NRG; PAM sequence: CAG
  source 1..20: mol_type = other DNA
ttatttttttctttgagatg

SEQ ID NO: 9883 - DNA, 20 bp, synthetic construct
  misc_feature 1..20: note = Description of Artificial Sequence: Synthetic oligonucleotide
  misc_feature 1..20: note = Target: FXN; (-) strand; PAM type: NRG; PAM sequence: GAG
  source 1..20: mol_type = other DNA
atttatttatttttttcttt

SEQ ID NO: 9884 - DNA, 20 bp, synthetic construct
  misc_feature 1..20: note = Description of Artificial Sequence: Synthetic oligonucleotide
  misc_feature 1..20: note = Target: FXN; (-) strand; PAM type: NRG; PAM sequence: CAG
  source 1..20: mol_type = other DNA
atttattattagtttataag

SEQ ID NO: 9885 - DNA, 20 bp, synthetic construct
  misc_feature 1..20: note = Description of Artificial Sequence: Synthetic oligonucleotide
  misc_feature 1..20: note = Target: FXN; (-) strand; PAM type: NRG; PAM sequence: AAG
  source 1..20: mol_type = other DNA
agcatttattattagtttat

SEQ ID NO: 9886 - DNA, 20 bp, synthetic construct
  misc_feature 1..20: note = Description of Artificial Sequence: Synthetic oligonucleotide
  misc_feature 1..20: note = Target: FXN; (-) strand; PAM type: NRG; PAM sequence: TAG
  source 1..20: mol_type = other DNA
cagaccatagcatttattat

SEQ ID NO: 9887 - DNA, 20 bp, synthetic construct
  misc_feature 1..20: note = Description of Artificial Sequence: Synthetic oligonucleotide
  misc_feature 1..20: note = Target: FXN; (-) strand; PAM type: NRG; PAM sequence: TAG
  source 1..20: mol_type = other DNA
tgacacaaacatgcagacca

SEQ ID NO: 9888 - DNA, 20 bp, synthetic construct
  misc_feature 1..20: note = Description of Artificial Sequence: Synthetic oligonucleotide
  misc_feature 1..20: note = Target: FXN; (-) strand; PAM type: NRG; PAM sequence: CAG
  source 1..20: mol_type = other DNA
ggtggggtgacacaaacatg

SEQ ID NO: 9889 - DNA, 20 bp, synthetic construct
  misc_feature 1..20: note = Description of Artificial Sequence: Synthetic oligonucleotide
  misc_feature 1..20: note = Target: FXN; (-) strand; PAM type: NRG; PAM sequence: GGG
  source 1..20: mol_type = other DNA
gttttaacatatgaatggtg

SEQ ID NO: 9890 - DNA, 20 bp, synthetic construct
  misc_feature 1..20: note = Description of Artificial Sequence: Synthetic oligonucleotide
  misc_feature 1..20: note = Target: FXN; (-) strand; PAM type: NRG; PAM sequence: GGG
  source 1..20: mol_type = other DNA
ggttttaacatatgaatggt

SEQ ID NO: 9891 - DNA, 20 bp, synthetic construct
  misc_feature 1..20: note = Description of Artificial Sequence: Synthetic oligonucleotide
  misc_feature 1..20: note = Target: FXN; (-) strand; PAM type: NRG; PAM sequence: TGG
  source 1..20: mol_type = other DNA
aggttttaacatatgaatgg

SEQ ID NO: 9892 - DNA, 20 bp, synthetic construct
  misc_feature 1..20: note = Description of Artificial Sequence: Synthetic oligonucleotide
  misc_feature 1..20: note = Target: FXN; (-) strand; PAM type: NRG; PAM sequence: TGG
  source 1..20: mol_type = other DNA
attaggttttaacatatgaa

SEQ ID NO: 9893 - DNA, 20 bp, synthetic construct
  misc_feature 1..20: note = Description of Artificial Sequence: Synthetic oligonucleotide
  misc_feature 1..20: note = Target: FXN; (-) strand; PAM type: NRG; PAM sequence: AGG
  source 1..20: mol_type = other DNA
ctaatatcactttggtgatt

SEQ ID NO: 9894 - DNA, 20 bp, synthetic construct
  misc_feature 1..20: note = Description of Artificial Sequence: Synthetic oligonucleotide
  misc_feature 1..20: note = Target: FXN; (-) strand; PAM type: NRG; PAM sequence: TAG
  source 1..20: mol_type = other DNA
cctaatatcactttggtgat

SEQ ID NO: 9895 - DNA, 20 bp, synthetic construct
  misc_feature 1..20: note = Description of Artificial Sequence: Synthetic oligonucleotide
  misc_feature 1..20: note = Target: FXN; (-) strand; PAM type: NRG; PAM sequence: TGG
  source 1..20: mol_type = other DNA
cccacctcctaatatcactt

SEQ ID NO: 9896 - DNA, 20 bp, synthetic construct
  misc_feature 1..20: note = Description of Artificial Sequence: Synthetic oligonucleotide
  misc_feature 1..20: note = Target: FXN; (-) strand; PAM type: NRG; PAM sequence: GGG
  source 1..20: mol_type = other DNA
catacctcatcacctcccaa

SEQ ID NO: 9897 - DNA, 20 bp, synthetic construct
  misc_feature 1..20: note = Description of Artificial Sequence: Synthetic oligonucleotide
  misc_feature 1..20: note = Target: FXN; (-) strand; PAM type: NRG; PAM sequence: AGG
  source 1..20: mol_type = other DNA
tcatacctcatcacctccca

SEQ ID NO: 9898 - DNA, 20 bp, synthetic construct
  misc_feature 1..20: note = Description of Artificial Sequence: Synthetic oligonucleotide
  misc_feature 1..20: note = Target: FXN; (-) strand; PAM type: NRG; PAM sequence: AAG
  source 1..20: mol_type = other DNA
ctcatacctcatcacctccc

SEQ ID NO: 9899 - DNA, 20 bp, synthetic construct
  misc_feature 1..20: note = Description of Artificial Sequence: Synthetic oligonucleotide
  misc_feature 1..20: note = Target: FXN; (-) strand; PAM type: NRG; PAM sequence: GGG
  source 1..20: mol_type = other DNA
ggcactaatcccaatcatat

SEQ ID NO: 9900 - DNA, 20 bp, synthetic construct
  misc_feature 1..20: note = Description of Artificial Sequence: Synthetic oligonucleotide
  misc_feature 1..20: note = Target: FXN; (-) strand; PAM type: NRG; PAM sequence: TGG
  source 1..20: mol_type = other DNA
gggcactaatcccaatcata

SEQ ID NO: 9901 - DNA, 20 bp, synthetic construct
  misc_feature 1..20: note = Description of Artificial Sequence: Synthetic oligonucleotide
  misc_feature 1..20: note = Target: FXN; (-) strand; PAM type: NRG; PAM sequence: GGG
  source 1..20: mol_type = other DNA
tccgttgggctattttagaa

SEQ ID NO: 9902 - DNA, 20 bp, synthetic construct
  misc_feature 1..20: note = Description of Artificial Sequence: Synthetic oligonucleotide
  misc_feature 1..20: note = Target: FXN; (-) strand; PAM type: NRG; PAM sequence: AGG
  source 1..20: mol_type = other DNA
ctccgttgggctattttaga

SEQ ID NO: 9903 - DNA, 20 bp, synthetic construct
  misc_feature 1..20: note = Description of Artificial Sequence: Synthetic oligonucleotide
  misc_feature 1..20: note = Target: FXN; (-) strand; PAM type: NRG; PAM sequence: AAG
  source 1..20: mol_type = other DNA
gctccgttgggctattttag

SEQ ID NO: 9904 - DNA, 20 bp, synthetic construct
  misc_feature 1..20: note = Description of Artificial Sequence: Synthetic oligonucleotide
  misc_feature 1..20: note = Target: FXN; (-) strand; PAM type: NRG; PAM sequence: TAG
  source 1..20: mol_type = other DNA
tgggctccgttgggctattt

SEQ ID NO: 9905 - DNA, 20 bp, synthetic construct
  misc_feature 1..20: note = Description of Artificial Sequence: Synthetic oligonucleotide
  misc_feature 1..20: note = Target: FXN; (-) strand; PAM type: NRG; PAM sequence: GGG
  source 1..20: mol_type = other DNA
ccttgtcactgggctccgtt

SEQ ID NO: 9906 - DNA, 20 bp, synthetic construct
  misc_feature 1..20: note = Description of Artificial Sequence: Synthetic oligonucleotide
  misc_feature 1..20: note = Target: FXN; (-) strand; PAM type: NRG; PAM sequence: TGG
  source 1..20: mol_type = other DNA
gccttgtcactgggctccgt

SEQ ID NO: 9907 - DNA, 20 bp, synthetic construct
  misc_feature 1..20: note = Description of Artificial Sequence: Synthetic oligonucleotide
  misc_feature 1..20: note = Target: FXN; (-) strand; PAM type: NRG; PAM sequence: GGG
  source 1..20: mol_type = other DNA
atagatgatgccttgtcact

SEQ ID NO: 9908 - DNA, 20 bp, synthetic construct
  misc_feature 1..20: note = Description of Artificial Sequence: Synthetic oligonucleotide
  misc_feature 1..20: note = Target: FXN; (-) strand; PAM type: NRG; PAM sequence: TGG
  source 1..20: mol_type = other DNA
catagatgatgccttgtcac

SEQ ID NO: 9909 - DNA, 20 bp, synthetic construct
  misc_feature 1..20: note = Description of Artificial Sequence: Synthetic oligonucleotide
  misc_feature 1..20: note = Target: FXN; (-) strand; PAM type: NRG; PAM sequence: TAG
  source 1..20: mol_type = other DNA
agggccagtttcctggttca

SEQ ID NO: 9910 - DNA, 20 bp, synthetic construct
  misc_feature 1..20: note = Description of Artificial Sequence: Synthetic oligonucleotide
  misc_feature 1..20: note = Target: FXN; (-) strand; PAM type: NRG; PAM sequence: TGG
  source 1..20: mol_type = other DNA
tctggtgagggccagtttcc

SEQ ID NO: 9911 - DNA, 20 bp, synthetic construct
  misc_feature 1..20: note = Description of Artificial Sequence: Synthetic oligonucleotide
  misc_feature 1..20: note = Target: FXN; (-) strand; PAM type: NRG; PAM sequence: CAG
  source 1..20: mol_type = other DNA
ctttggtgtctggtgagggc

SEQ ID NO: 9912 - DNA, 20 bp, synthetic construct
  misc_feature 1..20: note = Description of Artificial Sequence: Synthetic oligonucleotide
  misc_feature 1..20: note = Target: FXN; (-) strand; PAM type: NRG; PAM sequence: GGG
  source 1..20: mol_type = other DNA
acagctttggtgtctggtga

SEQ ID NO: 9913 - DNA, 20 bp, synthetic construct
  misc_feature 1..20: note = Description of Artificial Sequence: Synthetic oligonucleotide
  misc_feature 1..20: note = Target: FXN; (-) strand; PAM type: NRG; PAM sequence: AGG
  source 1..20: mol_type = other DNA
aacagctttggtgtctggtg

SEQ ID NO: 9914 - DNA, 20 bp, synthetic construct
  misc_feature 1..20: note = Description of Artificial Sequence: Synthetic oligonucleotide
  misc_feature 1..20: note = Target: FXN; (-) strand; PAM type: NRG; PAM sequence: GAG
  source 1..20: mol_type = other DNA
caacagctttggtgtctggt

SEQ ID NO: 9915 - DNA, 20 bp, synthetic construct
  misc_feature 1..20: note = Description of Artificial Sequence: Synthetic oligonucleotide
  misc_feature 1..20: note = Target: FXN; (-) strand; PAM type: NRG; PAM sequence: TGG
  source 1..20: mol_type = other DNA
gcaccaacagctttggtgtc

SEQ ID NO: 9916 - DNA, 20 bp, synthetic construct
  misc_feature 1..20: note = Description of Artificial Sequence: Synthetic oligonucleotide
  misc_feature 1..20: note = Target: FXN; (-) strand; PAM type: NRG; PAM sequence: TGG
  source 1..20: mol_type = other DNA
gatcaatgcaccaacagctt

SEQ ID NO: 9917 - DNA, 20 bp, synthetic construct
  misc_feature 1..20: note = Description of Artificial Sequence: Synthetic oligonucleotide
  misc_feature 1..20: note = Target: FXN; (-) strand; PAM type: NRG; PAM sequence: CAG
  source 1..20: mol_type = other DNA
atccaagatcaatgcaccaa

SEQ ID NO: 9918 - DNA, 20 bp, synthetic construct
  misc_feature 1..20: note = Description of Artificial Sequence: Synthetic oligonucleotide
  misc_feature 1..20: note = Target: FXN; (-) strand; PAM type: NRG; PAM sequence: AAG
  source 1..20: mol_type = other DNA
tcctggagggtgggaaatcc

SEQ ID NO: 9919 - DNA, 20 bp, synthetic construct
  misc_feature 1..20: note = Description of Artificial Sequence: Synthetic oligonucleotide
  misc_feature 1..20: note = Target: FXN; (-) strand; PAM type: NRG; PAM sequence: GGG
  source 1..20: mol_type = other DNA
ttcttagagtcctggagggt

SEQ ID NO: 9920 - DNA, 20 bp, synthetic construct
  misc_feature 1..20: note = Description of Artificial Sequence: Synthetic oligonucleotide
  misc_feature 1..20: note = Target: FXN; (-) strand; PAM type: NRG; PAM sequence: TGG
  source 1..20: mol_type = other DNA
tttcttagagtcctggaggg

SEQ ID NO: 9921 - DNA, 20 bp, synthetic construct
  misc_feature 1..20: note = Description of Artificial Sequence: Synthetic oligonucleotide
  misc_feature 1..20: note = Target: FXN; (-) strand; PAM type: NRG; PAM sequence: GGG
  source 1..20: mol_type = other DNA
gtgtttcttagagtcctgga

SEQ ID NO: 9922 - DNA, 20 bp, synthetic construct
  misc_feature 1..20: note = Description of Artificial Sequence: Synthetic oligonucleotide
  misc_feature 1..20: note = Target: FXN; (-) strand; PAM type: NRG; PAM sequence: AGG
  source 1..20: mol_type = other DNA
tgtgtttcttagagtcctgg

SEQ ID NO: 9923 - DNA, 20 bp, synthetic construct
  misc_feature 1..20: note = Description of Artificial Sequence: Synthetic oligonucleotide
  misc_feature 1..20: note = Target: FXN; (-) strand; PAM type: NRG; PAM sequence: GAG
  source 1..20: mol_type = other DNA
atgtgtttcttagagtcctg

SEQ ID NO: 9924 - DNA, 20 bp, synthetic construct
  misc_feature 1..20: note = Description of Artificial Sequence: Synthetic oligonucleotide
  misc_feature 1..20: note = Target: FXN; (-) strand; PAM type: NRG; PAM sequence: TGG
  source 1..20: mol_type = other DNA
aaatgtgtttcttagagtcc

SEQ ID NO: 9925 - DNA, 20 bp, synthetic construct
  misc_feature 1..20: note = Description of Artificial Sequence: Synthetic oligonucleotide
  misc_feature 1..20: note = Target: FXN; (-) strand; PAM type: NRG; PAM sequence: GAG
  source 1..20: mol_type = other DNA
caatagaaatgtgtttctta

SEQ ID NO: 9926 - DNA, 20 bp, synthetic construct
  misc_feature 1..20: note = Description of Artificial Sequence: Synthetic oligonucleotide
  misc_feature 1..20: note = Target: FXN; (-) strand; PAM type: NRG; PAM sequence: TAG
  source 1..20: mol_type = other DNA
aacaatagaaatgtgtttct

SEQ ID NO: 9927 - DNA, 20 bp, synthetic construct
  misc_feature 1..20: note = Description of Artificial Sequence: Synthetic oligonucleotide
  misc_feature 1..20: note = Target: FXN; (-) strand; PAM type: NRG; PAM sequence: TAG
  source 1..20: mol_type = other DNA
actgggtggcttataaacaa

SEQ ID NO: 9928 - DNA, 20 bp, synthetic construct
  misc_feature 1..20: note = Description of Artificial Sequence: Synthetic oligonucleotide
  misc_feature 1..20: note = Target: FXN; (-) strand; PAM type: NRG; PAM sequence: TGG
  source 1..20: mol_type = other DNA
acaaaataccagccactggg

SEQ ID NO: 9929 - DNA, 20 bp, synthetic construct
  misc_feature 1..20: note = Description of Artificial Sequence: Synthetic oligonucleotide
  misc_feature 1..20: note = Target: FXN; (-) strand; PAM type: NRG; PAM sequence: GGG
  source 1..20: mol_type = other DNA
ataacaaaataccagccact

SEQ ID NO: 9930 - DNA, 20 bp, synthetic construct
  misc_feature 1..20: note = Description of Artificial Sequence: Synthetic oligonucleotide
  misc_feature 1..20: note = Target: FXN; (-) strand; PAM type: NRG; PAM sequence: TGG
  source 1..20: mol_type = other DNA
tataacaaaataccagccac

SEQ ID NO: 9931 - DNA, 20 bp, synthetic construct
  misc_feature 1..20: note = Description of Artificial Sequence: Synthetic oligonucleotide
  misc_feature 1..20: note = Target: FXN; (-) strand; PAM type: NRG; PAM sequence: CAG
  source 1..20: mol_type = other DNA
gggatgttataacaaaatac

SEQ ID NO: 9932 - DNA, 20 bp, synthetic construct
  misc_feature 1..20: note = Description of Artificial Sequence: Synthetic oligonucleotide
  misc_feature 1..20: note = Target: FXN; (-) strand; PAM type: NRG; PAM sequence: GGG
  source 1..20: mol_type = other DNA
tttgttatttgtcttagtct

SEQ ID NO: 9933 - DNA, 20 bp, synthetic construct
  misc_feature 1..20: note = Description of Artificial Sequence: Synthetic oligonucleotide
  misc_feature 1..20: note = Target: FXN; (-) strand; PAM type: NRG; PAM sequence: TGG
  source 1..20: mol_type = other DNA
atttgttatttgtcttagtc

SEQ ID NO: 9934 - DNA, 20 bp, synthetic construct
  misc_feature 1..20: note = Description of Artificial Sequence: Synthetic oligonucleotide
  misc_feature 1..20: note = Target: FXN; (-) strand; PAM type: NRG; PAM sequence: TAG
  source 1..20: mol_type = other DNA
caagtatttgttatttgtct

SEQ ID NO: 9935 - DNA, 20 bp, synthetic construct
  misc_feature 1..20: note = Description of Artificial Sequence: Synthetic oligonucleotide
  misc_feature 1..20: note = Target: FXN; (-) strand; PAM type: NRG; PAM sequence: AAG
  source 1..20: mol_type = other DNA
taacctggtgtcagggatac

SEQ ID NO: 9936 - DNA, 20 bp, synthetic construct
  misc_feature 1..20: note = Description of Artificial Sequence: Synthetic oligonucleotide
  misc_feature 1..20: note = Target: FXN; (-) strand; PAM type: NRG; PAM sequence: GGG
  source 1..20: mol_type = other DNA
tatctcttaacctggtgtca

SEQ ID NO: 9937 - DNA, 20 bp, synthetic construct
  misc_feature 1..20: note = Description of Artificial Sequence: Synthetic oligonucleotide
  misc_feature 1..20: note = Target: FXN; (-) strand; PAM type: NRG; PAM sequence: AGG
  source 1..20: mol_type = other DNA
ctatctcttaacctggtgtc

SEQ ID NO: 9938 - DNA, 20 bp, synthetic construct
  misc_feature 1..20: note = Description of Artificial Sequence: Synthetic oligonucleotide
  misc_feature 1..20: note = Target: FXN; (-) strand; PAM type: NRG; PAM sequence: CAG
  source 1..20: mol_type = other DNA
tctatctcttaacctggtgt

SEQ ID NO: 9939 - DNA, 20 bp, synthetic construct
  misc_feature 1..20: note = Description of Artificial Sequence: Synthetic oligonucleotide
  misc_feature 1..20: note = Target: FXN; (-) strand; PAM type: NRG; PAM sequence: TGG
  source 1..20: mol_type = other DNA
acaaattctatctcttaacc

SEQ ID NO: 9940 - DNA, 20 bp, synthetic construct
  misc_feature 1..20: note = Description of Artificial Sequence: Synthetic oligonucleotide
  misc_feature 1..20: note = Target: FXN; (-) strand; PAM type: NRG; PAM sequence: AGG
  source 1..20: mol_type = other DNA
gtgaagacaagggcctccag

SEQ ID NO: 9941 - DNA, 20 bp, synthetic construct
  misc_feature 1..20: note = Description of Artificial Sequence: Synthetic oligonucleotide
  misc_feature 1..20: note = Target: FXN; (-) strand; PAM type: NRG; PAM sequence: GAG
  source 1..20: mol_type = other DNA
ggtgaagacaagggcctcca

SEQ ID NO: 9942 - DNA, 20 bp, synthetic construct
  misc_feature 1..20: note = Description of Artificial Sequence: Synthetic oligonucleotide
  misc_feature 1..20: note = Target: FXN; (-) strand; PAM type: NRG; PAM sequence: CAG
  source 1..20: mol_type = other DNA
ggggtgaagacaagggcctc

SEQ ID NO: 9943 - DNA, 20 bp, synthetic construct
  misc_feature 1..20: note = Description of Artificial Sequence: Synthetic oligonucleotide
  misc_feature 1..20: note = Target: FXN; (-) strand; PAM type: NRG; PAM sequence: GGG
  source 1..20: mol_type = other DNA
cagtgatggggtgaagacaa

SEQ ID NO: 9944 - DNA, 20 bp, synthetic construct
  misc_feature 1..20: note = Description of Artificial Sequence: Synthetic oligonucleotide
  misc_feature 1..20: note = Target: FXN; (-) strand; PAM type: NRG; PAM sequence: AGG
  source 1..20: mol_type = other DNA
gcagtgatggggtgaagaca

SEQ ID NO: 9945 - DNA, 20 bp, synthetic construct
  misc_feature 1..20: note = Description of Artificial Sequence: Synthetic oligonucleotide
  misc_feature 1..20: note = Target: FXN; (-) strand; PAM type: NRG; PAM sequence: AAG
  source 1..20: mol_type = other DNA
ggcagtgatggggtgaagac

SEQ ID NO: 9946 - DNA, 20 bp, synthetic construct
  misc_feature 1..20: note = Description of Artificial Sequence: Synthetic oligonucleotide
  misc_feature 1..20: note = Target: FXN; (-) strand; PAM type: NRG; PAM sequence: AAG
  source 1..20: mol_type = other DNA
gacagggcagtgatggggtg

SEQ ID NO: 9947 - DNA, 20 bp, synthetic construct
  misc_feature 1..20: note = Description of Artificial Sequence: Synthetic oligonucleotide
  misc_feature 1..20: note = Target: FXN; (-) strand; PAM type: NRG; PAM sequence: GGG
  source 1..20: mol_type = other DNA
gggaggacagggcagtgatg

SEQ ID NO: 9948 - DNA, 20 bp, synthetic construct
  misc_feature 1..20: note = Description of Artificial Sequence: Synthetic oligonucleotide
  misc_feature 1..20: note = Target: FXN; (-) strand; PAM type: NRG; PAM sequence: GGG
  source 1..20: mol_type = other DNA
agggaggacagggcagtgat

SEQ ID NO: 9949 - DNA, 20 bp, synthetic construct
  misc_feature 1..20: note = Description of Artificial Sequence: Synthetic oligonucleotide
  misc_feature 1..20: note = Target: FXN; (-) strand; PAM type: NRG; PAM sequence: TGG
  source 1..20: mol_type = other DNA
cagggaggacagggcagtga

SEQ ID NO: 9950 - DNA, 20 bp, synthetic construct
  misc_feature 1..20: note = Description of Artificial Sequence: Synthetic oligonucleotide
  misc_feature 1..20: note = Target: FXN; (-) strand; PAM type: NRG; PAM sequence: CAG
  source 1..20: mol_type = other DNA
ttcctccagggaggacaggg

SEQ ID NO: 9951 - DNA, 20 bp, synthetic construct
  misc_feature 1..20: note = Description of Artificial Sequence: Synthetic oligonucleotide
  misc_feature 1..20: note = Target: FXN; (-) strand; PAM type: NRG; PAM sequence: GGG
  source 1..20: mol_type = other DNA
agattcctccagggaggaca

SEQ ID NO: 9952 - DNA, 20 bp, synthetic construct
  misc_feature 1..20: note = Description of Artificial Sequence: Synthetic oligonucleotide
  misc_feature 1..20: note = Target: FXN; (-) strand; PAM type: NRG; PAM sequence: AGG
  source 1..20: mol_type = other DNA
cagattcctccagggaggac

SEQ ID NO: 9953 - DNA, 20 bp, synthetic construct
  misc_feature 1..20: note = Description of Artificial Sequence: Synthetic oligonucleotide
  misc_feature 1..20: note = Target: FXN; (-) strand; PAM type: NRG; PAM sequence: CAG
  source 1..20: mol_type = other DNA
gcagattcctccagggagga

SEQ ID NO: 9954 - DNA, 20 bp, synthetic construct
  misc_feature 1..20: note = Description of Artificial Sequence: Synthetic oligonucleotide
  misc_feature 1..20: note = Target: FXN; (-) strand; PAM type: NRG; PAM sequence: AGG
  source 1..20: mol_type = other DNA
gctggcagattcctccaggg

SEQ ID NO: 9955 - DNA, 20 bp, synthetic construct
  misc_feature 1..20: note = Description of Artificial Sequence: Synthetic oligonucleotide
  misc_feature 1..20: note = Target: FXN; (-) strand; PAM type: NRG; PAM sequence: GAG
  source 1..20: mol_type = other DNA
ggctggcagattcctccagg

SEQ ID NO: 9956 - DNA, 20 bp, synthetic construct
  misc_feature 1..20: note = Description of Artificial Sequence: Synthetic oligonucleotide
  misc_feature 1..20: note = Target: FXN; (-) strand; PAM type: NRG; PAM sequence: GGG
  source 1..20: mol_type = other DNA
cgggctggcagattcctcca

SEQ ID NO: 9957 - DNA, 20 bp, synthetic construct
  misc_feature 1..20: note = Description of Artificial Sequence: Synthetic oligonucleotide
  misc_feature 1..20: note = Target: FXN; (-) strand; PAM type: NRG; PAM sequence: AGG
  source 1..20: mol_type = other DNA
tcgggctggcagattcctcc

SEQ ID NO: 9958 - DNA, 20 bp, synthetic construct
  misc_feature 1..20: note = Description of Artificial Sequence: Synthetic oligonucleotide
  misc_feature 1..20: note = Target: FXN; (-) strand; PAM type: NRG; PAM sequence: CAG
  source 1..20: mol_type = other DNA
ttcgggctggcagattcctc

SEQ ID NO: 9959 - DNA, 20 bp, synthetic construct
  misc_feature 1..20: note = Description of Artificial Sequence: Synthetic oligonucleotide
  misc_feature 1..20: note = Target: FXN; (-) strand; PAM type: NRG; PAM sequence: CAG
  source 1..20: mol_type = other DNA
atgaacagaattcgggctgg

SEQ ID NO: 9960 - DNA, 20 bp, synthetic construct
  misc_feature 1..20: note = Description of Artificial Sequence: Synthetic oligonucleotide
  misc_feature 1..20: note = Target: FXN; (-) strand; PAM type: NRG; PAM sequence: TGG
  source 1..20: mol_type = other DNA
acgatgaacagaattcgggc

SEQ ID NO: 9961 - DNA, 20 bp, synthetic construct
  misc_feature 1..20: note = Description of Artificial Sequence: Synthetic oligonucleotide
  misc_feature 1..20: note = Target: FXN; (-) strand; PAM type: NRG; PAM sequence: GGG
  source 1..20: mol_type = other DNA
gggtacgatgaacagaattc

SEQ ID NO: 9962 - DNA, 20 bp, synthetic construct
  misc_feature 1..20: note = Description of Artificial Sequence: Synthetic oligonucleotide
  misc_feature 1..20: note = Target: FXN; (-) strand; PAM type: NRG; PAM sequence: CGG
  source 1..20: mol_type = other DNA
agggtacgatgaacagaatt

SEQ ID NO: 9963 - DNA, 20 bp, synthetic construct
  misc_feature 1..20: note = Description of Artificial Sequence: Synthetic oligonucleotide
  misc_feature 1..20: note = Target: FXN; (-) strand; PAM type: NRG; PAM sequence: CAG
  source 1..20: mol_type = other DNA
gaaaaggagggtacgatgaa

SEQ ID NO: 9964 - DNA, 20 bp, synthetic construct
  misc_feature 1..20: note = Description of Artificial Sequence: Synthetic oligonucleotide
  misc_feature 1..20: note = Target: FXN; (-) strand; PAM type: NRG; PAM sequence: GGG
  source 1..20: mol_type = other DNA
gtcaaactctaagaaaagga

SEQ ID NO: 9965 - DNA, 20 bp, synthetic construct
  misc_feature 1..20: note = Description of Artificial Sequence: Synthetic oligonucleotide
  misc_feature 1..20: note = Target: FXN; (-) strand; PAM type: NRG; PAM sequence: AGG
  source 1..20: mol_type = other DNA
ggtcaaactctaagaaaagg

SEQ ID NO: 9966 - DNA, 20 bp, synthetic construct
  misc_feature 1..20: note = Description of Artificial Sequence: Synthetic oligonucleotide
  misc_feature 1..20: note = Target: FXN; (-) strand; PAM type: NRG; PAM sequence: GAG
  source 1..20: mol_type = other DNA
aggtcaaactctaagaaaag

SEQ ID NO: 9967 - DNA, 20 bp, synthetic construct
  misc_feature 1..20: note = Description of Artificial Sequence: Synthetic oligonucleotide
  misc_feature 1..20: note = Target: FXN; (-) strand; PAM type: NRG; PAM sequence: AGG
  source 1..20: mol_type = other DNA
ggaggtcaaactctaagaaa

SEQ ID NO: 9968 - DNA, 20 bp, synthetic construct
  misc_feature 1..20: note = Description of Artificial Sequence: Synthetic oligonucleotide
  misc_feature 1..20: note = Target: FXN; (-) strand; PAM type: NRG; PAM sequence: AAG
  source 1..20: mol_type = other DNA
aggaggtcaaactctaagaa

SEQ ID NO: 9969 - DNA, 20 bp, synthetic construct
  misc_feature 1..20: note = Description of Artificial Sequence: Synthetic oligonucleotide
  misc_feature 1..20: note = Target: FXN; (-) strand; PAM type: NRG; PAM sequence: AAG
  source 1..20: mol_type = other DNA
tacagaggaggtcaaactct

SEQ ID NO: 9970 - DNA, 20 bp, synthetic construct
  misc_feature 1..20: note = Description of Artificial Sequence: Synthetic oligonucleotide
  misc_feature 1..20: note = Target: FXN; (-) strand; PAM type: NRG; PAM sequence: AGG
  source 1..20: mol_type = other DNA
gattgggggagatacagagg

SEQ ID NO: 9971 - DNA, 20 bp, synthetic construct
  misc_feature 1..20: note = Description of Artificial Sequence: Synthetic oligonucleotide
  misc_feature 1..20: note = Target: FXN; (-) strand; PAM type: NRG; PAM sequence: GAG
  source 1..20: mol_type = other DNA
ggattgggggagatacagag

SEQ ID NO: 9972 - DNA, 20 bp, synthetic construct
  misc_feature 1..20: note = Description of Artificial Sequence: Synthetic oligonucleotide
  misc_feature 1..20: note = Target: FXN; (-) strand; PAM type: NRG; PAM sequence: AGG
  source 1..20: mol_type = other DNA
atggattgggggagatacag

SEQ ID NO: 9973 - DNA, 20 bp, synthetic construct
  misc_feature 1..20: note = Description of Artificial Sequence: Synthetic oligonucleotide
  misc_feature 1..20: note = Target: FXN; (-) strand; PAM type: NRG; PAM sequence: GAG
  source 1..20: mol_type = other DNA
catggattgggggagataca

SEQ ID NO: 9974 - DNA, 20 bp, synthetic construct
  misc_feature 1..20: note = Description of Artificial Sequence: Synthetic oligonucleotide
  misc_feature 1..20: note = Target: FXN; (-) strand; PAM type: NRG; PAM sequence: CAG
  source 1..20: mol_type = other DNA
tacatggattgggggagata

SEQ ID NO: 9975 - DNA, 20 bp, synthetic construct
  misc_feature 1..20: note = Description of Artificial Sequence: Synthetic oligonucleotide
  misc_feature 1..20: note = Target: FXN; (-) strand; PAM type: NRG; PAM sequence: GAG
  source 1..20: mol_type = other DNA
aagcaatacatggattgggg

SEQ ID NO: 9976 - DNA, 20 bp, synthetic construct
  misc_feature 1..20: note = Description of Artificial Sequence: Synthetic oligonucleotide
  misc_feature 1..20: note = Target: FXN; (-) strand; PAM type: NRG; PAM sequence: GGG
  source 1..20: mol_type = other DNA
ataagcaatacatggattgg

SEQ ID NO: 9977 - DNA, 20 bp, synthetic construct
  misc_feature 1..20: note = Description of Artificial Sequence: Synthetic oligonucleotide
  misc_feature 1..20: note = Target: FXN; (-) strand; PAM type: NRG; PAM sequence: GGG
  source 1..20: mol_type = other DNA
tataagcaatacatggattg

SEQ ID NO: 9978 - DNA, 20 bp, synthetic construct
  misc_feature 1..20: note = Description of Artificial Sequence: Synthetic oligonucleotide
  misc_feature 1..20: note = Target: FXN; (-) strand; PAM type: NRG; PAM sequence: GGG
  source 1..20: mol_type = other DNA
atataagcaatacatggatt

SEQ ID NO: 9979 - DNA, 20 bp, synthetic construct
  misc_feature 1..20: note = Description of Artificial Sequence: Synthetic oligonucleotide
  misc_feature 1..20: note = Target: FXN; (-) strand; PAM type: NRG; PAM sequence: TGG
  source 1..20: mol_type = other DNA
tatataagcaatacatggat

SEQ ID NO: 9980 - DNA, 20 bp, synthetic construct
  misc_feature 1..20: note = Description of Artificial Sequence: Synthetic oligonucleotide
  misc_feature 1..20: note = Target: FXN; (-) strand; PAM type: NRG; PAM sequence: TGG
  source 1..20: mol_type = other DNA
ccttgtatataagcaataca

SEQ ID NO: 9981 - DNA, 20 bp, synthetic construct
  misc_feature 1..20: note = Description of Artificial Sequence: Synthetic oligonucleotide
  misc_feature 1..20: note = Target: FXN; (-) strand; PAM type: NRG; PAM sequence: AAG
  source 1..20: mol_type = other DNA
cagcagaataccttgtatat

SEQ ID NO: 9982 - DNA, 20 bp, synthetic construct
  misc_feature 1..20: note = Description of Artificial Sequence: Synthetic oligonucleotide
  misc_feature 1..20: note = Target: FXN; (-) strand; PAM type: NRG; PAM sequence: CAG
  source 1..20: mol_type = other DNA
ccatagcagaacagatacag

SEQ ID NO: 9983 - DNA, 20 bp, synthetic construct
  misc_feature 1..20: note = Description of Artificial Sequence: Synthetic oligonucleotide
  misc_feature 1..20: note = Target: FXN; (-) strand; PAM type: NRG; PAM sequence: CAG
  source 1..20: mol_type = other DNA
aagccatagcagaacagata

SEQ ID NO: 9984 - DNA, 20 bp, synthetic construct
  misc_feature 1..20: note = Description of Artificial Sequence: Synthetic oligonucleotide
  misc_feature 1..20: note = Target: FXN; (-) strand; PAM type: NRG; PAM sequence: CAG
  source 1..20: mol_type = other DNA
aggggcaagccatagcagaa

SEQ ID NO: 9985 - DNA, 20 bp, synthetic construct
  misc_feature 1..20: note = Description of Artificial Sequence: Synthetic oligonucleotide
  misc_feature 1..20: note = Target: FXN; (-) strand; PAM type: NRG; PAM sequence: CAG
  source 1..20: mol_type = other DNA
acaaaaggggcaagccatag

SEQ ID NO: 9986 - DNA, 20 bp, synthetic construct
  misc_feature 1..20: note = Description of Artificial Sequence: Synthetic oligonucleotide
  misc_feature 1..20: note = Target: FXN; (-) strand; PAM type: NRG; PAM sequence: TAG
  source 1..20: mol_type = other DNA
tgaacaaaaggggcaagcca

SEQ ID NO: 9987 - DNA, 20 bp, synthetic construct
  misc_feature 1..20: note = Description of Artificial Sequence: Synthetic oligonucleotide
  misc_feature 1..20: note = Target: FXN; (-) strand; PAM type: NRG; PAM sequence: AAG
  source 1..20: mol_type = other DNA
cagtgttgaacaaaaggggc

SEQ ID NO: 9988 - DNA, 20 bp, synthetic construct
  misc_feature 1..20: note = Description of Artificial Sequence: Synthetic oligonucleotide
  misc_feature 1..20: note = Target: FXN; (-) strand; PAM type: NRG; PAM sequence: GGG
  source 1..20: mol_type = other DNA
aaaacagtgttgaacaaaag

SEQ ID NO: 9989 - DNA, 20 bp, synthetic construct
  misc_feature 1..20: note = Description of Artificial Sequence: Synthetic oligonucleotide
  misc_feature 1..20: note = Target: FXN; (-) strand; PAM type: NRG; PAM sequence: GGG
  source 1..20: mol_type = other DNA
aaaaacagtgttgaacaaaa

SEQ ID NO: 9990 - DNA, 20 bp, synthetic construct
  misc_feature 1..20: note = Description of Artificial Sequence: Synthetic oligonucleotide
  misc_feature 1..20: note = Target: FXN; (-) strand; PAM type: NRG; PAM sequence: AGG
  source 1..20: mol_type = other DNA
caaaaacagtgttgaacaaa

SEQ ID NO: 9991 - DNA, 20 bp, synthetic construct
  misc_feature 1..20: note = Description of Artificial Sequence: Synthetic oligonucleotide
  misc_feature 1..20: note = Target: FXN; (-) strand; PAM type: NRG; PAM sequence: AAG
  source 1..20: mol_type = other DNA
acaaaaacagtgttgaacaa

SEQ ID NO: 9992 - DNA, 20 bp, synthetic construct
  misc_feature 1..20: note = Description of Artificial Sequence: Synthetic oligonucleotide
  misc_feature 1..20: note = Target: FXN; (-) strand; PAM type: NRG; PAM sequence: CAG
  source 1..20: mol_type = other DNA
atgcagatgacgcacaaaaa

SEQ ID NO: 9993 - DNA, 20 bp, synthetic construct
  misc_feature 1..20: note = Description of Artificial Sequence: Synthetic oligonucleotide
  misc_feature 1..20: note = Target: FXN; (-) strand; PAM type: NRG; PAM sequence: CAG
  source 1..20: mol_type = other DNA
gacaactgcatgcatcaatg

SEQ ID NO: 9994 - DNA, 20 bp, synthetic construct
  misc_feature 1..20: note = Description of Artificial Sequence: Synthetic oligonucleotide
  misc_feature 1..20: note = Target: FXN; (-) strand; PAM type: NRG; PAM sequence: AGG
  source 1..20: mol_type = other DNA
ccagcagtgagaacaaataa

SEQ ID NO: 9995 - DNA, 20 bp, synthetic construct
  misc_feature 1..20: note = Description of Artificial Sequence: Synthetic oligonucleotide
  misc_feature 1..20: note = Target: FXN; (-) strand; PAM type: NRG; PAM sequence: AAG
  source 1..20: mol_type = other DNA
tccagcagtgagaacaaata

SEQ ID NO: 9996 - DNA, 20 bp, synthetic construct
  misc_feature 1..20: note = Description of Artificial Sequence: Synthetic oligonucleotide
  misc_feature 1..20: note = Target: FXN; (-) strand; PAM type: NRG; PAM sequence: GAG
  source 1..20: mol_type = other DNA
accagatactatccagcagt

SEQ ID NO: 9997 - DNA, 20 bp, synthetic construct
  misc_feature 1..20: note = Description of Artificial Sequence: Synthetic oligonucleotide
  misc_feature 1..20: note = Target: FXN; (-) strand; PAM type: NRG; PAM sequence: CAG
  source 1..20: mol_type = other DNA
cccaaccagatactatccag

SEQ ID NO: 9998 - DNA, 20 bp, synthetic construct
  misc_feature 1..20: note = Description of Artificial Sequence: Synthetic oligonucleotide
  misc_feature 1..20: note = Target: FXN; (-) strand; PAM type: NRG; PAM sequence: CAG
  source 1..20: mol_type = other DNA
ttacccaaccagatactatc

SEQ ID NO: 9999 - DNA, 20 bp, synthetic construct
  misc_feature 1..20: note = Description of Artificial Sequence: Synthetic oligonucleotide
  misc_feature 1..20: note = Target: FXN; (-) strand; PAM type: NRG; PAM sequence: CAG
  source 1..20: mol_type = other DNA
gtgtgatatatttacccaac

SEQ ID NO: 10000 - DNA, 20 bp, synthetic construct
  misc_feature 1..20: note = Description of Artificial Sequence: Synthetic oligonucleotide
  misc_feature 1..20: note = Target: FXN; (-) strand; PAM type: NRG; PAM sequence: CAG
  source 1..20: mol_type = other DNA
aacctggatagtgtgattta

SEQ ID NO: 10001 - DNA, 20 bp, synthetic construct
  misc_feature 1..20: note = Description of Artificial Sequence: Synthetic oligonucleotide
  misc_feature 1..20: note = Target: FXN; (-) strand; PAM type: NRG; PAM sequence: TAG
  source 1..20: mol_type = other DNA
gtcacctaaaggaacctgga

SEQ ID NO: 10002 - DNA, 20 bp, synthetic construct
  misc_feature 1..20: note = Description of Artificial Sequence: Synthetic oligonucleotide
  misc_feature 1..20: note = Target: FXN; (-) strand; PAM type: NRG; PAM sequence: TGG
  source 1..20: mol_type = other DNA
aaatgtcacctaaaggaacc

SEQ ID NO: 10003 - DNA, 20 bp, synthetic construct
  misc_feature 1..20: note = Description of Artificial Sequence: Synthetic oligonucleotide
  misc_feature 1..20: note = Target: FXN; (-) strand; PAM type: NRG; PAM sequence: AGG
  source 1..20: mol_type = other DNA
atcaaccaaatgtcacctaa

SEQ ID NO: 10004 - DNA, 20 bp, synthetic construct
  misc_feature 1..20: note = Description of Artificial Sequence: Synthetic oligonucleotide
  misc_feature 1..20: note = Target: FXN; (-) strand; PAM type: NRG; PAM sequence: AAG
  source 1..20: mol_type = other DNA
aatcaaccaaatgtcaccta

SEQ ID NO: 10005 - DNA, 20 bp, synthetic construct
  misc_feature 1..20: note = Description of Artificial Sequence: Synthetic oligonucleotide
  misc_feature 1..20: note = Target: FXN; (-) strand; PAM type: NRG; PAM sequence: CAG
  source 1..20: mol_type = other DNA
cagcagcaccatcgtaacaa

SEQ ID NO: 10006 - DNA, 20 bp, synthetic construct
  misc_feature 1..20: note = Description of Artificial Sequence: Synthetic oligonucleotide
  misc_feature 1..20: note = Target: FXN; (-) strand; PAM type: NRG; PAM sequence: CAG
  source 1..20: mol_type = other DNA
atgcacaagaacagtcacag

SEQ ID NO: 10007 - DNA, 20 bp, synthetic construct
  misc_feature 1..20: note = Description of Artificial Sequence: Synthetic oligonucleotide
  misc_feature 1..20: note = Target: FXN; (-) strand; PAM type: NRG; PAM sequence: CAG
  source 1..20: mol_type = other DNA
tccatgcacaagaacagtca

SEQ ID NO: 10008 - DNA, 20 bp, synthetic construct
  misc_feature 1..20: note = Description of Artificial Sequence: Synthetic oligonucleotide
  misc_feature 1..20: note = Target: FXN; (-) strand; PAM type: NRG; PAM sequence: CAG
  source 1..20: mol_type = other DNA
cttctgtccatgcacaagaa

SEQ ID NO: 10009 - DNA, 20 bp, synthetic construct
  misc_feature 1..20: note = Description of Artificial Sequence: Synthetic oligonucleotide
  misc_feature 1..20: note = Target: FXN; (-) strand; PAM type: NRG; PAM sequence: AAG
  source 1..20: mol_type = other DNA
aggaacttctgtccatgcac

SEQ ID NO: 10010 - DNA, 20 bp, synthetic construct
  misc_feature 1..20: note = Description of Artificial Sequence: Synthetic oligonucleotide
  misc_feature 1..20: note = Target: FXN; (-) strand; PAM type: NRG; PAM sequence: AGG
  source 1..20: mol_type = other DNA
ttctgagaaattcacctgaa

SEQ ID NO: 10011 - DNA, 20 bp, synthetic construct
  misc_feature 1..20: note = Description of Artificial Sequence: Synthetic oligonucleotide
  misc_feature 1..20: note = Target: FXN; (-) strand; PAM type: NRG; PAM sequence: AAG
  source 1..20: mol_type = other DNA
attctgagaaattcacctga

SEQ ID NO: 10012 - DNA, 20 bp, synthetic construct
  misc_feature 1..20: note = Description of Artificial Sequence: Synthetic oligonucleotide
  misc_feature 1..20: note = Target: FXN; (-) strand; PAM type: NRG; PAM sequence: GAG
  source 1..20: mol_type = other DNA
ttgcccagcaattccattct

SEQ ID NO: 10013 - DNA, 20 bp, synthetic construct
  misc_feature 1..20: note = Description of Artificial Sequence: Synthetic oligonucleotide
  misc_feature 1..20: note = Target: FXN; (-) strand; PAM type: NRG; PAM sequence: CAG
  source 1..20: mol_type = other DNA
ttattggctgcccctttgcc

SEQ ID NO: 10014 - DNA, 20 bp, synthetic construct
  misc_feature 1..20: note = Description of Artificial Sequence: Synthetic oligonucleotide
  misc_feature 1..20: note = Target: FXN; (-) strand; PAM type: NRG; PAM sequence: TGG
  source 1..20: mol_type = other DNA
gcatcaaatgagttgattat

SEQ ID NO: 10015 - DNA, 20 bp, synthetic construct
  misc_feature 1..20: note = Description of Artificial Sequence: Synthetic oligonucleotide
  misc_feature 1..20: note = Target: FXN; (-) strand; PAM type: NRG; PAM sequence: GAG
  source 1..20: mol_type = other DNA
caccacttttggcatcaaat

SEQ ID NO: 10016 - DNA, 20 bp, synthetic construct
  misc_feature 1..20: note = Description of Artificial Sequence: Synthetic oligonucleotide
  misc_feature 1..20: note = Target: FXN; (-) strand; PAM type: NRG; PAM sequence: TGG
  source 1..20: mol_type = other DNA
tgaactggcaccaccacttt

SEQ ID NO: 10017 - DNA, 20 bp, synthetic construct
  misc_feature 1..20: note = Description of Artificial Sequence: Synthetic oligonucleotide
  misc_feature 1..20: note = Target: FXN; (-) strand; PAM type: NRG; PAM sequence: TGG
  source 1..20: mol_type = other DNA
cctcgcaggggaggatgaac

SEQ ID NO: 10018 - DNA, 20 bp, synthetic construct
  misc_feature 1..20: note = Description of Artificial Sequence: Synthetic oligonucleotide
  misc_feature 1..20: note = Target: FXN; (-) strand; PAM type: NRG; PAM sequence: AGG
  source 1..20: mol_type = other DNA
ggacccatacctcgcagggg

SEQ ID NO: 10019 - DNA, 20 bp, synthetic construct
  misc_feature 1..20: note = Description of Artificial Sequence: Synthetic oligonucleotide
  misc_feature 1..20: note = Target: FXN; (-) strand; PAM type: NRG; PAM sequence: GAG
  source 1..20: mol_type = other DNA
aggacccatacctcgcaggg

SEQ ID NO: 10020 - DNA, 20 bp, synthetic construct
  misc_feature 1..20: note = Description of Artificial Sequence: Synthetic oligonucleotide
  misc_feature 1..20: note = Target: FXN; (-) strand; PAM type: NRG; PAM sequence: GGG
  source 1..20: mol_type = other DNA
tcaggacccatacctcgcag

SEQ ID NO: 10021 - DNA, 20 bp, synthetic construct
  misc_feature 1..20: note = Description of Artificial Sequence: Synthetic oligonucleotide
  misc_feature 1..20: note = Target: FXN; (-) strand; PAM type: NRG; PAM sequence: GGG
  source 1..20: mol_type = other DNA
atcaggacccatacctcgca

SEQ ID NO: 10022 - DNA, 20 bp, synthetic construct
  misc_feature 1..20: note = Description of Artificial Sequence: Synthetic oligonucleotide
  misc_feature 1..20: note = Target: FXN; (-) strand; PAM type: NRG; PAM sequence: AGG
  source 1..20: mol_type = other DNA
aatcaggacccatacctcgc

SEQ ID NO: 10023 - DNA, 20 bp, synthetic construct
  misc_feature 1..20: note = Description of Artificial Sequence: Synthetic oligonucleotide
  misc_feature 1..20: note = Target: FXN; (-) strand; PAM type: NRG; PAM sequence: CAG
  source 1..20: mol_type = other DNA
gaatcaggacccatacctcg

SEQ ID NO: 10024 - DNA, 20 bp, synthetic construct
  misc_feature 1..20: note = Description of Artificial Sequence: Synthetic oligonucleotide
  misc_feature 1..20: note = Target: FXN; (-) strand; PAM type: NRG; PAM sequence: AGG
  source 1..20: mol_type = other DNA
cagcacttgaagagtgaatc

SEQ ID NO: 10025 - DNA, 20 bp, synthetic construct
  misc_feature 1..20: note = Description of Artificial Sequence: Synthetic oligonucleotide
  misc_feature 1..20: note = Target: FXN; (-) strand; PAM type: NRG; PAM sequence: CAG
  source 1..20: mol_type = other DNA
acagcacttgaagagtgaat

SEQ ID NO: 10026 - DNA, 20 bp, synthetic construct
  misc_feature 1..20: note = Description of Artificial Sequence: Synthetic oligonucleotide
  misc_feature 1..20: note = Target: FXN; (-) strand; PAM type: NRG; PAM sequence: GAG
  source 1..20: mol_type = other DNA
gtcaaaccacagcacttgaa

SEQ ID NO: 10027 - DNA, 20 bp, synthetic construct
  misc_feature 1..20: note = Description of Artificial Sequence: Synthetic oligonucleotide
  misc_feature 1..20: note = Target: FXN; (-) strand; PAM type: NRG; PAM sequence: AAG
  source 1..20: mol_type = other DNA
ctgtcaaaccacagcacttg

SEQ ID NO: 10028 - DNA, 20 bp, synthetic construct
  misc_feature 1..20: note = Description of Artificial Sequence: Synthetic oligonucleotide
  misc_feature 1..20: note = Target: FXN; (-) strand; PAM type: NRG; PAM sequence: CAG
  source 1..20: mol_type = other DNA
cccccggccctgtcaaacca

SEQ ID NO: 10029 - DNA, 20 bp, synthetic construct
  misc_feature 1..20: note = Description of Artificial Sequence: Synthetic oligonucleotide
  misc_feature 1..20: note = Target: FXN; (-) strand; PAM type: NRG; PAM sequence: CGG
  source 1..20: mol_type = other DNA
aggtgtccccttgtcacccc

SEQ ID NO: 10030 - DNA, 20 bp, synthetic construct
  misc_feature 1..20: note = Description of Artificial Sequence: Synthetic oligonucleotide
  misc_feature 1..20: note = Target: FXN; (-) strand; PAM type: NRG; PAM sequence: AGG
  source 1..20: mol_type = other DNA
ggagcccagctttccttccc

SEQ ID NO: 10031 - DNA, 20 bp, synthetic construct
  misc_feature 1..20: note = Description of Artificial Sequence: Synthetic oligonucleotide
  misc_feature 1..20: note = Target: FXN; (-) strand; PAM type: NRG; PAM sequence: CAG
  source 1..20: mol_type = other DNA
gggagcccagctttccttcc

SEQ ID NO: 10032 - DNA, 20 bp, synthetic construct
  misc_feature 1..20: note = Description of Artificial Sequence: Synthetic oligonucleotide
  misc_feature 1..20: note = Target: FXN; (-) strand; PAM type: NRG; PAM sequence: CAG
  source 1..20: mol_type = other DNA
tggatggccagcagggagcc

SEQ ID NO: 10033 - DNA, 20 bp, synthetic construct
  misc_feature 1..20: note = Description of Artificial Sequence: Synthetic oligonucleotide
  misc_feature 1..20: note = Target: FXN; (-) strand; PAM type: NRG; PAM sequence: GAG
  source 1..20: mol_type = other DNA
tggcctggatggccagcagg

SEQ ID NO: 10034 - DNA, 20 bp, synthetic construct
  misc_feature 1..20: note = Description of Artificial Sequence: Synthetic oligonucleotide
  misc_feature 1..20: note = Target: FXN; (-) strand; PAM type: NRG; PAM sequence: GGG
  source 1..20: mol_type = other DNA
actggcctggatggccagca

SEQ ID NO: 10035 - DNA, 20 bp, synthetic construct
  misc_feature 1..20: note = Description of Artificial Sequence: Synthetic oligonucleotide
  misc_feature 1..20: note = Target: FXN; (-) strand; PAM type: NRG; PAM sequence: AGG
  source 1..20: mol_type = other DNA
gactggcctggatggccagc

SEQ ID NO: 10036 - DNA, 20 bp, synthetic construct
  misc_feature 1..20: note = Description of Artificial Sequence: Synthetic oligonucleotide
  misc_feature 1..20: note = Target: FXN; (-) strand; PAM type: NRG; PAM sequence: CAG
  source 1..20: mol_type = other DNA
ggactggcctggatggccag

SEQ ID NO: 10037 - DNA, 20 bp, synthetic construct
  misc_feature 1..20: note = Description of Artificial Sequence: Synthetic oligonucleotide
  misc_feature 1..20: note = Target: FXN; (-) strand; PAM type: NRG; PAM sequence: CAG
  source 1..20: mol_type = other DNA
taaggactggcctggatggc

SEQ ID NO: 10038 - DNA, 20 bp, synthetic construct
  misc_feature 1..20: note = Description of Artificial Sequence: Synthetic oligonucleotide
  misc_feature 1..20: note = Target: FXN; (-) strand; PAM type: NRG; PAM sequence: TGG
  source 1..20: mol_type = other DNA
ctggtaaggactggcctgga

SEQ ID NO: 10039 - DNA, 20 bp, synthetic construct
  misc_feature 1..20: note = Description of Artificial Sequence: Synthetic oligonucleotide
  misc_feature 1..20: note = Target: FXN; (-) strand; PAM type: NRG; PAM sequence: TGG
  source 1..20: mol_type = other DNA
ccccctggtaaggactggcc

SEQ ID NO: 10040 - DNA, 20 bp, synthetic construct
  misc_feature 1..20: note = Description of Artificial Sequence: Synthetic oligonucleotide
  misc_feature 1..20: note = Target: FXN; (-) strand; PAM type: NRG; PAM sequence: TGG
  source 1..20: mol_type = other DNA
gcctaccccctggtaaggac

SEQ ID NO: 10041 - DNA, 20 bp, synthetic construct
  misc_feature 1..20: note = Description of Artificial Sequence: Synthetic oligonucleotide
  misc_feature 1..20: note = Target: FXN; (-) strand; PAM type: NRG; PAM sequence: AGG
  source 1..20: mol_type = other DNA
tcattgcctaccccctggta

SEQ ID NO: 10042 - DNA, 20 bp, synthetic construct
  misc_feature 1..20: note = Description of Artificial Sequence: Synthetic oligonucleotide
  misc_feature 1..20: note = Target: FXN; (-) strand; PAM type: NRG; PAM sequence: AAG
  source 1..20: mol_type = other DNA
atcattgcctaccccctggt

SEQ ID NO: 10043 - DNA, 20 bp, synthetic construct
  misc_feature 1..20: note = Description of Artificial Sequence: Synthetic oligonucleotide
  misc_feature 1..20: note = Target: FXN; (-) strand; PAM type: NRG; PAM sequence: TGG
  source 1..20: mol_type = other DNA
cccaatcattgcctaccccc

SEQ ID NO: 10044 - DNA, 20 bp, synthetic construct
  misc_feature 1..20: note = Description of Artificial Sequence: Synthetic oligonucleotide
  misc_feature 1..20: note = Target: FXN; (-) strand; PAM type: NRG; PAM sequence: AGG
  source 1..20: mol_type = other DNA
aagtctcaggcccagtggtc

SEQ ID NO: 10045 - DNA, 20 bp, synthetic construct
  misc_feature 1..20: note = Description of Artificial Sequence: Synthetic oligonucleotide
  misc_feature 1..20: note = Target: FXN; (-) strand; PAM type: NRG; PAM sequence: CAG
  source 1..20: mol_type = other DNA
gaagtctcaggcccagtggt

SEQ ID NO: 10046 - DNA, 20 bp, synthetic construct
  misc_feature 1..20: note = Description of Artificial Sequence: Synthetic oligonucleotide
  misc_feature 1..20: note = Target: FXN; (-) strand; PAM type: NRG; PAM sequence: TGG
  source 1..20: mol_type = other DNA
gcctgaagtctcaggcccag

SEQ ID NO: 10047 - DNA, 20 bp, synthetic construct
  misc_feature 1..20: note = Description of Artificial Sequence: Synthetic oligonucleotide
  misc_feature 1..20: note = Target: FXN; (-) strand; PAM type: NRG; PAM sequence: CAG
  source 1..20: mol_type = other DNA
tgggcctgaagtctcaggcc

SEQ ID NO: 10048 - DNA, 20 bp, synthetic construct
  misc_feature 1..20: note = Description of Artificial Sequence: Synthetic oligonucleotide
  misc_feature 1..20: note = Target: FXN; (-) strand; PAM type: NRG; PAM sequence: AGG
  source 1..20: mol_type = other DNA
gtttctgggcctgaagtctc

SEQ ID NO: 10049 - DNA, 20 bp, synthetic construct
  misc_feature 1..20: note = Description of Artificial Sequence: Synthetic oligonucleotide
  misc_feature 1..20: note = Target: FXN; (-) strand; PAM type: NRG; PAM sequence: CAG
  source 1..20: mol_type = other DNA
agtttctgggcctgaagtct

SEQ ID NO: 10050 - DNA, 20 bp, synthetic construct
  misc_feature 1..20: note = Description of Artificial Sequence: Synthetic oligonucleotide
  misc_feature 1..20: note = Target: FXN; (-) strand; PAM type: NRG; PAM sequence: AAG
  source 1..20: mol_type = other DNA
ttagatagtttctgggcctg

SEQ ID NO: 10051 - DNA, 20 bp, synthetic construct
  misc_feature 1..20: note = Description of Artificial Sequence: Synthetic oligonucleotide
  misc_feature 1..20: note = Target: FXN; (-) strand; PAM type: NRG; PAM sequence: GGG
  source 1..20: mol_type = other DNA
ggaaatattagatagtttct

SEQ ID NO: 10052 - DNA, 20 bp, synthetic construct
  misc_feature 1..20: note = Description of Artificial Sequence: Synthetic oligonucleotide
  misc_feature 1..20: note = Target: FXN; (-) strand; PAM type: NRG; PAM sequence: TGG
  source 1..20: mol_type = other DNA
aggaaatattagatagtttc

SEQ ID NO: 10053 - DNA, 20 bp, synthetic construct
  misc_feature 1..20: note = Description of Artificial Sequence: Synthetic oligonucleotide
  misc_feature 1..20: note = Target: FXN; (-) strand; PAM type: NRG; PAM sequence: TAG
  source 1..20: mol_type = other DNA
gcatttgaggaaatattaga

SEQ ID NO: 10054 - DNA, 20 bp, synthetic construct
  misc_feature 1..20: note = Description of Artificial Sequence: Synthetic oligonucleotide
  misc_feature 1..20: note = Target: FXN; (-) strand; PAM type: NRG; PAM sequence: TAG
  source 1..20: mol_type = other DNA
ggatgcatttgaggaaatat

SEQ ID NO: 10055 - DNA, 20 bp, synthetic construct
  misc_feature 1..20: note = Description of Artificial Sequence: Synthetic oligonucleotide
  misc_feature 1..20: note = Target: FXN; (-) strand; PAM type: NRG; PAM sequence: AGG
  source 1..20: mol_type = other DNA
ctgctcatgggatgcatttg

SEQ ID NO: 10056 - DNA, 20 bp, synthetic construct
  misc_feature 1..20: note = Description of Artificial Sequence: Synthetic oligonucleotide
  misc_feature 1..20: note = Target: FXN; (-) strand; PAM type: NRG; PAM sequence: GAG
  source 1..20: mol_type = other DNA
cctgctcatgggatgcattt

SEQ ID NO: 10057 - DNA, 20 bp, synthetic construct
  misc_feature 1..20: note = Description of Artificial Sequence: Synthetic oligonucleotide
  misc_feature 1..20: note = Target: FXN; (-) strand; PAM type: NRG; PAM sequence: GGG
  source 1..20: mol_type = other DNA
ctcacacagtgcctgctcat

SEQ ID NO: 10058 - DNA, 20 bp, synthetic construct
  misc_feature 1..20: note = Description of Artificial Sequence: Synthetic oligonucleotide
  misc_feature 1..20: note = Target: FXN; (-) strand; PAM type: NRG; PAM sequence: TGG
  source 1..20: mol_type = other DNA
actcacacagtgcctgctca

SEQ ID NO: 10059 - DNA, 20 bp, synthetic construct
  misc_feature 1..20: note = Description of Artificial Sequence: Synthetic oligonucleotide
  misc_feature 1..20: note = Target: FXN; (-) strand; PAM type: NRG; PAM sequence: CAG
  source 1..20: mol_type = other DNA
gatgtgtgtgctcactcaca

SEQ ID NO: 10060 - DNA, 20 bp, synthetic construct
  misc_feature 1..20: note = Description of Artificial Sequence: Synthetic oligonucleotide
  misc_feature 1..20: note = Target: FXN; (-) strand; PAM type: NRG; PAM sequence: CAG
  source 1..20: mol_type = other DNA
gcttgcctagcttgaggctt

SEQ ID NO: 10061 - DNA, 20 bp, synthetic construct
  misc_feature 1..20: note = Description of Artificial Sequence: Synthetic oligonucleotide
  misc_feature 1..20: note = Target: FXN; (-) strand; PAM type: NRG; PAM sequence: AGG
  source 1..20: mol_type = other DNA
tggtaggcttgcctagcttg

SEQ ID NO: 10062 - DNA, 20 bp, synthetic construct
  misc_feature 1..20: note = Description of Artificial Sequence: Synthetic oligonucleotide
  misc_feature 1..20: note = Target: FXN; (-) strand; PAM type: NRG; PAM sequence: GAG
  source 1..20: mol_type = other DNA
atggtaggcttgcctagctt

SEQ ID NO: 10063 - DNA, 20 bp, synthetic construct
  misc_feature 1..20: note = Description of Artificial Sequence: Synthetic oligonucleotide
  misc_feature 1..20: note = Target: FXN; (-) strand; PAM type: NRG; PAM sequence: TAG
  source 1..20: mol_type = other DNA
caagtcatggtaggcttgcc

SEQ ID NO: 10064 - DNA, 20 bp, synthetic construct
  misc_feature 1..20: note = Description of Artificial Sequence: Synthetic oligonucleotide
  misc_feature 1..20: note = Target: FXN; (-) strand; PAM type: NRG; PAM sequence: AGG
  source 1..20: mol_type = other DNA
cttggaccacaagtcatggt

SEQ ID NO: 10065 - DNA, 20 bp, synthetic construct
  misc_feature 1..20: note = Description of Artificial Sequence: Synthetic oligonucleotide
  misc_feature 1..20: note = Target: FXN; (-) strand; PAM type: NRG; PAM sequence: TAG
  source 1..20: mol_type = other DNA
ccttggaccacaagtcatgg

SEQ ID NO: 10066 - DNA, 20 bp, synthetic construct
  misc_feature 1..20: note = Description of Artificial Sequence: Synthetic oligonucleotide
  misc_feature 1..20: note = Target: FXN; (-) strand; PAM type: NRG; PAM sequence: TGG
  source 1..20: mol_type = other DNA
agcccttggaccacaagtca

SEQ ID NO: 10067 - DNA, 20 bp, synthetic construct
  misc_feature 1..20: note = Description of Artificial Sequence: Synthetic oligonucleotide
  misc_feature 1..20: note = Target: FXN; (-) strand; PAM type: NRG; PAM sequence: AAG
  source 1..20: mol_type = other DNA
cccgtgagcccttggaccac

SEQ ID NO: 10068 - DNA, 20 bp, synthetic construct
  misc_feature 1..20: note = Description of Artificial Sequence: Synthetic oligonucleotide
  misc_feature 1..20: note = Target: FXN; (-) strand; PAM type: NRG; PAM sequence: TGG
  source 1..20: mol_type = other DNA
ccaggtcacccgtgagccct

SEQ ID NO: 10069 - DNA, 20 bp, synthetic construct
  misc_feature 1..20: note = Description of Artificial Sequence: Synthetic oligonucleotide
  misc_feature 1..20: note = Target: FXN; (-) strand; PAM type: NRG; PAM sequence: GAG
  source 1..20: mol_type = other DNA
tctaactccaggtcacccgt

SEQ ID NO: 10070 - DNA, 20 bp, synthetic construct
  misc_feature 1..20: note = Description of Artificial Sequence: Synthetic oligonucleotide
  misc_feature 1..20: note = Target: FXN; (-) strand; PAM type: NRG; PAM sequence: AGG
  source 1..20: mol_type = other DNA
ccatgtctccctctaactcc

SEQ ID NO: 10071 - DNA, 20 bp, synthetic construct
  misc_feature 1..20: note = Description of Artificial Sequence: Synthetic oligonucleotide
  misc_feature 1..20: note = Target: FXN; (-) strand; PAM type: NRG; PAM sequence: CAG
  source 1..20: mol_type = other DNA
gccatgtctccctctaactc

SEQ ID NO: 10072 - DNA, 20 bp, synthetic construct
  misc_feature 1..20: note = Description of Artificial Sequence: Synthetic oligonucleotide
  misc_feature 1..20: note = Target: FXN; (-) strand; PAM type: NRG; PAM sequence: CAG
  source 1..20: mol_type = other DNA
ttctttctaaagccacctgg

SEQ ID NO: 10073 - DNA, 20 bp, synthetic construct
  misc_feature 1..20: note = Description of Artificial Sequence: Synthetic oligonucleotide
  misc_feature 1..20: note = Target: FXN; (-) strand; PAM type: NRG; PAM sequence: TGG
  source 1..20: mol_type = other DNA
gtgttctttctaaagccacc

SEQ ID NO: 10074 - DNA, 20 bp, synthetic construct
  misc_feature 1..20: note = Description of Artificial Sequence: Synthetic oligonucleotide
  misc_feature 1..20: note = Target: FXN; (-) strand; PAM type: NRG; PAM sequence: AAG
  source 1..20: mol_type = other DNA
catgatgagtgttctttcta

SEQ ID NO: 10075 - DNA, 20 bp, synthetic construct
  misc_feature 1..20: note = Description of Artificial Sequence: Synthetic oligonucleotide
  misc_feature 1..20: note = Target: FXN; (-) strand; PAM type: NRG; PAM sequence: GAG
  source 1..20: mol_type = other DNA
ccaccgcacctggccatgat

SEQ ID NO: 10076 - DNA, 20 bp, synthetic construct
  misc_feature 1..20: note = Description of Artificial Sequence: Synthetic oligonucleotide
  misc_feature 1..20: note = Target: FXN; (-) strand; PAM type: NRG; PAM sequence: TGG
  source 1..20: mol_type = other DNA
caggcgtaagccaccgcacc

SEQ ID NO: 10077 - DNA, 20 bp, synthetic construct
  misc_feature 1..20: note = Description of Artificial Sequence: Synthetic oligonucleotide
  misc_feature 1..20: note = Target: FXN; (-) strand; PAM type: NRG; PAM sequence: AAG
  source 1..20: mol_type = other DNA
agtgctgggattacaggcgt

SEQ ID NO: 10078 - DNA, 20 bp, synthetic construct
  misc_feature 1..20: note = Description of Artificial Sequence: Synthetic oligonucleotide
  misc_feature 1..20: note = Target: FXN; (-) strand; PAM type: NRG; PAM sequence: AGG
  source 1..20: mol_type = other DNA
tcccaaagtgctgggattac

SEQ ID NO: 10079 - DNA, 20 bp, synthetic construct
  misc_feature 1..20: note = Description of Artificial Sequence: Synthetic oligonucleotide
  misc_feature 1..20: note = Target: FXN; (-) strand; PAM type: NRG; PAM sequence: CAG
  source 1..20: mol_type = other DNA
ctcccaaagtgctgggatta

SEQ ID NO: 10080 - DNA, 20 bp, synthetic construct
  misc_feature 1..20: note = Description of Artificial Sequence: Synthetic oligonucleotide
  misc_feature 1..20: note = Target: FXN; (-) strand; PAM type: NRG; PAM sequence: GGG
  source 1..20: mol_type = other DNA
ccttggcctcccaaagtgct

SEQ ID NO: 10081 - DNA, 20 bp, synthetic construct
  misc_feature 1..20: note = Description of Artificial Sequence: Synthetic oligonucleotide
  misc_feature 1..20: note = Target: FXN; (-) strand; PAM type: NRG; PAM sequence: TGG
  source 1..20: mol_type = other DNA
accttggcctcccaaagtgc

SEQ ID NO: 10082 - DNA, 20 bp, synthetic construct
  misc_feature 1..20: note = Description of Artificial Sequence: Synthetic oligonucleotide
  misc_feature 1..20: note = Target: FXN; (-) strand; PAM type: NRG; PAM sequence: AAG
  source 1..20: mol_type = other DNA
ccacccaccttggcctccca

SEQ ID NO: 10083 - DNA, 20 bp, synthetic construct
  misc_feature 1..20: note = Description of Artificial Sequence: Synthetic oligonucleotide
  misc_feature 1..20: note = Target: FXN; (-) strand; PAM type: NRG; PAM sequence: TGG
  source 1..20: mol_type = other DNA
acctcatgatccacccacct

SEQ ID NO: 10084 - DNA, 20 bp, synthetic construct
  misc_feature 1..20: note = Description of Artificial Sequence: Synthetic oligonucleotide
  misc_feature 1..20: note = Target: FXN; (-) strand; PAM type: NRG; PAM sequence: TGG
  source 1..20: mol_type = other DNA
tttcagcatgttggtcaggc

SEQ ID NO: 10085 - DNA, 20 bp, synthetic construct
  misc_feature 1..20: note = Description of Artificial Sequence: Synthetic oligonucleotide
  misc_feature 1..20: note = Target: FXN; (-) strand; PAM type: NRG; PAM sequence: AGG
  source 1..20: mol_type = other DNA
caggtttcagcatgttggtc

SEQ ID NO: 10086 - DNA, 20 bp, synthetic construct
  misc_feature 1..20: note = Description of Artificial Sequence: Synthetic oligonucleotide
  misc_feature 1..20: note = Target: FXN; (-) strand; PAM type: NRG; PAM sequence: CAG
  source 1..20: mol_type = other DNA
acaggtttcagcatgttggt

SEQ ID NO: 10087 - DNA, 20 bp, synthetic construct
  misc_feature 1..20: note = Description of Artificial Sequence: Synthetic oligonucleotide
  misc_feature 1..20: note = Target: FXN; (-) strand; PAM type: NRG; PAM sequence: TGG
  source 1..20: mol_type = other DNA
agagacaggtttcagcatgt

SEQ ID NO: 10088 - DNA, 20 bp, synthetic construct
  misc_feature 1..20: note = Description of Artificial Sequence: Synthetic oligonucleotide
  misc_feature 1..20: note = Target: FXN; (-) strand; PAM type: NRG; PAM sequence: CAG
  source 1..20: mol_type = other DNA
tttttaggagagacaggttt

SEQ ID NO: 10089 - DNA, 20 bp, synthetic construct
  misc_feature 1..20: note = Description of Artificial Sequence: Synthetic oligonucleotide
  misc_feature 1..20: note = Target: FXN; (-) strand; PAM type: NRG; PAM sequence: AGG
  source 1..20: mol_type = other DNA
tttgtgtttttaggagagac

SEQ ID NO: 10090 - DNA, 20 bp, synthetic construct
  misc_feature 1..20: note = Description of Artificial Sequence: Synthetic oligonucleotide
  misc_feature 1..20: note = Target: FXN; (-) strand; PAM type: NRG; PAM sequence: CAG
  source 1..20: mol_type = other DNA
ttttgtgtttttaggagaga

SEQ ID NO: 10091 - DNA, 20 bp, synthetic construct
  misc_feature 1..20: note = Description of Artificial Sequence: Synthetic oligonucleotide
  misc_feature 1..20: note = Target: FXN; (-) strand; PAM type: NRG; PAM sequence: GAG
  source 1..20: mol_type = other DNA
taatttttgtgtttttagga

SEQ ID NO: 10092 - DNA, 20 bp, synthetic construct
  misc_feature 1..20: note = Description of Artificial Sequence: Synthetic oligonucleotide
  misc_feature 1..20: note = Target: FXN; (-) strand; PAM type: NRG; PAM sequence: GAG
  source 1..20: mol_type = other DNA
gctaatttttgtgtttttag

SEQ ID NO: 10093 - DNA, 20 bp, synthetic construct
  misc_feature 1..20: note = Description of Artificial Sequence: Synthetic oligonucleotide
  misc_feature 1..20: note = Target: FXN; (-) strand; PAM type: NRG; PAM sequence: AGG
  source 1..20: mol_type = other DNA
cagctaatttttgtgttttt

SEQ ID NO: 10094 - DNA, 20 bp, synthetic construct
  misc_feature 1..20: note = Description of Artificial Sequence: Synthetic oligonucleotide
  misc_feature 1..20: note = Target: FXN; (-) strand; PAM type: NRG; PAM sequence: TAG
  source 1..20: mol_type = other DNA
ccagctaatttttgtgtttt

SEQ ID NO: 10095 - DNA, 20 bp, synthetic construct
  misc_feature 1..20: note = Description of Artificial Sequence: Synthetic oligonucleotide
  misc_feature 1..20: note = Target: FXN; (-) strand; PAM type: NRG; PAM sequence: CAG
  source 1..20: mol_type = other DNA
caggcgtgcacctccatgcc

SEQ ID NO: 10096 - DNA, 20 bp, synthetic construct
  misc_feature 1..20: note = Description of Artificial Sequence: Synthetic oligonucleotide
  misc_feature 1..20: note = Target: FXN; (-) strand; PAM type: NRG; PAM sequence: AGG
  source 1..20: mol_type = other DNA
tcctgagtagctgggattac

SEQ ID NO: 10097 - DNA, 20 bp, synthetic construct
  misc_feature 1..20: note = Description of Artificial Sequence: Synthetic oligonucleotide
  misc_feature 1..20: note = Target: FXN; (-) strand; PAM type: NRG; PAM sequence: CAG
  source 1..20: mol_type = other DNA
ctcctgagtagctgggatta

SEQ ID NO: 10098 - DNA, 20 bp, synthetic construct
  misc_feature 1..20: note = Description of Artificial Sequence: Synthetic oligonucleotide
  misc_feature 1..20: note = Target: FXN; (-) strand; PAM type: NRG; PAM sequence: GGG
  source 1..20: mol_type = other DNA
cctcagcctcctgagtagct

SEQ ID NO: 10099 - DNA, 20 bp, synthetic construct
  misc_feature 1..20: note = Description of Artificial Sequence: Synthetic oligonucleotide
  misc_feature 1..20: note = Target: FXN; (-) strand; PAM type: NRG; PAM sequence: TGG
  source 1..20: mol_type = other DNA
gcctcagcctcctgagtagc

SEQ ID NO: 10100 - DNA, 20 bp, synthetic construct
  misc_feature 1..20: note = Description of Artificial Sequence: Synthetic oligonucleotide
  misc_feature 1..20: note = Target: FXN; (-) strand; PAM type: NRG; PAM sequence: TAG
  source 1..20: mol_type = other DNA
tcctgcctcagcctcctgag

SEQ ID NO: 10101 - DNA, 20 bp, synthetic construct
  misc_feature 1..20: note = Description of Artificial Sequence: Synthetic oligonucleotide
  misc_feature 1..20: note = Target: FXN; (-) strand; PAM type: NRG; PAM sequence: GAG
  source 1..20: mol_type = other DNA
ttctcctgcctcagcctcct

SEQ ID NO: 10102 - DNA, 20 bp, synthetic construct
  misc_feature 1..20: note = Description of Artificial Sequence: Synthetic oligonucleotide
  misc_feature 1..20: note = Target: FXN; (-) strand; PAM type: NRG; PAM sequence: CAG
  source 1..20: mol_type = other DNA
ttcaagtgattctcctgcct

SEQ ID NO: 10103 - DNA, 20 bp, synthetic construct
  misc_feature 1..20: note = Description of Artificial Sequence: Synthetic oligonucleotide
  misc_feature 1..20: note = Target: FXN; (-) strand; PAM type: NRG; PAM sequence: AAG
  source 1..20: mol_type = other DNA
aacctccgcctcccgggttc

SEQ ID NO: 10104 - DNA, 20 bp, synthetic construct
  misc_feature 1..20: note = Description of Artificial Sequence: Synthetic oligonucleotide
  misc_feature 1..20: note = Target: FXN; (-) strand; PAM type: NRG; PAM sequence: GGG
  source 1..20: mol_type = other DNA
tattgcaacctccgcctccc

SEQ ID NO: 10105 - DNA, 20 bp, synthetic construct
  misc_feature 1..20: note = Description of Artificial Sequence: Synthetic oligonucleotide
  misc_feature 1..20: note = Target: FXN; (-) strand; PAM type: NRG; PAM sequence: CGG
  source 1..20: mol_type = other DNA
ttattgcaacctccgcctcc

SEQ ID NO: 10106 - DNA, 20 bp, synthetic construct
  misc_feature 1..20: note = Description of Artificial Sequence: Synthetic oligonucleotide
  misc_feature 1..20: note = Target: FXN; (-) strand; PAM type: NRG; PAM sequence: AGG
  source 1..20: mol_type = other DNA
ggaatgcagtggcacaatct

SEQ ID NO: 10107 - DNA, 20 bp, synthetic construct
  misc_feature 1..20: note = Description of Artificial Sequence: Synthetic oligonucleotide
  misc_feature 1..20: note = Target: FXN; (-) strand; PAM type: NRG; PAM sequence: TAG
  source 1..20: mol_type = other DNA
tggaatgcagtggcacaatc

SEQ ID NO: 10108 - DNA, 20 bp, synthetic construct
  misc_feature 1..20: note = Description of Artificial Sequence: Synthetic oligonucleotide
  misc_feature 1..20: note = Target: FXN; (-) strand; PAM type: NRG; PAM sequence: TGG
  source 1..20: mol_type = other DNA
ttgcccaggctggaatgcag

SEQ ID NO: 10109 - DNA, 20 bp, synthetic construct
  misc_feature 1..20: note = Description of Artificial Sequence: Synthetic oligonucleotide
  misc_feature 1..20: note = Target: FXN; (-) strand; PAM type: NRG; PAM sequence: CAG
  source 1..20: mol_type = other DNA
ctgttgcccaggctggaatg

SEQ ID NO: 10110 - DNA, 20 bp, synthetic construct
  misc_feature 1..20: note = Description of Artificial Sequence: Synthetic oligonucleotide
  misc_feature 1..20: note = Target: FXN; (-) strand; PAM type: NRG; PAM sequence: TGG
  source 1..20: mol_type = other DNA
tcttgctctgttgcccaggc

SEQ ID NO: 10111 - DNA, 20 bp, synthetic construct
  misc_feature 1..20: note = Description of Artificial Sequence: Synthetic oligonucleotide
  misc_feature 1..20: note = Target: FXN; (-) strand; PAM type: NRG; PAM sequence: AGG
  source 1..20: mol_type = other DNA
ggagtcttgctctgttgccc

SEQ ID NO: 10112 - DNA, 20 bp, synthetic construct
  misc_feature 1..20: note = Description of Artificial Sequence: Synthetic oligonucleotide
  misc_feature 1..20: note = Target: FXN; (-) strand; PAM type: NRG; PAM sequence: CAG
  source 1..20: mol_type = other DNA
cggagtcttgctctgttgcc

SEQ ID NO: 10113 - DNA, 20 bp, synthetic construct
  misc_feature 1..20: note = Description of Artificial Sequence: Synthetic oligonucleotide
  misc_feature 1..20: note = Target: FXN; (-) strand; PAM type: NRG; PAM sequence: GAG
  source 1..20: mol_type = other DNA
ttttttttttttctgagacg

SEQ ID NO: 10114 - DNA, 20 bp, synthetic construct
  misc_feature 1..20: note = Description of Artificial Sequence: Synthetic oligonucleotide
  misc_feature 1..20: note = Target: FXN; (-) strand; PAM type: NRG; PAM sequence: CGG
  source 1..20: mol_type = other DNA
ttttttttttttttctgaga

SEQ ID NO: 10115 - DNA, 20 bp, synthetic construct
  misc_feature 1..20: note = Description of Artificial Sequence: Synthetic oligonucleotide
  misc_feature 1..20: note = Target: FXN; (-) strand; PAM type: NRG; PAM sequence: GAG
  source 1..20: mol_type = other DNA
tcctttttttttttttttct

SEQ ID NO: 10116 - DNA, 20 bp, synthetic construct
  misc_feature 1..20: note = Description of Artificial Sequence: Synthetic oligonucleotide
  misc_feature 1..20: note = Target: FXN; (-) strand; PAM type: NRG; PAM sequence: GAG
  source 1..20: mol_type = other DNA
ggaggtcaaggtcataggat

SEQ ID NO: 10117 - DNA, 20 bp, synthetic construct
  misc_feature 1..20: note = Description of Artificial Sequence: Synthetic oligonucleotide
  misc_feature 1..20: note = Target: FXN; (-) strand; PAM type: NRG; PAM sequence: AGG
  source 1..20: mol_type = other DNA
agcttggaggtcaaggtcat

SEQ ID NO: 10118 - DNA, 20 bp, synthetic construct
  misc_feature 1..20: note = Description of Artificial Sequence: Synthetic oligonucleotide
  misc_feature 1..20: note = Target: FXN; (-) strand; PAM type: NRG; PAM sequence: TAG
  source 1..20: mol_type = other DNA
aagcttggaggtcaaggtca

SEQ ID NO: 10119 - DNA, 20 bp, synthetic construct
  misc_feature 1..20: note = Description of Artificial Sequence: Synthetic oligonucleotide
  misc_feature 1..20: note = Target: FXN; (-) strand; PAM type: NRG; PAM sequence: AGG
  source 1..20: mol_type = other DNA
gaggcaaagcttggaggtca

SEQ ID NO: 10120 - DNA, 20 bp, synthetic construct
  misc_feature 1..20: note = Description of Artificial Sequence: Synthetic oligonucleotide
  misc_feature 1..20: note = Target: FXN; (-) strand; PAM type: NRG; PAM sequence: AAG
  source 1..20: mol_type = other DNA
ggaggcaaagcttggaggtc

SEQ ID NO: 10121 - DNA, 20 bp, synthetic construct
  misc_feature 1..20: note = Description of Artificial Sequence: Synthetic oligonucleotide
  misc_feature 1..20: note = Target: FXN; (-) strand; PAM type: NRG; PAM sequence: AGG
  source 1..20: mol_type = other DNA
ttgagggaggcaaagcttgg

SEQ ID NO: 10122 - DNA, 20 bp, synthetic construct
  misc_feature 1..20: note = Description of Artificial Sequence: Synthetic oligonucleotide
  misc_feature 1..20: note = Target: FXN; (-) strand; PAM type: NRG; PAM sequence: GAG
  source 1..20: mol_type = other DNA
cttgagggaggcaaagcttg

SEQ ID NO: 10123 - DNA, 20 bp, synthetic construct
  misc_feature 1..20: note = Description of Artificial Sequence: Synthetic oligonucleotide
  misc_feature 1..20: note = Target: FXN; (-) strand; PAM type: NRG; PAM sequence: TGG
  source 1..20: mol_type = other DNA
tgcttgagggaggcaaagct

SEQ ID NO: 10124 - DNA, 20 bp, synthetic construct
  misc_feature 1..20: note = Description of Artificial Sequence: Synthetic oligonucleotide
  misc_feature 1..20: note = Target: FXN; (-) strand; PAM type: NRG; PAM sequence: AAG
  source 1..20: mol_type = other DNA
tgttctgcttgagggaggca

SEQ ID NO: 10125 - DNA, 20 bp, synthetic construct
  misc_feature 1..20: note = Description of Artificial Sequence: Synthetic oligonucleotide
  misc_feature 1..20: note = Target: FXN; (-) strand; PAM type: NRG; PAM sequence: AGG
  source 1..20: mol_type = other DNA
cattctgttctgcttgaggg

SEQ ID NO: 10126 - DNA, 20 bp, synthetic construct
  misc_feature 1..20: note = Description of Artificial Sequence: Synthetic oligonucleotide
  misc_feature 1..20: note = Target: FXN; (-) strand; PAM type: NRG; PAM sequence: GAG
  source 1..20: mol_type = other DNA
ccattctgttctgcttgagg

SEQ ID NO: 10127 - DNA, 20 bp, synthetic construct
  misc_feature 1..20: note = Description of Artificial Sequence: Synthetic oligonucleotide
  misc_feature 1..20: note = Target: FXN; (-) strand; PAM type: NRG; PAM sequence: GGG
  source 1..20: mol_type = other DNA
ctccattctgttctgcttga

SEQ ID NO: 10128 - DNA, 20 bp, synthetic construct
  misc_feature 1..20: note = Description of Artificial Sequence: Synthetic oligonucleotide
  misc_feature 1..20: note = Target: FXN; (-) strand; PAM type: NRG; PAM sequence: AGG
  source 1..20: mol_type = other DNA
gctccattctgttctgcttg

SEQ ID NO: 10129 - DNA, 20 bp, synthetic construct
  misc_feature 1..20: note = Description of Artificial Sequence: Synthetic oligonucleotide
  misc_feature 1..20: note = Target: FXN; (-) strand; PAM type: NRG; PAM sequence: GAG
  source 1..20: mol_type = other DNA
ggctccattctgttctgctt

SEQ ID NO: 10130 - DNA, 20 bp, synthetic construct
  misc_feature 1..20: note = Description of Artificial Sequence: Synthetic oligonucleotide
  misc_feature 1..20: note = Target: FXN; (-) strand; PAM type: NRG; PAM sequence: AGG
  source 1..20: mol_type = other DNA
cttccgcctctgcctaaggg

SEQ ID NO: 10131 - DNA, 20 bp, synthetic construct
  misc_feature 1..20: note = Description of Artificial Sequence: Synthetic oligonucleotide
  misc_feature 1..20: note = Target: FXN; (-) strand; PAM type: NRG; PAM sequence: GAG
  source 1..20: mol_type = other DNA
acttccgcctctgcctaagg

SEQ ID NO: 10132 - DNA, 20 bp, synthetic construct
  misc_feature 1..20: note = Description of Artificial Sequence: Synthetic oligonucleotide
  misc_feature 1..20: note = Target: FXN; (-) strand; PAM type: NRG; PAM sequence: GGG
  source 1..20: mol_type = other DNA
aaacttccgcctctgcctaa

SEQ ID NO: 10133 - DNA, 20 bp, synthetic construct
  misc_feature 1..20: note = Description of Artificial Sequence: Synthetic oligonucleotide
  misc_feature 1..20: note = Target: FXN; (-) strand; PAM type: NRG; PAM sequence: AGG
  source 1..20: mol_type = other DNA
caaacttccgcctctgccta

SEQ ID NO: 10134 - DNA, 20 bp, synthetic construct
  misc_feature 1..20: note = Description of Artificial Sequence: Synthetic oligonucleotide
  misc_feature 1..20: note = Target: FXN; (-) strand; PAM type: NRG; PAM sequence: AAG
  source 1..20: mol_type = other DNA
gcaaacttccgcctctgcct

SEQ ID NO: 10135 - DNA, 20 bp, synthetic construct
  misc_feature 1..20: note = Description of Artificial Sequence: Synthetic oligonucleotide
  misc_feature 1..20: note = Target: FXN; (-) strand; PAM type: NRG; PAM sequence: AGG
  source 1..20: mol_type = other DNA
agaatggagaactaggtgag

SEQ ID NO: 10136 - DNA, 20 bp, synthetic construct
  misc_feature 1..20: note = Description of Artificial Sequence: Synthetic oligonucleotide
  misc_feature 1..20: note = Target: FXN; (-) strand; PAM type: NRG; PAM sequence: GAG
  source 1..20: mol_type = other DNA
aagaatggagaactaggtga

SEQ ID NO: 10137 - DNA, 20 bp, synthetic construct
  misc_feature 1..20: note = Description of Artificial Sequence: Synthetic oligonucleotide
  misc_feature 1..20: note = Target: FXN; (-) strand; PAM type: NRG; PAM sequence: GAG
  source 1..20: mol_type = other DNA
aaaagaatggagaactaggt

SEQ ID NO: 10138 - DNA, 20 bp, synthetic construct
  misc_feature 1..20: note = Description of Artificial Sequence: Synthetic oligonucleotide
  misc_feature 1..20: note = Target: FXN; (-) strand; PAM type: NRG; PAM sequence: AGG
  source 1..20: mol_type = other DNA
gaacaaaagaatggagaact

SEQ ID NO: 10139 - DNA, 20 bp, synthetic construct
  misc_feature 1..20: note = Description of Artificial Sequence: Synthetic oligonucleotide
  misc_feature 1..20: note = Target: FXN; (-) strand; PAM type: NRG; PAM sequence: TAG
  source 1..20: mol_type = other DNA
tgaacaaaagaatggagaac

SEQ ID NO: 10140 - DNA, 20 bp, synthetic construct
  misc_feature 1..20: note = Description of Artificial Sequence: Synthetic oligonucleotide
  misc_feature 1..20: note = Target: FXN; (-) strand; PAM type: NRG; PAM sequence: GAG
  source 1..20: mol_type = other DNA
aggctctgaacaaaagaatg

SEQ ID NO: 10141 - DNA, 20 bp, synthetic construct
  misc_feature 1..20: note = Description of Artificial Sequence: Synthetic oligonucleotide
  misc_feature 1..20: note = Target: FXN; (-) strand; PAM type: NRG; PAM sequence: TGG
  source 1..20: mol_type = other DNA
tcaggctctgaacaaaagaa

SEQ ID NO: 10142 - DNA, 20 bp, synthetic construct
  misc_feature 1..20: note = Description of Artificial Sequence: Synthetic oligonucleotide
  misc_feature 1..20: note = Target: FXN; (-) strand; PAM type: NRG; PAM sequence: AAG
  source 1..20: mol_type = other DNA
ggtattcaggctctgaacaa

SEQ ID NO: 10143 - DNA, 20 bp, synthetic construct
  misc_feature 1..20: note = Description of Artificial Sequence: Synthetic oligonucleotide
  misc_feature 1..20: note = Target: FXN; (-) strand; PAM type: NRG; PAM sequence: AGG
  source 1..20: mol_type = other DNA
tacagagcctgagggtattc

SEQ ID NO: 10144 - DNA, 20 bp, synthetic construct
  misc_feature 1..20: note = Description of Artificial Sequence: Synthetic oligonucleotide
  misc_feature 1..20: note = Target: FXN; (-) strand; PAM type: NRG; PAM sequence: CAG
  source 1..20: mol_type = other DNA
gtacagagcctgagggtatt

SEQ ID NO: 10145 - DNA, 20 bp, synthetic construct
  misc_feature 1..20: note = Description of Artificial Sequence: Synthetic oligonucleotide
  misc_feature 1..20: note = Target: FXN; (-) strand; PAM type: NRG; PAM sequence: GGG
  source 1..20: mol_type = other DNA
accccaagtacagagcctga

SEQ ID NO: 10146 - DNA, 20 bp, synthetic construct
  misc_feature 1..20: note = Description of Artificial Sequence: Synthetic oligonucleotide
  misc_feature 1..20: note = Target: FXN; (-) strand; PAM type: NRG; PAM sequence: AGG
  source 1..20: mol_type = other DNA
taccccaagtacagagcctg

SEQ ID NO: 10147 - DNA, 20 bp, synthetic construct
  misc_feature 1..20: note = Description of Artificial Sequence: Synthetic oligonucleotide
  misc_feature 1..20: note = Target: FXN; (-) strand; PAM type: NRG; PAM sequence: GAG
  source 1..20: mol_type = other DNA
ataccccaagtacagagcct

SEQ ID NO: 10148 - DNA, 20 bp, synthetic construct
  misc_feature 1..20: note = Description of Artificial Sequence: Synthetic oligonucleotide
  misc_feature 1..20: note = Target: FXN; (-) strand; PAM type: NRG; PAM sequence: GAG
  source 1..20: mol_type = other DNA
acagaaataccccaagtaca

SEQ ID NO: 10149 - DNA, 20 bp, synthetic construct
  misc_feature 1..20: note = Description of Artificial Sequence: Synthetic oligonucleotide
  misc_feature 1..20: note = Target: FXN; (-) strand; PAM type: NRG; PAM sequence: CAG
  source 1..20: mol_type = other DNA
gaacagaaataccccaagta

SEQ ID NO: 10150 - DNA, 20 bp, synthetic construct
  misc_feature 1..20: note = Description of Artificial Sequence: Synthetic oligonucleotide
  misc_feature 1..20: note = Target: FXN; (-) strand; PAM type: NRG; PAM sequence: AAG
  source 1..20: mol_type = other DNA
caagagaacagaaatacccc

SEQ ID NO: 10151 - DNA, 20 bp, synthetic construct
  misc_feature 1..20: note = Description of Artificial Sequence: Synthetic oligonucleotide
  misc_feature 1..20: note = Target: FXN; (-) strand; PAM type: NRG; PAM sequence: CAG
  source 1..20: mol_type = other DNA
gtgagcataaaacaagagaa

SEQ ID NO: 10152 - DNA, 20 bp, synthetic construct
  misc_feature 1..20: note = Description of Artificial Sequence: Synthetic oligonucleotide
  misc_feature 1..20: note = Target: FXN; (-) strand; PAM type: NRG; PAM sequence: GAG
  source 1..20: mol_type = other DNA
caaccgtgagcataaaacaa

SEQ ID NO: 10153 - DNA, 20 bp, synthetic construct
  misc_feature 1..20: note = Description of Artificial Sequence: Synthetic oligonucleotide
  misc_feature 1..20: note = Target: FXN; (-) strand; PAM type: NRG; PAM sequence: AAG
  source 1..20: mol_type = other DNA
cacaaccgtgagcataaaac

SEQ ID NO: 10154 - DNA, 20 bp, synthetic construct
  misc_feature 1..20: note = Description of Artificial Sequence: Synthetic oligonucleotide
  misc_feature 1..20: note = Target: FXN; (-) strand; PAM type: NRG; PAM sequence: GAG
  source 1..20: mol_type = other DNA
acaacaaacctcacaaccgt

SEQ ID NO: 10155 - DNA, 20 bp, synthetic construct
  misc_feature 1..20: note = Description of Artificial Sequence: Synthetic oligonucleotide
  misc_feature 1..20: note = Target: FXN; (-) strand; PAM type: NRG; PAM sequence: TGG
  source 1..20: mol_type = other DNA
tcctctgaaggaagggatcg

SEQ ID NO: 10156 - DNA, 20 bp, synthetic construct
  misc_feature 1..20: note = Description of Artificial Sequence: Synthetic oligonucleotide
  misc_feature 1..20: note = Target: FXN; (-) strand; PAM type: NRG; PAM sequence: GGG
  source 1..20: mol_type = other DNA
agtttactcctctgaaggaa

SEQ ID NO: 10157 - DNA, 20 bp, synthetic construct
  misc_feature 1..20: note = Description of Artificial Sequence: Synthetic oligonucleotide
  misc_feature 1..20: note = Target: FXN; (-) strand; PAM type: NRG; PAM sequence: AGG
  source 1..20: mol_type = other DNA
cagtttactcctctgaagga

SEQ ID NO: 10158 - DNA, 20 bp, synthetic construct
  misc_feature 1..20: note = Description of Artificial Sequence: Synthetic oligonucleotide
  misc_feature 1..20: note = Target: FXN; (-) strand; PAM type: NRG; PAM sequence: AAG
  source 1..20: mol_type = other DNA
tcagtttactcctctgaagg

SEQ ID NO: 10159 - DNA, 20 bp, synthetic construct
  misc_feature 1..20: note = Description of Artificial Sequence: Synthetic oligonucleotide
  misc_feature 1..20: note = Target: FXN; (-) strand; PAM type: NRG; PAM sequence: AGG
  source 1..20: mol_type = other DNA
acctcagtttactcctctga

SEQ ID NO: 10160 - DNA, 20 bp, synthetic construct
  misc_feature 1..20: note = Description of Artificial Sequence: Synthetic oligonucleotide
  misc_feature 1..20: note = Target: FXN; (-) strand; PAM type: NRG; PAM sequence: AAG
  source 1..20: mol_type = other DNA
aacctcagtttactcctctg

SEQ ID NO: 10161 - DNA, 20 bp, synthetic construct
  misc_feature 1..20: note = Description of Artificial Sequence: Synthetic oligonucleotide
  misc_feature 1..20: note = Target: FXN; (-) strand; PAM type: NRG; PAM sequence: CAG
  source 1..20: mol_type = other DNA
tgctaaaccttttggaacct

SEQ ID NO: 10162 - DNA, 20 bp, synthetic construct
  misc_feature 1..20: note = Description of Artificial Sequence: Synthetic oligonucleotide
  misc_feature 1..20: note = Target: FXN; (-) strand; PAM type: NRG; PAM sequence: TGG
  source 1..20: mol_type = other DNA
cgggcaactgctaaaccttt

SEQ ID NO: 10163 - DNA, 20 bp, synthetic construct
  misc_feature 1..20: note = Description of Artificial Sequence: Synthetic oligonucleotide
  misc_feature 1..20: note = Target: FXN; (-) strand; PAM type: NRG; PAM sequence: GGG
  source 1..20: mol_type = other DNA
ttgccaatttaatattcctc

SEQ ID NO: 10164 - DNA, 20 bp, synthetic construct
  misc_feature 1..20: note = Description of Artificial Sequence: Synthetic oligonucleotide
  misc_feature 1..20: note = Target: FXN; (-) strand; PAM type: NRG; PAM sequence: CGG
  source 1..20: mol_type = other DNA
tttgccaatttaatattcct

SEQ ID NO: 10165 - DNA, 20 bp, synthetic construct
  misc_feature 1..20: note = Description of Artificial Sequence: Synthetic oligonucleotide
  misc_feature 1..20: note = Target: FXN; (-) strand; PAM type: NRG; PAM sequence: AAG
  source 1..20: mol_type = other DNA
ggctgtttttaatcataaaa

SEQ ID NO: 10166 - DNA, 20 bp, synthetic construct
  misc_feature 1..20: note = Description of Artificial Sequence: Synthetic oligonucleotide
  misc_feature 1..20: note = Target: FXN; (-) strand; PAM type: NRG; PAM sequence: CGG
  source 1..20: mol_type = other DNA
cacaagtagaagtctttctt

SEQ ID NO: 10167 - DNA, 20 bp, synthetic construct
  misc_feature 1..20: note = Description of Artificial Sequence: Synthetic oligonucleotide
  misc_feature 1..20: note = Target: FXN; (-) strand; PAM type: NRG; PAM sequence: AAG
  source 1..20: mol_type = other DNA
tccttcaaaggcacaagtag

SEQ ID NO: 10168 - DNA, 20 bp, synthetic construct
  misc_feature 1..20: note = Description of Artificial Sequence: Synthetic oligonucleotide
  misc_feature 1..20: note = Target: FXN; (-) strand; PAM type: NRG; PAM sequence: TAG
  source 1..20: mol_type = other DNA
tactccttcaaaggcacaag

SEQ ID NO: 10169 - DNA, 20 bp, synthetic construct
  misc_feature 1..20: note = Description of Artificial Sequence: Synthetic oligonucleotide
  misc_feature 1..20: note = Target: FXN; (-) strand; PAM type: NRG; PAM sequence: AAG
  source 1..20: mol_type = other DNA
agttactccttcaaaggcac

SEQ ID NO: 10170 - DNA, 20 bp, synthetic construct
  misc_feature 1..20: note = Description of Artificial Sequence: Synthetic oligonucleotide
  misc_feature 1..20: note = Target: FXN; (-) strand; PAM type: NRG; PAM sequence: AGG
  source 1..20: mol_type = other DNA
aaatgcagttactccttcaa

SEQ ID NO: 10171 - DNA, 20 bp, synthetic construct
  misc_feature 1..20: note = Description of Artificial Sequence: Synthetic oligonucleotide
  misc_feature 1..20: note = Target: FXN; (-) strand; PAM type: NRG; PAM sequence: AAG
  source 1..20: mol_type = other DNA
caaatgcagttactccttca

SEQ ID NO: 10172 - DNA, 20 bp, synthetic construct
  misc_feature 1..20: note = Description of Artificial Sequence: Synthetic oligonucleotide
  misc_feature 1..20: note = Target: FXN; (-) strand; PAM type: NRG; PAM sequence: CAG
  source 1..20: mol_type = other DNA
actggtgggaaggtcaaatg

SEQ ID NO: 10173 - DNA, 20 bp, synthetic construct
  misc_feature 1..20: note = Description of Artificial Sequence: Synthetic oligonucleotide
  misc_feature 1..20: note = Target: FXN; (-) strand; PAM type: NRG; PAM sequence: AGG
  source 1..20: mol_type = other DNA
gatggttgttactggtggga

SEQ ID NO: 10174 - DNA, 20 bp, synthetic construct
  misc_feature 1..20: note = Description of Artificial Sequence: Synthetic oligonucleotide
  misc_feature 1..20: note = Target: FXN; (-) strand; PAM type: NRG; PAM sequence: AAG
  source 1..20: mol_type = other DNA
tgatggttgttactggtggg

SEQ ID NO: 10175 - DNA, 20 bp, synthetic construct
  misc_feature 1..20: note = Description of Artificial Sequence: Synthetic oligonucleotide
  misc_feature 1..20: note = Target: FXN; (-) strand; PAM type: NRG; PAM sequence: GGG
  source 1..20: mol_type = other DNA
atttgatggttgttactggt

SEQ ID NO: 10176 - DNA, 20 bp, synthetic construct
  misc_feature 1..20: note = Description of Artificial Sequence: Synthetic oligonucleotide
  misc_feature 1..20: note = Target: FXN; (-) strand; PAM type: NRG; PAM sequence: TGG
  source 1..20: mol_type = other DNA
gatttgatggttgttactgg

SEQ ID NO: 10177 - DNA, 20 bp, synthetic construct
  misc_feature 1..20: note = Description of Artificial Sequence: Synthetic oligonucleotide
  misc_feature 1..20: note = Target: FXN; (-) strand; PAM type: NRG; PAM sequence: TGG
  source 1..20: mol_type = other DNA
agagatttgatggttgttac

SEQ ID NO: 10178 - DNA, 20 bp, synthetic construct
  misc_feature 1..20: note = Description of Artificial Sequence: Synthetic oligonucleotide
  misc_feature 1..20: note = Target: FXN; (-) strand; PAM type: NRG; PAM sequence: TGG
  source 1..20: mol_type = other DNA
ttaatttaatagagatttga

SEQ ID NO: 10179 - DNA, 20 bp, synthetic construct
  misc_feature 1..20: note = Description of Artificial Sequence: Synthetic oligonucleotide
  misc_feature 1..20: note = Target: FXN; (-) strand; PAM type: NRG; PAM sequence: GAG
  source 1..20: mol_type = other DNA
tgtgtgtgtttaatttaata

SEQ ID NO: 10180 - DNA, 20 bp, synthetic construct
  misc_feature 1..20: note = Description of Artificial Sequence: Synthetic oligonucleotide
  misc_feature 1..20: note = Target: FXN; (-) strand; PAM type: NRG; PAM sequence: TAG
  source 1..20: mol_type = other DNA
tgtgtgtgtgtttaatttaa

SEQ ID NO: 10181 - DNA, 20 bp, synthetic construct
  misc_feature 1..20: note = Description of Artificial Sequence: Synthetic oligonucleotide
  misc_feature 1..20: note = Target: FXN; (-) strand; PAM type: NRG; PAM sequence: TAG
  source 1..20: mol_type = other DNA
agtcgctgataccttcacaa

SEQ ID NO: 10182 - DNA, 20 bp, synthetic construct
  misc_feature 1..20: note = Description of Artificial Sequence: Synthetic oligonucleotide
  misc_feature 1..20: note = Target: FXN; (-) strand; PAM type: NRG; PAM sequence: TAG
  source 1..20: mol_type = other DNA
ccctcaaaccttagttgtct

SEQ ID NO: 10183 - DNA, 20 bp, synthetic construct
  misc_feature 1..20: note = Description of Artificial Sequence: Synthetic oligonucleotide
  misc_feature 1..20: note = Target: FXN; (-) strand; PAM type: NRG; PAM sequence: TAG
  source 1..20: mol_type = other DNA
gatcctggcccctcaaacct

SEQ ID NO: 10184 - DNA, 20 bp, synthetic construct
  misc_feature 1..20: note = Description of Artificial Sequence: Synthetic oligonucleotide
  misc_feature 1..20: note = Target: FXN; (-) strand; PAM type: NRG; PAM sequence: TGG
  source 1..20: mol_type = other DNA
tttccatctctccaggatcc

SEQ ID NO: 10185 - DNA, 20 bp, synthetic construct
  misc_feature 1..20: note = Description of Artificial Sequence: Synthetic oligonucleotide
  misc_feature 1..20: note = Target: FXN; (-) strand; PAM type: NRG; PAM sequence: AGG
  source 1..20: mol_type = other DNA
agggaagtttccatctctcc

SEQ ID NO: 10186 - DNA, 20 bp, synthetic construct
  misc_feature 1..20: note = Description of Artificial Sequence: Synthetic oligonucleotide
  misc_feature 1..20: note = Target: FXN; (-) strand; PAM type: NRG; PAM sequence: CAG
  source 1..20: mol_type = other DNA
cagggaagtttccatctctc

SEQ ID NO: 10187 - DNA, 20 bp, synthetic construct
  misc_feature 1..20: note = Description of Artificial Sequence: Synthetic oligonucleotide
  misc_feature 1..20: note = Target: FXN; (-) strand; PAM type: NRG; PAM sequence: AAG
  source 1..20: mol_type = other DNA
atgtggggctcacctcaggg

SEQ ID NO: 10188 - DNA, 20 bp, synthetic construct
  misc_feature 1..20: note = Description of Artificial Sequence: Synthetic oligonucleotide
  misc_feature 1..20: note = Target: FXN; (-) strand; PAM type: NRG; PAM sequence: GGG
  source 1..20: mol_type = other DNA
agaatgtggggctcacctca

SEQ ID NO: 10189 - DNA, 20 bp, synthetic construct
  misc_feature 1..20: note = Description of Artificial Sequence: Synthetic oligonucleotide
  misc_feature 1..20: note = Target: FXN; (-) strand; PAM type: NRG; PAM sequence: AGG
  source 1..20: mol_type = other DNA
gagaatgtggggctcacctc

SEQ ID NO: 10190 - DNA, 20 bp, synthetic construct
  misc_feature 1..20: note = Description of Artificial Sequence: Synthetic oligonucleotide
  misc_feature 1..20: note = Target: FXN; (-) strand; PAM type: NRG; PAM sequence: CAG
  source 1..20: mol_type = other DNA
tgagaatgtggggctcacct

SEQ ID NO: 10191 - DNA, 20 bp, synthetic construct
  misc_feature 1..20: note = Description of Artificial Sequence: Synthetic oligonucleotide
  misc_feature 1..20: note = Target: FXN; (-) strand; PAM type: NRG; PAM sequence: GGG
  source 1..20: mol_type = other DNA
gaaaagtgtctgagaatgtg

SEQ ID NO: 10192 - DNA, 20 bp, synthetic construct
  misc_feature 1..20: note = Description of Artificial Sequence: Synthetic oligonucleotide
  misc_feature 1..20: note = Target: FXN; (-) strand; PAM type: NRG; PAM sequence: GGG
  source 1..20: mol_type = other DNA
ggaaaagtgtctgagaatgt

SEQ ID NO: 10193 - DNA, 20 bp, synthetic construct
  misc_feature 1..20: note = Description of Artificial Sequence: Synthetic oligonucleotide
  misc_feature 1..20: note = Target: FXN; (-) strand; PAM type: NRG; PAM sequence: TGG
  source 1..20: mol_type = other DNA
aggaaaagtgtctgagaatg

SEQ ID NO: 10194 - DNA, 20 bp, synthetic construct
  misc_feature 1..20: note = Description of Artificial Sequence: Synthetic oligonucleotide
  misc_feature 1..20: note = Target: FXN; (-) strand; PAM type: NRG; PAM sequence: GAG
  source 1..20: mol_type = other DNA
acatccaaggaaaagtgtct

SEQ ID NO: 10195 - DNA, 20 bp, synthetic construct
  misc_feature 1..20: note = Description of Artificial Sequence: Synthetic oligonucleotide
  misc_feature 1..20: note = Target: FXN; (-) strand; PAM type: NRG; PAM sequence: AAG
  source 1..20: mol_type = other DNA
tgctcaaaacatccaaggaa

SEQ ID NO: 10196 - DNA, 20 bp, synthetic construct
  misc_feature 1..20: note = Description of Artificial Sequence: Synthetic oligonucleotide
  misc_feature 1..20: note = Target: FXN; (-) strand; PAM type: NRG; PAM sequence: AGG
  source 1..20: mol_type = other DNA
agcagtgctcaaaacatcca

SEQ ID NO: 10197 - DNA, 20 bp, synthetic construct
  misc_feature 1..20: note = Description of Artificial Sequence: Synthetic oligonucleotide
  misc_feature 1..20: note = Target: FXN; (-) strand; PAM type: NRG; PAM sequence: AAG
  source 1..20: mol_type = other DNA
aagcagtgctcaaaacatcc

SEQ ID NO: 10198 - DNA, 20 bp, synthetic construct
  misc_feature 1..20: note = Description of Artificial Sequence: Synthetic oligonucleotide
  misc_feature 1..20: note = Target: FXN; (-) strand; PAM type: NRG; PAM sequence: CAG
  source 1..20: mol_type = other DNA
tgttttcccaggaattaaag

SEQ ID NO: 10199 - DNA, 20 bp, synthetic construct
  misc_feature 1..20: note = Description of Artificial Sequence: Synthetic oligonucleotide
  misc_feature 1..20: note = Target: FXN; (-) strand; PAM type: NRG; PAM sequence: AAG
  source 1..20: mol_type = other DNA
aattgttttcccaggaatta

SEQ ID NO: 10200 - DNA, 20 bp, synthetic construct
  misc_feature 1..20: note = Description of Artificial Sequence: Synthetic oligonucleotide
  misc_feature 1..20: note = Target: FXN; (-) strand; PAM type: NRG; PAM sequence: AGG
  source 1..20: mol_type = other DNA
gtggaaggaattgttttccc

SEQ ID NO: 10201 - DNA, 20 bp, synthetic construct
  misc_feature 1..20: note = Description of Artificial Sequence: Synthetic oligonucleotide
  misc_feature 1..20: note = Target: FXN; (-) strand; PAM type: NRG; PAM sequence: CAG
  source 1..20: mol_type = other DNA
agtggaaggaattgttttcc

SEQ ID NO: 10202 - DNA, 20 bp, synthetic construct
  misc_feature 1..20: note = Description of Artificial Sequence: Synthetic oligonucleotide
  misc_feature 1..20: note = Target: FXN; (-) strand; PAM type: NRG; PAM sequence: AGG
  source 1..20: mol_type = other DNA
cagagtctgtgcacagtgga

SEQ ID NO: 10203 - DNA, 20 bp, synthetic construct
  misc_feature 1..20: note = Description of Artificial Sequence: Synthetic oligonucleotide
  misc_feature 1..20: note = Target: FXN; (-) strand; PAM type: NRG; PAM sequence: AAG
  source 1..20: mol_type = other DNA
ccagagtctgtgcacagtgg

SEQ ID NO: 10204 - DNA, 20 bp, synthetic construct
  misc_feature 1..20: note = Description of Artificial Sequence: Synthetic oligonucleotide
  misc_feature 1..20: note = Target: FXN; (-) strand; PAM type: NRG; PAM sequence: TGG
  source 1..20: mol_type = other DNA
gccccagagtctgtgcacag

SEQ ID NO: 10205 - DNA, 20 bp, synthetic construct
  misc_feature 1..20: note = Description of Artificial Sequence: Synthetic oligonucleotide
  misc_feature 1..20: note = Target: FXN; (-) strand; PAM type: NRG; PAM sequence: CAG
  source 1..20: mol_type = other DNA
ctggccccagagtctgtgca

SEQ ID NO: 10206 - DNA, 20 bp, synthetic construct
  misc_feature 1..20: note = Description of Artificial Sequence: Synthetic oligonucleotide
  misc_feature 1..20: note = Target: FXN; (-) strand; PAM type: NRG; PAM sequence: GAG
  source 1..20: mol_type = other DNA
acccaagctgtctggcccca

SEQ ID NO: 10207 - DNA, 20 bp, synthetic construct
  misc_feature 1..20: note = Description of Artificial Sequence: Synthetic oligonucleotide
  misc_feature 1..20: note = Target: FXN; (-) strand; PAM type: NRG; PAM sequence: CAG
  source 1..20: mol_type = other DNA
gaacccaagctgtctggccc

SEQ ID NO: 10208 - DNA, 20 bp, synthetic construct
  misc_feature 1..20: note = Description of Artificial Sequence: Synthetic oligonucleotide
  misc_feature 1..20: note = Target: FXN; (-) strand; PAM type: NRG; PAM sequence: TGG
  source 1..20: mol_type = other DNA
gggattgaacccaagctgtc

SEQ ID NO: 10209 - DNA, 20 bp, synthetic construct
  misc_feature 1..20: note = Description of Artificial Sequence: Synthetic oligonucleotide
  misc_feature 1..20: note = Target: FXN; (-) strand; PAM type: NRG; PAM sequence: AAG
  source 1..20: mol_type = other DNA
gcagagctgggattgaaccc

SEQ ID NO: 10210 - DNA, 20 bp, synthetic construct
  misc_feature 1..20: note = Description of Artificial Sequence: Synthetic oligonucleotide
  misc_feature 1..20: note = Target: FXN; (-) strand; PAM type: NRG; PAM sequence: GGG
  source 1..20: mol_type = other DNA
agacattaagtggcagagct

SEQ ID NO: 10211 - DNA, 20 bp, synthetic construct
  misc_feature 1..20: note = Description of Artificial Sequence: Synthetic oligonucleotide
  misc_feature 1..20: note = Target: FXN; (-) strand; PAM type: NRG; PAM sequence: TGG
  source 1..20: mol_type = other DNA
cagacattaagtggcagagc

SEQ ID NO: 10212 - DNA, 20 bp, synthetic construct
  misc_feature 1..20: note = Description of Artificial Sequence: Synthetic oligonucleotide
  misc_feature 1..20: note = Target: FXN; (-) strand; PAM type: NRG; PAM sequence: GAG
  source 1..20: mol_type = other DNA
tacacagacattaagtggca

SEQ ID NO: 10213 - DNA, 20 bp, synthetic construct
  misc_feature 1..20: note = Description of Artificial Sequence: Synthetic oligonucleotide
  misc_feature 1..20: note = Target: FXN; (-) strand; PAM type: NRG; PAM sequence: CAG
  source 1..20: mol_type = other DNA
gatacacagacattaagtgg

SEQ ID NO: 10214 - DNA, 20 bp, synthetic construct
  misc_feature 1..20: note = Description of Artificial Sequence: Synthetic oligonucleotide
  misc_feature 1..20: note = Target: FXN; (-) strand; PAM type: NRG; PAM sequence: TGG
  source 1..20: mol_type = other DNA
acagatacacagacattaag

SEQ ID NO: 10215 - DNA, 20 bp, synthetic construct
  misc_feature 1..20: note = Description of Artificial Sequence: Synthetic oligonucleotide
  misc_feature 1..20: note = Target: FXN; (-) strand; PAM type: NRG; PAM sequence: AAG
  source 1..20: mol_type = other DNA
tacacagatacacagacatt

SEQ ID NO: 10216 - DNA, 20 bp, synthetic construct
  misc_feature 1..20: note = Description of Artificial Sequence: Synthetic oligonucleotide
  misc_feature 1..20: note = Target: FXN; (-) strand; PAM type: NRG; PAM sequence: CAG
  source 1..20: mol_type = other DNA
aacttgcctacacagataca

SEQ ID NO: 10217 - DNA, 20 bp, synthetic construct
  misc_feature 1..20: note = Description of Artificial Sequence: Synthetic oligonucleotide
  misc_feature 1..20: note = Target: FXN; (-) strand; PAM type: NRG; PAM sequence: CAG
  source 1..20: mol_type = other DNA
caaagggtaacttgcctaca

SEQ ID NO: 10218 - DNA, 20 bp, synthetic construct
  misc_feature 1..20: note = Description of Artificial Sequence: Synthetic oligonucleotide
  misc_feature 1..20: note = Target: FXN; (-) strand; PAM type: NRG; PAM sequence: GGG
  source 1..20: mol_type = other DNA
gaggaaactgacgcaccaaa

SEQ ID NO: 10219 - DNA, 20 bp, synthetic construct
  misc_feature 1..20: note = Description of Artificial Sequence: Synthetic oligonucleotide
  misc_feature 1..20: note = Target: FXN; (-) strand; PAM type: NRG; PAM sequence: AGG
  source 1..20: mol_type = other DNA
tgaggaaactgacgcaccaa

SEQ ID NO: 10220 - DNA, 20 bp, synthetic construct
  misc_feature 1..20: note = Description of Artificial Sequence: Synthetic oligonucleotide
  misc_feature 1..20: note = Target: FXN; (-) strand; PAM type: NRG; PAM sequence: AAG
  source 1..20: mol_type = other DNA
atgaggaaactgacgcacca

SEQ ID NO: 10221 - DNA, 20 bp, synthetic construct
  misc_feature 1..20: note = Description of Artificial Sequence: Synthetic oligonucleotide
  misc_feature 1..20: note = Target: FXN; (-) strand; PAM type: NRG; PAM sequence: AGG
  source 1..20: mol_type = other DNA
atagttgtgttttacagatg

SEQ ID NO: 10222 - DNA, 20 bp, synthetic construct
  misc_feature 1..20: note = Description of Artificial Sequence: Synthetic oligonucleotide
  misc_feature 1..20: note = Target: FXN; (-) strand; PAM type: NRG; PAM sequence: GAG
  source 1..20: mol_type = other DNA
tatagttgtgttttacagat

SEQ ID NO: 10223 - DNA, 20 bp, synthetic construct
  misc_feature 1..20: note = Description of Artificial Sequence: Synthetic oligonucleotide
  misc_feature 1..20: note = Target: FXN; (-) strand; PAM type: NRG; PAM sequence: CAG
  source 1..20: mol_type = other DNA
tcaactatagttgtgtttta

SEQ ID NO: 10224 - DNA, 20 bp, synthetic construct
  misc_feature 1..20: note = Description of Artificial Sequence: Synthetic oligonucleotide
  misc_feature 1..20: note = Target: FXN; (-) strand; PAM type: NRG; PAM sequence: TAG
  source 1..20: mol_type = other DNA
taacgaatgaggatcaacta

SEQ ID NO: 10225 - DNA, 20 bp, synthetic construct
  misc_feature 1..20: note = Description of Artificial Sequence: Synthetic oligonucleotide
  misc_feature 1..20: note = Target: FXN; (-) strand; PAM type: NRG; PAM sequence: AGG
  source 1..20: mol_type = other DNA
gtacagactcttaacgaatg

SEQ ID NO: 10226 - DNA, 20 bp, synthetic construct
  misc_feature 1..20: note = Description of Artificial Sequence: Synthetic oligonucleotide
  misc_feature 1..20: note = Target: FXN; (-) strand; PAM type: NRG; PAM sequence: GAG
  source 1..20: mol_type = other DNA
agtacagactcttaacgaat

SEQ ID NO: 10227 - DNA, 20 bp, synthetic construct
  misc_feature 1..20: note = Description of Artificial Sequence: Synthetic oligonucleotide
  misc_feature 1..20: note = Target: FXN; (-) strand; PAM type: NRG; PAM sequence: CAG
  source 1..20: mol_type = other DNA
agtgagcaaattaacaagta

SEQ ID NO: 10228 - DNA, 20 bp, synthetic construct
  misc_feature 1..20: note = Description of Artificial Sequence: Synthetic oligonucleotide
  misc_feature 1..20: note = Target: FXN; (-) strand; PAM type: NRG; PAM sequence: AAG
  source 1..20: mol_type = other DNA
tagcaagtgagcaaattaac

SEQ ID NO: 10229 - DNA, 20 bp, synthetic construct
  misc_feature 1..20: note = Description of Artificial Sequence: Synthetic oligonucleotide
  misc_feature 1..20: note = Target: FXN; (-) strand; PAM type: NRG; PAM sequence: GAG
  source 1..20: mol_type = other DNA
ggtaacaaattttagcaagt

SEQ ID NO: 10230 - DNA, 20 bp, synthetic construct
  misc_feature 1..20: note = Description of Artificial Sequence: Synthetic oligonucleotide
  misc_feature 1..20: note = Target: FXN; (-) strand; PAM type: NRG; PAM sequence: AAG
  source 1..20: mol_type = other DNA
ttggggtaacaaattttagc

SEQ ID NO: 10231 - DNA, 20 bp, synthetic construct
  misc_feature 1..20: note = Description of Artificial Sequence: Synthetic oligonucleotide
  misc_feature 1..20: note = Target: FXN; (-) strand; PAM type: NRG; PAM sequence: TAG
  source 1..20: mol_type = other DNA
gattttggggtaacaaattt

SEQ ID NO: 10232 - DNA, 20 bp, synthetic construct
  misc_feature 1..20: note = Description of Artificial Sequence: Synthetic oligonucleotide
  misc_feature 1..20: note = Target: FXN; (-) strand; PAM type: NRG; PAM sequence: GGG
  source 1..20: mol_type = other DNA
ggctaggggtactgattttg

SEQ ID NO: 10233 - DNA, 20 bp, synthetic construct
  misc_feature 1..20: note = Description of Artificial Sequence: Synthetic oligonucleotide
  misc_feature 1..20: note = Target: FXN; (-) strand; PAM type: NRG; PAM sequence: GGG
  source 1..20: mol_type = other DNA
aggctaggggtactgatttt

SEQ ID NO: 10234 - DNA, 20 bp, synthetic construct
  misc_feature 1..20: note = Description of Artificial Sequence: Synthetic oligonucleotide
  misc_feature 1..20: note = Target: FXN; (-) strand; PAM type: NRG; PAM sequence: TGG
  source 1..20: mol_type = other DNA
aaggctaggggtactgattt

SEQ ID NO: 10235 - DNA, 20 bp, synthetic construct
  misc_feature 1..20: note = Description of Artificial Sequence: Synthetic oligonucleotide
  misc_feature 1..20: note = Target: FXN; (-) strand; PAM type: NRG; PAM sequence: GGG
  source 1..20: mol_type = other DNA
aaacgaccccaaaaggctag

SEQ ID NO: 10236 - DNA, 20 bp, synthetic construct
  misc_feature 1..20: note = Description of Artificial Sequence: Synthetic oligonucleotide
  misc_feature 1..20: note = Target: FXN; (-) strand; PAM type: NRG; PAM sequence: GGG
  source 1..20: mol_type = other DNA
gaaacgaccccaaaaggcta

SEQ ID NO: 10237 - DNA, 20 bp, synthetic construct
  misc_feature 1..20: note = Description of Artificial Sequence: Synthetic oligonucleotide
  misc_feature 1..20: note = Target: FXN; (-) strand; PAM type: NRG; PAM sequence: AGG
  source 1..20: mol_type = other DNA
tgaaacgaccccaaaaggct

SEQ ID NO: 10238 - DNA, 20 bp, synthetic construct
  misc_feature 1..20: note = Description of Artificial Sequence: Synthetic oligonucleotide
  misc_feature 1..20: note = Target: FXN; (-) strand; PAM type: NRG; PAM sequence: TAG
  source 1..20: mol_type = other DNA
ttgaaacgaccccaaaaggc

SEQ ID NO: 10239 - DNA, 20 bp, synthetic construct
  misc_feature 1..20: note = Description of Artificial Sequence: Synthetic oligonucleotide
  misc_feature 1..20: note = Target: FXN; (-) strand; PAM type: NRG; PAM sequence: AGG
  source 1..20: mol_type = other DNA
atctttgaaacgaccccaaa

SEQ ID NO: 10240 - DNA, 20 bp, synthetic construct
  misc_feature 1..20: note = Description of Artificial Sequence: Synthetic oligonucleotide
  misc_feature 1..20: note = Target: FXN; (-) strand; PAM type: NRG; PAM sequence: AAG
  source 1..20: mol_type = other DNA
catctttgaaacgaccccaa

SEQ ID NO: 10241 - DNA, 20 bp, synthetic construct
  misc_feature 1..20: note = Description of Artificial Sequence: Synthetic oligonucleotide
  misc_feature 1..20: note = Target: FXN; (-) strand; PAM type: NRG; PAM sequence: GAG
  source 1..20: mol_type = other DNA
ctgggaacatgagcctggag

SEQ ID NO: 10242 - DNA, 20 bp, synthetic construct
  misc_feature 1..20: note = Description of Artificial Sequence: Synthetic oligonucleotide
  misc_feature 1..20: note = Target: FXN; (-) strand; PAM type: NRG; PAM sequence: AGG
  source 1..20: mol_type = other DNA
ggctgggaacatgagcctgg

SEQ ID NO: 10243 - DNA, 20 bp, synthetic construct
  misc_feature 1..20: note = Description of Artificial Sequence: Synthetic oligonucleotide
  misc_feature 1..20: note = Target: FXN; (-) strand; PAM type: NRG; PAM sequence: GAG
  source 1..20: mol_type = other DNA
tggctgggaacatgagcctg

SEQ ID NO: 10244 - DNA, 20 bp, synthetic construct
  misc_feature 1..20: note = Description of Artificial Sequence: Synthetic oligonucleotide
  misc_feature 1..20: note = Target: FXN; (-) strand; PAM type: NRG; PAM sequence: TGG
  source 1..20: mol_type = other DNA
cttggctgggaacatgagcc

SEQ ID NO: 10245 - DNA, 20 bp, synthetic construct
  misc_feature 1..20: note = Description of Artificial Sequence: Synthetic oligonucleotide
  misc_feature 1..20: note = Target: FXN; (-) strand; PAM type: NRG; PAM sequence: GAG
  source 1..20: mol_type = other DNA
tggaccttggctgggaacat

SEQ ID NO: 10246 - DNA, 20 bp, synthetic construct
  misc_feature 1..20: note = Description of Artificial Sequence: Synthetic oligonucleotide
  misc_feature 1..20: note = Target: FXN; (-) strand; PAM type: NRG; PAM sequence: GGG
  source 1..20: mol_type = other DNA
cactttgttggaccttggct

SEQ ID NO: 10247 - DNA, 20 bp, synthetic construct
  misc_feature 1..20: note = Description of Artificial Sequence: Synthetic oligonucleotide
  misc_feature 1..20: note = Target: FXN; (-) strand; PAM type: NRG; PAM sequence: TGG
  source 1..20: mol_type = other DNA
gcactttgttggaccttggc

SEQ ID NO: 10248 - DNA, 20 bp, synthetic construct
  misc_feature 1..20: note = Description of Artificial Sequence: Synthetic oligonucleotide
  misc_feature 1..20: note = Target: FXN; (-) strand; PAM type: NRG; PAM sequence: TGG
  source 1..20: mol_type = other DNA
ggcagcactttgttggacct

SEQ ID NO: 10249 - DNA, 20 bp, synthetic construct
  misc_feature 1..20: note = Description of Artificial Sequence: Synthetic oligonucleotide
  misc_feature 1..20: note = Target: FXN; (-) strand; PAM type: NRG; PAM sequence: TGG
  source 1..20: mol_type = other DNA
aaggcagggcagcactttgt

SEQ ID NO: 10250 - DNA, 20 bp, synthetic construct
  misc_feature 1..20: note = Description of Artificial Sequence: Synthetic oligonucleotide
  misc_feature 1..20: note = Target: FXN; (-) strand; PAM type: NRG; PAM sequence: CAG
  source 1..20: mol_type = other DNA
gctgaaataagaaggcaggg

SEQ ID NO: 10251 - DNA, 20 bp, synthetic construct
  misc_feature 1..20: note = Description of Artificial Sequence: Synthetic oligonucleotide
  misc_feature 1..20: note = Target: FXN; (-) strand; PAM type: NRG; PAM sequence: GGG
  source 1..20: mol_type = other DNA
acagctgaaataagaaggca

SEQ ID NO: 10252 - DNA, 20 bp, synthetic construct
  misc_feature 1..20: note = Description of Artificial Sequence: Synthetic oligonucleotide
  misc_feature 1..20: note = Target: FXN; (-) strand; PAM type: NRG; PAM sequence: AGG
  source 1..20: mol_type = other DNA
gacagctgaaataagaaggc

SEQ ID NO: 10253 - DNA, 20 bp, synthetic construct
  misc_feature 1..20: note = Description of Artificial Sequence: Synthetic oligonucleotide
  misc_feature 1..20: note = Target: FXN; (-) strand; PAM type: NRG; PAM sequence: CAG
  source 1..20: mol_type = other DNA
tgacagctgaaataagaagg

SEQ ID NO: 10254 - DNA, 20 bp, synthetic construct
  misc_feature 1..20: note = Description of Artificial Sequence: Synthetic oligonucleotide
  misc_feature 1..20: note = Target: FXN; (-) strand; PAM type: NRG; PAM sequence: AGG
  source 1..20: mol_type = other DNA
ctatgacagctgaaataaga

SEQ ID NO: 10255 - DNA, 20 bp, synthetic construct
  misc_feature 1..20: note = Description of Artificial Sequence: Synthetic oligonucleotide
  misc_feature 1..20: note = Target: FXN; (-) strand; PAM type: NRG; PAM sequence: AAG
  source 1..20: mol_type = other DNA
actatgacagctgaaataag

SEQ ID NO: 10256 - DNA, 20 bp, synthetic construct
  misc_feature 1..20: note = Description of Artificial Sequence: Synthetic oligonucleotide
  misc_feature 1..20: note = Target: FXN; (-) strand; PAM type: NRG; PAM sequence: AAG
  source 1..20: mol_type = other DNA
tacactatgacagctgaaat

SEQ ID NO: 10257 - DNA, 20 bp, synthetic construct
  misc_feature 1..20: note = Description of Artificial Sequence: Synthetic oligonucleotide
  misc_feature 1..20: note = Target: FXN; (-) strand; PAM type: NRG; PAM sequence: CAG
  source 1..20: mol_type = other DNA
ggacacagtttacactatga

SEQ ID NO: 10258 - DNA, 20 bp, synthetic construct
  misc_feature 1..20: note = Description of Artificial Sequence: Synthetic oligonucleotide
  misc_feature 1..20: note = Target: FXN; (-) strand; PAM type: NRG; PAM sequence: CAG
  source 1..20: mol_type = other DNA
atcagactgtgaaaaggaca

SEQ ID NO: 10259 - DNA, 20 bp, synthetic construct
  misc_feature 1..20: note = Description of Artificial Sequence: Synthetic oligonucleotide
  misc_feature 1..20: note = Target: FXN; (-) strand; PAM type: NRG; PAM sequence: AGG
  source 1..20: mol_type = other DNA
gcactaatcagactgtgaaa

SEQ ID NO: 10260 - DNA, 20 bp, synthetic construct
  misc_feature 1..20: note = Description of Artificial Sequence: Synthetic oligonucleotide
  misc_feature 1..20: note = Target: FXN; (-) strand; PAM type: NRG; PAM sequence: AAG
  source 1..20: mol_type = other DNA
ggcactaatcagactgtgaa

SEQ ID NO: 10261 - DNA, 20 bp, synthetic construct
  misc_feature 1..20: note = Description of Artificial Sequence: Synthetic oligonucleotide
  misc_feature 1..20: note = Target: FXN; (-) strand; PAM type: NRG; PAM sequence: CAG
  source 1..20: mol_type = other DNA
ctgaaaaacatggcactaat

SEQ ID NO: 10262 - DNA, 20 bp, synthetic construct
  misc_feature 1..20: note = Description of Artificial Sequence: Synthetic oligonucleotide
  misc_feature 1..20: note = Target: FXN; (-) strand; PAM type: NRG; PAM sequence: TGG
  source 1..20: mol_type = other DNA
gcataaaaatctgaaaaaca

SEQ ID NO: 10263 - DNA, 20 bp, synthetic construct
  misc_feature 1..20: note = Description of Artificial Sequence: Synthetic oligonucleotide
  misc_feature 1..20: note = Target: FXN; (-) strand; PAM type: NRG; PAM sequence: AAG
  source 1..20: mol_type = other DNA
cagagaaataaccaagaaaa

SEQ ID NO: 10264 - DNA, 20 bp, synthetic construct
  misc_feature 1..20: note = Description of Artificial Sequence: Synthetic oligonucleotide
  misc_feature 1..20: note = Target: FXN; (-) strand; PAM type: NRG; PAM sequence: AAG
  source 1..20: mol_type = other DNA
attttaacagagaaataacc

SEQ ID NO: 10265 - DNA, 20 bp, synthetic construct
  misc_feature 1..20: note = Description of Artificial Sequence: Synthetic oligonucleotide
  misc_feature 1..20: note = Target: FXN; (-) strand; PAM type: NRG; PAM sequence: GAG
  source 1..20: mol_type = other DNA
acttggagacaattttaaca

SEQ ID NO: 10266 - DNA, 20 bp, synthetic construct
  misc_feature 1..20: note = Description of Artificial Sequence: Synthetic oligonucleotide
  misc_feature 1..20: note = Target: FXN; (-) strand; PAM type: NRG; PAM sequence: CAG
  source 1..20: mol_type = other DNA
acacttggagacaattttaa

SEQ ID NO: 10267 - DNA, 20 bp, synthetic construct
  misc_feature 1..20: note = Description of Artificial Sequence: Synthetic oligonucleotide
  misc_feature 1..20: note = Target: FXN; (-) strand; PAM type: NRG; PAM sequence: GAG
  source 1..20: mol_type = other DNA
taaactttgcactacacttg

SEQ ID NO: 10268 - DNA, 20 bp, synthetic construct
  misc_feature 1..20: note = Description of Artificial Sequence: Synthetic oligonucleotide
  misc_feature 1..20: note = Target: FXN; (-) strand; PAM type: NRG; PAM sequence: TGG
  source 1..20: mol_type = other DNA
gctaaactttgcactacact

SEQ ID NO: 10269 - DNA, 20 bp, synthetic construct
  misc_feature 1..20: note = Description of Artificial Sequence: Synthetic oligonucleotide
  misc_feature 1..20: note = Target: FXN; (-) strand; PAM type: NRG; PAM sequence: CAG
  source 1..20: mol_type = other DNA
tttctctgtaaggaacatca

SEQ ID NO: 10270 - DNA, 20 bp, synthetic construct
  misc_feature 1..20: note = Description of Artificial Sequence: Synthetic oligonucleotide
  misc_feature 1..20: note = Target: FXN; (-) strand; PAM type: NRG; PAM sequence: AGG
  source 1..20: mol_type = other DNA
acacatgcattttctctgta

SEQ ID NO: 10271 - DNA, 20 bp, synthetic construct
  misc_feature 1..20: note = Description of Artificial Sequence: Synthetic oligonucleotide
  misc_feature 1..20: note = Target: FXN; (-) strand; PAM type: NRG; PAM sequence: AAG
  source 1..20: mol_type = other DNA
aacacatgcattttctctgt

SEQ ID NO: 10272 - DNA, 20 bp, synthetic construct
  misc_feature 1..20: note = Description of Artificial Sequence: Synthetic oligonucleotide
  misc_feature 1..20: note = Target: FXN; (-) strand; PAM type: NRG; PAM sequence: AAG
  source 1..20: mol_type = other DNA
accttaactcatgcctgaca

SEQ ID NO: 10273 - DNA, 20 bp, synthetic construct
  misc_feature 1..20: note = Description of Artificial Sequence: Synthetic oligonucleotide
  misc_feature 1..20: note = Target: FXN; (-) strand; PAM type: NRG; PAM sequence: CAG
  source 1..20: mol_type = other DNA
attaattgatctcaggacaa

SEQ ID NO: 10274 - DNA, 20 bp, synthetic construct
  misc_feature 1..20: note = Description of Artificial Sequence: Synthetic oligonucleotide
  misc_feature 1..20: note = Target: FXN; (-) strand; PAM type: NRG; PAM sequence: AGG
  source 1..20: mol_type = other DNA
acaacaaattaattgatctc

SEQ ID NO: 10275 - DNA, 20 bp, synthetic construct
  misc_feature 1..20: note = Description of Artificial Sequence: Synthetic oligonucleotide
  misc_feature 1..20: note = Target: FXN; (-) strand; PAM type: NRG; PAM sequence: CAG
  source 1..20: mol_type = other DNA
aacaacaaattaattgatct

SEQ ID NO: 10276 - DNA, 20 bp, synthetic construct
  misc_feature 1..20: note = Description of Artificial Sequence: Synthetic oligonucleotide
  misc_feature 1..20: note = Target: FXN; (-) strand; PAM type: NRG; PAM sequence: GAG
  source 1..20: mol_type = other DNA
agcagcctgggcaacagagg

SEQ ID NO: 10277 - DNA, 20 bp, synthetic construct
  misc_feature 1..20: note = Description of Artificial Sequence: Synthetic oligonucleotide
  misc_feature 1..20: note = Target: FXN; (-) strand; PAM type: NRG; PAM sequence: GGG
  source 1..20: mol_type = other DNA
ccagcagcctgggcaacaga

SEQ ID NO: 10278 - DNA, 20 bp, synthetic construct
  misc_feature 1..20: note = Description of Artificial Sequence: Synthetic oligonucleotide
  misc_feature 1..20: note = Target: FXN; (-) strand; PAM type: NRG; PAM sequence: AGG
  source 1..20: mol_type = other DNA
tccagcagcctgggcaacag

SEQ ID NO: 10279 - DNA, 20 bp, synthetic construct
  misc_feature 1..20: note = Description of Artificial Sequence: Synthetic oligonucleotide
  misc_feature 1..20: note = Target: FXN; (-) strand; PAM type: NRG; PAM sequence: GAG
  source 1..20: mol_type = other DNA
ctccagcagcctgggcaaca

SEQ ID NO: 10280 - DNA, 20 bp, synthetic construct
  misc_feature 1..20: note = Description of Artificial Sequence: Synthetic oligonucleotide
  misc_feature 1..20: note = Target: FXN; (-) strand; PAM type: NRG; PAM sequence: CAG
  source 1..20: mol_type = other DNA
cactccagcagcctgggcaa

SEQ ID NO: 10281 - DNA, 20 bp, synthetic construct
  misc_feature 1..20: note = Description of Artificial Sequence: Synthetic oligonucleotide
  misc_feature 1..20: note = Target: FXN; (-) strand; PAM type: NRG; PAM sequence: GGG
  source 1..20: mol_type = other DNA
ccattgcactccagcagcct

SEQ ID NO: 10282 - DNA, 20 bp, synthetic construct
  misc_feature 1..20: note = Description of Artificial Sequence: Synthetic oligonucleotide
  misc_feature 1..20: note = Target: FXN; (-) strand; PAM type: NRG; PAM sequence: TGG
  source 1..20: mol_type = other DNA
accattgcactccagcagcc

SEQ ID NO: 10283 - DNA, 20 bp, synthetic construct
  misc_feature 1..20: note = Description of Artificial Sequence: Synthetic oligonucleotide
  misc_feature 1..20: note = Target: FXN; (-) strand; PAM type: NRG; PAM sequence: CAG
  source 1..20: mol_type = other DNA
attacaccattgcactccag

SEQ ID NO: 10284 - DNA, 20 bp, synthetic construct
  misc_feature 1..20: note = Description of Artificial Sequence: Synthetic oligonucleotide
  misc_feature 1..20: note = Target: FXN; (-) strand; PAM type: NRG; PAM sequence: CAG
  source 1..20: mol_type = other DNA
atgattacaccattgcactc

SEQ ID NO: 10285 - DNA, 20 bp, synthetic construct
  misc_feature 1..20: note = Description of Artificial Sequence: Synthetic oligonucleotide
  misc_feature 1..20: note = Target: FXN; (-) strand; PAM type: NRG; PAM sequence: GAG
  source 1..20: mol_type = other DNA
agagaggtagaggctgcagt

SEQ ID NO: 10286 - DNA, 20 bp, synthetic construct
  misc_feature 1..20: note = Description of Artificial Sequence: Synthetic oligonucleotide
  misc_feature 1..20: note = Target: FXN; (-) strand; PAM type: NRG; PAM sequence: CAG
  source 1..20: mol_type = other DNA
agccagagaggtagaggctg

SEQ ID NO: 10287 - DNA, 20 bp, synthetic construct
  misc_feature 1..20: note = Description of Artificial Sequence: Synthetic oligonucleotide
  misc_feature 1..20: note = Target: FXN; (-) strand; PAM type: NRG; PAM sequence: AGG
  source 1..20: mol_type = other DNA
tgcttgagccagagaggtag

SEQ ID NO: 10288 - DNA, 20 bp, synthetic construct
  misc_feature 1..20: note = Description of Artificial Sequence: Synthetic oligonucleotide
  misc_feature 1..20: note = Target: FXN; (-) strand; PAM type: NRG; PAM sequence: GAG
  source 1..20: mol_type = other DNA
ttgcttgagccagagaggta

SEQ ID NO: 10289 - DNA, 20 bp, synthetic construct
  misc_feature 1..20: note = Description of Artificial Sequence: Synthetic oligonucleotide
  misc_feature 1..20: note = Target: FXN; (-) strand; PAM type: NRG; PAM sequence: TAG
  source 1..20: mol_type = other DNA
gattgcttgagccagagagg

SEQ ID NO: 10290 - DNA, 20 bp, synthetic construct
  misc_feature 1..20: note = Description of Artificial Sequence: Synthetic oligonucleotide
  misc_feature 1..20: note = Target: FXN; (-) strand; PAM type: NRG; PAM sequence: AGG
  source 1..20: mol_type = other DNA
gaggattgcttgagccagag

SEQ ID NO: 10291 - DNA, 20 bp, synthetic construct
  misc_feature 1..20: note = Description of Artificial Sequence: Synthetic oligonucleotide
  misc_feature 1..20: note = Target: FXN; (-) strand; PAM type: NRG; PAM sequence: GAG
  source 1..20: mol_type = other DNA
ggaggattgcttgagccaga

SEQ ID NO: 10292 - DNA, 20 bp, synthetic construct
  misc_feature 1..20: note = Description of Artificial Sequence: Synthetic oligonucleotide
  misc_feature 1..20: note = Target: FXN; (-) strand; PAM type: NRG; PAM sequence: GAG
  source 1..20: mol_type = other DNA
tgggaggattgcttgagcca

SEQ ID NO: 10293 - DNA, 20 bp, synthetic construct
  misc_feature 1..20: note = Description of Artificial Sequence: Synthetic oligonucleotide
  misc_feature 1..20: note = Target: FXN; (-) strand; PAM type: NRG; PAM sequence: CAG
  source 1..20: mol_type = other DNA
ggtgggaggattgcttgagc

SEQ ID NO: 10294 - DNA, 20 bp, synthetic construct
  misc_feature 1..20: note = Description of Artificial Sequence: Synthetic oligonucleotide
  misc_feature 1..20: note = Target: FXN; (-) strand; PAM type: NRG; PAM sequence: GAG
  source 1..20: mol_type = other DNA
ccgaggtgggaggattgctt

SEQ ID NO: 10295 - DNA, 20 bp, synthetic construct
  misc_feature 1..20: note = Description of Artificial Sequence: Synthetic oligonucleotide
  misc_feature 1..20: note = Target: FXN; (-) strand; PAM type: NRG; PAM sequence: AGG
  source 1..20: mol_type = other DNA
actcaggaggccgaggtggg

SEQ ID NO: 10296 - DNA, 20 bp, synthetic construct
  misc_feature 1..20: note = Description of Artificial Sequence: Synthetic oligonucleotide
  misc_feature 1..20: note = Target: FXN; (-) strand; PAM type: NRG; PAM sequence: GAG
  source 1..20: mol_type = other DNA
tactcaggaggccgaggtgg

SEQ ID NO: 10297 - DNA, 20 bp, synthetic construct
  misc_feature 1..20: note = Description of Artificial Sequence: Synthetic oligonucleotide
  misc_feature 1..20: note = Target: FXN; (-) strand; PAM type: NRG; PAM sequence: GGG
  source 1..20: mol_type = other DNA
gctactcaggaggccgaggt

SEQ ID NO: 10298 - DNA, 20 bp, synthetic construct
  misc_feature 1..20: note = Description of Artificial Sequence: Synthetic oligonucleotide
  misc_feature 1..20: note = Target: FXN; (-) strand; PAM type: NRG; PAM sequence: TGG
  source 1..20: mol_type = other DNA
agctactcaggaggccgagg

SEQ ID NO: 10299 - DNA, 20 bp, synthetic construct
  misc_feature 1..20: note = Description of Artificial Sequence: Synthetic oligonucleotide
  misc_feature 1..20: note = Target: FXN; (-) strand; PAM type: NRG; PAM sequence: AGG
  source 1..20: mol_type = other DNA
cccagctactcaggaggccg

SEQ ID NO: 10300 - DNA, 20 bp, synthetic construct
  misc_feature 1..20: note = Description of Artificial Sequence: Synthetic oligonucleotide
  misc_feature 1..20: note = Target: FXN; (-) strand; PAM type: NRG; PAM sequence: GAG
  source 1..20: mol_type = other DNA
tcccagctactcaggaggcc

SEQ ID NO: 10301 - DNA, 20 bp, synthetic construct
  misc_feature 1..20: note = Description of Artificial Sequence: Synthetic oligonucleotide
  misc_feature 1..20: note = Target: FXN; (-) strand; PAM type: NRG; PAM sequence: AGG
  source 1..20: mol_type = other DNA
tgtagtcccagctactcagg

SEQ ID NO: 10302 - DNA, 20 bp, synthetic construct
  misc_feature 1..20: note = Description of Artificial Sequence: Synthetic oligonucleotide
  misc_feature 1..20: note = Target: FXN; (-) strand; PAM type: NRG; PAM sequence: GAG
  source 1..20: mol_type = other DNA
ctgtagtcccagctactcag

SEQ ID NO: 10303 - DNA, 20 bp, synthetic construct
  misc_feature 1..20: note = Description of Artificial Sequence: Synthetic oligonucleotide
  misc_feature 1..20: note = Target: FXN; (-) strand; PAM type: NRG; PAM sequence: AGG
  source 1..20: mol_type = other DNA
acctgtagtcccagctactc

SEQ ID NO: 10304 - DNA, 20 bp, synthetic construct
  misc_feature 1..20: note = Description of Artificial Sequence: Synthetic oligonucleotide
  misc_feature 1..20: note = Target: FXN; (-) strand; PAM type: NRG; PAM sequence: CAG
  source 1..20: mol_type = other DNA
tacctgtagtcccagctact

SEQ ID NO: 10305 - DNA, 20 bp, synthetic construct
  misc_feature 1..20: note = Description of Artificial Sequence: Synthetic oligonucleotide
  misc_feature 1..20: note = Target: FXN; (-) strand; PAM type: NRG; PAM sequence: CAG
  source 1..20: mol_type = other DNA
gtggggtgtacctgtagtcc

SEQ ID NO: 10306 - DNA, 20 bp, synthetic construct
  misc_feature 1..20: note = Description of Artificial Sequence: Synthetic oligonucleotide
  misc_feature 1..20: note = Target: FXN; (-) strand; PAM type: NRG; PAM sequence: TAG
  source 1..20: mol_type = other DNA
ggtgtggtggggtgtacctg

SEQ ID NO: 10307 - DNA, 20 bp, synthetic construct
  misc_feature 1..20: note = Description of Artificial Sequence: Synthetic oligonucleotide
  misc_feature 1..20: note = Target: FXN; (-) strand; PAM type: NRG; PAM sequence: GGG
  source 1..20: mol_type = other DNA
aacattatctgggtgtggtg

SEQ ID NO: 10308 - DNA, 20 bp, synthetic construct
  misc_feature 1..20: note = Description of Artificial Sequence: Synthetic oligonucleotide
  misc_feature 1..20: note = Target: FXN; (-) strand; PAM type: NRG; PAM sequence: GGG
  source 1..20: mol_type = other DNA
aaacattatctgggtgtggt

SEQ ID NO: 10309 - DNA, 20 bp, synthetic construct
  misc_feature 1..20: note = Description of Artificial Sequence: Synthetic oligonucleotide
  misc_feature 1..20: note = Target: FXN; (-) strand; PAM type: NRG; PAM sequence: TGG
  source 1..20: mol_type = other DNA
aaaacattatctgggtgtgg

SEQ ID NO: 10310 - DNA, 20 bp, synthetic construct
  misc_feature 1..20: note = Description of Artificial Sequence: Synthetic oligonucleotide
  misc_feature 1..20: note = Target: FXN; (-) strand; PAM type: NRG; PAM sequence: TGG
  source 1..20: mol_type = other DNA
tcaaaaacattatctgggtg

SEQ ID NO: 10311 - DNA, 20 bp, synthetic construct
  misc_feature 1..20: note = Description of Artificial Sequence: Synthetic oligonucleotide
  misc_feature 1..20: note = Target: FXN; (-) strand; PAM type: NRG; PAM sequence: GGG
  source 1..20: mol_type = other DNA
aaatatcaaaaacattatct

SEQ ID NO: 10312 - DNA, 20 bp, synthetic construct
  misc_feature 1..20: note = Description of Artificial Sequence: Synthetic oligonucleotide
  misc_feature 1..20: note = Target: FXN; (-) strand; PAM type: NRG; PAM sequence: TGG
  source 1..20: mol_type = other DNA
aaaatatcaaaaacattatc

SEQ ID NO: 10313 - DNA, 20 bp, synthetic construct
  misc_feature 1..20: note = Description of Artificial Sequence: Synthetic oligonucleotide
  misc_feature 1..20: note = Target: FXN; (-) strand; PAM type: NRG; PAM sequence: GAG
  source 1..20: mol_type = other DNA
tgcactccagcctgggtgat

SEQ ID NO: 10314 - DNA, 20 bp, synthetic construct
  misc_feature 1..20: note = Description of Artificial Sequence: Synthetic oligonucleotide
  misc_feature 1..20: note = Target: FXN; (-) strand; PAM type: NRG; PAM sequence: GGG
  source 1..20: mol_type = other DNA
gcaccattgcactccagcct

SEQ ID NO: 10315 - DNA, 20 bp, synthetic construct
  misc_feature 1..20: note = Description of Artificial Sequence: Synthetic oligonucleotide
  misc_feature 1..20: note = Target: FXN; (-) strand; PAM type: NRG; PAM sequence: TGG
  source 1..20: mol_type = other DNA
cgcaccattgcactccagcc

SEQ ID NO: 10316 - DNA, 20 bp, synthetic construct
  misc_feature 1..20: note = Description of Artificial Sequence: Synthetic oligonucleotide
  misc_feature 1..20: note = Target: FXN; (-) strand; PAM type: NRG; PAM sequence: CAG
  source 1..20: mol_type = other DNA
aggatcgcaccattgcactc

SEQ ID NO: 10317 - DNA, 20 bp, synthetic construct
  misc_feature 1..20: note = Description of Artificial Sequence: Synthetic oligonucleotide
  misc_feature 1..20: note = Target: FXN; (-) strand; PAM type: NRG; PAM sequence: AGG
  source 1..20: mol_type = other DNA
ggtggaggttgcagtgagcc

SEQ ID NO: 10318 - DNA, 20 bp, synthetic construct
  misc_feature 1..20: note = Description of Artificial Sequence: Synthetic oligonucleotide
  misc_feature 1..20: note = Target: FXN; (-) strand; PAM type: NRG; PAM sequence: CAG
  source 1..20: mol_type = other DNA
aggtggaggttgcagtgagc

SEQ ID NO: 10319 - DNA, 20 bp, synthetic construct
  misc_feature 1..20: note = Description of Artificial Sequence: Synthetic oligonucleotide
  misc_feature 1..20: note = Target: FXN; (-) strand; PAM type: NRG; PAM sequence: GAG
  source 1..20: mol_type = other DNA
cgggaggtggaggttgcagt

SEQ ID NO: 10320 - DNA, 20 bp, synthetic construct
  misc_feature 1..20: note = Description of Artificial Sequence: Synthetic oligonucleotide
  misc_feature 1..20: note = Target: FXN; (-) strand; PAM type: NRG; PAM sequence: CAG
  source 1..20: mol_type = other DNA
aatccgggaggtggaggttg

SEQ ID NO: 10321 - DNA, 20 bp, synthetic construct
  misc_feature 1..20: note = Description of Artificial Sequence: Synthetic oligonucleotide
  misc_feature 1..20: note = Target: FXN; (-) strand; PAM type: NRG; PAM sequence: AGG
  source 1..20: mol_type = other DNA
tgcttgaatccgggaggtgg

SEQ ID NO: 10322 - DNA, 20 bp, synthetic construct
  misc_feature 1..20: note = Description of Artificial Sequence: Synthetic oligonucleotide
  misc_feature 1..20: note = Target: FXN; (-) strand; PAM type: NRG; PAM sequence: GAG
  source 1..20: mol_type = other DNA
ttgcttgaatccgggaggtg

SEQ ID NO: 10323 - DNA, 20 bp, synthetic construct
  misc_feature 1..20: note = Description of Artificial Sequence: Synthetic oligonucleotide
  misc_feature 1..20: note = Target: FXN; (-) strand; PAM type: NRG; PAM sequence: TGG
  source 1..20: mol_type = other DNA
aattgcttgaatccgggagg

SEQ ID NO: 10324 - DNA, 20 bp, synthetic construct
  misc_feature 1..20: note = Description of Artificial Sequence: Synthetic oligonucleotide
  misc_feature 1..20: note = Target: FXN; (-) strand; PAM type: NRG; PAM sequence: AGG
  source 1..20: mol_type = other DNA
aagaattgcttgaatccggg

SEQ ID NO: 10325 - DNA, 20 bp, synthetic construct
  misc_feature 1..20: note = Description of Artificial Sequence: Synthetic oligonucleotide
  misc_feature 1..20: note = Target: FXN; (-) strand; PAM type: NRG; PAM sequence: GAG
  source 1..20: mol_type = other DNA
gaagaattgcttgaatccgg

SEQ ID NO: 10326 - DNA, 20 bp, synthetic construct
  misc_feature 1..20: note = Description of Artificial Sequence: Synthetic oligonucleotide
  misc_feature 1..20: note = Target: FXN; (-) strand; PAM type: NRG; PAM sequence: GGG
  source 1..20: mol_type = other DNA
cagaagaattgcttgaatcc

SEQ ID NO: 10327 - DNA, 20 bp, synthetic construct
  misc_feature 1..20: note = Description of Artificial Sequence: Synthetic oligonucleotide
  misc_feature 1..20: note = Target: FXN; (-) strand; PAM type: NRG; PAM sequence: CGG
  source 1..20: mol_type = other DNA
gcagaagaattgcttgaatc

SEQ ID NO: 10328 - DNA, 20 bp, synthetic construct
  misc_feature 1..20: note = Description of Artificial Sequence: Synthetic oligonucleotide
  misc_feature 1..20: note = Target: FXN; (-) strand; PAM type: NRG; PAM sequence: AAG
  source 1..20: mol_type = other DNA
tactcaggaggctgaggcag

SEQ ID NO: 10329 - DNA, 20 bp, synthetic construct
  misc_feature 1..20: note = Description of Artificial Sequence: Synthetic oligonucleotide
  misc_feature 1..20: note = Target: FXN; (-) strand; PAM type: NRG; PAM sequence: CAG
  source 1..20: mol_type = other DNA
tgctactcaggaggctgagg

SEQ ID NO: 10330 - DNA, 20 bp, synthetic construct
  misc_feature 1..20: note = Description of Artificial Sequence: Synthetic oligonucleotide
  misc_feature 1..20: note = Target: FXN; (-) strand; PAM type: NRG; PAM sequence: AGG
  source 1..20: mol_type = other DNA
ctgtgctactcaggaggctg

SEQ ID NO: 10331 - DNA, 20 bp, synthetic construct
  misc_feature 1..20: note = Description of Artificial Sequence: Synthetic oligonucleotide
  misc_feature 1..20: note = Target: FXN; (-) strand; PAM type: NRG; PAM sequence: GAG
  source 1..20: mol_type = other DNA
tctgtgctactcaggaggct

SEQ ID NO: 10332 - DNA, 20 bp, synthetic construct
  misc_feature 1..20: note = Description of Artificial Sequence: Synthetic oligonucleotide
  misc_feature 1..20: note = Target: FXN; (-) strand; PAM type: NRG; PAM sequence: AGG
  source 1..20: mol_type = other DNA
tgtaatctgtgctactcagg

SEQ ID NO: 10333 - DNA, 20 bp, synthetic construct
  misc_feature 1..20: note = Description of Artificial Sequence: Synthetic oligonucleotide
  misc_feature 1..20: note = Target: FXN; (-) strand; PAM type: NRG; PAM sequence: GAG
  source 1..20: mol_type = other DNA
ctgtaatctgtgctactcag

SEQ ID NO: 10334 - DNA, 20 bp, synthetic construct
  misc_feature 1..20: note = Description of Artificial Sequence: Synthetic oligonucleotide
  misc_feature 1..20: note = Target: FXN; (-) strand; PAM type: NRG; PAM sequence: AGG
  source 1..20: mol_type = other DNA
gcctgtaatctgtgctactc

SEQ ID NO: 10335 - DNA, 20 bp, synthetic construct
  misc_feature 1..20: note = Description of Artificial Sequence: Synthetic oligonucleotide
  misc_feature 1..20: note = Target: FXN; (-) strand; PAM type: NRG; PAM sequence: CAG
  source 1..20: mol_type = other DNA
tgcctgtaatctgtgctact

SEQ ID NO: 10336 - DNA, 20 bp, synthetic construct
  misc_feature 1..20: note = Description of Artificial Sequence: Synthetic oligonucleotide
  misc_feature 1..20: note = Target: FXN; (-) strand; PAM type: NRG; PAM sequence: AGG
  source 1..20: mol_type = other DNA
taaaaacacaaaaattagca

SEQ ID NO: 10337 - DNA, 20 bp, synthetic construct
  misc_feature 1..20: note = Description of Artificial Sequence: Synthetic oligonucleotide
  misc_feature 1..20: note = Target: FXN; (-) strand; PAM type: NRG; PAM sequence: AAG
  source 1..20: mol_type = other DNA
ctaaaaacacaaaaattagc

SEQ ID NO: 10338 - DNA, 20 bp, synthetic construct
  misc_feature 1..20: note = Description of Artificial Sequence: Synthetic oligonucleotide
  misc_feature 1..20: note = Target: FXN; (-) strand; PAM type: NRG; PAM sequence: TAG
  source 1..20: mol_type = other DNA
tctactaaaaacacaaaaat

SEQ ID NO: 10339 - DNA, 20 bp, synthetic construct
  misc_feature 1..20: note = Description of Artificial Sequence: Synthetic oligonucleotide
  misc_feature 1..20: note = Target: FXN; (-) strand; PAM type: NRG; PAM sequence: TGG
  source 1..20: mol_type = other DNA
caagactagcctggccaaca

SEQ ID NO: 10340 - DNA, 20 bp, synthetic construct
  misc_feature 1..20: note = Description of Artificial Sequence: Synthetic oligonucleotide
  misc_feature 1..20: note = Target: FXN; (-) strand; PAM type: NRG; PAM sequence: TGG
  source 1..20: mol_type = other DNA
tcaggagttcaagactagcc

SEQ ID NO: 10341 - DNA, 20 bp, synthetic construct
  misc_feature 1..20: note = Description of Artificial Sequence: Synthetic oligonucleotide
  misc_feature 1..20: note = Target: FXN; (-) strand; PAM type: NRG; PAM sequence: TAG
  source 1..20: mol_type = other DNA
tgaggtcaggagttcaagac

SEQ ID NO: 10342 - DNA, 20 bp, synthetic construct
  misc_feature 1..20: note = Description of Artificial Sequence: Synthetic oligonucleotide
  misc_feature 1..20: note = Target: FXN; (-) strand; PAM type: NRG; PAM sequence: AAG
  source 1..20: mol_type = other DNA
tcacctgaggtcaggagttc

SEQ ID NO: 10343 - DNA, 20 bp, synthetic construct
  misc_feature 1..20: note = Description of Artificial Sequence: Synthetic oligonucleotide
  misc_feature 1..20: note = Target: FXN; (-) strand; PAM type: NRG; PAM sequence: GAG
  source 1..20: mol_type = other DNA
ggtggatcacctgaggtcag

SEQ ID NO: 10344 - DNA, 20 bp, synthetic construct
  misc_feature 1..20: note = Description of Artificial Sequence: Synthetic oligonucleotide
  misc_feature 1..20: note = Target: FXN; (-) strand; PAM type: NRG; PAM sequence: AGG
  source 1..20: mol_type = other DNA
cgggtggatcacctgaggtc

SEQ ID NO: 10345 - DNA, 20 bp, synthetic construct
  misc_feature 1..20: note = Description of Artificial Sequence: Synthetic oligonucleotide
  misc_feature 1..20: note = Target: FXN; (-) strand; PAM type: NRG; PAM sequence: CAG
  source 1..20: mol_type = other DNA
gcgggtggatcacctgaggt

SEQ ID NO: 10346 - DNA, 20 bp, synthetic construct
  misc_feature 1..20: note = Description of Artificial Sequence: Synthetic oligonucleotide
  misc_feature 1..20: note = Target: FXN; (-) strand; PAM type: NRG; PAM sequence: AGG
  source 1..20: mol_type = other DNA
ggaggcgggtggatcacctg

SEQ ID NO: 10347 - DNA, 20 bp, synthetic construct
  misc_feature 1..20: note = Description of Artificial Sequence: Synthetic oligonucleotide
  misc_feature 1..20: note = Target: FXN; (-) strand; PAM type: NRG; PAM sequence: GAG
  source 1..20: mol_type = other DNA
cggaggcgggtggatcacct

SEQ ID NO: 10348 - DNA, 20 bp, synthetic construct
  misc_feature 1..20: note = Description of Artificial Sequence: Synthetic oligonucleotide
  misc_feature 1..20: note = Target: FXN; (-) strand; PAM type: NRG; PAM sequence: TGG
  source 1..20: mol_type = other DNA
gtttgggaggcggaggcggg

SEQ ID NO: 10349 - DNA, 20 bp, synthetic construct
  misc_feature 1..20: note = Description of Artificial Sequence: Synthetic oligonucleotide
  misc_feature 1..20: note = Target: FXN; (-) strand; PAM type: NRG; PAM sequence: GGG
  source 1..20: mol_type = other DNA
gcagtttgggaggcggaggc

SEQ ID NO: 10350 - DNA, 20 bp, synthetic construct
  misc_feature 1..20: note = Description of Artificial Sequence: Synthetic oligonucleotide
  misc_feature 1..20: note = Target: FXN; (-) strand; PAM type: NRG; PAM sequence: CGG
  source 1..20: mol_type = other DNA
tgcagtttgggaggcggagg

SEQ ID NO: 10351 - DNA, 20 bp, synthetic construct
  misc_feature 1..20: note = Description of Artificial Sequence: Synthetic oligonucleotide
  misc_feature 1..20: note = Target: FXN; (-) strand; PAM type: NRG; PAM sequence: AGG
  source 1..20: mol_type = other DNA
ctctgcagtttgggaggcgg

SEQ ID NO: 10352 - DNA, 20 bp, synthetic construct
  misc_feature 1..20: note = Description of Artificial Sequence: Synthetic oligonucleotide
  misc_feature 1..20: note = Target: FXN; (-) strand; PAM type: NRG; PAM sequence: GAG
  source 1..20: mol_type = other DNA
tctctgcagtttgggaggcg

SEQ ID NO: 10353 - DNA, 20 bp, synthetic construct
  misc_feature 1..20: note = Description of Artificial Sequence: Synthetic oligonucleotide
  misc_feature 1..20: note = Target: FXN; (-) strand; PAM type: NRG; PAM sequence: CGG
  source 1..20: mol_type = other DNA
aatctctgcagtttgggagg

SEQ ID NO: 10354 - DNA, 20 bp, synthetic construct
  misc_feature 1..20: note = Description of Artificial Sequence: Synthetic oligonucleotide
  misc_feature 1..20: note = Target: FXN; (-) strand; PAM type: NRG; PAM sequence: AGG
  source 1..20: mol_type = other DNA
tataatctctgcagtttggg

SEQ ID NO: 10355 - DNA, 20 bp, synthetic construct
  misc_feature 1..20: note = Description of Artificial Sequence: Synthetic oligonucleotide
  misc_feature 1..20: note = Target: FXN; (-) strand; PAM type: NRG; PAM sequence: GAG
  source 1..20: mol_type = other DNA
ctataatctctgcagtttgg

SEQ ID NO: 10356 - DNA, 20 bp, synthetic construct
  misc_feature 1..20: note = Description of Artificial Sequence: Synthetic oligonucleotide
  misc_feature 1..20: note = Target: FXN; (-) strand; PAM type: NRG; PAM sequence: GGG
  source 1..20: mol_type = other DNA
gcctataatctctgcagttt

SEQ ID NO: 10357 - DNA, 20 bp, synthetic construct
  misc_feature 1..20: note = Description of Artificial Sequence: Synthetic oligonucleotide
  misc_feature 1..20: note = Target: FXN; (-) strand; PAM type: NRG; PAM sequence: TGG
  source 1..20: mol_type = other DNA
tgcctataatctctgcagtt

SEQ ID NO: 10358 - DNA, 20 bp, synthetic construct
  misc_feature 1..20: note = Description of Artificial Sequence: Synthetic oligonucleotide
  misc_feature 1..20: note = Target: FXN; (-) strand; PAM type: NRG; PAM sequence: CAG
  source 1..20: mol_type = other DNA
gttcgtgcctataatctctg

SEQ ID NO: 10359 - DNA, 20 bp, synthetic construct
  misc_feature 1..20: note = Description of Artificial Sequence: Synthetic oligonucleotide
  misc_feature 1..20: note = Target: FXN; (-) strand; PAM type: NRG; PAM sequence: TGG
  source 1..20: mol_type = other DNA
aaacatgaggccgggcattg

SEQ ID NO: 10360 - DNA, 20 bp, synthetic construct
  misc_feature 1..20: note = Description of Artificial Sequence: Synthetic oligonucleotide
  misc_feature 1..20: note = Target: FXN; (-) strand; PAM type: NRG; PAM sequence: GGG
  source 1..20: mol_type = other DNA
aaaataaaaaacatgaggcc

SEQ ID NO: 10361 - DNA, 20 bp, synthetic construct
  misc_feature 1..20: note = Description of Artificial Sequence: Synthetic oligonucleotide
  misc_feature 1..20: note = Target: FXN; (-) strand; PAM type: NRG; PAM sequence: CGG
  source 1..20: mol_type = other DNA
aaaaataaaaaacatgaggc

SEQ ID NO: 10362 - DNA, 20 bp, synthetic construct
  misc_feature 1..20: note = Description of Artificial Sequence: Synthetic oligonucleotide
  misc_feature 1..20: note = Target: FXN; (-) strand; PAM type: NRG; PAM sequence: AGG
  source 1..20: mol_type = other DNA
cttgaaaaataaaaaacatg

SEQ ID NO: 10363 - DNA, 20 bp, synthetic construct
  misc_feature 1..20: note = Description of Artificial Sequence: Synthetic oligonucleotide
  misc_feature 1..20: note = Target: FXN; (-) strand; PAM type: NRG; PAM sequence: GAG
  source 1..20: mol_type = other DNA
acttgaaaaataaaaaacat

SEQ ID NO: 10364 - DNA, 20 bp, synthetic construct
  misc_feature 1..20: note = Description of Artificial Sequence: Synthetic oligonucleotide
  misc_feature 1..20: note = Target: FXN; (-) strand; PAM type: NRG; PAM sequence: GAG
  source 1..20: mol_type = other DNA
accaacctgggcaacataga

SEQ ID NO: 10365 - DNA, 20 bp, synthetic construct
  misc_feature 1..20: note = Description of Artificial Sequence: Synthetic oligonucleotide
  misc_feature 1..20: note = Target: FXN; (-) strand; PAM type: NRG; PAM sequence: GAG
  source 1..20: mol_type = other DNA
agaccaacctgggcaacata

SEQ ID NO: 10366 - DNA, 20 bp, synthetic construct
  misc_feature 1..20: note = Description of Artificial Sequence: Synthetic oligonucleotide
  misc_feature 1..20: note = Target: FXN; (-) strand; PAM type: NRG; PAM sequence: TAG
  source 1..20: mol_type = other DNA
tgagaccaacctgggcaaca

SEQ ID NO: 10367 - DNA, 20 bp, synthetic construct
  misc_feature 1..20: note = Description of Artificial Sequence: Synthetic oligonucleotide
  misc_feature 1..20: note = Target: FXN; (-) strand; PAM type: NRG; PAM sequence: GGG
  source 1..20: mol_type = other DNA
caagagtttgagaccaacct

SEQ ID NO: 10368 - DNA, 20 bp, synthetic construct
  misc_feature 1..20: note = Description of Artificial Sequence: Synthetic oligonucleotide
  misc_feature 1..20: note = Target: FXN; (-) strand; PAM type: NRG; PAM sequence: TGG
  source 1..20: mol_type = other DNA
tcaagagtttgagaccaacc

SEQ ID NO: 10369 - DNA, 20 bp, synthetic construct
  misc_feature 1..20: note = Description of Artificial Sequence: Synthetic oligonucleotide
  misc_feature 1..20: note = Target: FXN; (-) strand; PAM type: NRG; PAM sequence: GAG
  source 1..20: mol_type = other DNA
ttacttgagctcaagagttt

SEQ ID NO: 10370 - DNA, 20 bp, synthetic construct
  misc_feature 1..20: note = Description of Artificial Sequence: Synthetic oligonucleotide
  misc_feature 1..20: note = Target: FXN; (-) strand; PAM type: NRG; PAM sequence: GAG
  source 1..20: mol_type = other DNA
ggaggattacttgagctcaa

SEQ ID NO: 10371 - DNA, 20 bp, synthetic construct
  misc_feature 1..20: note = Description of Artificial Sequence: Synthetic oligonucleotide
  misc_feature 1..20: note = Target: FXN; (-) strand; PAM type: NRG; PAM sequence: AAG
  source 1..20: mol_type = other DNA
tgggaggattacttgagctc

SEQ ID NO: 10372 - DNA, 20 bp, synthetic construct
  misc_feature 1..20: note = Description of Artificial Sequence: Synthetic oligonucleotide
  misc_feature 1..20: note = Target: FXN; (-) strand; PAM type: NRG; PAM sequence: GAG
  source 1..20: mol_type = other DNA
ccaaggtgggaggattactt

SEQ ID NO: 10373 - DNA, 20 bp, synthetic construct
  misc_feature 1..20: note = Description of Artificial Sequence: Synthetic oligonucleotide
  misc_feature 1..20: note = Target: FXN; (-) strand; PAM type: NRG; PAM sequence: AGG
  source 1..20: mol_type = other DNA
ctttgggaggccaaggtggg

SEQ ID NO: 10374 - DNA, 20 bp, synthetic construct
  misc_feature 1..20: note = Description of Artificial Sequence: Synthetic oligonucleotide
  misc_feature 1..20: note = Target: FXN; (-) strand; PAM type: NRG; PAM sequence: GAG
  source 1..20: mol_type = other DNA
actttgggaggccaaggtgg

SEQ ID NO: 10375 - DNA, 20 bp, synthetic construct
  misc_feature 1..20: note = Description of Artificial Sequence: Synthetic oligonucleotide
  misc_feature 1..20: note = Target: FXN; (-) strand; PAM type: NRG; PAM sequence: GGG
  source 1..20: mol_type = other DNA
gcactttgggaggccaaggt

SEQ ID NO: 10376 - DNA, 20 bp, synthetic construct
  misc_feature 1..20: note = Description of Artificial Sequence: Synthetic oligonucleotide
  misc_feature 1..20: note = Target: FXN; (-) strand; PAM type: NRG; PAM sequence: TGG
  source 1..20: mol_type = other DNA
cgcactttgggaggccaagg

SEQ ID NO: 10377 - DNA, 20 bp, synthetic construct
  misc_feature 1..20: note = Description of Artificial Sequence: Synthetic oligonucleotide
  misc_feature 1..20: note = Target: FXN; (-) strand; PAM type: NRG; PAM sequence: AGG
  source 1..20: mol_type = other DNA
ccccgcactttgggaggcca

SEQ ID NO: 10378 - DNA, 20 bp, synthetic construct
  misc_feature 1..20: note = Description of Artificial Sequence: Synthetic oligonucleotide
  misc_feature 1..20: note = Target: FXN; (-) strand; PAM type: NRG; PAM sequence: AAG
  source 1..20: mol_type = other DNA
tccccgcactttgggaggcc

SEQ ID NO: 10379 - DNA, 20 bp, synthetic construct
  misc_feature 1..20: note = Description of Artificial Sequence: Synthetic oligonucleotide
  misc_feature 1..20: note = Target: FXN; (-) strand; PAM type: NRG; PAM sequence: AGG
  source 1..20: mol_type = other DNA
tgtaatccccgcactttggg

SEQ ID NO: 10380 - DNA, 20 bp, synthetic construct
  misc_feature 1..20: note = Description of Artificial Sequence: Synthetic oligonucleotide
  misc_feature 1..20: note = Target: FXN; (-) strand; PAM type: NRG; PAM sequence: GAG
  source 1..20: mol_type = other DNA
ctgtaatccccgcactttgg

SEQ ID NO: 10381 - DNA, 20 bp, synthetic construct
  misc_feature 1..20: note = Description of Artificial Sequence: Synthetic oligonucleotide
  misc_feature 1..20: note = Target: FXN; (-) strand; PAM type: NRG; PAM sequence: GGG
  source 1..20: mol_type = other DNA
acctgtaatccccgcacttt

SEQ ID NO: 10382 - DNA, 20 bp, synthetic construct
  misc_feature 1..20: note = Description of Artificial Sequence: Synthetic oligonucleotide
  misc_feature 1..20: note = Target: FXN; (-) strand; PAM type: NRG; PAM sequence: TGG
  source 1..20: mol_type = other DNA
cacctgtaatccccgcactt

SEQ ID NO: 10383 - DNA, 20 bp, synthetic construct
  misc_feature 1..20: note = Description of Artificial Sequence: Synthetic oligonucleotide
  misc_feature 1..20: note = Target: FXN; (-) strand; PAM type: NRG; PAM sequence: TAG
  source 1..20: mol_type = other DNA
ctgatcttggctgggcatgg

SEQ ID NO: 10384 - DNA, 20 bp, synthetic construct
  misc_feature 1..20: note = Description of Artificial Sequence: Synthetic oligonucleotide
  misc_feature 1..20: note = Target: FXN; (-) strand; PAM type: NRG; PAM sequence: TGG
  source 1..20: mol_type = other DNA
acactgatcttggctgggca

SEQ ID NO: 10385 - DNA, 20 bp, synthetic construct
  misc_feature 1..20: note = Description of Artificial Sequence: Synthetic oligonucleotide
  misc_feature 1..20: note = Target: FXN; (-) strand; PAM type: NRG; PAM sequence: GGG
  source 1..20: mol_type = other DNA
cattaacactgatcttggct

SEQ ID NO: 10386 - DNA, 20 bp, synthetic construct
  misc_feature 1..20: note = Description of Artificial Sequence: Synthetic oligonucleotide
  misc_feature 1..20: note = Target: FXN; (-) strand; PAM type: NRG; PAM sequence: TGG
  source 1..20: mol_type = other DNA
tcattaacactgatcttggc

SEQ ID NO: 10387 - DNA, 20 bp, synthetic construct
  misc_feature 1..20: note = Description of Artificial Sequence: Synthetic oligonucleotide
  misc_feature 1..20: note = Target: FXN; (-) strand; PAM type: NRG; PAM sequence: TGG
  source 1..20: mol_type = other DNA
tgattcattaacactgatct

SEQ ID NO: 10388 - DNA, 20 bp, synthetic construct
  misc_feature 1..20: note = Description of Artificial Sequence: Synthetic oligonucleotide
  misc_feature 1..20: note = Target: FXN; (-) strand; PAM type: NRG; PAM sequence: TAG
  source 1..20: mol_type = other DNA
gacaccttatgtaatatata

SEQ ID NO: 10389 - DNA, 20 bp, synthetic construct
  misc_feature 1..20: note = Description of Artificial Sequence: Synthetic oligonucleotide
  misc_feature 1..20: note = Target: FXN; (-) strand; PAM type: NRG; PAM sequence: AAG
  source 1..20: mol_type = other DNA
tataaccttatttctgttta

SEQ ID NO: 10390 - DNA, 20 bp, synthetic construct
  misc_feature 1..20: note = Description of Artificial Sequence: Synthetic oligonucleotide
  misc_feature 1..20: note = Target: FXN; (-) strand; PAM type: NRG; PAM sequence: TGG
  source 1..20: mol_type = other DNA
ctaggtaccctgtaagctgc

SEQ ID NO: 10391 - DNA, 20 bp, synthetic construct
  misc_feature 1..20: note = Description of Artificial Sequence: Synthetic oligonucleotide
  misc_feature 1..20: note = Target: FXN; (-) strand; PAM type: NRG; PAM sequence: AAG
  source 1..20: mol_type = other DNA
tacaaggctaggtaccctgt

SEQ ID NO: 10392 - DNA, 20 bp, synthetic construct
  misc_feature 1..20: note = Description of Artificial Sequence: Synthetic oligonucleotide
  misc_feature 1..20: note = Target: FXN; (-) strand; PAM type: NRG; PAM sequence: AGG
  source 1..20: mol_type = other DNA
tataggagaaatacaaggct

SEQ ID NO: 10393 - DNA, 20 bp, synthetic construct
  misc_feature 1..20: note = Description of Artificial Sequence: Synthetic oligonucleotide
  misc_feature 1..20: note = Target: FXN; (-) strand; PAM type: NRG; PAM sequence: TAG
  source 1..20: mol_type = other DNA
ttataggagaaatacaaggc

SEQ ID NO: 10394 - DNA, 20 bp, synthetic construct
  misc_feature 1..20: note = Description of Artificial Sequence: Synthetic oligonucleotide
  misc_feature 1..20: note = Target: FXN; (-) strand; PAM type: NRG; PAM sequence: AGG
  source 1..20: mol_type = other DNA
ttatttataggagaaataca

SEQ ID NO: 10395 - DNA, 20 bp, synthetic construct
  misc_feature 1..20: note = Description of Artificial Sequence: Synthetic oligonucleotide
  misc_feature 1..20: note = Target: FXN; (-) strand; PAM type: NRG; PAM sequence: AAG
  source 1..20: mol_type = other DNA
attatttataggagaaatac

SEQ ID NO: 10396 - DNA, 20 bp, synthetic construct
  misc_feature 1..20: note = Description of Artificial Sequence: Synthetic oligonucleotide
  misc_feature 1..20: note = Target: FXN; (-) strand; PAM type: NRG; PAM sequence: GAG
  source 1..20: mol_type = other DNA
aacgagcaaattatttatag

SEQ ID NO: 10397 - DNA, 20 bp, synthetic construct
  misc_feature 1..20: note = Description of Artificial Sequence: Synthetic oligonucleotide
  misc_feature 1..20: note = Target: FXN; (-) strand; PAM type: NRG; PAM sequence: AGG
  source 1..20: mol_type = other DNA
tcaacgagcaaattatttat

SEQ ID NO: 10398 - DNA, 20 bp, synthetic construct
  misc_feature 1..20: note = Description of Artificial Sequence: Synthetic oligonucleotide
  misc_feature 1..20: note = Target: FXN; (-) strand; PAM type: NRG; PAM sequence: TAG
  source 1..20: mol_type = other DNA
ctcaacgagcaaattattta

SEQ ID NO: 10399 - DNA, 20 bp, synthetic construct
  misc_feature 1..20: note = Description of Artificial Sequence: Synthetic oligonucleotide
  misc_feature 1..20: note = Target: FXN; (-) strand; PAM type: NRG; PAM sequence: GAG
  source 1..20: mol_type = other DNA
agttgccacaaacactcaac

SEQ ID NO: 10400 - DNA, 20 bp, synthetic construct
  misc_feature 1..20: note = Description of Artificial Sequence: Synthetic oligonucleotide
  misc_feature 1..20: note = Target: FXN; (-) strand; PAM type: NRG; PAM sequence: AAG
  source 1..20: mol_type = other DNA
cttggtagttatgtgctaca

SEQ ID NO: 10401 - DNA, 20 bp, synthetic construct
  misc_feature 1..20: note = Description of Artificial Sequence: Synthetic oligonucleotide
  misc_feature 1..20: note = Target: FXN; (-) strand; PAM type: NRG; PAM sequence: TAG
  source 1..20: mol_type = other DNA
attacagtccttattcttgg

SEQ ID NO: 10402 - DNA, 20 bp, synthetic construct
  misc_feature 1..20: note = Description of Artificial Sequence: Synthetic oligonucleotide
  misc_feature 1..20: note = Target: FXN; (-) strand; PAM type: NRG; PAM sequence: TGG
  source 1..20: mol_type = other DNA
cttattacagtccttattct

SEQ ID NO: 10403 - DNA, 20 bp, synthetic construct
  misc_feature 1..20: note = Description of Artificial Sequence: Synthetic oligonucleotide
  misc_feature 1..20: note = Target: FXN; (-) strand; PAM type: NRG; PAM sequence: CAG
  source 1..20: mol_type = other DNA
tgagggacgtactcttatta

SEQ ID NO: 10404 - DNA, 20 bp, synthetic construct
  misc_feature 1..20: note = Description of Artificial Sequence: Synthetic oligonucleotide
  misc_feature 1..20: note = Target: FXN; (-) strand; PAM type: NRG; PAM sequence: GGG
  source 1..20: mol_type = other DNA
tcttcattacaatcctgtga

SEQ ID NO: 10405 - DNA, 20 bp, synthetic construct
  misc_feature 1..20: note = Description of Artificial Sequence: Synthetic oligonucleotide
  misc_feature 1..20: note = Target: FXN; (-) strand; PAM type: NRG; PAM sequence: AGG
  source 1..20: mol_type = other DNA
gtcttcattacaatcctgtg

SEQ ID NO: 10406 - DNA, 20 bp, synthetic construct
  misc_feature 1..20: note = Description of Artificial Sequence: Synthetic oligonucleotide
  misc_feature 1..20: note = Target: FXN; (-) strand; PAM type: NRG; PAM sequence: GAG
  source 1..20: mol_type = other DNA
agtcttcattacaatcctgt

SEQ ID NO: 10407 - DNA, 20 bp, synthetic construct
  misc_feature 1..20: note = Description of Artificial Sequence: Synthetic oligonucleotide
  misc_feature 1..20: note = Target: FXN; (-) strand; PAM type: NRG; PAM sequence: CAG
  source 1..20: mol_type = other DNA
agcctttatgtaaatggact

SEQ ID NO: 10408 - DNA, 20 bp, synthetic construct
  misc_feature 1..20: note = Description of Artificial Sequence: Synthetic oligonucleotide
  misc_feature 1..20: note = Target: FXN; (-) strand; PAM type: NRG; PAM sequence: TGG
  source 1..20: mol_type = other DNA
gctctcagcctttatgtaaa

SEQ ID NO: 10409 - DNA, 20 bp, synthetic construct
  misc_feature 1..20: note = Description of Artificial Sequence: Synthetic oligonucleotide
  misc_feature 1..20: note = Target: FXN; (-) strand; PAM type: NRG; PAM sequence: CAG
  source 1..20: mol_type = other DNA
catctgcttgacactgctct

SEQ ID NO: 10410 - DNA, 20 bp, synthetic construct
  misc_feature 1..20: note = Description of Artificial Sequence: Synthetic oligonucleotide
  misc_feature 1..20: note = Target: FXN; (-) strand; PAM type: NRG; PAM sequence: CAG
  source 1..20: mol_type = other DNA
tagagctatcgcacattcta

SEQ ID NO: 10411 - DNA, 20 bp, synthetic construct
  misc_feature 1..20: note = Description of Artificial Sequence: Synthetic oligonucleotide
  misc_feature 1..20: note = Target: FXN; (-) strand; PAM type: NRG; PAM sequence: GAG
  source 1..20: mol_type = other DNA
agccatgataaccactgtta

SEQ ID NO: 10412 - DNA, 20 bp, synthetic construct
  misc_feature 1..20: note = Description of Artificial Sequence: Synthetic oligonucleotide
  misc_feature 1..20: note = Target: FXN; (-) strand; PAM type: NRG; PAM sequence: TAG
  source 1..20: mol_type = other DNA
gcagccatgataaccactgt

SEQ ID NO: 10413 - DNA, 20 bp, synthetic construct
  misc_feature 1..20: note = Description of Artificial Sequence: Synthetic oligonucleotide
  misc_feature 1..20: note = Target: FXN; (-) strand; PAM type: NRG; PAM sequence: CAG
  source 1..20: mol_type = other DNA
tctctgaagaagtgagaggg

SEQ ID NO: 10414 - DNA, 20 bp, synthetic construct
  misc_feature 1..20: note = Description of Artificial Sequence: Synthetic oligonucleotide
  misc_feature 1..20: note = Target: FXN; (-) strand; PAM type: NRG; PAM sequence: GGG
  source 1..20: mol_type = other DNA
atgtctctgaagaagtgaga

SEQ ID NO: 10415 - DNA, 20 bp, synthetic construct
  misc_feature 1..20: note = Description of Artificial Sequence: Synthetic oligonucleotide
  misc_feature 1..20: note = Target: FXN; (-) strand; PAM type: NRG; PAM sequence: AGG
  source 1..20: mol_type = other DNA
catgtctctgaagaagtgag

SEQ ID NO: 10416 - DNA, 20 bp, synthetic construct
  misc_feature 1..20: note = Description of Artificial Sequence: Synthetic oligonucleotide
  misc_feature 1..20: note = Target: FXN; (-) strand; PAM type: NRG; PAM sequence: GAG
  source 1..20: mol_type = other DNA
acatgtctctgaagaagtga

SEQ ID NO: 10417 - DNA, 20 bp, synthetic construct
  misc_feature 1..20: note = Description of Artificial Sequence: Synthetic oligonucleotide
  misc_feature 1..20: note = Target: FXN; (-) strand; PAM type: NRG; PAM sequence: GAG
  source 1..20: mol_type = other DNA
acacatgtctctgaagaagt

SEQ ID NO: 10418 - DNA, 20 bp, synthetic construct
  misc_feature 1..20: note = Description of Artificial Sequence: Synthetic oligonucleotide
  misc_feature 1..20: note = Target: FXN; (-) strand; PAM type: NRG; PAM sequence: AAG
  source 1..20: mol_type = other DNA
agaaacacatgtctctgaag

SEQ ID NO: 10419 - DNA, 20 bp, synthetic construct
  misc_feature 1..20: note = Description of Artificial Sequence: Synthetic oligonucleotide
  misc_feature 1..20: note = Target: FXN; (-) strand; PAM type: NRG; PAM sequence: AAG
  source 1..20: mol_type = other DNA
cttagaaacacatgtctctg

SEQ ID NO: 10420 - DNA, 20 bp, synthetic construct
  misc_feature 1..20: note = Description of Artificial Sequence: Synthetic oligonucleotide
  misc_feature 1..20: note = Target: FXN; (-) strand; PAM type: NRG; PAM sequence: TAG
  source 1..20: mol_type = other DNA
gtggggcagagtgcagacct

SEQ ID NO: 10421 - DNA, 20 bp, synthetic construct
  misc_feature 1..20: note = Description of Artificial Sequence: Synthetic oligonucleotide
  misc_feature 1..20: note = Target: FXN; (-) strand; PAM type: NRG; PAM sequence: CAG
  source 1..20: mol_type = other DNA
ggggagggtggggcagagtg

SEQ ID NO: 10422 - DNA, 20 bp, synthetic construct
  misc_feature 1..20: note = Description of Artificial Sequence: Synthetic oligonucleotide
  misc_feature 1..20: note = Target: FXN; (-) strand; PAM type: NRG; PAM sequence: GAG
  source 1..20: mol_type = other DNA
tggatggggagggtggggca

SEQ ID NO: 10423 - DNA, 20 bp, synthetic construct
  misc_feature 1..20: note = Description of Artificial Sequence: Synthetic oligonucleotide
  misc_feature 1..20: note = Target: FXN; (-) strand; PAM type: NRG; PAM sequence: CAG
  source 1..20: mol_type = other DNA
agtggatggggagggtgggg

SEQ ID NO: 10424 - DNA, 20 bp, synthetic construct
  misc_feature 1..20: note = Description of Artificial Sequence: Synthetic oligonucleotide
  misc_feature 1..20: note = Target: FXN; (-) strand; PAM type: NRG; PAM sequence: GGG
  source 1..20: mol_type = other DNA
gacagtggatggggagggtg

SEQ ID NO: 10425 - DNA, 20 bp, synthetic construct
  misc_feature 1..20: note = Description of Artificial Sequence: Synthetic oligonucleotide
  misc_feature 1..20: note = Target: FXN; (-) strand; PAM type: NRG; PAM sequence: GGG
  source 1..20: mol_type = other DNA
ggacagtggatggggagggt

SEQ ID NO: 10426 - DNA, 20 bp, synthetic construct
  misc_feature 1..20: note = Description of Artificial Sequence: Synthetic oligonucleotide
  misc_feature 1..20: note = Target: FXN; (-) strand; PAM type: NRG; PAM sequence: TGG
  source 1..20: mol_type = other DNA
gggacagtggatggggaggg

SEQ ID NO: 10427 - DNA, 20 bp, synthetic construct
  misc_feature 1..20: note = Description of Artificial Sequence: Synthetic oligonucleotide
  misc_feature 1..20: note = Target: FXN; (-) strand; PAM type: NRG; PAM sequence: GGG
  source 1..20: mol_type = other DNA
tgggggacagtggatgggga

SEQ ID NO: 10428 - DNA, 20 bp, synthetic construct
  misc_feature 1..20: note = Description of Artificial Sequence: Synthetic oligonucleotide
  misc_feature 1..20: note = Target: FXN; (-) strand; PAM type: NRG; PAM sequence: AGG
  source 1..20: mol_type = other DNA
ctgggggacagtggatgggg

SEQ ID NO: 10429 - DNA, 20 bp, synthetic construct
  misc_feature 1..20: note = Description of Artificial Sequence: Synthetic oligonucleotide
  misc_feature 1..20: note = Target: FXN; (-) strand; PAM type: NRG; PAM sequence: GAG
  source 1..20: mol_type = other DNA
gctgggggacagtggatggg

SEQ ID NO: 10430 - DNA, 20 bp, synthetic construct
  misc_feature 1..20: note = Description of Artificial Sequence: Synthetic oligonucleotide
  misc_feature 1..20: note = Target: FXN; (-) strand; PAM type: NRG; PAM sequence: GGG
  source 1..20: mol_type = other DNA
gggctgggggacagtggatg

SEQ ID NO: 10431 - DNA, 20 bp, synthetic construct
  misc_feature 1..20: note = Description of Artificial Sequence: Synthetic oligonucleotide
  misc_feature 1..20: note = Target: FXN; (-) strand; PAM type: NRG; PAM sequence: GGG
  source 1..20: mol_type = other DNA
cgggctgggggacagtggat

SEQ ID NO: 10432 - DNA, 20 bp, synthetic construct
  misc_feature 1..20: note = Description of Artificial Sequence: Synthetic oligonucleotide
  misc_feature 1..20: note = Target: FXN; (-) strand; PAM type: NRG; PAM sequence: TGG
  source 1..20: mol_type = other DNA
acgggctgggggacagtgga

SEQ ID NO: 10433 - DNA, 20 bp, synthetic construct
  misc_feature 1..20: note = Description of Artificial Sequence: Synthetic oligonucleotide
  misc_feature 1..20: note = Target: FXN; (-) strand; PAM type: NRG; PAM sequence: TGG
  source 1..20: mol_type = other DNA
ggaaacgggctgggggacag

SEQ ID NO: 10434 - DNA, 20 bp, synthetic construct
  misc_feature 1..20: note = Description of Artificial Sequence: Synthetic oligonucleotide
  misc_feature 1..20: note = Target: FXN; (-) strand; PAM type: NRG; PAM sequence: CAG
  source 1..20: mol_type = other DNA
ggaggaaacgggctggggga

SEQ ID NO: 10435 - DNA, 20 bp, synthetic construct
  misc_feature 1..20: note = Description of Artificial Sequence: Synthetic oligonucleotide
  misc_feature 1..20: note = Target: FXN; (-) strand; PAM type: NRG; PAM sequence: GGG
  source 1..20: mol_type = other DNA
tggaggaggaaacgggctgg

SEQ ID NO: 10436 - DNA, 20 bp, synthetic construct
  misc_feature 1..20: note = Description of Artificial Sequence: Synthetic oligonucleotide
  misc_feature 1..20: note = Target: FXN; (-) strand; PAM type: NRG; PAM sequence: GGG
  source 1..20: mol_type = other DNA
gtggaggaggaaacgggctg

SEQ ID NO: 10437 - DNA, 20 bp, synthetic construct
  misc_feature 1..20: note = Description of Artificial Sequence: Synthetic oligonucleotide
  misc_feature 1..20: note = Target: FXN; (-) strand; PAM type: NRG; PAM sequence: GGG
  source 1..20: mol_type = other DNA
agtggaggaggaaacgggct

SEQ ID NO: 10438 - DNA, 20 bp, synthetic construct
  misc_feature 1..20: note = Description of Artificial Sequence: Synthetic oligonucleotide
  misc_feature 1..20: note = Target: FXN; (-) strand; PAM type: NRG; PAM sequence: TGG
  source 1..20: mol_type = other DNA
aagtggaggaggaaacgggc

SEQ ID NO: 10439 - DNA, 20 bp, synthetic construct
  misc_feature 1..20: note = Description of Artificial Sequence: Synthetic oligonucleotide
  misc_feature 1..20: note = Target: FXN; (-) strand; PAM type: NRG; PAM sequence: GGG
  source 1..20: mol_type = other DNA
aagtaagtggaggaggaaac

SEQ ID NO: 10440 - DNA, 20 bp, synthetic construct
  misc_feature 1..20: note = Description of Artificial Sequence: Synthetic oligonucleotide
  misc_feature 1..20: note = Target: FXN; (-) strand; PAM type: NRG; PAM sequence: CGG
  source 1..20: mol_type = other DNA
gaagtaagtggaggaggaaa

SEQ ID NO: 10441 - DNA, 20 bp, synthetic construct
  misc_feature 1..20: note = Description of Artificial Sequence: Synthetic oligonucleotide
  misc_feature 1..20: note = Target: FXN; (-) strand; PAM type: NRG; PAM sequence: AGG
  source 1..20: mol_type = other DNA
ggctgggaagtaagtggagg

SEQ ID NO: 10442 - DNA, 20 bp, synthetic construct
  misc_feature 1..20: note = Description of Artificial Sequence: Synthetic oligonucleotide
  misc_feature 1..20: note = Target: FXN; (-) strand; PAM type: NRG; PAM sequence: GAG
  source 1..20: mol_type = other DNA
gggctgggaagtaagtggag

SEQ ID NO: 10443 - DNA, 20 bp, synthetic construct
  misc_feature 1..20: note = Description of Artificial Sequence: Synthetic oligonucleotide
  misc_feature 1..20: note = Target: FXN; (-) strand; PAM type: NRG; PAM sequence: AGG
  source 1..20: mol_type = other DNA
cagggctgggaagtaagtgg

SEQ ID NO: 10444 - DNA, 20 bp, synthetic construct
  misc_feature 1..20: note = Description of Artificial Sequence: Synthetic oligonucleotide
  misc_feature 1..20: note = Target: FXN; (-) strand; PAM type: NRG; PAM sequence: GAG
  source 1..20: mol_type = other DNA
acagggctgggaagtaagtg

SEQ ID NO: 10445 - DNA, 20 bp, synthetic construct
  misc_feature 1..20: note = Description of Artificial Sequence: Synthetic oligonucleotide
  misc_feature 1..20: note = Target: FXN; (-) strand; PAM type: NRG; PAM sequence: TGG
  source 1..20: mol_type = other DNA
gcacagggctgggaagtaag

SEQ ID NO: 10446 - DNA, 20 bp, synthetic construct
  misc_feature 1..20: note = Description of Artificial Sequence: Synthetic oligonucleotide
  misc_feature 1..20: note = Target: FXN; (-) strand; PAM type: NRG; PAM sequence: AAG
  source 1..20: mol_type = other DNA
aaggcacagggctgggaagt

SEQ ID NO: 10447 - DNA, 20 bp, synthetic construct
  misc_feature 1..20: note = Description of Artificial Sequence: Synthetic oligonucleotide
  misc_feature 1..20: note = Target: FXN; (-) strand; PAM type: NRG; PAM sequence: AAG
  source 1..20: mol_type = other DNA
gcagaaggcacagggctggg

SEQ ID NO: 10448 - DNA, 20 bp, synthetic construct
  misc_feature 1..20: note = Description of Artificial Sequence: Synthetic oligonucleotide
  misc_feature 1..20: note = Target: FXN; (-) strand; PAM type: NRG; PAM sequence: GGG
  source 1..20: mol_type = other DNA
aaggcagaaggcacagggct

SEQ ID NO: 10449 - DNA, 20 bp, synthetic construct
  misc_feature 1..20: note = Description of Artificial Sequence: Synthetic oligonucleotide
  misc_feature 1..20: note = Target: FXN; (-) strand; PAM type: NRG; PAM sequence: TGG
  source 1..20: mol_type = other DNA
gaaggcagaaggcacagggc

SEQ ID NO: 10450 - DNA, 20 bp, synthetic construct
  misc_feature 1..20: note = Description of Artificial Sequence: Synthetic oligonucleotide
  misc_feature 1..20: note = Target: FXN; (-) strand; PAM type: NRG; PAM sequence: GGG
  source 1..20: mol_type = other DNA
aagagaaggcagaaggcaca

SEQ ID NO: 10451 - DNA, 20 bp, synthetic construct
  misc_feature 1..20: note = Description of Artificial Sequence: Synthetic oligonucleotide
  misc_feature 1..20: note = Target: FXN; (-) strand; PAM type: NRG; PAM sequence: AGG
  source 1..20: mol_type = other DNA
aaagagaaggcagaaggcac

SEQ ID NO: 10452 - DNA, 20 bp, synthetic construct
  misc_feature 1..20: note = Description of Artificial Sequence: Synthetic oligonucleotide
  misc_feature 1..20: note = Target: FXN; (-) strand; PAM type: NRG; PAM sequence: CAG
  source 1..20: mol_type = other DNA
aaaagagaaggcagaaggca

SEQ ID NO: 10453 - DNA, 20 bp, synthetic construct
  misc_feature 1..20: note = Description of Artificial Sequence: Synthetic oligonucleotide
  misc_feature 1..20: note = Target: FXN; (-) strand; PAM type: NRG; PAM sequence: AGG
  source 1..20: mol_type = other DNA
ctcagaaaagagaaggcaga

SEQ ID NO: 10454 - DNA, 20 bp, synthetic construct
  misc_feature 1..20: note = Description of Artificial Sequence: Synthetic oligonucleotide
  misc_feature 1..20: note = Target: FXN; (-) strand; PAM type: NRG; PAM sequence: AAG
  source 1..20: mol_type = other DNA
actcagaaaagagaaggcag

SEQ ID NO: 10455 - DNA, 20 bp, synthetic construct
  misc_feature 1..20: note = Description of Artificial Sequence: Synthetic oligonucleotide
  misc_feature 1..20: note = Target: FXN; (-) strand; PAM type: NRG; PAM sequence: CAG
  source 1..20: mol_type = other DNA
caaactcagaaaagagaagg

SEQ ID NO: 10456 - DNA, 20 bp, synthetic construct
  misc_feature 1..20: note = Description of Artificial Sequence: Synthetic oligonucleotide
  misc_feature 1..20: note = Target: FXN; (-) strand; PAM type: NRG; PAM sequence: AGG
  source 1..20: mol_type = other DNA
tagcaaactcagaaaagaga

SEQ ID NO: 10457 - DNA, 20 bp, synthetic construct
  misc_feature 1..20: note = Description of Artificial Sequence: Synthetic oligonucleotide
  misc_feature 1..20: note = Target: FXN; (-) strand; PAM type: NRG; PAM sequence: AAG
  source 1..20: mol_type = other DNA
ttagcaaactcagaaaagag

SEQ ID NO: 10458 - DNA, 20 bp, synthetic construct
  misc_feature 1..20: note = Description of Artificial Sequence: Synthetic oligonucleotide
  misc_feature 1..20: note = Target: FXN; (-) strand; PAM type: NRG; PAM sequence: GAG
  source 1..20: mol_type = other DNA
cccttagcaaactcagaaaa

SEQ ID NO: 10459 - DNA, 20 bp, synthetic construct
  misc_feature 1..20: note = Description of Artificial Sequence: Synthetic oligonucleotide
  misc_feature 1..20: note = Target: FXN; (-) strand; PAM type: NRG; PAM sequence: AAG
  source 1..20: mol_type = other DNA
tgcccttagcaaactcagaa

SEQ ID NO: 10460 - DNA, 20 bp, synthetic construct
  misc_feature 1..20: note = Description of Artificial Sequence: Synthetic oligonucleotide
  misc_feature 1..20: note = Target: FXN; (-) strand; PAM type: NRG; PAM sequence: CAG
  source 1..20: mol_type = other DNA
agcagtgcccttagcaaact

SEQ ID NO: 10461 - DNA, 20 bp, synthetic construct
  misc_feature 1..20: note = Description of Artificial Sequence: Synthetic oligonucleotide
  misc_feature 1..20: note = Target: FXN; (-) strand; PAM type: NRG; PAM sequence: TAG
  source 1..20: mol_type = other DNA
tcttgagccagcagtgccct

SEQ ID NO: 10462 - DNA, 20 bp, synthetic construct
  misc_feature 1..20: note = Description of Artificial Sequence: Synthetic oligonucleotide
  misc_feature 1..20: note = Target: FXN; (-) strand; PAM type: NRG; PAM sequence: CAG
  source 1..20: mol_type = other DNA
agttactgctcttgagccag

SEQ ID NO: 10463 - DNA, 20 bp, synthetic construct
  misc_feature 1..20: note = Description of Artificial Sequence: Synthetic oligonucleotide
  misc_feature 1..20: note = Target: FXN; (-) strand; PAM type: NRG; PAM sequence: CAG
  source 1..20: mol_type = other DNA
gttagttactgctcttgagc

SEQ ID NO: 10464 - DNA, 20 bp, synthetic construct
  misc_feature 1..20: note = Description of Artificial Sequence: Synthetic oligonucleotide
  misc_feature 1..20: note = Target: FXN; (-) strand; PAM type: NRG; PAM sequence: GAG
  source 1..20: mol_type = other DNA
gactgttagttactgctctt

SEQ ID NO: 10465 - DNA, 20 bp, synthetic construct
  misc_feature 1..20: note = Description of Artificial Sequence: Synthetic oligonucleotide
  misc_feature 1..20: note = Target: FXN; (-) strand; PAM type: NRG; PAM sequence: TAG
  source 1..20: mol_type = other DNA
gagaagaggcgagagactgt

SEQ ID NO: 10466 - DNA, 20 bp, synthetic construct
  misc_feature 1..20: note = Description of Artificial Sequence: Synthetic oligonucleotide
  misc_feature 1..20: note = Target: FXN; (-) strand; PAM type: NRG; PAM sequence: GAG
  source 1..20: mol_type = other DNA
gccatggagagaagaggcga

SEQ ID NO: 10467 - DNA, 20 bp, synthetic construct
  misc_feature 1..20: note = Description of Artificial Sequence: Synthetic oligonucleotide
  misc_feature 1..20: note = Target: FXN; (-) strand; PAM type: NRG; PAM sequence: GAG
  source 1..20: mol_type = other DNA
ttgccatggagagaagaggc

SEQ ID NO: 10468 - DNA, 20 bp, synthetic construct
  misc_feature 1..20: note = Description of Artificial Sequence: Synthetic oligonucleotide
  misc_feature 1..20: note = Target: FXN; (-) strand; PAM type: NRG; PAM sequence: AGG
  source 1..20: mol_type = other DNA
ctggttgccatggagagaag

SEQ ID NO: 10469 - DNA, 20 bp, synthetic construct
  misc_feature 1..20: note = Description of Artificial Sequence: Synthetic oligonucleotide
  misc_feature 1..20: note = Target: FXN; (-) strand; PAM type: NRG; PAM sequence: GAG
  source 1..20: mol_type = other DNA
actggttgccatggagagaa

SEQ ID NO: 10470 - DNA, 20 bp, synthetic construct
  misc_feature 1..20: note = Description of Artificial Sequence: Synthetic oligonucleotide
  misc_feature 1..20: note = Target: FXN; (-) strand; PAM type: NRG; PAM sequence: AAG
  source 1..20: mol_type = other DNA
tcactggttgccatggagag

SEQ ID NO: 10471 - DNA, 20 bp, synthetic construct
  misc_feature 1..20: note = Description of Artificial Sequence: Synthetic oligonucleotide
  misc_feature 1..20: note = Target: FXN; (-) strand; PAM type: NRG; PAM sequence: GAG
  source 1..20: mol_type = other DNA
aggtcactggttgccatgga

SEQ ID NO: 10472 - DNA, 20 bp, synthetic construct
  misc_feature 1..20: note = Description of Artificial Sequence: Synthetic oligonucleotide
  misc_feature 1..20: note = Target: FXN; (-) strand; PAM type: NRG; PAM sequence: GAG
  source 1..20: mol_type = other DNA
aaaggtcactggttgccatg

SEQ ID NO: 10473 - DNA, 20 bp, synthetic construct
  misc_feature 1..20: note = Description of Artificial Sequence: Synthetic oligonucleotide
  misc_feature 1..20: note = Target: FXN; (-) strand; PAM type: NRG; PAM sequence: TGG
  source 1..20: mol_type = other DNA
ccaaaggtcactggttgcca

SEQ ID NO: 10474 - DNA, 20 bp, synthetic construct
  misc_feature 1..20: note = Description of Artificial Sequence: Synthetic oligonucleotide
  misc_feature 1..20: note = Target: FXN; (-) strand; PAM type: NRG; PAM sequence: TGG
  source 1..20: mol_type = other DNA
ttacattctccaaaggtcac

SEQ ID NO: 10475 - DNA, 20 bp, synthetic construct
  misc_feature 1..20: note = Description of Artificial Sequence: Synthetic oligonucleotide
  misc_feature 1..20: note = Target: FXN; (-) strand; PAM type: NRG; PAM sequence: AGG
  source 1..20: mol_type = other DNA
ataaggtttacattctccaa

SEQ ID NO: 10476 - DNA, 20 bp, synthetic construct
  misc_feature 1..20: note = Description of Artificial Sequence: Synthetic oligonucleotide
  misc_feature 1..20: note = Target: FXN; (-) strand; PAM type: NRG; PAM sequence: AAG
  source 1..20: mol_type = other DNA
gataaggtttacattctcca

SEQ ID NO: 10477 - DNA, 20 bp, synthetic construct
  misc_feature 1..20: note = Description of Artificial Sequence: Synthetic oligonucleotide
  misc_feature 1..20: note = Target: FXN; (-) strand; PAM type: NRG; PAM sequence: AGG
  source 1..20: mol_type = other DNA
gctttaagagattggtgata

SEQ ID NO: 10478 - DNA, 20 bp, synthetic construct
  misc_feature 1..20: note = Description of Artificial Sequence: Synthetic oligonucleotide
  misc_feature 1..20: note = Target: FXN; (-) strand; PAM type: NRG; PAM sequence: AAG
  source 1..20: mol_type = other DNA
ggctttaagagattggtgat

SEQ ID NO: 10479 - DNA, 20 bp, synthetic construct
  misc_feature 1..20: note = Description of Artificial Sequence: Synthetic oligonucleotide
  misc_feature 1..20: note = Target: FXN; (-) strand; PAM type: NRG; PAM sequence: TGG
  source 1..20: mol_type = other DNA
accgaagggctttaagagat

SEQ ID NO: 10480 - DNA, 20 bp, synthetic construct
  misc_feature 1..20: note = Description of Artificial Sequence: Synthetic oligonucleotide
  misc_feature 1..20: note = Target: FXN; (-) strand; PAM type: NRG; PAM sequence: GAG
  source 1..20: mol_type = other DNA
aaggcaccgaagggctttaa

SEQ ID NO: 10481 - DNA, 20 bp, synthetic construct
  misc_feature 1..20: note = Description of Artificial Sequence: Synthetic oligonucleotide
  misc_feature 1..20: note = Target: FXN; (-) strand; PAM type: NRG; PAM sequence: AAG
  source 1..20: mol_type = other DNA
ggaaggcaccgaagggcttt

SEQ ID NO: 10482 - DNA, 20 bp, synthetic construct
  misc_feature 1..20: note = Description of Artificial Sequence: Synthetic oligonucleotide
  misc_feature 1..20: note = Target: FXN; (-) strand; PAM type: NRG; PAM sequence: GGG
  source 1..20: mol_type = other DNA
catcctgggaaggcaccgaa

SEQ ID NO: 10483 - DNA, 20 bp, synthetic construct
  misc_feature 1..20: note = Description of Artificial Sequence: Synthetic oligonucleotide
  misc_feature 1..20: note = Target: FXN; (-) strand; PAM type: NRG; PAM sequence: AGG
  source 1..20: mol_type = other DNA
tcatcctgggaaggcaccga

SEQ ID NO: 10484 - DNA, 20 bp, synthetic construct
  misc_feature 1..20: note = Description of Artificial Sequence: Synthetic oligonucleotide
  misc_feature 1..20: note = Target: FXN; (-) strand; PAM type: NRG; PAM sequence: AAG
  source 1..20: mol_type = other DNA
gtcatcctgggaaggcaccg

SEQ ID NO: 10485 - DNA, 20 bp, synthetic construct
  misc_feature 1..20: note = Description of Artificial Sequence: Synthetic oligonucleotide
  misc_feature 1..20: note = Target: FXN; (-) strand; PAM type: NRG; PAM sequence: AGG
  source 1..20: mol_type = other DNA
agctggacgtcatcctggga

SEQ ID NO: 10486 - DNA, 20 bp, synthetic construct
  misc_feature 1..20: note = Description of Artificial Sequence: Synthetic oligonucleotide
  misc_feature 1..20: note = Target: FXN; (-) strand; PAM type: NRG; PAM sequence: AAG
  source 1..20: mol_type = other DNA
cagctggacgtcatcctggg

SEQ ID NO: 10487 - DNA, 20 bp, synthetic construct
  misc_feature 1..20: note = Description of Artificial Sequence: Synthetic oligonucleotide
  misc_feature 1..20: note = Target: FXN; (-) strand; PAM type: NRG; PAM sequence: GGG
  source 1..20: mol_type = other DNA
cctcagctggacgtcatcct

SEQ ID NO: 10488 - DNA, 20 bp, synthetic construct
  misc_feature 1..20: note = Description of Artificial Sequence: Synthetic oligonucleotide
  misc_feature 1..20: note = Target: FXN; (-) strand; PAM type: NRG; PAM sequence: TGG
  source 1..20: mol_type = other DNA
acctcagctggacgtcatcc

SEQ ID NO: 10489 - DNA, 20 bp, synthetic construct
  misc_feature 1..20: note = Description of Artificial Sequence: Synthetic oligonucleotide
  misc_feature 1..20: note = Target: FXN; (-) strand; PAM type: NRG; PAM sequence: TGG
  source 1..20: mol_type = other DNA
gtcttgccaaggacctcagc

SEQ ID NO: 10490 - DNA, 20 bp, synthetic construct
  misc_feature 1..20: note = Description of Artificial Sequence: Synthetic oligonucleotide
  misc_feature 1..20: note = Target: FXN; (-) strand; PAM type: NRG; PAM sequence: CAG
  source 1..20: mol_type = other DNA
ctgggtcttgccaaggacct

SEQ ID NO: 10491 - DNA, 20 bp, synthetic construct
  misc_feature 1..20: note = Description of Artificial Sequence: Synthetic oligonucleotide
  misc_feature 1..20: note = Target: FXN; (-) strand; PAM type: NRG; PAM sequence: AGG
  source 1..20: mol_type = other DNA
gggcgccctgggtcttgcca

SEQ ID NO: 10492 - DNA, 20 bp, synthetic construct
  misc_feature 1..20: note = Description of Artificial Sequence: Synthetic oligonucleotide
  misc_feature 1..20: note = Target: FXN; (-) strand; PAM type: NRG; PAM sequence: AAG
  source 1..20: mol_type = other DNA
ggggcgccctgggtcttgcc

SEQ ID NO: 10493 - DNA, 20 bp, synthetic construct
  misc_feature 1..20: note = Description of Artificial Sequence: Synthetic oligonucleotide
  misc_feature 1..20: note = Target: FXN; (-) strand; PAM type: NRG; PAM sequence: GGG
  source 1..20: mol_type = other DNA
gagcgaggagggggcgccct

SEQ ID NO: 10494 - DNA, 20 bp, synthetic construct
  misc_feature 1..20: note = Description of Artificial Sequence: Synthetic oligonucleotide
  misc_feature 1..20: note = Target: FXN; (-) strand; PAM type: NRG; PAM sequence: TGG
  source 1..20: mol_type = other DNA
ggagcgaggagggggcgccc

SEQ ID NO: 10495 - DNA, 20 bp, synthetic construct
  misc_feature 1..20: note = Description of Artificial Sequence: Synthetic oligonucleotide
  misc_feature 1..20: note = Target: FXN; (-) strand; PAM type: NRG; PAM sequence: GGG
  source 1..20: mol_type = other DNA
gaggtgatggagcgaggagg

SEQ ID NO: 10496 - DNA, 20 bp, synthetic construct
  misc_feature 1..20: note = Description of Artificial Sequence: Synthetic oligonucleotide
  misc_feature 1..20: note = Target: FXN; (-) strand; PAM type: NRG; PAM sequence: GGG
  source 1..20: mol_type = other DNA
ggaggtgatggagcgaggag

SEQ ID NO: 10497 - DNA, 20 bp, synthetic construct
  misc_feature 1..20: note = Description of Artificial Sequence: Synthetic oligonucleotide
  misc_feature 1..20: note = Target: FXN; (-) strand; PAM type: NRG; PAM sequence: GGG
  source 1..20: mol_type = other DNA
gggaggtgatggagcgagga

SEQ ID NO: 10498 - DNA, 20 bp, synthetic construct
  misc_feature 1..20: note = Description of Artificial Sequence: Synthetic oligonucleotide
  misc_feature 1..20: note = Target: FXN; (-) strand; PAM type: NRG; PAM sequence: AGG
  source 1..20: mol_type = other DNA
ggggaggtgatggagcgagg

SEQ ID NO: 10499 - DNA, 20 bp, synthetic construct
  misc_feature 1..20: note = Description of Artificial Sequence: Synthetic oligonucleotide
  misc_feature 1..20: note = Target: FXN; (-) strand; PAM type: NRG; PAM sequence: GAG
  source 1..20: mol_type = other DNA
aggggaggtgatggagcgag

SEQ ID NO: 10500 - DNA, 20 bp, synthetic construct
  misc_feature 1..20: note = Description of Artificial Sequence: Synthetic oligonucleotide
  misc_feature 1..20: note = Target: FXN; (-) strand; PAM type: NRG; PAM sequence: AGG
  source 1..20: mol_type = other DNA
acaggggaggtgatggagcg

SEQ ID NO: 10501 - DNA, 20 bp, synthetic construct
  misc_feature 1..20: note = Description of Artificial Sequence: Synthetic oligonucleotide
  misc_feature 1..20: note = Target: FXN; (-) strand; PAM type: NRG; PAM sequence: GAG
  source 1..20: mol_type = other DNA
gacaggggaggtgatggagc

SEQ ID NO: 10502 - DNA, 20 bp, synthetic construct
  misc_feature 1..20: note = Description of Artificial Sequence: Synthetic oligonucleotide
  misc_feature 1..20: note = Target: FXN; (-) strand; PAM type: NRG; PAM sequence: GAG
  source 1..20: mol_type = other DNA
aggtgacaggggaggtgatg

SEQ ID NO: 10503 - DNA, 20 bp, synthetic construct
  misc_feature 1..20: note = Description of Artificial Sequence: Synthetic oligonucleotide
  misc_feature 1..20: note = Target: FXN; (-) strand; PAM type: NRG; PAM sequence: TGG
  source 1..20: mol_type = other DNA
ggaggtgacaggggaggtga

SEQ ID NO: 10504 - DNA, 20 bp, synthetic construct
  misc_feature 1..20: note = Description of Artificial Sequence: Synthetic oligonucleotide
  misc_feature 1..20: note = Target: FXN; (-) strand; PAM type: NRG; PAM sequence: AGG
  source 1..20: mol_type = other DNA
tgcaggggaggtgacagggg

SEQ ID NO: 10505 - DNA, 20 bp, synthetic construct
  misc_feature 1..20: note = Description of Artificial Sequence: Synthetic oligonucleotide
  misc_feature 1..20: note = Target: FXN; (-) strand; PAM type: NRG; PAM sequence: GAG
  source 1..20: mol_type = other DNA
atgcaggggaggtgacaggg

SEQ ID NO: 10506 - DNA, 20 bp, synthetic construct
  misc_feature 1..20: note = Description of Artificial Sequence: Synthetic oligonucleotide
  misc_feature 1..20: note = Target: FXN; (-) strand; PAM type: NRG; PAM sequence: GGG
  source 1..20: mol_type = other DNA
agatgcaggggaggtgacag

SEQ ID NO: 10507 - DNA, 20 bp, synthetic construct
  misc_feature 1..20: note = Description of Artificial Sequence: Synthetic oligonucleotide
  misc_feature 1..20: note = Target: FXN; (-) strand; PAM type: NRG; PAM sequence: GGG
  source 1..20: mol_type = other DNA
gagatgcaggggaggtgaca

SEQ ID NO: 10508 - DNA, 20 bp, synthetic construct
  misc_feature 1..20: note = Description of Artificial Sequence: Synthetic oligonucleotide
  misc_feature 1..20: note = Target: FXN; (-) strand; PAM type: NRG; PAM sequence: AGG
  source 1..20: mol_type = other DNA
ggagatgcaggggaggtgac

SEQ ID NO: 10509 - DNA, 20 bp, synthetic construct
  misc_feature 1..20: note = Description of Artificial Sequence: Synthetic oligonucleotide
  misc_feature 1..20: note = Target: FXN; (-) strand; PAM type: NRG; PAM sequence: CAG
  source 1..20: mol_type = other DNA
gggagatgcaggggaggtga

SEQ ID NO: 10510 - DNA, 20 bp, synthetic construct
  misc_feature 1..20: note = Description of Artificial Sequence: Synthetic oligonucleotide
  misc_feature 1..20: note = Target: FXN; (-) strand; PAM type: NRG; PAM sequence: AGG
  source 1..20: mol_type = other DNA
ggagtagggagatgcagggg

SEQ ID NO: 10511 - DNA, 20 bp, synthetic construct
  misc_feature 1..20: note = Description of Artificial Sequence: Synthetic oligonucleotide
  misc_feature 1..20: note = Target: FXN; (-) strand; PAM type: NRG; PAM sequence: GAG
  source 1..20: mol_type = other DNA
tggagtagggagatgcaggg

SEQ ID NO: 10512 - DNA, 20 bp, synthetic construct
  misc_feature 1..20: note = Description of Artificial Sequence: Synthetic oligonucleotide
  misc_feature 1..20: note = Target: FXN; (-) strand; PAM type: NRG; PAM sequence: GGG
  source 1..20: mol_type = other DNA
gctggagtagggagatgcag

SEQ ID NO: 10513 - DNA, 20 bp, synthetic construct
  misc_feature 1..20: note = Description of Artificial Sequence: Synthetic oligonucleotide
  misc_feature 1..20: note = Target: FXN; (-) strand; PAM type: NRG; PAM sequence: GGG
  source 1..20: mol_type = other DNA
agctggagtagggagatgca

SEQ ID NO: 10514 - DNA, 20 bp, synthetic construct
  misc_feature 1..20: note = Description of Artificial Sequence: Synthetic oligonucleotide
  misc_feature 1..20: note = Target: FXN; (-) strand; PAM type: NRG; PAM sequence: AGG
  source 1..20: mol_type = other DNA
cagctggagtagggagatgc

SEQ ID NO: 10515 - DNA, 20 bp, synthetic construct
  misc_feature 1..20: note = Description of Artificial Sequence: Synthetic oligonucleotide
  misc_feature 1..20: note = Target: FXN; (-) strand; PAM type: NRG; PAM sequence: CAG
  source 1..20: mol_type = other DNA
gcagctggagtagggagatg

SEQ ID NO: 10516 - DNA, 20 bp, synthetic construct
  misc_feature 1..20: note = Description of Artificial Sequence: Synthetic oligonucleotide
  misc_feature 1..20: note = Target: FXN; (-) strand; PAM type: NRG; PAM sequence: GAG
  source 1..20: mol_type = other DNA
agtggtgcagctggagtagg

SEQ ID NO: 10517 - DNA, 20 bp, synthetic construct
  misc_feature 1..20: note = Description of Artificial Sequence: Synthetic oligonucleotide
  misc_feature 1..20: note = Target: FXN; (-) strand; PAM type: NRG; PAM sequence: GGG
  source 1..20: mol_type = other DNA
agagtggtgcagctggagta

SEQ ID NO: 10518 - DNA, 20 bp, synthetic construct
  misc_feature 1..20: note = Description of Artificial Sequence: Synthetic oligonucleotide
  misc_feature 1..20: note = Target: FXN; (-) strand; PAM type: NRG; PAM sequence: AGG
  source 1..20: mol_type = other DNA
aagagtggtgcagctggagt

SEQ ID NO: 10519 - DNA, 20 bp, synthetic construct
  misc_feature 1..20: note = Description of Artificial Sequence: Synthetic oligonucleotide
  misc_feature 1..20: note = Target: FXN; (-) strand; PAM type: NRG; PAM sequence: TAG
  source 1..20: mol_type = other DNA
caagagtggtgcagctggag

SEQ ID NO: 10520 - DNA, 20 bp, synthetic construct
  misc_feature 1..20: note = Description of Artificial Sequence: Synthetic oligonucleotide
  misc_feature 1..20: note = Target: FXN; (-) strand; PAM type: NRG; PAM sequence: GAG
  source 1..20: mol_type = other DNA
gcacaagagtggtgcagctg

SEQ ID NO: 10521 - DNA, 20 bp, synthetic construct
  misc_feature 1..20: note = Description of Artificial Sequence: Synthetic oligonucleotide
  misc_feature 1..20: note = Target: FXN; (-) strand; PAM type: NRG; PAM sequence: TGG
  source 1..20: mol_type = other DNA
gggcacaagagtggtgcagc

SEQ ID NO: 10522 - DNA, 20 bp, synthetic construct
  misc_feature 1..20: note = Description of Artificial Sequence: Synthetic oligonucleotide
  misc_feature 1..20: note = Target: FXN; (-) strand; PAM type: NRG; PAM sequence: CAG
  source 1..20: mol_type = other DNA
actggggcacaagagtggtg

SEQ ID NO: 10523 - DNA, 20 bp, synthetic construct
  misc_feature 1..20: note = Description of Artificial Sequence: Synthetic oligonucleotide
  misc_feature 1..20: note = Target: FXN; (-) strand; PAM type: NRG; PAM sequence: TGG
  source 1..20: mol_type = other DNA
gagccactggggcacaagag

SEQ ID NO: 10524 - DNA, 20 bp, synthetic construct
  misc_feature 1..20: note = Description of Artificial Sequence: Synthetic oligonucleotide
  misc_feature 1..20: note = Target: FXN; (-) strand; PAM type: NRG; PAM sequence: GAG
  source 1..20: mol_type = other DNA
caagagccactggggcacaa

SEQ ID NO: 10525 - DNA, 20 bp, synthetic construct
  misc_feature 1..20: note = Description of Artificial Sequence: Synthetic oligonucleotide
  misc_feature 1..20: note = Target: FXN; (-) strand; PAM type: NRG; PAM sequence: AAG
  source 1..20: mol_type = other DNA
gacaagagccactggggcac

SEQ ID NO: 10526 - DNA, 20 bp, synthetic construct
  misc_feature 1..20: note = Description of Artificial Sequence: Synthetic oligonucleotide
  misc_feature 1..20: note = Target: FXN; (-) strand; PAM type: NRG; PAM sequence: GGG
  source 1..20: mol_type = other DNA
taatcagacaagagccactg

SEQ ID NO: 10527 - DNA, 20 bp, synthetic construct
  misc_feature 1..20: note = Description of Artificial Sequence: Synthetic oligonucleotide
  misc_feature 1..20: note = Target: FXN; (-) strand; PAM type: NRG; PAM sequence: GGG
  source 1..20: mol_type = other DNA
ataatcagacaagagccact

SEQ ID NO: 10528 - DNA, 20 bp, synthetic construct
  misc_feature 1..20: note = Description of Artificial Sequence: Synthetic oligonucleotide
  misc_feature 1..20: note = Target: FXN; (-) strand; PAM type: NRG; PAM sequence: TGG
  source 1..20: mol_type = other DNA
aataatcagacaagagccac

SEQ ID NO: 10529 - DNA, 20 bp, synthetic construct
  misc_feature 1..20: note = Description of Artificial Sequence: Synthetic oligonucleotide
  misc_feature 1..20: note = Target: FXN; (-) strand; PAM type: NRG; PAM sequence: GAG
  source 1..20: mol_type = other DNA
tgaaggaaataatcagacaa

SEQ ID NO: 10530 - DNA, 20 bp, synthetic construct
  misc_feature 1..20: note = Description of Artificial Sequence: Synthetic oligonucleotide
  misc_feature 1..20: note = Target: FXN; (-) strand; PAM type: NRG; PAM sequence: AAG
  source 1..20: mol_type = other DNA
gatgaaggaaataatcagac

SEQ ID NO: 10531 - DNA, 20 bp, synthetic construct
  misc_feature 1..20: note = Description of Artificial Sequence: Synthetic oligonucleotide
  misc_feature 1..20: note = Target: FXN; (-) strand; PAM type: NRG; PAM sequence: CAG
  source 1..20: mol_type = other DNA
ggggagatgaaggaaataat

SEQ ID NO: 10532 - DNA, 20 bp, synthetic construct
  misc_feature 1..20: note = Description of Artificial Sequence: Synthetic oligonucleotide
  misc_feature 1..20: note = Target: FXN; (-) strand; PAM type: NRG; PAM sequence: AGG
  source 1..20: mol_type = other DNA
ctgaccagctggggagatga

SEQ ID NO: 10533 - DNA, 20 bp, synthetic construct
  misc_feature 1..20: note = Description of Artificial Sequence: Synthetic oligonucleotide
  misc_feature 1..20: note = Target: FXN; (-) strand; PAM type: NRG; PAM sequence: AAG
  source 1..20: mol_type = other DNA
gctgaccagctggggagatg

SEQ ID NO: 10534 - DNA, 20 bp, synthetic construct
  misc_feature 1..20: note = Description of Artificial Sequence: Synthetic oligonucleotide
  misc_feature 1..20: note = Target: FXN; (-) strand; PAM type: NRG; PAM sequence: GAG
  source 1..20: mol_type = other DNA
agctctgctgaccagctggg

SEQ ID NO: 10535 - DNA, 20 bp, synthetic construct
  misc_feature 1..20: note = Description of Artificial Sequence: Synthetic oligonucleotide
  misc_feature 1..20: note = Target: FXN; (-) strand; PAM type: NRG; PAM sequence: GGG
  source 1..20: mol_type = other DNA
ccagctctgctgaccagctg

SEQ ID NO: 10536 - DNA, 20 bp, synthetic construct
  misc_feature 1..20: note = Description of Artificial Sequence: Synthetic oligonucleotide
  misc_feature 1..20: note = Target: FXN; (-) strand; PAM type: NRG; PAM sequence: GGG
  source 1..20: mol_type = other DNA
accagctctgctgaccagct

SEQ ID NO: 10537 - DNA, 20 bp, synthetic construct
  misc_feature 1..20: note = Description of Artificial Sequence: Synthetic oligonucleotide
  misc_feature 1..20: note = Target: FXN; (-) strand; PAM type: NRG; PAM sequence: TGG
  source 1..20: mol_type = other DNA
caccagctctgctgaccagc

SEQ ID NO: 10538 - DNA, 20 bp, synthetic construct
  misc_feature 1..20: note = Description of Artificial Sequence: Synthetic oligonucleotide
  misc_feature 1..20: note = Target: FXN; (-) strand; PAM type: NRG; PAM sequence: CAG
  source 1..20: mol_type = other DNA
ttaccaccagctctgctgac

SEQ ID NO: 10539 - DNA, 20 bp, synthetic construct
  misc_feature 1..20: note = Description of Artificial Sequence: Synthetic oligonucleotide
  misc_feature 1..20: note = Target: FXN; (-) strand; PAM type: NRG; PAM sequence: CAG
  source 1..20: mol_type = other DNA
gggtctgagttgattaccac

SEQ ID NO: 10540 - DNA, 20 bp, synthetic construct
  misc_feature 1..20: note = Description of Artificial Sequence: Synthetic oligonucleotide
  misc_feature 1..20: note = Target: FXN; (-) strand; PAM type: NRG; PAM sequence: GAG
  source 1..20: mol_type = other DNA
acatccaggtgacagggtct

SEQ ID NO: 10541 - DNA, 20 bp, synthetic construct
  misc_feature 1..20: note = Description of Artificial Sequence: Synthetic oligonucleotide
  misc_feature 1..20: note = Target: FXN; (-) strand; PAM type: NRG; PAM sequence: GGG
  source 1..20: mol_type = other DNA
tgctggacatccaggtgaca

SEQ ID NO: 10542 - DNA, 20 bp, synthetic construct
  misc_feature 1..20: note = Description of Artificial Sequence: Synthetic oligonucleotide
  misc_feature 1..20: note = Target: FXN; (-) strand; PAM type: NRG; PAM sequence: AGG
  source 1..20: mol_type = other DNA
ctgctggacatccaggtgac

SEQ ID NO: 10543 - DNA, 20 bp, synthetic construct
  misc_feature 1..20: note = Description of Artificial Sequence: Synthetic oligonucleotide
  misc_feature 1..20: note = Target: FXN; (-) strand; PAM type: NRG; PAM sequence: CAG
  source 1..20: mol_type = other DNA
actgctggacatccaggtga

SEQ ID NO: 10544 - DNA, 20 bp, synthetic construct
  misc_feature 1..20: note = Description of Artificial Sequence: Synthetic oligonucleotide
  misc_feature 1..20: note = Target: FXN; (-) strand; PAM type: NRG; PAM sequence: AGG
  source 1..20: mol_type = other DNA
tccctaactgctggacatcc

SEQ ID NO: 10545 - DNA, 20 bp, synthetic construct
  misc_feature 1..20: note = Description of Artificial Sequence: Synthetic oligonucleotide
  misc_feature 1..20: note = Target: FXN; (-) strand; PAM type: NRG; PAM sequence: CAG
  source 1..20: mol_type = other DNA
gtccctaactgctggacatc

SEQ ID NO: 10546 - DNA, 20 bp, synthetic construct
  misc_feature 1..20: note = Description of Artificial Sequence: Synthetic oligonucleotide
  misc_feature 1..20: note = Target: FXN; (-) strand; PAM type: NRG; PAM sequence: TGG
  source 1..20: mol_type = other DNA
tttttttagtccctaactgc

SEQ ID NO: 10547 - DNA, 20 bp, synthetic construct
  misc_feature 1..20: note = Description of Artificial Sequence: Synthetic oligonucleotide
  misc_feature 1..20: note = Target: FXN; (-) strand; PAM type: NRG; PAM sequence: TAG
  source 1..20: mol_type = other DNA
tgtgacctgttgattttttt

SEQ ID NO: 10548 - DNA, 20 bp, synthetic construct
  misc_feature 1..20: note = Description of Artificial Sequence: Synthetic oligonucleotide
  misc_feature 1..20: note = Target: FXN; (-) strand; PAM type: NRG; PAM sequence: CAG
  source 1..20: mol_type = other DNA
tattatcatgatctgcagga

SEQ ID NO: 10549 - DNA, 20 bp, synthetic construct
  misc_feature 1..20: note = Description of Artificial Sequence: Synthetic oligonucleotide
  misc_feature 1..20: note = Target: FXN; (-) strand; PAM type: NRG; PAM sequence: AGG
  source 1..20: mol_type = other DNA
atcttattatcatgatctgc

SEQ ID NO: 10550 - DNA, 20 bp, synthetic construct
  misc_feature 1..20: note = Description of Artificial Sequence: Synthetic oligonucleotide
  misc_feature 1..20: note = Target: FXN; (-) strand; PAM type: NRG; PAM sequence: CAG
  source 1..20: mol_type = other DNA
gatcttattatcatgatctg

SEQ ID NO: 10551 - DNA, 20 bp, synthetic construct
  misc_feature 1..20: note = Description of Artificial Sequence: Synthetic oligonucleotide
  misc_feature 1..20: note = Target: FXN; (-) strand; PAM type: NRG; PAM sequence: CAG
  source 1..20: mol_type = other DNA
gactgctgactgctgtctga

SEQ ID NO: 10552 - DNA, 20 bp, synthetic construct
  misc_feature 1..20: note = Description of Artificial Sequence: Synthetic oligonucleotide
  misc_feature 1..20: note = Target: FXN; (-) strand; PAM type: NRG; PAM sequence: TGG
  source 1..20: mol_type = other DNA
ctgctgaagtccagaagatt

SEQ ID NO: 10553 - DNA, 20 bp, synthetic construct
  misc_feature 1..20: note = Description of Artificial Sequence: Synthetic oligonucleotide
  misc_feature 1..20: note = Target: FXN; (-) strand; PAM type: NRG; PAM sequence: AAG
  source 1..20: mol_type = other DNA
agaatcctgctgaagtccag

SEQ ID NO: 10554 - DNA, 20 bp, synthetic construct
  misc_feature 1..20: note = Description of Artificial Sequence: Synthetic oligonucleotide
  misc_feature 1..20: note = Target: FXN; (-) strand; PAM type: NRG; PAM sequence: CAG
  source 1..20: mol_type = other DNA
ggcagaatcctgctgaagtc

SEQ ID NO: 10555 - DNA, 20 bp, synthetic construct
  misc_feature 1..20: note = Description of Artificial Sequence: Synthetic oligonucleotide
  misc_feature 1..20: note = Target: FXN; (-) strand; PAM type: NRG; PAM sequence: AAG
  source 1..20: mol_type = other DNA
caagaggcagaatcctgctg

SEQ ID NO: 10556 - DNA, 20 bp, synthetic construct
  misc_feature 1..20: note = Description of Artificial Sequence: Synthetic oligonucleotide
  misc_feature 1..20: note = Target: FXN; (-) strand; PAM type: NRG; PAM sequence: CAG
  source 1..20: mol_type = other DNA
caacaggaaatagcaagagg

SEQ ID NO: 10557 - DNA, 20 bp, synthetic construct
  misc_feature 1..20: note = Description of Artificial Sequence: Synthetic oligonucleotide
  misc_feature 1..20: note = Target: FXN; (-) strand; PAM type: NRG; PAM sequence: AGG
  source 1..20: mol_type = other DNA
aggcaacaggaaatagcaag

SEQ ID NO: 10558 - DNA, 20 bp, synthetic construct
  misc_feature 1..20: note = Description of Artificial Sequence: Synthetic oligonucleotide
  misc_feature 1..20: note = Target: FXN; (-) strand; PAM type: NRG; PAM sequence: GAG
  source 1..20: mol_type = other DNA
gaggcaacaggaaatagcaa

SEQ ID NO: 10559 - DNA, 20 bp, synthetic construct
  misc_feature 1..20: note = Description of Artificial Sequence: Synthetic oligonucleotide
  misc_feature 1..20: note = Target: FXN; (-) strand; PAM type: NRG; PAM sequence: AAG
  source 1..20: mol_type = other DNA
gagaggcaacaggaaatagc

SEQ ID NO: 10560 - DNA, 20 bp, synthetic construct
  misc_feature 1..20: note = Description of Artificial Sequence: Synthetic oligonucleotide
  misc_feature 1..20: note = Target: FXN; (-) strand; PAM type: NRG; PAM sequence: TAG
  source 1..20: mol_type = other DNA
ctaagagaggcaacaggaaa

SEQ ID NO: 10561 - DNA, 20 bp, synthetic construct
  misc_feature 1..20: note = Description of Artificial Sequence: Synthetic oligonucleotide
  misc_feature 1..20: note = Target: FXN; (-) strand; PAM type: NRG; PAM sequence: AGG
  source 1..20: mol_type = other DNA
aggtcactaagagaggcaac

SEQ ID NO: 10562 - DNA, 20 bp, synthetic construct
  misc_feature 1..20: note = Description of Artificial Sequence: Synthetic oligonucleotide
  misc_feature 1..20: note = Target: FXN; (-) strand; PAM type: NRG; PAM sequence: CAG
  source 1..20: mol_type = other DNA
aaggtcactaagagaggcaa

SEQ ID NO: 10563 - DNA, 20 bp, synthetic construct
  misc_feature 1..20: note = Description of Artificial Sequence: Synthetic oligonucleotide
  misc_feature 1..20: note = Target: FXN; (-) strand; PAM type: NRG; PAM sequence: AGG
  source 1..20: mol_type = other DNA
tcttaaaaggtcactaagag

SEQ ID NO: 10564 - DNA, 20 bp, synthetic construct
  misc_feature 1..20: note = Description of Artificial Sequence: Synthetic oligonucleotide
  misc_feature 1..20: note = Target: FXN; (-) strand; PAM type: NRG; PAM sequence: GAG
  source 1..20: mol_type = other DNA
ctcttaaaaggtcactaaga

SEQ ID NO: 10565 - DNA, 20 bp, synthetic construct
  misc_feature 1..20: note = Description of Artificial Sequence: Synthetic oligonucleotide
  misc_feature 1..20: note = Target: FXN; (-) strand; PAM type: NRG; PAM sequence: GAG
  source 1..20: mol_type = other DNA
tgctcttaaaaggtcactaa

SEQ ID NO: 10566 - DNA, 20 bp, synthetic construct
  misc_feature 1..20: note = Description of Artificial Sequence: Synthetic oligonucleotide
  misc_feature 1..20: note = Target: FXN; (-) strand; PAM type: NRG; PAM sequence: AAG
  source 1..20: mol_type = other DNA
aatgctcttaaaaggtcact

SEQ ID NO: 10567 - DNA, 20 bp, synthetic construct
  misc_feature 1..20: note = Description of Artificial Sequence: Synthetic oligonucleotide
  misc_feature 1..20: note = Target: FXN; (-) strand; PAM type: NRG; PAM sequence: AGG
  source 1..20: mol_type = other DNA
gcatccacaatgctcttaaa

SEQ ID NO: 10568 - DNA, 20 bp, synthetic construct
  misc_feature 1..20: note = Description of Artificial Sequence: Synthetic oligonucleotide
  misc_feature 1..20: note = Target: FXN; (-) strand; PAM type: NRG; PAM sequence: AAG
  source 1..20: mol_type = other DNA
ggcatccacaatgctcttaa

SEQ ID NO: 10569 - DNA, 20 bp, synthetic construct
  misc_feature 1..20: note = Description of Artificial Sequence: Synthetic oligonucleotide
  misc_feature 1..20: note = Target: FXN; (-) strand; PAM type: NRG; PAM sequence: AGG
  source 1..20: mol_type = other DNA
gtggttagcaggaggctggg

SEQ ID NO: 10570 - DNA, 20 bp, synthetic construct
  misc_feature 1..20: note = Description of Artificial Sequence: Synthetic oligonucleotide
  misc_feature 1..20: note = Target: FXN; (-) strand; PAM type: NRG; PAM sequence: GAG
  source 1..20: mol_type = other DNA
ggtggttagcaggaggctgg

SEQ ID NO: 10571 - DNA, 20 bp, synthetic construct
  misc_feature 1..20: note = Description of Artificial Sequence: Synthetic oligonucleotide
  misc_feature 1..20: note = Target: FXN; (-) strand; PAM type: NRG; PAM sequence: GGG
  source 1..20: mol_type = other DNA
agggtggttagcaggaggct

SEQ ID NO: 10572 - DNA, 20 bp, synthetic construct
  misc_feature 1..20: note = Description of Artificial Sequence: Synthetic oligonucleotide
  misc_feature 1..20: note = Target: FXN; (-) strand; PAM type: NRG; PAM sequence: TGG
  source 1..20: mol_type = other DNA
cagggtggttagcaggaggc

SEQ ID NO: 10573 - DNA, 20 bp, synthetic construct
  misc_feature 1..20: note = Description of Artificial Sequence: Synthetic oligonucleotide
  misc_feature 1..20: note = Target: FXN; (-) strand; PAM type: NRG; PAM sequence: AGG
  source 1..20: mol_type = other DNA
gttacagggtggttagcagg

SEQ ID NO: 10574 - DNA, 20 bp, synthetic construct
  misc_feature 1..20: note = Description of Artificial Sequence: Synthetic oligonucleotide
  misc_feature 1..20: note = Target: FXN; (-) strand; PAM type: NRG; PAM sequence: GAG
  source 1..20: mol_type = other DNA
ggttacagggtggttagcag

SEQ ID NO: 10575 - DNA, 20 bp, synthetic construct
  misc_feature 1..20: note = Description of Artificial Sequence: Synthetic oligonucleotide
  misc_feature 1..20: note = Target: FXN; (-) strand; PAM type: NRG; PAM sequence: AGG
  source 1..20: mol_type = other DNA
caggttacagggtggttagc

SEQ ID NO: 10576 - DNA, 20 bp, synthetic construct
  misc_feature 1..20: note = Description of Artificial Sequence: Synthetic oligonucleotide
  misc_feature 1..20: note = Target: FXN; (-) strand; PAM type: NRG; PAM sequence: CAG
  source 1..20: mol_type = other DNA
tcaggttacagggtggttag

SEQ ID NO: 10577 - DNA, 20 bp, synthetic construct
  misc_feature 1..20: note = Description of Artificial Sequence: Synthetic oligonucleotide
  misc_feature 1..20: note = Target: FXN; (-) strand; PAM type: NRG; PAM sequence: TAG
  source 1..20: mol_type = other DNA
tgttcaggttacagggtggt

SEQ ID NO: 10578 - DNA, 20 bp, synthetic construct
  misc_feature 1..20: note = Description of Artificial Sequence: Synthetic oligonucleotide
  misc_feature 1..20: note = Target: FXN; (-) strand; PAM type: NRG; PAM sequence: TGG
  source 1..20: mol_type = other DNA
aggctgttcaggttacaggg

SEQ ID NO: 10579 - DNA, 20 bp, synthetic construct
  misc_feature 1..20: note = Description of Artificial Sequence: Synthetic oligonucleotide
  misc_feature 1..20: note = Target: FXN; (-) strand; PAM type: NRG; PAM sequence: GGG
  source 1..20: mol_type = other DNA
tgcaggctgttcaggttaca

SEQ ID NO: 10580 - DNA, 20 bp, synthetic construct
  misc_feature 1..20: note = Description of Artificial Sequence: Synthetic oligonucleotide
  misc_feature 1..20: note = Target: FXN; (-) strand; PAM type: NRG; PAM sequence: AGG
  source 1..20: mol_type = other DNA
ctgcaggctgttcaggttac

SEQ ID NO: 10581 - DNA, 20 bp, synthetic construct
  misc_feature 1..20: note = Description of Artificial Sequence: Synthetic oligonucleotide
  misc_feature 1..20: note = Target: FXN; (-) strand; PAM type: NRG; PAM sequence: CAG
  source 1..20: mol_type = other DNA
gctgcaggctgttcaggtta

SEQ ID NO: 10582 - DNA, 20 bp, synthetic construct
  misc_feature 1..20: note = Description of Artificial Sequence: Synthetic oligonucleotide
  misc_feature 1..20: note = Target: FXN; (-) strand; PAM type: NRG; PAM sequence: AGG
  source 1..20: mol_type = other DNA
agggctgctgcaggctgttc

SEQ ID NO: 10583 - DNA, 20 bp, synthetic construct
  misc_feature 1..20: note = Description of Artificial Sequence: Synthetic oligonucleotide
  misc_feature 1..20: note = Target: FXN; (-) strand; PAM type: NRG; PAM sequence: CAG
  source 1..20: mol_type = other DNA
cagggctgctgcaggctgtt

SEQ ID NO: 10584 - DNA, 20 bp, synthetic construct
  misc_feature 1..20: note = Description of Artificial Sequence: Synthetic oligonucleotide
  misc_feature 1..20: note = Target: FXN; (-) strand; PAM type: NRG; PAM sequence: AGG
  source 1..20: mol_type = other DNA
ctactgggcagggctgctgc

SEQ ID NO: 10585 - DNA, 20 bp, synthetic construct
  misc_feature 1..20: note = Description of Artificial Sequence: Synthetic oligonucleotide
  misc_feature 1..20: note = Target: FXN; (-) strand; PAM type: NRG; PAM sequence: CAG
  source 1..20: mol_type = other DNA
tctactgggcagggctgctg

SEQ ID NO: 10586 - DNA, 20 bp, synthetic construct
  misc_feature 1..20: note = Description of Artificial Sequence: Synthetic oligonucleotide
  misc_feature 1..20: note = Target: FXN; (-) strand; PAM type: NRG; PAM sequence: GGG
  source 1..20: mol_type = other DNA
tcaggaagttctactgggca

SEQ ID NO: 10587 - DNA, 20 bp, synthetic construct
  misc_feature 1..20: note = Description of Artificial Sequence: Synthetic oligonucleotide
  misc_feature 1..20: note = Target: FXN; (-) strand; PAM type: NRG; PAM sequence: AGG
  source 1..20: mol_type = other DNA
atcaggaagttctactgggc

SEQ ID NO: 10588 - DNA, 20 bp, synthetic construct
  misc_feature 1..20: note = Description of Artificial Sequence: Synthetic oligonucleotide
  misc_feature 1..20: note = Target: FXN; (-) strand; PAM type: NRG; PAM sequence: CAG
  source 1..20: mol_type = other DNA
catcaggaagttctactggg

SEQ ID NO: 10589 - DNA, 20 bp, synthetic construct
  misc_feature 1..20: note = Description of Artificial Sequence: Synthetic oligonucleotide
  misc_feature 1..20: note = Target: FXN; (-) strand; PAM type: NRG; PAM sequence: GGG
  source 1..20: mol_type = other DNA
tcacatcaggaagttctact

SEQ ID NO: 10590 - DNA, 20 bp, synthetic construct
  misc_feature 1..20: note = Description of Artificial Sequence: Synthetic oligonucleotide
  misc_feature 1..20: note = Target: FXN; (-) strand; PAM type: NRG; PAM sequence: TGG
  source 1..20: mol_type = other DNA
atcacatcaggaagttctac

SEQ ID NO: 10591 - DNA, 20 bp, synthetic construct
  misc_feature 1..20: note = Description of Artificial Sequence: Synthetic oligonucleotide
  misc_feature 1..20: note = Target: FXN; (-) strand; PAM type: NRG; PAM sequence: AAG
  source 1..20: mol_type = other DNA
agcatttccatcacatcagg

SEQ ID NO: 10592 - DNA, 20 bp, synthetic construct
  misc_feature 1..20: note = Description of Artificial Sequence: Synthetic oligonucleotide
  misc_feature 1..20: note = Target: FXN; (-) strand; PAM type: NRG; PAM sequence: AGG
  source 1..20: mol_type = other DNA
cacagcatttccatcacatc

SEQ ID NO: 10593 - DNA, 20 bp, synthetic construct
  misc_feature 1..20: note = Description of Artificial Sequence: Synthetic oligonucleotide
  misc_feature 1..20: note = Target: FXN; (-) strand; PAM type: NRG; PAM sequence: CAG
  source 1..20: mol_type = other DNA
acacagcatttccatcacat

SEQ ID NO: 10594 - DNA, 20 bp, synthetic construct
  misc_feature 1..20: note = Description of Artificial Sequence: Synthetic oligonucleotide
  misc_feature 1..20: note = Target: FXN; (-) strand; PAM type: NRG; PAM sequence: CAG
  source 1..20: mol_type = other DNA
tgtggctagtggtgcagaca

SEQ ID NO: 10595 - DNA, 20 bp, synthetic construct
  misc_feature 1..20: note = Description of Artificial Sequence: Synthetic oligonucleotide
  misc_feature 1..20: note = Target: FXN; (-) strand; PAM type: NRG; PAM sequence: CAG
  source 1..20: mol_type = other DNA
gccacatgtggctagtggtg

SEQ ID NO: 10596 - DNA, 20 bp, synthetic construct
  misc_feature 1..20: note = Description of Artificial Sequence: Synthetic oligonucleotide
  misc_feature 1..20: note = Target: FXN; (-) strand; PAM type: NRG; PAM sequence: TGG
  source 1..20: mol_type = other DNA
ctgtggccacatgtggctag

SEQ ID NO: 10597 - DNA, 20 bp, synthetic construct
  misc_feature 1..20: note = Description of Artificial Sequence: Synthetic oligonucleotide
  misc_feature 1..20: note = Target: FXN; (-) strand; PAM type: NRG; PAM sequence: TAG
  source 1..20: mol_type = other DNA
atcctgtggccacatgtggc

SEQ ID NO: 10598 - DNA, 20 bp, synthetic construct
  misc_feature 1..20: note = Description of Artificial Sequence: Synthetic oligonucleotide
  misc_feature 1..20: note = Target: FXN; (-) strand; PAM type: NRG; PAM sequence: TGG
  source 1..20: mol_type = other DNA
gagaatcctgtggccacatg

SEQ ID NO: 10599 - DNA, 20 bp, synthetic construct
  misc_feature 1..20: note = Description of Artificial Sequence: Synthetic oligonucleotide
  misc_feature 1..20: note = Target: FXN; (-) strand; PAM type: NRG; PAM sequence: TGG
  source 1..20: mol_type = other DNA
caccagtttcgagaatcctg

SEQ ID NO: 10600 - DNA, 20 bp, synthetic construct
  misc_feature 1..20: note = Description of Artificial Sequence: Synthetic oligonucleotide
  misc_feature 1..20: note = Target: FXN; (-) strand; PAM type: NRG; PAM sequence: GAG
  source 1..20: mol_type = other DNA
tcaactgcaccaccagtttc

SEQ ID NO: 10601 - DNA, 20 bp, synthetic construct
  misc_feature 1..20: note = Description of Artificial Sequence: Synthetic oligonucleotide
  misc_feature 1..20: note = Target: FXN; (-) strand; PAM type: NRG; PAM sequence: CAG
  source 1..20: mol_type = other DNA
cagctcctcaactgcaccac

SEQ ID NO: 10602 - DNA, 20 bp, synthetic construct
  misc_feature 1..20: note = Description of Artificial Sequence: Synthetic oligonucleotide
  misc_feature 1..20: note = Target: FXN; (-) strand; PAM type: NRG; PAM sequence: CAG
  source 1..20: mol_type = other DNA
aatgagataaaatataaagt

SEQ ID NO: 10603 - DNA, 20 bp, synthetic construct
  misc_feature 1..20: note = Description of Artificial Sequence: Synthetic oligonucleotide
  misc_feature 1..20: note = Target: FXN; (-) strand; PAM type: NRG; PAM sequence: AAG
  source 1..20: mol_type = other DNA
atttaatgagataaaatata

SEQ ID NO: 10604 - DNA, 20 bp, synthetic construct
  misc_feature 1..20: note = Description of Artificial Sequence: Synthetic oligonucleotide
  misc_feature 1..20: note = Target: FXN; (-) strand; PAM type: NRG; PAM sequence: GAG
  source 1..20: mol_type = other DNA
tatttacatttaaatttaat

SEQ ID NO: 10605 - DNA, 20 bp, synthetic construct
  misc_feature 1..20: note = Description of Artificial Sequence: Synthetic oligonucleotide
  misc_feature 1..20: note = Target: FXN; (-) strand; PAM type: NRG; PAM sequence: TAG
  source 1..20: mol_type = other DNA
gctagccaacaagccacacg

SEQ ID NO: 10606 - DNA, 20 bp, synthetic construct
  misc_feature 1..20: note = Description of Artificial Sequence: Synthetic oligonucleotide
  misc_feature 1..20: note = Target: FXN; (-) strand; PAM type: NRG; PAM sequence: AAG
  source 1..20: mol_type = other DNA
tttccaataggctagccaac

SEQ ID NO: 10607 - DNA, 20 bp, synthetic construct
  misc_feature 1..20: note = Description of Artificial Sequence: Synthetic oligonucleotide
  misc_feature 1..20: note = Target: FXN; (-) strand; PAM type: NRG; PAM sequence: TAG
  source 1..20: mol_type = other DNA
gcccgtgttttccaataggc

SEQ ID NO: 10608 - DNA, 20 bp, synthetic construct
  misc_feature 1..20: note = Description of Artificial Sequence: Synthetic oligonucleotide
  misc_feature 1..20: note = Target: FXN; (-) strand; PAM type: NRG; PAM sequence: AGG
  source 1..20: mol_type = other DNA
ctaagcccgtgttttccaat

SEQ ID NO: 10609 - DNA, 20 bp, synthetic construct
  misc_feature 1..20: note = Description of Artificial Sequence: Synthetic oligonucleotide
  misc_feature 1..20: note = Target: FXN; (-) strand; PAM type: NRG; PAM sequence: TAG
  source 1..20: mol_type = other DNA
tctaagcccgtgttttccaa

SEQ ID NO: 10610 - DNA, 20 bp, synthetic construct
  misc_feature 1..20: note = Description of Artificial Sequence: Synthetic oligonucleotide
  misc_feature 1..20: note = Target: FXN; (-) strand; PAM type: NRG; PAM sequence: AAG
  source 1..20: mol_type = other DNA
gattctccctgtgtctctct

SEQ ID NO: 10611 - DNA, 20 bp, synthetic construct
  misc_feature 1..20: note = Description of Artificial Sequence: Synthetic oligonucleotide
  misc_feature 1..20: note = Target: FXN; (-) strand; PAM type: NRG; PAM sequence: CAG
  source 1..20: mol_type = other DNA
taccttcttttagtgcatta

SEQ ID NO: 10612 - DNA, 20 bp, synthetic construct
  misc_feature 1..20: note = Description of Artificial Sequence: Synthetic oligonucleotide
  misc_feature 1..20: note = Target: FXN; (-) strand; PAM type: NRG; PAM sequence: TAG
  source 1..20: mol_type = other DNA
tttttttttttaccttcttt

SEQ ID NO: 10613 - DNA, 20 bp, synthetic construct
  misc_feature 1..20: note = Description of Artificial Sequence: Synthetic oligonucleotide
  misc_feature 1..20: note = Target: FXN; (-) strand; PAM type: NRG; PAM sequence: AGG
  source 1..20: mol_type = other DNA
gtattttaggaatatttctt

SEQ ID NO: 10614 - DNA, 20 bp, synthetic construct
  misc_feature 1..20: note = Description of Artificial Sequence: Synthetic oligonucleotide
  misc_feature 1..20: note = Target: FXN; (-) strand; PAM type: NRG; PAM sequence: TAG
  source 1..20: mol_type = other DNA
agtattttaggaatatttct

SEQ ID NO: 10615 - DNA, 20 bp, synthetic construct
  misc_feature 1..20: note = Description of Artificial Sequence: Synthetic oligonucleotide
  misc_feature 1..20: note = Target: FXN; (-) strand; PAM type: NRG; PAM sequence: AGG
  source 1..20: mol_type = other DNA
gccctatattaaagtatttt

SEQ ID NO: 10616 - DNA, 20 bp, synthetic construct
  misc_feature 1..20: note = Description of Artificial Sequence: Synthetic oligonucleotide
  misc_feature 1..20: note = Target: FXN; (-) strand; PAM type: NRG; PAM sequence: TAG
  source 1..20: mol_type = other DNA
agccctatattaaagtattt

SEQ ID NO: 10617 - DNA, 20 bp, synthetic construct
  misc_feature 1..20: note = Description of Artificial Sequence: Synthetic oligonucleotide
  misc_feature 1..20: note = Target: FXN; (-) strand; PAM type: NRG; PAM sequence: AAG
  source 1..20: mol_type = other DNA
ccgcacccagccctatatta

SEQ ID NO: 10618 - DNA, 20 bp, synthetic construct
  misc_feature 1..20: note = Description of Artificial Sequence: Synthetic oligonucleotide
  misc_feature 1..20: note = Target: FXN; (-) strand; PAM type: NRG; PAM sequence: CAG
  source 1..20: mol_type = other DNA
tggatgtgagccaccgcacc

SEQ ID NO: 10619 - DNA, 20 bp, synthetic construct
  misc_feature 1..20: note = Description of Artificial Sequence: Synthetic oligonucleotide
  misc_feature 1..20: note = Target: FXN; (-) strand; PAM type: NRG; PAM sequence: GAG
  source 1..20: mol_type = other DNA
cttcccaaaatgctggatgt

SEQ ID NO: 10620 - DNA, 20 bp, synthetic construct
  misc_feature 1..20: note = Description of Artificial Sequence: Synthetic oligonucleotide
  misc_feature 1..20: note = Target: FXN; (-) strand; PAM type: NRG; PAM sequence: TGG
  source 1..20: mol_type = other DNA
tcctcagcttcccaaaatgc

SEQ ID NO: 10621 - DNA, 20 bp, synthetic construct
  misc_feature 1..20: note = Description of Artificial Sequence: Synthetic oligonucleotide
  misc_feature 1..20: note = Target: FXN; (-) strand; PAM type: NRG; PAM sequence: CAG
  source 1..20: mol_type = other DNA
ctcaagtgatctgccctcct

SEQ ID NO: 10622 - DNA, 20 bp, synthetic construct
  misc_feature 1..20: note = Description of Artificial Sequence: Synthetic oligonucleotide
  misc_feature 1..20: note = Target: FXN; (-) strand; PAM type: NRG; PAM sequence: AAG
  source 1..20: mol_type = other DNA
ggtcttgaactcctggcctc

SEQ ID NO: 10623 - DNA, 20 bp, synthetic construct
  misc_feature 1..20: note = Description of Artificial Sequence: Synthetic oligonucleotide
  misc_feature 1..20: note = Target: FXN; (-) strand; PAM type: NRG; PAM sequence: TGG
  source 1..20: mol_type = other DNA
ccaggctggtcttgaactcc

SEQ ID NO: 10624 - DNA, 20 bp, synthetic construct
  misc_feature 1..20: note = Description of Artificial Sequence: Synthetic oligonucleotide
  misc_feature 1..20: note = Target: FXN; (-) strand; PAM type: NRG; PAM sequence: TGG
  source 1..20: mol_type = other DNA
tttcaccatgttggccaggc

SEQ ID NO: 10625 - DNA, 20 bp, synthetic construct
  misc_feature 1..20: note = Description of Artificial Sequence: Synthetic oligonucleotide
  misc_feature 1..20: note = Target: FXN; (-) strand; PAM type: NRG; PAM sequence: AGG
  source 1..20: mol_type = other DNA
ggggtttcaccatgttggcc

SEQ ID NO: 10626 - DNA, 20 bp, synthetic construct
  misc_feature 1..20: note = Description of Artificial Sequence: Synthetic oligonucleotide
  misc_feature 1..20: note = Target: FXN; (-) strand; PAM type: NRG; PAM sequence: CAG
  source 1..20: mol_type = other DNA
cggggtttcaccatgttggc

SEQ ID NO: 10627 - DNA, 20 bp, synthetic construct
  misc_feature 1..20: note = Description of Artificial Sequence: Synthetic oligonucleotide
  misc_feature 1..20: note = Target: FXN; (-) strand; PAM type: NRG; PAM sequence: TGG
  source 1..20: mol_type = other DNA
gagacggggtttcaccatgt

SEQ ID NO: 10628 - DNA, 20 bp, synthetic construct
  misc_feature 1..20: note = Description of Artificial Sequence: Synthetic oligonucleotide
  misc_feature 1..20: note = Target: FXN; (-) strand; PAM type: NRG; PAM sequence: GGG
  source 1..20: mol_type = other DNA
ttgtatttttagtagagacg

SEQ ID NO: 10629 - DNA, 20 bp, synthetic construct
  misc_feature 1..20: note = Description of Artificial Sequence: Synthetic oligonucleotide
  misc_feature 1..20: note = Target: FXN; (-) strand; PAM type: NRG; PAM sequence: GGG
  source 1..20: mol_type = other DNA
tttgtatttttagtagagac

SEQ ID NO: 10630 - DNA, 20 bp, synthetic construct
  misc_feature 1..20: note = Description of Artificial Sequence: Synthetic oligonucleotide
  misc_feature 1..20: note = Target: FXN; (-) strand; PAM type: NRG; PAM sequence: CGG
  source 1..20: mol_type = other DNA
ttttgtatttttagtagaga

SEQ ID NO: 10631 - DNA, 20 bp, synthetic construct
  misc_feature 1..20: note = Description of Artificial Sequence: Synthetic oligonucleotide
  misc_feature 1..20: note = Target: FXN; (-) strand; PAM type: NRG; PAM sequence: GAG
  source 1..20: mol_type = other DNA
gattttttgtatttttagta

SEQ ID NO: 10632 - DNA, 20 bp, synthetic construct
  misc_feature 1..20: note = Description of Artificial Sequence: Synthetic oligonucleotide
  misc_feature 1..20: note = Target: FXN; (-) strand; PAM type: NRG; PAM sequence: TAG
  source 1..20: mol_type = other DNA
ccgattttttgtatttttag

SEQ ID NO: 10633 - DNA, 20 bp, synthetic construct
  misc_feature 1..20: note = Description of Artificial Sequence: Synthetic oligonucleotide
  misc_feature 1..20: note = Target: FXN; (-) strand; PAM type: NRG; PAM sequence: TAG
  source 1..20: mol_type = other DNA
cacccgattttttgtatttt

SEQ ID NO: 10634 - DNA, 20 bp, synthetic construct
  misc_feature 1..20: note = Description of Artificial Sequence: Synthetic oligonucleotide
  misc_feature 1..20: note = Target: FXN; (-) strand; PAM type: NRG; PAM sequence: AGG
  source 1..20: mol_type = other DNA
tcccgcgtagctgggattac

SEQ ID NO: 10635 - DNA, 20 bp, synthetic construct
  misc_feature 1..20: note = Description of Artificial Sequence: Synthetic oligonucleotide
  misc_feature 1..20: note = Target: FXN; (-) strand; PAM type: NRG; PAM sequence: CAG
  source 1..20: mol_type = other DNA
ctcccgcgtagctgggatta

SEQ ID NO: 10636 - DNA, 20 bp, synthetic construct
  misc_feature 1..20: note = Description of Artificial Sequence: Synthetic oligonucleotide
  misc_feature 1..20: note = Target: FXN; (-) strand; PAM type: NRG; PAM sequence: GGG
  source 1..20: mol_type = other DNA
cctcagcctcccgcgtagct

SEQ ID NO: 10637 - DNA, 20 bp, synthetic construct
  misc_feature 1..20: note = Description of Artificial Sequence: Synthetic oligonucleotide
  misc_feature 1..20: note = Target: FXN; (-) strand; PAM type: NRG; PAM sequence: TGG
  source 1..20: mol_type = other DNA
gcctcagcctcccgcgtagc

SEQ ID NO: 10638 - DNA, 20 bp, synthetic construct
  misc_feature 1..20: note = Description of Artificial Sequence: Synthetic oligonucleotide
  misc_feature 1..20: note = Target: FXN; (-) strand; PAM type: NRG; PAM sequence: TAG
  source 1..20: mol_type = other DNA
tcgtgcctcagcctcccgcg

SEQ ID NO: 10639 - DNA, 20 bp, synthetic construct
  misc_feature 1..20: note = Description of Artificial Sequence: Synthetic oligonucleotide
  misc_feature 1..20: note = Target: FXN; (-) strand; PAM type: NRG; PAM sequence: CAG
  source 1..20: mol_type = other DNA
ttcgagtgattctcgtgcct

SEQ ID NO: 10640 - DNA, 20 bp, synthetic construct
  misc_feature 1..20: note = Description of Artificial Sequence: Synthetic oligonucleotide
  misc_feature 1..20: note = Target: FXN; (-) strand; PAM type: NRG; PAM sequence: GAG
  source 1..20: mol_type = other DNA
aacccccgcctcccgggttc

SEQ ID NO: 10641 - DNA, 20 bp, synthetic construct
  misc_feature 1..20: note = Description of Artificial Sequence: Synthetic oligonucleotide
  misc_feature 1..20: note = Target: FXN; (-) strand; PAM type: NRG; PAM sequence: GGG
  source 1..20: mol_type = other DNA
cactgcaacccccgcctccc

SEQ ID NO: 10642 - DNA, 20 bp, synthetic construct
  misc_feature 1..20: note = Description of Artificial Sequence: Synthetic oligonucleotide
  misc_feature 1..20: note = Target: FXN; (-) strand; PAM type: NRG; PAM sequence: CGG
  source 1..20: mol_type = other DNA
tcactgcaacccccgcctcc

SEQ ID NO: 10643 - DNA, 20 bp, synthetic construct
  misc_feature 1..20: note = Description of Artificial Sequence: Synthetic oligonucleotide
  misc_feature 1..20: note = Target: FXN; (-) strand; PAM type: NRG; PAM sequence: CGG
  source 1..20: mol_type = other DNA
ggagtgcagtggcacgatct

SEQ ID NO: 10644 - DNA, 20 bp, synthetic construct
  misc_feature 1..20: note = Description of Artificial Sequence: Synthetic oligonucleotide
  misc_feature 1..20: note = Target: FXN; (-) strand; PAM type: NRG; PAM sequence: TGG
  source 1..20: mol_type = other DNA
tcgcccaggctggagtgcag

SEQ ID NO: 10645 - DNA, 20 bp, synthetic construct
  misc_feature 1..20: note = Description of Artificial Sequence: Synthetic oligonucleotide
  misc_feature 1..20: note = Target: FXN; (-) strand; PAM type: NRG; PAM sequence: CAG
  source 1..20: mol_type = other DNA
ctgtcgcccaggctggagtg

SEQ ID NO: 10646 - DNA, 20 bp, synthetic construct
  misc_feature 1..20: note = Description of Artificial Sequence: Synthetic oligonucleotide
  misc_feature 1..20: note = Target: FXN; (-) strand; PAM type: NRG; PAM sequence: GAG
  source 1..20: mol_type = other DNA
tcgctctgtcgcccaggctg

SEQ ID NO: 10647 - DNA, 20 bp, synthetic construct
  misc_feature 1..20: note = Description of Artificial Sequence: Synthetic oligonucleotide
  misc_feature 1..20: note = Target: FXN; (-) strand; PAM type: NRG; PAM sequence: TGG
  source 1..20: mol_type = other DNA
tctcgctctgtcgcccaggc

SEQ ID NO: 10648 - DNA, 20 bp, synthetic construct
  misc_feature 1..20: note = Description of Artificial Sequence: Synthetic oligonucleotide
  misc_feature 1..20: note = Target: FXN; (-) strand; PAM type: NRG; PAM sequence: AGG
  source 1..20: mol_type = other DNA
gaagtctcgctctgtcgccc

SEQ ID NO: 10649 - DNA, 20 bp, synthetic construct
  misc_feature 1..20: note = Description of Artificial Sequence: Synthetic oligonucleotide
  misc_feature 1..20: note = Target: FXN; (-) strand; PAM type: NRG; PAM sequence: CAG
  source 1..20: mol_type = other DNA
tgaagtctcgctctgtcgcc

SEQ ID NO: 10650 - DNA, 20 bp, synthetic construct
  misc_feature 1..20: note = Description of Artificial Sequence: Synthetic oligonucleotide
  misc_feature 1..20: note = Target: FXN; (-) strand; PAM type: NRG; PAM sequence: AAG
  source 1..20: mol_type = other DNA
tgttttttgtttttgagatg

SEQ ID NO: 10651 - DNA, 20 bp, synthetic construct
  misc_feature 1..20: note = Description of Artificial Sequence: Synthetic oligonucleotide
  misc_feature 1..20: note = Target: FXN; (-) strand; PAM type: NRG; PAM sequence: GAG
  source 1..20: mol_type = other DNA
ggtttttgttttttgttttt

SEQ ID NO: 10652 - DNA, 20 bp, synthetic construct
  misc_feature 1..20: note = Description of Artificial Sequence: Synthetic oligonucleotide
  misc_feature 1..20: note = Target: FXN; (-) strand; PAM type: NRG; PAM sequence: TGG
  source 1..20: mol_type = other DNA
catgctgaagtttttttttt

SEQ ID NO: 10653 - DNA, 20 bp, synthetic construct
  misc_feature 1..20: note = Description of Artificial Sequence: Synthetic oligonucleotide
  misc_feature 1..20: note = Target: FXN; (-) strand; PAM type: NRG; PAM sequence: AAG
  source 1..20: mol_type = other DNA
ttggttaaataatcatgctg

SEQ ID NO: 10654 - DNA, 20 bp, synthetic construct
  misc_feature 1..20: note = Description of Artificial Sequence: Synthetic oligonucleotide
  misc_feature 1..20: note = Target: FXN; (-) strand; PAM type: NRG; PAM sequence: TGG
  source 1..20: mol_type = other DNA
tgaacaactaacctgcattt

SEQ ID NO: 10655 - DNA, 20 bp, synthetic construct
  misc_feature 1..20: note = Description of Artificial Sequence: Synthetic oligonucleotide
  misc_feature 1..20: note = Target: FXN; (-) strand; PAM type: NRG; PAM sequence: CGG
  source 1..20: mol_type = other DNA
tgttaattggactctgcatc

SEQ ID NO: 10656 - DNA, 20 bp, synthetic construct
  misc_feature 1..20: note = Description of Artificial Sequence: Synthetic oligonucleotide
  misc_feature 1..20: note = Target: FXN; (-) strand; PAM type: NRG; PAM sequence: TGG
  source 1..20: mol_type = other DNA
caggccttgctcttgttaat

SEQ ID NO: 10657 - DNA, 20 bp, synthetic construct
  misc_feature 1..20: note = Description of Artificial Sequence: Synthetic oligonucleotide
  misc_feature 1..20: note = Target: FXN; (-) strand; PAM type: NRG; PAM sequence: AGG
  source 1..20: mol_type = other DNA
aattcactttttttggtacc

SEQ ID NO: 10658 - DNA, 20 bp, synthetic construct
  misc_feature 1..20: note = Description of Artificial Sequence: Synthetic oligonucleotide
  misc_feature 1..20: note = Target: FXN; (-) strand; PAM type: NRG; PAM sequence: CAG
  source 1..20: mol_type = other DNA
aaattcactttttttggtac

SEQ ID NO: 10659 - DNA, 20 bp, synthetic construct
  misc_feature 1..20: note = Description of Artificial Sequence: Synthetic oligonucleotide
  misc_feature 1..20: note = Target: FXN; (-) strand; PAM type: NRG; PAM sequence: TGG
  source 1..20: mol_type = other DNA
cggagtaaattcactttttt

SEQ ID NO: 10660 - DNA, 20 bp, synthetic construct
  misc_feature 1..20: note = Description of Artificial Sequence: Synthetic oligonucleotide
  misc_feature 1..20: note = Target: FXN; (-) strand; PAM type: NRG; PAM sequence: GAG
  source 1..20: mol_type = other DNA
cctcacccaagctagtttcg

SEQ ID NO: 10661 - DNA, 20 bp, synthetic construct
  misc_feature 1..20: note = Description of Artificial Sequence: Synthetic oligonucleotide
  misc_feature 1..20: note = Target: FXN; (-) strand; PAM type: NRG; PAM sequence: CGG
  source 1..20: mol_type = other DNA
cccctcacccaagctagttt

SEQ ID NO: 10662 - DNA, 20 bp, synthetic construct
  misc_feature 1..20: note = Description of Artificial Sequence: Synthetic oligonucleotide
  misc_feature 1..20: note = Target: FXN; (-) strand; PAM type: NRG; PAM sequence: TAG
  source 1..20: mol_type = other DNA
tttgtacccctcacccaagc

SEQ ID NO: 10663 - DNA, 20 bp, synthetic construct
  misc_feature 1..20: note = Description of Artificial Sequence: Synthetic oligonucleotide
  misc_feature 1..20: note = Target: FXN; (-) strand; PAM type: NRG; PAM sequence: AAG
  source 1..20: mol_type = other DNA
atgctttgtacccctcaccc

SEQ ID NO: 10664 - DNA, 20 bp, synthetic construct
  misc_feature 1..20: note = Description of Artificial Sequence: Synthetic oligonucleotide
  misc_feature 1..20: note = Target: FXN; (-) strand; PAM type: NRG; PAM sequence: AGG
  source 1..20: mol_type = other DNA
cagcacttttaaagaaaggc

SEQ ID NO: 10665 - DNA, 20 bp, synthetic construct
  misc_feature 1..20: note = Description of Artificial Sequence: Synthetic oligonucleotide
  misc_feature 1..20: note = Target: FXN; (-) strand; PAM type: NRG; PAM sequence: CAG
  source 1..20: mol_type = other DNA
gcagcacttttaaagaaagg

SEQ ID NO: 10666 - DNA, 20 bp, synthetic construct
  misc_feature 1..20: note = Description of Artificial Sequence: Synthetic oligonucleotide
  misc_feature 1..20: note = Target: FXN; (-) strand; PAM type: NRG; PAM sequence: AGG
  source 1..20: mol_type = other DNA
gaagcagcacttttaaagaa

SEQ ID NO: 10667 - DNA, 20 bp, synthetic construct
  misc_feature 1..20: note = Description of Artificial Sequence: Synthetic oligonucleotide
  misc_feature 1..20: note = Target: FXN; (-) strand; PAM type: NRG; PAM sequence: AAG
  source 1..20: mol_type = other DNA
ggaagcagcacttttaaaga

SEQ ID NO: 10668 - DNA, 20 bp, synthetic construct
  misc_feature 1..20: note = Description of Artificial Sequence: Synthetic oligonucleotide
  misc_feature 1..20: note = Target: FXN; (-) strand; PAM type: NRG; PAM sequence: AAG
  source 1..20: mol_type = other DNA
aaggggaagcagcactttta

SEQ ID NO: 10669 - DNA, 20 bp, synthetic construct
  misc_feature 1..20: note = Description of Artificial Sequence: Synthetic oligonucleotide
  misc_feature 1..20: note = Target: FXN; (-) strand; PAM type: NRG; PAM sequence: CAG
  source 1..20: mol_type = other DNA
tttctacttccaaggggaag

SEQ ID NO: 10670 - DNA, 20 bp, synthetic construct
  misc_feature 1..20: note = Description of Artificial Sequence: Synthetic oligonucleotide
  misc_feature 1..20: note = Target: FXN; (-) strand; PAM type: NRG; PAM sequence: AAG
  source 1..20: mol_type = other DNA
cactttctacttccaagggg

SEQ ID NO: 10671 - DNA, 20 bp, synthetic construct
  misc_feature 1..20: note = Description of Artificial Sequence: Synthetic oligonucleotide
  misc_feature 1..20: note = Target: FXN; (-) strand; PAM type: NRG; PAM sequence: GGG
  source 1..20: mol_type = other DNA
gtccactttctacttccaag

SEQ ID NO: 10672 - DNA, 20 bp, synthetic construct
  misc_feature 1..20: note = Description of Artificial Sequence: Synthetic oligonucleotide
  misc_feature 1..20: note = Target: FXN; (-) strand; PAM type: NRG; PAM sequence: GGG
  source 1..20: mol_type = other DNA
tgtccactttctacttccaa

SEQ ID NO: 10673 - DNA, 20 bp, synthetic construct
  misc_feature 1..20: note = Description of Artificial Sequence: Synthetic oligonucleotide
  misc_feature 1..20: note = Target: FXN; (-) strand; PAM type: NRG; PAM sequence: AGG
  source 1..20: mol_type = other DNA
gtgtccactttctacttcca

SEQ ID NO: 10674 - DNA, 20 bp, synthetic construct
  misc_feature 1..20: note = Description of Artificial Sequence: Synthetic oligonucleotide
  misc_feature 1..20: note = Target: FXN; (-) strand; PAM type: NRG; PAM sequence: AAG
  source 1..20: mol_type = other DNA
agtgtccactttctacttcc

SEQ ID NO: 10675 - DNA, 20 bp, synthetic construct
  misc_feature 1..20: note = Description of Artificial Sequence: Synthetic oligonucleotide
  misc_feature 1..20: note = Target: FXN; (-) strand; PAM type: NRG; PAM sequence: AAG
  source 1..20: mol_type = other DNA
cttccccccttaccttataa

SEQ ID NO: 10676 - DNA, 20 bp, synthetic construct
  misc_feature 1..20: note = Description of Artificial Sequence: Synthetic oligonucleotide
  misc_feature 1..20: note = Target: FXN; (-) strand; PAM type: NRG; PAM sequence: GGG
  source 1..20: mol_type = other DNA
gtatgcacggaactagcaga

SEQ ID NO: 10677 - DNA, 20 bp, synthetic construct
  misc_feature 1..20: note = Description of Artificial Sequence: Synthetic oligonucleotide
  misc_feature 1..20: note = Target: FXN; (-) strand; PAM type: NRG; PAM sequence: AGG
  source 1..20: mol_type = other DNA
agtatgcacggaactagcag

SEQ ID NO: 10678 - DNA, 20 bp, synthetic construct
  misc_feature 1..20: note = Description of Artificial Sequence: Synthetic oligonucleotide
  misc_feature 1..20: note = Target: FXN; (-) strand; PAM type: NRG; PAM sequence: GAG
  source 1..20: mol_type = other DNA
gagtatgcacggaactagca

SEQ ID NO: 10679 - DNA, 20 bp, synthetic construct
  misc_feature 1..20: note = Description of Artificial Sequence: Synthetic oligonucleotide
  misc_feature 1..20: note = Target: FXN; (-) strand; PAM type: NRG; PAM sequence: CAG
  source 1..20: mol_type = other DNA
tagagtatgcacggaactag

SEQ ID NO: 10680 - DNA, 20 bp, synthetic construct
  misc_feature 1..20: note = Description of Artificial Sequence: Synthetic oligonucleotide
  misc_feature 1..20: note = Target: FXN; (-) strand; PAM type: NRG; PAM sequence: TAG
  source 1..20: mol_type = other DNA
ctgtagagtatgcacggaac

SEQ ID NO: 10681 - DNA, 20 bp, synthetic construct
  misc_feature 1..20: note = Description of Artificial Sequence: Synthetic oligonucleotide
  misc_feature 1..20: note = Target: FXN; (-) strand; PAM type: NRG; PAM sequence: CGG
  source 1..20: mol_type = other DNA
actgtcctgtagagtatgca

SEQ ID NO: 10682 - DNA, 20 bp, synthetic construct
  misc_feature 1..20: note = Description of Artificial Sequence: Synthetic oligonucleotide
  misc_feature 1..20: note = Target: FXN; (-) strand; PAM type: NRG; PAM sequence: GAG
  source 1..20: mol_type = other DNA
gccaagtcaactgtcctgta

SEQ ID NO: 10683 - DNA, 20 bp, synthetic construct
  misc_feature 1..20: note = Description of Artificial Sequence: Synthetic oligonucleotide
  misc_feature 1..20: note = Target: FXN; (-) strand; PAM type: NRG; PAM sequence: TAG
  source 1..20: mol_type = other DNA
gtgccaagtcaactgtcctg

SEQ ID NO: 10684 - DNA, 20 bp, synthetic construct
  misc_feature 1..20: note = Description of Artificial Sequence: Synthetic oligonucleotide
  misc_feature 1..20: note = Target: FXN; (-) strand; PAM type: NRG; PAM sequence: AAG
  source 1..20: mol_type = other DNA
ttactaaccaggaaggtgcc

SEQ ID NO: 10685 - DNA, 20 bp, synthetic construct
  misc_feature 1..20: note = Description of Artificial Sequence: Synthetic oligonucleotide
  misc_feature 1..20: note = Target: FXN; (-) strand; PAM type: NRG; PAM sequence: AGG
  source 1..20: mol_type = other DNA
cagcttattactaaccagga

SEQ ID NO: 10686 - DNA, 20 bp, synthetic construct
  misc_feature 1..20: note = Description of Artificial Sequence: Synthetic oligonucleotide
  misc_feature 1..20: note = Target: FXN; (-) strand; PAM type: NRG; PAM sequence: AAG
  source 1..20: mol_type = other DNA
acagcttattactaaccagg

SEQ ID NO: 10687 - DNA, 20 bp, synthetic construct
  misc_feature 1..20: note = Description of Artificial Sequence: Synthetic oligonucleotide
  misc_feature 1..20: note = Target: FXN; (-) strand; PAM type: NRG; PAM sequence: AGG
  source 1..20: mol_type = other DNA
gctacagcttattactaacc

SEQ ID NO: 10688 - DNA, 20 bp, synthetic construct
  misc_feature 1..20: note = Description of Artificial Sequence: Synthetic oligonucleotide
  misc_feature 1..20: note = Target: FXN; (-) strand; PAM type: NRG; PAM sequence: CAG
  source 1..20: mol_type = other DNA
tgctacagcttattactaac

SEQ ID NO: 10689 - DNA, 20 bp, synthetic construct
  misc_feature 1..20: note = Description of Artificial Sequence: Synthetic oligonucleotide
  misc_feature 1..20: note = Target: FXN; (-) strand; PAM type: NRG; PAM sequence: CAG
  source 1..20: mol_type = other DNA
tgcccacttggccactgcta

SEQ ID NO: 10690 - DNA, 20 bp, synthetic construct
  misc_feature 1..20: note = Description of Artificial Sequence: Synthetic oligonucleotide
  misc_feature 1..20: note = Target: FXN; (-) strand; PAM type: NRG; PAM sequence: TGG
  source 1..20: mol_type = other DNA
atactgaaagcatgcccact

SEQ ID NO: 10691 - DNA, 20 bp, synthetic construct
  misc_feature 1..20: note = Description of Artificial Sequence: Synthetic oligonucleotide
  misc_feature 1..20: note = Target: FXN; (-) strand; PAM type: NRG; PAM sequence: AAG
  source 1..20: mol_type = other DNA
tcactgggagggcatactga

SEQ ID NO: 10692 - DNA, 20 bp, synthetic construct
  misc_feature 1..20: note = Description of Artificial Sequence: Synthetic oligonucleotide
  misc_feature 1..20: note = Target: FXN; (-) strand; PAM type: NRG; PAM sequence: GGG
  source 1..20: mol_type = other DNA
aggactttcattcactggga

SEQ ID NO: 10693 - DNA, 20 bp, synthetic construct
  misc_feature 1..20: note = Description of Artificial Sequence: Synthetic oligonucleotide
  misc_feature 1..20: note = Target: FXN; (-) strand; PAM type: NRG; PAM sequence: AGG
  source 1..20: mol_type = other DNA
caggactttcattcactggg

SEQ ID NO: 10694 - DNA, 20 bp, synthetic construct
  misc_feature 1..20: note = Description of Artificial Sequence: Synthetic oligonucleotide
  misc_feature 1..20: note = Target: FXN; (-) strand; PAM type: NRG; PAM sequence: GAG
  source 1..20: mol_type = other DNA
tcaggactttcattcactgg

SEQ ID NO: 10695 - DNA, 20 bp, synthetic construct
  misc_feature 1..20: note = Description of Artificial Sequence: Synthetic oligonucleotide
  misc_feature 1..20: note = Target: FXN; (-) strand; PAM type: NRG; PAM sequence: GGG
  source 1..20: mol_type = other DNA
cctcaggactttcattcact

SEQ ID NO: 10696 - DNA, 20 bp, synthetic construct
  misc_feature 1..20: note = Description of Artificial Sequence: Synthetic oligonucleotide
  misc_feature 1..20: note = Target: FXN; (-) strand; PAM type: NRG; PAM sequence: TGG
  source 1..20: mol_type = other DNA
gcctcaggactttcattcac

SEQ ID NO: 10697 - DNA, 20 bp, synthetic construct
  misc_feature 1..20: note = Description of Artificial Sequence: Synthetic oligonucleotide
  misc_feature 1..20: note = Target: FXN; (-) strand; PAM type: NRG; PAM sequence: AGG
  source 1..20: mol_type = other DNA
ccacccttgggggttgcctc

SEQ ID NO: 10698 - DNA, 20 bp, synthetic construct
  misc_feature 1..20: note = Description of Artificial Sequence: Synthetic oligonucleotide
  misc_feature 1..20: note = Target: FXN; (-) strand; PAM type: NRG; PAM sequence: CAG
  source 1..20: mol_type = other DNA
tccacccttgggggttgcct

SEQ ID NO: 10699 - DNA, 20 bp, synthetic construct
  misc_feature 1..20: note = Description of Artificial Sequence: Synthetic oligonucleotide
  misc_feature 1..20: note = Target: FXN; (-) strand; PAM type: NRG; PAM sequence: GGG
  source 1..20: mol_type = other DNA
cctggcacttccacccttgg

SEQ ID NO: 10700 - DNA, 20 bp, synthetic construct
  misc_feature 1..20: note = Description of Artificial Sequence: Synthetic oligonucleotide
  misc_feature 1..20: note = Target: FXN; (-) strand; PAM type: NRG; PAM sequence: GGG
  source 1..20: mol_type = other DNA
gcctggcacttccacccttg

SEQ ID NO: 10701 - DNA, 20 bp, synthetic construct
  misc_feature 1..20: note = Description of Artificial Sequence: Synthetic oligonucleotide
  misc_feature 1..20: note = Target: FXN; (-) strand; PAM type: NRG; PAM sequence: GGG
  source 1..20: mol_type = other DNA
ggcctggcacttccaccctt

SEQ ID NO: 10702 - DNA, 20 bp, synthetic construct
  misc_feature 1..20: note = Description of Artificial Sequence: Synthetic oligonucleotide
  misc_feature 1..20: note = Target: FXN; (-) strand; PAM type: NRG; PAM sequence: TGG
  source 1..20: mol_type = other DNA
tggcctggcacttccaccct

SEQ ID NO: 10703 - DNA, 20 bp, synthetic construct
  misc_feature 1..20: note = Description of Artificial Sequence: Synthetic oligonucleotide
  misc_feature 1..20: note = Target: FXN; (-) strand; PAM type: NRG; PAM sequence: TGG
  source 1..20: mol_type = other DNA
acctccagtgggtggtggcc

SEQ ID NO: 10704 - DNA, 20 bp, synthetic construct
  misc_feature 1..20: note = Description of Artificial Sequence: Synthetic oligonucleotide
  misc_feature 1..20: note = Target: FXN; (-) strand; PAM type: NRG; PAM sequence: TGG
  source 1..20: mol_type = other DNA
ctttcacctccagtgggtgg

SEQ ID NO: 10705 - DNA, 20 bp, synthetic construct
  misc_feature 1..20: note = Description of Artificial Sequence: Synthetic oligonucleotide
  misc_feature 1..20: note = Target: FXN; (-) strand; PAM type: NRG; PAM sequence: TGG
  source 1..20: mol_type = other DNA
gaactttcacctccagtggg

SEQ ID NO: 10706 - DNA, 20 bp, synthetic construct
  misc_feature 1..20: note = Description of Artificial Sequence: Synthetic oligonucleotide
  misc_feature 1..20: note = Target: FXN; (-) strand; PAM type: NRG; PAM sequence: GGG
  source 1..20: mol_type = other DNA
acggaactttcacctccagt

SEQ ID NO: 10707 - DNA, 20 bp, synthetic construct
  misc_feature 1..20: note = Description of Artificial Sequence: Synthetic oligonucleotide
  misc_feature 1..20: note = Target: FXN; (-) strand; PAM type: NRG; PAM sequence: TGG
  source 1..20: mol_type = other DNA
cacggaactttcacctccag

SEQ ID NO: 10708 - DNA, 20 bp, synthetic construct
  misc_feature 1..20: note = Description of Artificial Sequence: Synthetic oligonucleotide
  misc_feature 1..20: note = Target: FXN; (-) strand; PAM type: NRG; PAM sequence: CAG
  source 1..20: mol_type = other DNA
catcacggaactttcacctc

SEQ ID NO: 10709 - DNA, 20 bp, synthetic construct
  misc_feature 1..20: note = Description of Artificial Sequence: Synthetic oligonucleotide
  misc_feature 1..20: note = Target: FXN; (-) strand; PAM type: NRG; PAM sequence: CGG
  source 1..20: mol_type = other DNA
agaccaaagcaaacccatca

SEQ ID NO: 10710 - DNA, 20 bp, synthetic construct
  misc_feature 1..20: note = Description of Artificial Sequence: Synthetic oligonucleotide
  misc_feature 1..20: note = Target: FXN; (-) strand; PAM type: NRG; PAM sequence: AAG
  source 1..20: mol_type = other DNA
gacagtagattcgcagacca

SEQ ID NO: 10711 - DNA, 20 bp, synthetic construct
  misc_feature 1..20: note = Description of Artificial Sequence: Synthetic oligonucleotide
  misc_feature 1..20: note = Target: FXN; (-) strand; PAM type: NRG; PAM sequence: CAG
  source 1..20: mol_type = other DNA
tccacatgacagtagattcg

SEQ ID NO: 10712 - DNA, 20 bp, synthetic construct
  misc_feature 1..20: note = Description of Artificial Sequence: Synthetic oligonucleotide
  misc_feature 1..20: note = Target: FXN; (-) strand; PAM type: NRG; PAM sequence: TAG
  source 1..20: mol_type = other DNA
cagatctctccacatgacag

SEQ ID NO: 10713 - DNA, 20 bp, synthetic construct
  misc_feature 1..20: note = Description of Artificial Sequence: Synthetic oligonucleotide
  misc_feature 1..20: note = Target: FXN; (-) strand; PAM type: NRG; PAM sequence: CAG
  source 1..20: mol_type = other DNA
gcacagatctctccacatga

SEQ ID NO: 10714 - DNA, 20 bp, synthetic construct
  misc_feature 1..20: note = Description of Artificial Sequence: Synthetic oligonucleotide
  misc_feature 1..20: note = Target: FXN; (-) strand; PAM type: NRG; PAM sequence: CAG
  source 1..20: mol_type = other DNA
ctgtatgctcttccagagca

SEQ ID NO: 10715 - DNA, 20 bp, synthetic construct
  misc_feature 1..20: note = Description of Artificial Sequence: Synthetic oligonucleotide
  misc_feature 1..20: note = Target: FXN; (-) strand; PAM type: NRG; PAM sequence: GAG
  source 1..20: mol_type = other DNA
tctaactgtatgctcttcca

SEQ ID NO: 10716 - DNA, 20 bp, synthetic construct
  misc_feature 1..20: note = Description of Artificial Sequence: Synthetic oligonucleotide
  misc_feature 1..20: note = Target: FXN; (-) strand; PAM type: NRG; PAM sequence: CAG
  source 1..20: mol_type = other DNA
tttctaactgtatgctcttc

SEQ ID NO: 10717 - DNA, 20 bp, synthetic construct
  misc_feature 1..20: note = Description of Artificial Sequence: Synthetic oligonucleotide
  misc_feature 1..20: note = Target: FXN; (-) strand; PAM type: NRG; PAM sequence: AAG
  source 1..20: mol_type = other DNA
ccatacattcccttcagggc

SEQ ID NO: 10718 - DNA, 20 bp, synthetic construct
  misc_feature 1..20: note = Description of Artificial Sequence: Synthetic oligonucleotide
  misc_feature 1..20: note = Target: FXN; (-) strand; PAM type: NRG; PAM sequence: GGG
  source 1..20: mol_type = other DNA
ttcaccatacattcccttca

SEQ ID NO: 10719 - DNA, 20 bp, synthetic construct
  misc_feature 1..20: note = Description of Artificial Sequence: Synthetic oligonucleotide
  misc_feature 1..20: note = Target: FXN; (-) strand; PAM type: NRG; PAM sequence: AGG
  source 1..20: mol_type = other DNA
cttcaccatacattcccttc

SEQ ID NO: 10720 - DNA, 20 bp, synthetic construct
  misc_feature 1..20: note = Description of Artificial Sequence: Synthetic oligonucleotide
  misc_feature 1..20: note = Target: FXN; (-) strand; PAM type: NRG; PAM sequence: CAG
  source 1..20: mol_type = other DNA
ccttcaccatacattccctt

SEQ ID NO: 10721 - DNA, 20 bp, synthetic construct
  misc_feature 1..20: note = Description of Artificial Sequence: Synthetic oligonucleotide
  misc_feature 1..20: note = Target: FXN; (-) strand; PAM type: NRG; PAM sequence: CAG
  source 1..20: mol_type = other DNA
cggtttcctacttagccctt

SEQ ID NO: 10722 - DNA, 20 bp, synthetic construct
  misc_feature 1..20: note = Description of Artificial Sequence: Synthetic oligonucleotide
  misc_feature 1..20: note = Target: FXN; (-) strand; PAM type: NRG; PAM sequence: TAG
  source 1..20: mol_type = other DNA
ctggttcccggtttcctact

SEQ ID NO: 10723 - DNA, 20 bp, synthetic construct
  misc_feature 1..20: note = Description of Artificial Sequence: Synthetic oligonucleotide
  misc_feature 1..20: note = Target: FXN; (-) strand; PAM type: NRG; PAM sequence: CGG
  source 1..20: mol_type = other DNA
ttctcctctcccctggttcc

SEQ ID NO: 10724 - DNA, 20 bp, synthetic construct
  misc_feature 1..20: note = Description of Artificial Sequence: Synthetic oligonucleotide
  misc_feature 1..20: note = Target: FXN; (-) strand; PAM type: NRG; PAM sequence: TGG
  source 1..20: mol_type = other DNA
tcttctcttctcctctcccc

SEQ ID NO: 10725 - DNA, 20 bp, synthetic construct
  misc_feature 1..20: note = Description of Artificial Sequence: Synthetic oligonucleotide
  misc_feature 1..20: note = Target: FXN; (-) strand; PAM type: NRG; PAM sequence: GGG
  source 1..20: mol_type = other DNA
tccattttttctaagaaaaa

SEQ ID NO: 10726 - DNA, 20 bp, synthetic construct
  misc_feature 1..20: note = Description of Artificial Sequence: Synthetic oligonucleotide
  misc_feature 1..20: note = Target: FXN; (-) strand; PAM type: NRG; PAM sequence: AGG
  source 1..20: mol_type = other DNA
ctccattttttctaagaaaa

SEQ ID NO: 10727 - DNA, 20 bp, synthetic construct
  misc_feature 1..20: note = Description of Artificial Sequence: Synthetic oligonucleotide
  misc_feature 1..20: note = Target: FXN; (-) strand; PAM type: NRG; PAM sequence: AAG
  source 1..20: mol_type = other DNA
gctccattttttctaagaaa

SEQ ID NO: 10728 - DNA, 20 bp, synthetic construct
  misc_feature 1..20: note = Description of Artificial Sequence: Synthetic oligonucleotide
  misc_feature 1..20: note = Target: FXN; (-) strand; PAM type: NRG; PAM sequence: AAG
  source 1..20: mol_type = other DNA
ccgagtgctccattttttct

SEQ ID NO: 10729 - DNA, 20 bp, synthetic construct
  misc_feature 1..20: note = Description of Artificial Sequence: Synthetic oligonucleotide
  misc_feature 1..20: note = Target: FXN; (-) strand; PAM type: NRG; PAM sequence: GAG
  source 1..20: mol_type = other DNA
acattcgagtgcctgtaacc

SEQ ID NO: 10730 - DNA, 20 bp, synthetic construct
  misc_feature 1..20: note = Description of Artificial Sequence: Synthetic oligonucleotide
  misc_feature 1..20: note = Target: FXN; (-) strand; PAM type: NRG; PAM sequence: GAG
  source 1..20: mol_type = other DNA
atattgctacttctacattc

SEQ ID NO: 10731 - DNA, 20 bp, synthetic construct
  misc_feature 1..20: note = Description of Artificial Sequence: Synthetic oligonucleotide
  misc_feature 1..20: note = Target: FXN; (-) strand; PAM type: NRG; PAM sequence: CAG
  source 1..20: mol_type = other DNA
agaagtacgttactattttt

SEQ ID NO: 10732 - DNA, 20 bp, synthetic construct
  misc_feature 1..20: note = Description of Artificial Sequence: Synthetic oligonucleotide
  misc_feature 1..20: note = Target: FXN; (-) strand; PAM type: NRG; PAM sequence: AAG
  source 1..20: mol_type = other DNA
ctctgaaagccaaagttaag

SEQ ID NO: 10733 - DNA, 20 bp, synthetic construct
  misc_feature 1..20: note = Description of Artificial Sequence: Synthetic oligonucleotide
  misc_feature 1..20: note = Target: FXN; (-) strand; PAM type: NRG; PAM sequence: AAG
  source 1..20: mol_type = other DNA
gaactctgaaagccaaagtt

SEQ ID NO: 10734 - DNA, 20 bp, synthetic construct
  misc_feature 1..20: note = Description of Artificial Sequence: Synthetic oligonucleotide
  misc_feature 1..20: note = Target: FXN; (-) strand; PAM type: NRG; PAM sequence: AAG
  source 1..20: mol_type = other DNA
ggttcgaactctgaaagcca

SEQ ID NO: 10735 - DNA, 20 bp, synthetic construct
  misc_feature 1..20: note = Description of Artificial Sequence: Synthetic oligonucleotide
  misc_feature 1..20: note = Target: FXN; (-) strand; PAM type: NRG; PAM sequence: AAG
  source 1..20: mol_type = other DNA
cacgttggttcgaactctga

SEQ ID NO: 10736 - DNA, 20 bp, synthetic construct
  misc_feature 1..20: note = Description of Artificial Sequence: Synthetic oligonucleotide
  misc_feature 1..20: note = Target: FXN; (-) strand; PAM type: NRG; PAM sequence: TGG
  source 1..20: mol_type = other DNA
aaatctggttgaggccacgt

SEQ ID NO: 10737 - DNA, 20 bp, synthetic construct
  misc_feature 1..20: note = Description of Artificial Sequence: Synthetic oligonucleotide
  misc_feature 1..20: note = Target: FXN; (-) strand; PAM type: NRG; PAM sequence: AGG
  source 1..20: mol_type = other DNA
tgacattccaaatctggttg

SEQ ID NO: 10738 - DNA, 20 bp, synthetic construct
  misc_feature 1..20: note = Description of Artificial Sequence: Synthetic oligonucleotide
  misc_feature 1..20: note = Target: FXN; (-) strand; PAM type: NRG; PAM sequence: GAG
  source 1..20: mol_type = other DNA
ttgacattccaaatctggtt

SEQ ID NO: 10739 - DNA, 20 bp, synthetic construct
  misc_feature 1..20: note = Description of Artificial Sequence: Synthetic oligonucleotide
  misc_feature 1..20: note = Target: FXN; (-) strand; PAM type: NRG; PAM sequence: TGG
  source 1..20: mol_type = other DNA
gctttttgacattccaaatc

SEQ ID NO: 10740 - DNA, 20 bp, synthetic construct
  misc_feature 1..20: note = Description of Artificial Sequence: Synthetic oligonucleotide
  misc_feature 1..20: note = Target: FXN; (-) strand; PAM type: NRG; PAM sequence: TAG
  source 1..20: mol_type = other DNA
atttcctcaaattcatcaaa

SEQ ID NO: 10741 - DNA, 20 bp, synthetic construct
  misc_feature 1..20: note = Description of Artificial Sequence: Synthetic oligonucleotide
  misc_feature 1..20: note = Target: FXN; (-) strand; PAM type: NRG; PAM sequence: CAG
  source 1..20: mol_type = other DNA
ccctgggtggcccaaagttc

SEQ ID NO: 10742 - DNA, 20 bp, synthetic construct
  misc_feature 1..20: note = Description of Artificial Sequence: Synthetic oligonucleotide
  misc_feature 1..20: note = Target: FXN; (-) strand; PAM type: NRG; PAM sequence: AAG
  source 1..20: mol_type = other DNA
atcttaccctgggtggccca

SEQ ID NO: 10743 - DNA, 20 bp, synthetic construct
  misc_feature 1..20: note = Description of Artificial Sequence: Synthetic oligonucleotide
  misc_feature 1..20: note = Target: FXN; (-) strand; PAM type: NRG; PAM sequence: TGG
  source 1..20: mol_type = other DNA
gtgttttatcttaccctggg

SEQ ID NO: 10744 - DNA, 20 bp, synthetic construct
  misc_feature 1..20: note = Description of Artificial Sequence: Synthetic oligonucleotide
  misc_feature 1..20: note = Target: FXN; (-) strand; PAM type: NRG; PAM sequence: GGG
  source 1..20: mol_type = other DNA
aaggtgttttatcttaccct

SEQ ID NO: 10745 - DNA, 20 bp, synthetic construct
  misc_feature 1..20: note = Description of Artificial Sequence: Synthetic oligonucleotide
  misc_feature 1..20: note = Target: FXN; (-) strand; PAM type: NRG; PAM sequence: TGG
  source 1..20: mol_type = other DNA
gaaggtgttttatcttaccc

SEQ ID NO: 10746 - DNA, 20 bp, synthetic construct
  misc_feature 1..20: note = Description of Artificial Sequence: Synthetic oligonucleotide
  misc_feature 1..20: note = Target: FXN; (-) strand; PAM type: NRG; PAM sequence: AGG
  source 1..20: mol_type = other DNA
gaagatacctatgacgtgga

SEQ ID NO: 10747 - DNA, 20 bp, synthetic construct
  misc_feature 1..20: note = Description of Artificial Sequence: Synthetic oligonucleotide
  misc_feature 1..20: note = Target: FXN; (-) strand; PAM type: NRG; PAM sequence: AAG
  source 1..20: mol_type = other DNA
ggaagatacctatgacgtgg

SEQ ID NO: 10748 - DNA, 20 bp, synthetic construct
  misc_feature 1..20: note = Description of Artificial Sequence: Synthetic oligonucleotide
  misc_feature 1..20: note = Target: FXN; (-) strand; PAM type: NRG; PAM sequence: TGG
  source 1..20: mol_type = other DNA
agaggaagatacctatgacg

SEQ ID NO: 10749 - DNA, 20 bp, synthetic construct
  misc_feature 1..20: note = Description of Artificial Sequence: Synthetic oligonucleotide
  misc_feature 1..20: note = Target: FXN; (-) strand; PAM type: NRG; PAM sequence: AAG
  source 1..20: mol_type = other DNA
gaggcagggaaggagagagg

SEQ ID NO: 10750 - DNA, 20 bp, synthetic construct
  misc_feature 1..20: note = Description of Artificial Sequence: Synthetic oligonucleotide
  misc_feature 1..20: note = Target: FXN; (-) strand; PAM type: NRG; PAM sequence: AGG
  source 1..20: mol_type = other DNA
ggagaggcagggaaggagag

SEQ ID NO: 10751 - DNA, 20 bp, synthetic construct
  misc_feature 1..20: note = Description of Artificial Sequence: Synthetic oligonucleotide
  misc_feature 1..20: note = Target: FXN; (-) strand; PAM type: NRG; PAM sequence: GAG
  source 1..20: mol_type = other DNA
gggagaggcagggaaggaga

SEQ ID NO: 10752 - DNA, 20 bp, synthetic construct
  misc_feature 1..20: note = Description of Artificial Sequence: Synthetic oligonucleotide
  misc_feature 1..20: note = Target: FXN; (-) strand; PAM type: NRG; PAM sequence: GAG
  source 1..20: mol_type = other DNA
atgggagaggcagggaagga

SEQ ID NO: 10753 - DNA, 20 bp, synthetic construct
  misc_feature 1..20: note = Description of Artificial Sequence: Synthetic oligonucleotide
  misc_feature 1..20: note = Target: FXN; (-) strand; PAM type: NRG; PAM sequence: GAG
  source 1..20: mol_type = other DNA
taatgggagaggcagggaag

SEQ ID NO: 10754 - DNA, 20 bp, synthetic construct
  misc_feature 1..20: note = Description of Artificial Sequence: Synthetic oligonucleotide
  misc_feature 1..20: note = Target: FXN; (-) strand; PAM type: NRG; PAM sequence: AGG
  source 1..20: mol_type = other DNA
tctaatgggagaggcaggga

SEQ ID NO: 10755 - DNA, 20 bp, synthetic construct
  misc_feature 1..20: note = Description of Artificial Sequence: Synthetic oligonucleotide
  misc_feature 1..20: note = Target: FXN; (-) strand; PAM type: NRG; PAM sequence: AAG
  source 1..20: mol_type = other DNA
ttctaatgggagaggcaggg

SEQ ID NO: 10756 - DNA, 20 bp, synthetic construct
  misc_feature 1..20: note = Description of Artificial Sequence: Synthetic oligonucleotide
  misc_feature 1..20: note = Target: FXN; (-) strand; PAM type: NRG; PAM sequence: GGG
  source 1..20: mol_type = other DNA
aggttctaatgggagaggca

SEQ ID NO: 10757 - DNA, 20 bp, synthetic construct
  misc_feature 1..20: note = Description of Artificial Sequence: Synthetic oligonucleotide
  misc_feature 1..20: note = Target: FXN; (-) strand; PAM type: NRG; PAM sequence: AGG
  source 1..20: mol_type = other DNA
caggttctaatgggagaggc

SEQ ID NO: 10758 - DNA, 20 bp, synthetic construct
  misc_feature 1..20: note = Description of Artificial Sequence: Synthetic oligonucleotide
  misc_feature 1..20: note = Target: FXN; (-) strand; PAM type: NRG; PAM sequence: CAG
  source 1..20: mol_type = other DNA
ccaggttctaatgggagagg

SEQ ID NO: 10759 - DNA, 20 bp, synthetic construct
  misc_feature 1..20: note = Description of Artificial Sequence: Synthetic oligonucleotide
  misc_feature 1..20: note = Target: FXN; (-) strand; PAM type: NRG; PAM sequence: AGG
  source 1..20: mol_type = other DNA
aaaccaggttctaatgggag

SEQ ID NO: 10760 - DNA, 20 bp, synthetic construct
  misc_feature 1..20: note = Description of Artificial Sequence: Synthetic oligonucleotide
  misc_feature 1..20: note = Target: FXN; (-) strand; PAM type: NRG; PAM sequence: GAG
  source 1..20: mol_type = other DNA
aaaaccaggttctaatggga

SEQ ID NO: 10761 - DNA, 20 bp, synthetic construct
  misc_feature 1..20: note = Description of Artificial Sequence: Synthetic oligonucleotide
  misc_feature 1..20: note = Target: FXN; (-) strand; PAM type: NRG; PAM sequence: GAG
  source 1..20: mol_type = other DNA
agaaaaccaggttctaatgg

SEQ ID NO: 10762 - DNA, 20 bp, synthetic construct
  misc_feature 1..20: note = Description of Artificial Sequence: Synthetic oligonucleotide
  misc_feature 1..20: note = Target: FXN; (-) strand; PAM type: NRG; PAM sequence: GGG
  source 1..20: mol_type = other DNA
gaagaaaaccaggttctaat

SEQ ID NO: 10763 - DNA, 20 bp, synthetic construct
  misc_feature 1..20: note = Description of Artificial Sequence: Synthetic oligonucleotide
  misc_feature 1..20: note = Target: FXN; (-) strand; PAM type: NRG; PAM sequence: TGG
  source 1..20: mol_type = other DNA
ggaagaaaaccaggttctaa

SEQ ID NO: 10764 - DNA, 20 bp, synthetic construct
  misc_feature 1..20: note = Description of Artificial Sequence: Synthetic oligonucleotide
  misc_feature 1..20: note = Target: FXN; (-) strand; PAM type: NRG; PAM sequence: AGG
  source 1..20: mol_type = other DNA
tgctgctcaggaagaaaacc

SEQ ID NO: 10765 - DNA, 20 bp, synthetic construct
  misc_feature 1..20: note = Description of Artificial Sequence: Synthetic oligonucleotide
  misc_feature 1..20: note = Target: FXN; (-) strand; PAM type: NRG; PAM sequence: CAG
  source 1..20: mol_type = other DNA
ttgctgctcaggaagaaaac

SEQ ID NO: 10766 - DNA, 20 bp, synthetic construct
  misc_feature 1..20: note = Description of Artificial Sequence: Synthetic oligonucleotide
  misc_feature 1..20: note = Target: FXN; (-) strand; PAM type: NRG; PAM sequence: AAG
  source 1..20: mol_type = other DNA
taagattgttgctgctcagg

SEQ ID NO: 10767 - DNA, 20 bp, synthetic construct
  misc_feature 1..20: note = Description of Artificial Sequence: Synthetic oligonucleotide
  misc_feature 1..20: note = Target: FXN; (-) strand; PAM type: NRG; PAM sequence: AGG
  source 1..20: mol_type = other DNA
gcctaagattgttgctgctc

SEQ ID NO: 10768 - DNA, 20 bp, synthetic construct
  misc_feature 1..20: note = Description of Artificial Sequence: Synthetic oligonucleotide
  misc_feature 1..20: note = Target: FXN; (-) strand; PAM type: NRG; PAM sequence: CAG
  source 1..20: mol_type = other DNA
tgcctaagattgttgctgct

SEQ ID NO: 10769 - DNA, 20 bp, synthetic construct
  misc_feature 1..20: note = Description of Artificial Sequence: Synthetic oligonucleotide
  misc_feature 1..20: note = Target: FXN; (-) strand; PAM type: NRG; PAM sequence: AAG
  source 1..20: mol_type = other DNA
agtcacatggaaagatgcct

SEQ ID NO: 10770 - DNA, 20 bp, synthetic construct
  misc_feature 1..20: note = Description of Artificial Sequence: Synthetic oligonucleotide
  misc_feature 1..20: note = Target: FXN; (-) strand; PAM type: NRG; PAM sequence: AAG
  source 1..20: mol_type = other DNA
tggatactcagtcacatgga

SEQ ID NO: 10771 - DNA, 20 bp, synthetic construct
  misc_feature 1..20: note = Description of Artificial Sequence: Synthetic oligonucleotide
  misc_feature 1..20: note = Target: FXN; (-) strand; PAM type: NRG; PAM sequence: TGG
  source 1..20: mol_type = other DNA
gtggtggatactcagtcaca

SEQ ID NO: 10772 - DNA, 20 bp, synthetic construct
  misc_feature 1..20: note = Description of Artificial Sequence: Synthetic oligonucleotide
  misc_feature 1..20: note = Target: FXN; (-) strand; PAM type: NRG; PAM sequence: CAG
  source 1..20: mol_type = other DNA
aaaataatgtggtggatact

SEQ ID NO: 10773 - DNA, 20 bp, synthetic construct
  misc_feature 1..20: note = Description of Artificial Sequence: Synthetic oligonucleotide
  misc_feature 1..20: note = Target: FXN; (-) strand; PAM type: NRG; PAM sequence: TGG
  source 1..20: mol_type = other DNA
tttcattaaaaataatgtgg

SEQ ID NO: 10774 - DNA, 20 bp, synthetic construct
  misc_feature 1..20: note = Description of Artificial Sequence: Synthetic oligonucleotide
  misc_feature 1..20: note = Target: FXN; (-) strand; PAM type: NRG; PAM sequence: TGG
  source 1..20: mol_type = other DNA
ctatttcattaaaaataatg

SEQ ID NO: 10775 - DNA, 20 bp, synthetic construct
  misc_feature 1..20: note = Description of Artificial Sequence: Synthetic oligonucleotide
  misc_feature 1..20: note = Target: FXN; (-) strand; PAM type: NRG; PAM sequence: TGG
  source 1..20: mol_type = other DNA
acagtaggggatgggttaaa

SEQ ID NO: 10776 - DNA, 20 bp, synthetic construct
  misc_feature 1..20: note = Description of Artificial Sequence: Synthetic oligonucleotide
  misc_feature 1..20: note = Target: FXN; (-) strand; PAM type: NRG; PAM sequence: GGG
  source 1..20: mol_type = other DNA
aatgtccaacagtaggggat

SEQ ID NO: 10777 - DNA, 20 bp, synthetic construct
  misc_feature 1..20: note = Description of Artificial Sequence: Synthetic oligonucleotide
  misc_feature 1..20: note = Target: FXN; (-) strand; PAM type: NRG; PAM sequence: TGG
  source 1..20: mol_type = other DNA
gaatgtccaacagtagggga

SEQ ID NO: 10778 - DNA, 20 bp, synthetic construct
  misc_feature 1..20: note = Description of Artificial Sequence: Synthetic oligonucleotide
  misc_feature 1..20: note = Target: FXN; (-) strand; PAM type: NRG; PAM sequence: GGG
  source 1..20: mol_type = other DNA
acctgaatgtccaacagtag

SEQ ID NO: 10779 - DNA, 20 bp, synthetic construct
  misc_feature 1..20: note = Description of Artificial Sequence: Synthetic oligonucleotide
  misc_feature 1..20: note = Target: FXN; (-) strand; PAM type: NRG; PAM sequence: GGG
  source 1..20: mol_type = other DNA
aacctgaatgtccaacagta

SEQ ID NO: 10780 - DNA, 20 bp, synthetic construct
  misc_feature 1..20: note = Description of Artificial Sequence: Synthetic oligonucleotide
  misc_feature 1..20: note = Target: FXN; (-) strand; PAM type: NRG; PAM sequence: AGG
  source 1..20: mol_type = other DNA
caacctgaatgtccaacagt

SEQ ID NO: 10781 - DNA, 20 bp, synthetic construct
  misc_feature 1..20: note = Description of Artificial Sequence: Synthetic oligonucleotide
  misc_feature 1..20: note = Target: FXN; (-) strand; PAM type: NRG; PAM sequence: TAG
  source 1..20: mol_type = other DNA
acaacctgaatgtccaacag

SEQ ID NO: 10782 - DNA, 20 bp, synthetic construct
  misc_feature 1..20: note = Description of Artificial Sequence: Synthetic oligonucleotide
  misc_feature 1..20: note = Target: FXN; (-) strand; PAM type: NRG; PAM sequence: CAG
  source 1..20: mol_type = other DNA
gaaacaacctgaatgtccaa

SEQ ID NO: 10783 - DNA, 20 bp, synthetic construct
  misc_feature 1..20: note = Description of Artificial Sequence: Synthetic oligonucleotide
  misc_feature 1..20: note = Target: FXN; (-) strand; PAM type: NRG; PAM sequence: TGG
  source 1..20: mol_type = other DNA
ataaaataatattgaaactc

SEQ ID NO: 10784 - DNA, 20 bp, synthetic construct
  misc_feature 1..20: note = Description of Artificial Sequence: Synthetic oligonucleotide
  misc_feature 1..20: note = Target: FXN; (-) strand; PAM type: NRG; PAM sequence: GGG
  source 1..20: mol_type = other DNA
atggcctgctctaactatta

SEQ ID NO: 10785 - DNA, 20 bp, synthetic construct
  misc_feature 1..20: note = Description of Artificial Sequence: Synthetic oligonucleotide
  misc_feature 1..20: note = Target: FXN; (-) strand; PAM type: NRG; PAM sequence: AGG
  source 1..20: mol_type = other DNA
catggcctgctctaactatt

SEQ ID NO: 10786 - DNA, 20 bp, synthetic construct
  misc_feature 1..20: note = Description of Artificial Sequence: Synthetic oligonucleotide
  misc_feature 1..20: note = Target: FXN; (-) strand; PAM type: NRG; PAM sequence: TAG
  source 1..20: mol_type = other DNA
gcatggcctgctctaactat

SEQ ID NO: 10787 - DNA, 20 bp, synthetic construct
  misc_feature 1..20: note = Description of Artificial Sequence: Synthetic oligonucleotide
  misc_feature 1..20: note = Target: FXN; (-) strand; PAM type: NRG; PAM sequence: TGG
  source 1..20: mol_type = other DNA
gtctatttgtgatagcagca

SEQ ID NO: 10788 - DNA, 20 bp, synthetic construct
  misc_feature 1..20: note = Description of Artificial Sequence: Synthetic oligonucleotide
  misc_feature 1..20: note = Target: FXN; (-) strand; PAM type: NRG; PAM sequence: CAG
  source 1..20: mol_type = other DNA
tttgggtctatttgtgatag

SEQ ID NO: 10789 - DNA, 20 bp, synthetic construct
  misc_feature 1..20: note = Description of Artificial Sequence: Synthetic oligonucleotide
  misc_feature 1..20: note = Target: FXN; (-) strand; PAM type: NRG; PAM sequence: TAG
  source 1..20: mol_type = other DNA
atatttgggtctatttgtga

SEQ ID NO: 10790 - DNA, 20 bp, synthetic construct
  misc_feature 1..20: note = Description of Artificial Sequence: Synthetic oligonucleotide
  misc_feature 1..20: note = Target: FXN; (-) strand; PAM type: NRG; PAM sequence: GGG
  source 1..20: mol_type = other DNA
gtttgagctattaaatattt

SEQ ID NO: 10791 - DNA, 20 bp, synthetic construct
  misc_feature 1..20: note = Description of Artificial Sequence: Synthetic oligonucleotide
  misc_feature 1..20: note = Target: FXN; (-) strand; PAM type: NRG; PAM sequence: TGG
  source 1..20: mol_type = other DNA
ggtttgagctattaaatatt

SEQ ID NO: 10792 - DNA, 20 bp, synthetic construct
  misc_feature 1..20: note = Description of Artificial Sequence: Synthetic oligonucleotide
  misc_feature 1..20: note = Target: FXN; (-) strand; PAM type: NRG; PAM sequence: GAG
  source 1..20: mol_type = other DNA
gacacaaacgttattggttt

SEQ ID NO: 10793 - DNA, 20 bp, synthetic construct
  misc_feature 1..20: note = Description of Artificial Sequence: Synthetic oligonucleotide
  misc_feature 1..20: note = Target: FXN; (-) strand; PAM type: NRG; PAM sequence: TGG
  source 1..20: mol_type = other DNA
gaggaggacacaaacgttat

SEQ ID NO: 10794 - DNA, 20 bp, synthetic construct
  misc_feature 1..20: note = Description of Artificial Sequence: Synthetic oligonucleotide
  misc_feature 1..20: note = Target: FXN; (-) strand; PAM type: NRG; PAM sequence: AGG
  source 1..20: mol_type = other DNA
ccctgtactgcccagagagg

SEQ ID NO: 10795 - DNA, 20 bp, synthetic construct
  misc_feature 1..20: note = Description of Artificial Sequence: Synthetic oligonucleotide
  misc_feature 1..20: note = Target: FXN; (-) strand; PAM type: NRG; PAM sequence: GAG
  source 1..20: mol_type = other DNA
accctgtactgcccagagag

SEQ ID NO: 10796 - DNA, 20 bp, synthetic construct
  misc_feature 1..20: note = Description of Artificial Sequence: Synthetic oligonucleotide
  misc_feature 1..20: note = Target: FXN; (-) strand; PAM type: NRG; PAM sequence: AGG
  source 1..20: mol_type = other DNA
caaccctgtactgcccagag

SEQ ID NO: 10797 - DNA, 20 bp, synthetic construct
  misc_feature 1..20: note = Description of Artificial Sequence: Synthetic oligonucleotide
  misc_feature 1..20: note = Target: FXN; (-) strand; PAM type: NRG; PAM sequence: GAG
  source 1..20: mol_type = other DNA
ccaaccctgtactgcccaga

SEQ ID NO: 10798 - DNA, 20 bp, synthetic construct
  misc_feature 1..20: note = Description of Artificial Sequence: Synthetic oligonucleotide
  misc_feature 1..20: note = Target: FXN; (-) strand; PAM type: NRG; PAM sequence: GAG
  source 1..20: mol_type = other DNA
tgccaaccctgtactgccca

SEQ ID NO: 10799 - DNA, 20 bp, synthetic construct
  misc_feature 1..20: note = Description of Artificial Sequence: Synthetic oligonucleotide
  misc_feature 1..20: note = Target: FXN; (-) strand; PAM type: NRG; PAM sequence: CAG
  source 1..20: mol_type = other DNA
tatgccaaccctgtactgcc

SEQ ID NO: 10800 - DNA, 20 bp, synthetic construct
  misc_feature 1..20: note = Description of Artificial Sequence: Synthetic oligonucleotide
  misc_feature 1..20: note = Target: FXN; (-) strand; PAM type: NRG; PAM sequence: AGG
  source 1..20: mol_type = other DNA
agttcctaattcacttcagg

SEQ ID NO: 10801 - DNA, 20 bp, synthetic construct
  misc_feature 1..20: note = Description of Artificial Sequence: Synthetic oligonucleotide
  misc_feature 1..20: note = Target: FXN; (-) strand; PAM type: NRG; PAM sequence: GAG
  source 1..20: mol_type = other DNA
tagttcctaattcacttcag

SEQ ID NO: 10802 - DNA, 20 bp, synthetic construct
  misc_feature 1..20: note = Description of Artificial Sequence: Synthetic oligonucleotide
  misc_feature 1..20: note = Target: FXN; (-) strand; PAM type: NRG; PAM sequence: AGG
  source 1..20: mol_type = other DNA
tgtagttcctaattcacttc

SEQ ID NO: 10803 - DNA, 20 bp, synthetic construct
  misc_feature 1..20: note = Description of Artificial Sequence: Synthetic oligonucleotide
  misc_feature 1..20: note = Target: FXN; (-) strand; PAM type: NRG; PAM sequence: CAG
  source 1..20: mol_type = other DNA
gtgtagttcctaattcactt

SEQ ID NO: 10804 - DNA, 20 bp, synthetic construct
  misc_feature 1..20: note = Description of Artificial Sequence: Synthetic oligonucleotide
  misc_feature 1..20: note = Target: FXN; (-) strand; PAM type: NRG; PAM sequence: TAG
  source 1..20: mol_type = other DNA
actggaagctggaatgagtg

SEQ ID NO: 10805 - DNA, 20 bp, synthetic construct
  misc_feature 1..20: note = Description of Artificial Sequence: Synthetic oligonucleotide
  misc_feature 1..20: note = Target: FXN; (-) strand; PAM type: NRG; PAM sequence: GAG
  source 1..20: mol_type = other DNA
accaaactggaagctggaat

SEQ ID NO: 10806 - DNA, 20 bp, synthetic construct
  misc_feature 1..20: note = Description of Artificial Sequence: Synthetic oligonucleotide
  misc_feature 1..20: note = Target: FXN; (-) strand; PAM type: NRG; PAM sequence: TGG
  source 1..20: mol_type = other DNA
ataaagaccaaactggaagc

SEQ ID NO: 10807 - DNA, 20 bp, synthetic construct
  misc_feature 1..20: note = Description of Artificial Sequence: Synthetic oligonucleotide
  misc_feature 1..20: note = Target: FXN; (-) strand; PAM type: NRG; PAM sequence: AAG
  source 1..20: mol_type = other DNA
acagataaagaccaaactgg

SEQ ID NO: 10808 - DNA, 20 bp, synthetic construct
  misc_feature 1..20: note = Description of Artificial Sequence: Synthetic oligonucleotide
  misc_feature 1..20: note = Target: FXN; (-) strand; PAM type: NRG; PAM sequence: TGG
  source 1..20: mol_type = other DNA
ctgacagataaagaccaaac

SEQ ID NO: 10809 - DNA, 20 bp, synthetic construct
  misc_feature 1..20: note = Description of Artificial Sequence: Synthetic oligonucleotide
  misc_feature 1..20: note = Target: FXN; (-) strand; PAM type: NRG; PAM sequence: AAG
  source 1..20: mol_type = other DNA
cagtaaggcactgacagata

SEQ ID NO: 10810 - DNA, 20 bp, synthetic construct
  misc_feature 1..20: note = Description of Artificial Sequence: Synthetic oligonucleotide
  misc_feature 1..20: note = Target: FXN; (-) strand; PAM type: NRG; PAM sequence: CAG
  source 1..20: mol_type = other DNA
agaggacagtaaggcactga

SEQ ID NO: 10811 - DNA, 20 bp, synthetic construct
  misc_feature 1..20: note = Description of Artificial Sequence: Synthetic oligonucleotide
  misc_feature 1..20: note = Target: FXN; (-) strand; PAM type: NRG; PAM sequence: AGG
  source 1..20: mol_type = other DNA
caacaatgcagaggacagta

SEQ ID NO: 10812 - DNA, 20 bp, synthetic construct
  misc_feature 1..20: note = Description of Artificial Sequence: Synthetic oligonucleotide
  misc_feature 1..20: note = Target: FXN; (-) strand; PAM type: NRG; PAM sequence: AAG
  source 1..20: mol_type = other DNA
tcaacaatgcagaggacagt

SEQ ID NO: 10813 - DNA, 20 bp, synthetic construct
  misc_feature 1..20: note = Description of Artificial Sequence: Synthetic oligonucleotide
  misc_feature 1..20: note = Target: FXN; (-) strand; PAM type: NRG; PAM sequence: CAG
  source 1..20: mol_type = other DNA
agactcaacaatgcagagga

SEQ ID NO: 10814 - DNA, 20 bp, synthetic construct
  misc_feature 1..20: note = Description of Artificial Sequence: Synthetic oligonucleotide
  misc_feature 1..20: note = Target: FXN; (-) strand; PAM type: NRG; PAM sequence: AGG
  source 1..20: mol_type = other DNA
actgagactcaacaatgcag

SEQ ID NO: 10815 - DNA, 20 bp, synthetic construct
  misc_feature 1..20: note = Description of Artificial Sequence: Synthetic oligonucleotide
  misc_feature 1..20: note = Target: FXN; (-) strand; PAM type: NRG; PAM sequence: GAG
  source 1..20: mol_type = other DNA
gactgagactcaacaatgca

SEQ ID NO: 10816 - DNA, 20 bp, synthetic construct
  misc_feature 1..20: note = Description of Artificial Sequence: Synthetic oligonucleotide
  misc_feature 1..20: note = Target: FXN; (-) strand; PAM type: NRG; PAM sequence: CAG
  source 1..20: mol_type = other DNA
gtgactgagactcaacaatg

SEQ ID NO: 10817 - DNA, 20 bp, synthetic construct
  misc_feature 1..20: note = Description of Artificial Sequence: Synthetic oligonucleotide
  misc_feature 1..20: note = Target: FXN; (-) strand; PAM type: NRG; PAM sequence: GAG
  source 1..20: mol_type = other DNA
ggaacttggacaaggtgact

SEQ ID NO: 10818 - DNA, 20 bp, synthetic construct
  misc_feature 1..20: note = Description of Artificial Sequence: Synthetic oligonucleotide
  misc_feature 1..20: note = Target: FXN; (-) strand; PAM type: NRG; PAM sequence: AGG
  source 1..20: mol_type = other DNA
tggccaatggaacttggaca

SEQ ID NO: 10819 - DNA, 20 bp, synthetic construct
  misc_feature 1..20: note = Description of Artificial Sequence: Synthetic oligonucleotide
  misc_feature 1..20: note = Target: FXN; (-) strand; PAM type: NRG; PAM sequence: AAG
  source 1..20: mol_type = other DNA
ctggccaatggaacttggac

SEQ ID NO: 10820 - DNA, 20 bp, synthetic construct
  misc_feature 1..20: note = Description of Artificial Sequence: Synthetic oligonucleotide
  misc_feature 1..20: note = Target: FXN; (-) strand; PAM type: NRG; PAM sequence: TGG
  source 1..20: mol_type = other DNA
cctttctggccaatggaact

SEQ ID NO: 10821 - DNA, 20 bp, synthetic construct
  misc_feature 1..20: note = Description of Artificial Sequence: Synthetic oligonucleotide
  misc_feature 1..20: note = Target: FXN; (-) strand; PAM type: NRG; PAM sequence: TGG
  source 1..20: mol_type = other DNA
ttctagccctttctggccaa

SEQ ID NO: 10822 - DNA, 20 bp, synthetic construct
  misc_feature 1..20: note = Description of Artificial Sequence: Synthetic oligonucleotide
  misc_feature 1..20: note = Target: FXN; (-) strand; PAM type: NRG; PAM sequence: TGG
  source 1..20: mol_type = other DNA
tctgtgcttctagccctttc

SEQ ID NO: 10823 - DNA, 20 bp, synthetic construct
  misc_feature 1..20: note = Description of Artificial Sequence: Synthetic oligonucleotide
  misc_feature 1..20: note = Target: FXN; (-) strand; PAM type: NRG; PAM sequence: TAG
  source 1..20: mol_type = other DNA
ttccagcccttctgtgcttc

SEQ ID NO: 10824 - DNA, 20 bp, synthetic construct
  misc_feature 1..20: note = Description of Artificial Sequence: Synthetic oligonucleotide
  misc_feature 1..20: note = Target: FXN; (-) strand; PAM type: NRG; PAM sequence: CAG
  source 1..20: mol_type = other DNA
tgaggaacaaatgccacttc

SEQ ID NO: 10825 - DNA, 20 bp, synthetic construct
  misc_feature 1..20: note = Description of Artificial Sequence: Synthetic oligonucleotide
  misc_feature 1..20: note = Target: FXN; (-) strand; PAM type: NRG; PAM sequence: AGG
  source 1..20: mol_type = other DNA
ttcccaccagaatgtgagtg

SEQ ID NO: 10826 - DNA, 20 bp, synthetic construct
  misc_feature 1..20: note = Description of Artificial Sequence: Synthetic oligonucleotide
  misc_feature 1..20: note = Target: FXN; (-) strand; PAM type: NRG; PAM sequence: GAG
  source 1..20: mol_type = other DNA
cttcccaccagaatgtgagt

SEQ ID NO: 10827 - DNA, 20 bp, synthetic construct
  misc_feature 1..20: note = Description of Artificial Sequence: Synthetic oligonucleotide
  misc_feature 1..20: note = Target: FXN; (-) strand; PAM type: NRG; PAM sequence: GAG
  source 1..20: mol_type = other DNA
agttcttcccaccagaatgt

SEQ ID NO: 10828 - DNA, 20 bp, synthetic construct
  misc_feature 1..20: note = Description of Artificial Sequence: Synthetic oligonucleotide
  misc_feature 1..20: note = Target: FXN; (-) strand; PAM type: NRG; PAM sequence: CAG
  source 1..20: mol_type = other DNA
caccactaagttcttcccac

SEQ ID NO: 10829 - DNA, 20 bp, synthetic construct
  misc_feature 1..20: note = Description of Artificial Sequence: Synthetic oligonucleotide
  misc_feature 1..20: note = Target: FXN; (-) strand; PAM type: NRG; PAM sequence: AAG
  source 1..20: mol_type = other DNA
tcagctaaggccacaccact

SEQ ID NO: 10830 - DNA, 20 bp, synthetic construct
  misc_feature 1..20: note = Description of Artificial Sequence: Synthetic oligonucleotide
  misc_feature 1..20: note = Target: FXN; (-) strand; PAM type: NRG; PAM sequence: AGG
  source 1..20: mol_type = other DNA
gcctcccttacagtcagcta

SEQ ID NO: 10831 - DNA, 20 bp, synthetic construct
  misc_feature 1..20: note = Description of Artificial Sequence: Synthetic oligonucleotide
  misc_feature 1..20: note = Target: FXN; (-) strand; PAM type: NRG; PAM sequence: AAG
  source 1..20: mol_type = other DNA
agcctcccttacagtcagct

SEQ ID NO: 10832 - DNA, 20 bp, synthetic construct
  misc_feature 1..20: note = Description of Artificial Sequence: Synthetic oligonucleotide
  misc_feature 1..20: note = Target: FXN; (-) strand; PAM type: NRG; PAM sequence: CAG
  source 1..20: mol_type = other DNA
ttcccagcctcccttacagt

SEQ ID NO: 10833 - DNA, 20 bp, synthetic construct
  misc_feature 1..20: note = Description of Artificial Sequence: Synthetic oligonucleotide
  misc_feature 1..20: note = Target: FXN; (-) strand; PAM type: NRG; PAM sequence: CAG
  source 1..20: mol_type = other DNA
atatttcccagcctccctta

SEQ ID NO: 10834 - DNA, 20 bp, synthetic construct
  misc_feature 1..20: note = Description of Artificial Sequence: Synthetic oligonucleotide
  misc_feature 1..20: note = Target: FXN; (-) strand; PAM type: NRG; PAM sequence: CAG
  source 1..20: mol_type = other DNA
actcgctagactatatttcc

SEQ ID NO: 10835 - DNA, 20 bp, synthetic construct
  misc_feature 1..20: note = Description of Artificial Sequence: Synthetic oligonucleotide
  misc_feature 1..20: note = Target: FXN; (-) strand; PAM type: NRG; PAM sequence: TAG
  source 1..20: mol_type = other DNA
gctttttccagggcactcgc

SEQ ID NO: 10836 - DNA, 20 bp, synthetic construct
  misc_feature 1..20: note = Description of Artificial Sequence: Synthetic oligonucleotide
  misc_feature 1..20: note = Target: FXN; (-) strand; PAM type: NRG; PAM sequence: GGG
  source 1..20: mol_type = other DNA
tgccgtgccggctttttcca

SEQ ID NO: 10837 - DNA, 20 bp, synthetic construct
  misc_feature 1..20: note = Description of Artificial Sequence: Synthetic oligonucleotide
  misc_feature 1..20: note = Target: FXN; (-) strand; PAM type: NRG; PAM sequence: AGG
  source 1..20: mol_type = other DNA
atgccgtgccggctttttcc

SEQ ID NO: 10838 - DNA, 20 bp, synthetic construct
  misc_feature 1..20: note = Description of Artificial Sequence: Synthetic oligonucleotide
  misc_feature 1..20: note = Target: FXN; (-) strand; PAM type: NRG; PAM sequence: CAG
  source 1..20: mol_type = other DNA
aatgccgtgccggctttttc

SEQ ID NO: 10839 - DNA, 20 bp, synthetic construct
  misc_feature 1..20: note = Description of Artificial Sequence: Synthetic oligonucleotide
  misc_feature 1..20: note = Target: FXN; (-) strand; PAM type: NRG; PAM sequence: CGG
  source 1..20: mol_type = other DNA
ttccatggggaatgccgtgc

SEQ ID NO: 10840 - DNA, 20 bp, synthetic construct
  misc_feature 1..20: note = Description of Artificial Sequence: Synthetic oligonucleotide
  misc_feature 1..20: note = Target: FXN; (-) strand; PAM type: NRG; PAM sequence: GGG
  source 1..20: mol_type = other DNA
gtgcctgacagctttccatg

SEQ ID NO: 10841 - DNA, 20 bp, synthetic construct
  misc_feature 1..20: note = Description of Artificial Sequence: Synthetic oligonucleotide
  misc_feature 1..20: note = Target: FXN; (-) strand; PAM type: NRG; PAM sequence: GGG
  source 1..20: mol_type = other DNA
cgtgcctgacagctttccat

SEQ ID NO: 10842 - DNA, 20 bp, synthetic construct
  misc_feature 1..20: note = Description of Artificial Sequence: Synthetic oligonucleotide
  misc_feature 1..20: note = Target: FXN; (-) strand; PAM type: NRG; PAM sequence: TGG
  source 1..20: mol_type = other DNA
ccgtgcctgacagctttcca

SEQ ID NO: 10843 - DNA, 20 bp, synthetic construct
  misc_feature 1..20: note = Description of Artificial Sequence: Synthetic oligonucleotide
  misc_feature 1..20: note = Target: FXN; (-) strand; PAM type: NRG; PAM sequence: CAG
  source 1..20: mol_type = other DNA
tagactgtagccgtgcctga

SEQ ID NO: 10844 - DNA, 20 bp, synthetic construct
  misc_feature 1..20: note = Description of Artificial Sequence: Synthetic oligonucleotide
  misc_feature 1..20: note = Target: FXN; (-) strand; PAM type: NRG; PAM sequence: TAG
  source 1..20: mol_type = other DNA
ggttggcagggggtagactg

SEQ ID NO: 10845 - DNA, 20 bp, synthetic construct
  misc_feature 1..20: note = Description of Artificial Sequence: Synthetic oligonucleotide
  misc_feature 1..20: note = Target: FXN; (-) strand; PAM type: NRG; PAM sequence: TAG
  source 1..20: mol_type = other DNA
agatactggttggcaggggg

SEQ ID NO: 10846 - DNA, 20 bp, synthetic construct
  misc_feature 1..20: note = Description of Artificial Sequence: Synthetic oligonucleotide
  misc_feature 1..20: note = Target: FXN; (-) strand; PAM type: NRG; PAM sequence: GGG
  source 1..20: mol_type = other DNA
tgcagatactggttggcagg

SEQ ID NO: 10847 - DNA, 20 bp, synthetic construct
  misc_feature 1..20: note = Description of Artificial Sequence: Synthetic oligonucleotide
  misc_feature 1..20: note = Target: FXN; (-) strand; PAM type: NRG; PAM sequence: GGG
  source 1..20: mol_type = other DNA
atgcagatactggttggcag

SEQ ID NO: 10848 - DNA, 20 bp, synthetic construct
  misc_feature 1..20: note = Description of Artificial Sequence: Synthetic oligonucleotide
  misc_feature 1..20: note = Target: FXN; (-) strand; PAM type: NRG; PAM sequence: GGG
  source 1..20: mol_type = other DNA
catgcagatactggttggca

SEQ ID NO: 10849 - DNA, 20 bp, synthetic construct
  misc_feature 1..20: note = Description of Artificial Sequence: Synthetic oligonucleotide
  misc_feature 1..20: note = Target: FXN; (-) strand; PAM type: NRG; PAM sequence: AGG
  source 1..20: mol_type = other DNA
ccatgcagatactggttggc

SEQ ID NO: 10850 - DNA, 20 bp, synthetic construct
  misc_feature 1..20: note = Description of Artificial Sequence: Synthetic oligonucleotide
  misc_feature 1..20: note = Target: FXN; (-) strand; PAM type: NRG; PAM sequence: CAG
  source 1..20: mol_type = other DNA
tccatgcagatactggttgg

SEQ ID NO: 10851 - DNA, 20 bp, synthetic construct
  misc_feature 1..20: note = Description of Artificial Sequence: Synthetic oligonucleotide
  misc_feature 1..20: note = Target: FXN; (-) strand; PAM type: NRG; PAM sequence: TGG
  source 1..20: mol_type = other DNA
gggtccatgcagatactggt

SEQ ID NO: 10852 - DNA, 20 bp, synthetic construct
  misc_feature 1..20: note = Description of Artificial Sequence: Synthetic oligonucleotide
  misc_feature 1..20: note = Target: FXN; (-) strand; PAM type: NRG; PAM sequence: TGG
  source 1..20: mol_type = other DNA
aggagggtccatgcagatac

SEQ ID NO: 10853 - DNA, 20 bp, synthetic construct
  misc_feature 1..20: note = Description of Artificial Sequence: Synthetic oligonucleotide
  misc_feature 1..20: note = Target: FXN; (-) strand; PAM type: NRG; PAM sequence: CAG
  source 1..20: mol_type = other DNA
gtgtggaaggagggtccatg

SEQ ID NO: 10854 - DNA, 20 bp, synthetic construct
  misc_feature 1..20: note = Description of Artificial Sequence: Synthetic oligonucleotide
  misc_feature 1..20: note = Target: FXN; (-) strand; PAM type: NRG; PAM sequence: GGG
  source 1..20: mol_type = other DNA
tgcatctgagtgtggaagga

SEQ ID NO: 10855 - DNA, 20 bp, synthetic construct
  misc_feature 1..20: note = Description of Artificial Sequence: Synthetic oligonucleotide
  misc_feature 1..20: note = Target: FXN; (-) strand; PAM type: NRG; PAM sequence: AGG
  source 1..20: mol_type = other DNA
atgcatctgagtgtggaagg

SEQ ID NO: 10856 - DNA, 20 bp, synthetic construct
  misc_feature 1..20: note = Description of Artificial Sequence: Synthetic oligonucleotide
  misc_feature 1..20: note = Target: FXN; (-) strand; PAM type: NRG; PAM sequence: GAG
  source 1..20: mol_type = other DNA
aatgcatctgagtgtggaag

SEQ ID NO: 10857 - DNA, 20 bp, synthetic construct
  misc_feature 1..20: note = Description of Artificial Sequence: Synthetic oligonucleotide
  misc_feature 1..20: note = Target: FXN; (-) strand; PAM type: NRG; PAM sequence: AGG
  source 1..20: mol_type = other DNA
taaatgcatctgagtgtgga

SEQ ID NO: 10858 - DNA, 20 bp, synthetic construct
  misc_feature 1..20: note = Description of Artificial Sequence: Synthetic oligonucleotide
  misc_feature 1..20: note = Target: FXN; (-) strand; PAM type: NRG; PAM sequence: AAG
  source 1..20: mol_type = other DNA
gtaaatgcatctgagtgtgg

SEQ ID NO: 10859 - DNA, 20 bp, synthetic construct
  misc_feature 1..20: note = Description of Artificial Sequence: Synthetic oligonucleotide
  misc_feature 1..20: note = Target: FXN; (-) strand; PAM type: NRG; PAM sequence: TGG
  source 1..20: mol_type = other DNA
ggggtaaatgcatctgagtg

SEQ ID NO: 10860 - DNA, 20 bp, synthetic construct
  misc_feature 1..20: note = Description of Artificial Sequence: Synthetic oligonucleotide
  misc_feature 1..20: note = Target: FXN; (-) strand; PAM type: NRG; PAM sequence: GAG
  source 1..20: mol_type = other DNA
ggctgggggtaaatgcatct

SEQ ID NO: 10861 - DNA, 20 bp, synthetic construct
  misc_feature 1..20: note = Description of Artificial Sequence: Synthetic oligonucleotide
  misc_feature 1..20: note = Target: FXN; (-) strand; PAM type: NRG; PAM sequence: GGG
  source 1..20: mol_type = other DNA
gttggctctcttggggctgg

SEQ ID NO: 10862 - DNA, 20 bp, synthetic construct
  misc_feature 1..20: note = Description of Artificial Sequence: Synthetic oligonucleotide
  misc_feature 1..20: note = Target: FXN; (-) strand; PAM type: NRG; PAM sequence: GGG
  source 1..20: mol_type = other DNA
ggttggctctcttggggctg

SEQ ID NO: 10863 - DNA, 20 bp, synthetic construct
  misc_feature 1..20: note = Description of Artificial Sequence: Synthetic oligonucleotide
  misc_feature 1..20: note = Target: FXN; (-) strand; PAM type: NRG; PAM sequence: GGG
  source 1..20: mol_type = other DNA
cggttggctctcttggggct

SEQ ID NO: 10864 - DNA, 20 bp, synthetic construct
  misc_feature 1..20: note = Description of Artificial Sequence: Synthetic oligonucleotide
  misc_feature 1..20: note = Target: FXN; (-) strand; PAM type: NRG; PAM sequence: TGG
  source 1..20: mol_type = other DNA
tcggttggctctcttggggc

SEQ ID NO: 10865 - DNA, 20 bp, synthetic construct
  misc_feature 1..20: note = Description of Artificial Sequence: Synthetic oligonucleotide
  misc_feature 1..20: note = Target: FXN; (-) strand; PAM type: NRG; PAM sequence: GGG
  source 1..20: mol_type = other DNA
ggcatcggttggctctcttg

SEQ ID NO: 10866 - DNA, 20 bp, synthetic construct
  misc_feature 1..20: note = Description of Artificial Sequence: Synthetic oligonucleotide
  misc_feature 1..20: note = Target: FXN; (-) strand; PAM type: NRG; PAM sequence: GGG
  source 1..20: mol_type = other DNA
gggcatcggttggctctctt

SEQ ID NO: 10867 - DNA, 20 bp, synthetic construct
  misc_feature 1..20: note = Description of Artificial Sequence: Synthetic oligonucleotide
  misc_feature 1..20: note = Target: FXN; (-) strand; PAM type: NRG; PAM sequence: TGG
  source 1..20: mol_type = other DNA
tgggcatcggttggctctct

SEQ ID NO: 10868 - DNA, 20 bp, synthetic construct
  misc_feature 1..20: note = Description of Artificial Sequence: Synthetic oligonucleotide
  misc_feature 1..20: note = Target: FXN; (-) strand; PAM type: NRG; PAM sequence: TGG
  source 1..20: mol_type = other DNA
gtgaccacatgggcatcggt

SEQ ID NO: 10869 - DNA, 20 bp, synthetic construct
  misc_feature 1..20: note = Description of Artificial Sequence: Synthetic oligonucleotide
  misc_feature 1..20: note = Target: FXN; (-) strand; PAM type: NRG; PAM sequence: CGG
  source 1..20: mol_type = other DNA
tgtggtgaccacatgggcat

SEQ ID NO: 10870 - DNA, 20 bp, synthetic construct
  misc_feature 1..20: note = Description of Artificial Sequence: Synthetic oligonucleotide
  misc_feature 1..20: note = Target: FXN; (-) strand; PAM type: NRG; PAM sequence: GGG
  source 1..20: mol_type = other DNA
ggtggctgtggtgaccacat

SEQ ID NO: 10871 - DNA, 20 bp, synthetic construct
  misc_feature 1..20: note = Description of Artificial Sequence: Synthetic oligonucleotide
  misc_feature 1..20: note = Target: FXN; (-) strand; PAM type: NRG; PAM sequence: TGG
  source 1..20: mol_type = other DNA
aggtggctgtggtgaccaca

SEQ ID NO: 10872 - DNA, 20 bp, synthetic construct
  misc_feature 1..20: note = Description of Artificial Sequence: Synthetic oligonucleotide
  misc_feature 1..20: note = Target: FXN; (-) strand; PAM type: NRG; PAM sequence: TGG
  source 1..20: mol_type = other DNA
cttggactcggaggtggctg

SEQ ID NO: 10873 - DNA, 20 bp, synthetic construct
  misc_feature 1..20: note = Description of Artificial Sequence: Synthetic oligonucleotide
  misc_feature 1..20: note = Target: FXN; (-) strand; PAM type: NRG; PAM sequence: TGG
  source 1..20: mol_type = other DNA
ggaaatcttggactcggagg

SEQ ID NO: 10874 - DNA, 20 bp, synthetic construct
  misc_feature 1..20: note = Description of Artificial Sequence: Synthetic oligonucleotide
  misc_feature 1..20: note = Target: FXN; (-) strand; PAM type: NRG; PAM sequence: AGG
  source 1..20: mol_type = other DNA
cctggaaatcttggactcgg

SEQ ID NO: 10875 - DNA, 20 bp, synthetic construct
  misc_feature 1..20: note = Description of Artificial Sequence: Synthetic oligonucleotide
  misc_feature 1..20: note = Target: FXN; (-) strand; PAM type: NRG; PAM sequence: GAG
  source 1..20: mol_type = other DNA
acctggaaatcttggactcg

SEQ ID NO: 10876 - DNA, 20 bp, synthetic construct
  misc_feature 1..20: note = Description of Artificial Sequence: Synthetic oligonucleotide
  misc_feature 1..20: note = Target: FXN; (-) strand; PAM type: NRG; PAM sequence: CGG
  source 1..20: mol_type = other DNA
tcacctggaaatcttggact

SEQ ID NO: 10877 - DNA, 20 bp, synthetic construct
  misc_feature 1..20: note = Description of Artificial Sequence: Synthetic oligonucleotide
  misc_feature 1..20: note = Target: FXN; (-) strand; PAM type: NRG; PAM sequence: TGG
  source 1..20: mol_type = other DNA
tgcatgtcacctggaaatct

SEQ ID NO: 10878 - DNA, 20 bp, synthetic construct
  misc_feature 1..20: note = Description of Artificial Sequence: Synthetic oligonucleotide
  misc_feature 1..20: note = Target: FXN; (-) strand; PAM type: NRG; PAM sequence: TGG
  source 1..20: mol_type = other DNA
agaggagactgcatgtcacc

SEQ ID NO: 10879 - DNA, 20 bp, synthetic construct
  misc_feature 1..20: note = Description of Artificial Sequence: Synthetic oligonucleotide
  misc_feature 1..20: note = Target: FXN; (-) strand; PAM type: NRG; PAM sequence: GAG
  source 1..20: mol_type = other DNA
ttcctaaagctgggagagag

SEQ ID NO: 10880 - DNA, 20 bp, synthetic construct
  misc_feature 1..20: note = Description of Artificial Sequence: Synthetic oligonucleotide
  misc_feature 1..20: note = Target: FXN; (-) strand; PAM type: NRG; PAM sequence: AGG
  source 1..20: mol_type = other DNA
cattcctaaagctgggagag

SEQ ID NO: 10881 - DNA, 20 bp, synthetic construct
  misc_feature 1..20: note = Description of Artificial Sequence: Synthetic oligonucleotide
  misc_feature 1..20: note = Target: FXN; (-) strand; PAM type: NRG; PAM sequence: GAG
  source 1..20: mol_type = other DNA
ccattcctaaagctgggaga

SEQ ID NO: 10882 - DNA, 20 bp, synthetic construct
  misc_feature 1..20: note = Description of Artificial Sequence: Synthetic oligonucleotide
  misc_feature 1..20: note = Target: FXN; (-) strand; PAM type: NRG; PAM sequence: GAG
  source 1..20: mol_type = other DNA
agccattcctaaagctggga

SEQ ID NO: 10883 - DNA, 20 bp, synthetic construct
  misc_feature 1..20: note = Description of Artificial Sequence: Synthetic oligonucleotide
  misc_feature 1..20: note = Target: FXN; (-) strand; PAM type: NRG; PAM sequence: GAG
  source 1..20: mol_type = other DNA
gaagccattcctaaagctgg

SEQ ID NO: 10884 - DNA, 20 bp, synthetic construct
  misc_feature 1..20: note = Description of Artificial Sequence: Synthetic oligonucleotide
  misc_feature 1..20: note = Target: FXN; (-) strand; PAM type: NRG; PAM sequence: GGG
  source 1..20: mol_type = other DNA
aagaagccattcctaaagct

SEQ ID NO: 10885 - DNA, 20 bp, synthetic construct
  misc_feature 1..20: note = Description of Artificial Sequence: Synthetic oligonucleotide
  misc_feature 1..20: note = Target: FXN; (-) strand; PAM type: NRG; PAM sequence: TGG
  source 1..20: mol_type = other DNA
gaagaagccattcctaaagc

SEQ ID NO: 10886 - DNA, 20 bp, synthetic construct
  misc_feature 1..20: note = Description of Artificial Sequence: Synthetic oligonucleotide
  misc_feature 1..20: note = Target: FXN; (-) strand; PAM type: NRG; PAM sequence: AAG
  source 1..20: mol_type = other DNA
atcagaagaagccattccta

SEQ ID NO: 10887 - DNA, 20 bp, synthetic construct
  misc_feature 1..20: note = Description of Artificial Sequence: Synthetic oligonucleotide
  misc_feature 1..20: note = Target: FXN; (-) strand; PAM type: NRG; PAM sequence: AAG
  source 1..20: mol_type = other DNA
gtctgtgtgtagatcagaag

SEQ ID NO: 10888 - DNA, 20 bp, synthetic construct
  misc_feature 1..20: note = Description of Artificial Sequence: Synthetic oligonucleotide
  misc_feature 1..20: note = Target: FXN; (-) strand; PAM type: NRG; PAM sequence: AAG
  source 1..20: mol_type = other DNA
tgtgtctgtgtgtagatcag

SEQ ID NO: 10889 - DNA, 20 bp, synthetic construct
  misc_feature 1..20: note = Description of Artificial Sequence: Synthetic oligonucleotide
  misc_feature 1..20: note = Target: FXN; (-) strand; PAM type: NRG; PAM sequence: CAG
  source 1..20: mol_type = other DNA
gtctgtgtctgtgtgtagat

SEQ ID NO: 10890 - DNA, 20 bp, synthetic construct
  misc_feature 1..20: note = Description of Artificial Sequence: Synthetic oligonucleotide
  misc_feature 1..20: note = Target: FXN; (-) strand; PAM type: NRG; PAM sequence: TAG
  source 1..20: mol_type = other DNA
tgtgtgtctgtgtctgtgtg

SEQ ID NO: 10891 - DNA, 20 bp, synthetic construct
  misc_feature 1..20: note = Description of Artificial Sequence: Synthetic oligonucleotide
  misc_feature 1..20: note = Target: FXN; (-) strand; PAM type: NRG; PAM sequence: CAG
  source 1..20: mol_type = other DNA
tctgaatggagttacagttg

SEQ ID NO: 10892 - DNA, 20 bp, synthetic construct
  misc_feature 1..20: note = Description of Artificial Sequence: Synthetic oligonucleotide
  misc_feature 1..20: note = Target: FXN; (-) strand; PAM type: NRG; PAM sequence: CAG
  source 1..20: mol_type = other DNA
ctcttttctgaatggagtta

SEQ ID NO: 10893 - DNA, 20 bp, synthetic construct
  misc_feature 1..20: note = Description of Artificial Sequence: Synthetic oligonucleotide
  misc_feature 1..20: note = Target: FXN; (-) strand; PAM type: NRG; PAM sequence: GAG
  source 1..20: mol_type = other DNA
ctgtgcctcttttctgaatg

SEQ ID NO: 10894 - DNA, 20 bp, synthetic construct
  misc_feature 1..20: note = Description of Artificial Sequence: Synthetic oligonucleotide
  misc_feature 1..20: note = Target: FXN; (-) strand; PAM type: NRG; PAM sequence: TGG
  source 1..20: mol_type = other DNA
tgctgtgcctcttttctgaa

SEQ ID NO: 10895 - DNA, 20 bp, synthetic construct
  misc_feature 1..20: note = Description of Artificial Sequence: Synthetic oligonucleotide
  misc_feature 1..20: note = Target: FXN; (-) strand; PAM type: NRG; PAM sequence: TAG
  source 1..20: mol_type = other DNA
gctccagtgctgcgggcagc

SEQ ID NO: 10896 - DNA, 20 bp, synthetic construct
  misc_feature 1..20: note = Description of Artificial Sequence: Synthetic oligonucleotide
  misc_feature 1..20: note = Target: FXN; (-) strand; PAM type: NRG; PAM sequence: CAG
  source 1..20: mol_type = other DNA
cagggctccagtgctgcggg

SEQ ID NO: 10897 - DNA, 20 bp, synthetic construct
  misc_feature 1..20: note = Description of Artificial Sequence: Synthetic oligonucleotide
  misc_feature 1..20: note = Target: FXN; (-) strand; PAM type: NRG; PAM sequence: GGG
  source 1..20: mol_type = other DNA
cagcagggctccagtgctgc

SEQ ID NO: 10898 - DNA, 20 bp, synthetic construct
  misc_feature 1..20: note = Description of Artificial Sequence: Synthetic oligonucleotide
  misc_feature 1..20: note = Target: FXN; (-) strand; PAM type: NRG; PAM sequence: CGG
  source 1..20: mol_type = other DNA
ccagcagggctccagtgctg

SEQ ID NO: 10899 - DNA, 20 bp, synthetic construct
  misc_feature 1..20: note = Description of Artificial Sequence: Synthetic oligonucleotide
  misc_feature 1..20: note = Target: FXN; (-) strand; PAM type: NRG; PAM sequence: CAG
  source 1..20: mol_type = other DNA
agtgctgcccagcagggctc

SEQ ID NO: 10900 - DNA, 20 bp, synthetic construct
  misc_feature 1..20: note = Description of Artificial Sequence: Synthetic oligonucleotide
  misc_feature 1..20: note = Target: FXN; (-) strand; PAM type: NRG; PAM sequence: GGG
  source 1..20: mol_type = other DNA
tgatccagtgctgcccagca

SEQ ID NO: 10901 - DNA, 20 bp, synthetic construct
  misc_feature 1..20: note = Description of Artificial Sequence: Synthetic oligonucleotide
  misc_feature 1..20: note = Target: FXN; (-) strand; PAM type: NRG; PAM sequence: AGG
  source 1..20: mol_type = other DNA
ttgatccagtgctgcccagc

SEQ ID NO: 10902 - DNA, 20 bp, synthetic construct
  misc_feature 1..20: note = Description of Artificial Sequence: Synthetic oligonucleotide
  misc_feature 1..20: note = Target: FXN; (-) strand; PAM type: NRG; PAM sequence: CAG
  source 1..20: mol_type = other DNA
gttgatccagtgctgcccag

SEQ ID NO: 10903 - DNA, 20 bp, synthetic construct
  misc_feature 1..20: note = Description of Artificial Sequence: Synthetic oligonucleotide
  misc_feature 1..20: note = Target: FXN; (-) strand; PAM type: NRG; PAM sequence: CAG
  source 1..20: mol_type = other DNA
gaggttgatccagtgctgcc

SEQ ID NO: 10904 - DNA, 20 bp, synthetic construct
  misc_feature 1..20: note = Description of Artificial Sequence: Synthetic oligonucleotide
  misc_feature 1..20: note = Target: FXN; (-) strand; PAM type: NRG; PAM sequence: CAG
  source 1..20: mol_type = other DNA
tgccagggcagaggttgatc

SEQ ID NO: 10905 - DNA, 20 bp, synthetic construct
  misc_feature 1..20: note = Description of Artificial Sequence: Synthetic oligonucleotide
  misc_feature 1..20: note = Target: FXN; (-) strand; PAM type: NRG; PAM sequence: AGG
  source 1..20: mol_type = other DNA
atgctcctctgccagggcag

SEQ ID NO: 10906 - DNA, 20 bp, synthetic construct
  misc_feature 1..20: note = Description of Artificial Sequence: Synthetic oligonucleotide
  misc_feature 1..20: note = Target: FXN; (-) strand; PAM type: NRG; PAM sequence: GAG
  source 1..20: mol_type = other DNA
catgctcctctgccagggca

SEQ ID NO: 10907 - DNA, 20 bp, synthetic construct
  misc_feature 1..20: note = Description of Artificial Sequence: Synthetic oligonucleotide
  misc_feature 1..20: note = Target: FXN; (-) strand; PAM type: NRG; PAM sequence: CAG
  source 1..20: mol_type = other DNA
aacatgctcctctgccaggg

SEQ ID NO: 10908 - DNA, 20 bp, synthetic construct
  misc_feature 1..20: note = Description of Artificial Sequence: Synthetic oligonucleotide
  misc_feature 1..20: note = Target: FXN; (-) strand; PAM type: NRG; PAM sequence: GGG
  source 1..20: mol_type = other DNA
aggaacatgctcctctgcca

SEQ ID NO: 10909 - DNA, 20 bp, synthetic construct
  misc_feature 1..20: note = Description of Artificial Sequence: Synthetic oligonucleotide
  misc_feature 1..20: note = Target: FXN; (-) strand; PAM type: NRG; PAM sequence: AGG
  source 1..20: mol_type = other DNA
gaggaacatgctcctctgcc

SEQ ID NO: 10910 - DNA, 20 bp, synthetic construct
  misc_feature 1..20: note = Description of Artificial Sequence: Synthetic oligonucleotide
  misc_feature 1..20: note = Target: FXN; (-) strand; PAM type: NRG; PAM sequence: CAG
  source 1..20: mol_type = other DNA
ggaggaacatgctcctctgc

SEQ ID NO: 10911 - DNA, 20 bp, synthetic construct
  misc_feature 1..20: note = Description of Artificial Sequence: Synthetic oligonucleotide
  misc_feature 1..20: note = Target: FXN; (-) strand; PAM type: NRG; PAM sequence: AGG
  source 1..20: mol_type = other DNA
gctgaagcagggatttgtgg

SEQ ID NO: 10912 - DNA, 20 bp, synthetic construct
  misc_feature 1..20: note = Description of Artificial Sequence: Synthetic oligonucleotide
  misc_feature 1..20: note = Target: FXN; (-) strand; PAM type: NRG; PAM sequence: GAG
  source 1..20: mol_type = other DNA
ggctgaagcagggatttgtg

SEQ ID NO: 10913 - DNA, 20 bp, synthetic construct
  misc_feature 1..20: note = Description of Artificial Sequence: Synthetic oligonucleotide
  misc_feature 1..20: note = Target: FXN; (-) strand; PAM type: NRG; PAM sequence: TGG
  source 1..20: mol_type = other DNA
gaggctgaagcagggatttg

SEQ ID NO: 10914 - DNA, 20 bp, synthetic construct
  misc_feature 1..20: note = Description of Artificial Sequence: Synthetic oligonucleotide
  misc_feature 1..20: note = Target: FXN; (-) strand; PAM type: NRG; PAM sequence: GGG
  source 1..20: mol_type = other DNA
cctctcgagaggctgaagca

SEQ ID NO: 10915 - DNA, 20 bp, synthetic construct
  misc_feature 1..20: note = Description of Artificial Sequence: Synthetic oligonucleotide
  misc_feature 1..20: note = Target: FXN; (-) strand; PAM type: NRG; PAM sequence: AGG
  source 1..20: mol_type = other DNA
gcctctcgagaggctgaagc

SEQ ID NO: 10916 - DNA, 20 bp, synthetic construct
  misc_feature 1..20: note = Description of Artificial Sequence: Synthetic oligonucleotide
  misc_feature 1..20: note = Target: FXN; (-) strand; PAM type: NRG; PAM sequence: CAG
  source 1..20: mol_type = other DNA
agcctctcgagaggctgaag

SEQ ID NO: 10917 - DNA, 20 bp, synthetic construct
  misc_feature 1..20: note = Description of Artificial Sequence: Synthetic oligonucleotide
  misc_feature 1..20: note = Target: FXN; (-) strand; PAM type: NRG; PAM sequence: AAG
  source 1..20: mol_type = other DNA
aggagcctctcgagaggctg

SEQ ID NO: 10918 - DNA, 20 bp, synthetic construct
  misc_feature 1..20: note = Description of Artificial Sequence: Synthetic oligonucleotide
  misc_feature 1..20: note = Target: FXN; (-) strand; PAM type: NRG; PAM sequence: AGG
  source 1..20: mol_type = other DNA
acaaggaggagcctctcgag

SEQ ID NO: 10919 - DNA, 20 bp, synthetic construct
  misc_feature 1..20: note = Description of Artificial Sequence: Synthetic oligonucleotide
  misc_feature 1..20: note = Target: FXN; (-) strand; PAM type: NRG; PAM sequence: GAG
  source 1..20: mol_type = other DNA
gacaaggaggagcctctcga

SEQ ID NO: 10920 - DNA, 20 bp, synthetic construct
  misc_feature 1..20: note = Description of Artificial Sequence: Synthetic oligonucleotide
  misc_feature 1..20: note = Target: FXN; (-) strand; PAM type: NRG; PAM sequence: GAG
  source 1..20: mol_type = other DNA
cagacaaggaggagcctctc

SEQ ID NO: 10921 - DNA, 20 bp, synthetic construct
  misc_feature 1..20: note = Description of Artificial Sequence: Synthetic oligonucleotide
  misc_feature 1..20: note = Target: FXN; (-) strand; PAM type: NRG; PAM sequence: GAG
  source 1..20: mol_type = other DNA
ggaaaataacagacaaggag

SEQ ID NO: 10922 - DNA, 20 bp, synthetic construct
  misc_feature 1..20: note = Description of Artificial Sequence: Synthetic oligonucleotide
  misc_feature 1..20: note = Target: FXN; (-) strand; PAM type: NRG; PAM sequence: AGG
  source 1..20: mol_type = other DNA
aaggaaaataacagacaagg

SEQ ID NO: 10923 - DNA, 20 bp, synthetic construct
  misc_feature 1..20: note = Description of Artificial Sequence: Synthetic oligonucleotide
  misc_feature 1..20: note = Target: FXN; (-) strand; PAM type: NRG; PAM sequence: GAG
  source 1..20: mol_type = other DNA
caaggaaaataacagacaag

SEQ ID NO: 10924 - DNA, 20 bp, synthetic construct
  misc_feature 1..20: note = Description of Artificial Sequence: Synthetic oligonucleotide
  misc_feature 1..20: note = Target: FXN; (-) strand; PAM type: NRG; PAM sequence: AGG
  source 1..20: mol_type = other DNA
gccaaggaaaataacagaca

SEQ ID NO: 10925 - DNA, 20 bp, synthetic construct
  misc_feature 1..20: note = Description of Artificial Sequence: Synthetic oligonucleotide
  misc_feature 1..20: note = Target: FXN; (-) strand; PAM type: NRG; PAM sequence: AAG
  source 1..20: mol_type = other DNA
ggccaaggaaaataacagac

SEQ ID NO: 10926 - DNA, 20 bp, synthetic construct
  misc_feature 1..20: note = Description of Artificial Sequence: Synthetic oligonucleotide
  misc_feature 1..20: note = Target: FXN; (-) strand; PAM type: NRG; PAM sequence: CAG
  source 1..20: mol_type = other DNA
cttgtggccaaggaaaataa

SEQ ID NO: 10927 - DNA, 20 bp, synthetic construct
  misc_feature 1..20: note = Description of Artificial Sequence: Synthetic oligonucleotide
  misc_feature 1..20: note = Target: FXN; (-) strand; PAM type: NRG; PAM sequence: AGG
  source 1..20: mol_type = other DNA
gcctgcctgccttgtggcca

SEQ ID NO: 10928 - DNA, 20 bp, synthetic construct
  misc_feature 1..20: note = Description of Artificial Sequence: Synthetic oligonucleotide
  misc_feature 1..20: note = Target: FXN; (-) strand; PAM type: NRG; PAM sequence: AAG
  source 1..20: mol_type = other DNA
tgcctgcctgccttgtggcc

SEQ ID NO: 10929 - DNA, 20 bp, synthetic construct
  misc_feature 1..20: note = Description of Artificial Sequence: Synthetic oligonucleotide
  misc_feature 1..20: note = Target: FXN; (-) strand; PAM type: NRG; PAM sequence: TGG
  source 1..20: mol_type = other DNA
cccactgcctgcctgccttg

SEQ ID NO: 10930 - DNA, 20 bp, synthetic construct
  misc_feature 1..20: note = Description of Artificial Sequence: Synthetic oligonucleotide
  misc_feature 1..20: note = Target: FXN; (-) strand; PAM type: NRG; PAM sequence: GGG
  source 1..20: mol_type = other DNA
aggctccttgccccggagga

SEQ ID NO: 10931 - DNA, 20 bp, synthetic construct
  misc_feature 1..20: note = Description of Artificial Sequence: Synthetic oligonucleotide
  misc_feature 1..20: note = Target: FXN; (-) strand; PAM type: NRG; PAM sequence: AGG
  source 1..20: mol_type = other DNA
aaggctccttgccccggagg

SEQ ID NO: 10932 - DNA, 20 bp, synthetic construct
  misc_feature 1..20: note = Description of Artificial Sequence: Synthetic oligonucleotide
  misc_feature 1..20: note = Target: FXN; (-) strand; PAM type: NRG; PAM sequence: GAG
  source 1..20: mol_type = other DNA
gaaggctccttgccccggag

SEQ ID NO: 10933 - DNA, 20 bp, synthetic construct
  misc_feature 1..20: note = Description of Artificial Sequence: Synthetic oligonucleotide
  misc_feature 1..20: note = Target: FXN; (-) strand; PAM type: NRG; PAM sequence: AGG
  source 1..20: mol_type = other DNA
gtgaaggctccttgccccgg

SEQ ID NO: 10934 - DNA, 20 bp, synthetic construct
  misc_feature 1..20: note = Description of Artificial Sequence: Synthetic oligonucleotide
  misc_feature 1..20: note = Target: FXN; (-) strand; PAM type: NRG; PAM sequence: GAG
  source 1..20: mol_type = other DNA
tgtgaaggctccttgccccg

SEQ ID NO: 10935 - DNA, 20 bp, synthetic construct
  misc_feature 1..20: note = Description of Artificial Sequence: Synthetic oligonucleotide
  misc_feature 1..20: note = Target: FXN; (-) strand; PAM type: NRG; PAM sequence: CGG
  source 1..20: mol_type = other DNA
gctgtgaaggctccttgccc

SEQ ID NO: 10936 - DNA, 20 bp, synthetic construct
  misc_feature 1..20: note = Description of Artificial Sequence: Synthetic oligonucleotide
  misc_feature 1..20: note = Target: FXN; (-) strand; PAM type: NRG; PAM sequence: AGG
  source 1..20: mol_type = other DNA
tagcaggaagtgggctgtga

SEQ ID NO: 10937 - DNA, 20 bp, synthetic construct
  misc_feature 1..20: note = Description of Artificial Sequence: Synthetic oligonucleotide
  misc_feature 1..20: note = Target: FXN; (-) strand; PAM type: NRG; PAM sequence: AAG
  source 1..20: mol_type = other DNA
ttagcaggaagtgggctgtg

SEQ ID NO: 10938 - DNA, 20 bp, synthetic construct
  misc_feature 1..20: note = Description of Artificial Sequence: Synthetic oligonucleotide
  misc_feature 1..20: note = Target: FXN; (-) strand; PAM type: NRG; PAM sequence: GGG
  source 1..20: mol_type = other DNA
aactgttattagcaggaagt

SEQ ID NO: 10939 - DNA, 20 bp, synthetic construct
  misc_feature 1..20: note = Description of Artificial Sequence: Synthetic oligonucleotide
  misc_feature 1..20: note = Target: FXN; (-) strand; PAM type: NRG; PAM sequence: TGG
  source 1..20: mol_type = other DNA
aaactgttattagcaggaag

SEQ ID NO: 10940 - DNA, 20 bp, synthetic construct
  misc_feature 1..20: note = Description of Artificial Sequence: Synthetic oligonucleotide
  misc_feature 1..20: note = Target: FXN; (-) strand; PAM type: NRG; PAM sequence: AAG
  source 1..20: mol_type = other DNA
cccaaactgttattagcagg

SEQ ID NO: 10941 - DNA, 20 bp, synthetic construct
  misc_feature 1..20: note = Description of Artificial Sequence: Synthetic oligonucleotide
  misc_feature 1..20: note = Target: FXN; (-) strand; PAM type: NRG; PAM sequence: AGG
  source 1..20: mol_type = other DNA
aaccccaaactgttattagc

SEQ ID NO: 10942 - DNA, 20 bp, synthetic construct
  misc_feature 1..20: note = Description of Artificial Sequence: Synthetic oligonucleotide
  misc_feature 1..20: note = Target: FXN; (-) strand; PAM type: NRG; PAM sequence: CAG
  source 1..20: mol_type = other DNA
gaaccccaaactgttattag

SEQ ID NO: 10943 - DNA, 20 bp, synthetic construct
  misc_feature 1..20: note = Description of Artificial Sequence: Synthetic oligonucleotide
  misc_feature 1..20: note = Target: FXN; (-) strand; PAM type: NRG; PAM sequence: TAG
  source 1..20: mol_type = other DNA
gtggaaccccaaactgttat

SEQ ID NO: 10944 - DNA, 20 bp, synthetic construct
  misc_feature 1..20: note = Description of Artificial Sequence: Synthetic oligonucleotide
  misc_feature 1..20: note = Target: FXN; (-) strand; PAM type: NRG; PAM sequence: TGG
  source 1..20: mol_type = other DNA
tggagtcttaaaacaccctg

SEQ ID NO: 10945 - DNA, 20 bp, synthetic construct
  misc_feature 1..20: note = Description of Artificial Sequence: Synthetic oligonucleotide
  misc_feature 1..20: note = Target: FXN; (-) strand; PAM type: NRG; PAM sequence: GAG
  source 1..20: mol_type = other DNA
tggcctaaaatagctgactg

SEQ ID NO: 10946 - DNA, 20 bp, synthetic construct
  misc_feature 1..20: note = Description of Artificial Sequence: Synthetic oligonucleotide
  misc_feature 1..20: note = Target: FXN; (-) strand; PAM type: NRG; PAM sequence: TGG
  source 1..20: mol_type = other DNA
tctggcctaaaatagctgac

SEQ ID NO: 10947 - DNA, 20 bp, synthetic construct
  misc_feature 1..20: note = Description of Artificial Sequence: Synthetic oligonucleotide
  misc_feature 1..20: note = Target: FXN; (-) strand; PAM type: NRG; PAM sequence: TAG
  source 1..20: mol_type = other DNA
gaaatgagtctggcctaaaa

SEQ ID NO: 10948 - DNA, 20 bp, synthetic construct
  misc_feature 1..20: note = Description of Artificial Sequence: Synthetic oligonucleotide
  misc_feature 1..20: note = Target: FXN; (-) strand; PAM type: NRG; PAM sequence: TGG
  source 1..20: mol_type = other DNA
gagagagagagaaatgagtc

SEQ ID NO: 10949 - DNA, 20 bp, synthetic construct
  misc_feature 1..20: note = Description of Artificial Sequence: Synthetic oligonucleotide
  misc_feature 1..20: note = Target: FXN; (-) strand; PAM type: NRG; PAM sequence: GAG
  source 1..20: mol_type = other DNA
agagagagagagagagaaat

SEQ ID NO: 10950 - DNA, 20 bp, synthetic construct
  misc_feature 1..20: note = Description of Artificial Sequence: Synthetic oligonucleotide
  misc_feature 1..20: note = Target: FXN; (-) strand; PAM type: NRG; PAM sequence: GAG
  source 1..20: mol_type = other DNA
aaaaaaaagagagagagaga

SEQ ID NO: 10951 - DNA, 20 bp, synthetic construct
  misc_feature 1..20: note = Description of Artificial Sequence: Synthetic oligonucleotide
  misc_feature 1..20: note = Target: FXN; (-) strand; PAM type: NRG; PAM sequence: GAG
  source 1..20: mol_type = other DNA
gaaaaaaaaagagagagaga

SEQ ID NO: 10952 - DNA, 20 bp, synthetic construct
  misc_feature 1..20: note = Description of Artificial Sequence: Synthetic oligonucleotide
  misc_feature 1..20: note = Target: FXN; (-) strand; PAM type: NRG; PAM sequence: GAG
  source 1..20: mol_type = other DNA
aagaaaaaaaaagagagaga

SEQ ID NO: 10953 - DNA, 20 bp, synthetic construct
  misc_feature 1..20: note = Description of Artificial Sequence: Synthetic oligonucleotide
  misc_feature 1..20: note = Target: FXN; (-) strand; PAM type: NRG; PAM sequence: GAG
  source 1..20: mol_type = other DNA
aaaagaaaaaaaaagagaga

SEQ ID NO: 10954 - DNA, 20 bp, synthetic construct
  misc_feature 1..20: note = Description of Artificial Sequence: Synthetic oligonucleotide
  misc_feature 1..20: note = Target: FXN; (-) strand; PAM type: NRG; PAM sequence: GAG
  source 1..20: mol_type = other DNA
ataaaagaaaaaaaaagaga

SEQ ID NO: 10955 - DNA, 20 bp, synthetic construct
  misc_feature 1..20: note = Description of Artificial Sequence: Synthetic oligonucleotide
  misc_feature 1..20: note = Target: FXN; (-) strand; PAM type: NRG; PAM sequence: GAG
  source 1..20: mol_type = other DNA
tcataaaagaaaaaaaaaga

SEQ ID NO: 10956 - DNA, 20 bp, synthetic construct
  misc_feature 1..20: note = Description of Artificial Sequence: Synthetic oligonucleotide
  misc_feature 1..20: note = Target: FXN; (-) strand; PAM type: NRG; PAM sequence: GAG
  source 1..20: mol_type = other DNA
tttcataaaagaaaaaaaaa

SEQ ID NO: 10957 - DNA, 20 bp, synthetic construct
  misc_feature 1..20: note = Description of Artificial Sequence: Synthetic oligonucleotide
  misc_feature 1..20: note = Target: FXN; (-) strand; PAM type: NRG; PAM sequence: AAG
  source 1..20: mol_type = other DNA
gatttcataaaagaaaaaaa

SEQ ID NO: 10958 - DNA, 20 bp, synthetic construct
  misc_feature 1..20: note = Description of Artificial Sequence: Synthetic oligonucleotide
  misc_feature 1..20: note = Target: FXN; (-) strand; PAM type: NRG; PAM sequence: AAG
  source 1..20: mol_type = other DNA
ctcagggtgtgatttcataa

SEQ ID NO: 10959 - DNA, 20 bp, synthetic construct
  misc_feature 1..20: note = Description of Artificial Sequence: Synthetic oligonucleotide
  misc_feature 1..20: note = Target: FXN; (-) strand; PAM type: NRG; PAM sequence: GGG
  source 1..20: mol_type = other DNA
gcactccagcctgggtctca

SEQ ID NO: 10960 - DNA, 20 bp, synthetic construct
  misc_feature 1..20: note = Description of Artificial Sequence: Synthetic oligonucleotide
  misc_feature 1..20: note = Target: FXN; (-) strand; PAM type: NRG; PAM sequence: AGG
  source 1..20: mol_type = other DNA
tgcactccagcctgggtctc

SEQ ID NO: 10961 - DNA, 20 bp, synthetic construct
  misc_feature 1..20: note = Description of Artificial Sequence: Synthetic oligonucleotide
  misc_feature 1..20: note = Target: FXN; (-) strand; PAM type: NRG; PAM sequence: CAG
  source 1..20: mol_type = other DNA
ctgcactccagcctgggtct

SEQ ID NO: 10962 - DNA, 20 bp, synthetic construct
  misc_feature 1..20: note = Description of Artificial Sequence: Synthetic oligonucleotide
  misc_feature 1..20: note = Target: FXN; (-) strand; PAM type: NRG; PAM sequence: GGG
  source 1..20: mol_type = other DNA
gcaccactgcactccagcct

SEQ ID NO: 10963 - DNA, 20 bp, synthetic construct
  misc_feature 1..20: note = Description of Artificial Sequence: Synthetic oligonucleotide
  misc_feature 1..20: note = Target: FXN; (-) strand; PAM type: NRG; PAM sequence: TGG
  source 1..20: mol_type = other DNA
cgcaccactgcactccagcc

SEQ ID NO: 10964 - DNA, 20 bp, synthetic construct
  misc_feature 1..20: note = Description of Artificial Sequence: Synthetic oligonucleotide
  misc_feature 1..20: note = Target: FXN; (-) strand; PAM type: NRG; PAM sequence: CAG
  source 1..20: mol_type = other DNA
gagatcgcaccactgcactc

SEQ ID NO: 10965 - DNA, 20 bp, synthetic construct
  misc_feature 1..20: note = Description of Artificial Sequence: Synthetic oligonucleotide
  misc_feature 1..20: note = Target: FXN; (-) strand; PAM type: NRG; PAM sequence: GAG
  source 1..20: mol_type = other DNA
ggcggaggctgcagtgagcc

SEQ ID NO: 10966 - DNA, 20 bp, synthetic construct
  misc_feature 1..20: note = Description of Artificial Sequence: Synthetic oligonucleotide
  misc_feature 1..20: note = Target: FXN; (-) strand; PAM type: NRG; PAM sequence: GAG
  source 1..20: mol_type = other DNA
cgggaggcggaggctgcagt

SEQ ID NO: 10967 - DNA, 20 bp, synthetic construct
  misc_feature 1..20: note = Description of Artificial Sequence: Synthetic oligonucleotide
  misc_feature 1..20: note = Target: FXN; (-) strand; PAM type: NRG; PAM sequence: CAG
  source 1..20: mol_type = other DNA
aacccgggaggcggaggctg

SEQ ID NO: 10968 - DNA, 20 bp, synthetic construct
  misc_feature 1..20: note = Description of Artificial Sequence: Synthetic oligonucleotide
  misc_feature 1..20: note = Target: FXN; (-) strand; PAM type: NRG; PAM sequence: AGG
  source 1..20: mol_type = other DNA
tgcttgaacccgggaggcgg

SEQ ID NO: 10969 - DNA, 20 bp, synthetic construct
  misc_feature 1..20: note = Description of Artificial Sequence: Synthetic oligonucleotide
  misc_feature 1..20: note = Target: FXN; (-) strand; PAM type: NRG; PAM sequence: GAG
  source 1..20: mol_type = other DNA
ttgcttgaacccgggaggcg

SEQ ID NO: 10970 - DNA, 20 bp, synthetic construct
  misc_feature 1..20: note = Description of Artificial Sequence: Synthetic oligonucleotide
  misc_feature 1..20: note = Target: FXN; (-) strand; PAM type: NRG; PAM sequence: CGG
  source 1..20: mol_type = other DNA
gattgcttgaacccgggagg

SEQ ID NO: 10971 - DNA, 20 bp, synthetic construct
  misc_feature 1..20: note = Description of Artificial Sequence: Synthetic oligonucleotide
  misc_feature 1..20: note = Target: FXN; (-) strand; PAM type: NRG; PAM sequence: AGG
  source 1..20: mol_type = other DNA
gaggattgcttgaacccggg

SEQ ID NO: 10972 - DNA, 20 bp, synthetic construct
  misc_feature 1..20: note = Description of Artificial Sequence: Synthetic oligonucleotide
  misc_feature 1..20: note = Target: FXN; (-) strand; PAM type: NRG; PAM sequence: GAG
  source 1..20: mol_type = other DNA
ggaggattgcttgaacccgg

SEQ ID NO: 10973 - DNA, 20 bp, synthetic construct
  misc_feature 1..20: note = Description of Artificial Sequence: Synthetic oligonucleotide
  misc_feature 1..20: note = Target: FXN; (-) strand; PAM type: NRG; PAM sequence: GGG
  source 1..20: mol_type = other DNA
caggaggattgcttgaaccc

SEQ ID NO: 10974 - DNA, 20 bp, synthetic construct
  misc_feature 1..20: note = Description of Artificial Sequence: Synthetic oligonucleotide
  misc_feature 1..20: note = Target: FXN; (-) strand; PAM type: NRG; PAM sequence: CGG
  source 1..20: mol_type = other DNA
gcaggaggattgcttgaacc

SEQ ID NO: 10975 - DNA, 20 bp, synthetic construct
  misc_feature 1..20: note = Description of Artificial Sequence: Synthetic oligonucleotide
  misc_feature 1..20: note = Target: FXN; (-) strand; PAM type: NRG; PAM sequence: AGG
  source 1..20: mol_type = other DNA
actcaggaggctgaggcagg

SEQ ID NO: 10976 - DNA, 20 bp, synthetic construct
  misc_feature 1..20: note = Description of Artificial Sequence: Synthetic oligonucleotide
  misc_feature 1..20: note = Target: FXN; (-) strand; PAM type: NRG; PAM sequence: GAG
  source 1..20: mol_type = other DNA
tactcaggaggctgaggcag

SEQ ID NO: 10977 - DNA, 20 bp, synthetic construct
  misc_feature 1..20: note = Description of Artificial Sequence: Synthetic oligonucleotide
  misc_feature 1..20: note = Target: FXN; (-) strand; PAM type: NRG; PAM sequence: AGG
  source 1..20: mol_type = other DNA
gctactcaggaggctgaggc

SEQ ID NO: 10978 - DNA, 20 bp, synthetic construct
  misc_feature 1..20: note = Description of Artificial Sequence: Synthetic oligonucleotide
  misc_feature 1..20: note = Target: FXN; (-) strand; PAM type: NRG; PAM sequence: CAG
  source 1..20: mol_type = other DNA
agctactcaggaggctgagg

SEQ ID NO: 10979 - DNA, 20 bp, synthetic construct
  misc_feature 1..20: note = Description of Artificial Sequence: Synthetic oligonucleotide
  misc_feature 1..20: note = Target: FXN; (-) strand; PAM type: NRG; PAM sequence: AGG
  source 1..20: mol_type = other DNA
cccagctactcaggaggctg

SEQ ID NO: 10980 - DNA, 20 bp, synthetic construct
  misc_feature 1..20: note = Description of Artificial Sequence: Synthetic oligonucleotide
  misc_feature 1..20: note = Target: FXN; (-) strand; PAM type: NRG; PAM sequence: GAG
  source 1..20: mol_type = other DNA
tcccagctactcaggaggct

SEQ ID NO: 10981 - DNA, 20 bp, synthetic construct
  misc_feature 1..20: note = Description of Artificial Sequence: Synthetic oligonucleotide
  misc_feature 1..20: note = Target: FXN; (-) strand; PAM type: NRG; PAM sequence: AGG
  source 1..20: mol_type = other DNA
tatagtcccagctactcagg

SEQ ID NO: 10982 - DNA, 20 bp, synthetic construct
  misc_feature 1..20: note = Description of Artificial Sequence: Synthetic oligonucleotide
  misc_feature 1..20: note = Target: FXN; (-) strand; PAM type: NRG; PAM sequence: GAG
  source 1..20: mol_type = other DNA
ctatagtcccagctactcag

SEQ ID NO: 10983 - DNA, 20 bp, synthetic construct
  misc_feature 1..20: note = Description of Artificial Sequence: Synthetic oligonucleotide
  misc_feature 1..20: note = Target: FXN; (-) strand; PAM type: NRG; PAM sequence: AGG
  source 1..20: mol_type = other DNA
gcctatagtcccagctactc

SEQ ID NO: 10984 - DNA, 20 bp, synthetic construct
  misc_feature 1..20: note = Description of Artificial Sequence: Synthetic oligonucleotide
  misc_feature 1..20: note = Target: FXN; (-) strand; PAM type: NRG; PAM sequence: CAG
  source 1..20: mol_type = other DNA
cgcctatagtcccagctact

SEQ ID NO: 10985 - DNA, 20 bp, synthetic construct
  misc_feature 1..20: note = Description of Artificial Sequence: Synthetic oligonucleotide
  misc_feature 1..20: note = Target: FXN; (-) strand; PAM type: NRG; PAM sequence: CAG
  source 1..20: mol_type = other DNA
gcactgcacgcctatagtcc

SEQ ID NO: 10986 - DNA, 20 bp, synthetic construct
  misc_feature 1..20: note = Description of Artificial Sequence: Synthetic oligonucleotide
  misc_feature 1..20: note = Target: FXN; (-) strand; PAM type: NRG; PAM sequence: TAG
  source 1..20: mol_type = other DNA
ggtgtggcactgcacgccta

SEQ ID NO: 10987 - DNA, 20 bp, synthetic construct
  misc_feature 1..20: note = Description of Artificial Sequence: Synthetic oligonucleotide
  misc_feature 1..20: note = Target: FXN; (-) strand; PAM type: NRG; PAM sequence: TGG
  source 1..20: mol_type = other DNA
atacaaaaattagctaggtg

SEQ ID NO: 10988 - DNA, 20 bp, synthetic construct
  misc_feature 1..20: note = Description of Artificial Sequence: Synthetic oligonucleotide
  misc_feature 1..20: note = Target: FXN; (-) strand; PAM type: NRG; PAM sequence: AGG
  source 1..20: mol_type = other DNA
taaaaatacaaaaattagct

SEQ ID NO: 10989 - DNA, 20 bp, synthetic construct
  misc_feature 1..20: note = Description of Artificial Sequence: Synthetic oligonucleotide
  misc_feature 1..20: note = Target: FXN; (-) strand; PAM type: NRG; PAM sequence: TAG
  source 1..20: mol_type = other DNA
ctaaaaatacaaaaattagc

SEQ ID NO: 10990 - DNA, 20 bp, synthetic construct
  misc_feature 1..20: note = Description of Artificial Sequence: Synthetic oligonucleotide
  misc_feature 1..20: note = Target: FXN; (-) strand; PAM type: NRG; PAM sequence: TAG
  source 1..20: mol_type = other DNA
tttactaaaaatacaaaaat

SEQ ID NO: 10991 - DNA, 20 bp, synthetic construct
  misc_feature 1..20: note = Description of Artificial Sequence: Synthetic oligonucleotide
  misc_feature 1..20: note = Target: FXN; (-) strand; PAM type: NRG; PAM sequence: TGG
  source 1..20: mol_type = other DNA
caagaccagcctggccaaca

SEQ ID NO: 10992 - DNA, 20 bp, synthetic construct
  misc_feature 1..20: note = Description of Artificial Sequence: Synthetic oligonucleotide
  misc_feature 1..20: note = Target: FXN; (-) strand; PAM type: NRG; PAM sequence: TGG
  source 1..20: mol_type = other DNA
tcaggagttcaagaccagcc

SEQ ID NO: 10993 - DNA, 20 bp, synthetic construct
  misc_feature 1..20: note = Description of Artificial Sequence: Synthetic oligonucleotide
  misc_feature 1..20: note = Target: FXN; (-) strand; PAM type: NRG; PAM sequence: CAG
  source 1..20: mol_type = other DNA
tgaggtcaggagttcaagac

SEQ ID NO: 10994 - DNA, 20 bp, synthetic construct
  misc_feature 1..20: note = Description of Artificial Sequence: Synthetic oligonucleotide
  misc_feature 1..20: note = Target: FXN; (-) strand; PAM type: NRG; PAM sequence: AAG
  source 1..20: mol_type = other DNA
tcatctgaggtcaggagttc

SEQ ID NO: 10995 - DNA, 20 bp, synthetic construct
  misc_feature 1..20: note = Description of Artificial Sequence: Synthetic oligonucleotide
  misc_feature 1..20: note = Target: FXN; (-) strand; PAM type: NRG; PAM sequence: GAG
  source 1..20: mol_type = other DNA
ggcggatcatctgaggtcag

SEQ ID NO: 10996 - DNA, 20 bp, synthetic construct
  misc_feature 1..20: note = Description of Artificial Sequence: Synthetic oligonucleotide
  misc_feature 1..20: note = Target: FXN; (-) strand; PAM type: NRG; PAM sequence: AGG
  source 1..20: mol_type = other DNA
cgggcggatcatctgaggtc

SEQ ID NO: 10997 - DNA, 20 bp, synthetic construct
  misc_feature 1..20: note = Description of Artificial Sequence: Synthetic oligonucleotide
  misc_feature 1..20: note = Target: FXN; (-) strand; PAM type: NRG; PAM sequence: CAG
  source 1..20: mol_type = other DNA
gcgggcggatcatctgaggt

SEQ ID NO: 10998 - DNA, 20 bp, synthetic construct
  misc_feature 1..20: note = Description of Artificial Sequence: Synthetic oligonucleotide
  misc_feature 1..20: note = Target: FXN; (-) strand; PAM type: NRG; PAM sequence: AGG
  source 1..20: mol_type = other DNA
cgaggcgggcggatcatctg

SEQ ID NO: 10999 - DNA, 20 bp, synthetic construct
  misc_feature 1..20: note = Description of Artificial Sequence: Synthetic oligonucleotide
  misc_feature 1..20: note = Target: FXN; (-) strand; PAM type: NRG; PAM sequence: GAG
  source 1..20: mol_type = other DNA
ccgaggcgggcggatcatct

SEQ ID NO: 11000 - DNA, 20 bp, synthetic construct
  misc_feature 1..20: note = Description of Artificial Sequence: Synthetic oligonucleotide
  misc_feature 1..20: note = Target: FXN; (-) strand; PAM type: NRG; PAM sequence: CGG
  source 1..20: mol_type = other DNA
ctttgggaggccgaggcggg

SEQ ID NO: 11001 - DNA, 20 bp, synthetic construct
  misc_feature 1..20: note = Description of Artificial Sequence: Synthetic oligonucleotide
  misc_feature 1..20: note = Target: FXN; (-) strand; PAM type: NRG; PAM sequence: GGG
  source 1..20: mol_type = other DNA
gcactttgggaggccgaggc

SEQ ID NO: 11002 - DNA, 20 bp, synthetic construct
  misc_feature 1..20: note = Description of Artificial Sequence: Synthetic oligonucleotide
  misc_feature 1..20: note = Target: FXN; (-) strand; PAM type: NRG; PAM sequence: CGG
  source 1..20: mol_type = other DNA
agcactttgggaggccgagg

SEQ ID NO: 11003 - DNA, 20 bp, synthetic construct
  misc_feature 1..20: note = Description of Artificial Sequence: Synthetic oligonucleotide
  misc_feature 1..20: note = Target: FXN; (-) strand; PAM type: NRG; PAM sequence: AGG
  source 1..20: mol_type = other DNA
cccagcactttgggaggccg

SEQ ID NO: 11004 - DNA, 20 bp, synthetic construct
  misc_feature 1..20: note = Description of Artificial Sequence: Synthetic oligonucleotide
  misc_feature 1..20: note = Target: FXN; (-) strand; PAM type: NRG; PAM sequence: GAG
  source 1..20: mol_type = other DNA
tcccagcactttgggaggcc

SEQ ID NO: 11005 - DNA, 20 bp, synthetic construct
  misc_feature 1..20: note = Description of Artificial Sequence: Synthetic oligonucleotide
  misc_feature 1..20: note = Target: FXN; (-) strand; PAM type: NRG; PAM sequence: AGG
  source 1..20: mol_type = other DNA
agtaatcccagcactttggg

SEQ ID NO: 11006 - DNA, 20 bp, synthetic construct
  misc_feature 1..20: note = Description of Artificial Sequence: Synthetic oligonucleotide
  misc_feature 1..20: note = Target: FXN; (-) strand; PAM type: NRG; PAM sequence: GAG
  source 1..20: mol_type = other DNA
cagtaatcccagcactttgg

SEQ ID NO: 11007 - DNA, 20 bp, synthetic construct
  misc_feature 1..20: note = Description of Artificial Sequence: Synthetic oligonucleotide
  misc_feature 1..20: note = Target: FXN; (-) strand; PAM type: NRG; PAM sequence: GGG
  source 1..20: mol_type = other DNA
gccagtaatcccagcacttt

SEQ ID NO: 11008 - DNA, 20 bp, synthetic construct
  misc_feature 1..20: note = Description of Artificial Sequence: Synthetic oligonucleotide
  misc_feature 1..20: note = Target: FXN; (-) strand; PAM type: NRG; PAM sequence: TGG
  source 1..20: mol_type = other DNA
tgccagtaatcccagcactt

SEQ ID NO: 11009 - DNA, 20 bp, synthetic construct
  misc_feature 1..20: note = Description of Artificial Sequence: Synthetic oligonucleotide
  misc_feature 1..20: note = Target: FXN; (-) strand; PAM type: NRG; PAM sequence: CAG
  source 1..20: mol_type = other DNA
gtggctcatgccagtaatcc

SEQ ID NO: 11010 - DNA, 20 bp, synthetic construct
  misc_feature 1..20: note = Description of Artificial Sequence: Synthetic oligonucleotide
  misc_feature 1..20: note = Target: FXN; (-) strand; PAM type: NRG; PAM sequence: CAG
  source 1..20: mol_type = other DNA
ctgggcgcagtggctcatgc

SEQ ID NO: 11011 - DNA, 20 bp, synthetic construct
  misc_feature 1..20: note = Description of Artificial Sequence: Synthetic oligonucleotide
  misc_feature 1..20: note = Target: FXN; (-) strand; PAM type: NRG; PAM sequence: TGG
  source 1..20: mol_type = other DNA
tgagtctgggctgggcgcag

SEQ ID NO: 11012 - DNA, 20 bp, synthetic construct
  misc_feature 1..20: note = Description of Artificial Sequence: Synthetic oligonucleotide
  misc_feature 1..20: note = Target: FXN; (-) strand; PAM type: NRG; PAM sequence: CAG
  source 1..20: mol_type = other DNA
aaatgagtctgggctgggcg

SEQ ID NO: 11013 - DNA, 20 bp, synthetic construct
  misc_feature 1..20: note = Description of Artificial Sequence: Synthetic oligonucleotide
  misc_feature 1..20: note = Target: FXN; (-) strand; PAM type: NRG; PAM sequence: GGG
  source 1..20: mol_type = other DNA
aagaaaaatgagtctgggct

SEQ ID NO: 11014 - DNA, 20 bp, synthetic construct
  misc_feature 1..20: note = Description of Artificial Sequence: Synthetic oligonucleotide
  misc_feature 1..20: note = Target: FXN; (-) strand; PAM type: NRG; PAM sequence: TGG
  source 1..20: mol_type = other DNA
aaagaaaaatgagtctgggc

SEQ ID NO: 11015 - DNA, 20 bp, synthetic construct
  misc_feature 1..20: note = Description of Artificial Sequence: Synthetic oligonucleotide
  misc_feature 1..20: note = Target: FXN; (-) strand; PAM type: NRG; PAM sequence: GGG
  source 1..20: mol_type = other DNA
tctcaaagaaaaatgagtct

SEQ ID NO: 11016 - DNA, 20 bp, synthetic construct
  misc_feature 1..20: note = Description of Artificial Sequence: Synthetic oligonucleotide
  misc_feature 1..20: note = Target: FXN; (-) strand; PAM type: NRG; PAM sequence: TGG
  source 1..20: mol_type = other DNA
ctctcaaagaaaaatgagtc

SEQ ID NO: 11017 - DNA, 20 bp, synthetic construct
  misc_feature 1..20: note = Description of Artificial Sequence: Synthetic oligonucleotide
  misc_feature 1..20: note = Target: FXN; (-) strand; PAM type: NRG; PAM sequence: GAG
  source 1..20: mol_type = other DNA
gcctactctcaaagaaaaat

SEQ ID NO: 11018 - DNA, 20 bp, synthetic construct
  misc_feature 1..20: note = Description of Artificial Sequence: Synthetic oligonucleotide
  misc_feature 1..20: note = Target: FXN; (-) strand; PAM type: NRG; PAM sequence: AAG
  source 1..20: mol_type = other DNA
ttgggaaaagcctactctca

SEQ ID NO: 11019 - DNA, 20 bp, synthetic construct
  misc_feature 1..20: note = Description of Artificial Sequence: Synthetic oligonucleotide
  misc_feature 1..20: note = Target: FXN; (-) strand; PAM type: NRG; PAM sequence: AAG
  source 1..20: mol_type = other DNA
cagaagcctacttttgggaa

SEQ ID NO: 11020 - DNA, 20 bp, synthetic construct
  misc_feature 1..20: note = Description of Artificial Sequence: Synthetic oligonucleotide
  misc_feature 1..20: note = Target: FXN; (-) strand; PAM type: NRG; PAM sequence: GGG
  source 1..20: mol_type = other DNA
tagctcagaagcctactttt

SEQ ID NO: 11021 - DNA, 20 bp, synthetic construct
  misc_feature 1..20: note = Description of Artificial Sequence: Synthetic oligonucleotide
  misc_feature 1..20: note = Target: FXN; (-) strand; PAM type: NRG; PAM sequence: TGG
  source 1..20: mol_type = other DNA
atagctcagaagcctacttt

SEQ ID NO: 11022 - DNA, 20 bp, synthetic construct
  misc_feature 1..20: note = Description of Artificial Sequence: Synthetic oligonucleotide
  misc_feature 1..20: note = Target: FXN; (-) strand; PAM type: NRG; PAM sequence: AAG
  source 1..20: mol_type = other DNA
cctgaaagtgaatagctcag

SEQ ID NO: 11023 - DNA, 20 bp, synthetic construct
  misc_feature 1..20: note = Description of Artificial Sequence: Synthetic oligonucleotide
  misc_feature 1..20: note = Target: FXN; (-) strand; PAM type: NRG; PAM sequence: CAG
  source 1..20: mol_type = other DNA
ctgcctgaaagtgaatagct

SEQ ID NO: 11024 - DNA, 20 bp, synthetic construct
  misc_feature 1..20: note = Description of Artificial Sequence: Synthetic oligonucleotide
  misc_feature 1..20: note = Target: FXN; (-) strand; PAM type: NRG; PAM sequence: TAG
  source 1..20: mol_type = other DNA
tgggactgcctgaaagtgaa

SEQ ID NO: 11025 - DNA, 20 bp, synthetic construct
  misc_feature 1..20: note = Description of Artificial Sequence: Synthetic oligonucleotide
  misc_feature 1..20: note = Target: FXN; (-) strand; PAM type: NRG; PAM sequence: AAG
  source 1..20: mol_type = other DNA
tggcacatgggactgcctga

SEQ ID NO: 11026 - DNA, 20 bp, synthetic construct
  misc_feature 1..20: note = Description of Artificial Sequence: Synthetic oligonucleotide
  misc_feature 1..20: note = Target: FXN; (-) strand; PAM type: NRG; PAM sequence: GGG
  source 1..20: mol_type = other DNA
ggatgtggttcctggcacat

SEQ ID NO: 11027 - DNA, 20 bp, synthetic construct
  misc_feature 1..20: note = Description of Artificial Sequence: Synthetic oligonucleotide
  misc_feature 1..20: note = Target: FXN; (-) strand; PAM type: NRG; PAM sequence: TGG
  source 1..20: mol_type = other DNA
tggatgtggttcctggcaca

SEQ ID NO: 11028 - DNA, 20 bp, synthetic construct
  misc_feature 1..20: note = Description of Artificial Sequence: Synthetic oligonucleotide
  misc_feature 1..20: note = Target: FXN; (-) strand; PAM type: NRG; PAM sequence: TGG
  source 1..20: mol_type = other DNA
ggaaatttggatgtggttcc

SEQ ID NO: 11029 - DNA, 20 bp, synthetic construct
  misc_feature 1..20: note = Description of Artificial Sequence: Synthetic oligonucleotide
  misc_feature 1..20: note = Target: FXN; (-) strand; PAM type: NRG; PAM sequence: TGG
  source 1..20: mol_type = other DNA
ccacggaggaaatttggatg

SEQ ID NO: 11030 - DNA, 20 bp, synthetic construct
  misc_feature 1..20: note = Description of Artificial Sequence: Synthetic oligonucleotide
  misc_feature 1..20: note = Target: FXN; (-) strand; PAM type: NRG; PAM sequence: TGG
  source 1..20: mol_type = other DNA
tcccatccacggaggaaatt

SEQ ID NO: 11031 - DNA, 20 bp, synthetic construct
  misc_feature 1..20: note = Description of Artificial Sequence: Synthetic oligonucleotide
  misc_feature 1..20: note = Target: FXN; (-) strand; PAM type: NRG; PAM sequence: AGG
  source 1..20: mol_type = other DNA
cctgagactcccatccacgg

SEQ ID NO: 11032 - DNA, 20 bp, synthetic construct
  misc_feature 1..20: note = Description of Artificial Sequence: Synthetic oligonucleotide
  misc_feature 1..20: note = Target: FXN; (-) strand; PAM type: NRG; PAM sequence: GAG
  source 1..20: mol_type = other DNA
gcctgagactcccatccacg

SEQ ID NO: 11033 - DNA, 20 bp, synthetic construct
  misc_feature 1..20: note = Description of Artificial Sequence: Synthetic oligonucleotide
  misc_feature 1..20: note = Target: FXN; (-) strand; PAM type: NRG; PAM sequence: CGG
  source 1..20: mol_type = other DNA
cagcctgagactcccatcca

SEQ ID NO: 11034 - DNA, 20 bp, synthetic construct
  misc_feature 1..20: note = Description of Artificial Sequence: Synthetic oligonucleotide
  misc_feature 1..20: note = Target: FXN; (-) strand; PAM type: NRG; PAM sequence: GAG
  source 1..20: mol_type = other DNA
gcaaggagataaggcagcct

SEQ ID NO: 11035 - DNA, 20 bp, synthetic construct
  misc_feature 1..20: note = Description of Artificial Sequence: Synthetic oligonucleotide
  misc_feature 1..20: note = Target: FXN; (-) strand; PAM type: NRG; PAM sequence: CAG
  source 1..20: mol_type = other DNA
ggacatgcaaggagataagg

SEQ ID NO: 11036 - DNA, 20 bp, synthetic construct
  misc_feature 1..20: note = Description of Artificial Sequence: Synthetic oligonucleotide
  misc_feature 1..20: note = Target: FXN; (-) strand; PAM type: NRG; PAM sequence: AGG
  source 1..20: mol_type = other DNA
tggggacatgcaaggagata

SEQ ID NO: 11037 - DNA, 20 bp, synthetic construct
  misc_feature 1..20: note = Description of Artificial Sequence: Synthetic oligonucleotide
  misc_feature 1..20: note = Target: FXN; (-) strand; PAM type: NRG; PAM sequence: AAG
  source 1..20: mol_type = other DNA
atggggacatgcaaggagat

SEQ ID NO: 11038 - DNA, 20 bp, synthetic construct
  misc_feature 1..20: note = Description of Artificial Sequence: Synthetic oligonucleotide
  misc_feature 1..20: note = Target: FXN; (-) strand; PAM type: NRG; PAM sequence: GAG
  source 1..20: mol_type = other DNA
tgggcatggggacatgcaag

SEQ ID NO: 11039 - DNA, 20 bp, synthetic construct
  misc_feature 1..20: note = Description of Artificial Sequence: Synthetic oligonucleotide
  misc_feature 1..20: note = Target: FXN; (-) strand; PAM type: NRG; PAM sequence: AGG
  source 1..20: mol_type = other DNA
gctgggcatggggacatgca

SEQ ID NO: 11040 - DNA, 20 bp, synthetic construct
  misc_feature 1..20: note = Description of Artificial Sequence: Synthetic oligonucleotide
  misc_feature 1..20: note = Target: FXN; (-) strand; PAM type: NRG; PAM sequence: AAG
  source 1..20: mol_type = other DNA
agctgggcatggggacatgc

SEQ ID NO: 11041 - DNA, 20 bp, synthetic construct
  misc_feature 1..20: note = Description of Artificial Sequence: Synthetic oligonucleotide
  misc_feature 1..20: note = Target: FXN; (-) strand; PAM type: NRG; PAM sequence: GGG
  source 1..20: mol_type = other DNA
ggctgagacagctgggcatg

SEQ ID NO: 11042 - DNA, 20 bp, synthetic construct
  misc_feature 1..20: note = Description of Artificial Sequence: Synthetic oligonucleotide
  misc_feature 1..20: note = Target: FXN; (-) strand; PAM type: NRG; PAM sequence: GGG
  source 1..20: mol_type = other DNA
aggctgagacagctgggcat

SEQ ID NO: 11043 - DNA, 20 bp, synthetic construct
  misc_feature 1..20: note = Description of Artificial Sequence: Synthetic oligonucleotide
  misc_feature 1..20: note = Target: FXN; (-) strand; PAM type: NRG; PAM sequence: TGG
  source 1..20: mol_type = other DNA
taggctgagacagctgggca

SEQ ID NO: 11044 - DNA, 20 bp, synthetic construct
  misc_feature 1..20: note = Description of Artificial Sequence: Synthetic oligonucleotide
  misc_feature 1..20: note = Target: FXN; (-) strand; PAM type: NRG; PAM sequence: GGG
  source 1..20: mol_type = other DNA
gcccttaggctgagacagct

SEQ ID NO: 11045 - DNA, 20 bp, synthetic construct
  misc_feature 1..20: note = Description of Artificial Sequence: Synthetic oligonucleotide
  misc_feature 1..20: note = Target: FXN; (-) strand; PAM type: NRG; PAM sequence: TGG
  source 1..20: mol_type = other DNA
tgcccttaggctgagacagc

SEQ ID NO: 11046 - DNA, 20 bp, synthetic construct
  misc_feature 1..20: note = Description of Artificial Sequence: Synthetic oligonucleotide
  misc_feature 1..20: note = Target: FXN; (-) strand; PAM type: NRG; PAM sequence: CAG
  source 1..20: mol_type = other DNA
tacctgcccttaggctgaga

SEQ ID NO: 11047 - DNA, 20 bp, synthetic construct
  misc_feature 1..20: note = Description of Artificial Sequence: Synthetic oligonucleotide
  misc_feature 1..20: note = Target: FXN; (-) strand; PAM type: NRG; PAM sequence: GAG
  source 1..20: mol_type = other DNA
aaggtacctgcccttaggct

SEQ ID NO: 11048 - DNA, 20 bp, synthetic construct
  misc_feature 1..20: note = Description of Artificial Sequence: Synthetic oligonucleotide
  misc_feature 1..20: note = Target: FXN; (-) strand; PAM type: NRG; PAM sequence: AGG
  source 1..20: mol_type = other DNA
acttcaaggtacctgccctt

SEQ ID NO: 11049 - DNA, 20 bp, synthetic construct
  misc_feature 1..20: note = Description of Artificial Sequence: Synthetic oligonucleotide
  misc_feature 1..20: note = Target: FXN; (-) strand; PAM type: NRG; PAM sequence: TAG
  source 1..20: mol_type = other DNA
gacttcaaggtacctgccct

SEQ ID NO: 11050 - DNA, 20 bp, synthetic construct
  misc_feature 1..20: note = Description of Artificial Sequence: Synthetic oligonucleotide
  misc_feature 1..20: note = Target: FXN; (-) strand; PAM type: NRG; PAM sequence: AGG
  source 1..20: mol_type = other DNA
tattgtttaacttgacttca

SEQ ID NO: 11051 - DNA, 20 bp, synthetic construct
  misc_feature 1..20: note = Description of Artificial Sequence: Synthetic oligonucleotide
  misc_feature 1..20: note = Target: FXN; (-) strand; PAM type: NRG; PAM sequence: AAG
  source 1..20: mol_type = other DNA
ttattgtttaacttgacttc

SEQ ID NO: 11052 - DNA, 20 bp, synthetic construct
  misc_feature 1..20: note = Description of Artificial Sequence: Synthetic oligonucleotide
  misc_feature 1..20: note = Target: FXN; (-) strand; PAM type: NRG; PAM sequence: TGG
  source 1..20: mol_type = other DNA
aaccaggctgagggcattgc

SEQ ID NO: 11053 - DNA, 20 bp, synthetic construct
  misc_feature 1..20: note = Description of Artificial Sequence: Synthetic oligonucleotide
  misc_feature 1..20: note = Target: FXN; (-) strand; PAM type: NRG; PAM sequence: GGG
  source 1..20: mol_type = other DNA
tgctgcaaaaaccaggctga

SEQ ID NO: 11054 - DNA, 20 bp, synthetic construct
  misc_feature 1..20: note = Description of Artificial Sequence: Synthetic oligonucleotide
  misc_feature 1..20: note = Target: FXN; (-) strand; PAM type: NRG; PAM sequence: AGG
  source 1..20: mol_type = other DNA
ctgctgcaaaaaccaggctg

SEQ ID NO: 11055 - DNA, 20 bp, synthetic construct
  misc_feature 1..20: note = Description of Artificial Sequence: Synthetic oligonucleotide
  misc_feature 1..20: note = Target: FXN; (-) strand; PAM type: NRG; PAM sequence: GAG
  source 1..20: mol_type = other DNA
cctgctgcaaaaaccaggct

SEQ ID NO: 11056 - DNA, 20 bp, synthetic construct
  misc_feature 1..20: note = Description of Artificial Sequence: Synthetic oligonucleotide
  misc_feature 1..20: note = Target: FXN; (-) strand; PAM type: NRG; PAM sequence: AGG
  source 1..20: mol_type = other DNA
tcagtcctgctgcaaaaacc

SEQ ID NO: 11057 - DNA, 20 bp, synthetic construct
  misc_feature 1..20: note = Description of Artificial Sequence: Synthetic oligonucleotide
  misc_feature 1..20: note = Target: FXN; (-) strand; PAM type: NRG; PAM sequence: CAG
  source 1..20: mol_type = other DNA
ctcagtcctgctgcaaaaac

SEQ ID NO: 11058 - DNA, 20 bp, synthetic construct
  misc_feature 1..20: note = Description of Artificial Sequence: Synthetic oligonucleotide
  misc_feature 1..20: note = Target: FXN; (-) strand; PAM type: NRG; PAM sequence: CAG
  source 1..20: mol_type = other DNA
ttgagccaaaacaagggact

SEQ ID NO: 11059 - DNA, 20 bp, synthetic construct
  misc_feature 1..20: note = Description of Artificial Sequence: Synthetic oligonucleotide
  misc_feature 1..20: note = Target: FXN; (-) strand; PAM type: NRG; PAM sequence: GGG
  source 1..20: mol_type = other DNA
ttcccattgagccaaaacaa

SEQ ID NO: 11060 - DNA, 20 bp, synthetic construct
  misc_feature 1..20: note = Description of Artificial Sequence: Synthetic oligonucleotide
  misc_feature 1..20: note = Target: FXN; (-) strand; PAM type: NRG; PAM sequence: AGG
  source 1..20: mol_type = other DNA
cttcccattgagccaaaaca

SEQ ID NO: 11061 - DNA, 20 bp, synthetic construct
  misc_feature 1..20: note = Description of Artificial Sequence: Synthetic oligonucleotide
  misc_feature 1..20: note = Target: FXN; (-) strand; PAM type: NRG; PAM sequence: AAG
  source 1..20: mol_type = other DNA
acttcccattgagccaaaac

SEQ ID NO: 11062 - DNA, 20 bp, synthetic construct
  misc_feature 1..20: note = Description of Artificial Sequence: Synthetic oligonucleotide
  misc_feature 1..20: note = Target: FXN; (-) strand; PAM type: NRG; PAM sequence: GAG
  source 1..20: mol_type = other DNA
aacagcaaagacttcccatt

SEQ ID NO: 11063 - DNA, 20 bp, synthetic construct
  misc_feature 1..20: note = Description of Artificial Sequence: Synthetic oligonucleotide
  misc_feature 1..20: note = Target: FXN; (-) strand; PAM type: NRG; PAM sequence: AAG
  source 1..20: mol_type = other DNA
agctaaggctttgaacagca

SEQ ID NO: 11064 - DNA, 20 bp, synthetic construct
  misc_feature 1..20: note = Description of Artificial Sequence: Synthetic oligonucleotide
  misc_feature 1..20: note = Target: FXN; (-) strand; PAM type: NRG; PAM sequence: CAG
  source 1..20: mol_type = other DNA
agagaagctaaggctttgaa

SEQ ID NO: 11065 - DNA, 20 bp, synthetic construct
  misc_feature 1..20: note = Description of Artificial Sequence: Synthetic oligonucleotide
  misc_feature 1..20: note = Target: FXN; (-) strand; PAM type: NRG; PAM sequence: AGG
  source 1..20: mol_type = other DNA
gcactcagccagagaagcta

SEQ ID NO: 11066 - DNA, 20 bp, synthetic construct
  misc_feature 1..20: note = Description of Artificial Sequence: Synthetic oligonucleotide
  misc_feature 1..20: note = Target: FXN; (-) strand; PAM type: NRG; PAM sequence: AAG
  source 1..20: mol_type = other DNA
cgcactcagccagagaagct

SEQ ID NO: 11067 - DNA, 20 bp, synthetic construct
  misc_feature 1..20: note = Description of Artificial Sequence: Synthetic oligonucleotide
  misc_feature 1..20: note = Target: FXN; (-) strand; PAM type: NRG; PAM sequence: AAG
  source 1..20: mol_type = other DNA
gccaccgcactcagccagag

SEQ ID NO: 11068 - DNA, 20 bp, synthetic construct
  misc_feature 1..20: note = Description of Artificial Sequence: Synthetic oligonucleotide
  misc_feature 1..20: note = Target: FXN; (-) strand; PAM type: NRG; PAM sequence: GAG
  source 1..20: mol_type = other DNA
tgagccaccgcactcagcca

SEQ ID NO: 11069 - DNA, 20 bp, synthetic construct
  misc_feature 1..20: note = Description of Artificial Sequence: Synthetic oligonucleotide
  misc_feature 1..20: note = Target: FXN; (-) strand; PAM type: NRG; PAM sequence: CAG
  source 1..20: mol_type = other DNA
cgtgagccaccgcactcagc

SEQ ID NO: 11070 - DNA, 20 bp, synthetic construct
  misc_feature 1..20: note = Description of Artificial Sequence: Synthetic oligonucleotide
  misc_feature 1..20: note = Target: FXN; (-) strand; PAM type: NRG; PAM sequence: CAG
  source 1..20: mol_type = other DNA
caggcgtgagccaccgcact

SEQ ID NO: 11071 - DNA, 20 bp, synthetic construct
  misc_feature 1..20: note = Description of Artificial Sequence: Synthetic oligonucleotide
  misc_feature 1..20: note = Target: FXN; (-) strand; PAM type: NRG; PAM sequence: GAG
  source 1..20: mol_type = other DNA
agagctaggatgacaggcgt

SEQ ID NO: 11072 - DNA, 20 bp, synthetic construct
  misc_feature 1..20: note = Description of Artificial Sequence: Synthetic oligonucleotide
  misc_feature 1..20: note = Target: FXN; (-) strand; PAM type: NRG; PAM sequence: AGG
  source 1..20: mol_type = other DNA
tcccaaagagctaggatgac

SEQ ID NO: 11073 - DNA, 20 bp, synthetic construct
  misc_feature 1..20: note = Description of Artificial Sequence: Synthetic oligonucleotide
  misc_feature 1..20: note = Target: FXN; (-) strand; PAM type: NRG; PAM sequence: CAG
  source 1..20: mol_type = other DNA
ctcccaaagagctaggatga

SEQ ID NO: 11074 - DNA, 20 bp, synthetic construct
  misc_feature 1..20: note = Description of Artificial Sequence: Synthetic oligonucleotide
  misc_feature 1..20: note = Target: FXN; (-) strand; PAM type: NRG; PAM sequence: AGG
  source 1..20: mol_type = other DNA
cctcggcctcccaaagagct

SEQ ID NO: 11075 - DNA, 20 bp, synthetic construct
  misc_feature 1..20: note = Description of Artificial Sequence: Synthetic oligonucleotide
  misc_feature 1..20: note = Target: FXN; (-) strand; PAM type: NRG; PAM sequence: TAG
  source 1..20: mol_type = other DNA
acctcggcctcccaaagagc

SEQ ID NO: 11076 - DNA, 20 bp, synthetic construct
  misc_feature 1..20: note = Description of Artificial Sequence: Synthetic oligonucleotide
  misc_feature 1..20: note = Target: FXN; (-) strand; PAM type: NRG; PAM sequence: GAG
  source 1..20: mol_type = other DNA
gctcacctcggcctcccaaa

SEQ ID NO: 11077 - DNA, 20 bp, synthetic construct
  misc_feature 1..20: note = Description of Artificial Sequence: Synthetic oligonucleotide
  misc_feature 1..20: note = Target: FXN; (-) strand; PAM type: NRG; PAM sequence: AAG
  source 1..20: mol_type = other DNA
ctgctcacctcggcctccca

SEQ ID NO: 11078 - DNA, 20 bp, synthetic construct
  misc_feature 1..20: note = Description of Artificial Sequence: Synthetic oligonucleotide
  misc_feature 1..20: note = Target: FXN; (-) strand; PAM type: NRG; PAM sequence: CGG
  source 1..20: mol_type = other DNA
cctcagtgatctgctcacct

SEQ ID NO: 11079 - DNA, 20 bp, synthetic construct
  misc_feature 1..20: note = Description of Artificial Sequence: Synthetic oligonucleotide
  misc_feature 1..20: note = Target: FXN; (-) strand; PAM type: NRG; PAM sequence: CAG
  source 1..20: mol_type = other DNA
tggtcttgaactcctggcct

SEQ ID NO: 11080 - DNA, 20 bp, synthetic construct
  misc_feature 1..20: note = Description of Artificial Sequence: Synthetic oligonucleotide
  misc_feature 1..20: note = Target: FXN; (-) strand; PAM type: NRG; PAM sequence: TGG
  source 1..20: mol_type = other DNA
ccaggctggtcttgaactcc

SEQ ID NO: 11081 - DNA, 20 bp, synthetic construct
  misc_feature 1..20: note = Description of Artificial Sequence: Synthetic oligonucleotide
  misc_feature 1..20: note = Target: FXN; (-) strand; PAM type: NRG; PAM sequence: TGG
  source 1..20: mol_type = other DNA
tttcaccatgttggccaggc

SEQ ID NO: 11082 - DNA, 20 bp, synthetic construct
  misc_feature 1..20: note = Description of Artificial Sequence: Synthetic oligonucleotide
  misc_feature 1..20: note = Target: FXN; (-) strand; PAM type: NRG; PAM sequence: AGG
  source 1..20: mol_type = other DNA
agggtttcaccatgttggcc

SEQ ID NO: 11083 - DNA, 20 bp, synthetic construct
  misc_feature 1..20: note = Description of Artificial Sequence: Synthetic oligonucleotide
  misc_feature 1..20: note = Target: FXN; (-) strand; PAM type: NRG; PAM sequence: CAG
  source 1..20: mol_type = other DNA
cagggtttcaccatgttggc

SEQ ID NO: 11084 - DNA, 20 bp, synthetic construct
  misc_feature 1..20: note = Description of Artificial Sequence: Synthetic oligonucleotide
  misc_feature 1..20: note = Target: FXN; (-) strand; PAM type: NRG; PAM sequence: TGG
  source 1..20: mol_type = other DNA
gagacagggtttcaccatgt

SEQ ID NO: 11085 - DNA, 20 bp, synthetic construct
  misc_feature 1..20: note = Description of Artificial Sequence: Synthetic oligonucleotide
  misc_feature 1..20: note = Target: FXN; (-) strand; PAM type: NRG; PAM sequence: GGG
  source 1..20: mol_type = other DNA
ttgtatttttagtagagaca

SEQ ID NO: 11086 - DNA, 20 bp, synthetic construct
  misc_feature 1..20: note = Description of Artificial Sequence: Synthetic oligonucleotide
  misc_feature 1..20: note = Target: FXN; (-) strand; PAM type: NRG; PAM sequence: AGG
  source 1..20: mol_type = other DNA
tttgtatttttagtagagac

SEQ ID NO: 11087 - DNA, 20 bp, synthetic construct
  misc_feature 1..20: note = Description of Artificial Sequence: Synthetic oligonucleotide
  misc_feature 1..20: note = Target: FXN; (-) strand; PAM type: NRG; PAM sequence: CAG
  source 1..20: mol_type = other DNA
ttttgtatttttagtagaga

SEQ ID NO: 11088 - DNA, 20 bp, synthetic construct
  misc_feature 1..20: note = Description of Artificial Sequence: Synthetic oligonucleotide
  misc_feature 1..20: note = Target: FXN; (-) strand; PAM type: NRG; PAM sequence: GAG
  source 1..20: mol_type = other DNA
aactttttgtatttttagta

SEQ ID NO: 11089 - DNA, 20 bp, synthetic construct
  misc_feature 1..20: note = Description of Artificial Sequence: Synthetic oligonucleotide
  misc_feature 1..20: note = Target: FXN; (-) strand; PAM type: NRG; PAM sequence: TAG
  source 1..20: mol_type = other DNA
ctaactttttgtatttttag

SEQ ID NO: 11090 - DNA, 20 bp, synthetic construct
  misc_feature 1..20: note = Description of Artificial Sequence: Synthetic oligonucleotide
  misc_feature 1..20: note = Target: FXN; (-) strand; PAM type: NRG; PAM sequence: TAG
  source 1..20: mol_type = other DNA
tggctaactttttgtatttt

SEQ ID NO: 11091 - DNA, 20 bp, synthetic construct
  misc_feature 1..20: note = Description of Artificial Sequence: Synthetic oligonucleotide
  misc_feature 1..20: note = Target: FXN; (-) strand; PAM type: NRG; PAM sequence: TGG
  source 1..20: mol_type = other DNA
caggtgcctgccaccacgcc

SEQ ID NO: 11092 - DNA, 20 bp, synthetic construct
  misc_feature 1..20: note = Description of Artificial Sequence: Synthetic oligonucleotide
  misc_feature 1..20: note = Target: FXN; (-) strand; PAM type: NRG; PAM sequence: AGG
  source 1..20: mol_type = other DNA
tcccgagtagctgggattac

SEQ ID NO: 11093 - DNA, 20 bp, synthetic construct
  misc_feature 1..20: note = Description of Artificial Sequence: Synthetic oligonucleotide
  misc_feature 1..20: note = Target: FXN; (-) strand; PAM type: NRG; PAM sequence: CAG
  source 1..20: mol_type = other DNA
ctcccgagtagctgggatta

SEQ ID NO: 11094 - DNA, 20 bp, synthetic construct
  misc_feature 1..20: note = Description of Artificial Sequence: Synthetic oligonucleotide
  misc_feature 1..20: note = Target: FXN; (-) strand; PAM type: NRG; PAM sequence: GGG
  source 1..20: mol_type = other DNA
cctcaggctcccgagtagct

SEQ ID NO: 11095 - DNA, 20 bp, synthetic construct
  misc_feature 1..20: note = Description of Artificial Sequence: Synthetic oligonucleotide
  misc_feature 1..20: note = Target: FXN; (-) strand; PAM type: NRG; PAM sequence: TGG
  source 1..20: mol_type = other DNA
gcctcaggctcccgagtagc

SEQ ID NO: 11096 - DNA, 20 bp, synthetic construct
  misc_feature 1..20: note = Description of Artificial Sequence: Synthetic oligonucleotide
  misc_feature 1..20: note = Target: FXN; (-) strand; PAM type: NRG; PAM sequence: TAG
  source 1..20: mol_type = other DNA
tcctgcctcaggctcccgag

SEQ ID NO: 11097 - DNA, 20 bp, synthetic construct
  misc_feature 1..20: note = Description of Artificial Sequence: Synthetic oligonucleotide
  misc_feature 1..20: note = Target: FXN; (-) strand; PAM type: NRG; PAM sequence: GAG
  source 1..20: mol_type = other DNA
ttctcctgcctcaggctccc

SEQ ID NO: 11098 - DNA, 20 bp, synthetic construct
  misc_feature 1..20: note = Description of Artificial Sequence: Synthetic oligonucleotide
  misc_feature 1..20: note = Target: FXN; (-) strand; PAM type: NRG; PAM sequence: AGG
  source 1..20: mol_type = other DNA
ttaagcgattctcctgcctc

SEQ ID NO: 11099 - DNA, 20 bp, synthetic construct
  misc_feature 1..20: note = Description of Artificial Sequence: Synthetic oligonucleotide
  misc_feature 1..20: note = Target: FXN; (-) strand; PAM type: NRG; PAM sequence: CAG
  source 1..20: mol_type = other DNA
tttaagcgattctcctgcct

SEQ ID NO: 11100 - DNA, 20 bp, synthetic construct
  misc_feature 1..20: note = Description of Artificial Sequence: Synthetic oligonucleotide
  misc_feature 1..20: note = Target: FXN; (-) strand; PAM type: NRG; PAM sequence: AAG
  source 1..20: mol_type = other DNA
agcctccatctcctgggttt

SEQ ID NO: 11101 - DNA, 20 bp, synthetic construct
  misc_feature 1..20: note = Description of Artificial Sequence: Synthetic oligonucleotide
  misc_feature 1..20: note = Target: FXN; (-) strand; PAM type: NRG; PAM sequence: GGG
  source 1..20: mol_type = other DNA
cactgcagcctccatctcct

SEQ ID NO: 11102 - DNA, 20 bp, synthetic construct
  misc_feature 1..20: note = Description of Artificial Sequence: Synthetic oligonucleotide
  misc_feature 1..20: note = Target: FXN; (-) strand; PAM type: NRG; PAM sequence: TGG
  source 1..20: mol_type = other DNA
tcactgcagcctccatctcc

SEQ ID NO: 11103 - DNA, 20 bp, synthetic construct
  misc_feature 1..20: note = Description of Artificial Sequence: Synthetic oligonucleotide
  misc_feature 1..20: note = Target: FXN; (-) strand; PAM type: NRG; PAM sequence: CAG
  source 1..20: mol_type = other DNA
ggcatgatctcagctcactg

SEQ ID NO: 11104 - DNA, 20 bp, synthetic construct
  misc_feature 1..20: note = Description of Artificial Sequence: Synthetic oligonucleotide
  misc_feature 1..20: note = Target: FXN; (-) strand; PAM type: NRG; PAM sequence: CAG
  source 1..20: mol_type = other DNA
ggagtgcaatggcatgatct

SEQ ID NO: 11105 - DNA, 20 bp, synthetic construct
  misc_feature 1..20: note = Description of Artificial Sequence: Synthetic oligonucleotide
  misc_feature 1..20: note = Target: FXN; (-) strand; PAM type: NRG; PAM sequence: TGG
  source 1..20: mol_type = other DNA
ttacccaggctggagtgcaa

SEQ ID NO: 11106 - DNA, 20 bp, synthetic construct
  misc_feature 1..20: note = Description of Artificial Sequence: Synthetic oligonucleotide
  misc_feature 1..20: note = Target: FXN; (-) strand; PAM type: NRG; PAM sequence: GAG
  source 1..20: mol_type = other DNA
ttcgctcgttacccaggctg

SEQ ID NO: 11107 - DNA, 20 bp, synthetic construct
  misc_feature 1..20: note = Description of Artificial Sequence: Synthetic oligonucleotide
  misc_feature 1..20: note = Target: FXN; (-) strand; PAM type: NRG; PAM sequence: TGG
  source 1..20: mol_type = other DNA
atttcgctcgttacccaggc

SEQ ID NO: 11108 - DNA, 20 bp, synthetic construct
  misc_feature 1..20: note = Description of Artificial Sequence: Synthetic oligonucleotide
  misc_feature 1..20: note = Target: FXN; (-) strand; PAM type: NRG; PAM sequence: AGG
  source 1..20: mol_type = other DNA
tggaatttcgctcgttaccc

SEQ ID NO: 11109 - DNA, 20 bp, synthetic construct
  misc_feature 1..20: note = Description of Artificial Sequence: Synthetic oligonucleotide
  misc_feature 1..20: note = Target: FXN; (-) strand; PAM type: NRG; PAM sequence: CAG
  source 1..20: mol_type = other DNA
atggaatttcgctcgttacc

SEQ ID NO: 11110 - DNA, 20 bp, synthetic construct
  misc_feature 1..20: note = Description of Artificial Sequence: Synthetic oligonucleotide
  misc_feature 1..20: note = Target: FXN; (-) strand; PAM type: NRG; PAM sequence: TGG
  source 1..20: mol_type = other DNA
ttttttcttttttttagaga

SEQ ID NO: 11111 - DNA, 20 bp, synthetic construct
  misc_feature 1..20: note = Description of Artificial Sequence: Synthetic oligonucleotide
  misc_feature 1..20: note = Target: FXN; (-) strand; PAM type: NRG; PAM sequence: GAG
  source 1..20: mol_type = other DNA
ttttttttttctttttttta

SEQ ID NO: 11112 - DNA, 20 bp, synthetic construct
  misc_feature 1..20: note = Description of Artificial Sequence: Synthetic oligonucleotide
  misc_feature 1..20: note = Target: FXN; (-) strand; PAM type: NRG; PAM sequence: TAG
  source 1..20: mol_type = other DNA
ccttttttttttcttttttt

SEQ ID NO: 11113 - DNA, 20 bp, synthetic construct
  misc_feature 1..20: note = Description of Artificial Sequence: Synthetic oligonucleotide
  misc_feature 1..20: note = Target: FXN; (-) strand; PAM type: NRG; PAM sequence: AGG
  source 1..20: mol_type = other DNA
aaagtcaaagggagaatcta

SEQ ID NO: 11114 - DNA, 20 bp, synthetic construct
  misc_feature 1..20: note = Description of Artificial Sequence: Synthetic oligonucleotide
  misc_feature 1..20: note = Target: FXN; (-) strand; PAM type: NRG; PAM sequence: AAG
  source 1..20: mol_type = other DNA
gaaagtcaaagggagaatct

SEQ ID NO: 11115 - DNA, 20 bp, synthetic construct
  misc_feature 1..20: note = Description of Artificial Sequence: Synthetic oligonucleotide
  misc_feature 1..20: note = Target: FXN; (-) strand; PAM type: NRG; PAM sequence: GAG
  source 1..20: mol_type = other DNA
caaacgtggaaagtcaaagg

SEQ ID NO: 11116 - DNA, 20 bp, synthetic construct
  misc_feature 1..20: note = Description of Artificial Sequence: Synthetic oligonucleotide
  misc_feature 1..20: note = Target: FXN; (-) strand; PAM type: NRG; PAM sequence: GGG
  source 1..20: mol_type = other DNA
cacaaacgtggaaagtcaaa

SEQ ID NO: 11117 - DNA, 20 bp, synthetic construct
  misc_feature 1..20: note = Description of Artificial Sequence: Synthetic oligonucleotide
  misc_feature 1..20: note = Target: FXN; (-) strand; PAM type: NRG; PAM sequence: AGG
  source 1..20: mol_type = other DNA
gcacaaacgtggaaagtcaa

SEQ ID NO: 11118 - DNA, 20 bp, synthetic construct
  misc_feature 1..20: note = Description of Artificial Sequence: Synthetic oligonucleotide
  misc_feature 1..20: note = Target: FXN; (-) strand; PAM type: NRG; PAM sequence: AAG
  source 1..20: mol_type = other DNA
tgcacaaacgtggaaagtca

SEQ ID NO: 11119 - DNA, 20 bp, synthetic construct
  misc_feature 1..20: note = Description of Artificial Sequence: Synthetic oligonucleotide
  misc_feature 1..20: note = Target: FXN; (-) strand; PAM type: NRG; PAM sequence: AAG
  source 1..20: mol_type = other DNA
aaaggctgcacaaacgtgga

SEQ ID NO: 11120 - DNA, 20 bp, synthetic construct
  misc_feature 1..20: note = Description of Artificial Sequence: Synthetic oligonucleotide
  misc_feature 1..20: note = Target: FXN; (-) strand; PAM type: NRG; PAM sequence: TGG
  source 1..20: mol_type = other DNA
gataaaaggctgcacaaacg

SEQ ID NO: 11121 - DNA, 20 bp, synthetic construct
  misc_feature 1..20: note = Description of Artificial Sequence: Synthetic oligonucleotide
  misc_feature 1..20: note = Target: FXN; (-) strand; PAM type: NRG; PAM sequence: AGG
  source 1..20: mol_type = other DNA
aatggagcattggagataaa

SEQ ID NO: 11122 - DNA, 20 bp, synthetic construct
  misc_feature 1..20: note = Description of Artificial Sequence: Synthetic oligonucleotide
  misc_feature 1..20: note = Target: FXN; (-) strand; PAM type: NRG; PAM sequence: AAG
  source 1..20: mol_type = other DNA
aaatggagcattggagataa

SEQ ID NO: 11123 - DNA, 20 bp, synthetic construct
  misc_feature 1..20: note = Description of Artificial Sequence: Synthetic oligonucleotide
  misc_feature 1..20: note = Target: FXN; (-) strand; PAM type: NRG; PAM sequence: GAG
  source 1..20: mol_type = other DNA
tggaatgaaatggagcattg

SEQ ID NO: 11124 - DNA, 20 bp, synthetic construct
  misc_feature 1..20: note = Description of Artificial Sequence: Synthetic oligonucleotide
  misc_feature 1..20: note = Target: FXN; (-) strand; PAM type: NRG; PAM sequence: TGG
  source 1..20: mol_type = other DNA
gatggaatgaaatggagcat

SEQ ID NO: 11125 - DNA, 20 bp, synthetic construct
  misc_feature 1..20: note = Description of Artificial Sequence: Synthetic oligonucleotide
  misc_feature 1..20: note = Target: FXN; (-) strand; PAM type: NRG; PAM sequence: GAG
  source 1..20: mol_type = other DNA
ccaggagatggaatgaaatg

SEQ ID NO: 11126 - DNA, 20 bp, synthetic construct
  misc_feature 1..20: note = Description of Artificial Sequence: Synthetic oligonucleotide
  misc_feature 1..20: note = Target: FXN; (-) strand; PAM type: NRG; PAM sequence: TGG
  source 1..20: mol_type = other DNA
agccaggagatggaatgaaa

SEQ ID NO: 11127 - DNA, 20 bp, synthetic construct
  misc_feature 1..20: note = Description of Artificial Sequence: Synthetic oligonucleotide
  misc_feature 1..20: note = Target: FXN; (-) strand; PAM type: NRG; PAM sequence: TGG
  source 1..20: mol_type = other DNA
gaaaagaataagccaggaga

SEQ ID NO: 11128 - DNA, 20 bp, synthetic construct
  misc_feature 1..20: note = Description of Artificial Sequence: Synthetic oligonucleotide
  misc_feature 1..20: note = Target: FXN; (-) strand; PAM type: NRG; PAM sequence: GAG
  source 1..20: mol_type = other DNA
acaagaaaagaataagccag

SEQ ID NO: 11129 - DNA, 20 bp, synthetic construct
  misc_feature 1..20: note = Description of Artificial Sequence: Synthetic oligonucleotide
  misc_feature 1..20: note = Target: FXN; (-) strand; PAM type: NRG; PAM sequence: AGG
  source 1..20: mol_type = other DNA
tgacaagaaaagaataagcc

SEQ ID NO: 11130 - DNA, 20 bp, synthetic construct
  misc_feature 1..20: note = Description of Artificial Sequence: Synthetic oligonucleotide
  misc_feature 1..20: note = Target: FXN; (-) strand; PAM type: NRG; PAM sequence: CAG
  source 1..20: mol_type = other DNA
gtgacaagaaaagaataagc

SEQ ID NO: 11131 - DNA, 20 bp, synthetic construct
  misc_feature 1..20: note = Description of Artificial Sequence: Synthetic oligonucleotide
  misc_feature 1..20: note = Target: FXN; (-) strand; PAM type: NRG; PAM sequence: AAG
  source 1..20: mol_type = other DNA
agatgtgacaagaaaagaat

SEQ ID NO: 11132 - DNA, 20 bp, synthetic construct
  misc_feature 1..20: note = Description of Artificial Sequence: Synthetic oligonucleotide
  misc_feature 1..20: note = Target: FXN; (-) strand; PAM type: NRG; PAM sequence: AAG
  source 1..20: mol_type = other DNA
tttagtagatgtgacaagaa

SEQ ID NO: 11133 - DNA, 20 bp, synthetic construct
  misc_feature 1..20: note = Description of Artificial Sequence: Synthetic oligonucleotide
  misc_feature 1..20: note = Target: FXN; (-) strand; PAM type: NRG; PAM sequence: AAG
  source 1..20: mol_type = other DNA
ttgcttttagtagatgtgac

SEQ ID NO: 11134 - DNA, 20 bp, synthetic construct
  misc_feature 1..20: note = Description of Artificial Sequence: Synthetic oligonucleotide
  misc_feature 1..20: note = Target: FXN; (-) strand; PAM type: NRG; PAM sequence: TAG
  source 1..20: mol_type = other DNA
tggcttcttgttgcttttag

SEQ ID NO: 11135 - DNA, 20 bp, synthetic construct
  misc_feature 1..20: note = Description of Artificial Sequence: Synthetic oligonucleotide
  misc_feature 1..20: note = Target: FXN; (-) strand; PAM type: NRG; PAM sequence: TAG
  source 1..20: mol_type = other DNA
cggtggcttcttgttgcttt

SEQ ID NO: 11136 - DNA, 20 bp, synthetic construct
  misc_feature 1..20: note = Description of Artificial Sequence: Synthetic oligonucleotide
  misc_feature 1..20: note = Target: FXN; (-) strand; PAM type: NRG; PAM sequence: TGG
  source 1..20: mol_type = other DNA
agaatgttcctgaataccgg

SEQ ID NO: 11137 - DNA, 20 bp, synthetic construct
  misc_feature 1..20: note = Description of Artificial Sequence: Synthetic oligonucleotide
  misc_feature 1..20: note = Target: FXN; (-) strand; PAM type: NRG; PAM sequence: CGG
  source 1..20: mol_type = other DNA
ggtagaatgttcctgaatac

SEQ ID NO: 11138 - DNA, 20 bp, synthetic construct
  misc_feature 1..20: note = Description of Artificial Sequence: Synthetic oligonucleotide
  misc_feature 1..20: note = Target: FXN; (-) strand; PAM type: NRG; PAM sequence: TAG
  source 1..20: mol_type = other DNA
catatagctctggggacagg

SEQ ID NO: 11139 - DNA, 20 bp, synthetic construct
  misc_feature 1..20: note = Description of Artificial Sequence: Synthetic oligonucleotide
  misc_feature 1..20: note = Target: FXN; (-) strand; PAM type: NRG; PAM sequence: AGG
  source 1..20: mol_type = other DNA
gagcatatagctctggggac

SEQ ID NO: 11140 - DNA, 20 bp, synthetic construct
  misc_feature 1..20: note = Description of Artificial Sequence: Synthetic oligonucleotide
  misc_feature 1..20: note = Target: FXN; (-) strand; PAM type: NRG; PAM sequence: CAG
  source 1..20: mol_type = other DNA
tgagcatatagctctgggga

SEQ ID NO: 11141 - DNA, 20 bp, synthetic construct
  misc_feature 1..20: note = Description of Artificial Sequence: Synthetic oligonucleotide
  misc_feature 1..20: note = Target: FXN; (-) strand; PAM type: NRG; PAM sequence: GGG
  source 1..20: mol_type = other DNA
ctactgagcatatagctctg

SEQ ID NO: 11142 - DNA, 20 bp, synthetic construct
  misc_feature 1..20: note = Description of Artificial Sequence: Synthetic oligonucleotide
  misc_feature 1..20: note = Target: FXN; (-) strand; PAM type: NRG; PAM sequence: GGG
  source 1..20: mol_type = other DNA
cctactgagcatatagctct

SEQ ID NO: 11143 - DNA, 20 bp, synthetic construct
  misc_feature 1..20: note = Description of Artificial Sequence: Synthetic oligonucleotide
  misc_feature 1..20: note = Target: FXN; (-) strand; PAM type: NRG; PAM sequence: TGG
  source 1..20: mol_type = other DNA
gcctactgagcatatagctc

SEQ ID NO: 11144 - DNA, 20 bp, synthetic construct
  misc_feature 1..20: note = Description of Artificial Sequence: Synthetic oligonucleotide
  misc_feature 1..20: note = Target: FXN; (-) strand; PAM type: NRG; PAM sequence: TAG
  source 1..20: mol_type = other DNA
ctgtatgcctactgagcata

SEQ ID NO: 11145 - DNA, 20 bp, synthetic construct
  misc_feature 1..20: note = Description of Artificial Sequence: Synthetic oligonucleotide
  misc_feature 1..20: note = Target: FXN; (-) strand; PAM type: NRG; PAM sequence: GAG
  source 1..20: mol_type = other DNA
gggccaactgtatgcctact

SEQ ID NO: 11146 - DNA, 20 bp, synthetic construct
  misc_feature 1..20: note = Description of Artificial Sequence: Synthetic oligonucleotide
  misc_feature 1..20: note = Target: FXN; (-) strand; PAM type: NRG; PAM sequence: GGG
  source 1..20: mol_type = other DNA
tgagtctcagataacctgga

SEQ ID NO: 11147 - DNA, 20 bp, synthetic construct
  misc_feature 1..20: note = Description of Artificial Sequence: Synthetic oligonucleotide
  misc_feature 1..20: note = Target: FXN; (-) strand; PAM type: NRG; PAM sequence: AGG
  source 1..20: mol_type = other DNA
ctgagtctcagataacctgg

SEQ ID NO: 11148 - DNA, 20 bp, synthetic construct
  misc_feature 1..20: note = Description of Artificial Sequence: Synthetic oligonucleotide
  misc_feature 1..20: note = Target: FXN; (-) strand; PAM type: NRG; PAM sequence: GAG
  source 1..20: mol_type = other DNA
tctgagtctcagataacctg

SEQ ID NO: 11149 - DNA, 20 bp, synthetic construct
  misc_feature 1..20: note = Description of Artificial Sequence: Synthetic oligonucleotide
  misc_feature 1..20: note = Target: FXN; (-) strand; PAM type: NRG; PAM sequence: TGG
  source 1..20: mol_type = other DNA
aatctgagtctcagataacc

SEQ ID NO: 11150 - DNA, 20 bp, synthetic construct
  misc_feature 1..20: note = Description of Artificial Sequence: Synthetic oligonucleotide
  misc_feature 1..20: note = Target: FXN; (-) strand; PAM type: NRG; PAM sequence: CAG
  source 1..20: mol_type = other DNA
ccctctggaaatctgagtct

SEQ ID NO: 11151 - DNA, 20 bp, synthetic construct
  misc_feature 1..20: note = Description of Artificial Sequence: Synthetic oligonucleotide
  misc_feature 1..20: note = Target: FXN; (-) strand; PAM type: NRG; PAM sequence: GAG
  source 1..20: mol_type = other DNA
gcaaagccctctggaaatct

SEQ ID NO: 11152 - DNA, 20 bp, synthetic construct
  misc_feature 1..20: note = Description of Artificial Sequence: Synthetic oligonucleotide
  misc_feature 1..20: note = Target: FXN; (-) strand; PAM type: NRG; PAM sequence: TGG
  source 1..20: mol_type = other DNA
gtgagccatgcaaagccctc

SEQ ID NO: 11153 - DNA, 20 bp, synthetic construct
  misc_feature 1..20: note = Description of Artificial Sequence: Synthetic oligonucleotide
  misc_feature 1..20: note = Target: FXN; (-) strand; PAM type: NRG; PAM sequence: AAG
  source 1..20: mol_type = other DNA
cagaccttgtgagccatgca

SEQ ID NO: 11154 - DNA, 20 bp, synthetic construct
  misc_feature 1..20: note = Description of Artificial Sequence: Synthetic oligonucleotide
  misc_feature 1..20: note = Target: FXN; (-) strand; PAM type: NRG; PAM sequence: GAG
  source 1..20: mol_type = other DNA
agaggttcttcagaccttgt

SEQ ID NO: 11155 - DNA, 20 bp, synthetic construct
  misc_feature 1..20: note = Description of Artificial Sequence: Synthetic oligonucleotide
  misc_feature 1..20: note = Target: FXN; (-) strand; PAM type: NRG; PAM sequence: CAG
  source 1..20: mol_type = other DNA
cgggaggctcagaggttctt

SEQ ID NO: 11156 - DNA, 20 bp, synthetic construct
  misc_feature 1..20: note = Description of Artificial Sequence: Synthetic oligonucleotide
  misc_feature 1..20: note = Target: FXN; (-) strand; PAM type: NRG; PAM sequence: AGG
  source 1..20: mol_type = other DNA
accgcaggcgggaggctcag

SEQ ID NO: 11157 - DNA, 20 bp, synthetic construct
  misc_feature 1..20: note = Description of Artificial Sequence: Synthetic oligonucleotide
  misc_feature 1..20: note = Target: FXN; (-) strand; PAM type: NRG; PAM sequence: GAG
  source 1..20: mol_type = other DNA
caccgcaggcgggaggctca

SEQ ID NO: 11158 - DNA, 20 bp, synthetic construct
  misc_feature 1..20: note = Description of Artificial Sequence: Synthetic oligonucleotide
  misc_feature 1..20: note = Target: FXN; (-) strand; PAM type: NRG; PAM sequence: CAG
  source 1..20: mol_type = other DNA
gacaccgcaggcgggaggct

SEQ ID NO: 11159 - DNA, 20 bp, synthetic construct
  misc_feature 1..20: note = Description of Artificial Sequence: Synthetic oligonucleotide
  misc_feature 1..20: note = Target: FXN; (-) strand; PAM type: NRG; PAM sequence: AGG
  source 1..20: mol_type = other DNA
gaacagacaccgcaggcggg

SEQ ID NO: 11160 - DNA, 20 bp, synthetic construct
  misc_feature 1..20: note = Description of Artificial Sequence: Synthetic oligonucleotide
  misc_feature 1..20: note = Target: FXN; (-) strand; PAM type: NRG; PAM sequence: GAG
  source 1..20: mol_type = other DNA
tgaacagacaccgcaggcgg

SEQ ID NO: 11161 - DNA, 20 bp, synthetic construct
  misc_feature 1..20: note = Description of Artificial Sequence: Synthetic oligonucleotide
  misc_feature 1..20: note = Target: FXN; (-) strand; PAM type: NRG; PAM sequence: GGG
  source 1..20: mol_type = other DNA
aatgaacagacaccgcaggc

SEQ ID NO: 11162 - DNA, 20 bp, synthetic construct
  misc_feature 1..20: note = Description of Artificial Sequence: Synthetic oligonucleotide
  misc_feature 1..20: note = Target: FXN; (-) strand; PAM type: NRG; PAM sequence: CGG
  source 1..20: mol_type = other DNA
caatgaacagacaccgcagg

SEQ ID NO: 11163 - DNA, 20 bp, synthetic construct
  misc_feature 1..20: note = Description of Artificial Sequence: Synthetic oligonucleotide
  misc_feature 1..20: note = Target: FXN; (-) strand; PAM type: NRG; PAM sequence: AGG
  source 1..20: mol_type = other DNA
agtcaatgaacagacaccgc

SEQ ID NO: 11164 - DNA, 20 bp, synthetic construct
  misc_feature 1..20: note = Description of Artificial Sequence: Synthetic oligonucleotide
  misc_feature 1..20: note = Target: FXN; (-) strand; PAM type: NRG; PAM sequence: CAG
  source 1..20: mol_type = other DNA
aagtcaatgaacagacaccg

SEQ ID NO: 11165 - DNA, 20 bp, synthetic construct
  misc_feature 1..20: note = Description of Artificial Sequence: Synthetic oligonucleotide
  misc_feature 1..20: note = Target: FXN; (-) strand; PAM type: NRG; PAM sequence: CAG
  source 1..20: mol_type = other DNA
actgtggcaaagtcaatgaa

SEQ ID NO: 11166 - DNA, 20 bp, synthetic construct
  misc_feature 1..20: note = Description of Artificial Sequence: Synthetic oligonucleotide
  misc_feature 1..20: note = Target: FXN; (-) strand; PAM type: NRG; PAM sequence: AAG
  source 1..20: mol_type = other DNA
gcctctttgagactgtggca

SEQ ID NO: 11167 - DNA, 20 bp, synthetic construct
  misc_feature 1..20: note = Description of Artificial Sequence: Synthetic oligonucleotide
  misc_feature 1..20: note = Target: FXN; (-) strand; PAM type: NRG; PAM sequence: TGG
  source 1..20: mol_type = other DNA
gcagtgcctctttgagactg

SEQ ID NO: 11168 - DNA, 20 bp, synthetic construct
  misc_feature 1..20: note = Description of Artificial Sequence: Synthetic oligonucleotide
  misc_feature 1..20: note = Target: FXN; (-) strand; PAM type: NRG; PAM sequence: GAG
  source 1..20: mol_type = other DNA
gcagcatgcagtgcctcttt

SEQ ID NO: 11169 - DNA, 20 bp, synthetic construct
  misc_feature 1..20: note = Description of Artificial Sequence: Synthetic oligonucleotide
  misc_feature 1..20: note = Target: FXN; (-) strand; PAM type: NRG; PAM sequence: CAG
  source 1..20: mol_type = other DNA
aacctcaaacatgcagcatg

SEQ ID NO: 11170 - DNA, 20 bp, synthetic construct
  misc_feature 1..20: note = Description of Artificial Sequence: Synthetic oligonucleotide
  misc_feature 1..20: note = Target: FXN; (-) strand; PAM type: NRG; PAM sequence: CAG
  source 1..20: mol_type = other DNA
aagcaaaaacctcaaacatg

SEQ ID NO: 11171 - DNA, 20 bp, synthetic construct
  misc_feature 1..20: note = Description of Artificial Sequence: Synthetic oligonucleotide
  misc_feature 1..20: note = Target: FXN; (-) strand; PAM type: NRG; PAM sequence: AAG
  source 1..20: mol_type = other DNA
gctggaaatggatgccacca

SEQ ID NO: 11172 - DNA, 20 bp, synthetic construct
  misc_feature 1..20: note = Description of Artificial Sequence: Synthetic oligonucleotide
  misc_feature 1..20: note = Target: FXN; (-) strand; PAM type: NRG; PAM sequence: TGG
  source 1..20: mol_type = other DNA
ccggaagccgaggctggaaa

SEQ ID NO: 11173 - DNA, 20 bp, synthetic construct
  misc_feature 1..20: note = Description of Artificial Sequence: Synthetic oligonucleotide
  misc_feature 1..20: note = Target: FXN; (-) strand; PAM type: NRG; PAM sequence: TGG
  source 1..20: mol_type = other DNA
ggaatgccggaagccgaggc

SEQ ID NO: 11174 - DNA, 20 bp, synthetic construct
  misc_feature 1..20: note = Description of Artificial Sequence: Synthetic oligonucleotide
  misc_feature 1..20: note = Target: FXN; (-) strand; PAM type: NRG; PAM sequence: AGG
  source 1..20: mol_type = other DNA
gggaggaatgccggaagccg

SEQ ID NO: 11175 - DNA, 20 bp, synthetic construct
  misc_feature 1..20: note = Description of Artificial Sequence: Synthetic oligonucleotide
  misc_feature 1..20: note = Target: FXN; (-) strand; PAM type: NRG; PAM sequence: GAG
  source 1..20: mol_type = other DNA
ggggaggaatgccggaagcc

SEQ ID NO: 11176 - DNA, 20 bp, synthetic construct
  misc_feature 1..20: note = Description of Artificial Sequence: Synthetic oligonucleotide
  misc_feature 1..20: note = Target: FXN; (-) strand; PAM type: NRG; PAM sequence: AAG
  source 1..20: mol_type = other DNA
tgctgggggaggaatgccgg

SEQ ID NO: 11177 - DNA, 20 bp, synthetic construct
  misc_feature 1..20: note = Description of Artificial Sequence: Synthetic oligonucleotide
  misc_feature 1..20: note = Target: FXN; (-) strand; PAM type: NRG; PAM sequence: CGG
  source 1..20: mol_type = other DNA
gtctgctgggggaggaatgc

SEQ ID NO: 11178 - DNA, 20 bp, synthetic construct
  misc_feature 1..20: note = Description of Artificial Sequence: Synthetic oligonucleotide
  misc_feature 1..20: note = Target: FXN; (-) strand; PAM type: NRG; PAM sequence: AGG
  source 1..20: mol_type = other DNA
agcagagagtctgctggggg

SEQ ID NO: 11179 - DNA, 20 bp, synthetic construct
  misc_feature 1..20: note = Description of Artificial Sequence: Synthetic oligonucleotide
  misc_feature 1..20: note = Target: FXN; (-) strand; PAM type: NRG; PAM sequence: GAG
  source 1..20: mol_type = other DNA
cagcagagagtctgctgggg

SEQ ID NO: 11180 - DNA, 20 bp, synthetic construct
  misc_feature 1..20: note = Description of Artificial Sequence: Synthetic oligonucleotide
  misc_feature 1..20: note = Target: FXN; (-) strand; PAM type: NRG; PAM sequence: GGG
  source 1..20: mol_type = other DNA
agcagcagagagtctgctgg

SEQ ID NO: 11181 - DNA, 20 bp, synthetic construct
  misc_feature 1..20: note = Description of Artificial Sequence: Synthetic oligonucleotide
  misc_feature 1..20: note = Target: FXN; (-) strand; PAM type: NRG; PAM sequence: GGG
  source 1..20: mol_type = other DNA
aagcagcagagagtctgctg

SEQ ID NO: 11182 - DNA, 20 bp, synthetic construct
  misc_feature 1..20: note = Description of Artificial Sequence: Synthetic oligonucleotide
  misc_feature 1..20: note = Target: FXN; (-) strand; PAM type: NRG; PAM sequence: GGG
  source 1..20: mol_type = other DNA
aaagcagcagagagtctgct

SEQ ID NO: 11183 - DNA, 20 bp, synthetic construct
  misc_feature 1..20: note = Description of Artificial Sequence: Synthetic oligonucleotide
  misc_feature 1..20: note = Target: FXN; (-) strand; PAM type: NRG; PAM sequence: TGG
  source 1..20: mol_type = other DNA
gaaagcagcagagagtctgc

SEQ ID NO: 11184 - DNA, 20 bp, synthetic construct
  misc_feature 1..20: note = Description of Artificial Sequence: Synthetic oligonucleotide
  misc_feature 1..20: note = Target: FXN; (-) strand; PAM type: NRG; PAM sequence: GAG
  source 1..20: mol_type = other DNA
agtaaggggaaagcagcaga

SEQ ID NO: 11185 - DNA, 20 bp, synthetic construct
  misc_feature 1..20: note = Description of Artificial Sequence: Synthetic oligonucleotide
  misc_feature 1..20: note = Target: FXN; (-) strand; PAM type: NRG; PAM sequence: GAG
  source 1..20: mol_type = other DNA
ggagtaaggggaaagcagca

SEQ ID NO: 11186 - DNA, 20 bp, synthetic construct
  misc_feature 1..20: note = Description of Artificial Sequence: Synthetic oligonucleotide
  misc_feature 1..20: note = Target: FXN; (-) strand; PAM type: NRG; PAM sequence: CAG
  source 1..20: mol_type = other DNA
aaggagtaaggggaaagcag

SEQ ID NO: 11187 - DNA, 20 bp, synthetic construct
  misc_feature 1..20: note = Description of Artificial Sequence: Synthetic oligonucleotide
  misc_feature 1..20: note = Target: FXN; (-) strand; PAM type: NRG; PAM sequence: CAG
  source 1..20: mol_type = other DNA
cagaaggagtaaggggaaag

SEQ ID NO: 11188 - DNA, 20 bp, synthetic construct
  misc_feature 1..20: note = Description of Artificial Sequence: Synthetic oligonucleotide
  misc_feature 1..20: note = Target: FXN; (-) strand; PAM type: NRG; PAM sequence: AAG
  source 1..20: mol_type = other DNA
tgccagaaggagtaagggga

SEQ ID NO: 11189 - DNA, 20 bp, synthetic construct
  misc_feature 1..20: note = Description of Artificial Sequence: Synthetic oligonucleotide
  misc_feature 1..20: note = Target: FXN; (-) strand; PAM type: NRG; PAM sequence: GGG
  source 1..20: mol_type = other DNA
gaactgccagaaggagtaag

SEQ ID NO: 11190 - DNA, 20 bp, synthetic construct
  misc_feature 1..20: note = Description of Artificial Sequence: Synthetic oligonucleotide
  misc_feature 1..20: note = Target: FXN; (-) strand; PAM type: NRG; PAM sequence: GGG
  source 1..20: mol_type = other DNA
agaactgccagaaggagtaa

SEQ ID NO: 11191 - DNA, 20 bp, synthetic construct
  misc_feature 1..20: note = Description of Artificial Sequence: Synthetic oligonucleotide
  misc_feature 1..20: note = Target: FXN; (-) strand; PAM type: NRG; PAM sequence: AGG
  source 1..20: mol_type = other DNA
cagaactgccagaaggagta

SEQ ID NO: 11192 - DNA, 20 bp, synthetic construct
  misc_feature 1..20: note = Description of Artificial Sequence: Synthetic oligonucleotide
  misc_feature 1..20: note = Target: FXN; (-) strand; PAM type: NRG; PAM sequence: AAG
  source 1..20: mol_type = other DNA
ccagaactgccagaaggagt

SEQ ID NO: 11193 - DNA, 20 bp, synthetic construct
  misc_feature 1..20: note = Description of Artificial Sequence: Synthetic oligonucleotide
  misc_feature 1..20: note = Target: FXN; (-) strand; PAM type: NRG; PAM sequence: GAG
  source 1..20: mol_type = other DNA
cctcccagaactgccagaag

SEQ ID NO: 11194 - DNA, 20 bp, synthetic construct
  misc_feature 1..20: note = Description of Artificial Sequence: Synthetic oligonucleotide
  misc_feature 1..20: note = Target: FXN; (-) strand; PAM type: NRG; PAM sequence: AGG
  source 1..20: mol_type = other DNA
aacctcccagaactgccaga

SEQ ID NO: 11195 - DNA, 20 bp, synthetic construct
  misc_feature 1..20: note = Description of Artificial Sequence: Synthetic oligonucleotide
  misc_feature 1..20: note = Target: FXN; (-) strand; PAM type: NRG; PAM sequence: AAG
  source 1..20: mol_type = other DNA
caacctcccagaactgccag

SEQ ID NO: 11196 - DNA, 20 bp, synthetic construct
  misc_feature 1..20: note = Description of Artificial Sequence: Synthetic oligonucleotide
  misc_feature 1..20: note = Target: FXN; (-) strand; PAM type: NRG; PAM sequence: CAG
  source 1..20: mol_type = other DNA
atgcaacctcccagaactgc

SEQ ID NO: 11197 - DNA, 20 bp, synthetic construct
  misc_feature 1..20: note = Description of Artificial Sequence: Synthetic oligonucleotide
  misc_feature 1..20: note = Target: FXN; (-) strand; PAM type: NRG; PAM sequence: CAG
  source 1..20: mol_type = other DNA
aagggccctatgcaacctcc

SEQ ID NO: 11198 - DNA, 20 bp, synthetic construct
  misc_feature 1..20: note = Description of Artificial Sequence: Synthetic oligonucleotide
  misc_feature 1..20: note = Target: FXN; (-) strand; PAM type: NRG; PAM sequence: GGG
  source 1..20: mol_type = other DNA
ggacttggggcatcctgcaa

SEQ ID NO: 11199 - DNA, 20 bp, synthetic construct
  misc_feature 1..20: note = Description of Artificial Sequence: Synthetic oligonucleotide
  misc_feature 1..20: note = Target: FXN; (-) strand; PAM type: NRG; PAM sequence: AGG
  source 1..20: mol_type = other DNA
tggacttggggcatcctgca

SEQ ID NO: 11200 - DNA, 20 bp, synthetic construct
  misc_feature 1..20: note = Description of Artificial Sequence: Synthetic oligonucleotide
  misc_feature 1..20: note = Target: FXN; (-) strand; PAM type: NRG; PAM sequence: AAG
  source 1..20: mol_type = other DNA
ctggacttggggcatcctgc

SEQ ID NO: 11201 - DNA, 20 bp, synthetic construct
  misc_feature 1..20: note = Description of Artificial Sequence: Synthetic oligonucleotide
  misc_feature 1..20: note = Target: FXN; (-) strand; PAM type: NRG; PAM sequence: GGG
  source 1..20: mol_type = other DNA
gccagaggcagctggacttg

SEQ ID NO: 11202 - DNA, 20 bp, synthetic construct
  misc_feature 1..20: note = Description of Artificial Sequence: Synthetic oligonucleotide
  misc_feature 1..20: note = Target: FXN; (-) strand; PAM type: NRG; PAM sequence: GGG
  source 1..20: mol_type = other DNA
ggccagaggcagctggactt

SEQ ID NO: 11203 - DNA, 20 bp, synthetic construct
  misc_feature 1..20: note = Description of Artificial Sequence: Synthetic oligonucleotide
  misc_feature 1..20: note = Target: FXN; (-) strand; PAM type: NRG; PAM sequence: TGG
  source 1..20: mol_type = other DNA
aggccagaggcagctggact

SEQ ID NO: 11204 - DNA, 20 bp, synthetic construct
  misc_feature 1..20: note = Description of Artificial Sequence: Synthetic oligonucleotide
  misc_feature 1..20: note = Target: FXN; (-) strand; PAM type: NRG; PAM sequence: TGG
  source 1..20: mol_type = other DNA
tcccagaggccagaggcagc

SEQ ID NO: 11205 - DNA, 20 bp, synthetic construct
  misc_feature 1..20: note = Description of Artificial Sequence: Synthetic oligonucleotide
  misc_feature 1..20: note = Target: FXN; (-) strand; PAM type: NRG; PAM sequence: CAG
  source 1..20: mol_type = other DNA
tgcttcccagaggccagagg

SEQ ID NO: 11206 - DNA, 20 bp, synthetic construct
  misc_feature 1..20: note = Description of Artificial Sequence: Synthetic oligonucleotide
  misc_feature 1..20: note = Target: FXN; (-) strand; PAM type: NRG; PAM sequence: AGG
  source 1..20: mol_type = other DNA
gtgtgcttcccagaggccag

SEQ ID NO: 11207 - DNA, 20 bp, synthetic construct
  misc_feature 1..20: note = Description of Artificial Sequence: Synthetic oligonucleotide
  misc_feature 1..20: note = Target: FXN; (-) strand; PAM type: NRG; PAM sequence: GAG
  source 1..20: mol_type = other DNA
ggtgtgcttcccagaggcca

SEQ ID NO: 11208 - DNA, 20 bp, synthetic construct
  misc_feature 1..20: note = Description of Artificial Sequence: Synthetic oligonucleotide
  misc_feature 1..20: note = Target: FXN; (-) strand; PAM type: NRG; PAM sequence: CAG
  source 1..20: mol_type = other DNA
agggtgtgcttcccagaggc

SEQ ID NO: 11209 - DNA, 20 bp, synthetic construct
  misc_feature 1..20: note = Description of Artificial Sequence: Synthetic oligonucleotide
  misc_feature 1..20: note = Target: FXN; (-) strand; PAM type: NRG; PAM sequence: AGG
  source 1..20: mol_type = other DNA
gtcaagggtgtgcttcccag

SEQ ID NO: 11210 - DNA, 20 bp, synthetic construct
  misc_feature 1..20: note = Description of Artificial Sequence: Synthetic oligonucleotide
  misc_feature 1..20: note = Target: FXN; (-) strand; PAM type: NRG; PAM sequence: GAG
  source 1..20: mol_type = other DNA
ggtcaagggtgtgcttccca

SEQ ID NO: 11211 - DNA, 20 bp, synthetic construct
  misc_feature 1..20: note = Description of Artificial Sequence: Synthetic oligonucleotide
  misc_feature 1..20: note = Target: FXN; (-) strand; PAM type: NRG; PAM sequence: CAG
  source 1..20: mol_type = other DNA
caggtcaagggtgtgcttcc

SEQ ID NO: 11212 - DNA, 20 bp, synthetic construct
  misc_feature 1..20: note = Description of Artificial Sequence: Synthetic oligonucleotide
  misc_feature 1..20: note = Target: FXN; (-) strand; PAM type: NRG; PAM sequence: GGG
  source 1..20: mol_type = other DNA
tcctacacatggcaggtcaa

SEQ ID NO: 11213 - DNA, 20 bp, synthetic construct
  misc_feature 1..20: note = Description of Artificial Sequence: Synthetic oligonucleotide
  misc_feature 1..20: note = Target: FXN; (-) strand; PAM type: NRG; PAM sequence: AGG
  source 1..20: mol_type = other DNA
ttcctacacatggcaggtca

SEQ ID NO: 11214 - DNA, 20 bp, synthetic construct
  misc_feature 1..20: note = Description of Artificial Sequence: Synthetic oligonucleotide
  misc_feature 1..20: note = Target: FXN; (-) strand; PAM type: NRG; PAM sequence: AAG
  source 1..20: mol_type = other DNA
cttcctacacatggcaggtc

SEQ ID NO: 11215 - DNA, 20 bp, synthetic construct
  misc_feature 1..20: note = Description of Artificial Sequence: Synthetic oligonucleotide
  misc_feature 1..20: note = Target: FXN; (-) strand; PAM type: NRG; PAM sequence: AGG
  source 1..20: mol_type = other DNA
gctgtcttcctacacatggc

SEQ ID NO: 11216 - DNA, 20 bp, synthetic construct
  misc_feature 1..20: note = Description of Artificial Sequence: Synthetic oligonucleotide
  misc_feature 1..20: note = Target: FXN; (-) strand; PAM type: NRG; PAM sequence: CAG
  source 1..20: mol_type = other DNA
ggctgtcttcctacacatgg

SEQ ID NO: 11217 - DNA, 20 bp, synthetic construct
  misc_feature 1..20: note = Description of Artificial Sequence: Synthetic oligonucleotide
  misc_feature 1..20: note = Target: FXN; (-) strand; PAM type: NRG; PAM sequence: TGG
  source 1..20: mol_type = other DNA
gcgggctgtcttcctacaca

SEQ ID NO: 11218 - DNA, 20 bp, synthetic construct
  misc_feature 1..20: note = Description of Artificial Sequence: Synthetic oligonucleotide
  misc_feature 1..20: note = Target: FXN; (-) strand; PAM type: NRG; PAM sequence: GGG
  source 1..20: mol_type = other DNA
agttgggccctggcagaagc

SEQ ID NO: 11219 - DNA, 20 bp, synthetic construct
  misc_feature 1..20: note = Description of Artificial Sequence: Synthetic oligonucleotide
  misc_feature 1..20: note = Target: FXN; (-) strand; PAM type: NRG; PAM sequence: CGG
  source 1..20: mol_type = other DNA
gagttgggccctggcagaag

SEQ ID NO: 11220 - DNA, 20 bp, synthetic construct
  misc_feature 1..20: note = Description of Artificial Sequence: Synthetic oligonucleotide
  misc_feature 1..20: note = Target: FXN; (-) strand; PAM type: NRG; PAM sequence: AAG
  source 1..20: mol_type = other DNA
gcagagttgggccctggcag

SEQ ID NO: 11221 - DNA, 20 bp, synthetic construct
  misc_feature 1..20: note = Description of Artificial Sequence: Synthetic oligonucleotide
  misc_feature 1..20: note = Target: FXN; (-) strand; PAM type: NRG; PAM sequence: CAG
  source 1..20: mol_type = other DNA
ccggcagagttgggccctgg

SEQ ID NO: 11222 - DNA, 20 bp, synthetic construct
  misc_feature 1..20: note = Description of Artificial Sequence: Synthetic oligonucleotide
  misc_feature 1..20: note = Target: FXN; (-) strand; PAM type: NRG; PAM sequence: TGG
  source 1..20: mol_type = other DNA
ctgccggcagagttgggccc

SEQ ID NO: 11223 - DNA, 20 bp, synthetic construct
  misc_feature 1..20: note = Description of Artificial Sequence: Synthetic oligonucleotide
  misc_feature 1..20: note = Target: FXN; (-) strand; PAM type: NRG; PAM sequence: GGG
  source 1..20: mol_type = other DNA
tgctacctgccggcagagtt

SEQ ID NO: 11224 - DNA, 20 bp, synthetic construct
  misc_feature 1..20: note = Description of Artificial Sequence: Synthetic oligonucleotide
  misc_feature 1..20: note = Target: FXN; (-) strand; PAM type: NRG; PAM sequence: TGG
  source 1..20: mol_type = other DNA
gtgctacctgccggcagagt

SEQ ID NO: 11225 - DNA, 20 bp, synthetic construct
  misc_feature 1..20: note = Description of Artificial Sequence: Synthetic oligonucleotide
  misc_feature 1..20: note = Target: FXN; (-) strand; PAM type: NRG; PAM sequence: GAG
  source 1..20: mol_type = other DNA
gaaggtgctacctgccggca

SEQ ID NO: 11226 - DNA, 20 bp, synthetic construct
  misc_feature 1..20: note = Description of Artificial Sequence: Synthetic oligonucleotide
  misc_feature 1..20: note = Target: FXN; (-) strand; PAM type: NRG; PAM sequence: CAG
  source 1..20: mol_type = other DNA
tggaaggtgctacctgccgg

SEQ ID NO: 11227 - DNA, 20 bp, synthetic construct
  misc_feature 1..20: note = Description of Artificial Sequence: Synthetic oligonucleotide
  misc_feature 1..20: note = Target: FXN; (-) strand; PAM type: NRG; PAM sequence: CGG
  source 1..20: mol_type = other DNA
ggttggaaggtgctacctgc

SEQ ID NO: 11228 - DNA, 20 bp, synthetic construct
  misc_feature 1..20: note = Description of Artificial Sequence: Synthetic oligonucleotide
  misc_feature 1..20: note = Target: FXN; (-) strand; PAM type: NRG; PAM sequence: AGG
  source 1..20: mol_type = other DNA
tccaaagtgaagaggttgga

SEQ ID NO: 11229 - DNA, 20 bp, synthetic construct
  misc_feature 1..20: note = Description of Artificial Sequence: Synthetic oligonucleotide
  misc_feature 1..20: note = Target: FXN; (-) strand; PAM type: NRG; PAM sequence: AAG
  source 1..20: mol_type = other DNA
gtccaaagtgaagaggttgg

SEQ ID NO: 11230 - DNA, 20 bp, synthetic construct
  misc_feature 1..20: note = Description of Artificial Sequence: Synthetic oligonucleotide
  misc_feature 1..20: note = Target: FXN; (-) strand; PAM type: NRG; PAM sequence: TGG
  source 1..20: mol_type = other DNA
aaagtccaaagtgaagaggt

SEQ ID NO: 11231 - DNA, 20 bp, synthetic construct
  misc_feature 1..20: note = Description of Artificial Sequence: Synthetic oligonucleotide
  misc_feature 1..20: note = Target: FXN; (-) strand; PAM type: NRG; PAM sequence: AGG
  source 1..20: mol_type = other DNA
ttataaagtccaaagtgaag

SEQ ID NO: 11232 - DNA, 20 bp, synthetic construct
  misc_feature 1..20: note = Description of Artificial Sequence: Synthetic oligonucleotide
  misc_feature 1..20: note = Target: FXN; (-) strand; PAM type: NRG; PAM sequence: GAG
  source 1..20: mol_type = other DNA
gttataaagtccaaagtgaa

SEQ ID NO: 11233 - DNA, 20 bp, synthetic construct
  misc_feature 1..20: note = Description of Artificial Sequence: Synthetic oligonucleotide
  misc_feature 1..20: note = Target: FXN; (-) strand; PAM type: NRG; PAM sequence: AAG
  source 1..20: mol_type = other DNA
cagttataaagtccaaagtg

SEQ ID NO: 11234 - DNA, 20 bp, synthetic construct
  misc_feature 1..20: note = Description of Artificial Sequence: Synthetic oligonucleotide
  misc_feature 1..20: note = Target: FXN; (-) strand; PAM type: NRG; PAM sequence: AAG
  source 1..20: mol_type = other DNA
cctgacagttataaagtcca

SEQ ID NO: 11235 - DNA, 20 bp, synthetic construct
  misc_feature 1..20: note = Description of Artificial Sequence: Synthetic oligonucleotide
  misc_feature 1..20: note = Target: FXN; (-) strand; PAM type: NRG; PAM sequence: AAG
  source 1..20: mol_type = other DNA
ctttatacctgacagttata

SEQ ID NO: 11236 - DNA, 20 bp, synthetic construct
  misc_feature 1..20: note = Description of Artificial Sequence: Synthetic oligonucleotide
  misc_feature 1..20: note = Target: FXN; (-) strand; PAM type: NRG; PAM sequence: CAG
  source 1..20: mol_type = other DNA
acaaccgactttatacctga

SEQ ID NO: 11237 - DNA, 20 bp, synthetic construct
  misc_feature 1..20: note = Description of Artificial Sequence: Synthetic oligonucleotide
  misc_feature 1..20: note = Target: FXN; (-) strand; PAM type: NRG; PAM sequence: AGG
  source 1..20: mol_type = other DNA
tgaagaatttgagaaacgta

SEQ ID NO: 11238 - DNA, 20 bp, synthetic construct
  misc_feature 1..20: note = Description of Artificial Sequence: Synthetic oligonucleotide
  misc_feature 1..20: note = Target: FXN; (-) strand; PAM type: NRG; PAM sequence: AAG
  source 1..20: mol_type = other DNA
ttgaagaatttgagaaacgt

SEQ ID NO: 11239 - DNA, 20 bp, synthetic construct
  misc_feature 1..20: note = Description of Artificial Sequence: Synthetic oligonucleotide
  misc_feature 1..20: note = Target: FXN; (-) strand; PAM type: NRG; PAM sequence: GAG
  source 1..20: mol_type = other DNA
tgacgtgtcttgaagaattt

SEQ ID NO: 11240 - DNA, 20 bp, synthetic construct
  misc_feature 1..20: note = Description of Artificial Sequence: Synthetic oligonucleotide
  misc_feature 1..20: note = Target: FXN; (-) strand; PAM type: NRG; PAM sequence: AAG
  source 1..20: mol_type = other DNA
aggctggttgacgtgtcttg

SEQ ID NO: 11241 - DNA, 20 bp, synthetic construct
  misc_feature 1..20: note = Description of Artificial Sequence: Synthetic oligonucleotide
  misc_feature 1..20: note = Target: FXN; (-) strand; PAM type: NRG; PAM sequence: TGG
  source 1..20: mol_type = other DNA
agagaatgcgtaggagaggc

SEQ ID NO: 11242 - DNA, 20 bp, synthetic construct
  misc_feature 1..20: note = Description of Artificial Sequence: Synthetic oligonucleotide
  misc_feature 1..20: note = Target: FXN; (-) strand; PAM type: NRG; PAM sequence: AGG
  source 1..20: mol_type = other DNA
ctggagagaatgcgtaggag

SEQ ID NO: 11243 - DNA, 20 bp, synthetic construct
  misc_feature 1..20: note = Description of Artificial Sequence: Synthetic oligonucleotide
  misc_feature 1..20: note = Target: FXN; (-) strand; PAM type: NRG; PAM sequence: GAG
  source 1..20: mol_type = other DNA
gctggagagaatgcgtagga

SEQ ID NO: 11244 - DNA, 20 bp, synthetic construct
  misc_feature 1..20: note = Description of Artificial Sequence: Synthetic oligonucleotide
  misc_feature 1..20: note = Target: FXN; (-) strand; PAM type: NRG; PAM sequence: GAG
  source 1..20: mol_type = other DNA
gagctggagagaatgcgtag

SEQ ID NO: 11245 - DNA, 20 bp, synthetic construct
  misc_feature 1..20: note = Description of Artificial Sequence: Synthetic oligonucleotide
  misc_feature 1..20: note = Target: FXN; (-) strand; PAM type: NRG; PAM sequence: AGG
  source 1..20: mol_type = other DNA
ctgagctggagagaatgcgt

SEQ ID NO: 11246 - DNA, 20 bp, synthetic construct
  misc_feature 1..20: note = Description of Artificial Sequence: Synthetic oligonucleotide
  misc_feature 1..20: note = Target: FXN; (-) strand; PAM type: NRG; PAM sequence: TAG
  source 1..20: mol_type = other DNA
actgagctggagagaatgcg

SEQ ID NO: 11247 - DNA, 20 bp, synthetic construct
  misc_feature 1..20: note = Description of Artificial Sequence: Synthetic oligonucleotide
  misc_feature 1..20: note = Target: FXN; (-) strand; PAM type: NRG; PAM sequence: GAG
  source 1..20: mol_type = other DNA
tgttttgagactgagctgga

SEQ ID NO: 11248 - DNA, 20 bp, synthetic construct
  misc_feature 1..20: note = Description of Artificial Sequence: Synthetic oligonucleotide
  misc_feature 1..20: note = Target: FXN; (-) strand; PAM type: NRG; PAM sequence: GAG
  source 1..20: mol_type = other DNA
tgtgttttgagactgagctg

SEQ ID NO: 11249 - DNA, 20 bp, synthetic construct
  misc_feature 1..20: note = Description of Artificial Sequence: Synthetic oligonucleotide
  misc_feature 1..20: note = Target: FXN; (-) strand; PAM type: NRG; PAM sequence: TGG
  source 1..20: mol_type = other DNA
ggtgtgttttgagactgagc

SEQ ID NO: 11250 - DNA, 20 bp, synthetic construct
  misc_feature 1..20: note = Description of Artificial Sequence: Synthetic oligonucleotide
  misc_feature 1..20: note = Target: FXN; (-) strand; PAM type: NRG; PAM sequence: GAG
  source 1..20: mol_type = other DNA
aaagggtgtgttttgagact

SEQ ID NO: 11251 - DNA, 20 bp, synthetic construct
  misc_feature 1..20: note = Description of Artificial Sequence: Synthetic oligonucleotide
  misc_feature 1..20: note = Target: FXN; (-) strand; PAM type: NRG; PAM sequence: GAG
  source 1..20: mol_type = other DNA
ggagagaaagggtgtgtttt

SEQ ID NO: 11252 - DNA, 20 bp, synthetic construct
  misc_feature 1..20: note = Description of Artificial Sequence: Synthetic oligonucleotide
  misc_feature 1..20: note = Target: FXN; (-) strand; PAM type: NRG; PAM sequence: GGG
  source 1..20: mol_type = other DNA
gagagtgagctggagagaaa

SEQ ID NO: 11253 - DNA, 20 bp, synthetic construct
  misc_feature 1..20: note = Description of Artificial Sequence: Synthetic oligonucleotide
  misc_feature 1..20: note = Target: FXN; (-) strand; PAM type: NRG; PAM sequence: AGG
  source 1..20: mol_type = other DNA
tgagagtgagctggagagaa

SEQ ID NO: 11254 - DNA, 20 bp, synthetic construct
  misc_feature 1..20: note = Description of Artificial Sequence: Synthetic oligonucleotide
  misc_feature 1..20: note = Target: FXN; (-) strand; PAM type: NRG; PAM sequence: AAG
  source 1..20: mol_type = other DNA
ttgagagtgagctggagaga

SEQ ID NO: 11255 - DNA, 20 bp, synthetic construct
  misc_feature 1..20: note = Description of Artificial Sequence: Synthetic oligonucleotide
  misc_feature 1..20: note = Target: FXN; (-) strand; PAM type: NRG; PAM sequence: GAG
  source 1..20: mol_type = other DNA
tgttttgagagtgagctgga

SEQ ID NO: 11256 - DNA, 20 bp, synthetic construct
  misc_feature 1..20: note = Description of Artificial Sequence: Synthetic oligonucleotide
  misc_feature 1..20: note = Target: FXN; (-) strand; PAM type: NRG; PAM sequence: GAG
  source 1..20: mol_type = other DNA
tgtgttttgagagtgagctg

SEQ ID NO: 11257 - DNA, 20 bp, synthetic construct
  misc_feature 1..20: note = Description of Artificial Sequence: Synthetic oligonucleotide
  misc_feature 1..20: note = Target: FXN; (-) strand; PAM type: NRG; PAM sequence: TGG
  source 1..20: mol_type = other DNA
ggtgtgttttgagagtgagc

SEQ ID NO: 11258 - DNA, 20 bp, synthetic construct
  misc_feature 1..20: note = Description of Artificial Sequence: Synthetic oligonucleotide
  misc_feature 1..20: note = Target: FXN; (-) strand; PAM type: NRG; PAM sequence: GAG
  source 1..20: mol_type = other DNA
atagggtgtgttttgagagt

SEQ ID NO: 11259 - DNA, 20 bp, synthetic construct
  misc_feature 1..20: note = Description of Artificial Sequence: Synthetic oligonucleotide
  misc_feature 1..20: note = Target: FXN; (-) strand; PAM type: NRG; PAM sequence: GAG
  source 1..20: mol_type = other DNA
cctgatagggtgtgttttga

SEQ ID NO: 11260 - DNA, 20 bp, synthetic construct
  misc_feature 1..20: note = Description of Artificial Sequence: Synthetic oligonucleotide
  misc_feature 1..20: note = Target: FXN; (-) strand; PAM type: NRG; PAM sequence: GAG
  source 1..20: mol_type = other DNA
ggcctgatagggtgtgtttt

SEQ ID NO: 11261 - DNA, 20 bp, synthetic construct
  misc_feature 1..20: note = Description of Artificial Sequence: Synthetic oligonucleotide
  misc_feature 1..20: note = Target: FXN; (-) strand; PAM type: NRG; PAM sequence: GGG
  source 1..20: mol_type = other DNA
aaagagtggttggcctgata

SEQ ID NO: 11262 - DNA, 20 bp, synthetic construct
  misc_feature 1..20: note = Description of Artificial Sequence: Synthetic oligonucleotide
  misc_feature 1..20: note = Target: FXN; (-) strand; PAM type: NRG; PAM sequence: AGG
  source 1..20: mol_type = other DNA
aaaagagtggttggcctgat

SEQ ID NO: 11263 - DNA, 20 bp, synthetic construct
  misc_feature 1..20: note = Description of Artificial Sequence: Synthetic oligonucleotide
  misc_feature 1..20: note = Target: FXN; (-) strand; PAM type: NRG; PAM sequence: TAG
  source 1..20: mol_type = other DNA
aaaaagagtggttggcctga

SEQ ID NO: 11264 - DNA, 20 bp, synthetic construct
  misc_feature 1..20: note = Description of Artificial Sequence: Synthetic oligonucleotide
  misc_feature 1..20: note = Target: FXN; (-) strand; PAM type: NRG; PAM sequence: TGG
  source 1..20: mol_type = other DNA
tgtcctttaaaaagagtggt

SEQ ID NO: 11265 - DNA, 20 bp, synthetic construct
  misc_feature 1..20: note = Description of Artificial Sequence: Synthetic oligonucleotide
  misc_feature 1..20: note = Target: FXN; (-) strand; PAM type: NRG; PAM sequence: TGG
  source 1..20: mol_type = other DNA
gagctgtcctttaaaaagag

SEQ ID NO: 11266 - DNA, 20 bp, synthetic construct
  misc_feature 1..20: note = Description of Artificial Sequence: Synthetic oligonucleotide
  misc_feature 1..20: note = Target: FXN; (-) strand; PAM type: NRG; PAM sequence: GAG
  source 1..20: mol_type = other DNA
gaggagctgtcctttaaaaa

SEQ ID NO: 11267 - DNA, 20 bp, synthetic construct
  misc_feature 1..20: note = Description of Artificial Sequence: Synthetic oligonucleotide
  misc_feature 1..20: note = Target: FXN; (-) strand; PAM type: NRG; PAM sequence: AAG
  source 1..20: mol_type = other DNA
gtgaggagctgtcctttaaa

SEQ ID NO: 11268 - DNA, 20 bp, synthetic construct
  misc_feature 1..20: note = Description of Artificial Sequence: Synthetic oligonucleotide
  misc_feature 1..20: note = Target: FXN; (-) strand; PAM type: NRG; PAM sequence: GAG
  source 1..20: mol_type = other DNA
tacctgactggattggtgag

SEQ ID NO: 11269 - DNA, 20 bp, synthetic construct
  misc_feature 1..20: note = Description of Artificial Sequence: Synthetic oligonucleotide
  misc_feature 1..20: note = Target: FXN; (-) strand; PAM type: NRG; PAM sequence: AGG
  source 1..20: mol_type = other DNA
gctacctgactggattggtg

SEQ ID NO: 11270 - DNA, 20 bp, synthetic construct
  misc_feature 1..20: note = Description of Artificial Sequence: Synthetic oligonucleotide
  misc_feature 1..20: note = Target: FXN; (-) strand; PAM type: NRG; PAM sequence: GAG
  source 1..20: mol_type = other DNA
ggctacctgactggattggt

SEQ ID NO: 11271 - DNA, 20 bp, synthetic construct
  misc_feature 1..20: note = Description of Artificial Sequence: Synthetic oligonucleotide
  misc_feature 1..20: note = Target: FXN; (-) strand; PAM type: NRG; PAM sequence: TGG
  source 1..20: mol_type = other DNA
ggaaggctacctgactggat

SEQ ID NO: 11272 - DNA, 20 bp, synthetic construct
  misc_feature 1..20: note = Description of Artificial Sequence: Synthetic oligonucleotide
  misc_feature 1..20: note = Target: FXN; (-) strand; PAM type: NRG; PAM sequence: TGG
  source 1..20: mol_type = other DNA
tgtggggaaggctacctgac

SEQ ID NO: 11273 - DNA, 20 bp, synthetic construct
  misc_feature 1..20: note = Description of Artificial Sequence: Synthetic oligonucleotide
  misc_feature 1..20: note = Target: FXN; (-) strand; PAM type: NRG; PAM sequence: AGG
  source 1..20: mol_type = other DNA
tccaggatacaatgtgggga

SEQ ID NO: 11274 - DNA, 20 bp, synthetic construct
  misc_feature 1..20: note = Description of Artificial Sequence: Synthetic oligonucleotide
  misc_feature 1..20: note = Target: FXN; (-) strand; PAM type: NRG; PAM sequence: AAG
  source 1..20: mol_type = other DNA
ttccaggatacaatgtgggg

SEQ ID NO: 11275 - DNA, 20 bp, synthetic construct
  misc_feature 1..20: note = Description of Artificial Sequence: Synthetic oligonucleotide
  misc_feature 1..20: note = Target: FXN; (-) strand; PAM type: NRG; PAM sequence: GGG
  source 1..20: mol_type = other DNA
cacttccaggatacaatgtg

SEQ ID NO: 11276 - DNA, 20 bp, synthetic construct
  misc_feature 1..20: note = Description of Artificial Sequence: Synthetic oligonucleotide
  misc_feature 1..20: note = Target: FXN; (-) strand; PAM type: NRG; PAM sequence: GGG
  source 1..20: mol_type = other DNA
ccacttccaggatacaatgt

SEQ ID NO: 11277 - DNA, 20 bp, synthetic construct
  misc_feature 1..20: note = Description of Artificial Sequence: Synthetic oligonucleotide
  misc_feature 1..20: note = Target: FXN; (-) strand; PAM type: NRG; PAM sequence: TGG
  source 1..20: mol_type = other DNA
cccacttccaggatacaatg

SEQ ID NO: 11278 - DNA, 20 bp, synthetic construct
  misc_feature 1..20: note = Description of Artificial Sequence: Synthetic oligonucleotide
  misc_feature 1..20: note = Target: FXN; (-) strand; PAM type: NRG; PAM sequence: AGG
  source 1..20: mol_type = other DNA
ccagtccatcacccacttcc

SEQ ID NO: 11279 - DNA, 20 bp, synthetic construct
  misc_feature 1..20: note = Description of Artificial Sequence: Synthetic oligonucleotide
  misc_feature 1..20: note = Target: FXN; (-) strand; PAM type: NRG; PAM sequence: CAG
  source 1..20: mol_type = other DNA
cccagtccatcacccacttc

SEQ ID NO: 11280 - DNA, 20 bp, synthetic construct
  misc_feature 1..20: note = Description of Artificial Sequence: Synthetic oligonucleotide
  misc_feature 1..20: note = Target: FXN; (-) strand; PAM type: NRG; PAM sequence: CAG
  source 1..20: mol_type = other DNA
atatgaccctcttccccacc

SEQ ID NO: 11281 - DNA, 20 bp, synthetic construct
  misc_feature 1..20: note = Description of Artificial Sequence: Synthetic oligonucleotide
  misc_feature 1..20: note = Target: FXN; (-) strand; PAM type: NRG; PAM sequence: CAG
  source 1..20: mol_type = other DNA
gacaattactgtaagacata

SEQ ID NO: 11282 - DNA, 20 bp, synthetic construct
  misc_feature 1..20: note = Description of Artificial Sequence: Synthetic oligonucleotide
  misc_feature 1..20: note = Target: FXN; (-) strand; PAM type: NRG; PAM sequence: AAG
  source 1..20: mol_type = other DNA
ggctgctagacaattactgt

SEQ ID NO: 11283 - DNA, 20 bp, synthetic construct
  misc_feature 1..20: note = Description of Artificial Sequence: Synthetic oligonucleotide
  misc_feature 1..20: note = Target: FXN; (-) strand; PAM type: NRG; PAM sequence: TAG
  source 1..20: mol_type = other DNA
agtaagacaccaggggctgc

SEQ ID NO: 11284 - DNA, 20 bp, synthetic construct
  misc_feature 1..20: note = Description of Artificial Sequence: Synthetic oligonucleotide
  misc_feature 1..20: note = Target: FXN; (-) strand; PAM type: NRG; PAM sequence: GGG
  source 1..20: mol_type = other DNA
ggcctaaagtaagacaccag

SEQ ID NO: 11285 - DNA, 20 bp, synthetic construct
  misc_feature 1..20: note = Description of Artificial Sequence: Synthetic oligonucleotide
  misc_feature 1..20: note = Target: FXN; (-) strand; PAM type: NRG; PAM sequence: GGG
  source 1..20: mol_type = other DNA
gggcctaaagtaagacacca

SEQ ID NO: 11286 - DNA, 20 bp, synthetic construct
  misc_feature 1..20: note = Description of Artificial Sequence: Synthetic oligonucleotide
  misc_feature 1..20: note = Target: FXN; (-) strand; PAM type: NRG; PAM sequence: AGG
  source 1..20: mol_type = other DNA
ggggcctaaagtaagacacc

SEQ ID NO: 11287 - DNA, 20 bp, synthetic construct
  misc_feature 1..20: note = Description of Artificial Sequence: Synthetic oligonucleotide
  misc_feature 1..20: note = Target: FXN; (-) strand; PAM type: NRG; PAM sequence: CAG
  source 1..20: mol_type = other DNA
gggggcctaaagtaagacac

SEQ ID NO: 11288 - DNA, 20 bp, synthetic construct
  misc_feature 1..20: note = Description of Artificial Sequence: Synthetic oligonucleotide
  misc_feature 1..20: note = Target: FXN; (-) strand; PAM type: NRG; PAM sequence: AAG
  source 1..20: mol_type = other DNA
gtttccagggggcctaaagt

SEQ ID NO: 11289 - DNA, 20 bp, synthetic construct
  misc_feature 1..20: note = Description of Artificial Sequence: Synthetic oligonucleotide
  misc_feature 1..20: note = Target: FXN; (-) strand; PAM type: NRG; PAM sequence: AAG
  source 1..20: mol_type = other DNA
gaaagtttccagggggccta

SEQ ID NO: 11290 - DNA, 20 bp, synthetic construct
  misc_feature 1..20: note = Description of Artificial Sequence: Synthetic oligonucleotide
  misc_feature 1..20: note = Target: FXN; (-) strand; PAM type: NRG; PAM sequence: GGG
  source 1..20: mol_type = other DNA
actatctgaaagtttccagg

SEQ ID NO: 11291 - DNA, 20 bp, synthetic construct
  misc_feature 1..20: note = Description of Artificial Sequence: Synthetic oligonucleotide
  misc_feature 1..20: note = Target: FXN; (-) strand; PAM type: NRG; PAM sequence: GGG
  source 1..20: mol_type = other DNA
cactatctgaaagtttccag

SEQ ID NO: 11292 - DNA, 20 bp, synthetic construct
  misc_feature 1..20: note = Description of Artificial Sequence: Synthetic oligonucleotide
  misc_feature 1..20: note = Target: FXN; (-) strand; PAM type: NRG; PAM sequence: GGG
  source 1..20: mol_type = other DNA
ccactatctgaaagtttcca

SEQ ID NO: 11293 - DNA, 20 bp, synthetic construct
  misc_feature 1..20: note = Description of Artificial Sequence: Synthetic oligonucleotide
  misc_feature 1..20: note = Target: FXN; (-) strand; PAM type: NRG; PAM sequence: AGG
  source 1..20: mol_type = other DNA
tccactatctgaaagtttcc

SEQ ID NO: 11294 - DNA, 20 bp, synthetic construct
  misc_feature 1..20: note = Description of Artificial Sequence: Synthetic oligonucleotide
  misc_feature 1..20: note = Target: FXN; (-) strand; PAM type: NRG; PAM sequence: CAG
  source 1..20: mol_type = other DNA
ctccactatctgaaagtttc

SEQ ID NO: 11295 - DNA, 20 bp, synthetic construct
  misc_feature 1..20: note = Description of Artificial Sequence: Synthetic oligonucleotide
  misc_feature 1..20: note = Target: FXN; (-) strand; PAM type: NRG; PAM sequence: AAG
  source 1..20: mol_type = other DNA
cagacaactccactatctga

SEQ ID NO: 11296 - DNA, 20 bp, synthetic construct
  misc_feature 1..20: note = Description of Artificial Sequence: Synthetic oligonucleotide
  misc_feature 1..20: note = Target: FXN; (-) strand; PAM type: NRG; PAM sequence: CAG
  source 1..20: mol_type = other DNA
gtaggttataagatatgtat

SEQ ID NO: 11297 - DNA, 20 bp, synthetic construct
  misc_feature 1..20: note = Description of Artificial Sequence: Synthetic oligonucleotide
  misc_feature 1..20: note = Target: FXN; (-) strand; PAM type: NRG; PAM sequence: AAG
  source 1..20: mol_type = other DNA
tattaatatctgtaggttat

SEQ ID NO: 11298 - DNA, 20 bp, synthetic construct
  misc_feature 1..20: note = Description of Artificial Sequence: Synthetic oligonucleotide
  misc_feature 1..20: note = Target: FXN; (-) strand; PAM type: NRG; PAM sequence: AGG
  source 1..20: mol_type = other DNA
gaggatatattaatatctgt

SEQ ID NO: 11299 - DNA, 20 bp, synthetic construct
  misc_feature 1..20: note = Description of Artificial Sequence: Synthetic oligonucleotide
  misc_feature 1..20: note = Target: FXN; (-) strand; PAM type: NRG; PAM sequence: TAG
  source 1..20: mol_type = other DNA
tgaggatatattaatatctg

SEQ ID NO: 11300 - DNA, 20 bp, synthetic construct
  misc_feature 1..20: note = Description of Artificial Sequence: Synthetic oligonucleotide
  misc_feature 1..20: note = Target: FXN; (-) strand; PAM type: NRG; PAM sequence: AGG
  source 1..20: mol_type = other DNA
agagcttttgtgcccctgtg

SEQ ID NO: 11301 - DNA, 20 bp, synthetic construct
  misc_feature 1..20: note = Description of Artificial Sequence: Synthetic oligonucleotide
  misc_feature 1..20: note = Target: FXN; (-) strand; PAM type: NRG; PAM sequence: GAG
  source 1..20: mol_type = other DNA
aagagcttttgtgcccctgt

SEQ ID NO: 11302 - DNA, 20 bp, synthetic construct
  misc_feature 1..20: note = Description of Artificial Sequence: Synthetic oligonucleotide
  misc_feature 1..20: note = Target: FXN; (-) strand; PAM type: NRG; PAM sequence: GAG
  source 1..20: mol_type = other DNA
tataataaacatccttgtaa

SEQ ID NO: 11303 - DNA, 20 bp, synthetic construct
  misc_feature 1..20: note = Description of Artificial Sequence: Synthetic oligonucleotide
  misc_feature 1..20: note = Target: FXN; (-) strand; PAM type: NRG; PAM sequence: AAG
  source 1..20: mol_type = other DNA
attataataaacatccttgt

SEQ ID NO: 11304 - DNA, 20 bp, synthetic construct
  misc_feature 1..20: note = Description of Artificial Sequence: Synthetic oligonucleotide
  misc_feature 1..20: note = Target: FXN; (-) strand; PAM type: NRG; PAM sequence: TGG
  source 1..20: mol_type = other DNA
ttttaaaatggttagtttta

SEQ ID NO: 11305 - DNA, 20 bp, synthetic construct
  misc_feature 1..20: note = Description of Artificial Sequence: Synthetic oligonucleotide
  misc_feature 1..20: note = Target: FXN; (-) strand; PAM type: NRG; PAM sequence: TAG
  source 1..20: mol_type = other DNA
attatacattttaaaatggt

SEQ ID NO: 11306 - DNA, 20 bp, synthetic construct
  misc_feature 1..20: note = Description of Artificial Sequence: Synthetic oligonucleotide
  misc_feature 1..20: note = Target: FXN; (-) strand; PAM type: NRG; PAM sequence: TGG
  source 1..20: mol_type = other DNA
ttgcattatacattttaaaa

SEQ ID NO: 11307 - DNA, 20 bp, synthetic construct
  misc_feature 1..20: note = Description of Artificial Sequence: Synthetic oligonucleotide
  misc_feature 1..20: note = Target: FXN; (-) strand; PAM type: NRG; PAM sequence: CAG
  source 1..20: mol_type = other DNA
tgttctggaattagtagtga

SEQ ID NO: 11308 - DNA, 20 bp, synthetic construct
  misc_feature 1..20: note = Description of Artificial Sequence: Synthetic oligonucleotide
  misc_feature 1..20: note = Target: FXN; (-) strand; PAM type: NRG; PAM sequence: TAG
  source 1..20: mol_type = other DNA
tgaaaatgttctggaattag

SEQ ID NO: 11309 - DNA, 20 bp, synthetic construct
  misc_feature 1..20: note = Description of Artificial Sequence: Synthetic oligonucleotide
  misc_feature 1..20: note = Target: FXN; (-) strand; PAM type: NRG; PAM sequence: TAG
  source 1..20: mol_type = other DNA
taatgaaaatgttctggaat

SEQ ID NO: 11310 - DNA, 20 bp, synthetic construct
  misc_feature 1..20: note = Description of Artificial Sequence: Synthetic oligonucleotide
  misc_feature 1..20: note = Target: FXN; (-) strand; PAM type: NRG; PAM sequence: TGG
  source 1..20: mol_type = other DNA
ctggaataatgaaaatgttc

SEQ ID NO: 11311 - DNA, 20 bp, synthetic construct
  misc_feature 1..20: note = Description of Artificial Sequence: Synthetic oligonucleotide
  misc_feature 1..20: note = Target: FXN; (-) strand; PAM type: NRG; PAM sequence: TGG
  source 1..20: mol_type = other DNA
atatgaatagggtttccttc

SEQ ID NO: 11312 - DNA, 20 bp, synthetic construct
  misc_feature 1..20: note = Description of Artificial Sequence: Synthetic oligonucleotide
  misc_feature 1..20: note = Target: FXN; (-) strand; PAM type: NRG; PAM sequence: GGG
  source 1..20: mol_type = other DNA
agtgattgctaatatgaata

SEQ ID NO: 11313 - DNA, 20 bp, synthetic construct
  misc_feature 1..20: note = Description of Artificial Sequence: Synthetic oligonucleotide
  misc_feature 1..20: note = Target: FXN; (-) strand; PAM type: NRG; PAM sequence: AGG
  source 1..20: mol_type = other DNA
gagtgattgctaatatgaat

SEQ ID NO: 11314 - DNA, 20 bp, synthetic construct
  misc_feature 1..20: note = Description of Artificial Sequence: Synthetic oligonucleotide
  misc_feature 1..20: note = Target: FXN; (-) strand; PAM type: NRG; PAM sequence: TAG
  source 1..20: mol_type = other DNA
ggagtgattgctaatatgaa

SEQ ID NO: 11315 - DNA, 20 bp, synthetic construct
  misc_feature 1..20: note = Description of Artificial Sequence: Synthetic oligonucleotide
  misc_feature 1..20: note = Target: FXN; (-) strand; PAM type: NRG; PAM sequence: GAG
  source 1..20: mol_type = other DNA
tagggaaaggcggaatgggg

SEQ ID NO: 11316 - DNA, 20 bp, synthetic construct
  misc_feature 1..20: note = Description of Artificial Sequence: Synthetic oligonucleotide
  misc_feature 1..20: note = Target: FXN; (-) strand; PAM type: NRG; PAM sequence: GGG
  source 1..20: mol_type = other DNA
tttagggaaaggcggaatgg

SEQ ID NO: 11317 - DNA, 20 bp, synthetic construct
  misc_feature 1..20: note = Description of Artificial Sequence: Synthetic oligonucleotide
  misc_feature 1..20: note = Target: FXN; (-) strand; PAM type: NRG; PAM sequence: GGG
  source 1..20: mol_type = other DNA
ttttagggaaaggcggaatg

SEQ ID NO: 11318 - DNA, 20 bp, synthetic construct
  misc_feature 1..20: note = Description of Artificial Sequence: Synthetic oligonucleotide
  misc_feature 1..20: note = Target: FXN; (-) strand; PAM type: NRG; PAM sequence: GGG
  source 1..20: mol_type = other DNA
gttttagggaaaggcggaat

SEQ ID NO: 11319 - DNA, 20 bp, synthetic construct
  misc_feature 1..20: note = Description of Artificial Sequence: Synthetic oligonucleotide
  misc_feature 1..20: note = Target: FXN; (-) strand; PAM type: NRG; PAM sequence: TGG
  source 1..20: mol_type = other DNA
ggttttagggaaaggcggaa

SEQ ID NO: 11320 - DNA, 20 bp, synthetic construct
  misc_feature 1..20: note = Description of Artificial Sequence: Synthetic oligonucleotide
  misc_feature 1..20: note = Target: FXN; (-) strand; PAM type: NRG; PAM sequence: CGG
  source 1..20: mol_type = other DNA
tgctgggttttagggaaagg

SEQ ID NO: 11321 - DNA, 20 bp, synthetic construct
  misc_feature 1..20: note = Description of Artificial Sequence: Synthetic oligonucleotide
  misc_feature 1..20: note = Target: FXN; (-) strand; PAM type: NRG; PAM sequence: AGG
  source 1..20: mol_type = other DNA
gattgctgggttttagggaa

SEQ ID NO: 11322 - DNA, 20 bp, synthetic construct
  misc_feature 1..20: note = Description of Artificial Sequence: Synthetic oligonucleotide
  misc_feature 1..20: note = Target: FXN; (-) strand; PAM type: NRG; PAM sequence: AAG
  source 1..20: mol_type = other DNA
tgattgctgggttttaggga

SEQ ID NO: 11323 - DNA, 20 bp, synthetic construct
  misc_feature 1..20: note = Description of Artificial Sequence: Synthetic oligonucleotide
  misc_feature 1..20: note = Target: FXN; (-) strand; PAM type: NRG; PAM sequence: GGG
  source 1..20: mol_type = other DNA
ttagtgattgctgggtttta

SEQ ID NO: 11324 - DNA, 20 bp, synthetic construct
  misc_feature 1..20: note = Description of Artificial Sequence: Synthetic oligonucleotide
  misc_feature 1..20: note = Target: FXN; (-) strand; PAM type: NRG; PAM sequence: AGG
  source 1..20: mol_type = other DNA
attagtgattgctgggtttt

SEQ ID NO: 11325 - DNA, 20 bp, synthetic construct
  misc_feature 1..20: note = Description of Artificial Sequence: Synthetic oligonucleotide
  misc_feature 1..20: note = Target: FXN; (-) strand; PAM type: NRG; PAM sequence: TAG
  source 1..20: mol_type = other DNA
gattagtgattgctgggttt

SEQ ID NO: 11326 - DNA, 20 bp, synthetic construct
  misc_feature 1..20: note = Description of Artificial Sequence: Synthetic oligonucleotide
  misc_feature 1..20: note = Target: FXN; (-) strand; PAM type: NRG; PAM sequence: GGG
  source 1..20: mol_type = other DNA
aaagtagattagtgattgct

SEQ ID NO: 11327 - DNA, 20 bp, synthetic construct
  misc_feature 1..20: note = Description of Artificial Sequence: Synthetic oligonucleotide
  misc_feature 1..20: note = Target: FXN; (-) strand; PAM type: NRG; PAM sequence: TGG
  source 1..20: mol_type = other DNA
gaaagtagattagtgattgc

SEQ ID NO: 11328 - DNA, 20 bp, synthetic construct
  misc_feature 1..20: note = Description of Artificial Sequence: Synthetic oligonucleotide
  misc_feature 1..20: note = Target: FXN; (-) strand; PAM type: NRG; PAM sequence: TAG
  source 1..20: mol_type = other DNA
cacagagacagaaagtagat

SEQ ID NO: 11329 - DNA, 20 bp, synthetic construct
  misc_feature 1..20: note = Description of Artificial Sequence: Synthetic oligonucleotide
  misc_feature 1..20: note = Target: FXN; (-) strand; PAM type: NRG; PAM sequence: TAG
  source 1..20: mol_type = other DNA
aaatccacagagacagaaag

SEQ ID NO: 11330 - DNA, 20 bp, synthetic construct
  misc_feature 1..20: note = Description of Artificial Sequence: Synthetic oligonucleotide
  misc_feature 1..20: note = Target: FXN; (-) strand; PAM type: NRG; PAM sequence: AAG
  source 1..20: mol_type = other DNA
tttaaatccacagagacaga

SEQ ID NO: 11331 - DNA, 20 bp, synthetic construct
  misc_feature 1..20: note = Description of Artificial Sequence: Synthetic oligonucleotide
  misc_feature 1..20: note = Target: FXN; (-) strand; PAM type: NRG; PAM sequence: CAG
  source 1..20: mol_type = other DNA
ttactttaaatccacagaga

SEQ ID NO: 11332 - DNA, 20 bp, synthetic construct
  misc_feature 1..20: note = Description of Artificial Sequence: Synthetic oligonucleotide
  misc_feature 1..20: note = Target: FXN; (-) strand; PAM type: NRG; PAM sequence: GAG
  source 1..20: mol_type = other DNA
aaaattactttaaatccaca

SEQ ID NO: 11333 - DNA, 20 bp, synthetic construct
  misc_feature 1..20: note = Description of Artificial Sequence: Synthetic oligonucleotide
  misc_feature 1..20: note = Target: FXN; (-) strand; PAM type: NRG; PAM sequence: CAG
  source 1..20: mol_type = other DNA
ttaaaattactttaaatcca

SEQ ID NO: 11334 - DNA, 20 bp, synthetic construct
  misc_feature 1..20: note = Description of Artificial Sequence: Synthetic oligonucleotide
  misc_feature 1..20: note = Target: FXN; (-) strand; PAM type: NRG; PAM sequence: TAG
  source 1..20: mol_type = other DNA
tgactagatacatttcctta

SEQ ID NO: 11335 - DNA, 20 bp, synthetic construct
  misc_feature 1..20: note = Description of Artificial Sequence: Synthetic oligonucleotide
  misc_feature 1..20: note = Target: FXN; (-) strand; PAM type: NRG; PAM sequence: TAG
  source 1..20: mol_type = other DNA
tcaagctgtatgcttgtgac

SEQ ID NO: 11336 - DNA, 20 bp, synthetic construct
  misc_feature 1..20: note = Description of Artificial Sequence: Synthetic oligonucleotide
  misc_feature 1..20: note = Target: FXN; (-) strand; PAM type: NRG; PAM sequence: AAG
  source 1..20: mol_type = other DNA
tcaatttttacaaattcatc

SEQ ID NO: 11337 - DNA, 20 bp, synthetic construct
  misc_feature 1..20: note = Description of Artificial Sequence: Synthetic oligonucleotide
  misc_feature 1..20: note = Target: FXN; (-) strand; PAM type: NRG; PAM sequence: AGG
  source 1..20: mol_type = other DNA
agcttacagggtatgttcat

SEQ ID NO: 11338 - DNA, 20 bp, synthetic construct
  misc_feature 1..20: note = Description of Artificial Sequence: Synthetic oligonucleotide
  misc_feature 1..20: note = Target: FXN; (-) strand; PAM type: NRG; PAM sequence: TAG
  source 1..20: mol_type = other DNA
gagcttacagggtatgttca

SEQ ID NO: 11339 - DNA, 20 bp, synthetic construct
  misc_feature 1..20: note = Description of Artificial Sequence: Synthetic oligonucleotide
  misc_feature 1..20: note = Target: FXN; (-) strand; PAM type: NRG; PAM sequence: GGG
  source 1..20: mol_type = other DNA
ttctatgtcttgagcttaca

SEQ ID NO: 11340 - DNA, 20 bp, synthetic construct
  misc_feature 1..20: note = Description of Artificial Sequence: Synthetic oligonucleotide
  misc_feature 1..20: note = Target: FXN; (-) strand; PAM type: NRG; PAM sequence: AGG
  source 1..20: mol_type = other DNA
attctatgtcttgagcttac

SEQ ID NO: 11341 - DNA, 20 bp, synthetic construct
  misc_feature 1..20: note = Description of Artificial Sequence: Synthetic oligonucleotide
  misc_feature 1..20: note = Target: FXN; (-) strand; PAM type: NRG; PAM sequence: CAG
  source 1..20: mol_type = other DNA
cattctatgtcttgagctta

SEQ ID NO: 11342 - DNA, 20 bp, synthetic construct
  misc_feature 1..20: note = Description of Artificial Sequence: Synthetic oligonucleotide
  misc_feature 1..20: note = Target: FXN; (-) strand; PAM type: NRG; PAM sequence: GAG
  source 1..20: mol_type = other DNA
ctggtaacattctatgtctt

SEQ ID NO: 11343 - DNA, 20 bp, synthetic construct
  misc_feature 1..20: note = Description of Artificial Sequence: Synthetic oligonucleotide
  misc_feature 1..20: note = Target: FXN; (-) strand; PAM type: NRG; PAM sequence: TGG
  source 1..20: mol_type = other DNA
ggcagcttgcttgcaggggc

SEQ ID NO: 11344 - DNA, 20 bp, synthetic construct
  misc_feature 1..20: note = Description of Artificial Sequence: Synthetic oligonucleotide
  misc_feature 1..20: note = Target: FXN; (-) strand; PAM type: NRG; PAM sequence: GGG
  source 1..20: mol_type = other DNA
agcaggcagcttgcttgcag

SEQ ID NO: 11345 - DNA, 20 bp, synthetic construct
  misc_feature 1..20: note = Description of Artificial Sequence: Synthetic oligonucleotide
  misc_feature 1..20: note = Target: FXN; (-) strand; PAM type: NRG; PAM sequence: GGG
  source 1..20: mol_type = other DNA
gagcaggcagcttgcttgca

SEQ ID NO: 11346 - DNA, 20 bp, synthetic construct
  misc_feature 1..20: note = Description of Artificial Sequence: Synthetic oligonucleotide
  misc_feature 1..20: note = Target: FXN; (-) strand; PAM type: NRG; PAM sequence: AGG
  source 1..20: mol_type = other DNA
tgagcaggcagcttgcttgc

SEQ ID NO: 11347 - DNA, 20 bp, synthetic construct
  misc_feature 1..20: note = Description of Artificial Sequence: Synthetic oligonucleotide
  misc_feature 1..20: note = Target: FXN; (-) strand; PAM type: NRG; PAM sequence: CAG
  source 1..20: mol_type = other DNA
gtgagcaggcagcttgcttg

SEQ ID NO: 11348 - DNA, 20 bp, synthetic construct
  misc_feature 1..20: note = Description of Artificial Sequence: Synthetic oligonucleotide
  misc_feature 1..20: note = Target: FXN; (-) strand; PAM type: NRG; PAM sequence: CAG
  source 1..20: mol_type = other DNA
aatgactagaagtgagcagg

SEQ ID NO: 11349 - DNA, 20 bp, synthetic construct
  misc_feature 1..20: note = Description of Artificial Sequence: Synthetic oligonucleotide
  misc_feature 1..20: note = Target: FXN; (-) strand; PAM type: NRG; PAM sequence: AGG
  source 1..20: mol_type = other DNA
gttaatgactagaagtgagc

SEQ ID NO: 11350 - DNA, 20 bp, synthetic construct
  misc_feature 1..20: note = Description of Artificial Sequence: Synthetic oligonucleotide
  misc_feature 1..20: note = Target: FXN; (-) strand; PAM type: NRG; PAM sequence: CAG
  source 1..20: mol_type = other DNA
ggttaatgactagaagtgag

SEQ ID NO: 11351 - DNA, 20 bp, synthetic construct
  misc_feature 1..20: note = Description of Artificial Sequence: Synthetic oligonucleotide
  misc_feature 1..20: note = Target: FXN; (-) strand; PAM type: NRG; PAM sequence: GAG
  source 1..20: mol_type = other DNA
aggggttaatgactagaagt

SEQ ID NO: 11352 - DNA, 20 bp, synthetic construct
  misc_feature 1..20: note = Description of Artificial Sequence: Synthetic oligonucleotide
  misc_feature 1..20: note = Target: FXN; (-) strand; PAM type: NRG; PAM sequence: AAG
  source 1..20: mol_type = other DNA
agggaggggttaatgactag

SEQ ID NO: 11353 - DNA, 20 bp, synthetic construct
  misc_feature 1..20: note = Description of Artificial Sequence: Synthetic oligonucleotide
  misc_feature 1..20: note = Target: FXN; (-) strand; PAM type: NRG; PAM sequence: TAG
  source 1..20: mol_type = other DNA
aagagggaggggttaatgac

SEQ ID NO: 11354 - DNA, 20 bp, synthetic construct
  misc_feature 1..20: note = Description of Artificial Sequence: Synthetic oligonucleotide
  misc_feature 1..20: note = Target: FXN; (-) strand; PAM type: NRG; PAM sequence: GGG
  source 1..20: mol_type = other DNA
actagaaggaaaagagggag

SEQ ID NO: 11355 - DNA, 20 bp, synthetic construct
  misc_feature 1..20: note = Description of Artificial Sequence: Synthetic oligonucleotide
  misc_feature 1..20: note = Target: FXN; (-) strand; PAM type: NRG; PAM sequence: GGG
  source 1..20: mol_type = other DNA
gactagaaggaaaagaggga

SEQ ID NO: 11356 - DNA, 20 bp, synthetic construct
  misc_feature 1..20: note = Description of Artificial Sequence: Synthetic oligonucleotide
  misc_feature 1..20: note = Target: FXN; (-) strand; PAM type: NRG; PAM sequence: AGG
  source 1..20: mol_type = other DNA
tgactagaaggaaaagaggg

SEQ ID NO: 11357 - DNA, 20 bp, synthetic construct
  misc_feature 1..20: note = Description of Artificial Sequence: Synthetic oligonucleotide
  misc_feature 1..20: note = Target: FXN; (-) strand; PAM type: NRG; PAM sequence: GAG
  source 1..20: mol_type = other DNA
atgactagaaggaaaagagg

SEQ ID NO: 11358 - DNA, 20 bp, synthetic construct
  misc_feature 1..20: note = Description of Artificial Sequence: Synthetic oligonucleotide
  misc_feature 1..20: note = Target: FXN; (-) strand; PAM type: NRG; PAM sequence: GGG
  source 1..20: mol_type = other DNA
taatgactagaaggaaaaga

SEQ ID NO: 11359 - DNA, 20 bp, synthetic construct
  misc_feature 1..20: note = Description of Artificial Sequence: Synthetic oligonucleotide
  misc_feature 1..20: note = Target: FXN; (-) strand; PAM type: NRG; PAM sequence: AGG
  source 1..20: mol_type = other DNA
ttaatgactagaaggaaaag

SEQ ID NO: 11360 - DNA, 20 bp, synthetic construct
  misc_feature 1..20: note = Description of Artificial Sequence: Synthetic oligonucleotide
  misc_feature 1..20: note = Target: FXN; (-) strand; PAM type: NRG; PAM sequence: GAG
  source 1..20: mol_type = other DNA
gttaatgactagaaggaaaa

SEQ ID NO: 11361 - DNA, 20 bp, synthetic construct
  misc_feature 1..20: note = Description of Artificial Sequence: Synthetic oligonucleotide
  misc_feature 1..20: note = Target: FXN; (-) strand; PAM type: NRG; PAM sequence: AAG
  source 1..20: mol_type = other DNA
gggttaatgactagaaggaa

SEQ ID NO: 11362 - DNA, 20 bp, synthetic construct
  misc_feature 1..20: note = Description of Artificial Sequence: Synthetic oligonucleotide
  misc_feature 1..20: note = Target: FXN; (-) strand; PAM type: NRG; PAM sequence: AGG
  source 1..20: mol_type = other DNA
ctgaagggttaatgactaga

SEQ ID NO: 11363 - DNA, 20 bp, synthetic construct
  misc_feature 1..20: note = Description of Artificial Sequence: Synthetic oligonucleotide
  misc_feature 1..20: note = Target: FXN; (-) strand; PAM type: NRG; PAM sequence: AAG
  source 1..20: mol_type = other DNA
tctgaagggttaatgactag

SEQ ID NO: 11364 - DNA, 20 bp, synthetic construct
  misc_feature 1..20: note = Description of Artificial Sequence: Synthetic oligonucleotide
  misc_feature 1..20: note = Target: FXN; (-) strand; PAM type: NRG; PAM sequence: TAG
  source 1..20: mol_type = other DNA
tactctgaagggttaatgac

SEQ ID NO: 11365 - DNA, 20 bp, synthetic construct
  misc_feature 1..20: note = Description of Artificial Sequence: Synthetic oligonucleotide
  misc_feature 1..20: note = Target: FXN; (-) strand; PAM type: NRG; PAM sequence: GGG
  source 1..20: mol_type = other DNA
atcagaatagttactctgaa

SEQ ID NO: 11366 - DNA, 20 bp, synthetic construct
  misc_feature 1..20: note = Description of Artificial Sequence: Synthetic oligonucleotide
  misc_feature 1..20: note = Target: FXN; (-) strand; PAM type: NRG; PAM sequence: AGG
  source 1..20: mol_type = other DNA
aatcagaatagttactctga

SEQ ID NO: 11367 - DNA, 20 bp, synthetic construct
  misc_feature 1..20: note = Description of Artificial Sequence: Synthetic oligonucleotide
  misc_feature 1..20: note = Target: FXN; (-) strand; PAM type: NRG; PAM sequence: AAG
  source 1..20: mol_type = other DNA
taatcagaatagttactctg

SEQ ID NO: 11368 - DNA, 20 bp, synthetic construct
  misc_feature 1..20: note = Description of Artificial Sequence: Synthetic oligonucleotide
  misc_feature 1..20: note = Target: FXN; (-) strand; PAM type: NRG; PAM sequence: TAG
  source 1..20: mol_type = other DNA
tatgctattggtaatcagaa

SEQ ID NO: 11369 - DNA, 20 bp, synthetic construct
  misc_feature 1..20: note = Description of Artificial Sequence: Synthetic oligonucleotide
  misc_feature 1..20: note = Target: FXN; (-) strand; PAM type: NRG; PAM sequence: CAG
  source 1..20: mol_type = other DNA
taatctatgctattggtaat

SEQ ID NO: 11370 - DNA, 20 bp, synthetic construct
  misc_feature 1..20: note = Description of Artificial Sequence: Synthetic oligonucleotide
  misc_feature 1..20: note = Target: FXN; (-) strand; PAM type: NRG; PAM sequence: TGG
  source 1..20: mol_type = other DNA
gcagaactaatctatgctat

SEQ ID NO: 11371 - DNA, 20 bp, synthetic construct
  misc_feature 1..20: note = Description of Artificial Sequence: Synthetic oligonucleotide
  misc_feature 1..20: note = Target: FXN; (-) strand; PAM type: NRG; PAM sequence: CAG
  source 1..20: mol_type = other DNA
atataaagtaaaacaacagg

SEQ ID NO: 11372 - DNA, 20 bp, synthetic construct
  misc_feature 1..20: note = Description of Artificial Sequence: Synthetic oligonucleotide
  misc_feature 1..20: note = Target: FXN; (-) strand; PAM type: NRG; PAM sequence: AGG
  source 1..20: mol_type = other DNA
tttatataaagtaaaacaac

SEQ ID NO: 11373 - DNA, 20 bp, synthetic construct
  misc_feature 1..20: note = Description of Artificial Sequence: Synthetic oligonucleotide
  misc_feature 1..20: note = Target: FXN; (-) strand; PAM type: NRG; PAM sequence: CAG
  source 1..20: mol_type = other DNA
gtttatataaagtaaaacaa

SEQ ID NO: 11374 - DNA, 20 bp, synthetic construct
  misc_feature 1..20: note = Description of Artificial Sequence: Synthetic oligonucleotide
  misc_feature 1..20: note = Target: FXN; (-) strand; PAM type: NRG; PAM sequence: AAG
  source 1..20: mol_type = other DNA
ttaatgagacagtttatata

SEQ ID NO: 11375 - DNA, 20 bp, synthetic construct
  misc_feature 1..20: note = Description of Artificial Sequence: Synthetic oligonucleotide
  misc_feature 1..20: note = Target: FXN; (-) strand; PAM type: NRG; PAM sequence: CAG
  source 1..20: mol_type = other DNA
catgtttatacttaatgaga

SEQ ID NO: 11376 - DNA, 20 bp, synthetic construct
  misc_feature 1..20: note = Description of Artificial Sequence: Synthetic oligonucleotide
  misc_feature 1..20: note = Target: FXN; (-) strand; PAM type: NRG; PAM sequence: GAG
  source 1..20: mol_type = other DNA
caaacatgtttatacttaat

SEQ ID NO: 11377 - DNA, 20 bp, synthetic construct
  misc_feature 1..20: note = Description of Artificial Sequence: Synthetic oligonucleotide
  misc_feature 1..20: note = Target: FXN; (-) strand; PAM type: NRG; PAM sequence: AAG
  source 1..20: mol_type = other DNA
tgtgatagaaagaaatacac

SEQ ID NO: 11378 - DNA, 20 bp, synthetic construct
  misc_feature 1..20: note = Description of Artificial Sequence: Synthetic oligonucleotide
  misc_feature 1..20: note = Target: FXN; (-) strand; PAM type: NRG; PAM sequence: AAG
  source 1..20: mol_type = other DNA
acaaacatcattgtgataga

SEQ ID NO: 11379 - DNA, 20 bp, synthetic construct
  misc_feature 1..20: note = Description of Artificial Sequence: Synthetic oligonucleotide
  misc_feature 1..20: note = Target: FXN; (-) strand; PAM type: NRG; PAM sequence: TAG
  source 1..20: mol_type = other DNA
tctcacaaacatcattgtga

SEQ ID NO: 11380 - DNA, 20 bp, synthetic construct
  misc_feature 1..20: note = Description of Artificial Sequence: Synthetic oligonucleotide
  misc_feature 1..20: note = Target: FXN; (-) strand; PAM type: NRG; PAM sequence: TGG
  source 1..20: mol_type = other DNA
aattgtctataggaacagca

SEQ ID NO: 11381 - DNA, 20 bp, synthetic construct
  misc_feature 1..20: note = Description of Artificial Sequence: Synthetic oligonucleotide
  misc_feature 1..20: note = Target: FXN; (-) strand; PAM type: NRG; PAM sequence: CAG
  source 1..20: mol_type = other DNA
aatagaattgtctataggaa

SEQ ID NO: 11382 - DNA, 20 bp, synthetic construct
  misc_feature 1..20: note = Description of Artificial Sequence: Synthetic oligonucleotide
  misc_feature 1..20: note = Target: FXN; (-) strand; PAM type: NRG; PAM sequence: AGG
  source 1..20: mol_type = other DNA
tgcaaaatagaattgtctat

SEQ ID NO: 11383 - DNA, 20 bp, synthetic construct
  misc_feature 1..20: note = Description of Artificial Sequence: Synthetic oligonucleotide
  misc_feature 1..20: note = Target: FXN; (-) strand; PAM type: NRG; PAM sequence: TAG
  source 1..20: mol_type = other DNA
ctgcaaaatagaattgtcta

SEQ ID NO: 11384 - DNA, 20 bp, synthetic construct
  misc_feature 1..20: note = Description of Artificial Sequence: Synthetic oligonucleotide
  misc_feature 1..20: note = Target: FXN; (-) strand; PAM type: NRG; PAM sequence: TAG
  source 1..20: mol_type = other DNA
tggaatactacgctgcaaaa

SEQ ID NO: 11385 - DNA, 20 bp, synthetic construct
  misc_feature 1..20: note = Description of Artificial Sequence: Synthetic oligonucleotide
  misc_feature 1..20: note = Target: FXN; (-) strand; PAM type: NRG; PAM sequence: TGG
  source 1..20: mol_type = other DNA
attgtggtatagtcatgcaa

SEQ ID NO: 11386 - DNA, 20 bp, synthetic construct
  misc_feature 1..20: note = Description of Artificial Sequence: Synthetic oligonucleotide
  misc_feature 1..20: note = Target: FXN; (-) strand; PAM type: NRG; PAM sequence: TAG
  source 1..20: mol_type = other DNA
atcacagataaattgtggta

SEQ ID NO: 11387 - DNA, 20 bp, synthetic construct
  misc_feature 1..20: note = Description of Artificial Sequence: Synthetic oligonucleotide
  misc_feature 1..20: note = Target: FXN; (-) strand; PAM type: NRG; PAM sequence: TGG
  source 1..20: mol_type = other DNA
gtaatatcacagataaattg

SEQ ID NO: 11388 - DNA, 20 bp, synthetic construct
  misc_feature 1..20: note = Description of Artificial Sequence: Synthetic oligonucleotide
  misc_feature 1..20: note = Target: FXN; (-) strand; PAM type: NRG; PAM sequence: CAG
  source 1..20: mol_type = other DNA
agtattcctttgtaatatca

SEQ ID NO: 11389 - DNA, 20 bp, synthetic construct
  misc_feature 1..20: note = Description of Artificial Sequence: Synthetic oligonucleotide
  misc_feature 1..20: note = Target: FXN; (-) strand; PAM type: NRG; PAM sequence: AAG
  source 1..20: mol_type = other DNA
ccccaaactggaaactgccc

SEQ ID NO: 11390 - DNA, 20 bp, synthetic construct
  misc_feature 1..20: note = Description of Artificial Sequence: Synthetic oligonucleotide
  misc_feature 1..20: note = Target: FXN; (-) strand; PAM type: NRG; PAM sequence: TGG
  source 1..20: mol_type = other DNA
actatcctatagccccaaac

SEQ ID NO: 11391 - DNA, 20 bp, synthetic construct
  misc_feature 1..20: note = Description of Artificial Sequence: Synthetic oligonucleotide
  misc_feature 1..20: note = Target: FXN; (-) strand; PAM type: NRG; PAM sequence: TAG
  source 1..20: mol_type = other DNA
tttgtatcacaactatccta

SEQ ID NO: 11392 - DNA, 20 bp, synthetic construct
  misc_feature 1..20: note = Description of Artificial Sequence: Synthetic oligonucleotide
  misc_feature 1..20: note = Target: FXN; (-) strand; PAM type: NRG; PAM sequence: AAG
  source 1..20: mol_type = other DNA
tgtgtacccaggttcaccaa

SEQ ID NO: 11393 - DNA, 20 bp, synthetic construct
  misc_feature 1..20: note = Description of Artificial Sequence: Synthetic oligonucleotide
  misc_feature 1..20: note = Target: FXN; (-) strand; PAM type: NRG; PAM sequence: AGG
  source 1..20: mol_type = other DNA
cacaacagaaatgtgtaccc

SEQ ID NO: 11394 - DNA, 20 bp, synthetic construct
  misc_feature 1..20: note = Description of Artificial Sequence: Synthetic oligonucleotide
  misc_feature 1..20: note = Target: FXN; (-) strand; PAM type: NRG; PAM sequence: CAG
  source 1..20: mol_type = other DNA
acacaacagaaatgtgtacc

SEQ ID NO: 11395 - DNA, 20 bp, synthetic construct
  misc_feature 1..20: note = Description of Artificial Sequence: Synthetic oligonucleotide
  misc_feature 1..20: note = Target: FXN; (-) strand; PAM type: NRG; PAM sequence: CAG
  source 1..20: mol_type = other DNA
ctcttaaggggtatacacaa

SEQ ID NO: 11396 - DNA, 20 bp, synthetic construct
  misc_feature 1..20: note = Description of Artificial Sequence: Synthetic oligonucleotide
  misc_feature 1..20: note = Target: FXN; (-) strand; PAM type: NRG; PAM sequence: GGG
  source 1..20: mol_type = other DNA
tcatcagctccactcttaag

SEQ ID NO: 11397 - DNA, 20 bp, synthetic construct
  misc_feature 1..20: note = Description of Artificial Sequence: Synthetic oligonucleotide
  misc_feature 1..20: note = Target: FXN; (-) strand; PAM type: NRG; PAM sequence: GGG
  source 1..20: mol_type = other DNA
atcatcagctccactcttaa

SEQ ID NO: 11398 - DNA, 20 bp, synthetic construct
  misc_feature 1..20: note = Description of Artificial Sequence: Synthetic oligonucleotide
  misc_feature 1..20: note = Target: FXN; (-) strand; PAM type: NRG; PAM sequence: AGG
  source 1..20: mol_type = other DNA
gatcatcagctccactctta

SEQ ID NO: 11399 - DNA, 20 bp, synthetic construct
  misc_feature 1..20: note = Description of Artificial Sequence: Synthetic oligonucleotide
  misc_feature 1..20: note = Target: FXN; (-) strand; PAM type: NRG; PAM sequence: AAG
  source 1..20: mol_type = other DNA
ggatcatcagctccactctt

SEQ ID NO: 11400 - DNA, 20 bp, synthetic construct
  misc_feature 1..20: note = Description of Artificial Sequence: Synthetic oligonucleotide
  misc_feature 1..20: note = Target: FXN; (-) strand; PAM type: NRG; PAM sequence: CAG
  source 1..20: mol_type = other DNA
accttgttagccaggatcat

SEQ ID NO: 11401 - DNA, 20 bp, synthetic construct
  misc_feature 1..20: note = Description of Artificial Sequence: Synthetic oligonucleotide
  misc_feature 1..20: note = Target: FXN; (-) strand; PAM type: NRG; PAM sequence: AGG
  source 1..20: mol_type = other DNA
ggggtttcaccttgttagcc

SEQ ID NO: 11402 - DNA, 20 bp, synthetic construct
  misc_feature 1..20: note = Description of Artificial Sequence: Synthetic oligonucleotide
  misc_feature 1..20: note = Target: FXN; (-) strand; PAM type: NRG; PAM sequence: CAG
  source 1..20: mol_type = other DNA
cggggtttcaccttgttagc

SEQ ID NO: 11403 - DNA, 20 bp, synthetic construct
  misc_feature 1..20: note = Description of Artificial Sequence: Synthetic oligonucleotide
  misc_feature 1..20: note = Target: FXN; (-) strand; PAM type: NRG; PAM sequence: TAG
  source 1..20: mol_type = other DNA
gagacggggtttcaccttgt

SEQ ID NO: 11404 - DNA, 20 bp, synthetic construct
  misc_feature 1..20: note = Description of Artificial Sequence: Synthetic oligonucleotide
  misc_feature 1..20: note = Target: FXN; (-) strand; PAM type: NRG; PAM sequence: GGG
  source 1..20: mol_type = other DNA
ttgtatttttagtagagacg

SEQ ID NO: 11405 - DNA, 20 bp, synthetic construct
  misc_feature 1..20: note = Description of Artificial Sequence: Synthetic oligonucleotide
  misc_feature 1..20: note = Target: FXN; (-) strand; PAM type: NRG; PAM sequence: GGG
  source 1..20: mol_type = other DNA
tttgtatttttagtagagac

SEQ ID NO: 11406 - DNA, 20 bp, synthetic construct
  misc_feature 1..20: note = Description of Artificial Sequence: Synthetic oligonucleotide
  misc_feature 1..20: note = Target: FXN; (-) strand; PAM type: NRG; PAM sequence: CGG
  source 1..20: mol_type = other DNA
ttttgtatttttagtagaga

SEQ ID NO: 11407 - DNA, 20 bp, synthetic construct
  misc_feature 1..20: note = Description of Artificial Sequence: Synthetic oligonucleotide
  misc_feature 1..20: note = Target: FXN; (-) strand; PAM type: NRG; PAM sequence: GAG
  source 1..20: mol_type = other DNA
aattttttgtatttttagta

SEQ ID NO: 11408 - DNA, 20 bp, synthetic construct
  misc_feature 1..20: note = Description of Artificial Sequence: Synthetic oligonucleotide
  misc_feature 1..20: note = Target: FXN; (-) strand; PAM type: NRG; PAM sequence: TAG
  source 1..20: mol_type = other DNA
ctaattttttgtatttttag

SEQ ID NO: 11409 - DNA, 20 bp, synthetic construct
  misc_feature 1..20: note = Description of Artificial Sequence: Synthetic oligonucleotide
  misc_feature 1..20: note = Target: FXN; (-) strand; PAM type: NRG; PAM sequence: TAG
  source 1..20: mol_type = other DNA
cggctaattttttgtatttt

SEQ ID NO: 11410 - DNA, 20 bp, synthetic construct
  misc_feature 1..20: note = Description of Artificial Sequence: Synthetic oligonucleotide
  misc_feature 1..20: note = Target: FXN; (-) strand; PAM type: NRG; PAM sequence: CGG
  source 1..20: mol_type = other DNA
caggcgcccgctaccacgcc

SEQ ID NO: 11411 - DNA, 20 bp, synthetic construct
  misc_feature 1..20: note = Description of Artificial Sequence: Synthetic oligonucleotide
  misc_feature 1..20: note = Target: FXN; (-) strand; PAM type: NRG; PAM sequence: AGG
  source 1..20: mol_type = other DNA
tcccgagtagctgggactac

SEQ ID NO: 11412 - DNA, 20 bp, synthetic construct
  misc_feature 1..20: note = Description of Artificial Sequence: Synthetic oligonucleotide
  misc_feature 1..20: note = Target: FXN; (-) strand; PAM type: NRG; PAM sequence: CAG
  source 1..20: mol_type = other DNA
ctcccgagtagctgggacta

SEQ ID NO: 11413 - DNA, 20 bp, synthetic construct
  misc_feature 1..20: note = Description of Artificial Sequence: Synthetic oligonucleotide
  misc_feature 1..20: note = Target: FXN; (-) strand; PAM type: NRG; PAM sequence: GGG
  source 1..20: mol_type = other DNA
cctcagcctcccgagtagct

SEQ ID NO: 11414 - DNA, 20 bp, synthetic construct
  misc_feature 1..20: note = Description of Artificial Sequence: Synthetic oligonucleotide
  misc_feature 1..20: note = Target: FXN; (-) strand; PAM type: NRG; PAM sequence: TGG
  source 1..20: mol_type = other DNA
gcctcagcctcccgagtagc

SEQ ID NO: 11415 - DNA, 20 bp, synthetic construct
  misc_feature 1..20: note = Description of Artificial Sequence: Synthetic oligonucleotide
  misc_feature 1..20: note = Target: FXN; (-) strand; PAM type: NRG; PAM sequence: TAG
  source 1..20: mol_type = other DNA
tcctgcctcagcctcccgag

SEQ ID NO: 11416 - DNA, 20 bp, synthetic construct
  misc_feature 1..20: note = Description of Artificial Sequence: Synthetic oligonucleotide
  misc_feature 1..20: note = Target: FXN; (-) strand; PAM type: NRG; PAM sequence: GAG
  source 1..20: mol_type = other DNA
ttctcctgcctcagcctccc

SEQ ID NO: 11417 - DNA, 20 bp, synthetic construct
  misc_feature 1..20: note = Description of Artificial Sequence: Synthetic oligonucleotide
  misc_feature 1..20: note = Target: FXN; (-) strand; PAM type: NRG; PAM sequence: CAG
  source 1..20: mol_type = other DNA
ttcacgccattctcctgcct

SEQ ID NO: 11418 - DNA, 20 bp, synthetic construct
  misc_feature 1..20: note = Description of Artificial Sequence: Synthetic oligonucleotide
  misc_feature 1..20: note = Target: FXN; (-) strand; PAM type: NRG; PAM sequence: GGG
  source 1..20: mol_type = other DNA
gcaagcaagctccgcctccc

SEQ ID NO: 11419 - DNA, 20 bp, synthetic construct
  misc_feature 1..20: note = Description of Artificial Sequence: Synthetic oligonucleotide
  misc_feature 1..20: note = Target: FXN; (-) strand; PAM type: NRG; PAM sequence: CGG
  source 1..20: mol_type = other DNA
tgcaagcaagctccgcctcc

SEQ ID NO: 11420 - DNA, 20 bp, synthetic construct
  misc_feature 1..20: note = Description of Artificial Sequence: Synthetic oligonucleotide
  misc_feature 1..20: note = Target: FXN; (-) strand; PAM type: NRG; PAM sequence: AAG
  source 1..20: mol_type = other DNA
gatctcggctcactgcaagc

SEQ ID NO: 11421 - DNA, 20 bp, synthetic construct
  misc_feature 1..20: note = Description of Artificial Sequence: Synthetic oligonucleotide
  misc_feature 1..20: note = Target: FXN; (-) strand; PAM type: NRG; PAM sequence: AAG
  source 1..20: mol_type = other DNA
gcgcgatctcggctcactgc

SEQ ID NO: 11422 - DNA, 20 bp, synthetic construct
  misc_feature 1..20: note = Description of Artificial Sequence: Synthetic oligonucleotide
  misc_feature 1..20: note = Target: FXN; (-) strand; PAM type: NRG; PAM sequence: CGG
  source 1..20: mol_type = other DNA
ggagtgcagtggcgcgatct

SEQ ID NO: 11423 - DNA, 20 bp, synthetic construct
  misc_feature 1..20: note = Description of Artificial Sequence: Synthetic oligonucleotide
  misc_feature 1..20: note = Target: FXN; (-) strand; PAM type: NRG; PAM sequence: TGG
  source 1..20: mol_type = other DNA
tcgcccaggctggagtgcag

SEQ ID NO: 11424 - DNA, 20 bp, synthetic construct
  misc_feature 1..20: note = Description of Artificial Sequence: Synthetic oligonucleotide
  misc_feature 1..20: note = Target: FXN; (-) strand; PAM type: NRG; PAM sequence: CAG
  source 1..20: mol_type = other DNA
ctgtcgcccaggctggagtg

SEQ ID NO: 11425 - DNA, 20 bp, synthetic construct
  misc_feature 1..20: note = Description of Artificial Sequence: Synthetic oligonucleotide
  misc_feature 1..20: note = Target: FXN; (-) strand; PAM type: NRG; PAM sequence: GAG
  source 1..20: mol_type = other DNA
tcgctctgtcgcccaggctg

SEQ ID NO: 11426 - DNA, 20 bp, synthetic construct
  misc_feature 1..20: note = Description of Artificial Sequence: Synthetic oligonucleotide
  misc_feature 1..20: note = Target: FXN; (-) strand; PAM type: NRG; PAM sequence: TGG
  source 1..20: mol_type = other DNA
tctcgctctgtcgcccaggc

SEQ ID NO: 11427 - DNA, 20 bp, synthetic construct
  misc_feature 1..20: note = Description of Artificial Sequence: Synthetic oligonucleotide
  misc_feature 1..20: note = Target: FXN; (-) strand; PAM type: NRG; PAM sequence: AGG
  source 1..20: mol_type = other DNA
ggagtctcgctctgtcgccc

SEQ ID NO: 11428 - DNA, 20 bp, synthetic construct
  misc_feature 1..20: note = Description of Artificial Sequence: Synthetic oligonucleotide
  misc_feature 1..20: note = Target: FXN; (-) strand; PAM type: NRG; PAM sequence: CAG
  source 1..20: mol_type = other DNA
cggagtctcgctctgtcgcc

SEQ ID NO: 11429 - DNA, 20 bp, synthetic construct
  misc_feature 1..20: note = Description of Artificial Sequence: Synthetic oligonucleotide
  misc_feature 1..20: note = Target: FXN; (-) strand; PAM type: NRG; PAM sequence: GAG
  source 1..20: mol_type = other DNA
ttttttttttttttgagacg

SEQ ID NO: 11430 - DNA, 20 bp, synthetic construct
  misc_feature 1..20: note = Description of Artificial Sequence: Synthetic oligonucleotide
  misc_feature 1..20: note = Target: FXN; (-) strand; PAM type: NRG; PAM sequence: CGG
  source 1..20: mol_type = other DNA
ttttttttttttttttgaga

SEQ ID NO: 11431 - DNA, 20 bp, synthetic construct
  misc_feature 1..20: note = Description of Artificial Sequence: Synthetic oligonucleotide
  misc_feature 1..20: note = Target: FXN; (-) strand; PAM type: NRG; PAM sequence: GAG
  source 1..20: mol_type = other DNA
cttttttttttttttttttt

SEQ ID NO: 11432 - DNA, 20 bp, synthetic construct
  misc_feature 1..20: note = Description of Artificial Sequence: Synthetic oligonucleotide
  misc_feature 1..20: note = Target: FXN; (-) strand; PAM type: NRG; PAM sequence: CAG
  source 1..20: mol_type = other DNA
atttacatgctatgacccat

SEQ ID NO: 11433 - DNA, 20 bp, synthetic construct
  misc_feature 1..20: note = Description of Artificial Sequence: Synthetic oligonucleotide
  misc_feature 1..20: note = Target: FXN; (-) strand; PAM type: NRG; PAM sequence: AAG
  source 1..20: mol_type = other DNA
ctgttggacagtatctacta

SEQ ID NO: 11434 - DNA, 20 bp, synthetic construct
  misc_feature 1..20: note = Description of Artificial Sequence: Synthetic oligonucleotide
  misc_feature 1..20: note = Target: FXN; (-) strand; PAM type: NRG; PAM sequence: CAG
  source 1..20: mol_type = other DNA
cactttggaaaactgttgga

SEQ ID NO: 11435 - DNA, 20 bp, synthetic construct
  misc_feature 1..20: note = Description of Artificial Sequence: Synthetic oligonucleotide
  misc_feature 1..20: note = Target: FXN; (-) strand; PAM type: NRG; PAM sequence: TGG
  source 1..20: mol_type = other DNA
caatcactttggaaaactgt

SEQ ID NO: 11436 - DNA, 20 bp, synthetic construct
  misc_feature 1..20: note = Description of Artificial Sequence: Synthetic oligonucleotide
  misc_feature 1..20: note = Target: FXN; (-) strand; PAM type: NRG; PAM sequence: TGG
  source 1..20: mol_type = other DNA
agtaagttggacaatcactt

SEQ ID NO: 11437 - DNA, 20 bp, synthetic construct
  misc_feature 1..20: note = Description of Artificial Sequence: Synthetic oligonucleotide
  misc_feature 1..20: note = Target: FXN; (-) strand; PAM type: NRG; PAM sequence: TGG
  source 1..20: mol_type = other DNA
ctgctgataggcaagtaagt

SEQ ID NO: 11438 - DNA, 20 bp, synthetic construct
  misc_feature 1..20: note = Description of Artificial Sequence: Synthetic oligonucleotide
  misc_feature 1..20: note = Target: FXN; (-) strand; PAM type: NRG; PAM sequence: AAG
  source 1..20: mol_type = other DNA
gatactgctgataggcaagt

SEQ ID NO: 11439 - DNA, 20 bp, synthetic construct
  misc_feature 1..20: note = Description of Artificial Sequence: Synthetic oligonucleotide
  misc_feature 1..20: note = Target: FXN; (-) strand; PAM type: NRG; PAM sequence: AAG
  source 1..20: mol_type = other DNA
ttcagatactgctgataggc

SEQ ID NO: 11440 - DNA, 20 bp, synthetic construct
  misc_feature 1..20: note = Description of Artificial Sequence: Synthetic oligonucleotide
  misc_feature 1..20: note = Target: FXN; (-) strand; PAM type: NRG; PAM sequence: AGG
  source 1..20: mol_type = other DNA
acttttcagatactgctgat

SEQ ID NO: 11441 - DNA, 20 bp, synthetic construct
  misc_feature 1..20: note = Description of Artificial Sequence: Synthetic oligonucleotide
  misc_feature 1..20: note = Target: FXN; (-) strand; PAM type: NRG; PAM sequence: TAG
  source 1..20: mol_type = other DNA
gacttttcagatactgctga

SEQ ID NO: 11442 - DNA, 20 bp, synthetic construct
  misc_feature 1..20: note = Description of Artificial Sequence: Synthetic oligonucleotide
  misc_feature 1..20: note = Target: FXN; (-) strand; PAM type: NRG; PAM sequence: CAG
  source 1..20: mol_type = other DNA
aaagaagcaactagactttt

SEQ ID NO: 11443 - DNA, 20 bp, synthetic construct
  misc_feature 1..20: note = Description of Artificial Sequence: Synthetic oligonucleotide
  misc_feature 1..20: note = Target: FXN; (-) strand; PAM type: NRG; PAM sequence: TAG
  source 1..20: mol_type = other DNA
tggccaagaaaagaagcaac

SEQ ID NO: 11444 - DNA, 20 bp, synthetic construct
  misc_feature 1..20: note = Description of Artificial Sequence: Synthetic oligonucleotide
  misc_feature 1..20: note = Target: FXN; (-) strand; PAM type: NRG; PAM sequence: AAG
  source 1..20: mol_type = other DNA
aaagagttggccaagaaaag

SEQ ID NO: 11445 - DNA, 20 bp, synthetic construct
  misc_feature 1..20: note = Description of Artificial Sequence: Synthetic oligonucleotide
  misc_feature 1..20: note = Target: FXN; (-) strand; PAM type: NRG; PAM sequence: AAG
  source 1..20: mol_type = other DNA
aaaaaagagttggccaagaa

SEQ ID NO: 11446 - DNA, 20 bp, synthetic construct
  misc_feature 1..20: note = Description of Artificial Sequence: Synthetic oligonucleotide
  misc_feature 1..20: note = Target: FXN; (-) strand; PAM type: NRG; PAM sequence: AAG
  source 1..20: mol_type = other DNA
aaaaaaaaaaagagttggcc

SEQ ID NO: 11447 - DNA, 20 bp, synthetic construct
  misc_feature 1..20: note = Description of Artificial Sequence: Synthetic oligonucleotide
  misc_feature 1..20: note = Target: FXN; (-) strand; PAM type: NRG; PAM sequence: TGG
  source 1..20: mol_type = other DNA
ctcaaaaaaaaaaaaagagt

SEQ ID NO: 11448 - DNA, 20 bp, synthetic construct
  misc_feature 1..20: note = Description of Artificial Sequence: Synthetic oligonucleotide
  misc_feature 1..20: note = Target: FXN; (-) strand; PAM type: NRG; PAM sequence: GAG
  source 1..20: mol_type = other DNA
ccatctcaaaaaaaaaaaaa

SEQ ID NO: 11449 - DNA, 20 bp, synthetic construct
  misc_feature 1..20: note = Description of Artificial Sequence: Synthetic oligonucleotide
  misc_feature 1..20: note = Target: FXN; (-) strand; PAM type: NRG; PAM sequence: AAG
  source 1..20: mol_type = other DNA
ctccatctcaaaaaaaaaaa

SEQ ID NO: 11450 - DNA, 20 bp, synthetic construct
  misc_feature 1..20: note = Description of Artificial Sequence: Synthetic oligonucleotide
  misc_feature 1..20: note = Target: FXN; (-) strand; PAM type: NRG; PAM sequence: GAG
  source 1..20: mol_type = other DNA
cgctccagcctgggcaacaa

SEQ ID NO: 11451 - DNA, 20 bp, synthetic construct
  misc_feature 1..20: note = Description of Artificial Sequence: Synthetic oligonucleotide
  misc_feature 1..20: note = Target: FXN; (-) strand; PAM type: NRG; PAM sequence: AAG
  source 1..20: mol_type = other DNA
tgcgctccagcctgggcaac

SEQ ID NO: 11452 - DNA, 20 bp, synthetic construct
  misc_feature 1..20: note = Description of Artificial Sequence: Synthetic oligonucleotide
  misc_feature 1..20: note = Target: FXN; (-) strand; PAM type: NRG; PAM sequence: GGG
  source 1..20: mol_type = other DNA
gtgccattgcgctccagcct

SEQ ID NO: 11453 - DNA, 20 bp, synthetic construct
  misc_feature 1..20: note = Description of Artificial Sequence: Synthetic oligonucleotide
  misc_feature 1..20: note = Target: FXN; (-) strand; PAM type: NRG; PAM sequence: TGG
  source 1..20: mol_type = other DNA
cgtgccattgcgctccagcc

SEQ ID NO: 11454 - DNA, 20 bp, synthetic construct
  misc_feature 1..20: note = Description of Artificial Sequence: Synthetic oligonucleotide
  misc_feature 1..20: note = Target: FXN; (-) strand; PAM type: NRG; PAM sequence: CAG
  source 1..20: mol_type = other DNA
gaggacgtgccattgcgctc

SEQ ID NO: 11455 - DNA, 20 bp, synthetic construct
  misc_feature 1..20: note = Description of Artificial Sequence: Synthetic oligonucleotide
  misc_feature 1..20: note = Target: FXN; (-) strand; PAM type: NRG; PAM sequence: AGG
  source 1..20: mol_type = other DNA
gcggaggttgcagtgagcag

SEQ ID NO: 11456 - DNA, 20 bp, synthetic construct
  misc_feature 1..20: note = Description of Artificial Sequence: Synthetic oligonucleotide
  misc_feature 1..20: note = Target: FXN; (-) strand; PAM type: NRG; PAM sequence: GAG
  source 1..20: mol_type = other DNA
ggcggaggttgcagtgagca

SEQ ID NO: 11457 - DNA, 20 bp, synthetic construct
  misc_feature 1..20: note = Description of Artificial Sequence: Synthetic oligonucleotide
  misc_feature 1..20: note = Target: FXN; (-) strand; PAM type: NRG; PAM sequence: CAG
  source 1..20: mol_type = other DNA
gaggcggaggttgcagtgag

SEQ ID NO: 11458 - DNA, 20 bp, synthetic construct
  misc_feature 1..20: note = Description of Artificial Sequence: Synthetic oligonucleotide
  misc_feature 1..20: note = Target: FXN; (-) strand; PAM type: NRG; PAM sequence: GAG
  source 1..20: mol_type = other DNA
caggaggcggaggttgcagt

SEQ ID NO: 11459 - DNA, 20 bp, synthetic construct
  misc_feature 1..20: note = Description of Artificial Sequence: Synthetic oligonucleotide
  misc_feature 1..20: note = Target: FXN; (-) strand; PAM type: NRG; PAM sequence: CAG
  source 1..20: mol_type = other DNA
aacccaggaggcggaggttg

SEQ ID NO: 11460 - DNA, 20 bp, synthetic construct
  misc_feature 1..20: note = Description of Artificial Sequence: Synthetic oligonucleotide
  misc_feature 1..20: note = Target: FXN; (-) strand; PAM type: NRG; PAM sequence: AGG
  source 1..20: mol_type = other DNA
tgcttgaacccaggaggcgg

SEQ ID NO: 11461 - DNA, 20 bp, synthetic construct
  misc_feature 1..20: note = Description of Artificial Sequence: Synthetic oligonucleotide
  misc_feature 1..20: note = Target: FXN; (-) strand; PAM type: NRG; PAM sequence: GAG
  source 1..20: mol_type = other DNA
ttgcttgaacccaggaggcg

SEQ ID NO: 11462 - DNA, 20 bp, synthetic construct
  misc_feature 1..20: note = Description of Artificial Sequence: Synthetic oligonucleotide
  misc_feature 1..20: note = Target: FXN; (-) strand; PAM type: NRG; PAM sequence: CGG
  source 1..20: mol_type = other DNA
aattgcttgaacccaggagg

SEQ ID NO: 11463 - DNA, 20 bp, synthetic construct
  misc_feature 1..20: note = Description of Artificial Sequence: Synthetic oligonucleotide
  misc_feature 1..20: note = Target: FXN; (-) strand; PAM type: NRG; PAM sequence: AGG
  source 1..20: mol_type = other DNA
gagaattgcttgaacccagg

SEQ ID NO: 11464 - DNA, 20 bp, synthetic construct
  misc_feature 1..20: note = Description of Artificial Sequence: Synthetic oligonucleotide
  misc_feature 1..20: note = Target: FXN; (-) strand; PAM type: NRG; PAM sequence: GAG
  source 1..20: mol_type = other DNA
ggagaattgcttgaacccag

SEQ ID NO: 11465 - DNA, 20 bp, synthetic construct
  misc_feature 1..20: note = Description of Artificial Sequence: Synthetic oligonucleotide
  misc_feature 1..20: note = Target: FXN; (-) strand; PAM type: NRG; PAM sequence: AGG
  source 1..20: mol_type = other DNA
caggagaattgcttgaaccc

SEQ ID NO: 11466 - DNA, 20 bp, synthetic construct
  misc_feature 1..20: note = Description of Artificial Sequence: Synthetic oligonucleotide
  misc_feature 1..20: note = Target: FXN; (-) strand; PAM type: NRG; PAM sequence: CAG
  source 1..20: mol_type = other DNA
gcaggagaattgcttgaacc

SEQ ID NO: 11467 - DNA, 20 bp, synthetic construct
  misc_feature 1..20: note = Description of Artificial Sequence: Synthetic oligonucleotide
  misc_feature 1..20: note = Target: FXN; (-) strand; PAM type: NRG; PAM sequence: GAG
  source 1..20: mol_type = other DNA
tactcgggaggctgaggcag

SEQ ID NO: 11468 - DNA, 20 bp, synthetic construct
  misc_feature 1..20: note = Description of Artificial Sequence: Synthetic oligonucleotide
  misc_feature 1..20: note = Target: FXN; (-) strand; PAM type: NRG; PAM sequence: AGG
  source 1..20: mol_type = other DNA
gctactcgggaggctgaggc

SEQ ID NO: 11469 - DNA, 20 bp, synthetic construct
  misc_feature 1..20: note = Description of Artificial Sequence: Synthetic oligonucleotide
  misc_feature 1..20: note = Target: FXN; (-) strand; PAM type: NRG; PAM sequence: CAG
  source 1..20: mol_type = other DNA
agctactcgggaggctgagg

SEQ ID NO: 11470 - DNA, 20 bp, synthetic construct
  misc_feature 1..20: note = Description of Artificial Sequence: Synthetic oligonucleotide
  misc_feature 1..20: note = Target: FXN; (-) strand; PAM type: NRG; PAM sequence: AGG
  source 1..20: mol_type = other DNA
cccagctactcgggaggctg

SEQ ID NO: 11471 - DNA, 20 bp, synthetic construct
  misc_feature 1..20: note = Description of Artificial Sequence: Synthetic oligonucleotide
  misc_feature 1..20: note = Target: FXN; (-) strand; PAM type: NRG; PAM sequence: GAG
  source 1..20: mol_type = other DNA
tcccagctactcgggaggct

SEQ ID NO: 11472 - DNA, 20 bp, synthetic construct
  misc_feature 1..20: note = Description of Artificial Sequence: Synthetic oligonucleotide
  misc_feature 1..20: note = Target: FXN; (-) strand; PAM type: NRG; PAM sequence: AGG
  source 1..20: mol_type = other DNA
tgtaatcccagctactcggg

SEQ ID NO: 11473 - DNA, 20 bp, synthetic construct
  misc_feature 1..20: note = Description of Artificial Sequence: Synthetic oligonucleotide
  misc_feature 1..20: note = Target: FXN; (-) strand; PAM type: NRG; PAM sequence: GAG
  source 1..20: mol_type = other DNA
ctgtaatcccagctactcgg

SEQ ID NO: 11474 - DNA, 20 bp, synthetic construct
  misc_feature 1..20: note = Description of Artificial Sequence: Synthetic oligonucleotide
  misc_feature 1..20: note = Target: FXN; (-) strand; PAM type: NRG; PAM sequence: GGG
  source 1..20: mol_type = other DNA
gcctgtaatcccagctactc

SEQ ID NO: 11475 - DNA, 20 bp, synthetic construct
  misc_feature 1..20: note = Description of Artificial Sequence: Synthetic oligonucleotide
  misc_feature 1..20: note = Target: FXN; (-) strand; PAM type: NRG; PAM sequence: CGG
  source 1..20: mol_type = other DNA
tgcctgtaatcccagctact

SEQ ID NO: 11476 - DNA, 20 bp, synthetic construct
  misc_feature 1..20: note = Description of Artificial Sequence: Synthetic oligonucleotide
  misc_feature 1..20: note = Target: FXN; (-) strand; PAM type: NRG; PAM sequence: CAG
  source 1..20: mol_type = other DNA
gtggcgcatgcctgtaatcc

SEQ ID NO: 11477 - DNA, 20 bp, synthetic construct
  misc_feature 1..20: note = Description of Artificial Sequence: Synthetic oligonucleotide
  misc_feature 1..20: note = Target: FXN; (-) strand; PAM type: NRG; PAM sequence: TGG
  source 1..20: mol_type = other DNA
acaaaattagccgggcatag

SEQ ID NO: 11478 - DNA, 20 bp, synthetic construct
  misc_feature 1..20: note = Description of Artificial Sequence: Synthetic oligonucleotide
  misc_feature 1..20: note = Target: FXN; (-) strand; PAM type: NRG; PAM sequence: TAG
  source 1..20: mol_type = other DNA
aatacaaaattagccgggca

SEQ ID NO: 11479 - DNA, 20 bp, synthetic construct
  misc_feature 1..20: note = Description of Artificial Sequence: Synthetic oligonucleotide
  misc_feature 1..20: note = Target: FXN; (-) strand; PAM type: NRG; PAM sequence: GGG
  source 1..20: mol_type = other DNA
ctaaaaatacaaaattagcc

SEQ ID NO: 11480 - DNA, 20 bp, synthetic construct
  misc_feature 1..20: note = Description of Artificial Sequence: Synthetic oligonucleotide
  misc_feature 1..20: note = Target: FXN; (-) strand; PAM type: NRG; PAM sequence: CGG
  source 1..20: mol_type = other DNA
actaaaaatacaaaattagc

SEQ ID NO: 11481 - DNA, 20 bp, synthetic construct
  misc_feature 1..20: note = Description of Artificial Sequence: Synthetic oligonucleotide
  misc_feature 1..20: note = Target: FXN; (-) strand; PAM type: NRG; PAM sequence: TAG
  source 1..20: mol_type = other DNA
ctctactaaaaatacaaaat

SEQ ID NO: 11482 - DNA, 20 bp, synthetic construct
  misc_feature 1..20: note = Description of Artificial Sequence: Synthetic oligonucleotide
  misc_feature 1..20: note = Target: FXN; (-) strand; PAM type: NRG; PAM sequence: GAG
  source 1..20: mol_type = other DNA
agaccagcttgaccaacatg

SEQ ID NO: 11483 - DNA, 20 bp, synthetic construct
  misc_feature 1..20: note = Description of Artificial Sequence: Synthetic oligonucleotide
  misc_feature 1..20: note = Target: FXN; (-) strand; PAM type: NRG; PAM sequence: TGG
  source 1..20: mol_type = other DNA
cgagaccagcttgaccaaca

SEQ ID NO: 11484 - DNA, 20 bp, synthetic construct
  misc_feature 1..20: note = Description of Artificial Sequence: Synthetic oligonucleotide
  misc_feature 1..20: note = Target: FXN; (-) strand; PAM type: NRG; PAM sequence: CAG
  source 1..20: mol_type = other DNA
tgaggttaggagttcgagac

SEQ ID NO: 11485 - DNA, 20 bp, synthetic construct
  misc_feature 1..20: note = Description of Artificial Sequence: Synthetic oligonucleotide
  misc_feature 1..20: note = Target: FXN; (-) strand; PAM type: NRG; PAM sequence: GAG
  source 1..20: mol_type = other DNA
tcacctgaggttaggagttc

SEQ ID NO: 11486 - DNA, 20 bp, synthetic construct
  misc_feature 1..20: note = Description of Artificial Sequence: Synthetic oligonucleotide
  misc_feature 1..20: note = Target: FXN; (-) strand; PAM type: NRG; PAM sequence: GAG
  source 1..20: mol_type = other DNA
ggcggatcacctgaggttag

SEQ ID NO: 11487 - DNA, 20 bp, synthetic construct
  misc_feature 1..20: note = Description of Artificial Sequence: Synthetic oligonucleotide
  misc_feature 1..20: note = Target: FXN; (-) strand; PAM type: NRG; PAM sequence: AGG
  source 1..20: mol_type = other DNA
cgggcggatcacctgaggtt

SEQ ID NO: 11488 - DNA, 20 bp, synthetic construct
  misc_feature 1..20: note = Description of Artificial Sequence: Synthetic oligonucleotide
  misc_feature 1..20: note = Target: FXN; (-) strand; PAM type: NRG; PAM sequence: TAG
  source 1..20: mol_type = other DNA
gcgggcggatcacctgaggt

SEQ ID NO: 11489 - DNA, 20 bp, synthetic construct
  misc_feature 1..20: note = Description of Artificial Sequence: Synthetic oligonucleotide
  misc_feature 1..20: note = Target: FXN; (-) strand; PAM type: NRG; PAM sequence: AGG
  source 1..20: mol_type = other DNA
cgaggcgggcggatcacctg

SEQ ID NO: 11490 - DNA, 20 bp, synthetic construct
  misc_feature 1..20: note = Description of Artificial Sequence: Synthetic oligonucleotide
  misc_feature 1..20: note = Target: FXN; (-) strand; PAM type: NRG; PAM sequence: GAG
  source 1..20: mol_type = other DNA
ccgaggcgggcggatcacct

SEQ ID NO: 11491 - DNA, 20 bp, synthetic construct
  misc_feature 1..20: note = Description of Artificial Sequence: Synthetic oligonucleotide
  misc_feature 1..20: note = Target: FXN; (-) strand; PAM type: NRG; PAM sequence: CGG
  source 1..20: mol_type = other DNA
cttcgggaggccgaggcggg

SEQ ID NO: 11492 - DNA, 20 bp, synthetic construct
  misc_feature 1..20: note = Description of Artificial Sequence: Synthetic oligonucleotide
  misc_feature 1..20: note = Target: FXN; (-) strand; PAM type: NRG; PAM sequence: GGG
  source 1..20: mol_type = other DNA
gcacttcgggaggccgaggc

SEQ ID NO: 11493 - DNA, 20 bp, synthetic construct
  misc_feature 1..20: note = Description of Artificial Sequence: Synthetic oligonucleotide
  misc_feature 1..20: note = Target: FXN; (-) strand; PAM type: NRG; PAM sequence: CGG
  source 1..20: mol_type = other DNA
agcacttcgggaggccgagg

SEQ ID NO: 11494 - DNA, 20 bp, synthetic construct
  misc_feature 1..20: note = Description of Artificial Sequence: Synthetic oligonucleotide
  misc_feature 1..20: note = Target: FXN; (-) strand; PAM type: NRG; PAM sequence: AGG
  source 1..20: mol_type = other DNA
cccagcacttcgggaggccg

SEQ ID NO: 11495 - DNA, 20 bp, synthetic construct
  misc_feature 1..20: note = Description of Artificial Sequence: Synthetic oligonucleotide
  misc_feature 1..20: note = Target: FXN; (-) strand; PAM type: NRG; PAM sequence: GAG
  source 1..20: mol_type = other DNA
tcccagcacttcgggaggcc

SEQ ID NO: 11496 - DNA, 20 bp, synthetic construct
  misc_feature 1..20: note = Description of Artificial Sequence: Synthetic oligonucleotide
  misc_feature 1..20: note = Target: FXN; (-) strand; PAM type: NRG; PAM sequence: AGG
  source 1..20: mol_type = other DNA
tgtaatcccagcacttcggg

SEQ ID NO: 11497 - DNA, 20 bp, synthetic construct
  misc_feature 1..20: note = Description of Artificial Sequence: Synthetic oligonucleotide
  misc_feature 1..20: note = Target: FXN; (-) strand; PAM type: NRG; PAM sequence: GAG
  source 1..20: mol_type = other DNA
ctgtaatcccagcacttcgg

SEQ ID NO: 11498 - DNA, 20 bp, synthetic construct
  misc_feature 1..20: note = Description of Artificial Sequence: Synthetic oligonucleotide
  misc_feature 1..20: note = Target: FXN; (-) strand; PAM type: NRG; PAM sequence: GGG
  source 1..20: mol_type = other DNA
gcctgtaatcccagcacttc

SEQ ID NO: 11499 - DNA, 20 bp, synthetic construct
  misc_feature 1..20: note = Description of Artificial Sequence: Synthetic oligonucleotide
  misc_feature 1..20: note = Target: FXN; (-) strand; PAM type: NRG; PAM sequence: CGG
  source 1..20: mol_type = other DNA
tgcctgtaatcccagcactt

SEQ ID NO: 11500 - DNA, 20 bp, synthetic construct
  misc_feature 1..20: note = Description of Artificial Sequence: Synthetic oligonucleotide
  misc_feature 1..20: note = Target: FXN; (-) strand; PAM type: NRG; PAM sequence: CAG
  source 1..20: mol_type = other DNA
gtggctcatgcctgtaatcc

SEQ ID NO: 11501 - DNA, 20 bp, synthetic construct
  misc_feature 1..20: note = Description of Artificial Sequence: Synthetic oligonucleotide
  misc_feature 1..20: note = Target: FXN; (-) strand; PAM type: NRG; PAM sequence: TGG
  source 1..20: mol_type = other DNA
agttggccggcctggcgcgg

SEQ ID NO: 11502 - DNA, 20 bp, synthetic construct
  misc_feature 1..20: note = Description of Artificial Sequence: Synthetic oligonucleotide
  misc_feature 1..20: note = Target: FXN; (-) strand; PAM type: NRG; PAM sequence: CGG
  source 1..20: mol_type = other DNA
aagagttggccggcctggcg

SEQ ID NO: 11503 - DNA, 20 bp, synthetic construct
  misc_feature 1..20: note = Description of Artificial Sequence: Synthetic oligonucleotide
  misc_feature 1..20: note = Target: FXN; (-) strand; PAM type: NRG; PAM sequence: TGG
  source 1..20: mol_type = other DNA
taaaaaagagttggccggcc

SEQ ID NO: 11504 - DNA, 20 bp, synthetic construct
  misc_feature 1..20: note = Description of Artificial Sequence: Synthetic oligonucleotide
  misc_feature 1..20: note = Target: FXN; (-) strand; PAM type: NRG; PAM sequence: CGG
  source 1..20: mol_type = other DNA
taaaataaaaaagagttggc

SEQ ID NO: 11505 - DNA, 20 bp, synthetic construct
  misc_feature 1..20: note = Description of Artificial Sequence: Synthetic oligonucleotide
  misc_feature 1..20: note = Target: FXN; (-) strand; PAM type: NRG; PAM sequence: TGG
  source 1..20: mol_type = other DNA
aaaataaaataaaaaagagt

SEQ ID NO: 11506 - DNA, 20 bp, synthetic construct
  misc_feature 1..20: note = Description of Artificial Sequence: Synthetic oligonucleotide
  misc_feature 1..20: note = Target: FXN; (-) strand; PAM type: NRG; PAM sequence: GAG
  source 1..20: mol_type = other DNA
aaataaaataaaataaaaaa

SEQ ID NO: 11507 - DNA, 20 bp, synthetic construct
  misc_feature 1..20: note = Description of Artificial Sequence: Synthetic oligonucleotide
  misc_feature 1..20: note = Target: FXN; (-) strand; PAM type: NRG; PAM sequence: AAG
  source 1..20: mol_type = other DNA
taaaataaaataaaataaaa

SEQ ID NO: 11508 - DNA, 20 bp, synthetic construct
  misc_feature 1..20: note = Description of Artificial Sequence: Synthetic oligonucleotide
  misc_feature 1..20: note = Target: FXN; (-) strand; PAM type: NRG; PAM sequence: AAG
  source 1..20: mol_type = other DNA
aaagtgaaaccctgtcttta

SEQ ID NO: 11509 - DNA, 20 bp, synthetic construct
  misc_feature 1..20: note = Description of Artificial Sequence: Synthetic oligonucleotide
  misc_feature 1..20: note = Target: FXN; (-) strand; PAM type: NRG; PAM sequence: AAG
  source 1..20: mol_type = other DNA
gcattccatcctgggtgaca

SEQ ID NO: 11510 - DNA, 20 bp, synthetic construct
  misc_feature 1..20: note = Description of Artificial Sequence: Synthetic oligonucleotide
  misc_feature 1..20: note = Target: FXN; (-) strand; PAM type: NRG; PAM sequence: GGG
  source 1..20: mol_type = other DNA
gtgccattgcattccatcct

SEQ ID NO: 11511 - DNA, 20 bp, synthetic construct
  misc_feature 1..20: note = Description of Artificial Sequence: Synthetic oligonucleotide
  misc_feature 1..20: note = Target: FXN; (-) strand; PAM type: NRG; PAM sequence: TGG
  source 1..20: mol_type = other DNA
cgtgccattgcattccatcc

SEQ ID NO: 11512 - DNA, 20 bp, synthetic construct
  misc_feature 1..20: note = Description of Artificial Sequence: Synthetic oligonucleotide
  misc_feature 1..20: note = Target: FXN; (-) strand; PAM type: NRG; PAM sequence: GAG
  source 1..20: mol_type = other DNA
agggaggtcaaggctgcagt

SEQ ID NO: 11513 - DNA, 20 bp, synthetic construct
  misc_feature 1..20: note = Description of Artificial Sequence: Synthetic oligonucleotide
  misc_feature 1..20: note = Target: FXN; (-) strand; PAM type: NRG; PAM sequence: CAG
  source 1..20: mol_type = other DNA
agccagggaggtcaaggctg

SEQ ID NO: 11514 - DNA, 20 bp, synthetic construct
  misc_feature 1..20: note = Description of Artificial Sequence: Synthetic oligonucleotide
  misc_feature 1..20: note = Target: FXN; (-) strand; PAM type: NRG; PAM sequence: AGG
  source 1..20: mol_type = other DNA
cacccgagccagggaggtca

SEQ ID NO: 11515 - DNA, 20 bp, synthetic construct
  misc_feature 1..20: note = Description of Artificial Sequence: Synthetic oligonucleotide
  misc_feature 1..20: note = Target: FXN; (-) strand; PAM type: NRG; PAM sequence: AAG
  source 1..20: mol_type = other DNA
tcacccgagccagggaggtc

SEQ ID NO: 11516 - DNA, 20 bp, synthetic construct
  misc_feature 1..20: note = Description of Artificial Sequence: Synthetic oligonucleotide
  misc_feature 1..20: note = Target: FXN; (-) strand; PAM type: NRG; PAM sequence: AGG
  source 1..20: mol_type = other DNA
agggatcacccgagccaggg

SEQ ID NO: 11517 - DNA, 20 bp, synthetic construct
  misc_feature 1..20: note = Description of Artificial Sequence: Synthetic oligonucleotide
  misc_feature 1..20: note = Target: FXN; (-) strand; PAM type: NRG; PAM sequence: GAG
  source 1..20: mol_type = other DNA
gagggatcacccgagccagg

SEQ ID NO: 11518 - DNA, 20 bp, synthetic construct
  misc_feature 1..20: note = Description of Artificial Sequence: Synthetic oligonucleotide
  misc_feature 1..20: note = Target: FXN; (-) strand; PAM type: NRG; PAM sequence: GGG
  source 1..20: mol_type = other DNA
gggagggatcacccgagcca

SEQ ID NO: 11519 - DNA, 20 bp, synthetic construct
  misc_feature 1..20: note = Description of Artificial Sequence: Synthetic oligonucleotide
  misc_feature 1..20: note = Target: FXN; (-) strand; PAM type: NRG; PAM sequence: AGG
  source 1..20: mol_type = other DNA
tgggagggatcacccgagcc

SEQ ID NO: 11520 - DNA, 20 bp, synthetic construct
  misc_feature 1..20: note = Description of Artificial Sequence: Synthetic oligonucleotide
  misc_feature 1..20: note = Target: FXN; (-) strand; PAM type: NRG; PAM sequence: CAG
  source 1..20: mol_type = other DNA
gtgggagggatcacccgagc

SEQ ID NO: 11521 - DNA, 20 bp, synthetic construct
  misc_feature 1..20: note = Description of Artificial Sequence: Synthetic oligonucleotide
  misc_feature 1..20: note = Target: FXN; (-) strand; PAM type: NRG; PAM sequence: GAG
  source 1..20: mol_type = other DNA
tgaggtgggagggatcaccc

SEQ ID NO: 11522 - DNA, 20 bp, synthetic construct
  misc_feature 1..20: note = Description of Artificial Sequence: Synthetic oligonucleotide
  misc_feature 1..20: note = Target: FXN; (-) strand; PAM type: NRG; PAM sequence: GGG
  source 1..20: mol_type = other DNA
ctcaggagcctgaggtggga

SEQ ID NO: 11523 - DNA, 20 bp, synthetic construct
  misc_feature 1..20: note = Description of Artificial Sequence: Synthetic oligonucleotide
  misc_feature 1..20: note = Target: FXN; (-) strand; PAM type: NRG; PAM sequence: AGG
  source 1..20: mol_type = other DNA
cctcaggagcctgaggtggg

SEQ ID NO: 11524 - DNA, 20 bp, synthetic construct
  misc_feature 1..20: note = Description of Artificial Sequence: Synthetic oligonucleotide
  misc_feature 1..20: note = Target: FXN; (-) strand; PAM type: NRG; PAM sequence: GAG
  source 1..20: mol_type = other DNA
tcctcaggagcctgaggtgg

SEQ ID NO: 11525 - DNA, 20 bp, synthetic construct
  misc_feature 1..20: note = Description of Artificial Sequence: Synthetic oligonucleotide
  misc_feature 1..20: note = Target: FXN; (-) strand; PAM type: NRG; PAM sequence: GGG
  source 1..20: mol_type = other DNA
gctcctcaggagcctgaggt

SEQ ID NO: 11526 - DNA, 20 bp, synthetic construct
  misc_feature 1..20: note = Description of Artificial Sequence: Synthetic oligonucleotide
  misc_feature 1..20: note = Target: FXN; (-) strand; PAM type: NRG; PAM sequence: TGG
  source 1..20: mol_type = other DNA
agctcctcaggagcctgagg

SEQ ID NO: 11527 - DNA, 20 bp, synthetic construct
  misc_feature 1..20: note = Description of Artificial Sequence: Synthetic oligonucleotide
  misc_feature 1..20: note = Target: FXN; (-) strand; PAM type: NRG; PAM sequence: AGG
  source 1..20: mol_type = other DNA
tctagctcctcaggagcctg

SEQ ID NO: 11528 - DNA, 20 bp, synthetic construct
  misc_feature 1..20: note = Description of Artificial Sequence: Synthetic oligonucleotide
  misc_feature 1..20: note = Target: FXN; (-) strand; PAM type: NRG; PAM sequence: GAG
  source 1..20: mol_type = other DNA
ttctagctcctcaggagcct

SEQ ID NO: 11529 - DNA, 20 bp, synthetic construct
  misc_feature 1..20: note = Description of Artificial Sequence: Synthetic oligonucleotide
  misc_feature 1..20: note = Target: FXN; (-) strand; PAM type: NRG; PAM sequence: GAG
  source 1..20: mol_type = other DNA
ctgtagttctagctcctcag

SEQ ID NO: 11530 - DNA, 20 bp, synthetic construct
  misc_feature 1..20: note = Description of Artificial Sequence: Synthetic oligonucleotide
  misc_feature 1..20: note = Target: FXN; (-) strand; PAM type: NRG; PAM sequence: AGG
  source 1..20: mol_type = other DNA
gcctgtagttctagctcctc

SEQ ID NO: 11531 - DNA, 20 bp, synthetic construct
  misc_feature 1..20: note = Description of Artificial Sequence: Synthetic oligonucleotide
  misc_feature 1..20: note = Target: FXN; (-) strand; PAM type: NRG; PAM sequence: CAG
  source 1..20: mol_type = other DNA
tgcctgtagttctagctcct

SEQ ID NO: 11532 - DNA, 20 bp, synthetic construct
  misc_feature 1..20: note = Description of Artificial Sequence: Synthetic oligonucleotide
  misc_feature 1..20: note = Target: FXN; (-) strand; PAM type: NRG; PAM sequence: TAG
  source 1..20: mol_type = other DNA
atggcccatgcctgtagttc

SEQ ID NO: 11533 - DNA, 20 bp, synthetic construct
  misc_feature 1..20: note = Description of Artificial Sequence: Synthetic oligonucleotide
  misc_feature 1..20: note = Target: FXN; (-) strand; PAM type: NRG; PAM sequence: TAG
  source 1..20: mol_type = other DNA
ctgggcatggcccatgcctg

SEQ ID NO: 11534 - DNA, 20 bp, synthetic construct
  misc_feature 1..20: note = Description of Artificial Sequence: Synthetic oligonucleotide
  misc_feature 1..20: note = Target: FXN; (-) strand; PAM type: NRG; PAM sequence: TGG
  source 1..20: mol_type = other DNA
attaaaaaattagctgggca

SEQ ID NO: 11535 - DNA, 20 bp, synthetic construct
  misc_feature 1..20: note = Description of Artificial Sequence: Synthetic oligonucleotide
  misc_feature 1..20: note = Target: FXN; (-) strand; PAM type: NRG; PAM sequence: GGG
  source 1..20: mol_type = other DNA
caaaaattaaaaaattagct

SEQ ID NO: 11536 - DNA, 20 bp, synthetic construct
  misc_feature 1..20: note = Description of Artificial Sequence: Synthetic oligonucleotide
  misc_feature 1..20: note = Target: FXN; (-) strand; PAM type: NRG; PAM sequence: TGG
  source 1..20: mol_type = other DNA
ccaaaaattaaaaaattagc

SEQ ID NO: 11537 - DNA, 20 bp, synthetic construct
  misc_feature 1..20: note = Description of Artificial Sequence: Synthetic oligonucleotide
  misc_feature 1..20: note = Target: FXN; (-) strand; PAM type: NRG; PAM sequence: TAG
  source 1..20: mol_type = other DNA
tctaccaaaaattaaaaaat

SEQ ID NO: 11538 - DNA, 20 bp, synthetic construct
  misc_feature 1..20: note = Description of Artificial Sequence: Synthetic oligonucleotide
  misc_feature 1..20: note = Target: FXN; (-) strand; PAM type: NRG; PAM sequence: GAG
  source 1..20: mol_type = other DNA
cccaggaatctgagacaaca

SEQ ID NO: 11539 - DNA, 20 bp, synthetic construct
  misc_feature 1..20: note = Description of Artificial Sequence: Synthetic oligonucleotide
  misc_feature 1..20: note = Target: FXN; (-) strand; PAM type: NRG; PAM sequence: CAG
  source 1..20: mol_type = other DNA
aacccaggaatctgagacaa

SEQ ID NO: 11540 - DNA, 20 bp, synthetic construct
  misc_feature 1..20: note = Description of Artificial Sequence: Synthetic oligonucleotide
  misc_feature 1..20: note = Target: FXN; (-) strand; PAM type: NRG; PAM sequence: GAG
  source 1..20: mol_type = other DNA
tcacttgaacccaggaatct

SEQ ID NO: 11541 - DNA, 20 bp, synthetic construct
  misc_feature 1..20: note = Description of Artificial Sequence: Synthetic oligonucleotide
  misc_feature 1..20: note = Target: FXN; (-) strand; PAM type: NRG; PAM sequence: AGG
  source 1..20: mol_type = other DNA
gagaaggatcacttgaaccc

SEQ ID NO: 11542 - DNA, 20 bp, synthetic construct
  misc_feature 1..20: note = Description of Artificial Sequence: Synthetic oligonucleotide
  misc_feature 1..20: note = Target: FXN; (-) strand; PAM type: NRG; PAM sequence: CAG
  source 1..20: mol_type = other DNA
ggagaaggatcacttgaacc

SEQ ID NO: 11543 - DNA, 20 bp, synthetic construct
  misc_feature 1..20: note = Description of Artificial Sequence: Synthetic oligonucleotide
  misc_feature 1..20: note = Target: FXN; (-) strand; PAM type: NRG; PAM sequence: AGG
  source 1..20: mol_type = other DNA
ctttgggaggccaagggaga

SEQ ID NO: 11544 - DNA, 20 bp, synthetic construct
  misc_feature 1..20: note = Description of Artificial Sequence: Synthetic oligonucleotide
  misc_feature 1..20: note = Target: FXN; (-) strand; PAM type: NRG; PAM sequence: AAG
  source 1..20: mol_type = other DNA
actttgggaggccaagggag

SEQ ID NO: 11545 - DNA, 20 bp, synthetic construct
  misc_feature 1..20: note = Description of Artificial Sequence: Synthetic oligonucleotide
  misc_feature 1..20: note = Target: FXN; (-) strand; PAM type: NRG; PAM sequence: GAG
  source 1..20: mol_type = other DNA
agaactttgggaggccaagg

SEQ ID NO: 11546 - DNA, 20 bp, synthetic construct
  misc_feature 1..20: note = Description of Artificial Sequence: Synthetic oligonucleotide
  misc_feature 1..20: note = Target: FXN; (-) strand; PAM type: NRG; PAM sequence: GGG
  source 1..20: mol_type = other DNA
ccagaactttgggaggccaa

SEQ ID NO: 11547 - DNA, 20 bp, synthetic construct
  misc_feature 1..20: note = Description of Artificial Sequence: Synthetic oligonucleotide
  misc_feature 1..20: note = Target: FXN; (-) strand; PAM type: NRG; PAM sequence: AGG
  source 1..20: mol_type = other DNA
accagaactttgggaggcca

SEQ ID NO: 11548 - DNA, 20 bp, synthetic construct
  misc_feature 1..20: note = Description of Artificial Sequence: Synthetic oligonucleotide
  misc_feature 1..20: note = Target: FXN; (-) strand; PAM type: NRG; PAM sequence: AAG
  source 1..20: mol_type = other DNA
taccagaactttgggaggcc

SEQ ID NO: 11549 - DNA, 20 bp, synthetic construct
  misc_feature 1..20: note = Description of Artificial Sequence: Synthetic oligonucleotide
  misc_feature 1..20: note = Target: FXN; (-) strand; PAM type: NRG; PAM sequence: AGG
  source 1..20: mol_type = other DNA
tgtaataccagaactttggg

SEQ ID NO: 11550 - DNA, 20 bp, synthetic construct
  misc_feature 1..20: note = Description of Artificial Sequence: Synthetic oligonucleotide
  misc_feature 1..20: note = Target: FXN; (-) strand; PAM type: NRG; PAM sequence: GAG
  source 1..20: mol_type = other DNA
ctgtaataccagaactttgg

SEQ ID NO: 11551 - DNA, 20 bp, synthetic construct
  misc_feature 1..20: note = Description of Artificial Sequence: Synthetic oligonucleotide
  misc_feature 1..20: note = Target: FXN; (-) strand; PAM type: NRG; PAM sequence: GGG
  source 1..20: mol_type = other DNA
gcctgtaataccagaacttt

SEQ ID NO: 11552 - DNA, 20 bp, synthetic construct
  misc_feature 1..20: note = Description of Artificial Sequence: Synthetic oligonucleotide
  misc_feature 1..20: note = Target: FXN; (-) strand; PAM type: NRG; PAM sequence: TGG
  source 1..20: mol_type = other DNA
tgcctgtaataccagaactt

SEQ ID NO: 11553 - DNA, 20 bp, synthetic construct
  misc_feature 1..20: note = Description of Artificial Sequence: Synthetic oligonucleotide
  misc_feature 1..20: note = Target: FXN; (-) strand; PAM type: NRG; PAM sequence: CAG
  source 1..20: mol_type = other DNA
gtggctcatgcctgtaatac

SEQ ID NO: 11554 - DNA, 20 bp, synthetic construct
  misc_feature 1..20: note = Description of Artificial Sequence: Synthetic oligonucleotide
  misc_feature 1..20: note = Target: FXN; (-) strand; PAM type: NRG; PAM sequence: TGG
  source 1..20: mol_type = other DNA
tggccatgggctgggtgcag

SEQ ID NO: 11555 - DNA, 20 bp, synthetic construct
  misc_feature 1..20: note = Description of Artificial Sequence: Synthetic oligonucleotide
  misc_feature 1..20: note = Target: FXN; (-) strand; PAM type: NRG; PAM sequence: CAG
  source 1..20: mol_type = other DNA
agctggccatgggctgggtg

SEQ ID NO: 11556 - DNA, 20 bp, synthetic construct
  misc_feature 1..20: note = Description of Artificial Sequence: Synthetic oligonucleotide
  misc_feature 1..20: note = Target: FXN; (-) strand; PAM type: NRG; PAM sequence: GGG
  source 1..20: mol_type = other DNA
tcaagagctggccatgggct

SEQ ID NO: 11557 - DNA, 20 bp, synthetic construct
  misc_feature 1..20: note = Description of Artificial Sequence: Synthetic oligonucleotide
  misc_feature 1..20: note = Target: FXN; (-) strand; PAM type: NRG; PAM sequence: TGG
  source 1..20: mol_type = other DNA
atcaagagctggccatgggc

SEQ ID NO: 11558 - DNA, 20 bp, synthetic construct
  misc_feature 1..20: note = Description of Artificial Sequence: Synthetic oligonucleotide
  misc_feature 1..20: note = Target: FXN; (-) strand; PAM type: NRG; PAM sequence: GGG
  source 1..20: mol_type = other DNA
tcgtatcaagagctggccat

SEQ ID NO: 11559 - DNA, 20 bp, synthetic construct
  misc_feature 1..20: note = Description of Artificial Sequence: Synthetic oligonucleotide
  misc_feature 1..20: note = Target: FXN; (-) strand; PAM type: NRG; PAM sequence: TGG
  source 1..20: mol_type = other DNA
atcgtatcaagagctggcca

SEQ ID NO: 11560 - DNA, 20 bp, synthetic construct
  misc_feature 1..20: note = Description of Artificial Sequence: Synthetic oligonucleotide
  misc_feature 1..20: note = Target: FXN; (-) strand; PAM type: NRG; PAM sequence: TGG
  source 1..20: mol_type = other DNA
agacagatcgtatcaagagc

SEQ ID NO: 11561 - DNA, 20 bp, synthetic construct
  misc_feature 1..20: note = Description of Artificial Sequence: Synthetic oligonucleotide
  misc_feature 1..20: note = Target: FXN; (-) strand; PAM type: NRG; PAM sequence: GAG
  source 1..20: mol_type = other DNA
aaagagacagatcgtatcaa

SEQ ID NO: 11562 - DNA, 20 bp, synthetic construct
  misc_feature 1..20: note = Description of Artificial Sequence: Synthetic oligonucleotide
  misc_feature 1..20: note = Target: FXN; (-) strand; PAM type: NRG; PAM sequence: AAG
  source 1..20: mol_type = other DNA
agaaagagacagatcgtatc

SEQ ID NO: 11563 - DNA, 20 bp, synthetic construct
  misc_feature 1..20: note = Description of Artificial Sequence: Synthetic oligonucleotide
  misc_feature 1..20: note = Target: FXN; (-) strand; PAM type: NRG; PAM sequence: CAG
  source 1..20: mol_type = other DNA
aaaaaaagaaaagaaagaga

SEQ ID NO: 11564 - DNA, 20 bp, synthetic construct
  misc_feature 1..20: note = Description of Artificial Sequence: Synthetic oligonucleotide
  misc_feature 1..20: note = Target: FXN; (-) strand; PAM type: NRG; PAM sequence: GAG
  source 1..20: mol_type = other DNA
aaaaaaaaaaagaaaagaaa

SEQ ID NO: 11565 - DNA, 20 bp, synthetic construct
  misc_feature 1..20: note = Description of Artificial Sequence: Synthetic oligonucleotide
  misc_feature 1..20: note = Target: FXN; (-) strand; PAM type: NRG; PAM sequence: AAG
  source 1..20: mol_type = other DNA
aaaaaaaaaaaaagaaaaga

SEQ ID NO: 11566 - DNA, 20 bp, synthetic construct
  misc_feature 1..20: note = Description of Artificial Sequence: Synthetic oligonucleotide
  misc_feature 1..20: note = Target: FXN; (-) strand; PAM type: NRG; PAM sequence: AAG
  source 1..20: mol_type = other DNA
aattaaaaaaaaaaaaagaa

SEQ ID NO: 11567 - DNA, 20 bp, synthetic construct
  misc_feature 1..20: note = Description of Artificial Sequence: Synthetic oligonucleotide
  misc_feature 1..20: note = Target: FXN; (-) strand; PAM type: NRG; PAM sequence: AAG
  source 1..20: mol_type = other DNA
tctcaaattaaaaaaaaaaa

SEQ ID NO: 11568 - DNA, 20 bp, synthetic construct
  misc_feature 1..20: note = Description of Artificial Sequence: Synthetic oligonucleotide
  misc_feature 1..20: note = Target: FXN; (-) strand; PAM type: NRG; PAM sequence: AAG
  source 1..20: mol_type = other DNA
tttatgtataatatcaaaga

SEQ ID NO: 11569 - DNA, 20 bp, synthetic construct
  misc_feature 1..20: note = Description of Artificial Sequence: Synthetic oligonucleotide
  misc_feature 1..20: note = Target: FXN; (-) strand; PAM type: NRG; PAM sequence: AAG
  source 1..20: mol_type = other DNA
gtggtttatgtataatatca

SEQ ID NO: 11570 - DNA, 20 bp, synthetic construct
  misc_feature 1..20: note = Description of Artificial Sequence: Synthetic oligonucleotide
  misc_feature 1..20: note = Target: FXN; (-) strand; PAM type: NRG; PAM sequence: TGG
  source 1..20: mol_type = other DNA
tactgaaagacattttggtg

SEQ ID NO: 11571 - DNA, 20 bp, synthetic construct
  misc_feature 1..20: note = Description of Artificial Sequence: Synthetic oligonucleotide
  misc_feature 1..20: note = Target: FXN; (-) strand; PAM type: NRG; PAM sequence: TGG
  source 1..20: mol_type = other DNA
ttacttactgaaagacattt

SEQ ID NO: 11572 - DNA, 20 bp, synthetic construct
  misc_feature 1..20: note = Description of Artificial Sequence: Synthetic oligonucleotide
  misc_feature 1..20: note = Target: FXN; (-) strand; PAM type: NRG; PAM sequence: AAG
  source 1..20: mol_type = other DNA
tggttcattttacttactga

SEQ ID NO: 11573 - DNA, 20 bp, synthetic construct
  misc_feature 1..20: note = Description of Artificial Sequence: Synthetic oligonucleotide
  misc_feature 1..20: note = Target: FXN; (-) strand; PAM type: NRG; PAM sequence: TGG
  source 1..20: mol_type = other DNA
agaattttctgtatctaaaa

SEQ ID NO: 11574 - DNA, 20 bp, synthetic construct
  misc_feature 1..20: note = Description of Artificial Sequence: Synthetic oligonucleotide
  misc_feature 1..20: note = Target: FXN; (-) strand; PAM type: NRG; PAM sequence: TAG
  source 1..20: mol_type = other DNA
cttaactatgccaatctaat

SEQ ID NO: 11575 - DNA, 20 bp, synthetic construct
  misc_feature 1..20: note = Description of Artificial Sequence: Synthetic oligonucleotide
  misc_feature 1..20: note = Target: FXN; (-) strand; PAM type: NRG; PAM sequence: TGG
  source 1..20: mol_type = other DNA
caatgtcaactttatatttt

SEQ ID NO: 11576 - DNA, 20 bp, synthetic construct
  misc_feature 1..20: note = Description of Artificial Sequence: Synthetic oligonucleotide
  misc_feature 1..20: note = Target: FXN; (-) strand; PAM type: NRG; PAM sequence: TAG
  source 1..20: mol_type = other DNA
ggcaagggctgaagataagg

SEQ ID NO: 11577 - DNA, 20 bp, synthetic construct
  misc_feature 1..20: note = Description of Artificial Sequence: Synthetic oligonucleotide
  misc_feature 1..20: note = Target: FXN; (-) strand; PAM type: NRG; PAM sequence: AGG
  source 1..20: mol_type = other DNA
aaaggcaagggctgaagata

SEQ ID NO: 11578 - DNA, 20 bp, synthetic construct
  misc_feature 1..20: note = Description of Artificial Sequence: Synthetic oligonucleotide
  misc_feature 1..20: note = Target: FXN; (-) strand; PAM type: NRG; PAM sequence: AAG
  source 1..20: mol_type = other DNA
taaaggcaagggctgaagat

SEQ ID NO: 11579 - DNA, 20 bp, synthetic construct
  misc_feature 1..20: note = Description of Artificial Sequence: Synthetic oligonucleotide
  misc_feature 1..20: note = Target: FXN; (-) strand; PAM type: NRG; PAM sequence: AAG
  source 1..20: mol_type = other DNA
cctcttaaaggcaagggctg

SEQ ID NO: 11580 - DNA, 20 bp, synthetic construct
  misc_feature 1..20: note = Description of Artificial Sequence: Synthetic oligonucleotide
  misc_feature 1..20: note = Target: FXN; (-) strand; PAM type: NRG; PAM sequence: GGG
  source 1..20: mol_type = other DNA
catttgcctcttaaaggcaa

SEQ ID NO: 11581 - DNA, 20 bp, synthetic construct
  misc_feature 1..20: note = Description of Artificial Sequence: Synthetic oligonucleotide
  misc_feature 1..20: note = Target: FXN; (-) strand; PAM type: NRG; PAM sequence: AGG
  source 1..20: mol_type = other DNA
tcatttgcctcttaaaggca

SEQ ID NO: 11582 - DNA, 20 bp, synthetic construct
  misc_feature 1..20: note = Description of Artificial Sequence: Synthetic oligonucleotide
  misc_feature 1..20: note = Target: FXN; (-) strand; PAM type: NRG; PAM sequence: AAG
  source 1..20: mol_type = other DNA
ttcatttgcctcttaaaggc

SEQ ID NO: 11583 - DNA, 20 bp, synthetic construct
  misc_feature 1..20: note = Description of Artificial Sequence: Synthetic oligonucleotide
  misc_feature 1..20: note = Target: FXN; (-) strand; PAM type: NRG; PAM sequence: AGG
  source 1..20: mol_type = other DNA
tgtgttcatttgcctcttaa

SEQ ID NO: 11584 - DNA, 20 bp, synthetic construct
  misc_feature 1..20: note = Description of Artificial Sequence: Synthetic oligonucleotide
  misc_feature 1..20: note = Target: FXN; (-) strand; PAM type: NRG; PAM sequence: AAG
  source 1..20: mol_type = other DNA
ttgtgttcatttgcctctta

SEQ ID NO: 11585 - DNA, 20 bp, synthetic construct
  misc_feature 1..20: note = Description of Artificial Sequence: Synthetic oligonucleotide
  misc_feature 1..20: note = Target: FXN; (-) strand; PAM type: NRG; PAM sequence: AAG
  source 1..20: mol_type = other DNA
tcactgtctcagaaccaagc

SEQ ID NO: 11586 - DNA, 20 bp, synthetic construct
  misc_feature 1..20: note = Description of Artificial Sequence: Synthetic oligonucleotide
  misc_feature 1..20: note = Target: FXN; (-) strand; PAM type: NRG; PAM sequence: AAG
  source 1..20: mol_type = other DNA
tccttcactgtctcagaacc

SEQ ID NO: 11587 - DNA, 20 bp, synthetic construct
  misc_feature 1..20: note = Description of Artificial Sequence: Synthetic oligonucleotide
  misc_feature 1..20: note = Target: FXN; (-) strand; PAM type: NRG; PAM sequence: CAG
  source 1..20: mol_type = other DNA
gggaaagtccttcactgtct

SEQ ID NO: 11588 - DNA, 20 bp, synthetic construct
  misc_feature 1..20: note = Description of Artificial Sequence: Synthetic oligonucleotide
  misc_feature 1..20: note = Target: FXN; (-) strand; PAM type: NRG; PAM sequence: AAG
  source 1..20: mol_type = other DNA
tatatttaaatactggggga

SEQ ID NO: 11589 - DNA, 20 bp, synthetic construct
  misc_feature 1..20: note = Description of Artificial Sequence: Synthetic oligonucleotide
  misc_feature 1..20: note = Target: FXN; (-) strand; PAM type: NRG; PAM sequence: GGG
  source 1..20: mol_type = other DNA
taaatatatttaaatactgg

SEQ ID NO: 11590 - DNA, 20 bp, synthetic construct
  misc_feature 1..20: note = Description of Artificial Sequence: Synthetic oligonucleotide
  misc_feature 1..20: note = Target: FXN; (-) strand; PAM type: NRG; PAM sequence: GGG
  source 1..20: mol_type = other DNA
gtaaatatatttaaatactg

SEQ ID NO: 11591 - DNA, 20 bp, synthetic construct
  misc_feature 1..20: note = Description of Artificial Sequence: Synthetic oligonucleotide
  misc_feature 1..20: note = Target: FXN; (-) strand; PAM type: NRG; PAM sequence: GGG
  source 1..20: mol_type = other DNA
tgtaaatatatttaaatact

SEQ ID NO: 11592 - DNA, 20 bp, synthetic construct
  misc_feature 1..20: note = Description of Artificial Sequence: Synthetic oligonucleotide
  misc_feature 1..20: note = Target: FXN; (-) strand; PAM type: NRG; PAM sequence: TGG
  source 1..20: mol_type = other DNA
atgtaaatatatttaaatac

SEQ ID NO: 11593 - DNA, 20 bp, synthetic construct
  misc_feature 1..20: note = Description of Artificial Sequence: Synthetic oligonucleotide
  misc_feature 1..20: note = Target: FXN; (-) strand; PAM type: NRG; PAM sequence: TGG
  source 1..20: mol_type = other DNA
aatatttagatttatgtaac

SEQ ID NO: 11594 - DNA, 20 bp, synthetic construct
  misc_feature 1..20: note = Description of Artificial Sequence: Synthetic oligonucleotide
  misc_feature 1..20: note = Target: FXN; (-) strand; PAM type: NRG; PAM sequence: TAG
  source 1..20: mol_type = other DNA
ttggagatttttttaatatt

SEQ ID NO: 11595 - DNA, 20 bp, synthetic construct
  misc_feature 1..20: note = Description of Artificial Sequence: Synthetic oligonucleotide
  misc_feature 1..20: note = Target: FXN; (-) strand; PAM type: NRG; PAM sequence: GAG
  source 1..20: mol_type = other DNA
atgccatctaaaatctattg

SEQ ID NO: 11596 - DNA, 20 bp, synthetic construct
  misc_feature 1..20: note = Description of Artificial Sequence: Synthetic oligonucleotide
  misc_feature 1..20: note = Target: FXN; (-) strand; PAM type: NRG; PAM sequence: TGG
  source 1..20: mol_type = other DNA
gaatgccatctaaaatctat

SEQ ID NO: 11597 - DNA, 20 bp, synthetic construct
  misc_feature 1..20: note = Description of Artificial Sequence: Synthetic oligonucleotide
  misc_feature 1..20: note = Target: FXN; (-) strand; PAM type: NRG; PAM sequence: TGG
  source 1..20: mol_type = other DNA
tgttcaacttttcacaaaga

SEQ ID NO: 11598 - DNA, 20 bp, synthetic construct
  misc_feature 1..20: note = Description of Artificial Sequence: Synthetic oligonucleotide
  misc_feature 1..20: note = Target: FXN; (-) strand; PAM type: NRG; PAM sequence: AAG
  source 1..20: mol_type = other DNA
gtaatgttcaacttttcaca

SEQ ID NO: 11599 - DNA, 20 bp, synthetic construct
  misc_feature 1..20: note = Description of Artificial Sequence: Synthetic oligonucleotide
  misc_feature 1..20: note = Target: FXN; (-) strand; PAM type: NRG; PAM sequence: TAG
  source 1..20: mol_type = other DNA
aagatatgatcagatttcat

SEQ ID NO: 11600 - DNA, 20 bp, synthetic construct
  misc_feature 1..20: note = Description of Artificial Sequence: Synthetic oligonucleotide
  misc_feature 1..20: note = Target: FXN; (-) strand; PAM type: NRG; PAM sequence: CAG
  source 1..20: mol_type = other DNA
tatccttctaaagatatgat

SEQ ID NO: 11601 - DNA, 20 bp, synthetic construct
  misc_feature 1..20: note = Description of Artificial Sequence: Synthetic oligonucleotide
  misc_feature 1..20: note = Target: FXN; (-) strand; PAM type: NRG; PAM sequence: AAG
  source 1..20: mol_type = other DNA
tatcactgtttatccttcta

SEQ ID NO: 11602 - DNA, 20 bp, synthetic construct
  misc_feature 1..20: note = Description of Artificial Sequence: Synthetic oligonucleotide
  misc_feature 1..20: note = Target: FXN; (-) strand; PAM type: NRG; PAM sequence: CAG
  source 1..20: mol_type = other DNA
aaaaaacagttattctgatt

SEQ ID NO: 11603 - DNA, 20 bp, synthetic construct
  misc_feature 1..20: note = Description of Artificial Sequence: Synthetic oligonucleotide
  misc_feature 1..20: note = Target: FXN; (-) strand; PAM type: NRG; PAM sequence: CAG
  source 1..20: mol_type = other DNA
tcaaagaaaaccccaaaaaa

SEQ ID NO: 11604 - DNA, 20 bp, synthetic construct
  misc_feature 1..20: note = Description of Artificial Sequence: Synthetic oligonucleotide
  misc_feature 1..20: note = Target: FXN; (-) strand; PAM type: NRG; PAM sequence: AAG
  source 1..20: mol_type = other DNA
aagagcaaaactccgtctca

SEQ ID NO: 11605 - DNA, 20 bp, synthetic construct
  misc_feature 1..20: note = Description of Artificial Sequence: Synthetic oligonucleotide
  misc_feature 1..20: note = Target: FXN; (-) strand; PAM type: NRG; PAM sequence: GAG
  source 1..20: mol_type = other DNA
cactccagcctgggcaacaa

SEQ ID NO: 11606 - DNA, 20 bp, synthetic construct
  misc_feature 1..20: note = Description of Artificial Sequence: Synthetic oligonucleotide
  misc_feature 1..20: note = Target: FXN; (-) strand; PAM type: NRG; PAM sequence: AAG
  source 1..20: mol_type = other DNA
tgcactccagcctgggcaac

SEQ ID NO: 11607 - DNA, 20 bp, synthetic construct
  misc_feature 1..20: note = Description of Artificial Sequence: Synthetic oligonucleotide
  misc_feature 1..20: note = Target: FXN; (-) strand; PAM type: NRG; PAM sequence: GGG
  source 1..20: mol_type = other DNA
gcaccactgcactccagcct

SEQ ID NO: 11608 - DNA, 20 bp, synthetic construct
  misc_feature 1..20: note = Description of Artificial Sequence: Synthetic oligonucleotide
  misc_feature 1..20: note = Target: FXN; (-) strand; PAM type: NRG; PAM sequence: TGG
  source 1..20: mol_type = other DNA
ggcaccactgcactccagcc

SEQ ID NO: 11609 - DNA, 20 bp, synthetic construct
  misc_feature 1..20: note = Description of Artificial Sequence: Synthetic oligonucleotide
  misc_feature 1..20: note = Target: FXN; (-) strand; PAM type: NRG; PAM sequence: CAG
  source 1..20: mol_type = other DNA
gaggtggcaccactgcactc

SEQ ID NO: 11610 - DNA, 20 bp, synthetic construct
  misc_feature 1..20: note = Description of Artificial Sequence: Synthetic oligonucleotide
  misc_feature 1..20: note = Target: FXN; (-) strand; PAM type: NRG; PAM sequence: TGG
  source 1..20: mol_type = other DNA
gaggttgcagtgagctgagg

SEQ ID NO: 11611 - DNA, 20 bp, synthetic construct
  misc_feature 1..20: note = Description of Artificial Sequence: Synthetic oligonucleotide
  misc_feature 1..20: note = Target: FXN; (-) strand; PAM type: NRG; PAM sequence: AGG
  source 1..20: mol_type = other DNA
gcggaggttgcagtgagctg

SEQ ID NO: 11612 - DNA, 20 bp, synthetic construct
  misc_feature 1..20: note = Description of Artificial Sequence: Synthetic oligonucleotide
  misc_feature 1..20: note = Target: FXN; (-) strand; PAM type: NRG; PAM sequence: GAG
  source 1..20: mol_type = other DNA
ggcggaggttgcagtgagct

SEQ ID NO: 11613 - DNA, 20 bp, synthetic construct
  misc_feature 1..20: note = Description of Artificial Sequence: Synthetic oligonucleotide
  misc_feature 1..20: note = Target: FXN; (-) strand; PAM type: NRG; PAM sequence: GAG
  source 1..20: mol_type = other DNA
cagggggcggaggttgcagt

SEQ ID NO: 11614 - DNA, 20 bp, synthetic construct
  misc_feature 1..20: note = Description of Artificial Sequence: Synthetic oligonucleotide
  misc_feature 1..20: note = Target: FXN; (-) strand; PAM type: NRG; PAM sequence: CAG
  source 1..20: mol_type = other DNA
aatccagggggcggaggttg

SEQ ID NO: 11615 - DNA, 20 bp, synthetic construct
  misc_feature 1..20: note = Description of Artificial Sequence: Synthetic oligonucleotide
  misc_feature 1..20: note = Target: FXN; (-) strand; PAM type: NRG; PAM sequence: AGG
  source 1..20: mol_type = other DNA
ctcttgaatccagggggcgg

SEQ ID NO: 11616 - DNA, 20 bp, synthetic construct
  misc_feature 1..20: note = Description of Artificial Sequence: Synthetic oligonucleotide
  misc_feature 1..20: note = Target: FXN; (-) strand; PAM type: NRG; PAM sequence: GAG
  source 1..20: mol_type = other DNA
tctcttgaatccagggggcg

SEQ ID NO: 11617 - DNA, 20 bp, synthetic construct
  misc_feature 1..20: note = Description of Artificial Sequence: Synthetic oligonucleotide
  misc_feature 1..20: note = Target: FXN; (-) strand; PAM type: NRG; PAM sequence: CGG
  source 1..20: mol_type = other DNA
aatctcttgaatccaggggg

SEQ ID NO: 11618 - DNA, 20 bp, synthetic construct
  misc_feature 1..20: note = Description of Artificial Sequence: Synthetic oligonucleotide
  misc_feature 1..20: note = Target: FXN; (-) strand; PAM type: NRG; PAM sequence: GGG
  source 1..20: mol_type = other DNA
gataatctcttgaatccagg

SEQ ID NO: 11619 - DNA, 20 bp, synthetic construct
  misc_feature 1..20: note = Description of Artificial Sequence: Synthetic oligonucleotide
  misc_feature 1..20: note = Target: FXN; (-) strand; PAM type: NRG; PAM sequence: GGG
  source 1..20: mol_type = other DNA
ggataatctcttgaatccag

SEQ ID NO: 11620 - DNA, 20 bp, synthetic construct
  misc_feature 1..20: note = Description of Artificial Sequence: Synthetic oligonucleotide
  misc_feature 1..20: note = Target: FXN; (-) strand; PAM type: NRG; PAM sequence: GGG
  source 1..20: mol_type = other DNA
aggataatctcttgaatcca

SEQ ID NO: 11621 - DNA, 20 bp, synthetic construct
  misc_feature 1..20: note = Description of Artificial Sequence: Synthetic oligonucleotide
  misc_feature 1..20: note = Target: FXN; (-) strand; PAM type: NRG; PAM sequence: AGG
  source 1..20: mol_type = other DNA
caggataatctcttgaatcc

SEQ ID NO: 11622 - DNA, 20 bp, synthetic construct
  misc_feature 1..20: note = Description of Artificial Sequence: Synthetic oligonucleotide
  misc_feature 1..20: note = Target: FXN; (-) strand; PAM type: NRG; PAM sequence: CAG
  source 1..20: mol_type = other DNA
gcaggataatctcttgaatc

SEQ ID NO: 11623 - DNA, 20 bp, synthetic construct
  misc_feature 1..20: note = Description of Artificial Sequence: Synthetic oligonucleotide
  misc_feature 1..20: note = Target: FXN; (-) strand; PAM type: NRG; PAM sequence: AGG
  source 1..20: mol_type = other DNA
gctactcgggaggctgaggc

SEQ ID NO: 11624 - DNA, 20 bp, synthetic construct
  misc_feature 1..20: note = Description of Artificial Sequence: Synthetic oligonucleotide
  misc_feature 1..20: note = Target: FXN; (-) strand; PAM type: NRG; PAM sequence: CAG
  source 1..20: mol_type = other DNA
agctactcgggaggctgagg

SEQ ID NO: 11625 - DNA, 20 bp, synthetic construct
  misc_feature 1..20: note = Description of Artificial Sequence: Synthetic oligonucleotide
  misc_feature 1..20: note = Target: FXN; (-) strand; PAM type: NRG; PAM sequence: AGG
  source 1..20: mol_type = other DNA
cccagctactcgggaggctg

SEQ ID NO: 11626 - DNA, 20 bp, synthetic construct
  misc_feature 1..20: note = Description of Artificial Sequence: Synthetic oligonucleotide
  misc_feature 1..20: note = Target: FXN; (-) strand; PAM type: NRG; PAM sequence: GAG
  source 1..20: mol_type = other DNA
tcccagctactcgggaggct

SEQ ID NO: 11627 - DNA, 20 bp, synthetic construct
  misc_feature 1..20: note = Description of Artificial Sequence: Synthetic oligonucleotide
  misc_feature 1..20: note = Target: FXN; (-) strand; PAM type: NRG; PAM sequence: AGG
  source 1..20: mol_type = other DNA
tgtaatcccagctactcggg

SEQ ID NO: 11628 - DNA, 20 bp, synthetic construct
  misc_feature 1..20: note = Description of Artificial Sequence: Synthetic oligonucleotide
  misc_feature 1..20: note = Target: FXN; (-) strand; PAM type: NRG; PAM sequence: GAG
  source 1..20: mol_type = other DNA
ctgtaatcccagctactcgg

SEQ ID NO: 11629 - DNA, 20 bp, synthetic construct
  misc_feature 1..20: note = Description of Artificial Sequence: Synthetic oligonucleotide
  misc_feature 1..20: note = Target: FXN; (-) strand; PAM type: NRG; PAM sequence: GGG
  source 1..20: mol_type = other DNA
gcctgtaatcccagctactc

SEQ ID NO: 11630 - DNA, 20 bp, synthetic construct
  misc_feature 1..20: note = Description of Artificial Sequence: Synthetic oligonucleotide
  misc_feature 1..20: note = Target: FXN; (-) strand; PAM type: NRG; PAM sequence: CGG
  source 1..20: mol_type = other DNA
agcctgtaatcccagctact

SEQ ID NO: 11631 - DNA, 20 bp, synthetic construct
  misc_feature 1..20: note = Description of Artificial Sequence: Synthetic oligonucleotide
  misc_feature 1..20: note = Target: FXN; (-) strand; PAM type: NRG; PAM sequence: CAG
  source 1..20: mol_type = other DNA
gtggggcgagcctgtaatcc

SEQ ID NO: 11632 - DNA, 20 bp, synthetic construct
  misc_feature 1..20: note = Description of Artificial Sequence: Synthetic oligonucleotide
  misc_feature 1..20: note = Target: FXN; (-) strand; PAM type: NRG; PAM sequence: GAG
  source 1..20: mol_type = other DNA
ttagctgggcatggtggggc

SEQ ID NO: 11633 - DNA, 20 bp, synthetic construct
  misc_feature 1..20: note = Description of Artificial Sequence: Synthetic oligonucleotide
  misc_feature 1..20: note = Target: FXN; (-) strand; PAM type: NRG; PAM sequence: GGG
  source 1..20: mol_type = other DNA
aaaattagctgggcatggtg

SEQ ID NO: 11634 - DNA, 20 bp, synthetic construct
  misc_feature 1..20: note = Description of Artificial Sequence: Synthetic oligonucleotide
  misc_feature 1..20: note = Target: FXN; (-) strand; PAM type: NRG; PAM sequence: GGG
  source 1..20: mol_type = other DNA
aaaaattagctgggcatggt

SEQ ID NO: 11635 - DNA, 20 bp, synthetic construct
  misc_feature 1..20: note = Description of Artificial Sequence: Synthetic oligonucleotide
  misc_feature 1..20: note = Target: FXN; (-) strand; PAM type: NRG; PAM sequence: TGG
  source 1..20: mol_type = other DNA
caaaaattagctgggcatgg

SEQ ID NO: 11636 - DNA, 20 bp, synthetic construct
  misc_feature 1..20: note = Description of Artificial Sequence: Synthetic oligonucleotide
  misc_feature 1..20: note = Target: FXN; (-) strand; PAM type: NRG; PAM sequence: TGG
  source 1..20: mol_type = other DNA
atacaaaaattagctgggca

SEQ ID NO: 11637 - DNA, 20 bp, synthetic construct
  misc_feature 1..20: note = Description of Artificial Sequence: Synthetic oligonucleotide
  misc_feature 1..20: note = Target: FXN; (-) strand; PAM type: NRG; PAM sequence: GGG
  source 1..20: mol_type = other DNA
taaaaatacaaaaattagct

SEQ ID NO: 11638 - DNA, 20 bp, synthetic construct
  misc_feature 1..20: note = Description of Artificial Sequence: Synthetic oligonucleotide
  misc_feature 1..20: note = Target: FXN; (-) strand; PAM type: NRG; PAM sequence: TGG
  source 1..20: mol_type = other DNA
ctaaaaatacaaaaattagc

SEQ ID NO: 11639 - DNA, 20 bp, synthetic construct
  misc_feature 1..20: note = Description of Artificial Sequence: Synthetic oligonucleotide
  misc_feature 1..20: note = Target: FXN; (-) strand; PAM type: NRG; PAM sequence: TAG
  source 1..20: mol_type = other DNA
tctactaaaaatacaaaaat

SEQ ID NO: 11640 - DNA, 20 bp, synthetic construct
  misc_feature 1..20: note = Description of Artificial Sequence: Synthetic oligonucleotide
  misc_feature 1..20: note = Target: FXN; (-) strand; PAM type: NRG; PAM sequence: TGG
  source 1..20: mol_type = other DNA
caagaccagcctggctgaca

SEQ ID NO: 11641 - DNA, 20 bp, synthetic construct
  misc_feature 1..20: note = Description of Artificial Sequence: Synthetic oligonucleotide
  misc_feature 1..20: note = Target: FXN; (-) strand; PAM type: NRG; PAM sequence: TGG
  source 1..20: mol_type = other DNA
tcaggagttcaagaccagcc

SEQ ID NO: 11642 - DNA, 20 bp, synthetic construct
  misc_feature 1..20: note = Description of Artificial Sequence: Synthetic oligonucleotide
  misc_feature 1..20: note = Target: FXN; (-) strand; PAM type: NRG; PAM sequence: CAG
  source 1..20: mol_type = other DNA
tgaggtcaggagttcaagac

SEQ ID NO: 11643 - DNA, 20 bp, synthetic construct
  misc_feature 1..20: note = Description of Artificial Sequence: Synthetic oligonucleotide
  misc_feature 1..20: note = Target: FXN; (-) strand; PAM type: NRG; PAM sequence: AAG
  source 1..20: mol_type = other DNA
tcacctgaggtcaggagttc

SEQ ID NO: 11644 - DNA, 20 bp, synthetic construct
  misc_feature 1..20: note = Description of Artificial Sequence: Synthetic oligonucleotide
  misc_feature 1..20: note = Target: FXN; (-) strand; PAM type: NRG; PAM sequence: GAG
  source 1..20: mol_type = other DNA
ggtggatcacctgaggtcag

SEQ ID NO: 11645 - DNA, 20 bp, synthetic construct
  misc_feature 1..20: note = Description of Artificial Sequence: Synthetic oligonucleotide
  misc_feature 1..20: note = Target: FXN; (-) strand; PAM type: NRG; PAM sequence: AGG
  source 1..20: mol_type = other DNA
cgggtggatcacctgaggtc

SEQ ID NO: 11646 - DNA, 20 bp, synthetic construct
  misc_feature 1..20: note = Description of Artificial Sequence: Synthetic oligonucleotide
  misc_feature 1..20: note = Target: FXN; (-) strand; PAM type: NRG; PAM sequence: CAG
  source 1..20: mol_type = other DNA
gcgggtggatcacctgaggt

SEQ ID NO: 11647 - DNA, 20 bp, synthetic construct
  misc_feature 1..20: note = Description of Artificial Sequence: Synthetic oligonucleotide
  misc_feature 1..20: note = Target: FXN; (-) strand; PAM type: NRG; PAM sequence: AGG
  source 1..20: mol_type = other DNA
tgaggcgggtggatcacctg

SEQ ID NO: 11648 - DNA, 20 bp, synthetic construct
  misc_feature 1..20: note = Description of Artificial Sequence: Synthetic oligonucleotide
  misc_feature 1..20: note = Target: FXN; (-) strand; PAM type: NRG; PAM sequence: GAG
  source 1..20: mol_type = other DNA
ctgaggcgggtggatcacct

SEQ ID NO: 11649 - DNA, 20 bp, synthetic construct
  misc_feature 1..20: note = Description of Artificial Sequence: Synthetic oligonucleotide
  misc_feature 1..20: note = Target: FXN; (-) strand; PAM type: NRG; PAM sequence: TGG
  source 1..20: mol_type = other DNA
ttttgggaggctgaggcggg

SEQ ID NO: 11650 - DNA, 20 bp, synthetic construct
  misc_feature 1..20: note = Description of Artificial Sequence: Synthetic oligonucleotide
  misc_feature 1..20: note = Target: FXN; (-) strand; PAM type: NRG; PAM sequence: GGG
  source 1..20: mol_type = other DNA
gcattttgggaggctgaggc

SEQ ID NO: 11651 - DNA, 20 bp, synthetic construct
  misc_feature 1..20: note = Description of Artificial Sequence: Synthetic oligonucleotide
  misc_feature 1..20: note = Target: FXN; (-) strand; PAM type: NRG; PAM sequence: CGG
  source 1..20: mol_type = other DNA
agcattttgggaggctgagg

SEQ ID NO: 11652 - DNA, 20 bp, synthetic construct
  misc_feature 1..20: note = Description of Artificial Sequence: Synthetic oligonucleotide
  misc_feature 1..20: note = Target: FXN; (-) strand; PAM type: NRG; PAM sequence: AGG
  source 1..20: mol_type = other DNA
cctagcattttgggaggctg

SEQ ID NO: 11653 - DNA, 20 bp, synthetic construct
  misc_feature 1..20: note = Description of Artificial Sequence: Synthetic oligonucleotide
  misc_feature 1..20: note = Target: FXN; (-) strand; PAM type: NRG; PAM sequence: GAG
  source 1..20: mol_type = other DNA
tcctagcattttgggaggct

SEQ ID NO: 11654 - DNA, 20 bp, synthetic construct
  misc_feature 1..20: note = Description of Artificial Sequence: Synthetic oligonucleotide
  misc_feature 1..20: note = Target: FXN; (-) strand; PAM type: NRG; PAM sequence: AGG
  source 1..20: mol_type = other DNA
tgtaatcctagcattttggg

SEQ ID NO: 11655 - DNA, 20 bp, synthetic construct
  misc_feature 1..20: note = Description of Artificial Sequence: Synthetic oligonucleotide
  misc_feature 1..20: note = Target: FXN; (-) strand; PAM type: NRG; PAM sequence: GAG
  source 1..20: mol_type = other DNA
ctgtaatcctagcattttgg

SEQ ID NO: 11656 - DNA, 20 bp, synthetic construct
  misc_feature 1..20: note = Description of Artificial Sequence: Synthetic oligonucleotide
  misc_feature 1..20: note = Target: FXN; (-) strand; PAM type: NRG; PAM sequence: GGG
  source 1..20: mol_type = other DNA
gcctgtaatcctagcatttt

SEQ ID NO: 11657 - DNA, 20 bp, synthetic construct
  misc_feature 1..20: note = Description of Artificial Sequence: Synthetic oligonucleotide
  misc_feature 1..20: note = Target: FXN; (-) strand; PAM type: NRG; PAM sequence: TGG
  source 1..20: mol_type = other DNA
cgcctgtaatcctagcattt

SEQ ID NO: 11658 - DNA, 20 bp, synthetic construct
  misc_feature 1..20: note = Description of Artificial Sequence: Synthetic oligonucleotide
  misc_feature 1..20: note = Target: FXN; (-) strand; PAM type: NRG; PAM sequence: TAG
  source 1..20: mol_type = other DNA
gtggctcacgcctgtaatcc

SEQ ID NO: 11659 - DNA, 20 bp, synthetic construct
  misc_feature 1..20: note = Description of Artificial Sequence: Synthetic oligonucleotide
  misc_feature 1..20: note = Target: FXN; (-) strand; PAM type: NRG; PAM sequence: TGG
  source 1..20: mol_type = other DNA
aaaaaataggctgggcctgg

SEQ ID NO: 11660 - DNA, 20 bp, synthetic construct
  misc_feature 1..20: note = Description of Artificial Sequence: Synthetic oligonucleotide
  misc_feature 1..20: note = Target: FXN; (-) strand; PAM type: NRG; PAM sequence: TGG
  source 1..20: mol_type = other DNA
aaaaaaaaataggctgggcc

SEQ ID NO: 11661 - DNA, 20 bp, synthetic construct
  misc_feature 1..20: note = Description of Artificial Sequence: Synthetic oligonucleotide
  misc_feature 1..20: note = Target: FXN; (-) strand; PAM type: NRG; PAM sequence: GGG
  source 1..20: mol_type = other DNA
aaaaaaaaaaaaaataggct

SEQ ID NO: 11662 - DNA, 20 bp, synthetic construct
  misc_feature 1..20: note = Description of Artificial Sequence: Synthetic oligonucleotide
  misc_feature 1..20: note = Target: FXN; (-) strand; PAM type: NRG; PAM sequence: TGG
  source 1..20: mol_type = other DNA
gaaaaaaaaaaaaaataggc

SEQ ID NO: 11663 - DNA, 20 bp, synthetic construct
  misc_feature 1..20: note = Description of Artificial Sequence: Synthetic oligonucleotide
  misc_feature 1..20: note = Target: FXN; (-) strand; PAM type: NRG; PAM sequence: AGG
  source 1..20: mol_type = other DNA
aaaagaaaaaaaaaaaaaat

SEQ ID NO: 11664 - DNA, 20 bp, synthetic construct
  misc_feature 1..20: note = Description of Artificial Sequence: Synthetic oligonucleotide
  misc_feature 1..20: note = Target: FXN; (-) strand; PAM type: NRG; PAM sequence: TAG
  source 1..20: mol_type = other DNA
aaaaagaaaaaaaaaaaaaa

SEQ ID NO: 11665 - DNA, 20 bp, synthetic construct
  misc_feature 1..20: note = Description of Artificial Sequence: Synthetic oligonucleotide
  misc_feature 1..20: note = Target: FXN; (-) strand; PAM type: NRG; PAM sequence: AAG
  source 1..20: mol_type = other DNA
gtgagactccgtctcaaaaa

SEQ ID NO: 11666 - DNA, 20 bp, synthetic construct
  misc_feature 1..20: note = Description of Artificial Sequence: Synthetic oligonucleotide
  misc_feature 1..20: note = Target: FXN; (-) strand; PAM type: NRG; PAM sequence: GAG
  source 1..20: mol_type = other DNA
tccagcctgggtgacagagt

SEQ ID NO: 11667 - DNA, 20 bp, synthetic construct
  misc_feature 1..20: note = Description of Artificial Sequence: Synthetic oligonucleotide
  misc_feature 1..20: note = Target: FXN; (-) strand; PAM type: NRG; PAM sequence: GAG
  source 1..20: mol_type = other DNA
gcactccagcctgggtgaca

SEQ ID NO: 11668 - DNA, 20 bp, synthetic construct
  misc_feature 1..20: note = Description of Artificial Sequence: Synthetic oligonucleotide
  misc_feature 1..20: note = Target: FXN; (-) strand; PAM type: NRG; PAM sequence: CAG
  source 1..20: mol_type = other DNA
ctgcactccagcctgggtga

SEQ ID NO: 11669 - DNA, 20 bp, synthetic construct
  misc_feature 1..20: note = Description of Artificial Sequence: Synthetic oligonucleotide
  misc_feature 1..20: note = Target: FXN; (-) strand; PAM type: NRG; PAM sequence: GGG
  source 1..20: mol_type = other DNA
gtgccactgcactccagcct

SEQ ID NO: 11670 - DNA, 20 bp, synthetic construct
  misc_feature 1..20: note = Description of Artificial Sequence: Synthetic oligonucleotide
  misc_feature 1..20: note = Target: FXN; (-) strand; PAM type: NRG; PAM sequence: TGG
  source 1..20: mol_type = other DNA
tgtgccactgcactccagcc

SEQ ID NO: 11671 - DNA, 20 bp, synthetic construct
  misc_feature 1..20: note = Description of Artificial Sequence: Synthetic oligonucleotide
  misc_feature 1..20: note = Target: FXN; (-) strand; PAM type: NRG; PAM sequence: CAG
  source 1..20: mol_type = other DNA
gacattgtgccactgcactc

SEQ ID NO: 11672 - DNA, 20 bp, synthetic construct
  misc_feature 1..20: note = Description of Artificial Sequence: Synthetic oligonucleotide
  misc_feature 1..20: note = Target: FXN; (-) strand; PAM type: NRG; PAM sequence: GAG
  source 1..20: mol_type = other DNA
ccggaggtggaggttgcaat

SEQ ID NO: 11673 - DNA, 20 bp, synthetic construct
  misc_feature 1..20: note = Description of Artificial Sequence: Synthetic oligonucleotide
  misc_feature 1..20: note = Target: FXN; (-) strand; PAM type: NRG; PAM sequence: AGG
  source 1..20: mol_type = other DNA
cactgaaaccccggaggtgg

SEQ ID NO: 11674 - DNA, 20 bp, synthetic construct
  misc_feature 1..20: note = Description of Artificial Sequence: Synthetic oligonucleotide
  misc_feature 1..20: note = Target: FXN; (-) strand; PAM type: NRG; PAM sequence: GAG
  source 1..20: mol_type = other DNA
tcactgaaaccccggaggtg

SEQ ID NO: 11675 - DNA, 20 bp, synthetic construct
  misc_feature 1..20: note = Description of Artificial Sequence: Synthetic oligonucleotide
  misc_feature 1..20: note = Target: FXN; (-) strand; PAM type: NRG; PAM sequence: TGG
  source 1..20: mol_type = other DNA
aatcactgaaaccccggagg

SEQ ID NO: 11676 - DNA, 20 bp, synthetic construct
  misc_feature 1..20: note = Description of Artificial Sequence: Synthetic oligonucleotide
  misc_feature 1..20: note = Target: FXN; (-) strand; PAM type: NRG; PAM sequence: AGG
  source 1..20: mol_type = other DNA
gagaatcactgaaaccccgg

SEQ ID NO: 11677 - DNA, 20 bp, synthetic construct
  misc_feature 1..20: note = Description of Artificial Sequence: Synthetic oligonucleotide
  misc_feature 1..20: note = Target: FXN; (-) strand; PAM type: NRG; PAM sequence: GAG
  source 1..20: mol_type = other DNA
ggagaatcactgaaaccccg

SEQ ID NO: 11678 - DNA, 20 bp, synthetic construct
  misc_feature 1..20: note = Description of Artificial Sequence: Synthetic oligonucleotide
  misc_feature 1..20: note = Target: FXN; (-) strand; PAM type: NRG; PAM sequence: CGG
  source 1..20: mol_type = other DNA
caggagaatcactgaaaccc

SEQ ID NO: 11679 - DNA, 20 bp, synthetic construct
  misc_feature 1..20: note = Description of Artificial Sequence: Synthetic oligonucleotide
  misc_feature 1..20: note = Target: FXN; (-) strand; PAM type: NRG; PAM sequence: GAG
  source 1..20: mol_type = other DNA
tacttgggaggctgagacag

SEQ ID NO: 11680 - DNA, 20 bp, synthetic construct
  misc_feature 1..20: note = Description of Artificial Sequence: Synthetic oligonucleotide
  misc_feature 1..20: note = Target: FXN; (-) strand; PAM type: NRG; PAM sequence: AGG
  source 1..20: mol_type = other DNA
gctacttgggaggctgagac

SEQ ID NO: 11681 - DNA, 20 bp, synthetic construct
  misc_feature 1..20: note = Description of Artificial Sequence: Synthetic oligonucleotide
  misc_feature 1..20: note = Target: FXN; (-) strand; PAM type: NRG; PAM sequence: CAG
  source 1..20: mol_type = other DNA
agctacttgggaggctgaga

SEQ ID NO: 11682 - DNA, 20 bp, synthetic construct
  misc_feature 1..20: note = Description of Artificial Sequence: Synthetic oligonucleotide
  misc_feature 1..20: note = Target: FXN; (-) strand; PAM type: NRG; PAM sequence: GAG
  source 1..20: mol_type = other DNA
tcccagctacttgggaggct

SEQ ID NO: 11683 - DNA, 20 bp, synthetic construct
  misc_feature 1..20: note = Description of Artificial Sequence: Synthetic oligonucleotide
  misc_feature 1..20: note = Target: FXN; (-) strand; PAM type: NRG; PAM sequence: AGG
  source 1..20: mol_type = other DNA
gtagttcccagctacttggg

SEQ ID NO: 11684 - DNA, 20 bp, synthetic construct
  misc_feature 1..20: note = Description of Artificial Sequence: Synthetic oligonucleotide
  misc_feature 1..20: note = Target: FXN; (-) strand; PAM type: NRG; PAM sequence: GAG
  source 1..20: mol_type = other DNA
tgtagttcccagctacttgg

SEQ ID NO: 11685 - DNA, 20 bp, synthetic construct
  misc_feature 1..20: note = Description of Artificial Sequence: Synthetic oligonucleotide
  misc_feature 1..20: note = Target: FXN; (-) strand; PAM type: NRG; PAM sequence: GGG
  source 1..20: mol_type = other DNA
cctgtagttcccagctactt

SEQ ID NO: 11686 - DNA, 20 bp, synthetic construct
  misc_feature 1..20: note = Description of Artificial Sequence: Synthetic oligonucleotide
  misc_feature 1..20: note = Target: FXN; (-) strand; PAM type: NRG; PAM sequence: TGG
  source 1..20: mol_type = other DNA
gcctgtagttcccagctact

SEQ ID NO: 11687 - DNA, 20 bp, synthetic construct
  misc_feature 1..20: note = Description of Artificial Sequence: Synthetic oligonucleotide
  misc_feature 1..20: note = Target: FXN; (-) strand; PAM type: NRG; PAM sequence: CAG
  source 1..20: mol_type = other DNA
tggtgcacgcctgtagttcc

SEQ ID NO: 11688 - DNA, 20 bp, synthetic construct
  misc_feature 1..20: note = Description of Artificial Sequence: Synthetic oligonucleotide
  misc_feature 1..20: note = Target: FXN; (-) strand; PAM type: NRG; PAM sequence: TAG
  source 1..20: mol_type = other DNA
gggcttgtggtgcacgcctg

SEQ ID NO: 11689 - DNA, 20 bp, synthetic construct
  misc_feature 1..20: note = Description of Artificial Sequence: Synthetic oligonucleotide
  misc_feature 1..20: note = Target: FXN; (-) strand; PAM type: NRG; PAM sequence: TGG
  source 1..20: mol_type = other DNA
acaaaaattagctgggcttg

SEQ ID NO: 11690 - DNA, 20 bp, synthetic construct
  misc_feature 1..20: note = Description of Artificial Sequence: Synthetic oligonucleotide
  misc_feature 1..20: note = Target: FXN; (-) strand; PAM type: NRG; PAM sequence: GGG
  source 1..20: mol_type = other DNA
taaaaatacaaaaattagct

SEQ ID NO: 11691 - DNA, 20 bp, synthetic construct
  misc_feature 1..20: note = Description of Artificial Sequence: Synthetic oligonucleotide
  misc_feature 1..20: note = Target: FXN; (-) strand; PAM type: NRG; PAM sequence: TGG
  source 1..20: mol_type = other DNA
ctaaaaatacaaaaattagc

SEQ ID NO: 11692 - DNA, 20 bp, synthetic construct
  misc_feature 1..20: note = Description of Artificial Sequence: Synthetic oligonucleotide
  misc_feature 1..20: note = Target: FXN; (-) strand; PAM type: NRG; PAM sequence: TAG
  source 1..20: mol_type = other DNA
tctactaaaaatacaaaaat

SEQ ID NO: 11693 - DNA, 20 bp, synthetic construct
  misc_feature 1..20: note = Description of Artificial Sequence: Synthetic oligonucleotide
  misc_feature 1..20: note = Target: FXN; (-) strand; PAM type: NRG; PAM sequence: TGG
  source 1..20: mol_type = other DNA
tgaaactagccaggccaata

SEQ ID NO: 11694 - DNA, 20 bp, synthetic construct
  misc_feature 1..20: note = Description of Artificial Sequence: Synthetic oligonucleotide
  misc_feature 1..20: note = Target: FXN; (-) strand; PAM type: NRG; PAM sequence: AGG
  source 1..20: mol_type = other DNA
tcaggagtttgaaactagcc

SEQ ID NO: 11695 - DNA, 20 bp, synthetic construct
  misc_feature 1..20: note = Description of Artificial Sequence: Synthetic oligonucleotide
  misc_feature 1..20: note = Target: FXN; (-) strand; PAM type: NRG; PAM sequence: CAG
  source 1..20: mol_type = other DNA
gtcaggagtttgaaactagc

SEQ ID NO: 11696 - DNA, 20 bp, synthetic construct
  misc_feature 1..20: note = Description of Artificial Sequence: Synthetic oligonucleotide
  misc_feature 1..20: note = Target: FXN; (-) strand; PAM type: NRG; PAM sequence: TAG
  source 1..20: mol_type = other DNA
tgaggtcaggagtttgaaac

SEQ ID NO: 11697 - DNA, 20 bp, synthetic construct
  misc_feature 1..20: note = Description of Artificial Sequence: Synthetic oligonucleotide
  misc_feature 1..20: note = Target: FXN; (-) strand; PAM type: NRG; PAM sequence: GAG
  source 1..20: mol_type = other DNA
ggtggctcacctgaggtcag

SEQ ID NO: 11698 - DNA, 20 bp, synthetic construct
  misc_feature 1..20: note = Description of Artificial Sequence: Synthetic oligonucleotide
  misc_feature 1..20: note = Target: FXN; (-) strand; PAM type: NRG; PAM sequence: AGG
  source 1..20: mol_type = other DNA
taggtggctcacctgaggtc

SEQ ID NO: 11699 - DNA, 20 bp, synthetic construct
  misc_feature 1..20: note = Description of Artificial Sequence: Synthetic oligonucleotide
  misc_feature 1..20: note = Target: FXN; (-) strand; PAM type: NRG; PAM sequence: CAG
  source 1..20: mol_type = other DNA
gtaggtggctcacctgaggt

SEQ ID NO: 11700 - DNA, 20 bp, synthetic construct
  misc_feature 1..20: note = Description of Artificial Sequence: Synthetic oligonucleotide
  misc_feature 1..20: note = Target: FXN; (-) strand; PAM type: NRG; PAM sequence: AGG
  source 1..20: mol_type = other DNA
cgaggtaggtggctcacctg

SEQ ID NO: 11701 - DNA, 20 bp, synthetic construct
  misc_feature 1..20: note = Description of Artificial Sequence: Synthetic oligonucleotide
  misc_feature 1..20: note = Target: FXN; (-) strand; PAM type: NRG; PAM sequence: GAG
  source 1..20: mol_type = other DNA
ccgaggtaggtggctcacct

SEQ ID NO: 11702 - DNA, 20 bp, synthetic construct
  misc_feature 1..20: note = Description of Artificial Sequence: Synthetic oligonucleotide
  misc_feature 1..20: note = Target: FXN; (-) strand; PAM type: NRG; PAM sequence: TGG
  source 1..20: mol_type = other DNA
ctttcggaggccgaggtagg

SEQ ID NO: 11703 - DNA, 20 bp, synthetic construct
  misc_feature 1..20: note = Description of Artificial Sequence: Synthetic oligonucleotide
  misc_feature 1..20: note = Target: FXN; (-) strand; PAM type: NRG; PAM sequence: AGG
  source 1..20: mol_type = other DNA
ggactttcggaggccgaggt

SEQ ID NO: 11704 - DNA, 20 bp, synthetic construct
  misc_feature 1..20: note = Description of Artificial Sequence: Synthetic oligonucleotide
  misc_feature 1..20: note = Target: FXN; (-) strand; PAM type: NRG; PAM sequence: TAG
  source 1..20: mol_type = other DNA
aggactttcggaggccgagg

SEQ ID NO: 11705 - DNA, 20 bp, synthetic construct
  misc_feature 1..20: note = Description of Artificial Sequence: Synthetic oligonucleotide
  misc_feature 1..20: note = Target: FXN; (-) strand; PAM type: NRG; PAM sequence: AGG
  source 1..20: mol_type = other DNA
cccaggactttcggaggccg

SEQ ID NO: 11706 - DNA, 20 bp, synthetic construct
  misc_feature 1..20: note = Description of Artificial Sequence: Synthetic oligonucleotide
  misc_feature 1..20: note = Target: FXN; (-) strand; PAM type: NRG; PAM sequence: GAG
  source 1..20: mol_type = other DNA
tcccaggactttcggaggcc

SEQ ID NO: 11707 - DNA, 20 bp, synthetic construct
  misc_feature 1..20: note = Description of Artificial Sequence: Synthetic oligonucleotide
  misc_feature 1..20: note = Target: FXN; (-) strand; PAM type: NRG; PAM sequence: AGG
  source 1..20: mol_type = other DNA
tgtaatcccaggactttcgg

SEQ ID NO: 11708 - DNA, 20 bp, synthetic construct
  misc_feature 1..20: note = Description of Artificial Sequence: Synthetic oligonucleotide
  misc_feature 1..20: note = Target: FXN; (-) strand; PAM type: NRG; PAM sequence: GAG
  source 1..20: mol_type = other DNA
ctgtaatcccaggactttcg

SEQ ID NO: 11709 - DNA, 20 bp, synthetic construct
  misc_feature 1..20: note = Description of Artificial Sequence: Synthetic oligonucleotide
  misc_feature 1..20: note = Target: FXN; (-) strand; PAM type: NRG; PAM sequence: CGG
  source 1..20: mol_type = other DNA
gtctgtaatcccaggacttt

SEQ ID NO: 11710 - DNA, 20 bp, synthetic construct
  misc_feature 1..20: note = Description of Artificial Sequence: Synthetic oligonucleotide
  misc_feature 1..20: note = Target: FXN; (-) strand; PAM type: NRG; PAM sequence: AGG
  source 1..20: mol_type = other DNA
tggctcacgtctgtaatccc

SEQ ID NO: 11711 - DNA, 20 bp, synthetic construct
  misc_feature 1..20: note = Description of Artificial Sequence: Synthetic oligonucleotide
  misc_feature 1..20: note = Target: FXN; (-) strand; PAM type: NRG; PAM sequence: CAG
  source 1..20: mol_type = other DNA
gtggctcacgtctgtaatcc

SEQ ID NO: 11712 - DNA, 20 bp, synthetic construct
  misc_feature 1..20: note = Description of Artificial Sequence: Synthetic oligonucleotide
  misc_feature 1..20: note = Target: FXN; (-) strand; PAM type: NRG; PAM sequence: TGG
  source 1..20: mol_type = other DNA
ttctgggccaggcagtgcag

SEQ ID NO: 11713 - DNA, 20 bp, synthetic construct
  misc_feature 1..20: note = Description of Artificial Sequence: Synthetic oligonucleotide
  misc_feature 1..20: note = Target: FXN; (-) strand; PAM type: NRG; PAM sequence: CAG
  source 1..20: mol_type = other DNA
cctttctgggccaggcagtg

SEQ ID NO: 11714 - DNA, 20 bp, synthetic construct
  misc_feature 1..20: note = Description of Artificial Sequence: Synthetic oligonucleotide
  misc_feature 1..20: note = Target: FXN; (-) strand; PAM type: NRG; PAM sequence: CAG
  source 1..20: mol_type = other DNA
atagtcctttctgggccagg

SEQ ID NO: 11715 - DNA, 20 bp, synthetic construct
  misc_feature 1..20: note = Description of Artificial Sequence: Synthetic oligonucleotide
  misc_feature 1..20: note = Target: FXN; (-) strand; PAM type: NRG; PAM sequence: AGG
  source 1..20: mol_type = other DNA
ttaatagtcctttctgggcc

SEQ ID NO: 11716 - DNA, 20 bp, synthetic construct
  misc_feature 1..20: note = Description of Artificial Sequence: Synthetic oligonucleotide
  misc_feature 1..20: note = Target: FXN; (-) strand; PAM type: NRG; PAM sequence: CAG
  source 1..20: mol_type = other DNA
attaatagtcctttctgggc

SEQ ID NO: 11717 - DNA, 20 bp, synthetic construct
  misc_feature 1..20: note = Description of Artificial Sequence: Synthetic oligonucleotide
  misc_feature 1..20: note = Target: FXN; (-) strand; PAM type: NRG; PAM sequence: GGG
  source 1..20: mol_type = other DNA
tacaattaatagtcctttct

SEQ ID NO: 11718 - DNA, 20 bp, synthetic construct
  misc_feature 1..20: note = Description of Artificial Sequence: Synthetic oligonucleotide
  misc_feature 1..20: note = Target: FXN; (-) strand; PAM type: NRG; PAM sequence: TGG
  source 1..20: mol_type = other DNA
ctacaattaatagtcctttc

SEQ ID NO: 11719 - DNA, 20 bp, synthetic construct
  misc_feature 1..20: note = Description of Artificial Sequence: Synthetic oligonucleotide
  misc_feature 1..20: note = Target: FXN; (-) strand; PAM type: NRG; PAM sequence: TAG
  source 1..20: mol_type = other DNA
ccagaggcaactacaattaa

SEQ ID NO: 11720 - DNA, 20 bp, synthetic construct
  misc_feature 1..20: note = Description of Artificial Sequence: Synthetic oligonucleotide
  misc_feature 1..20: note = Target: FXN; (-) strand; PAM type: NRG; PAM sequence: AGG
  source 1..20: mol_type = other DNA
caggcagcccccattcccag

SEQ ID NO: 11721 - DNA, 20 bp, synthetic construct
  misc_feature 1..20: note = Description of Artificial Sequence: Synthetic oligonucleotide
  misc_feature 1..20: note = Target: FXN; (-) strand; PAM type: NRG; PAM sequence: GAG
  source 1..20: mol_type = other DNA
gcaggcagcccccattccca

SEQ ID NO: 11722 - DNA, 20 bp, synthetic construct
  misc_feature 1..20: note = Description of Artificial Sequence: Synthetic oligonucleotide
  misc_feature 1..20: note = Target: FXN; (-) strand; PAM type: NRG; PAM sequence: CAG
  source 1..20: mol_type = other DNA
aagcaggcagcccccattcc

SEQ ID NO: 11723 - DNA, 20 bp, synthetic construct
  misc_feature 1..20: note = Description of Artificial Sequence: Synthetic oligonucleotide
  misc_feature 1..20: note = Target: FXN; (-) strand; PAM type: NRG; PAM sequence: CAG
  source 1..20: mol_type = other DNA
gggttacagaaagaagcagg

SEQ ID NO: 11724 - DNA, 20 bp, synthetic construct
  misc_feature 1..20: note = Description of Artificial Sequence: Synthetic oligonucleotide
  misc_feature 1..20: note = Target: FXN; (-) strand; PAM type: NRG; PAM sequence: AGG
  source 1..20: mol_type = other DNA
aaggggttacagaaagaagc

SEQ ID NO: 11725 - DNA, 20 bp, synthetic construct
  misc_feature 1..20: note = Description of Artificial Sequence: Synthetic oligonucleotide
  misc_feature 1..20: note = Target: FXN; (-) strand; PAM type: NRG; PAM sequence: CAG
  source 1..20: mol_type = other DNA
gaaggggttacagaaagaag

SEQ ID NO: 11726 - DNA, 20 bp, synthetic construct
  misc_feature 1..20: note = Description of Artificial Sequence: Synthetic oligonucleotide
  misc_feature 1..20: note = Target: FXN; (-) strand; PAM type: NRG; PAM sequence: AAG
  source 1..20: mol_type = other DNA
acagaaggggttacagaaag

SEQ ID NO: 11727 - DNA, 20 bp, synthetic construct
  misc_feature 1..20: note = Description of Artificial Sequence: Synthetic oligonucleotide
  misc_feature 1..20: note = Target: FXN; (-) strand; PAM type: NRG; PAM sequence: AAG
  source 1..20: mol_type = other DNA
agcacagaaggggttacaga

SEQ ID NO: 11728 - DNA, 20 bp, synthetic construct
  misc_feature 1..20: note = Description of Artificial Sequence: Synthetic oligonucleotide
  misc_feature 1..20: note = Target: FXN; (-) strand; PAM type: NRG; PAM sequence: CAG
  source 1..20: mol_type = other DNA
aaacagcacagaaggggtta

SEQ ID NO: 11729 - DNA, 20 bp, synthetic construct
  misc_feature 1..20: note = Description of Artificial Sequence: Synthetic oligonucleotide
  misc_feature 1..20: note = Target: FXN; (-) strand; PAM type: NRG; PAM sequence: GGG
  source 1..20: mol_type = other DNA
aaatttaaacagcacagaag

SEQ ID NO: 11730 - DNA, 20 bp, synthetic construct
  misc_feature 1..20: note = Description of Artificial Sequence: Synthetic oligonucleotide
  misc_feature 1..20: note = Target: FXN; (-) strand; PAM type: NRG; PAM sequence: GGG
  source 1..20: mol_type = other DNA
aaaatttaaacagcacagaa

SEQ ID NO: 11731 - DNA, 20 bp, synthetic construct
  misc_feature 1..20: note = Description of Artificial Sequence: Synthetic oligonucleotide
  misc_feature 1..20: note = Target: FXN; (-) strand; PAM type: NRG; PAM sequence: AGG
  source 1..20: mol_type = other DNA
aaaaatttaaacagcacaga

SEQ ID NO: 11732 - DNA, 20 bp, synthetic construct
  misc_feature 1..20: note = Description of Artificial Sequence: Synthetic oligonucleotide
  misc_feature 1..20: note = Target: FXN; (-) strand; PAM type: NRG; PAM sequence: AAG
  source 1..20: mol_type = other DNA
aaaaaatttaaacagcacag

SEQ ID NO: 11733 - DNA, 20 bp, synthetic construct
  misc_feature 1..20: note = Description of Artificial Sequence: Synthetic oligonucleotide
  misc_feature 1..20: note = Target: FXN; (-) strand; PAM type: NRG; PAM sequence: CAG
  source 1..20: mol_type = other DNA
aaaaaaaaatttaaacagca

SEQ ID NO: 11734 - DNA, 20 bp, synthetic construct
  misc_feature 1..20: note = Description of Artificial Sequence: Synthetic oligonucleotide
  misc_feature 1..20: note = Target: FXN; (-) strand; PAM type: NRG; PAM sequence: CAG
  source 1..20: mol_type = other DNA
aaaaaaaaaaaaaatttaaa

SEQ ID NO: 11735 - DNA, 20 bp, synthetic construct
  misc_feature 1..20: note = Description of Artificial Sequence: Synthetic oligonucleotide
  misc_feature 1..20: note = Target: FXN; (-) strand; PAM type: NRG; PAM sequence: GAG
  source 1..20: mol_type = other DNA
tccagcctgggcgacagagc

SEQ ID NO: 11736 - DNA, 20 bp, synthetic construct
  misc_feature 1..20: note = Description of Artificial Sequence: Synthetic oligonucleotide
  misc_feature 1..20: note = Target: FXN; (-) strand; PAM type: NRG; PAM sequence: GAG
  source 1..20: mol_type = other DNA
gcactccagcctgggcgaca

SEQ ID NO: 11737 - DNA, 20 bp, synthetic construct
  misc_feature 1..20: note = Description of Artificial Sequence: Synthetic oligonucleotide
  misc_feature 1..20: note = Target: FXN; (-) strand; PAM type: NRG; PAM sequence: CAG
  source 1..20: mol_type = other DNA
ctgcactccagcctgggcga

SEQ ID NO: 11738 - DNA, 20 bp, synthetic construct
  misc_feature 1..20: note = Description of Artificial Sequence: Synthetic oligonucleotide
  misc_feature 1..20: note = Target: FXN; (-) strand; PAM type: NRG; PAM sequence: GGG
  source 1..20: mol_type = other DNA
gcgccactgcactccagcct

SEQ ID NO: 11739 - DNA, 20 bp, synthetic construct
  misc_feature 1..20: note = Description of Artificial Sequence: Synthetic oligonucleotide
  misc_feature 1..20: note = Target: FXN; (-) strand; PAM type: NRG; PAM sequence: TGG
  source 1..20: mol_type = other DNA
tgcgccactgcactccagcc

SEQ ID NO: 11740 - DNA, 20 bp, synthetic construct
  misc_feature 1..20: note = Description of Artificial Sequence: Synthetic oligonucleotide
  misc_feature 1..20: note = Target: FXN; (-) strand; PAM type: NRG; PAM sequence: CAG
  source 1..20: mol_type = other DNA
gagattgcgccactgcactc

SEQ ID NO: 11741 - DNA, 20 bp, synthetic construct
  misc_feature 1..20: note = Description of Artificial Sequence: Synthetic oligonucleotide
  misc_feature 1..20: note = Target: FXN; (-) strand; PAM type: NRG; PAM sequence: GAG
  source 1..20: mol_type = other DNA
ggcggagcttgcagtgagcc

SEQ ID NO: 11742 - DNA, 20 bp, synthetic construct
  misc_feature 1..20: note = Description of Artificial Sequence: Synthetic oligonucleotide
  misc_feature 1..20: note = Target: FXN; (-) strand; PAM type: NRG; PAM sequence: GAG
  source 1..20: mol_type = other DNA
tgggaggcggagcttgcagt

SEQ ID NO: 11743 - DNA, 20 bp, synthetic construct
  misc_feature 1..20: note = Description of Artificial Sequence: Synthetic oligonucleotide
  misc_feature 1..20: note = Target: FXN; (-) strand; PAM type: NRG; PAM sequence: CAG
  source 1..20: mol_type = other DNA
aacctgggaggcggagcttg

SEQ ID NO: 11744 - DNA, 20 bp, synthetic construct
  misc_feature 1..20: note = Description of Artificial Sequence: Synthetic oligonucleotide
  misc_feature 1..20: note = Target: FXN; (-) strand; PAM type: NRG; PAM sequence: GAG
  source 1..20: mol_type = other DNA
tggcgtgaacctgggaggcg

SEQ ID NO: 11745 - DNA, 20 bp, synthetic construct
  misc_feature 1..20: note = Description of Artificial Sequence: Synthetic oligonucleotide
  misc_feature 1..20: note = Target: FXN; (-) strand; PAM type: NRG; PAM sequence: CGG
  source 1..20: mol_type = other DNA
aatggcgtgaacctgggagg

SEQ ID NO: 11746 - DNA, 20 bp, synthetic construct
  misc_feature 1..20: note = Description of Artificial Sequence: Synthetic oligonucleotide
  misc_feature 1..20: note = Target: FXN; (-) strand; PAM type: NRG; PAM sequence: AGG
  source 1..20: mol_type = other DNA
gagaatggcgtgaacctggg

SEQ ID NO: 11747 - DNA, 20 bp, synthetic construct
  misc_feature 1..20: note = Description of Artificial Sequence: Synthetic oligonucleotide
  misc_feature 1..20: note = Target: FXN; (-) strand; PAM type: NRG; PAM sequence: GAG
  source 1..20: mol_type = other DNA
ggagaatggcgtgaacctgg

SEQ ID NO: 11748 - DNA, 20 bp, synthetic construct
  misc_feature 1..20: note = Description of Artificial Sequence: Synthetic oligonucleotide
  misc_feature 1..20: note = Target: FXN; (-) strand; PAM type: NRG; PAM sequence: GGG
  source 1..20: mol_type = other DNA
caggagaatggcgtgaacct

SEQ ID NO: 11749 - DNA, 20 bp, synthetic construct
  misc_feature 1..20: note = Description of Artificial Sequence: Synthetic oligonucleotide
  misc_feature 1..20: note = Target: FXN; (-) strand; PAM type: NRG; PAM sequence: TGG
  source 1..20: mol_type = other DNA
gcaggagaatggcgtgaacc

SEQ ID NO: 11750 - DNA, 20 bp, synthetic construct
  misc_feature 1..20: note = Description of Artificial Sequence: Synthetic oligonucleotide
  misc_feature 1..20: note = Target: FXN; (-) strand; PAM type: NRG; PAM sequence: TGG
  source 1..20: mol_type = other DNA
aggaggctgaggcaggagaa

SEQ ID NO: 11751 - DNA, 20 bp, synthetic construct
  misc_feature 1..20: note = Description of Artificial Sequence: Synthetic oligonucleotide
  misc_feature 1..20: note = Target: FXN; (-) strand; PAM type: NRG; PAM sequence: GAG
  source 1..20: mol_type = other DNA
tactcaggaggctgaggcag

SEQ ID NO: 11752 - DNA, 20 bp, synthetic construct
  misc_feature 1..20: note = Description of Artificial Sequence: Synthetic oligonucleotide
  misc_feature 1..20: note = Target: FXN; (-) strand; PAM type: NRG; PAM sequence: AGG
  source 1..20: mol_type = other DNA
gctactcaggaggctgaggc

SEQ ID NO: 11753 - DNA, 20 bp, synthetic construct
  misc_feature 1..20: note = Description of Artificial Sequence: Synthetic oligonucleotide
  misc_feature 1..20: note = Target: FXN; (-) strand; PAM type: NRG; PAM sequence: CAG
  source 1..20: mol_type = other DNA
agctactcaggaggctgagg

SEQ ID NO: 11754 - DNA, 20 bp, synthetic construct
  misc_feature 1..20: note = Description of Artificial Sequence: Synthetic oligonucleotide
  misc_feature 1..20: note = Target: FXN; (-) strand; PAM type: NRG; PAM sequence: AGG
  source 1..20: mol_type = other DNA
cccagctactcaggaggctg

SEQ ID NO: 11755 - DNA, 20 bp, synthetic construct
  misc_feature 1..20: note = Description of Artificial Sequence: Synthetic oligonucleotide
  misc_feature 1..20: note = Target: FXN; (-) strand; PAM type: NRG; PAM sequence: GAG
  source 1..20: mol_type = other DNA
tcccagctactcaggaggct

SEQ ID NO: 11756 - DNA, 20 bp, synthetic construct
  misc_feature 1..20: note = Description of Artificial Sequence: Synthetic oligonucleotide
  misc_feature 1..20: note = Target: FXN; (-) strand; PAM type: NRG; PAM sequence: AGG
  source 1..20: mol_type = other DNA
tgtagtcccagctactcagg

SEQ ID NO: 11757 - DNA, 20 bp, synthetic construct
  misc_feature 1..20: note = Description of Artificial Sequence: Synthetic oligonucleotide
  misc_feature 1..20: note = Target: FXN; (-) strand; PAM type: NRG; PAM sequence: GAG
  source 1..20: mol_type = other DNA
ctgtagtcccagctactcag

SEQ ID NO: 11758 - DNA, 20 bp, synthetic construct
  misc_feature 1..20: note = Description of Artificial Sequence: Synthetic oligonucleotide
  misc_feature 1..20: note = Target: FXN; (-) strand; PAM type: NRG; PAM sequence: AGG
  source 1..20: mol_type = other DNA
gcctgtagtcccagctactc

SEQ ID NO: 11759 - DNA, 20 bp, synthetic construct
  misc_feature 1..20: note = Description of Artificial Sequence: Synthetic oligonucleotide
  misc_feature 1..20: note = Target: FXN; (-) strand; PAM type: NRG; PAM sequence: CAG
  source 1..20: mol_type = other DNA
tgcctgtagtcccagctact

SEQ ID NO: 11760 - DNA, 20 bp, synthetic construct
  misc_feature 1..20: note = Description of Artificial Sequence: Synthetic oligonucleotide
  misc_feature 1..20: note = Target: FXN; (-) strand; PAM type: NRG; PAM sequence: CAG
  source 1..20: mol_type = other DNA
gtgacgggtgcctgtagtcc

SEQ ID NO: 11761 - DNA, 20 bp, synthetic construct
  misc_feature 1..20: note = Description of Artificial Sequence: Synthetic oligonucleotide
  misc_feature 1..20: note = Target: FXN; (-) strand; PAM type: NRG; PAM sequence: TAG
  source 1..20: mol_type = other DNA
ggcgtggtgacgggtgcctg

SEQ ID NO: 11762 - DNA, 20 bp, synthetic construct
  misc_feature 1..20: note = Description of Artificial Sequence: Synthetic oligonucleotide
  misc_feature 1..20: note = Target: FXN; (-) strand; PAM type: NRG; PAM sequence: GGG
  source 1..20: mol_type = other DNA
aattagccgggcgtggtgac

SEQ ID NO: 11763 - DNA, 20 bp, synthetic construct
  misc_feature 1..20: note = Description of Artificial Sequence: Synthetic oligonucleotide
  misc_feature 1..20: note = Target: FXN; (-) strand; PAM type: NRG; PAM sequence: CGG
  source 1..20: mol_type = other DNA
aaattagccgggcgtggtga

SEQ ID NO: 11764 - DNA, 20 bp, synthetic construct
  misc_feature 1..20: note = Description of Artificial Sequence: Synthetic oligonucleotide
  misc_feature 1..20: note = Target: FXN; (-) strand; PAM type: NRG; PAM sequence: TGG
  source 1..20: mol_type = other DNA
tacaaaaaattagccgggcg

SEQ ID NO: 11765 - DNA, 20 bp, synthetic construct
  misc_feature 1..20: note = Description of Artificial Sequence: Synthetic oligonucleotide
  misc_feature 1..20: note = Target: FXN; (-) strand; PAM type: NRG; PAM sequence: GGG
  source 1..20: mol_type = other DNA
gaaaatacaaaaaattagcc

SEQ ID NO: 11766 - DNA, 20 bp, synthetic construct
  misc_feature 1..20: note = Description of Artificial Sequence: Synthetic oligonucleotide
  misc_feature 1..20: note = Target: FXN; (-) strand; PAM type: NRG; PAM sequence: CGG
  source 1..20: mol_type = other DNA
tgaaaatacaaaaaattagc

SEQ ID NO: 11767 - DNA, 20 bp, synthetic construct
  misc_feature 1..20: note = Description of Artificial Sequence: Synthetic oligonucleotide
  misc_feature 1..20: note = Target: FXN; (-) strand; PAM type: NRG; PAM sequence: TAG
  source 1..20: mol_type = other DNA
ctactgaaaatacaaaaaat

SEQ ID NO: 11768 - DNA, 20 bp, synthetic construct
  misc_feature 1..20: note = Description of Artificial Sequence: Synthetic oligonucleotide
  misc_feature 1..20: note = Target: FXN; (-) strand; PAM type: NRG; PAM sequence: TGG
  source 1..20: mol_type = other DNA
cgagaccatcctggctaaca

SEQ ID NO: 11769 - DNA, 20 bp, synthetic construct
  misc_feature 1..20: note = Description of Artificial Sequence: Synthetic oligonucleotide
  misc_feature 1..20: note = Target: FXN; (-) strand; PAM type: NRG; PAM sequence: TGG
  source 1..20: mol_type = other DNA
tcaggagatcgagaccatcc

SEQ ID NO: 11770 - DNA, 20 bp, synthetic construct
  misc_feature 1..20: note = Description of Artificial Sequence: Synthetic oligonucleotide
  misc_feature 1..20: note = Target: FXN; (-) strand; PAM type: NRG; PAM sequence: GAG
  source 1..20: mol_type = other DNA
gataacacggtcaggagatc

SEQ ID NO: 11771 - DNA, 20 bp, synthetic construct
  misc_feature 1..20: note = Description of Artificial Sequence: Synthetic oligonucleotide
  misc_feature 1..20: note = Target: FXN; (-) strand; PAM type: NRG; PAM sequence: GAG
  source 1..20: mol_type = other DNA
caggcagataacacggtcag

SEQ ID NO: 11772 - DNA, 20 bp, synthetic construct
  misc_feature 1..20: note = Description of Artificial Sequence: Synthetic oligonucleotide
  misc_feature 1..20: note = Target: FXN; (-) strand; PAM type: NRG; PAM sequence: AGG
  source 1..20: mol_type = other DNA
ggcaggcagataacacggtc

SEQ ID NO: 11773 - DNA, 20 bp, synthetic construct
  misc_feature 1..20: note = Description of Artificial Sequence: Synthetic oligonucleotide
  misc_feature 1..20: note = Target: FXN; (-) strand; PAM type: NRG; PAM sequence: CAG
  source 1..20: mol_type = other DNA
aggcaggcagataacacggt

SEQ ID NO: 11774 - DNA, 20 bp, synthetic construct
  misc_feature 1..20: note = Description of Artificial Sequence: Synthetic oligonucleotide
  misc_feature 1..20: note = Target: FXN; (-) strand; PAM type: NRG; PAM sequence: CGG
  source 1..20: mol_type = other DNA
gccgaggcaggcagataaca

SEQ ID NO: 11775 - DNA, 20 bp, synthetic construct
  misc_feature 1..20: note = Description of Artificial Sequence: Synthetic oligonucleotide
  misc_feature 1..20: note = Target: FXN; (-) strand; PAM type: NRG; PAM sequence: CAG
  source 1..20: mol_type = other DNA
ctctgggaggccgaggcagg

SEQ ID NO: 11776 - DNA, 20 bp, synthetic construct
  misc_feature 1..20: note = Description of Artificial Sequence: Synthetic oligonucleotide
  misc_feature 1..20: note = Target: FXN; (-) strand; PAM type: NRG; PAM sequence: AGG
  source 1..20: mol_type = other DNA
gcactctgggaggccgaggc

SEQ ID NO: 11777 - DNA, 20 bp, synthetic construct
  misc_feature 1..20: note = Description of Artificial Sequence: Synthetic oligonucleotide
  misc_feature 1..20: note = Target: FXN; (-) strand; PAM type: NRG; PAM sequence: CAG
  source 1..20: mol_type = other DNA
agcactctgggaggccgagg

SEQ ID NO: 11778 - DNA, 20 bp, synthetic construct
  misc_feature 1..20: note = Description of Artificial Sequence: Synthetic oligonucleotide
  misc_feature 1..20: note = Target: FXN; (-) strand; PAM type: NRG; PAM sequence: AGG
  source 1..20: mol_type = other DNA
cccagcactctgggaggccg

SEQ ID NO: 11779 - DNA, 20 bp, synthetic construct
  misc_feature 1..20: note = Description of Artificial Sequence: Synthetic oligonucleotide
  misc_feature 1..20: note = Target: FXN; (-) strand; PAM type: NRG; PAM sequence: GAG
  source 1..20: mol_type = other DNA
tcccagcactctgggaggcc

SEQ ID NO: 11780 - DNA, 20 bp, synthetic construct
  misc_feature 1..20: note = Description of Artificial Sequence: Synthetic oligonucleotide
  misc_feature 1..20: note = Target: FXN; (-) strand; PAM type: NRG; PAM sequence: AGG
  source 1..20: mol_type = other DNA
tgtaatcccagcactctggg

SEQ ID NO: 11781 - DNA, 20 bp, synthetic construct
  misc_feature 1..20: note = Description of Artificial Sequence: Synthetic oligonucleotide
  misc_feature 1..20: note = Target: FXN; (-) strand; PAM type: NRG; PAM sequence: GAG
  source 1..20: mol_type = other DNA
ctgtaatcccagcactctgg

SEQ ID NO: 11782 - DNA, 20 bp, synthetic construct
  misc_feature 1..20: note = Description of Artificial Sequence: Synthetic oligonucleotide
  misc_feature 1..20: note = Target: FXN; (-) strand; PAM type: NRG; PAM sequence: GGG
  source 1..20: mol_type = other DNA
gcctgtaatcccagcactct

SEQ ID NO: 11783 - DNA, 20 bp, synthetic construct
  misc_feature 1..20: note = Description of Artificial Sequence: Synthetic oligonucleotide
  misc_feature 1..20: note = Target: FXN; (-) strand; PAM type: NRG; PAM sequence: TGG
  source 1..20: mol_type = other DNA
tgcctgtaatcccagcactc

SEQ ID NO: 11784 - DNA, 20 bp, synthetic construct
  misc_feature 1..20: note = Description of Artificial Sequence: Synthetic oligonucleotide
  misc_feature 1..20: note = Target: FXN; (-) strand; PAM type: NRG; PAM sequence: CAG
  source 1..20: mol_type = other DNA
gtagctcatgcctgtaatcc

SEQ ID NO: 11785 - DNA, 20 bp, synthetic construct
  misc_feature 1..20: note = Description of Artificial Sequence: Synthetic oligonucleotide
  misc_feature 1..20: note = Target: FXN; (-) strand; PAM type: NRG; PAM sequence: TAG
  source 1..20: mol_type = other DNA
aatttaaaggccgggcgtgg

SEQ ID NO: 11786 - DNA, 20 bp, synthetic construct
  misc_feature 1..20: note = Description of Artificial Sequence: Synthetic oligonucleotide
  misc_feature 1..20: note = Target: FXN; (-) strand; PAM type: NRG; PAM sequence: TGG
  source 1..20: mol_type = other DNA
aaaaatttaaaggccgggcg

SEQ ID NO: 11787 - DNA, 20 bp, synthetic construct
  misc_feature 1..20: note = Description of Artificial Sequence: Synthetic oligonucleotide
  misc_feature 1..20: note = Target: FXN; (-) strand; PAM type: NRG; PAM sequence: GGG
  source 1..20: mol_type = other DNA
aaagtaaaaatttaaaggcc

SEQ ID NO: 11788 - DNA, 20 bp, synthetic construct
  misc_feature 1..20: note = Description of Artificial Sequence: Synthetic oligonucleotide
  misc_feature 1..20: note = Target: FXN; (-) strand; PAM type: NRG; PAM sequence: CGG
  source 1..20: mol_type = other DNA
caaagtaaaaatttaaaggc

SEQ ID NO: 11789 - DNA, 20 bp, synthetic construct
  misc_feature 1..20: note = Description of Artificial Sequence: Synthetic oligonucleotide
  misc_feature 1..20: note = Target: FXN; (-) strand; PAM type: NRG; PAM sequence: AGG
  source 1..20: mol_type = other DNA
ggcccaaagtaaaaatttaa

SEQ ID NO: 11790 - DNA, 20 bp, synthetic construct
  misc_feature 1..20: note = Description of Artificial Sequence: Synthetic oligonucleotide
  misc_feature 1..20: note = Target: FXN; (-) strand; PAM type: NRG; PAM sequence: AAG
  source 1..20: mol_type = other DNA
cggcccaaagtaaaaattta

SEQ ID NO: 11791 - DNA, 20 bp, synthetic construct
  misc_feature 1..20: note = Description of Artificial Sequence: Synthetic oligonucleotide
  misc_feature 1..20: note = Target: FXN; (-) strand; PAM type: NRG; PAM sequence: AAG
  source 1..20: mol_type = other DNA
aaggcaccgtgcccggccca

SEQ ID NO: 11792 - DNA, 20 bp, synthetic construct
  misc_feature 1..20: note = Description of Artificial Sequence: Synthetic oligonucleotide
  misc_feature 1..20: note = Target: FXN; (-) strand; PAM type: NRG; PAM sequence: CGG
  source 1..20: mol_type = other DNA
caggcgtaaggcaccgtgcc

SEQ ID NO: 11793 - DNA, 20 bp, synthetic construct
  misc_feature 1..20: note = Description of Artificial Sequence: Synthetic oligonucleotide
  misc_feature 1..20: note = Target: FXN; (-) strand; PAM type: NRG; PAM sequence: AGG
  source 1..20: mol_type = other DNA
atgttaggattacaggcgta

SEQ ID NO: 11794 - DNA, 20 bp, synthetic construct
  misc_feature 1..20: note = Description of Artificial Sequence: Synthetic oligonucleotide
  misc_feature 1..20: note = Target: FXN; (-) strand; PAM type: NRG; PAM sequence: AAG
  source 1..20: mol_type = other DNA
aatgttaggattacaggcgt

SEQ ID NO: 11795 - DNA, 20 bp, synthetic construct
  misc_feature 1..20: note = Description of Artificial Sequence: Synthetic oligonucleotide
  misc_feature 1..20: note = Target: FXN; (-) strand; PAM type: NRG; PAM sequence: AGG
  source 1..20: mol_type = other DNA
tctcgaaatgttaggattac

SEQ ID NO: 11796 - DNA, 20 bp, synthetic construct
  misc_feature 1..20: note = Description of Artificial Sequence: Synthetic oligonucleotide
  misc_feature 1..20: note = Target: FXN; (-) strand; PAM type: NRG; PAM sequence: CAG
  source 1..20: mol_type = other DNA
ttctcgaaatgttaggatta

SEQ ID NO: 11797 - DNA, 20 bp, synthetic construct
  misc_feature 1..20: note = Description of Artificial Sequence: Synthetic oligonucleotide
  misc_feature 1..20: note = Target: FXN; (-) strand; PAM type: NRG; PAM sequence: AGG
  source 1..20: mol_type = other DNA
cctcagcttctcgaaatgtt

SEQ ID NO: 11798 - DNA, 20 bp, synthetic construct
  misc_feature 1..20: note = Description of Artificial Sequence: Synthetic oligonucleotide
  misc_feature 1..20: note = Target: FXN; (-) strand; PAM type: NRG; PAM sequence: TAG
  source 1..20: mol_type = other DNA
gcctcagcttctcgaaatgt

SEQ ID NO: 11799 - DNA, 20 bp, synthetic construct
  misc_feature 1..20: note = Description of Artificial Sequence: Synthetic oligonucleotide
  misc_feature 1..20: note = Target: FXN; (-) strand; PAM type: NRG; PAM sequence: CAG
  source 1..20: mol_type = other DNA
aagtgatccaccacgtgcct

SEQ ID NO: 11800 - DNA, 20 bp, synthetic construct
  misc_feature 1..20: note = Description of Artificial Sequence: Synthetic oligonucleotide
  misc_feature 1..20: note = Target: FXN; (-) strand; PAM type: NRG; PAM sequence: AAG
  source 1..20: mol_type = other DNA
tggtctgaactcgtgacatc

SEQ ID NO: 11801 - DNA, 20 bp, synthetic construct
  misc_feature 1..20: note = Description of Artificial Sequence: Synthetic oligonucleotide
  misc_feature 1..20: note = Target: FXN; (-) strand; PAM type: NRG; PAM sequence: TGG
  source 1..20: mol_type = other DNA
ccaggctggagtgcagtggc

SEQ ID NO: 11802 - DNA, 20 bp, synthetic construct
  misc_feature 1..20: note = Description of Artificial Sequence: Synthetic oligonucleotide
  misc_feature 1..20: note = Target: FXN; (-) strand; PAM type: NRG; PAM sequence: TGG
  source 1..20: mol_type = other DNA
tcacccaggctggagtgcag

SEQ ID NO: 11803 - DNA, 20 bp, synthetic construct
  misc_feature 1..20: note = Description of Artificial Sequence: Synthetic oligonucleotide
  misc_feature 1..20: note = Target: FXN; (-) strand; PAM type: NRG; PAM sequence: CAG
  source 1..20: mol_type = other DNA
ctgtcacccaggctggagtg

SEQ ID NO: 11804 - DNA, 20 bp, synthetic construct
  misc_feature 1..20: note = Description of Artificial Sequence: Synthetic oligonucleotide
  misc_feature 1..20: note = Target: FXN; (-) strand; PAM type: NRG; PAM sequence: GAG
  source 1..20: mol_type = other DNA
tcactctgtcacccaggctg

SEQ ID NO: 11805 - DNA, 20 bp, synthetic construct
  misc_feature 1..20: note = Description of Artificial Sequence: Synthetic oligonucleotide
  misc_feature 1..20: note = Target: FXN; (-) strand; PAM type: NRG; PAM sequence: TGG
  source 1..20: mol_type = other DNA
tctcactctgtcacccaggc

SEQ ID NO: 11806 - DNA, 20 bp, synthetic construct
  misc_feature 1..20: note = Description of Artificial Sequence: Synthetic oligonucleotide
  misc_feature 1..20: note = Target: FXN; (-) strand; PAM type: NRG; PAM sequence: AGG
  source 1..20: mol_type = other DNA
agagtctcactctgtcaccc

SEQ ID NO: 11807 - DNA, 20 bp, synthetic construct
  misc_feature 1..20: note = Description of Artificial Sequence: Synthetic oligonucleotide
  misc_feature 1..20: note = Target: FXN; (-) strand; PAM type: NRG; PAM sequence: CAG
  source 1..20: mol_type = other DNA
cagagtctcactctgtcacc

SEQ ID NO: 11808 - DNA, 20 bp, synthetic construct
  misc_feature 1..20: note = Description of Artificial Sequence: Synthetic oligonucleotide
  misc_feature 1..20: note = Target: FXN; (-) strand; PAM type: NRG; PAM sequence: GAG
  source 1..20: mol_type = other DNA
ttttttttttttttgagaca

SEQ ID NO: 11809 - DNA, 20 bp, synthetic construct
  misc_feature 1..20: note = Description of Artificial Sequence: Synthetic oligonucleotide
  misc_feature 1..20: note = Target: FXN; (-) strand; PAM type: NRG; PAM sequence: CAG
  source 1..20: mol_type = other DNA
ttttttttttttttttgaga

SEQ ID NO: 11810 - DNA, 20 bp, synthetic construct
  misc_feature 1..20: note = Description of Artificial Sequence: Synthetic oligonucleotide
  misc_feature 1..20: note = Target: FXN; (-) strand; PAM type: NRG; PAM sequence: GAG
  source 1..20: mol_type = other DNA
tttctttttttttttttttt

SEQ ID NO: 11811 - DNA, 20 bp, synthetic construct
  misc_feature 1..20: note = Description of Artificial Sequence: Synthetic oligonucleotide
  misc_feature 1..20: note = Target: FXN; (-) strand; PAM type: NRG; PAM sequence: AAG
  source 1..20: mol_type = other DNA
aaataacatgtaaaaagtaa

SEQ ID NO: 11812 - DNA, 20 bp, synthetic construct
  misc_feature 1..20: note = Description of Artificial Sequence: Synthetic oligonucleotide
  misc_feature 1..20: note = Target: FXN; (-) strand; PAM type: NRG; PAM sequence: AAG
  source 1..20: mol_type = other DNA
tgatgaaaataacatgtaaa

SEQ ID NO: 11813 - DNA, 20 bp, synthetic construct
  misc_feature 1..20: note = Description of Artificial Sequence: Synthetic oligonucleotide
  misc_feature 1..20: note = Target: FXN; (-) strand; PAM type: NRG; PAM sequence: AAG
  source 1..20: mol_type = other DNA
catctagagagctgcagagg

SEQ ID NO: 11814 - DNA, 20 bp, synthetic construct
  misc_feature 1..20: note = Description of Artificial Sequence: Synthetic oligonucleotide
  misc_feature 1..20: note = Target: FXN; (-) strand; PAM type: NRG; PAM sequence: AGG
  source 1..20: mol_type = other DNA
tctcatctagagagctgcag

SEQ ID NO: 11815 - DNA, 20 bp, synthetic construct
  misc_feature 1..20: note = Description of Artificial Sequence: Synthetic oligonucleotide
  misc_feature 1..20: note = Target: FXN; (-) strand; PAM type: NRG; PAM sequence: GAG
  source 1..20: mol_type = other DNA
gtctcatctagagagctgca

SEQ ID NO: 11816 - DNA, 20 bp, synthetic construct
  misc_feature 1..20: note = Description of Artificial Sequence: Synthetic oligonucleotide
  misc_feature 1..20: note = Target: FXN; (-) strand; PAM type: NRG; PAM sequence: CAG
  source 1..20: mol_type = other DNA
tggtctcatctagagagctg

SEQ ID NO: 11817 - DNA, 20 bp, synthetic construct
  misc_feature 1..20: note = Description of Artificial Sequence: Synthetic oligonucleotide
  misc_feature 1..20: note = Target: FXN; (-) strand; PAM type: NRG; PAM sequence: GAG
  source 1..20: mol_type = other DNA
cataggtggtctcatctaga

SEQ ID NO: 11818 - DNA, 20 bp, synthetic construct
  misc_feature 1..20: note = Description of Artificial Sequence: Synthetic oligonucleotide
  misc_feature 1..20: note = Target: FXN; (-) strand; PAM type: NRG; PAM sequence: GAG
  source 1..20: mol_type = other DNA
ttcataggtggtctcatcta

SEQ ID NO: 11819 - DNA, 20 bp, synthetic construct
  misc_feature 1..20: note = Description of Artificial Sequence: Synthetic oligonucleotide
  misc_feature 1..20: note = Target: FXN; (-) strand; PAM type: NRG; PAM sequence: TAG
  source 1..20: mol_type = other DNA
ctttcataggtggtctcatc

SEQ ID NO: 11820 - DNA, 20 bp, synthetic construct
  misc_feature 1..20: note = Description of Artificial Sequence: Synthetic oligonucleotide
  misc_feature 1..20: note = Target: FXN; (-) strand; PAM type: NRG; PAM sequence: TGG
  source 1..20: mol_type = other DNA
ctctgctagtctttcatagg

SEQ ID NO: 11821 - DNA, 20 bp, synthetic construct
  misc_feature 1..20: note = Description of Artificial Sequence: Synthetic oligonucleotide
  misc_feature 1..20: note = Target: FXN; (-) strand; PAM type: NRG; PAM sequence: AGG
  source 1..20: mol_type = other DNA
ttcctctgctagtctttcat

SEQ ID NO: 11822 - DNA, 20 bp, synthetic construct
  misc_feature 1..20: note = Description of Artificial Sequence: Synthetic oligonucleotide
  misc_feature 1..20: note = Target: FXN; (-) strand; PAM type: NRG; PAM sequence: TAG
  source 1..20: mol_type = other DNA
tttcctctgctagtctttca

SEQ ID NO: 11823 - DNA, 20 bp, synthetic construct
  misc_feature 1..20: note = Description of Artificial Sequence: Synthetic oligonucleotide
  misc_feature 1..20: note = Target: FXN; (-) strand; PAM type: NRG; PAM sequence: TAG
  source 1..20: mol_type = other DNA
gagtccagcgtttcctctgc

SEQ ID NO: 11824 - DNA, 20 bp, synthetic construct
  misc_feature 1..20: note = Description of Artificial Sequence: Synthetic oligonucleotide
  misc_feature 1..20: note = Target: FXN; (-) strand; PAM type: NRG; PAM sequence: CAG
  source 1..20: mol_type = other DNA
aaaaactctgctaaagagtc

SEQ ID NO: 11825 - DNA, 20 bp, synthetic construct
  misc_feature 1..20: note = Description of Artificial Sequence: Synthetic oligonucleotide
  misc_feature 1..20: note = Target: FXN; (-) strand; PAM type: NRG; PAM sequence: GAG
  source 1..20: mol_type = other DNA
cttcaaaaaactctgctaaa

SEQ ID NO: 11826 - DNA, 20 bp, synthetic construct
  misc_feature 1..20: note = Description of Artificial Sequence: Synthetic oligonucleotide
  misc_feature 1..20: note = Target: FXN; (-) strand; PAM type: NRG; PAM sequence: AAG
  source 1..20: mol_type = other DNA
gtcttcaaaaaactctgcta

SEQ ID NO: 11827 - DNA, 20 bp, synthetic construct
  misc_feature 1..20: note = Description of Artificial Sequence: Synthetic oligonucleotide
  misc_feature 1..20: note = Target: FXN; (-) strand; PAM type: NRG; PAM sequence: AGG
  source 1..20: mol_type = other DNA
acgtgtatggcttgtctgca

SEQ ID NO: 11828 - DNA, 20 bp, synthetic construct
  misc_feature 1..20: note = Description of Artificial Sequence: Synthetic oligonucleotide
  misc_feature 1..20: note = Target: FXN; (-) strand; PAM type: NRG; PAM sequence: AAG
  source 1..20: mol_type = other DNA
aacgtgtatggcttgtctgc

SEQ ID NO: 11829 - DNA, 20 bp, synthetic construct
  misc_feature 1..20: note = Description of Artificial Sequence: Synthetic oligonucleotide
  misc_feature 1..20: note = Target: FXN; (-) strand; PAM type: NRG; PAM sequence: TGG
  source 1..20: mol_type = other DNA
tcatagtcctcaaacgtgta

SEQ ID NO: 11830 - DNA, 20 bp, synthetic construct
  misc_feature 1..20: note = Description of Artificial Sequence: Synthetic oligonucleotide
  misc_feature 1..20: note = Target: FXN; (-) strand; PAM type: NRG; PAM sequence: TAG
  source 1..20: mol_type = other DNA
gtaccccaaaggagacatca

SEQ ID NO: 11831 - DNA, 20 bp, synthetic construct
  misc_feature 1..20: note = Description of Artificial Sequence: Synthetic oligonucleotide
  misc_feature 1..20: note = Target: FXN; (-) strand; PAM type: NRG; PAM sequence: GAG
  source 1..20: mol_type = other DNA
agtcaagaggtaccccaaag

SEQ ID NO: 11832 - DNA, 20 bp, synthetic construct
  misc_feature 1..20: note = Description of Artificial Sequence: Synthetic oligonucleotide
  misc_feature 1..20: note = Target: FXN; (-) strand; PAM type: NRG; PAM sequence: AGG
  source 1..20: mol_type = other DNA
gaagtcaagaggtaccccaa

SEQ ID NO: 11833 - DNA, 20 bp, synthetic construct
  misc_feature 1..20: note = Description of Artificial Sequence: Synthetic oligonucleotide
  misc_feature 1..20: note = Target: FXN; (-) strand; PAM type: NRG; PAM sequence: AAG
  source 1..20: mol_type = other DNA
agaagtcaagaggtacccca

SEQ ID NO: 11834 - DNA, 20 bp, synthetic construct
  misc_feature 1..20: note = Description of Artificial Sequence: Synthetic oligonucleotide
  misc_feature 1..20: note = Target: FXN; (-) strand; PAM type: NRG; PAM sequence: AGG
  source 1..20: mol_type = other DNA
gaaaaataaaagaagtcaag

SEQ ID NO: 11835 - DNA, 20 bp, synthetic construct
  misc_feature 1..20: note = Description of Artificial Sequence: Synthetic oligonucleotide
  misc_feature 1..20: note = Target: FXN; (-) strand; PAM type: NRG; PAM sequence: GAG
  source 1..20: mol_type = other DNA
agaaaaataaaagaagtcaa

SEQ ID NO: 11836 - DNA, 20 bp, synthetic construct
  misc_feature 1..20: note = Description of Artificial Sequence: Synthetic oligonucleotide
  misc_feature 1..20: note = Target: FXN; (-) strand; PAM type: NRG; PAM sequence: AAG
  source 1..20: mol_type = other DNA
acagaaaaataaaagaagtc

SEQ ID NO: 11837 - DNA, 20 bp, synthetic construct
  misc_feature 1..20: note = Description of Artificial Sequence: Synthetic oligonucleotide
  misc_feature 1..20: note = Target: FXN; (-) strand; PAM type: NRG; PAM sequence: AAG
  source 1..20: mol_type = other DNA
gggaaacagaaaaataaaag

SEQ ID NO: 11838 - DNA, 20 bp, synthetic construct
  misc_feature 1..20: note = Description of Artificial Sequence: Synthetic oligonucleotide
  misc_feature 1..20: note = Target: FXN; (-) strand; PAM type: NRG; PAM sequence: AAG
  source 1..20: mol_type = other DNA
agggggaaacagaaaaataa

SEQ ID NO: 11839 - DNA, 20 bp, synthetic construct
  misc_feature 1..20: note = Description of Artificial Sequence: Synthetic oligonucleotide
  misc_feature 1..20: note = Target: FXN; (-) strand; PAM type: NRG; PAM sequence: CAG
  source 1..20: mol_type = other DNA
aaaattcttagagggggaaa

SEQ ID NO: 11840 - DNA, 20 bp, synthetic construct
  misc_feature 1..20: note = Description of Artificial Sequence: Synthetic oligonucleotide
  misc_feature 1..20: note = Target: FXN; (-) strand; PAM type: NRG; PAM sequence: GGG
  source 1..20: mol_type = other DNA
tgaactaaaattcttagagg

SEQ ID NO: 11841 - DNA, 20 bp, synthetic construct
  misc_feature 1..20: note = Description of Artificial Sequence: Synthetic oligonucleotide
  misc_feature 1..20: note = Target: FXN; (-) strand; PAM type: NRG; PAM sequence: GGG
  source 1..20: mol_type = other DNA
gtgaactaaaattcttagag

SEQ ID NO: 11842 - DNA, 20 bp, synthetic construct
  misc_feature 1..20: note = Description of Artificial Sequence: Synthetic oligonucleotide
  misc_feature 1..20: note = Target: FXN; (-) strand; PAM type: NRG; PAM sequence: GGG
  source 1..20: mol_type = other DNA
agtgaactaaaattcttaga

SEQ ID NO: 11843 - DNA, 20 bp, synthetic construct
  misc_feature 1..20: note = Description of Artificial Sequence: Synthetic oligonucleotide
  misc_feature 1..20: note = Target: FXN; (-) strand; PAM type: NRG; PAM sequence: AGG
  source 1..20: mol_type = other DNA
tagtgaactaaaattcttag

SEQ ID NO: 11844 - DNA, 20 bp, synthetic construct
  misc_feature 1..20: note = Description of Artificial Sequence: Synthetic oligonucleotide
  misc_feature 1..20: note = Target: FXN; (-) strand; PAM type: NRG; PAM sequence: GAG
  source 1..20: mol_type = other DNA
ttagtgaactaaaattctta

SEQ ID NO: 11845 - DNA, 20 bp, synthetic construct
  misc_feature 1..20: note = Description of Artificial Sequence: Synthetic oligonucleotide
  misc_feature 1..20: note = Target: FXN; (-) strand; PAM type: NRG; PAM sequence: TAG
  source 1..20: mol_type = other DNA
ttttagtgaactaaaattct

SEQ ID NO: 11846 - DNA, 20 bp, synthetic construct
  misc_feature 1..20: note = Description of Artificial Sequence: Synthetic oligonucleotide
  misc_feature 1..20: note = Target: FXN; (-) strand; PAM type: NRG; PAM sequence: TAG
  source 1..20: mol_type = other DNA
tggagggaaattcttcattt

SEQ ID NO: 11847 - DNA, 20 bp, synthetic construct
  misc_feature 1..20: note = Description of Artificial Sequence: Synthetic oligonucleotide
  misc_feature 1..20: note = Target: FXN; (-) strand; PAM type: NRG; PAM sequence: GGG
  source 1..20: mol_type = other DNA
tgatgcttagctctgctgga

SEQ ID NO: 11848 - DNA, 20 bp, synthetic construct
  misc_feature 1..20: note = Description of Artificial Sequence: Synthetic oligonucleotide
  misc_feature 1..20: note = Target: FXN; (-) strand; PAM type: NRG; PAM sequence: AGG
  source 1..20: mol_type = other DNA
ttgatgcttagctctgctgg

SEQ ID NO: 11849 - DNA, 20 bp, synthetic construct
  misc_feature 1..20: note = Description of Artificial Sequence: Synthetic oligonucleotide
  misc_feature 1..20: note = Target: FXN; (-) strand; PAM type: NRG; PAM sequence: GAG
  source 1..20: mol_type = other DNA
cttgatgcttagctctgctg

SEQ ID NO: 11850 - DNA, 20 bp, synthetic construct
  misc_feature 1..20: note = Description of Artificial Sequence: Synthetic oligonucleotide
  misc_feature 1..20: note = Target: FXN; (-) strand; PAM type: NRG; PAM sequence: TGG
  source 1..20: mol_type = other DNA
tacttgatgcttagctctgc

SEQ ID NO: 11851 - DNA, 20 bp, synthetic construct
  misc_feature 1..20: note = Description of Artificial Sequence: Synthetic oligonucleotide
  misc_feature 1..20: note = Target: FXN; (-) strand; PAM type: NRG; PAM sequence: TAG
  source 1..20: mol_type = other DNA
actacatgctacttgatgct

SEQ ID NO: 11852 - DNA, 20 bp, synthetic construct
  misc_feature 1..20: note = Description of Artificial Sequence: Synthetic oligonucleotide
  misc_feature 1..20: note = Target: FXN; (-) strand; PAM type: NRG; PAM sequence: TAG
  source 1..20: mol_type = other DNA
accttcacctcccggaaccc

SEQ ID NO: 11853 - DNA, 20 bp, synthetic construct
  misc_feature 1..20: note = Description of Artificial Sequence: Synthetic oligonucleotide
  misc_feature 1..20: note = Target: FXN; (-) strand; PAM type: NRG; PAM sequence: CGG
  source 1..20: mol_type = other DNA
tcactgcaaccttcacctcc

SEQ ID NO: 11854 - DNA, 20 bp, synthetic construct
  misc_feature 1..20: note = Description of Artificial Sequence: Synthetic oligonucleotide
  misc_feature 1..20: note = Target: FXN; (-) strand; PAM type: NRG; PAM sequence: TGG
  source 1..20: mol_type = other DNA
ggagtgcagtggcgtgattt

SEQ ID NO: 11855 - DNA, 20 bp, synthetic construct
  misc_feature 1..20: note = Description of Artificial Sequence: Synthetic oligonucleotide
  misc_feature 1..20: note = Target: FXN; (-) strand; PAM type: NRG; PAM sequence: TGG
  source 1..20: mol_type = other DNA
tcacccaggctggagtgcag

SEQ ID NO: 11856 - DNA, 20 bp, synthetic construct
  misc_feature 1..20: note = Description of Artificial Sequence: Synthetic oligonucleotide
  misc_feature 1..20: note = Target: FXN; (-) strand; PAM type: NRG; PAM sequence: CAG
  source 1..20: mol_type = other DNA
ctgtcacccaggctggagtg

SEQ ID NO: 11857 - DNA, 20 bp, synthetic construct
  misc_feature 1..20: note = Description of Artificial Sequence: Synthetic oligonucleotide
  misc_feature 1..20: note = Target: FXN; (-) strand; PAM type: NRG; PAM sequence: GAG
  source 1..20: mol_type = other DNA
tcgctctgtcacccaggctg

SEQ ID NO: 11858 - DNA, 20 bp, synthetic construct
  misc_feature 1..20: note = Description of Artificial Sequence: Synthetic oligonucleotide
  misc_feature 1..20: note = Target: FXN; (-) strand; PAM type: NRG; PAM sequence: TGG
  source 1..20: mol_type = other DNA
tctcgctctgtcacccaggc

SEQ ID NO: 11859 - DNA, 20 bp, synthetic construct
  misc_feature 1..20: note = Description of Artificial Sequence: Synthetic oligonucleotide
  misc_feature 1..20: note = Target: FXN; (-) strand; PAM type: NRG; PAM sequence: AGG
  source 1..20: mol_type = other DNA
agagtctcgctctgtcaccc

SEQ ID NO: 11860 - DNA, 20 bp, synthetic construct
  misc_feature 1..20: note = Description of Artificial Sequence: Synthetic oligonucleotide
  misc_feature 1..20: note = Target: FXN; (-) strand; PAM type: NRG; PAM sequence: CAG
  source 1..20: mol_type = other DNA
cagagtctcgctctgtcacc

SEQ ID NO: 11861 - DNA, 20 bp, synthetic construct
  misc_feature 1..20: note = Description of Artificial Sequence: Synthetic oligonucleotide
  misc_feature 1..20: note = Target: FXN; (-) strand; PAM type: NRG; PAM sequence: GAG
  source 1..20: mol_type = other DNA
ccatccatccatctatgaca

SEQ ID NO: 11862 - DNA, 20 bp, synthetic construct
  misc_feature 1..20: note = Description of Artificial Sequence: Synthetic oligonucleotide
  misc_feature 1..20: note = Target: FXN; (-) strand; PAM type: NRG; PAM sequence: CAG
  source 1..20: mol_type = other DNA
atccatccatccatctatga

SEQ ID NO: 11863 - DNA, 20 bp, synthetic construct
  misc_feature 1..20: note = Description of Artificial Sequence: Synthetic oligonucleotide
  misc_feature 1..20: note = Target: FXN; (-) strand; PAM type: NRG; PAM sequence: CAG
  source 1..20: mol_type = other DNA
atctatcttatctatctatc

SEQ ID NO: 11864 - DNA, 20 bp, synthetic construct
  misc_feature 1..20: note = Description of Artificial Sequence: Synthetic oligonucleotide
  misc_feature 1..20: note = Target: FXN; (-) strand; PAM type: NRG; PAM sequence: TAG
  source 1..20: mol_type = other DNA
ctggactgcagcttgaagcc

SEQ ID NO: 11865 - DNA, 20 bp, synthetic construct
  misc_feature 1..20: note = Description of Artificial Sequence: Synthetic oligonucleotide
  misc_feature 1..20: note = Target: FXN; (-) strand; PAM type: NRG; PAM sequence: AAG
  source 1..20: mol_type = other DNA
tagagctggactgcagcttg

SEQ ID NO: 11866 - DNA, 20 bp, synthetic construct
  misc_feature 1..20: note = Description of Artificial Sequence: Synthetic oligonucleotide
  misc_feature 1..20: note = Target: FXN; (-) strand; PAM type: NRG; PAM sequence: CAG
  source 1..20: mol_type = other DNA
agcctggtagagctggactg

SEQ ID NO: 11867 - DNA, 20 bp, synthetic construct
  misc_feature 1..20: note = Description of Artificial Sequence: Synthetic oligonucleotide
  misc_feature 1..20: note = Target: FXN; (-) strand; PAM type: NRG; PAM sequence: TGG
  source 1..20: mol_type = other DNA
cacaacaagcctggtagagc

SEQ ID NO: 11868 - DNA, 20 bp, synthetic construct
  misc_feature 1..20: note = Description of Artificial Sequence: Synthetic oligonucleotide
  misc_feature 1..20: note = Target: FXN; (-) strand; PAM type: NRG; PAM sequence: GAG
  source 1..20: mol_type = other DNA
gagtcacaacaagcctggta

SEQ ID NO: 11869 - DNA, 20 bp, synthetic construct
  misc_feature 1..20: note = Description of Artificial Sequence: Synthetic oligonucleotide
  misc_feature 1..20: note = Target: FXN; (-) strand; PAM type: NRG; PAM sequence: TAG
  source 1..20: mol_type = other DNA
cagagtcacaacaagcctgg

SEQ ID NO: 11870 - DNA, 20 bp, synthetic construct
  misc_feature 1..20: note = Description of Artificial Sequence: Synthetic oligonucleotide
  misc_feature 1..20: note = Target: FXN; (-) strand; PAM type: NRG; PAM sequence: TGG
  source 1..20: mol_type = other DNA
gcccagagtcacaacaagcc

SEQ ID NO: 11871 - DNA, 20 bp, synthetic construct
  misc_feature 1..20: note = Description of Artificial Sequence: Synthetic oligonucleotide
  misc_feature 1..20: note = Target: FXN; (-) strand; PAM type: NRG; PAM sequence: AAG
  source 1..20: mol_type = other DNA
gacttgcccagagtcacaac

SEQ ID NO: 11872 - DNA, 20 bp, synthetic construct
  misc_feature 1..20: note = Description of Artificial Sequence: Synthetic oligonucleotide
  misc_feature 1..20: note = Target: FXN; (-) strand; PAM type: NRG; PAM sequence: GAG
  source 1..20: mol_type = other DNA
gaggctgagtgacttgccca

SEQ ID NO: 11873 - DNA, 20 bp, synthetic construct
  misc_feature 1..20: note = Description of Artificial Sequence: Synthetic oligonucleotide
  misc_feature 1..20: note = Target: FXN; (-) strand; PAM type: NRG; PAM sequence: CAG
  source 1..20: mol_type = other DNA
gagaggctgagtgacttgcc

SEQ ID NO: 11874 - DNA, 20 bp, synthetic construct
  misc_feature 1..20: note = Description of Artificial Sequence: Synthetic oligonucleotide
  misc_feature 1..20: note = Target: FXN; (-) strand; PAM type: NRG; PAM sequence: GAG
  source 1..20: mol_type = other DNA
aaatgaggctcagagaggct

SEQ ID NO: 11875 - DNA, 20 bp, synthetic construct
  misc_feature 1..20: note = Description of Artificial Sequence: Synthetic oligonucleotide
  misc_feature 1..20: note = Target: FXN; (-) strand; PAM type: NRG; PAM sequence: AGG
  source 1..20: mol_type = other DNA
ctggaaaatgaggctcagag

SEQ ID NO: 11876 - DNA, 20 bp, synthetic construct
  misc_feature 1..20: note = Description of Artificial Sequence: Synthetic oligonucleotide
  misc_feature 1..20: note = Target: FXN; (-) strand; PAM type: NRG; PAM sequence: GAG
  source 1..20: mol_type = other DNA
gctggaaaatgaggctcaga

SEQ ID NO: 11877 - DNA, 20 bp, synthetic construct
  misc_feature 1..20: note = Description of Artificial Sequence: Synthetic oligonucleotide
  misc_feature 1..20: note = Target: FXN; (-) strand; PAM type: NRG; PAM sequence: GAG
  source 1..20: mol_type = other DNA
aagctggaaaatgaggctca

SEQ ID NO: 11878 - DNA, 20 bp, synthetic construct
  misc_feature 1..20: note = Description of Artificial Sequence: Synthetic oligonucleotide
  misc_feature 1..20: note = Target: FXN; (-) strand; PAM type: NRG; PAM sequence: CAG
  source 1..20: mol_type = other DNA
tgaagctggaaaatgaggct

SEQ ID NO: 11879 - DNA, 20 bp, synthetic construct
  misc_feature 1..20: note = Description of Artificial Sequence: Synthetic oligonucleotide
  misc_feature 1..20: note = Target: FXN; (-) strand; PAM type: NRG; PAM sequence: AGG
  source 1..20: mol_type = other DNA
tccactgaagctggaaaatg

SEQ ID NO: 11880 - DNA, 20 bp, synthetic construct
  misc_feature 1..20: note = Description of Artificial Sequence: Synthetic oligonucleotide
  misc_feature 1..20: note = Target: FXN; (-) strand; PAM type: NRG; PAM sequence: GAG
  source 1..20: mol_type = other DNA
atccactgaagctggaaaat

SEQ ID NO: 11881 - DNA, 20 bp, synthetic construct
  misc_feature 1..20: note = Description of Artificial Sequence: Synthetic oligonucleotide
  misc_feature 1..20: note = Target: FXN; (-) strand; PAM type: NRG; PAM sequence: TGG
  source 1..20: mol_type = other DNA
tcatgggtatccactgaagc

SEQ ID NO: 11882 - DNA, 20 bp, synthetic construct
  misc_feature 1..20: note = Description of Artificial Sequence: Synthetic oligonucleotide
  misc_feature 1..20: note = Target: FXN; (-) strand; PAM type: NRG; PAM sequence: AAG
  source 1..20: mol_type = other DNA
gccttcatgggtatccactg

SEQ ID NO: 11883 - DNA, 20 bp, synthetic construct
  misc_feature 1..20: note = Description of Artificial Sequence: Synthetic oligonucleotide
  misc_feature 1..20: note = Target: FXN; (-) strand; PAM type: NRG; PAM sequence: GGG
  source 1..20: mol_type = other DNA
cctctctgatttgccttcat

SEQ ID NO: 11884 - DNA, 20 bp, synthetic construct
  misc_feature 1..20: note = Description of Artificial Sequence: Synthetic oligonucleotide
  misc_feature 1..20: note = Target: FXN; (-) strand; PAM type: NRG; PAM sequence: TGG
  source 1..20: mol_type = other DNA
ccctctctgatttgccttca

SEQ ID NO: 11885 - DNA, 20 bp, synthetic construct
  misc_feature 1..20: note = Description of Artificial Sequence: Synthetic oligonucleotide
  misc_feature 1..20: note = Target: FXN; (-) strand; PAM type: NRG; PAM sequence: AGG
  source 1..20: mol_type = other DNA
tgctggacaaatacacactc

SEQ ID NO: 11886 - DNA, 20 bp, synthetic construct
  misc_feature 1..20: note = Description of Artificial Sequence: Synthetic oligonucleotide
  misc_feature 1..20: note = Target: FXN; (-) strand; PAM type: NRG; PAM sequence: CAG
  source 1..20: mol_type = other DNA
ctgctggacaaatacacact

SEQ ID NO: 11887 - DNA, 20 bp, synthetic construct
  misc_feature 1..20: note = Description of Artificial Sequence: Synthetic oligonucleotide
  misc_feature 1..20: note = Target: FXN; (-) strand; PAM type: NRG; PAM sequence: TGG
  source 1..20: mol_type = other DNA
tgttccctccatctgcctgc

SEQ ID NO: 11888 - DNA, 20 bp, synthetic construct
  misc_feature 1..20: note = Description of Artificial Sequence: Synthetic oligonucleotide
  misc_feature 1..20: note = Target: FXN; (-) strand; PAM type: NRG; PAM sequence: TAG
  source 1..20: mol_type = other DNA
ctactgaagaactacgggtc

SEQ ID NO: 11889 - DNA, 20 bp, synthetic construct
  misc_feature 1..20: note = Description of Artificial Sequence: Synthetic oligonucleotide
  misc_feature 1..20: note = Target: FXN; (-) strand; PAM type: NRG; PAM sequence: GGG
  source 1..20: mol_type = other DNA
tatccctactgaagaactac

SEQ ID NO: 11890 - DNA, 20 bp, synthetic construct
  misc_feature 1..20: note = Description of Artificial Sequence: Synthetic oligonucleotide
  misc_feature 1..20: note = Target: FXN; (-) strand; PAM type: NRG; PAM sequence: CGG
  source 1..20: mol_type = other DNA
ttatccctactgaagaacta

SEQ ID NO: 11891 - DNA, 20 bp, synthetic construct
  misc_feature 1..20: note = Description of Artificial Sequence: Synthetic oligonucleotide
  misc_feature 1..20: note = Target: FXN; (-) strand; PAM type: NRG; PAM sequence: AAG
  source 1..20: mol_type = other DNA
cagttatcttatccctactg

SEQ ID NO: 11892 - DNA, 20 bp, synthetic construct
  misc_feature 1..20: note = Description of Artificial Sequence: Synthetic oligonucleotide
  misc_feature 1..20: note = Target: FXN; (-) strand; PAM type: NRG; PAM sequence: CAG
  source 1..20: mol_type = other DNA
taatctaaataacttttggg

SEQ ID NO: 11893 - DNA, 20 bp, synthetic construct
  misc_feature 1..20: note = Description of Artificial Sequence: Synthetic oligonucleotide
  misc_feature 1..20: note = Target: FXN; (-) strand; PAM type: NRG; PAM sequence: GGG
  source 1..20: mol_type = other DNA
ttgtaatctaaataactttt

SEQ ID NO: 11894 - DNA, 20 bp, synthetic construct
  misc_feature 1..20: note = Description of Artificial Sequence: Synthetic oligonucleotide
  misc_feature 1..20: note = Target: FXN; (-) strand; PAM type: NRG; PAM sequence: TGG
  source 1..20: mol_type = other DNA
tttgtaatctaaataacttt

SEQ ID NO: 11895 - DNA, 20 bp, synthetic construct
  misc_feature 1..20: note = Description of Artificial Sequence: Synthetic oligonucleotide
  misc_feature 1..20: note = Target: FXN; (-) strand; PAM type: NRG; PAM sequence: AAG
  source 1..20: mol_type = other DNA
gtctcacaggagcagggctc

SEQ ID NO: 11896 - DNA, 20 bp, synthetic construct
  misc_feature 1..20: note = Description of Artificial Sequence: Synthetic oligonucleotide
  misc_feature 1..20: note = Target: FXN; (-) strand; PAM type: NRG; PAM sequence: GGG
  source 1..20: mol_type = other DNA
atcactgtctcacaggagca

SEQ ID NO: 11897 - DNA, 20 bp, synthetic construct
  misc_feature 1..20: note = Description of Artificial Sequence: Synthetic oligonucleotide
  misc_feature 1..20: note = Target: FXN; (-) strand; PAM type: NRG; PAM sequence: AGG
  source 1..20: mol_type = other DNA
catcactgtctcacaggagc

SEQ ID NO: 11898 - DNA, 20 bp, synthetic construct
  misc_feature 1..20: note = Description of Artificial Sequence: Synthetic oligonucleotide
  misc_feature 1..20: note = Target: FXN; (-) strand; PAM type: NRG; PAM sequence: CAG
  source 1..20: mol_type = other DNA
ccatcactgtctcacaggag

SEQ ID NO: 11899 - DNA, 20 bp, synthetic construct
  misc_feature 1..20: note = Description of Artificial Sequence: Synthetic oligonucleotide
  misc_feature 1..20: note = Target: FXN; (-) strand; PAM type: NRG; PAM sequence: GAG
  source 1..20: mol_type = other DNA
accccatcactgtctcacag

SEQ ID NO: 11900 - DNA, 20 bp, synthetic construct
  misc_feature 1..20: note = Description of Artificial Sequence: Synthetic oligonucleotide
  misc_feature 1..20: note = Target: FXN; (-) strand; PAM type: NRG; PAM sequence: AGG
  source 1..20: mol_type = other DNA
ctaccccatcactgtctcac

SEQ ID NO: 11901 - DNA, 20 bp, synthetic construct
  misc_feature 1..20: note = Description of Artificial Sequence: Synthetic oligonucleotide
  misc_feature 1..20: note = Target: FXN; (-) strand; PAM type: NRG; PAM sequence: CAG
  source 1..20: mol_type = other DNA
cctaccccatcactgtctca

SEQ ID NO: 11902 - DNA, 20 bp, synthetic construct
  misc_feature 1..20: note = Description of Artificial Sequence: Synthetic oligonucleotide
  misc_feature 1..20: note = Target: FXN; (-) strand; PAM type: NRG; PAM sequence: AGG
  source 1..20: mol_type = other DNA
ttttcaaaaatatgcttccc

SEQ ID NO: 11903 - DNA, 20 bp, synthetic construct
  misc_feature 1..20: note = Description of Artificial Sequence: Synthetic oligonucleotide
  misc_feature 1..20: note = Target: FXN; (-) strand; PAM type: NRG; PAM sequence: CAG
  source 1..20: mol_type = other DNA
cttttcaaaaatatgcttcc

SEQ ID NO: 11904 - DNA, 20 bp, synthetic construct
  misc_feature 1..20: note = Description of Artificial Sequence: Synthetic oligonucleotide
  misc_feature 1..20: note = Target: FXN; (-) strand; PAM type: NRG; PAM sequence: GAG
  source 1..20: mol_type = other DNA
tacacattagaatcccaggt

SEQ ID NO: 11905 - DNA, 20 bp, synthetic construct
  misc_feature 1..20: note = Description of Artificial Sequence: Synthetic oligonucleotide
  misc_feature 1..20: note = Target: FXN; (-) strand; PAM type: NRG; PAM sequence: AGG
  source 1..20: mol_type = other DNA
gggatacacattagaatccc

SEQ ID NO: 11906 - DNA, 20 bp, synthetic construct
  misc_feature 1..20: note = Description of Artificial Sequence: Synthetic oligonucleotide
  misc_feature 1..20: note = Target: FXN; (-) strand; PAM type: NRG; PAM sequence: CAG
  source 1..20: mol_type = other DNA
agggatacacattagaatcc

SEQ ID NO: 11907 - DNA, 20 bp, synthetic construct
  misc_feature 1..20: note = Description of Artificial Sequence: Synthetic oligonucleotide
  misc_feature 1..20: note = Target: FXN; (-) strand; PAM type: NRG; PAM sequence: TAG
  source 1..20: mol_type = other DNA
taagacctagggatacacat

SEQ ID NO: 11908 - DNA, 20 bp, synthetic construct
  misc_feature 1..20: note = Description of Artificial Sequence: Synthetic oligonucleotide
  misc_feature 1..20: note = Target: FXN; (-) strand; PAM type: NRG; PAM sequence: GGG
  source 1..20: mol_type = other DNA
atctctaggaataagaccta

SEQ ID NO: 11909 - DNA, 20 bp, synthetic construct
  misc_feature 1..20: note = Description of Artificial Sequence: Synthetic oligonucleotide
  misc_feature 1..20: note = Target: FXN; (-) strand; PAM type: NRG; PAM sequence: AGG
  source 1..20: mol_type = other DNA
aatctctaggaataagacct

SEQ ID NO: 11910 - DNA, 20 bp, synthetic construct
  misc_feature 1..20: note = Description of Artificial Sequence: Synthetic oligonucleotide
  misc_feature 1..20: note = Target: FXN; (-) strand; PAM type: NRG; PAM sequence: TAG
  source 1..20: mol_type = other DNA
aaatctctaggaataagacc

SEQ ID NO: 11911 - DNA, 20 bp, synthetic construct
  misc_feature 1..20: note = Description of Artificial Sequence: Synthetic oligonucleotide
  misc_feature 1..20: note = Target: FXN; (-) strand; PAM type: NRG; PAM sequence: AAG
  source 1..20: mol_type = other DNA
taatcaaaatctctaggaat

SEQ ID NO: 11912 - DNA, 20 bp, synthetic construct
  misc_feature 1..20: note = Description of Artificial Sequence: Synthetic oligonucleotide
  misc_feature 1..20: note = Target: FXN; (-) strand; PAM type: NRG; PAM sequence: AGG
  source 1..20: mol_type = other DNA
accaagtaatcaaaatctct

SEQ ID NO: 11913 - DNA, 20 bp, synthetic construct
  misc_feature 1..20: note = Description of Artificial Sequence: Synthetic oligonucleotide
  misc_feature 1..20: note = Target: FXN; (-) strand; PAM type: NRG; PAM sequence: TAG
  source 1..20: mol_type = other DNA
gaccaagtaatcaaaatctc

SEQ ID NO: 11914 - DNA, 20 bp, synthetic construct
  misc_feature 1..20: note = Description of Artificial Sequence: Synthetic oligonucleotide
  misc_feature 1..20: note = Target: FXN; (-) strand; PAM type: NRG; PAM sequence: AAG
  source 1..20: mol_type = other DNA
gtcatgccacaccccagacc

SEQ ID NO: 11915 - DNA, 20 bp, synthetic construct
  misc_feature 1..20: note = Description of Artificial Sequence: Synthetic oligonucleotide
  misc_feature 1..20: note = Target: FXN; (-) strand; PAM type: NRG; PAM sequence: CAG
  source 1..20: mol_type = other DNA
gcccaggtcatgccacaccc

SEQ ID NO: 11916 - DNA, 20 bp, synthetic construct
  misc_feature 1..20: note = Description of Artificial Sequence: Synthetic oligonucleotide
  misc_feature 1..20: note = Target: FXN; (-) strand; PAM type: NRG; PAM sequence: AGG
  source 1..20: mol_type = other DNA
aaaatcccagtgccctgccc

SEQ ID NO: 11917 - DNA, 20 bp, synthetic construct
  misc_feature 1..20: note = Description of Artificial Sequence: Synthetic oligonucleotide
  misc_feature 1..20: note = Target: FXN; (-) strand; PAM type: NRG; PAM sequence: CAG
  source 1..20: mol_type = other DNA
aaaaatcccagtgccctgcc

SEQ ID NO: 11918 - DNA, 20 bp, synthetic construct
  misc_feature 1..20: note = Description of Artificial Sequence: Synthetic oligonucleotide
  misc_feature 1..20: note = Target: FXN; (-) strand; PAM type: NRG; PAM sequence: CAG
  source 1..20: mol_type = other DNA
tctgtggagcttaaaaatcc

SEQ ID NO: 11919 - DNA, 20 bp, synthetic construct
  misc_feature 1..20: note = Description of Artificial Sequence: Synthetic oligonucleotide
  misc_feature 1..20: note = Target: FXN; (-) strand; PAM type: NRG; PAM sequence: GAG
  source 1..20: mol_type = other DNA
gcatattggaatcatctgtg

SEQ ID NO: 11920 - DNA, 20 bp, synthetic construct
  misc_feature 1..20: note = Description of Artificial Sequence: Synthetic oligonucleotide
  misc_feature 1..20: note = Target: FXN; (-) strand; PAM type: NRG; PAM sequence: TGG
  source 1..20: mol_type = other DNA
ctgcatattggaatcatctg

SEQ ID NO: 11921 - DNA, 20 bp, synthetic construct
  misc_feature 1..20: note = Description of Artificial Sequence: Synthetic oligonucleotide
  misc_feature 1..20: note = Target: FXN; (-) strand; PAM type: NRG; PAM sequence: TGG
  source 1..20: mol_type = other DNA
ttctcatactagctgcatat

SEQ ID NO: 11922 - DNA, 20 bp, synthetic construct
  misc_feature 1..20: note = Description of Artificial Sequence: Synthetic oligonucleotide
  misc_feature 1..20: note = Target: FXN; (-) strand; PAM type: NRG; PAM sequence: TAG
  source 1..20: mol_type = other DNA
aaaaaaacaagttctcatac

SEQ ID NO: 11923 - DNA, 20 bp, synthetic construct
  misc_feature 1..20: note = Description of Artificial Sequence: Synthetic oligonucleotide
  misc_feature 1..20: note = Target: FXN; (-) strand; PAM type: NRG; PAM sequence: AAG
  source 1..20: mol_type = other DNA
agactccttcaaaaaaaaac

SEQ ID NO: 11924 - DNA, 20 bp, synthetic construct
  misc_feature 1..20: note = Description of Artificial Sequence: Synthetic oligonucleotide
  misc_feature 1..20: note = Target: FXN; (-) strand; PAM type: NRG; PAM sequence: GAG
  source 1..20: mol_type = other DNA
tccagcctgggtgacagagt

SEQ ID NO: 11925 - DNA, 20 bp, synthetic construct
  misc_feature 1..20: note = Description of Artificial Sequence: Synthetic oligonucleotide
  misc_feature 1..20: note = Target: FXN; (-) strand; PAM type: NRG; PAM sequence: GAG
  source 1..20: mol_type = other DNA
gcactccagcctgggtgaca

SEQ ID NO: 11926 - DNA, 20 bp, synthetic construct
  misc_feature 1..20: note = Description of Artificial Sequence: Synthetic oligonucleotide
  misc_feature 1..20: note = Target: FXN; (-) strand; PAM type: NRG; PAM sequence: CAG
  source 1..20: mol_type = other DNA
ctgcactccagcctgggtga

SEQ ID NO: 11927 - DNA, 20 bp, synthetic construct
  misc_feature 1..20: note = Description of Artificial Sequence: Synthetic oligonucleotide
  misc_feature 1..20: note = Target: FXN; (-) strand; PAM type: NRG; PAM sequence: GGG
  source 1..20: mol_type = other DNA
gcgccactgcactccagcct

SEQ ID NO: 11928 - DNA, 20 bp, synthetic construct
  misc_feature 1..20: note = Description of Artificial Sequence: Synthetic oligonucleotide
  misc_feature 1..20: note = Target: FXN; (-) strand; PAM type: NRG; PAM sequence: TGG
  source 1..20: mol_type = other DNA
tgcgccactgcactccagcc

SEQ ID NO: 11929 - DNA, 20 bp, synthetic construct
  misc_feature 1..20: note = Description of Artificial Sequence: Synthetic oligonucleotide
  misc_feature 1..20: note = Target: FXN; (-) strand; PAM type: NRG; PAM sequence: CAG
  source 1..20: mol_type = other DNA
gagattgcgccactgcactc

SEQ ID NO: 11930 - DNA, 20 bp, synthetic construct
  misc_feature 1..20: note = Description of Artificial Sequence: Synthetic oligonucleotide
  misc_feature 1..20: note = Target: FXN; (-) strand; PAM type: NRG; PAM sequence: GAG
  source 1..20: mol_type = other DNA
aggaagcggagcagtgagcc

SEQ ID NO: 11931 - DNA, 20 bp, synthetic construct
  misc_feature 1..20: note = Description of Artificial Sequence: Synthetic oligonucleotide
  misc_feature 1..20: note = Target: FXN; (-) strand; PAM type: NRG; PAM sequence: GAG
  source 1..20: mol_type = other DNA
aacccaggaagcggagcagt

SEQ ID NO: 11932 - DNA, 20 bp, synthetic construct
  misc_feature 1..20: note = Description of Artificial Sequence: Synthetic oligonucleotide
  misc_feature 1..20: note = Target: FXN; (-) strand; PAM type: NRG; PAM sequence: CAG
  source 1..20: mol_type = other DNA
cttgaacccaggaagcggag

SEQ ID NO: 11933 - DNA, 20 bp, synthetic construct
  misc_feature 1..20: note = Description of Artificial Sequence: Synthetic oligonucleotide
  misc_feature 1..20: note = Target: FXN; (-) strand; PAM type: NRG; PAM sequence: GAG
  source 1..20: mol_type = other DNA
ctgcttgaacccaggaagcg

SEQ ID NO: 11934 - DNA, 20 bp, synthetic construct
  misc_feature 1..20: note = Description of Artificial Sequence: Synthetic oligonucleotide
  misc_feature 1..20: note = Target: FXN; (-) strand; PAM type: NRG; PAM sequence: CGG
  source 1..20: mol_type = other DNA
aactgcttgaacccaggaag

SEQ ID NO: 11935 - DNA, 20 bp, synthetic construct
  misc_feature 1..20: note = Description of Artificial Sequence: Synthetic oligonucleotide
  misc_feature 1..20: note = Target: FXN; (-) strand; PAM type: NRG; PAM sequence: AAG
  source 1..20: mol_type = other DNA
gagaactgcttgaacccagg

SEQ ID NO: 11936 - DNA, 20 bp, synthetic construct
  misc_feature 1..20: note = Description of Artificial Sequence: Synthetic oligonucleotide
  misc_feature 1..20: note = Target: FXN; (-) strand; PAM type: NRG; PAM sequence: AGG
  source 1..20: mol_type = other DNA
caggagaactgcttgaaccc

SEQ ID NO: 11937 - DNA, 20 bp, synthetic construct
  misc_feature 1..20: note = Description of Artificial Sequence: Synthetic oligonucleotide
  misc_feature 1..20: note = Target: FXN; (-) strand; PAM type: NRG; PAM sequence: CAG
  source 1..20: mol_type = other DNA
gcaggagaactgcttgaacc

SEQ ID NO: 11938 - DNA, 20 bp, synthetic construct
  misc_feature 1..20: note = Description of Artificial Sequence: Synthetic oligonucleotide
  misc_feature 1..20: note = Target: FXN; (-) strand; PAM type: NRG; PAM sequence: GAG
  source 1..20: mol_type = other DNA
tactcgggaggctgaggcag

SEQ ID NO: 11939 - DNA, 20 bp, synthetic construct
  misc_feature 1..20: note = Description of Artificial Sequence: Synthetic oligonucleotide
  misc_feature 1..20: note = Target: FXN; (-) strand; PAM type: NRG; PAM sequence: AGG
  source 1..20: mol_type = other DNA
gctactcgggaggctgaggc

SEQ ID NO: 11940 - DNA, 20 bp, synthetic construct
  misc_feature 1..20: note = Description of Artificial Sequence: Synthetic oligonucleotide
  misc_feature 1..20: note = Target: FXN; (-) strand; PAM type: NRG; PAM sequence: CAG
  source 1..20: mol_type = other DNA
agctactcgggaggctgagg

SEQ ID NO: 11941 - DNA, 20 bp, synthetic construct
  misc_feature 1..20: note = Description of Artificial Sequence: Synthetic oligonucleotide
  misc_feature 1..20: note = Target: FXN; (-) strand; PAM type: NRG; PAM sequence: AGG
  source 1..20: mol_type = other DNA
cccagctactcgggaggctg

SEQ ID NO: 11942 - DNA, 20 bp, synthetic construct
  misc_feature 1..20: note = Description of Artificial Sequence: Synthetic oligonucleotide
  misc_feature 1..20: note = Target: FXN; (-) strand; PAM type: NRG; PAM sequence: GAG
  source 1..20: mol_type = other DNA
tcccagctactcgggaggct

SEQ ID NO: 11943 - DNA, 20 bp, synthetic construct
  misc_feature 1..20: note = Description of Artificial Sequence: Synthetic oligonucleotide
  misc_feature 1..20: note = Target: FXN; (-) strand; PAM type: NRG; PAM sequence: AGG
  source 1..20: mol_type = other DNA
tataatcccagctactcggg

SEQ ID NO: 11944 - DNA, 20 bp, synthetic construct
  misc_feature 1..20: note = Description of Artificial Sequence: Synthetic oligonucleotide
  misc_feature 1..20: note = Target: FXN; (-) strand; PAM type: NRG; PAM sequence: GAG
  source 1..20: mol_type = other DNA
ctataatcccagctactcgg

SEQ ID NO: 11945 - DNA, 20 bp, synthetic construct
  misc_feature 1..20: note = Description of Artificial Sequence: Synthetic oligonucleotide
  misc_feature 1..20: note = Target: FXN; (-) strand; PAM type: NRG; PAM sequence: GGG
  source 1..20: mol_type = other DNA
gcctataatcccagctactc

SEQ ID NO: 11946 - DNA, 20 bp, synthetic construct
  misc_feature 1..20: note = Description of Artificial Sequence: Synthetic oligonucleotide
  misc_feature 1..20: note = Target: FXN; (-) strand; PAM type: NRG; PAM sequence: CGG
  source 1..20: mol_type = other DNA
tgcctataatcccagctact

SEQ ID NO: 11947 - DNA, 20 bp, synthetic construct
  misc_feature 1..20: note = Description of Artificial Sequence: Synthetic oligonucleotide
  misc_feature 1..20: note = Target: FXN; (-) strand; PAM type: NRG; PAM sequence: CAG
  source 1..20: mol_type = other DNA
gtggcagatgcctataatcc

SEQ ID NO: 11948 - DNA, 20 bp, synthetic construct
  misc_feature 1..20: note = Description of Artificial Sequence: Synthetic oligonucleotide
  misc_feature 1..20: note = Target: FXN; (-) strand; PAM type: NRG; PAM sequence: CAG
  source 1..20: mol_type = other DNA
aaattagctgggcatggtgg

SEQ ID NO: 11949 - DNA, 20 bp, synthetic construct
  misc_feature 1..20: note = Description of Artificial Sequence: Synthetic oligonucleotide
  misc_feature 1..20: note = Target: FXN; (-) strand; PAM type: NRG; PAM sequence: TGG
  source 1..20: mol_type = other DNA
caaaaattagctgggcatgg

SEQ ID NO: 11950 - DNA, 20 bp, synthetic construct
  misc_feature 1..20: note = Description of Artificial Sequence: Synthetic oligonucleotide
  misc_feature 1..20: note = Target: FXN; (-) strand; PAM type: NRG; PAM sequence: TGG
  source 1..20: mol_type = other DNA
atgcaaaaattagctgggca

SEQ ID NO: 11951 - DNA, 20 bp, synthetic construct
  misc_feature 1..20: note = Description of Artificial Sequence: Synthetic oligonucleotide
  misc_feature 1..20: note = Target: FXN; (-) strand; PAM type: NRG; PAM sequence: GGG
  source 1..20: mol_type = other DNA
ctaaaatgcaaaaattagct

SEQ ID NO: 11952 - DNA, 20 bp, synthetic construct
  misc_feature 1..20: note = Description of Artificial Sequence: Synthetic oligonucleotide
  misc_feature 1..20: note = Target: FXN; (-) strand; PAM type: NRG; PAM sequence: TGG
  source 1..20: mol_type = other DNA
actaaaatgcaaaaattagc

SEQ ID NO: 11953 - DNA, 20 bp, synthetic construct
  misc_feature 1..20: note = Description of Artificial Sequence: Synthetic oligonucleotide
  misc_feature 1..20: note = Target: FXN; (-) strand; PAM type: NRG; PAM sequence: TAG
  source 1..20: mol_type = other DNA
ctttactaaaatgcaaaaat

SEQ ID NO: 11954 - DNA, 20 bp, synthetic construct
  misc_feature 1..20: note = Description of Artificial Sequence: Synthetic oligonucleotide
  misc_feature 1..20: note = Target: FXN; (-) strand; PAM type: NRG; PAM sequence: TGG
  source 1..20: mol_type = other DNA
cgagaccagcctaaccaaca

SEQ ID NO: 11955 - DNA, 20 bp, synthetic construct
  misc_feature 1..20: note = Description of Artificial Sequence: Synthetic oligonucleotide
  misc_feature 1..20: note = Target: FXN; (-) strand; PAM type: NRG; PAM sequence: CAG
  source 1..20: mol_type = other DNA
tgaggtcaggagatcgagac

SEQ ID NO: 11956 - DNA, 20 bp, synthetic construct
  misc_feature 1..20: note = Description of Artificial Sequence: Synthetic oligonucleotide
  misc_feature 1..20: note = Target: FXN; (-) strand; PAM type: NRG; PAM sequence: GAG
  source 1..20: mol_type = other DNA
ccatttgaggtcaggagatc

SEQ ID NO: 11957 - DNA, 20 bp, synthetic construct
  misc_feature 1..20: note = Description of Artificial Sequence: Synthetic oligonucleotide
  misc_feature 1..20: note = Target: FXN; (-) strand; PAM type: NRG; PAM sequence: GAG
  source 1..20: mol_type = other DNA
ggtggaccatttgaggtcag

SEQ ID NO: 11958 - DNA, 20 bp, synthetic construct
  misc_feature 1..20: note = Description of Artificial Sequence: Synthetic oligonucleotide
  misc_feature 1..20: note = Target: FXN; (-) strand; PAM type: NRG; PAM sequence: AGG
  source 1..20: mol_type = other DNA
ggggtggaccatttgaggtc

SEQ ID NO: 11959 - DNA, 20 bp, synthetic construct
  misc_feature 1..20: note = Description of Artificial Sequence: Synthetic oligonucleotide
  misc_feature 1..20: note = Target: FXN; (-) strand; PAM type: NRG; PAM sequence: CAG
  source 1..20: mol_type = other DNA
gggggtggaccatttgaggt

SEQ ID NO: 11960 - DNA, 20 bp, synthetic construct
  misc_feature 1..20: note = Description of Artificial Sequence: Synthetic oligonucleotide
  misc_feature 1..20: note = Target: FXN; (-) strand; PAM type: NRG; PAM sequence: AGG
  source 1..20: mol_type = other DNA
tgatgggggtggaccatttg

SEQ ID NO: 11961 - DNA, 20 bp, synthetic construct
  misc_feature 1..20: note = Description of Artificial Sequence: Synthetic oligonucleotide
  misc_feature 1..20: note = Target: FXN; (-) strand; PAM type: NRG; PAM sequence: GAG
  source 1..20: mol_type = other DNA
ctgatgggggtggaccattt

SEQ ID NO: 11962 - DNA, 20 bp, synthetic construct
  misc_feature 1..20: note = Description of Artificial Sequence: Synthetic oligonucleotide
  misc_feature 1..20: note = Target: FXN; (-) strand; PAM type: NRG; PAM sequence: TGG
  source 1..20: mol_type = other DNA
ctttggaaggctgatggggg

SEQ ID NO: 11963 - DNA, 20 bp, synthetic construct
  misc_feature 1..20: note = Description of Artificial Sequence: Synthetic oligonucleotide
  misc_feature 1..20: note = Target: FXN; (-) strand; PAM type: NRG; PAM sequence: GGG
  source 1..20: mol_type = other DNA
aaactttggaaggctgatgg

SEQ ID NO: 11964 - DNA, 20 bp, synthetic construct
  misc_feature 1..20: note = Description of Artificial Sequence: Synthetic oligonucleotide
  misc_feature 1..20: note = Target: FXN; (-) strand; PAM type: NRG; PAM sequence: GGG
  source 1..20: mol_type = other DNA
aaaactttggaaggctgatg

SEQ ID NO: 11965 - DNA, 20 bp, synthetic construct
  misc_feature 1..20: note = Description of Artificial Sequence: Synthetic oligonucleotide
  misc_feature 1..20: note = Target: FXN; (-) strand; PAM type: NRG; PAM sequence: GGG
  source 1..20: mol_type = other DNA
caaaactttggaaggctgat

SEQ ID NO: 11966 - DNA, 20 bp, synthetic construct
  misc_feature 1..20: note = Description of Artificial Sequence: Synthetic oligonucleotide
  misc_feature 1..20: note = Target: FXN; (-) strand; PAM type: NRG; PAM sequence: TGG
  source 1..20: mol_type = other DNA
ccaaaactttggaaggctga

SEQ ID NO: 11967 - DNA, 20 bp, synthetic construct
  misc_feature 1..20: note = Description of Artificial Sequence: Synthetic oligonucleotide
  misc_feature 1..20: note = Target: FXN; (-) strand; PAM type: NRG; PAM sequence: AGG
  source 1..20: mol_type = other DNA
tgttatcccaaaactttgga

SEQ ID NO: 11968 - DNA, 20 bp, synthetic construct
  misc_feature 1..20: note = Description of Artificial Sequence: Synthetic oligonucleotide
  misc_feature 1..20: note = Target: FXN; (-) strand; PAM type: NRG; PAM sequence: AAG
  source 1..20: mol_type = other DNA
ctgttatcccaaaactttgg

SEQ ID NO: 11969 - DNA, 20 bp, synthetic construct
  misc_feature 1..20: note = Description of Artificial Sequence: Synthetic oligonucleotide
  misc_feature 1..20: note = Target: FXN; (-) strand; PAM type: NRG; PAM sequence: TGG
  source 1..20: mol_type = other DNA
cgcctgttatcccaaaactt

SEQ ID NO: 11970 - DNA, 20 bp, synthetic construct
  misc_feature 1..20: note = Description of Artificial Sequence: Synthetic oligonucleotide
  misc_feature 1..20: note = Target: FXN; (-) strand; PAM type: NRG; PAM sequence: TGG
  source 1..20: mol_type = other DNA
tcacaccaggccggacctgg

SEQ ID NO: 11971 - DNA, 20 bp, synthetic construct
  misc_feature 1..20: note = Description of Artificial Sequence: Synthetic oligonucleotide
  misc_feature 1..20: note = Target: FXN; (-) strand; PAM type: NRG; PAM sequence: TGG
  source 1..20: mol_type = other DNA
ttctcacaccaggccggacc

SEQ ID NO: 11972 - DNA, 20 bp, synthetic construct
  misc_feature 1..20: note = Description of Artificial Sequence: Synthetic oligonucleotide
  misc_feature 1..20: note = Target: FXN; (-) strand; PAM type: NRG; PAM sequence: CGG
  source 1..20: mol_type = other DNA
cagaagttctcacaccaggc

SEQ ID NO: 11973 - DNA, 20 bp, synthetic construct
  misc_feature 1..20: note = Description of Artificial Sequence: Synthetic oligonucleotide
  misc_feature 1..20: note = Target: FXN; (-) strand; PAM type: NRG; PAM sequence: AGG
  source 1..20: mol_type = other DNA
aactcagaagttctcacacc

SEQ ID NO: 11974 - DNA, 20 bp, synthetic construct
  misc_feature 1..20: note = Description of Artificial Sequence: Synthetic oligonucleotide
  misc_feature 1..20: note = Target: FXN; (-) strand; PAM type: NRG; PAM sequence: CAG
  source 1..20: mol_type = other DNA
caactcagaagttctcacac

SEQ ID NO: 11975 - DNA, 20 bp, synthetic construct
  misc_feature 1..20: note = Description of Artificial Sequence: Synthetic oligonucleotide
  misc_feature 1..20: note = Target: FXN; (-) strand; PAM type: NRG; PAM sequence: AAG
  source 1..20: mol_type = other DNA
taatgtttcatccaactcag

SEQ ID NO: 11976 - DNA, 20 bp, synthetic construct
  misc_feature 1..20: note = Description of Artificial Sequence: Synthetic oligonucleotide
  misc_feature 1..20: note = Target: FXN; (-) strand; PAM type: NRG; PAM sequence: CAG
  source 1..20: mol_type = other DNA
ggctaatgtttcatccaact

SEQ ID NO: 11977 - DNA, 20 bp, synthetic construct
  misc_feature 1..20: note = Description of Artificial Sequence: Synthetic oligonucleotide
  misc_feature 1..20: note = Target: FXN; (-) strand; PAM type: NRG; PAM sequence: GGG
  source 1..20: mol_type = other DNA
tccctggcttctaggatctg

SEQ ID NO: 11978 - DNA, 20 bp, synthetic construct
  misc_feature 1..20: note = Description of Artificial Sequence: Synthetic oligonucleotide
  misc_feature 1..20: note = Target: FXN; (-) strand; PAM type: NRG; PAM sequence: GGG
  source 1..20: mol_type = other DNA
ttccctggcttctaggatct

SEQ ID NO: 11979 - DNA, 20 bp, synthetic construct
  misc_feature 1..20: note = Description of Artificial Sequence: Synthetic oligonucleotide
  misc_feature 1..20: note = Target: FXN; (-) strand; PAM type: NRG; PAM sequence: TGG
  source 1..20: mol_type = other DNA
cttccctggcttctaggatc

SEQ ID NO: 11980 - DNA, 20 bp, synthetic construct
  misc_feature 1..20: note = Description of Artificial Sequence: Synthetic oligonucleotide
  misc_feature 1..20: note = Target: FXN; (-) strand; PAM type: NRG; PAM sequence: AGG
  source 1..20: mol_type = other DNA
ccagcacttccctggcttct

SEQ ID NO: 11981 - DNA, 20 bp, synthetic construct
  misc_feature 1..20: note = Description of Artificial Sequence: Synthetic oligonucleotide
  misc_feature 1..20: note = Target: FXN; (-) strand; PAM type: NRG; PAM sequence: TAG
  source 1..20: mol_type = other DNA
accagcacttccctggcttc

SEQ ID NO: 11982 - DNA, 20 bp, synthetic construct
  misc_feature 1..20: note = Description of Artificial Sequence: Synthetic oligonucleotide
  misc_feature 1..20: note = Target: FXN; (-) strand; PAM type: NRG; PAM sequence: TGG
  source 1..20: mol_type = other DNA
gataaagaccagcacttccc

SEQ ID NO: 11983 - DNA, 20 bp, synthetic construct
  misc_feature 1..20: note = Description of Artificial Sequence: Synthetic oligonucleotide
  misc_feature 1..20: note = Target: FXN; (-) strand; PAM type: NRG; PAM sequence: CAG
  source 1..20: mol_type = other DNA
ggtggccagtcgataaagac

SEQ ID NO: 11984 - DNA, 20 bp, synthetic construct
  misc_feature 1..20: note = Description of Artificial Sequence: Synthetic oligonucleotide
  misc_feature 1..20: note = Target: FXN; (-) strand; PAM type: NRG; PAM sequence: AAG
  source 1..20: mol_type = other DNA
cacctggtggccagtcgata

SEQ ID NO: 11985 - DNA, 20 bp, synthetic construct
  misc_feature 1..20: note = Description of Artificial Sequence: Synthetic oligonucleotide
  misc_feature 1..20: note = Target: FXN; (-) strand; PAM type: NRG; PAM sequence: CAG
  source 1..20: mol_type = other DNA
caaatctgccacctggtggc

SEQ ID NO: 11986 - DNA, 20 bp, synthetic construct
  misc_feature 1..20: note = Description of Artificial Sequence: Synthetic oligonucleotide
  misc_feature 1..20: note = Target: FXN; (-) strand; PAM type: NRG; PAM sequence: TGG
  source 1..20: mol_type = other DNA
tgcccaaatctgccacctgg

SEQ ID NO: 11987 - DNA, 20 bp, synthetic construct
  misc_feature 1..20: note = Description of Artificial Sequence: Synthetic oligonucleotide
  misc_feature 1..20: note = Target: FXN; (-) strand; PAM type: NRG; PAM sequence: TGG
  source 1..20: mol_type = other DNA
ccttgcccaaatctgccacc

SEQ ID NO: 11988 - DNA, 20 bp, synthetic construct
  misc_feature 1..20: note = Description of Artificial Sequence: Synthetic oligonucleotide
  misc_feature 1..20: note = Target: FXN; (-) strand; PAM type: NRG; PAM sequence: CAG
  source 1..20: mol_type = other DNA
aataattctaaacccaaagg

SEQ ID NO: 11989 - DNA, 20 bp, synthetic construct
  misc_feature 1..20: note = Description of Artificial Sequence: Synthetic oligonucleotide
  misc_feature 1..20: note = Target: FXN; (-) strand; PAM type: NRG; PAM sequence: AGG
  source 1..20: mol_type = other DNA
agcaataattctaaacccaa

SEQ ID NO: 11990 - DNA, 20 bp, synthetic construct
  misc_feature 1..20: note = Description of Artificial Sequence: Synthetic oligonucleotide
  misc_feature 1..20: note = Target: FXN; (-) strand; PAM type: NRG; PAM sequence: AAG
  source 1..20: mol_type = other DNA
aagcaataattctaaaccca

SEQ ID NO: 11991 - DNA, 20 bp, synthetic construct
  misc_feature 1..20: note = Description of Artificial Sequence: Synthetic oligonucleotide
  misc_feature 1..20: note = Target: FXN; (-) strand; PAM type: NRG; PAM sequence: AAG
  source 1..20: mol_type = other DNA
aaagaactactttaaggcct

SEQ ID NO: 11992 - DNA, 20 bp, synthetic construct
  misc_feature 1..20: note = Description of Artificial Sequence: Synthetic oligonucleotide
  misc_feature 1..20: note = Target: FXN; (-) strand; PAM type: NRG; PAM sequence: AGG
  source 1..20: mol_type = other DNA
ggcaaaaaagaactacttta

SEQ ID NO: 11993 - DNA, 20 bp, synthetic construct
  misc_feature 1..20: note = Description of Artificial Sequence: Synthetic oligonucleotide
  misc_feature 1..20: note = Target: FXN; (-) strand; PAM type: NRG; PAM sequence: AAG
  source 1..20: mol_type = other DNA
tggcaaaaaagaactacttt

SEQ ID NO: 11994 - DNA, 20 bp, synthetic construct
  misc_feature 1..20: note = Description of Artificial Sequence: Synthetic oligonucleotide
  misc_feature 1..20: note = Target: FXN; (-) strand; PAM type: NRG; PAM sequence: AAG
  source 1..20: mol_type = other DNA
attttctcccactggcaaaa

SEQ ID NO: 11995 - DNA, 20 bp, synthetic construct
  misc_feature 1..20: note = Description of Artificial Sequence: Synthetic oligonucleotide
  misc_feature 1..20: note = Target: FXN; (-) strand; PAM type: NRG; PAM sequence: TGG
  source 1..20: mol_type = other DNA
tttgagggattttctcccac

SEQ ID NO: 11996 - DNA, 20 bp, synthetic construct
  misc_feature 1..20: note = Description of Artificial Sequence: Synthetic oligonucleotide
  misc_feature 1..20: note = Target: FXN; (-) strand; PAM type: NRG; PAM sequence: GGG
  source 1..20: mol_type = other DNA
acccagaaaaccatctttga

SEQ ID NO: 11997 - DNA, 20 bp, synthetic construct
  misc_feature 1..20: note = Description of Artificial Sequence: Synthetic oligonucleotide
  misc_feature 1..20: note = Target: FXN; (-) strand; PAM type: NRG; PAM sequence: AGG
  source 1..20: mol_type = other DNA
aacccagaaaaccatctttg

SEQ ID NO: 11998 - DNA, 20 bp, synthetic construct
  misc_feature 1..20: note = Description of Artificial Sequence: Synthetic oligonucleotide
  misc_feature 1..20: note = Target: FXN; (-) strand; PAM type: NRG; PAM sequence: GAG
  source 1..20: mol_type = other DNA
caacccagaaaaccatcttt

SEQ ID NO: 11999 - DNA, 20 bp, synthetic construct
  misc_feature 1..20: note = Description of Artificial Sequence: Synthetic oligonucleotide
  misc_feature 1..20: note = Target: FXN; (-) strand; PAM type: NRG; PAM sequence: CAG
  source 1..20: mol_type = other DNA
gacaaacaaaccaaccaacc

SEQ ID NO: 12000 - DNA, 20 bp, synthetic construct
  misc_feature 1..20: note = Description of Artificial Sequence: Synthetic oligonucleotide
  misc_feature 1..20: note = Target: FXN; (-) strand; PAM type: NRG; PAM sequence: CAG
  source 1..20: mol_type = other DNA
tgtctcaaaaaacaaacaaa

SEQ ID NO: 12001 - DNA, 20 bp, synthetic construct
  misc_feature 1..20: note = Description of Artificial Sequence: Synthetic oligonucleotide
  misc_feature 1..20: note = Target: FXN; (-) strand; PAM type: NRG; PAM sequence: GAG
  source 1..20: mol_type = other DNA
tccaggctgaataacagagg

SEQ ID NO: 12002 - DNA, 20 bp, synthetic construct
  misc_feature 1..20: note = Description of Artificial Sequence: Synthetic oligonucleotide
  misc_feature 1..20: note = Target: FXN; (-) strand; PAM type: NRG; PAM sequence: GGG
  source 1..20: mol_type = other DNA
actccaggctgaataacaga

SEQ ID NO: 12003 - DNA, 20 bp, synthetic construct
  misc_feature 1..20: note = Description of Artificial Sequence: Synthetic oligonucleotide
  misc_feature 1..20: note = Target: FXN; (-) strand; PAM type: NRG; PAM sequence: AGG
  source 1..20: mol_type = other DNA
cactccaggctgaataacag

SEQ ID NO: 12004 - DNA, 20 bp, synthetic construct
  misc_feature 1..20: note = Description of Artificial Sequence: Synthetic oligonucleotide
  misc_feature 1..20: note = Target: FXN; (-) strand; PAM type: NRG; PAM sequence: GAG
  source 1..20: mol_type = other DNA
gcactccaggctgaataaca

SEQ ID NO: 12005 - DNA, 20 bp, synthetic construct
  misc_feature 1..20: note = Description of Artificial Sequence: Synthetic oligonucleotide
  misc_feature 1..20: note = Target: FXN; (-) strand; PAM type: NRG; PAM sequence: CAG
  source 1..20: mol_type = other DNA
ctgcactccaggctgaataa

SEQ ID NO: 12006 - DNA, 20 bp, synthetic construct
  misc_feature 1..20: note = Description of Artificial Sequence: Synthetic oligonucleotide
  misc_feature 1..20: note = Target: FXN; (-) strand; PAM type: NRG; PAM sequence: AGG
  source 1..20: mol_type = other DNA
agatcatgccactgcactcc

SEQ ID NO: 12007 - DNA, 20 bp, synthetic construct
  misc_feature 1..20: note = Description of Artificial Sequence: Synthetic oligonucleotide
  misc_feature 1..20: note = Target: FXN; (-) strand; PAM type: NRG; PAM sequence: CAG
  source 1..20: mol_type = other DNA
gagatcatgccactgcactc

SEQ ID NO: 12008 - DNA, 20 bp, synthetic construct
  misc_feature 1..20: note = Description of Artificial Sequence: Synthetic oligonucleotide
  misc_feature 1..20: note = Target: FXN; (-) strand; PAM type: NRG; PAM sequence: GAG
  source 1..20: mol_type = other DNA
cgagaggcagaggttgcagt

SEQ ID NO: 12009 - DNA, 20 bp, synthetic construct
  misc_feature 1..20: note = Description of Artificial Sequence: Synthetic oligonucleotide
  misc_feature 1..20: note = Target: FXN; (-) strand; PAM type: NRG; PAM sequence: CAG
  source 1..20: mol_type = other DNA
aacccgagaggcagaggttg

SEQ ID NO: 12010 - DNA, 20 bp, synthetic construct
  misc_feature 1..20: note = Description of Artificial Sequence: Synthetic oligonucleotide
  misc_feature 1..20: note = Target: FXN; (-) strand; PAM type: NRG; PAM sequence: AGG
  source 1..20: mol_type = other DNA
tgcttgaacccgagaggcag

SEQ ID NO: 12011 - DNA, 20 bp, synthetic construct
  misc_feature 1..20: note = Description of Artificial Sequence: Synthetic oligonucleotide
  misc_feature 1..20: note = Target: FXN; (-) strand; PAM type: NRG; PAM sequence: GAG
  source 1..20: mol_type = other DNA
ctgcttgaacccgagaggca

SEQ ID NO: 12012 - DNA, 20 bp, synthetic construct
  misc_feature 1..20: note = Description of Artificial Sequence: Synthetic oligonucleotide
  misc_feature 1..20: note = Target: FXN; (-) strand; PAM type: NRG; PAM sequence: CAG
  source 1..20: mol_type = other DNA
aactgcttgaacccgagagg

SEQ ID NO: 12013 - DNA, 20 bp, synthetic construct
  misc_feature 1..20: note = Description of Artificial Sequence: Synthetic oligonucleotide
  misc_feature 1..20: note = Target: FXN; (-) strand; PAM type: NRG; PAM sequence: AGG
  source 1..20: mol_type = other DNA
gagaactgcttgaacccgag

SEQ ID NO: 12014 - DNA, 20 bp, synthetic construct
  misc_feature 1..20: note = Description of Artificial Sequence: Synthetic oligonucleotide
  misc_feature 1..20: note = Target: FXN; (-) strand; PAM type: NRG; PAM sequence: GAG
  source 1..20: mol_type = other DNA
ggagaactgcttgaacccga

SEQ ID NO: 12015 - DNA, 20 bp, synthetic construct
  misc_feature 1..20: note = Description of Artificial Sequence: Synthetic oligonucleotide
  misc_feature 1..20: note = Target: FXN; (-) strand; PAM type: NRG; PAM sequence: GAG
  source 1..20: mol_type = other DNA
caggagaactgcttgaaccc

SEQ ID NO: 12016 - DNA, 20 bp, synthetic construct
  misc_feature 1..20: note = Description of Artificial Sequence: Synthetic oligonucleotide
  misc_feature 1..20: note = Target: FXN; (-) strand; PAM type: NRG; PAM sequence: GAG
  source 1..20: mol_type = other DNA
tacttgggaggttgaggcag

SEQ ID NO: 12017 - DNA, 20 bp, synthetic construct
  misc_feature 1..20: note = Description of Artificial Sequence: Synthetic oligonucleotide
  misc_feature 1..20: note = Target: FXN; (-) strand; PAM type: NRG; PAM sequence: AGG
  source 1..20: mol_type = other DNA
gctacttgggaggttgaggc

SEQ ID NO: 12018 - DNA, 20 bp, synthetic construct
  misc_feature 1..20: note = Description of Artificial Sequence: Synthetic oligonucleotide
  misc_feature 1..20: note = Target: FXN; (-) strand; PAM type: NRG; PAM sequence: CAG
  source 1..20: mol_type = other DNA
agctacttgggaggttgagg

SEQ ID NO: 12019 - DNA, 20 bp, synthetic construct
  misc_feature 1..20: note = Description of Artificial Sequence: Synthetic oligonucleotide
  misc_feature 1..20: note = Target: FXN; (-) strand; PAM type: NRG; PAM sequence: AGG
  source 1..20: mol_type = other DNA
tccagctacttgggaggttg

SEQ ID NO: 12020 - DNA, 20 bp, synthetic construct
  misc_feature 1..20: note = Description of Artificial Sequence: Synthetic oligonucleotide
  misc_feature 1..20: note = Target: FXN; (-) strand; PAM type: NRG; PAM sequence: GAG
  source 1..20: mol_type = other DNA
ttccagctacttgggaggtt

SEQ ID NO: 12021 - DNA, 20 bp, synthetic construct
  misc_feature 1..20: note = Description of Artificial Sequence: Synthetic oligonucleotide
  misc_feature 1..20: note = Target: FXN; (-) strand; PAM type: NRG; PAM sequence: AGG
  source 1..20: mol_type = other DNA
tataattccagctacttggg

SEQ ID NO: 12022 - DNA, 20 bp, synthetic construct
  misc_feature 1..20: note = Description of Artificial Sequence: Synthetic oligonucleotide
  misc_feature 1..20: note = Target: FXN; (-) strand; PAM type: NRG; PAM sequence: GAG
  source 1..20: mol_type = other DNA
ctataattccagctacttgg

SEQ ID NO: 12023 - DNA, 20 bp, synthetic construct
  misc_feature 1..20: note = Description of Artificial Sequence: Synthetic oligonucleotide
  misc_feature 1..20: note = Target: FXN; (-) strand; PAM type: NRG; PAM sequence: GGG
  source 1..20: mol_type = other DNA
gcctataattccagctactt

SEQ ID NO: 12024 - DNA, 20 bp, synthetic construct
  misc_feature 1..20: note = Description of Artificial Sequence: Synthetic oligonucleotide
  misc_feature 1..20: note = Target: FXN; (-) strand; PAM type: NRG; PAM sequence: TGG
  source 1..20: mol_type = other DNA
tgcctataattccagctact

SEQ ID NO: 12025 - DNA, 20 bp, synthetic construct
  misc_feature 1..20: note = Description of Artificial Sequence: Synthetic oligonucleotide
  misc_feature 1..20: note = Target: FXN; (-) strand; PAM type: NRG; PAM sequence: CAG
  source 1..20: mol_type = other DNA
ggggcgtgtgcctataattc

SEQ ID NO: 12026 - DNA, 20 bp, synthetic construct
  misc_feature 1..20: note = Description of Artificial Sequence: Synthetic oligonucleotide
  misc_feature 1..20: note = Target: FXN; (-) strand; PAM type: NRG; PAM sequence: GGG
  source 1..20: mol_type = other DNA
caaaaattagctgggtgtgg

SEQ ID NO: 12027 - DNA, 20 bp, synthetic construct
  misc_feature 1..20: note = Description of Artificial Sequence: Synthetic oligonucleotide
  misc_feature 1..20: note = Target: FXN; (-) strand; PAM type: NRG; PAM sequence: GGG
  source 1..20: mol_type = other DNA
acaaaaattagctgggtgtg

SEQ ID NO: 12028 - DNA, 20 bp, synthetic construct
  misc_feature 1..20: note = Description of Artificial Sequence: Synthetic oligonucleotide
  misc_feature 1..20: note = Target: FXN; (-) strand; PAM type: NRG; PAM sequence: GGG
  source 1..20: mol_type = other DNA
tacaaaaattagctgggtgt

SEQ ID NO: 12029 - DNA, 20 bp, synthetic construct
  misc_feature 1..20: note = Description of Artificial Sequence: Synthetic oligonucleotide
  misc_feature 1..20: note = Target: FXN; (-) strand; PAM type: NRG; PAM sequence: TGG
  source 1..20: mol_type = other DNA
atacaaaaattagctgggtg

SEQ ID NO: 12030 - DNA, 20 bp, synthetic construct
  misc_feature 1..20: note = Description of Artificial Sequence: Synthetic oligonucleotide
  misc_feature 1..20: note = Target: FXN; (-) strand; PAM type: NRG; PAM sequence: GGG
  source 1..20: mol_type = other DNA
taaaaatacaaaaattagct

SEQ ID NO: 12031 - DNA, 20 bp, synthetic construct
  misc_feature 1..20: note = Description of Artificial Sequence: Synthetic oligonucleotide
  misc_feature 1..20: note = Target: FXN; (-) strand; PAM type: NRG; PAM sequence: TGG
  source 1..20: mol_type = other DNA
ctaaaaatacaaaaattagc

SEQ ID NO: 12032 - DNA, 20 bp, synthetic construct
  misc_feature 1..20: note = Description of Artificial Sequence: Synthetic oligonucleotide
  misc_feature 1..20: note = Target: FXN; (-) strand; PAM type: NRG; PAM sequence: TAG
  source 1..20: mol_type = other DNA
tctactaaaaatacaaaaat

SEQ ID NO: 12033 - DNA, 20 bp, synthetic construct
  misc_feature 1..20: note = Description of Artificial Sequence: Synthetic oligonucleotide
  misc_feature 1..20: note = Target: FXN; (-) strand; PAM type: NRG; PAM sequence: TGG
  source 1..20: mol_type = other DNA
caaaaccagcctggccaacg

SEQ ID NO: 12034 - DNA, 20 bp, synthetic construct
  misc_feature 1..20: note = Description of Artificial Sequence: Synthetic oligonucleotide
  misc_feature 1..20: note = Target: FXN; (-) strand; PAM type: NRG; PAM sequence: TGG
  source 1..20: mol_type = other DNA
tcaggagttcaaaaccagcc

SEQ ID NO: 12035 - DNA, 20 bp, synthetic construct
  misc_feature 1..20: note = Description of Artificial Sequence: Synthetic oligonucleotide
  misc_feature 1..20: note = Target: FXN; (-) strand; PAM type: NRG; PAM sequence: CAG
  source 1..20: mol_type = other DNA
tgagttcaggagttcaaaac

SEQ ID NO: 12036 - DNA, 20 bp, synthetic construct
  misc_feature 1..20: note = Description of Artificial Sequence: Synthetic oligonucleotide
  misc_feature 1..20: note = Target: FXN; (-) strand; PAM type: NRG; PAM sequence: GAG
  source 1..20: mol_type = other DNA
ggaggattacttgagttcag

SEQ ID NO: 12037 - DNA, 20 bp, synthetic construct
  misc_feature 1..20: note = Description of Artificial Sequence: Synthetic oligonucleotide
  misc_feature 1..20: note = Target: FXN; (-) strand; PAM type: NRG; PAM sequence: AGG
  source 1..20: mol_type = other DNA
tgggaggattacttgagttc

SEQ ID NO: 12038 - DNA, 20 bp, synthetic construct
  misc_feature 1..20: note = Description of Artificial Sequence: Synthetic oligonucleotide
  misc_feature 1..20: note = Target: FXN; (-) strand; PAM type: NRG; PAM sequence: CAG
  source 1..20: mol_type = other DNA
gtgggaggattacttgagtt

SEQ ID NO: 12039 - DNA, 20 bp, synthetic construct
  misc_feature 1..20: note = Description of Artificial Sequence: Synthetic oligonucleotide
  misc_feature 1..20: note = Target: FXN; (-) strand; PAM type: NRG; PAM sequence: GAG
  source 1..20: mol_type = other DNA
ctgaggtgggaggattactt

SEQ ID NO: 12040 - DNA, 20 bp, synthetic construct
  misc_feature 1..20: note = Description of Artificial Sequence: Synthetic oligonucleotide
  misc_feature 1..20: note = Target: FXN; (-) strand; PAM type: NRG; PAM sequence: AGG
  source 1..20: mol_type = other DNA
ctttgggaggctgaggtggg

SEQ ID NO: 12041 - DNA, 20 bp, synthetic construct
  misc_feature 1..20: note = Description of Artificial Sequence: Synthetic oligonucleotide
  misc_feature 1..20: note = Target: FXN; (-) strand; PAM type: NRG; PAM sequence: GAG
  source 1..20: mol_type = other DNA
actttgggaggctgaggtgg

SEQ ID NO: 12042 - DNA, 20 bp, synthetic construct
  misc_feature 1..20: note = Description of Artificial Sequence: Synthetic oligonucleotide
  misc_feature 1..20: note = Target: FXN; (-) strand; PAM type: NRG; PAM sequence: GGG
  source 1..20: mol_type = other DNA
gcactttgggaggctgaggt

SEQ ID NO: 12043 - DNA, 20 bp, synthetic construct
  misc_feature 1..20: note = Description of Artificial Sequence: Synthetic oligonucleotide
  misc_feature 1..20: note = Target: FXN; (-) strand; PAM type: NRG; PAM sequence: TGG
  source 1..20: mol_type = other DNA
agcactttgggaggctgagg

SEQ ID NO: 12044 - DNA, 20 bp, synthetic construct
  misc_feature 1..20: note = Description of Artificial Sequence: Synthetic oligonucleotide
  misc_feature 1..20: note = Target: FXN; (-) strand; PAM type: NRG; PAM sequence: AGG
  source 1..20: mol_type = other DNA
cctagcactttgggaggctg

SEQ ID NO: 12045 - DNA, 20 bp, synthetic construct
  misc_feature 1..20: note = Description of Artificial Sequence: Synthetic oligonucleotide
  misc_feature 1..20: note = Target: FXN; (-) strand; PAM type: NRG; PAM sequence: GAG
  source 1..20: mol_type = other DNA
tcctagcactttgggaggct

SEQ ID NO: 12046 - DNA, 20 bp, synthetic construct
  misc_feature 1..20: note = Description of Artificial Sequence: Synthetic oligonucleotide
  misc_feature 1..20: note = Target: FXN; (-) strand; PAM type: NRG; PAM sequence: AGG
  source 1..20: mol_type = other DNA
tgtaatcctagcactttggg

SEQ ID NO: 12047 - DNA, 20 bp, synthetic construct
  misc_feature 1..20: note = Description of Artificial Sequence: Synthetic oligonucleotide
  misc_feature 1..20: note = Target: FXN; (-) strand; PAM type: NRG; PAM sequence: GAG
  source 1..20: mol_type = other DNA
ctgtaatcctagcactttgg

SEQ ID NO: 12048 - DNA, 20 bp, synthetic construct
  misc_feature 1..20: note = Description of Artificial Sequence: Synthetic oligonucleotide
  misc_feature 1..20: note = Target: FXN; (-) strand; PAM type: NRG; PAM sequence: GGG
  source 1..20: mol_type = other DNA
acctgtaatcctagcacttt

SEQ ID NO: 12049 - DNA, 20 bp, synthetic construct
  misc_feature 1..20: note = Description of Artificial Sequence: Synthetic oligonucleotide
  misc_feature 1..20: note = Target: FXN; (-) strand; PAM type: NRG; PAM sequence: TGG
  source 1..20: mol_type = other DNA
cacctgtaatcctagcactt

SEQ ID NO: 12050 - DNA, 20 bp, synthetic construct
  misc_feature 1..20: note = Description of Artificial Sequence: Synthetic oligonucleotide
  misc_feature 1..20: note = Target: FXN; (-) strand; PAM type: NRG; PAM sequence: TAG
  source 1..20: mol_type = other DNA
gtggctcacacctgtaatcc

SEQ ID NO: 12051 - DNA, 20 bp, synthetic construct
  misc_feature 1..20: note = Description of Artificial Sequence: Synthetic oligonucleotide
  misc_feature 1..20: note = Target: FXN; (-) strand; PAM type: NRG; PAM sequence: TGG
  source 1..20: mol_type = other DNA
ctttgaggagccaggcgcgg

SEQ ID NO: 12052 - DNA, 20 bp, synthetic construct
  misc_feature 1..20: note = Description of Artificial Sequence: Synthetic oligonucleotide
  misc_feature 1..20: note = Target: FXN; (-) strand; PAM type: NRG; PAM sequence: CGG
  source 1..20: mol_type = other DNA
catctttgaggagccaggcg

SEQ ID NO: 12053 - DNA, 20 bp, synthetic construct
  misc_feature 1..20: note = Description of Artificial Sequence: Synthetic oligonucleotide
  misc_feature 1..20: note = Target: FXN; (-) strand; PAM type: NRG; PAM sequence: AGG
  source 1..20: mol_type = other DNA
attaacatctttgaggagcc

SEQ ID NO: 12054 - DNA, 20 bp, synthetic construct
  misc_feature 1..20: note = Description of Artificial Sequence: Synthetic oligonucleotide
  misc_feature 1..20: note = Target: FXN; (-) strand; PAM type: NRG; PAM sequence: CAG
  source 1..20: mol_type = other DNA
gattaacatctttgaggagc

SEQ ID NO: 12055 - DNA, 20 bp, synthetic construct
  misc_feature 1..20: note = Description of Artificial Sequence: Synthetic oligonucleotide
  misc_feature 1..20: note = Target: FXN; (-) strand; PAM type: NRG; PAM sequence: GAG
  source 1..20: mol_type = other DNA
agaggattaacatctttgag

SEQ ID NO: 12056 - DNA, 20 bp, synthetic construct
  misc_feature 1..20: note = Description of Artificial Sequence: Synthetic oligonucleotide
  misc_feature 1..20: note = Target: FXN; (-) strand; PAM type: NRG; PAM sequence: AGG
  source 1..20: mol_type = other DNA
caagaggattaacatctttg

SEQ ID NO: 12057 - DNA, 20 bp, synthetic construct
  misc_feature 1..20: note = Description of Artificial Sequence: Synthetic oligonucleotide
  misc_feature 1..20: note = Target: FXN; (-) strand; PAM type: NRG; PAM sequence: GAG
  source 1..20: mol_type = other DNA
tcaagaggattaacatcttt

SEQ ID NO: 12058 - DNA, 20 bp, synthetic construct
  misc_feature 1..20: note = Description of Artificial Sequence: Synthetic oligonucleotide
  misc_feature 1..20: note = Target: FXN; (-) strand; PAM type: NRG; PAM sequence: AGG
  source 1..20: mol_type = other DNA
attagtcaattgccatcaag

SEQ ID NO: 12059 - DNA, 20 bp, synthetic construct
  misc_feature 1..20: note = Description of Artificial Sequence: Synthetic oligonucleotide
  misc_feature 1..20: note = Target: FXN; (-) strand; PAM type: NRG; PAM sequence: GAG
  source 1..20: mol_type = other DNA
tattagtcaattgccatcaa

SEQ ID NO: 12060 - DNA, 20 bp, synthetic construct
  misc_feature 1..20: note = Description of Artificial Sequence: Synthetic oligonucleotide
  misc_feature 1..20: note = Target: FXN; (-) strand; PAM type: NRG; PAM sequence: AAG
  source 1..20: mol_type = other DNA
ggtattagtcaattgccatc

SEQ ID NO: 12061 - DNA, 20 bp, synthetic construct
  misc_feature 1..20: note = Description of Artificial Sequence: Synthetic oligonucleotide
  misc_feature 1..20: note = Target: FXN; (-) strand; PAM type: NRG; PAM sequence: TAG
  source 1..20: mol_type = other DNA
ttcgtgacattttctggtat

SEQ ID NO: 12062 - DNA, 20 bp, synthetic construct
  misc_feature 1..20: note = Description of Artificial Sequence: Synthetic oligonucleotide
  misc_feature 1..20: note = Target: FXN; (-) strand; PAM type: NRG; PAM sequence: TGG
  source 1..20: mol_type = other DNA
gcacgcttcgtgacattttc

SEQ ID NO: 12063 - DNA, 20 bp, synthetic construct
  misc_feature 1..20: note = Description of Artificial Sequence: Synthetic oligonucleotide
  misc_feature 1..20: note = Target: FXN; (-) strand; PAM type: NRG; PAM sequence: TGG
  source 1..20: mol_type = other DNA
tttctatcgctttagtctga

SEQ ID NO: 12064 - DNA, 20 bp, synthetic construct
  misc_feature 1..20: note = Description of Artificial Sequence: Synthetic oligonucleotide
  misc_feature 1..20: note = Target: FXN; (-) strand; PAM type: NRG; PAM sequence: TAG
  source 1..20: mol_type = other DNA
caatactatttctatcgctt

SEQ ID NO: 12065 - DNA, 20 bp, synthetic construct
  misc_feature 1..20: note = Description of Artificial Sequence: Synthetic oligonucleotide
  misc_feature 1..20: note = Target: FXN; (-) strand; PAM type: NRG; PAM sequence: CAG
  source 1..20: mol_type = other DNA
tgtggagtgccttctccatt

SEQ ID NO: 12066 - DNA, 20 bp, synthetic construct
  misc_feature 1..20: note = Description of Artificial Sequence: Synthetic oligonucleotide
  misc_feature 1..20: note = Target: FXN; (-) strand; PAM type: NRG; PAM sequence: GAG
  source 1..20: mol_type = other DNA
gttgcctcctccattatgtg

SEQ ID NO: 12067 - DNA, 20 bp, synthetic construct
  misc_feature 1..20: note = Description of Artificial Sequence: Synthetic oligonucleotide
  misc_feature 1..20: note = Target: FXN; (-) strand; PAM type: NRG; PAM sequence: TGG
  source 1..20: mol_type = other DNA
tggttgcctcctccattatg

SEQ ID NO: 12068 - DNA, 20 bp, synthetic construct
  misc_feature 1..20: note = Description of Artificial Sequence: Synthetic oligonucleotide
  misc_feature 1..20: note = Target: FXN; (-) strand; PAM type: NRG; PAM sequence: TGG
  source 1..20: mol_type = other DNA
ttgataccttctctaagact

SEQ ID NO: 12069 - DNA, 20 bp, synthetic construct
  misc_feature 1..20: note = Description of Artificial Sequence: Synthetic oligonucleotide
  misc_feature 1..20: note = Target: FXN; (-) strand; PAM type: NRG; PAM sequence: AAG
  source 1..20: mol_type = other DNA
tcaggcttgataccttctct

SEQ ID NO: 12070 - DNA, 20 bp, synthetic construct
  misc_feature 1..20: note = Description of Artificial Sequence: Synthetic oligonucleotide
  misc_feature 1..20: note = Target: FXN; (-) strand; PAM type: NRG; PAM sequence: AGG
  source 1..20: mol_type = other DNA
ccctcactgtccttatagtc

SEQ ID NO: 12071 - DNA, 20 bp, synthetic construct
  misc_feature 1..20: note = Description of Artificial Sequence: Synthetic oligonucleotide
  misc_feature 1..20: note = Target: FXN; (-) strand; PAM type: NRG; PAM sequence: CAG
  source 1..20: mol_type = other DNA
tccctcactgtccttatagt

SEQ ID NO: 12072 - DNA, 20 bp, synthetic construct
  misc_feature 1..20: note = Description of Artificial Sequence: Synthetic oligonucleotide
  misc_feature 1..20: note = Target: FXN; (-) strand; PAM type: NRG; PAM sequence: TAG
  source 1..20: mol_type = other DNA
caattccctcactgtcctta

SEQ ID NO: 12073 - DNA, 20 bp, synthetic construct
  misc_feature 1..20: note = Description of Artificial Sequence: Synthetic oligonucleotide
  misc_feature 1..20: note = Target: FXN; (-) strand; PAM type: NRG; PAM sequence: AGG
  source 1..20: mol_type = other DNA
aattactgaatctacttgaa

SEQ ID NO: 12074 - DNA, 20 bp, synthetic construct
  misc_feature 1..20: note = Description of Artificial Sequence: Synthetic oligonucleotide
  misc_feature 1..20: note = Target: FXN; (-) strand; PAM type: NRG; PAM sequence: AAG
  source 1..20: mol_type = other DNA
caattactgaatctacttga

SEQ ID NO: 12075 - DNA, 20 bp, synthetic construct
  misc_feature 1..20: note = Description of Artificial Sequence: Synthetic oligonucleotide
  misc_feature 1..20: note = Target: FXN; (-) strand; PAM type: NRG; PAM sequence: CAG
  source 1..20: mol_type = other DNA
actgcattttttgctgctaa

SEQ ID NO: 12076 - DNA, 20 bp, synthetic construct
  misc_feature 1..20: note = Description of Artificial Sequence: Synthetic oligonucleotide
  misc_feature 1..20: note = Target: FXN; (-) strand; PAM type: NRG; PAM sequence: AGG
  source 1..20: mol_type = other DNA
agcactttaaagccctgccc

SEQ ID NO: 12077 - DNA, 20 bp, synthetic construct
  misc_feature 1..20: note = Description of Artificial Sequence: Synthetic oligonucleotide
  misc_feature 1..20: note = Target: FXN; (-) strand; PAM type: NRG; PAM sequence: CAG
  source 1..20: mol_type = other DNA
aagcactttaaagccctgcc

SEQ ID NO: 12078 - DNA, 20 bp, synthetic construct
  misc_feature 1..20: note = Description of Artificial Sequence: Synthetic oligonucleotide
  misc_feature 1..20: note = Target: FXN; (-) strand; PAM type: NRG; PAM sequence: AAG
  source 1..20: mol_type = other DNA
ctgcctgtgcaagcacttta

SEQ ID NO: 12079 - DNA, 20 bp, synthetic construct
  misc_feature 1..20: note = Description of Artificial Sequence: Synthetic oligonucleotide
  misc_feature 1..20: note = Target: FXN; (-) strand; PAM type: NRG; PAM sequence: AAG
  source 1..20: mol_type = other DNA
ccctctagggctgcctgtgc

SEQ ID NO: 12080 - DNA, 20 bp, synthetic construct
  misc_feature 1..20: note = Description of Artificial Sequence: Synthetic oligonucleotide
  misc_feature 1..20: note = Target: FXN; (-) strand; PAM type: NRG; PAM sequence: GGG
  source 1..20: mol_type = other DNA
ccaagcagcccggccctcta

SEQ ID NO: 12081 - DNA, 20 bp, synthetic construct
  misc_feature 1..20: note = Description of Artificial Sequence: Synthetic oligonucleotide
  misc_feature 1..20: note = Target: FXN; (-) strand; PAM type: NRG; PAM sequence: AGG
  source 1..20: mol_type = other DNA
cccaagcagcccggccctct

SEQ ID NO: 12082 - DNA, 20 bp, synthetic construct
  misc_feature 1..20: note = Description of Artificial Sequence: Synthetic oligonucleotide
  misc_feature 1..20: note = Target: FXN; (-) strand; PAM type: NRG; PAM sequence: TAG
  source 1..20: mol_type = other DNA
tcccaagcagcccggccctc

SEQ ID NO: 12083 - DNA, 20 bp, synthetic construct
  misc_feature 1..20: note = Description of Artificial Sequence: Synthetic oligonucleotide
  misc_feature 1..20: note = Target: FXN; (-) strand; PAM type: NRG; PAM sequence: CGG
  source 1..20: mol_type = other DNA
gtaagagttcccaagcagcc

SEQ ID NO: 12084 - DNA, 20 bp, synthetic construct
  misc_feature 1..20: note = Description of Artificial Sequence: Synthetic oligonucleotide
  misc_feature 1..20: note = Target: FXN; (-) strand; PAM type: NRG; PAM sequence: CAG
  source 1..20: mol_type = other DNA
agtttgtaagagttcccaag

SEQ ID NO: 12085 - DNA, 20 bp, synthetic construct
  misc_feature 1..20: note = Description of Artificial Sequence: Synthetic oligonucleotide
  misc_feature 1..20: note = Target: FXN; (-) strand; PAM type: NRG; PAM sequence: AAG
  source 1..20: mol_type = other DNA
gtcagtttgtaagagttccc

SEQ ID NO: 12086 - DNA, 20 bp, synthetic construct
  misc_feature 1..20: note = Description of Artificial Sequence: Synthetic oligonucleotide
  misc_feature 1..20: note = Target: FXN; (-) strand; PAM type: NRG; PAM sequence: GAG
  source 1..20: mol_type = other DNA
gttggtaggtcagtttgtaa

SEQ ID NO: 12087 - DNA, 20 bp, synthetic construct
  misc_feature 1..20: note = Description of Artificial Sequence: Synthetic oligonucleotide
  misc_feature 1..20: note = Target: FXN; (-) strand; PAM type: NRG; PAM sequence: AAG
  source 1..20: mol_type = other DNA
aagttggtaggtcagtttgt

SEQ ID NO: 12088 - DNA, 20 bp, synthetic construct
  misc_feature 1..20: note = Description of Artificial Sequence: Synthetic oligonucleotide
  misc_feature 1..20: note = Target: FXN; (-) strand; PAM type: NRG; PAM sequence: CAG
  source 1..20: mol_type = other DNA
ggatgctcaagttggtaggt

SEQ ID NO: 12089 - DNA, 20 bp, synthetic construct
  misc_feature 1..20: note = Description of Artificial Sequence: Synthetic oligonucleotide
  misc_feature 1..20: note = Target: FXN; (-) strand; PAM type: NRG; PAM sequence: AGG
  source 1..20: mol_type = other DNA
ctgtggatgctcaagttggt

SEQ ID NO: 12090 - DNA, 20 bp, synthetic construct
  misc_feature 1..20: note = Description of Artificial Sequence: Synthetic oligonucleotide
  misc_feature 1..20: note = Target: FXN; (-) strand; PAM type: NRG; PAM sequence: TAG
  source 1..20: mol_type = other DNA
gctgtggatgctcaagttgg

SEQ ID NO: 12091 - DNA, 20 bp, synthetic construct
  misc_feature 1..20: note = Description of Artificial Sequence: Synthetic oligonucleotide
  misc_feature 1..20: note = Target: FXN; (-) strand; PAM type: NRG; PAM sequence: TGG
  source 1..20: mol_type = other DNA
caggctgtggatgctcaagt

SEQ ID NO: 12092 - DNA, 20 bp, synthetic construct
  misc_feature 1..20: note = Description of Artificial Sequence: Synthetic oligonucleotide
  misc_feature 1..20: note = Target: FXN; (-) strand; PAM type: NRG; PAM sequence: AAG
  source 1..20: mol_type = other DNA
tgatcaggctgtggatgctc

SEQ ID NO: 12093 - DNA, 20 bp, synthetic construct
  misc_feature 1..20: note = Description of Artificial Sequence: Synthetic oligonucleotide
  misc_feature 1..20: note = Target: FXN; (-) strand; PAM type: NRG; PAM sequence: TGG
  source 1..20: mol_type = other DNA
ccccacctctgatcaggctg

SEQ ID NO: 12094 - DNA, 20 bp, synthetic construct
  misc_feature 1..20: note = Description of Artificial Sequence: Synthetic oligonucleotide
  misc_feature 1..20: note = Target: FXN; (-) strand; PAM type: NRG; PAM sequence: AGG
  source 1..20: mol_type = other DNA
taactcccccacctctgatc

SEQ ID NO: 12095 - DNA, 20 bp, synthetic construct
  misc_feature 1..20: note = Description of Artificial Sequence: Synthetic oligonucleotide
  misc_feature 1..20: note = Target: FXN; (-) strand; PAM type: NRG; PAM sequence: CAG
  source 1..20: mol_type = other DNA
ttaactcccccacctctgat

SEQ ID NO: 12096 - DNA, 20 bp, synthetic construct
  misc_feature 1..20: note = Description of Artificial Sequence: Synthetic oligonucleotide
  misc_feature 1..20: note = Target: FXN; (-) strand; PAM type: NRG; PAM sequence: AGG
  source 1..20: mol_type = other DNA
agtagaggctaggggagaga

SEQ ID NO: 12097 - DNA, 20 bp, synthetic construct
  misc_feature 1..20: note = Description of Artificial Sequence: Synthetic oligonucleotide
  misc_feature 1..20: note = Target: FXN; (-) strand; PAM type: NRG; PAM sequence: AAG
  source 1..20: mol_type = other DNA
tagtagaggctaggggagag

SEQ ID NO: 12098 - DNA, 20 bp, synthetic construct
  misc_feature 1..20: note = Description of Artificial Sequence: Synthetic oligonucleotide
  misc_feature 1..20: note = Target: FXN; (-) strand; PAM type: NRG; PAM sequence: GAG
  source 1..20: mol_type = other DNA
ctctagtagaggctagggga

SEQ ID NO: 12099 - DNA, 20 bp, synthetic construct
  misc_feature 1..20: note = Description of Artificial Sequence: Synthetic oligonucleotide
  misc_feature 1..20: note = Target: FXN; (-) strand; PAM type: NRG; PAM sequence: GAG
  source 1..20: mol_type = other DNA
ggctctagtagaggctaggg

SEQ ID NO: 12100 - DNA, 20 bp, synthetic construct
  misc_feature 1..20: note = Description of Artificial Sequence: Synthetic oligonucleotide
  misc_feature 1..20: note = Target: FXN; (-) strand; PAM type: NRG; PAM sequence: GGG
  source 1..20: mol_type = other DNA
caggctctagtagaggctag

SEQ ID NO: 12101 - DNA, 20 bp, synthetic construct
  misc_feature 1..20: note = Description of Artificial Sequence: Synthetic oligonucleotide
  misc_feature 1..20: note = Target: FXN; (-) strand; PAM type: NRG; PAM sequence: GGG
  source 1..20: mol_type = other DNA
acaggctctagtagaggcta

SEQ ID NO: 12102 - DNA, 20 bp, synthetic construct
  misc_feature 1..20: note = Description of Artificial Sequence: Synthetic oligonucleotide
  misc_feature 1..20: note = Target: FXN; (-) strand; PAM type: NRG; PAM sequence: AGG
  source 1..20: mol_type = other DNA
tacaggctctagtagaggct

SEQ ID NO: 12103 - DNA, 20 bp, synthetic construct
  misc_feature 1..20: note = Description of Artificial Sequence: Synthetic oligonucleotide
  misc_feature 1..20: note = Target: FXN; (-) strand; PAM type: NRG; PAM sequence: TAG
  source 1..20: mol_type = other DNA
ttacaggctctagtagaggc

SEQ ID NO: 12104 - DNA, 20 bp, synthetic construct
  misc_feature 1..20: note = Description of Artificial Sequence: Synthetic oligonucleotide
  misc_feature 1..20: note = Target: FXN; (-) strand; PAM type: NRG; PAM sequence: AGG
  source 1..20: mol_type = other DNA
gcagttacaggctctagtag

SEQ ID NO: 12105 - DNA, 20 bp, synthetic construct
  misc_feature 1..20: note = Description of Artificial Sequence: Synthetic oligonucleotide
  misc_feature 1..20: note = Target: FXN; (-) strand; PAM type: NRG; PAM sequence: GAG
  source 1..20: mol_type = other DNA
tgcagttacaggctctagta

SEQ ID NO: 12106 - DNA, 20 bp, synthetic construct
  misc_feature 1..20: note = Description of Artificial Sequence: Synthetic oligonucleotide
  misc_feature 1..20: note = Target: FXN; (-) strand; PAM type: NRG; PAM sequence: TAG
  source 1..20: mol_type = other DNA
cctgcagttacaggctctag

SEQ ID NO: 12107 - DNA, 20 bp, synthetic construct
  misc_feature 1..20: note = Description of Artificial Sequence: Synthetic oligonucleotide
  misc_feature 1..20: note = Target: FXN; (-) strand; PAM type: NRG; PAM sequence: TAG
  source 1..20: mol_type = other DNA
ttccctgcagttacaggctc

SEQ ID NO: 12108 - DNA, 20 bp, synthetic construct
  misc_feature 1..20: note = Description of Artificial Sequence: Synthetic oligonucleotide
  misc_feature 1..20: note = Target: FXN; (-) strand; PAM type: NRG; PAM sequence: AGG
  source 1..20: mol_type = other DNA
cttggtttccctgcagttac

SEQ ID NO: 12109 - DNA, 20 bp, synthetic construct
  misc_feature 1..20: note = Description of Artificial Sequence: Synthetic oligonucleotide
  misc_feature 1..20: note = Target: FXN; (-) strand; PAM type: NRG; PAM sequence: CAG
  source 1..20: mol_type = other DNA
acttggtttccctgcagtta

SEQ ID NO: 12110 - DNA, 20 bp, synthetic construct
  misc_feature 1..20: note = Description of Artificial Sequence: Synthetic oligonucleotide
  misc_feature 1..20: note = Target: FXN; (-) strand; PAM type: NRG; PAM sequence: CAG
  source 1..20: mol_type = other DNA
cctgcaacttggtttccctg

SEQ ID NO: 12111 - DNA, 20 bp, synthetic construct
  misc_feature 1..20: note = Description of Artificial Sequence: Synthetic oligonucleotide
  misc_feature 1..20: note = Target: FXN; (-) strand; PAM type: NRG; PAM sequence: TGG
  source 1..20: mol_type = other DNA
gcagagtttagcctgcaact

SEQ ID NO: 12112 - DNA, 20 bp, synthetic construct
  misc_feature 1..20: note = Description of Artificial Sequence: Synthetic oligonucleotide
  misc_feature 1..20: note = Target: FXN; (-) strand; PAM type: NRG; PAM sequence: TAG
  source 1..20: mol_type = other DNA
ctgcatgtgtgggcagagtt

SEQ ID NO: 12113 - DNA, 20 bp, synthetic construct
  misc_feature 1..20: note = Description of Artificial Sequence: Synthetic oligonucleotide
  misc_feature 1..20: note = Target: FXN; (-) strand; PAM type: NRG; PAM sequence: GAG
  source 1..20: mol_type = other DNA
aatgtctgcatgtgtgggca

SEQ ID NO: 12114 - DNA, 20 bp, synthetic construct
  misc_feature 1..20: note = Description of Artificial Sequence: Synthetic oligonucleotide
  misc_feature 1..20: note = Target: FXN; (-) strand; PAM type: NRG; PAM sequence: CAG
  source 1..20: mol_type = other DNA
tcaatgtctgcatgtgtggg

SEQ ID NO: 12115 - DNA, 20 bp, synthetic construct
  misc_feature 1..20: note = Description of Artificial Sequence: Synthetic oligonucleotide
  misc_feature 1..20: note = Target: FXN; (-) strand; PAM type: NRG; PAM sequence: GGG
  source 1..20: mol_type = other DNA
taatcaatgtctgcatgtgt

SEQ ID NO: 12116 - DNA, 20 bp, synthetic construct
  misc_feature 1..20: note = Description of Artificial Sequence: Synthetic oligonucleotide
  misc_feature 1..20: note = Target: FXN; (-) strand; PAM type: NRG; PAM sequence: TGG
  source 1..20: mol_type = other DNA
ctaatcaatgtctgcatgtg

SEQ ID NO: 12117 - DNA, 20 bp, synthetic construct
  misc_feature 1..20: note = Description of Artificial Sequence: Synthetic oligonucleotide
  misc_feature 1..20: note = Target: FXN; (-) strand; PAM type: NRG; PAM sequence: TAG
  source 1..20: mol_type = other DNA
aggtttcatgactgtttttg

SEQ ID NO: 12118 - DNA, 20 bp, synthetic construct
  misc_feature 1..20: note = Description of Artificial Sequence: Synthetic oligonucleotide
  misc_feature 1..20: note = Target: FXN; (-) strand; PAM type: NRG; PAM sequence: AGG
  source 1..20: mol_type = other DNA
ttcactaatcctataaaaac

SEQ ID NO: 12119 - DNA, 20 bp, synthetic construct
  misc_feature 1..20: note = Description of Artificial Sequence: Synthetic oligonucleotide
  misc_feature 1..20: note = Target: FXN; (-) strand; PAM type: NRG; PAM sequence: CAG
  source 1..20: mol_type = other DNA
cttcactaatcctataaaaa

SEQ ID NO: 12120 - DNA, 20 bp, synthetic construct
  misc_feature 1..20: note = Description of Artificial Sequence: Synthetic oligonucleotide
  misc_feature 1..20: note = Target: FXN; (-) strand; PAM type: NRG; PAM sequence: GGG
  source 1..20: mol_type = other DNA
aaagtactctggtcaaactg

SEQ ID NO: 12121 - DNA, 20 bp, synthetic construct
  misc_feature 1..20: note = Description of Artificial Sequence: Synthetic oligonucleotide
  misc_feature 1..20: note = Target: FXN; (-) strand; PAM type: NRG; PAM sequence: GGG
  source 1..20: mol_type = other DNA
caaagtactctggtcaaact

SEQ ID NO: 12122 - DNA, 20 bp, synthetic construct
  misc_feature 1..20: note = Description of Artificial Sequence: Synthetic oligonucleotide
  misc_feature 1..20: note = Target: FXN; (-) strand; PAM type: NRG; PAM sequence: TGG
  source 1..20: mol_type = other DNA
gcaaagtactctggtcaaac

SEQ ID NO: 12123 - DNA, 20 bp, synthetic construct
  misc_feature 1..20: note = Description of Artificial Sequence: Synthetic oligonucleotide
  misc_feature 1..20: note = Target: FXN; (-) strand; PAM type: NRG; PAM sequence: TGG
  source 1..20: mol_type = other DNA
aacattcatgcaaagtactc

SEQ ID NO: 12124 - DNA, 20 bp, synthetic construct
  misc_feature 1..20: note = Description of Artificial Sequence: Synthetic oligonucleotide
  misc_feature 1..20: note = Target: FXN; (-) strand; PAM type: NRG; PAM sequence: AAG
  source 1..20: mol_type = other DNA
tctaacaaaacattcatgca

SEQ ID NO: 12125 - DNA, 20 bp, synthetic construct
  misc_feature 1..20: note = Description of Artificial Sequence: Synthetic oligonucleotide
  misc_feature 1..20: note = Target: FXN; (-) strand; PAM type: NRG; PAM sequence: TGG
  source 1..20: mol_type = other DNA
aaacgcagctgctagaatat

SEQ ID NO: 12126 - DNA, 20 bp, synthetic construct
  misc_feature 1..20: note = Description of Artificial Sequence: Synthetic oligonucleotide
  misc_feature 1..20: note = Target: FXN; (-) strand; PAM type: NRG; PAM sequence: TAG
  source 1..20: mol_type = other DNA
agtaaaccaaacgcagctgc

SEQ ID NO: 12127 - DNA, 20 bp, synthetic construct
  misc_feature 1..20: note = Description of Artificial Sequence: Synthetic oligonucleotide
  misc_feature 1..20: note = Target: FXN; (-) strand; PAM type: NRG; PAM sequence: CAG
  source 1..20: mol_type = other DNA
aagaagaagtaaaccaaacg

SEQ ID NO: 12128 - DNA, 20 bp, synthetic construct
  misc_feature 1..20: note = Description of Artificial Sequence: Synthetic oligonucleotide
  misc_feature 1..20: note = Target: FXN; (-) strand; PAM type: NRG; PAM sequence: AAG
  source 1..20: mol_type = other DNA
aaaaaaaaaagaagaagaag

SEQ ID NO: 12129 - DNA, 20 bp, synthetic construct
  misc_feature 1..20: note = Description of Artificial Sequence: Synthetic oligonucleotide
  misc_feature 1..20: note = Target: FXN; (-) strand; PAM type: NRG; PAM sequence: AAG
  source 1..20: mol_type = other DNA
aaaaaaaaaaaaagaagaag

SEQ ID NO: 12130 - DNA, 20 bp, synthetic construct
  misc_feature 1..20: note = Description of Artificial Sequence: Synthetic oligonucleotide
  misc_feature 1..20: note = Target: FXN; (-) strand; PAM type: NRG; PAM sequence: AAG
  source 1..20: mol_type = other DNA
caaaaaaaaaaaaaaagaag

SEQ ID NO: 12131 - DNA, 20 bp, synthetic construct
  misc_feature 1..20: note = Description of Artificial Sequence: Synthetic oligonucleotide
  misc_feature 1..20: note = Target: FXN; (-) strand; PAM type: NRG; PAM sequence: AAG
  source 1..20: mol_type = other DNA
actcaaaaaaaaaaaaaaag

SEQ ID NO: 12132 - DNA, 20 bp, synthetic construct
  misc_feature 1..20: note = Description of Artificial Sequence: Synthetic oligonucleotide
  misc_feature 1..20: note = Target: FXN; (-) strand; PAM type: NRG; PAM sequence: AAG
  source 1..20: mol_type = other DNA
tcaactcaaaaaaaaaaaaa

SEQ ID NO: 12133 - DNA, 20 bp, synthetic construct
  misc_feature 1..20: note = Description of Artificial Sequence: Synthetic oligonucleotide
  misc_feature 1..20: note = Target: FXN; (-) strand; PAM type: NRG; PAM sequence: AGG
  source 1..20: mol_type = other DNA
ccagcctgggtgacagagct

SEQ ID NO: 12134 - DNA, 20 bp, synthetic construct
  misc_feature 1..20: note = Description of Artificial Sequence: Synthetic oligonucleotide
  misc_feature 1..20: note = Target: FXN; (-) strand; PAM type: NRG; PAM sequence: TAG
  source 1..20: mol_type = other DNA
tccagcctgggtgacagagc

SEQ ID NO: 12135 - DNA, 20 bp, synthetic construct
  misc_feature 1..20: note = Description of Artificial Sequence: Synthetic oligonucleotide
  misc_feature 1..20: note = Target: FXN; (-) strand; PAM type: NRG; PAM sequence: GAG
  source 1..20: mol_type = other DNA
gcactccagcctgggtgaca

SEQ ID NO: 12136 - DNA, 20 bp, synthetic construct
  misc_feature 1..20: note = Description of Artificial Sequence: Synthetic oligonucleotide
  misc_feature 1..20: note = Target: FXN; (-) strand; PAM type: NRG; PAM sequence: CAG
  source 1..20: mol_type = other DNA
ctgcactccagcctgggtga

SEQ ID NO: 12137 - DNA, 20 bp, synthetic construct
  misc_feature 1..20: note = Description of Artificial Sequence: Synthetic oligonucleotide
  misc_feature 1..20: note = Target: FXN; (-) strand; PAM type: NRG; PAM sequence: GGG
  source 1..20: mol_type = other DNA
acacaactgcactccagcct

SEQ ID NO: 12138 - DNA, 20 bp, synthetic construct
  misc_feature 1..20: note = Description of Artificial Sequence: Synthetic oligonucleotide
  misc_feature 1..20: note = Target: FXN; (-) strand; PAM type: NRG; PAM sequence: TGG
  source 1..20: mol_type = other DNA
cacacaactgcactccagcc

SEQ ID NO: 12139 - DNA, 20 bp, synthetic construct
  misc_feature 1..20: note = Description of Artificial Sequence: Synthetic oligonucleotide
  misc_feature 1..20: note = Target: FXN; (-) strand; PAM type: NRG; PAM sequence: CAG
  source 1..20: mol_type = other DNA
gagatcacacaactgcactc

SEQ ID NO: 12140 - DNA, 20 bp, synthetic construct
  misc_feature 1..20: note = Description of Artificial Sequence: Synthetic oligonucleotide
  misc_feature 1..20: note = Target: FXN; (-) strand; PAM type: NRG; PAM sequence: GAG
  source 1..20: mol_type = other DNA
ggcagaggttgcagtgagct

SEQ ID NO: 12141 - DNA, 20 bp, synthetic construct
  misc_feature 1..20: note = Description of Artificial Sequence: Synthetic oligonucleotide
  misc_feature 1..20: note = Target: FXN; (-) strand; PAM type: NRG; PAM sequence: GAG
  source 1..20: mol_type = other DNA
tgggaggcagaggttgcagt

SEQ ID NO: 12142 - DNA, 20 bp, synthetic construct
  misc_feature 1..20: note = Description of Artificial Sequence: Synthetic oligonucleotide
  misc_feature 1..20: note = Target: FXN; (-) strand; PAM type: NRG; PAM sequence: CAG
  source 1..20: mol_type = other DNA
aacctgggaggcagaggttg

SEQ ID NO: 12143 - DNA, 20 bp, synthetic construct
  misc_feature 1..20: note = Description of Artificial Sequence: Synthetic oligonucleotide
  misc_feature 1..20: note = Target: FXN; (-) strand; PAM type: NRG; PAM sequence: AGG
  source 1..20: mol_type = other DNA
cgcttgaacctgggaggcag

SEQ ID NO: 12144 - DNA, 20 bp, synthetic construct
  misc_feature 1..20: note = Description of Artificial Sequence: Synthetic oligonucleotide
  misc_feature 1..20: note = Target: FXN; (-) strand; PAM type: NRG; PAM sequence: GAG
  source 1..20: mol_type = other DNA
tcgcttgaacctgggaggca

SEQ ID NO: 12145 - DNA, 20 bp, synthetic construct
  misc_feature 1..20: note = Description of Artificial Sequence: Synthetic oligonucleotide
  misc_feature 1..20: note = Target: FXN; (-) strand; PAM type: NRG; PAM sequence: CAG
  source 1..20: mol_type = other DNA
aatcgcttgaacctgggagg

SEQ ID NO: 12146 - DNA, 20 bp, synthetic construct
  misc_feature 1..20: note = Description of Artificial Sequence: Synthetic oligonucleotide
  misc_feature 1..20: note = Target: FXN; (-) strand; PAM type: NRG; PAM sequence: AGG
  source 1..20: mol_type = other DNA
gagaatcgcttgaacctggg

SEQ ID NO: 12147 - DNA, 20 bp, synthetic construct
  misc_feature 1..20: note = Description of Artificial Sequence: Synthetic oligonucleotide
  misc_feature 1..20: note = Target: FXN; (-) strand; PAM type: NRG; PAM sequence: GAG
  source 1..20: mol_type = other DNA
ggagaatcgcttgaacctgg

SEQ ID NO: 12148 - DNA, 20 bp, synthetic construct
  misc_feature 1..20: note = Description of Artificial Sequence: Synthetic oligonucleotide
  misc_feature 1..20: note = Target: FXN; (-) strand; PAM type: NRG; PAM sequence: GGG
  source 1..20: mol_type = other DNA
cgggagaatcgcttgaacct

SEQ ID NO: 12149 - DNA, 20 bp, synthetic construct
  misc_feature 1..20: note = Description of Artificial Sequence: Synthetic oligonucleotide
  misc_feature 1..20: note = Target: FXN; (-) strand; PAM type: NRG; PAM sequence: TGG
  source 1..20: mol_type = other DNA
gcgggagaatcgcttgaacc

SEQ ID NO: 12150 - DNA, 20 bp, synthetic construct
  misc_feature 1..20: note = Description of Artificial Sequence: Synthetic oligonucleotide
  misc_feature 1..20: note = Target: FXN; (-) strand; PAM type: NRG; PAM sequence: GAG
  source 1..20: mol_type = other DNA
tactcaggaggttgaggcgg

SEQ ID NO: 12151 - DNA, 20 bp, synthetic construct
  misc_feature 1..20: note = Description of Artificial Sequence: Synthetic oligonucleotide
  misc_feature 1..20: note = Target: FXN; (-) strand; PAM type: NRG; PAM sequence: GGG
  source 1..20: mol_type = other DNA
gctactcaggaggttgaggc

SEQ ID NO: 12152 - DNA, 20 bp, synthetic construct
  misc_feature 1..20: note = Description of Artificial Sequence: Synthetic oligonucleotide
  misc_feature 1..20: note = Target: FXN; (-) strand; PAM type: NRG; PAM sequence: CGG
  source 1..20: mol_type = other DNA
agctactcaggaggttgagg

SEQ ID NO: 12153 - DNA, 20 bp, synthetic construct
  misc_feature 1..20: note = Description of Artificial Sequence: Synthetic oligonucleotide
  misc_feature 1..20: note = Target: FXN; (-) strand; PAM type: NRG; PAM sequence: AGG
  source 1..20: mol_type = other DNA
cccagctactcaggaggttg

SEQ ID NO: 12154 - DNA, 20 bp, synthetic construct
  misc_feature 1..20: note = Description of Artificial Sequence: Synthetic oligonucleotide
  misc_feature 1..20: note = Target: FXN; (-) strand; PAM type: NRG; PAM sequence: GAG
  source 1..20: mol_type = other DNA
tcccagctactcaggaggtt

SEQ ID NO: 12155 - DNA, 20 bp, synthetic construct
  misc_feature 1..20: note = Description of Artificial Sequence: Synthetic oligonucleotide
  misc_feature 1..20: note = Target: FXN; (-) strand; PAM type: NRG; PAM sequence: AGG
  source 1..20: mol_type = other DNA
tgtaatcccagctactcagg

SEQ ID NO: 12156 - DNA, 20 bp, synthetic construct
  misc_feature 1..20: note = Description of Artificial Sequence: Synthetic oligonucleotide
  misc_feature 1..20: note = Target: FXN; (-) strand; PAM type: NRG; PAM sequence: GAG
  source 1..20: mol_type = other DNA
ctgtaatcccagctactcag

SEQ ID NO: 12157 - DNA, 20 bp, synthetic construct
  misc_feature 1..20: note = Description of Artificial Sequence: Synthetic oligonucleotide
  misc_feature 1..20: note = Target: FXN; (-) strand; PAM type: NRG; PAM sequence: AGG
  source 1..20: mol_type = other DNA
gtctgtaatcccagctactc

SEQ ID NO: 12158 - DNA, 20 bp, synthetic construct
  misc_feature 1..20: note = Description of Artificial Sequence: Synthetic oligonucleotide
  misc_feature 1..20: note = Target: FXN; (-) strand; PAM type: NRG; PAM sequence: CAG
  source 1..20: mol_type = other DNA
tgtctgtaatcccagctact

SEQ ID NO: 12159 - DNA, 20 bp, synthetic construct
  misc_feature 1..20: note = Description of Artificial Sequence: Synthetic oligonucleotide
  misc_feature 1..20: note = Target: FXN; (-) strand; PAM type: NRG; PAM sequence: CAG
  source 1..20: mol_type = other DNA
gtggtacatgtctgtaatcc

SEQ ID NO: 12160 - DNA, 20 bp, synthetic construct
  misc_feature 1..20: note = Description of Artificial Sequence: Synthetic oligonucleotide
  misc_feature 1..20: note = Target: FXN; (-) strand; PAM type: NRG; PAM sequence: TGG
  source 1..20: mol_type = other DNA
caaaacttagccctgtattg

SEQ ID NO: 12161 - DNA, 20 bp, synthetic construct
  misc_feature 1..20: note = Description of Artificial Sequence: Synthetic oligonucleotide
  misc_feature 1..20: note = Target: FXN; (-) strand; PAM type: NRG; PAM sequence: TAG
  source 1..20: mol_type = other DNA
tctactaaaaatacaaaact

SEQ ID NO: 12162 - DNA, 20 bp, synthetic construct
  misc_feature 1..20: note = Description of Artificial Sequence: Synthetic oligonucleotide
  misc_feature 1..20: note = Target: FXN; (-) strand; PAM type: NRG; PAM sequence: TGG
  source 1..20: mol_type = other DNA
tgagaccagcctggccaaca

SEQ ID NO: 12163 - DNA, 20 bp, synthetic construct
  misc_feature 1..20: note = Description of Artificial Sequence: Synthetic oligonucleotide
  misc_feature 1..20: note = Target: FXN; (-) strand; PAM type: NRG; PAM sequence: TGG
  source 1..20: mol_type = other DNA
tcaggagtttgagaccagcc

SEQ ID NO: 12164 - DNA, 20 bp, synthetic construct
  misc_feature 1..20: note = Description of Artificial Sequence: Synthetic oligonucleotide
  misc_feature 1..20: note = Target: FXN; (-) strand; PAM type: NRG; PAM sequence: CAG
  source 1..20: mol_type = other DNA
tgagatcaggagtttgagac

SEQ ID NO: 12165 - DNA, 20 bp, synthetic construct
  misc_feature 1..20: note = Description of Artificial Sequence: Synthetic oligonucleotide
  misc_feature 1..20: note = Target: FXN; (-) strand; PAM type: NRG; PAM sequence: GAG
  source 1..20: mol_type = other DNA
tcacttgagatcaggagttt

SEQ ID NO: 12166 - DNA, 20 bp, synthetic construct
  misc_feature 1..20: note = Description of Artificial Sequence: Synthetic oligonucleotide
  misc_feature 1..20: note = Target: FXN; (-) strand; PAM type: NRG; PAM sequence: GAG
  source 1..20: mol_type = other DNA
ggtggatcacttgagatcag

SEQ ID NO: 12167 - DNA, 20 bp, synthetic construct
  misc_feature 1..20: note = Description of Artificial Sequence: Synthetic oligonucleotide
  misc_feature 1..20: note = Target: FXN; (-) strand; PAM type: NRG; PAM sequence: AGG
  source 1..20: mol_type = other DNA
cgggtggatcacttgagatc

SEQ ID NO: 12168 - DNA, 20 bp, synthetic construct
  misc_feature 1..20: note = Description of Artificial Sequence: Synthetic oligonucleotide
  misc_feature 1..20: note = Target: FXN; (-) strand; PAM type: NRG; PAM sequence: CAG
  source 1..20: mol_type = other DNA
gcgggtggatcacttgagat

SEQ ID NO: 12169 - DNA, 20 bp, synthetic construct
  misc_feature 1..20: note = Description of Artificial Sequence: Synthetic oligonucleotide
  misc_feature 1..20: note = Target: FXN; (-) strand; PAM type: NRG; PAM sequence: GAG
  source 1..20: mol_type = other DNA
ctgaggcgggtggatcactt

SEQ ID NO: 12170 - DNA, 20 bp, synthetic construct
  misc_feature 1..20: note = Description of Artificial Sequence: Synthetic oligonucleotide
  misc_feature 1..20: note = Target: FXN; (-) strand; PAM type: NRG; PAM sequence: TGG
  source 1..20: mol_type = other DNA
ctttaggaggctgaggcggg

SEQ ID NO: 12171 - DNA, 20 bp, synthetic construct
  misc_feature 1..20: note = Description of Artificial Sequence: Synthetic oligonucleotide
  misc_feature 1..20: note = Target: FXN; (-) strand; PAM type: NRG; PAM sequence: GGG
  source 1..20: mol_type = other DNA
gcactttaggaggctgaggc

SEQ ID NO: 12172 - DNA, 20 bp, synthetic construct
  misc_feature 1..20: note = Description of Artificial Sequence: Synthetic oligonucleotide
  misc_feature 1..20: note = Target: FXN; (-) strand; PAM type: NRG; PAM sequence: CGG
  source 1..20: mol_type = other DNA
agcactttaggaggctgagg

SEQ ID NO: 12173 - DNA, 20 bp, synthetic construct
  misc_feature 1..20: note = Description of Artificial Sequence: Synthetic oligonucleotide
  misc_feature 1..20: note = Target: FXN; (-) strand; PAM type: NRG; PAM sequence: AGG
  source 1..20: mol_type = other DNA
cccagcactttaggaggctg

SEQ ID NO: 12174 - DNA, 20 bp, synthetic construct
  misc_feature 1..20: note = Description of Artificial Sequence: Synthetic oligonucleotide
  misc_feature 1..20: note = Target: FXN; (-) strand; PAM type: NRG; PAM sequence: GAG
  source 1..20: mol_type = other DNA
acccagcactttaggaggct

SEQ ID NO: 12175 - DNA, 20 bp, synthetic construct
  misc_feature 1..20: note = Description of Artificial Sequence: Synthetic oligonucleotide
  misc_feature 1..20: note = Target: FXN; (-) strand; PAM type: NRG; PAM sequence: AGG
  source 1..20: mol_type = other DNA
tgttaacccagcactttagg

SEQ ID NO: 12176 - DNA, 20 bp, synthetic construct
  misc_feature 1..20: note = Description of Artificial Sequence: Synthetic oligonucleotide
  misc_feature 1..20: note = Target: FXN; (-) strand; PAM type: NRG; PAM sequence: GAG
  source 1..20: mol_type = other DNA
ctgttaacccagcactttag

SEQ ID NO: 12177 - DNA, 20 bp, synthetic construct
  misc_feature 1..20: note = Description of Artificial Sequence: Synthetic oligonucleotide
  misc_feature 1..20: note = Target: FXN; (-) strand; PAM type: NRG; PAM sequence: AGG
  source 1..20: mol_type = other DNA
gcctgttaacccagcacttt

SEQ ID NO: 12178 - DNA, 20 bp, synthetic construct
  misc_feature 1..20: note = Description of Artificial Sequence: Synthetic oligonucleotide
  misc_feature 1..20: note = Target: FXN; (-) strand; PAM type: NRG; PAM sequence: TAG
  source 1..20: mol_type = other DNA
tgcctgttaacccagcactt

SEQ ID NO: 12179 - DNA, 20 bp, synthetic construct
  misc_feature 1..20: note = Description of Artificial Sequence: Synthetic oligonucleotide
  misc_feature 1..20: note = Target: FXN; (-) strand; PAM type: NRG; PAM sequence: CAG
  source 1..20: mol_type = other DNA
gtggctcatgcctgttaacc

SEQ ID NO: 12180 - DNA, 20 bp, synthetic construct
  misc_feature 1..20: note = Description of Artificial Sequence: Synthetic oligonucleotide
  misc_feature 1..20: note = Target: FXN; (-) strand; PAM type: NRG; PAM sequence: TGG
  source 1..20: mol_type = other DNA
atgacttttgccaggtgccg

SEQ ID NO: 12181 - DNA, 20 bp, synthetic construct
  misc_feature 1..20: note = Description of Artificial Sequence: Synthetic oligonucleotide
  misc_feature 1..20: note = Target: FXN; (-) strand; PAM type: NRG; PAM sequence: AGG
  source 1..20: mol_type = other DNA
accaaaagatgacttttgcc

SEQ ID NO: 12182 - DNA, 20 bp, synthetic construct
  misc_feature 1..20: note = Description of Artificial Sequence: Synthetic oligonucleotide
  misc_feature 1..20: note = Target: FXN; (-) strand; PAM type: NRG; PAM sequence: CAG
  source 1..20: mol_type = other DNA
aaccaaaagatgacttttgc

SEQ ID NO: 12183 - DNA, 20 bp, synthetic construct
  misc_feature 1..20: note = Description of Artificial Sequence: Synthetic oligonucleotide
  misc_feature 1..20: note = Target: FXN; (-) strand; PAM type: NRG; PAM sequence: AAG
  source 1..20: mol_type = other DNA
gttcaatagaagtaaaccaa

SEQ ID NO: 12184 - DNA, 20 bp, synthetic construct
  misc_feature 1..20: note = Description of Artificial Sequence: Synthetic oligonucleotide
  misc_feature 1..20: note = Target: FXN; (-) strand; PAM type: NRG; PAM sequence: AAG
  source 1..20: mol_type = other DNA
tgactttttcagttcaatag

SEQ ID NO: 12185 - DNA, 20 bp, synthetic construct
  misc_feature 1..20: note = Description of Artificial Sequence: Synthetic oligonucleotide
  misc_feature 1..20: note = Target: FXN; (-) strand; PAM type: NRG; PAM sequence: TAG
  source 1..20: mol_type = other DNA
ttgtgactttttcagttcaa

SEQ ID NO: 12186 - DNA, 20 bp, synthetic construct
  misc_feature 1..20: note = Description of Artificial Sequence: Synthetic oligonucleotide
  misc_feature 1..20: note = Target: FXN; (-) strand; PAM type: NRG; PAM sequence: CAG
  source 1..20: mol_type = other DNA
aaatatatttgtgacttttt

SEQ ID NO: 12187 - DNA, 20 bp, synthetic construct
  misc_feature 1..20: note = Description of Artificial Sequence: Synthetic oligonucleotide
  misc_feature 1..20: note = Target: FXN; (-) strand; PAM type: NRG; PAM sequence: AGG
  source 1..20: mol_type = other DNA
ccagcctgggtgacagagcg

SEQ ID NO: 12188 - DNA, 20 bp, synthetic construct
  misc_feature 1..20: note = Description of Artificial Sequence: Synthetic oligonucleotide
  misc_feature 1..20: note = Target: FXN; (-) strand; PAM type: NRG; PAM sequence: GAG
  source 1..20: mol_type = other DNA
tccagcctgggtgacagagc

SEQ ID NO: 12189 - DNA, 20 bp, synthetic construct
  misc_feature 1..20: note = Description of Artificial Sequence: Synthetic oligonucleotide
  misc_feature 1..20: note = Target: FXN; (-) strand; PAM type: NRG; PAM sequence: GAG
  source 1..20: mol_type = other DNA
gcactccagcctgggtgaca

SEQ ID NO: 12190 - DNA, 20 bp, synthetic construct
  misc_feature 1..20: note = Description of Artificial Sequence: Synthetic oligonucleotide
  misc_feature 1..20: note = Target: FXN; (-) strand; PAM type: NRG; PAM sequence: CAG
  source 1..20: mol_type = other DNA
ctgcactccagcctgggtga

SEQ ID NO: 12191 - DNA, 20 bp, synthetic construct
  misc_feature 1..20: note = Description of Artificial Sequence: Synthetic oligonucleotide
  misc_feature 1..20: note = Target: FXN; (-) strand; PAM type: NRG; PAM sequence: GGG
  source 1..20: mol_type = other DNA
gtgccactgcactccagcct

SEQ ID NO: 12192 - DNA, 20 bp, synthetic construct
  misc_feature 1..20: note = Description of Artificial Sequence: Synthetic oligonucleotide
  misc_feature 1..20: note = Target: FXN; (-) strand; PAM type: NRG; PAM sequence: TGG
  source 1..20: mol_type = other DNA
tgtgccactgcactccagcc

SEQ ID NO: 12193 - DNA, 20 bp, synthetic construct
  misc_feature 1..20: note = Description of Artificial Sequence: Synthetic oligonucleotide
  misc_feature 1..20: note = Target: FXN; (-) strand; PAM type: NRG; PAM sequence: CAG
  source 1..20: mol_type = other DNA
atgattgtgccactgcactc

SEQ ID NO: 12194 - DNA, 20 bp, synthetic construct
  misc_feature 1..20: note = Description of Artificial Sequence: Synthetic oligonucleotide
  misc_feature 1..20: note = Target: FXN; (-) strand; PAM type: NRG; PAM sequence: GAG
  source 1..20: mol_type = other DNA
cagaagcttgaggctgcagt

SEQ ID NO: 12195 - DNA, 20 bp, synthetic construct
  misc_feature 1..20: note = Description of Artificial Sequence: Synthetic oligonucleotide
  misc_feature 1..20: note = Target: FXN; (-) strand; PAM type: NRG; PAM sequence: CAG
  source 1..20: mol_type = other DNA
agcccagaagcttgaggctg

SEQ ID NO: 12196 - DNA, 20 bp, synthetic construct
  misc_feature 1..20: note = Description of Artificial Sequence: Synthetic oligonucleotide
  misc_feature 1..20: note = Target: FXN; (-) strand; PAM type: NRG; PAM sequence: AGG
  source 1..20: mol_type = other DNA
cacttgagcccagaagcttg

SEQ ID NO: 12197 - DNA, 20 bp, synthetic construct
  misc_feature 1..20: note = Description of Artificial Sequence: Synthetic oligonucleotide
  misc_feature 1..20: note = Target: FXN; (-) strand; PAM type: NRG; PAM sequence: GAG
  source 1..20: mol_type = other DNA
tcacttgagcccagaagctt

SEQ ID NO: 12198 - DNA, 20 bp, synthetic construct
  misc_feature 1..20: note = Description of Artificial Sequence: Synthetic oligonucleotide
  misc_feature 1..20: note = Target: FXN; (-) strand; PAM type: NRG; PAM sequence: AAG
  source 1..20: mol_type = other DNA
gaacgatcacttgagcccag

SEQ ID NO: 12199 - DNA, 20 bp, synthetic construct
  misc_feature 1..20: note = Description of Artificial Sequence: Synthetic oligonucleotide
  misc_feature 1..20: note = Target: FXN; (-) strand; PAM type: NRG; PAM sequence: CAG
  source 1..20: mol_type = other DNA
gtggaacgatcacttgagcc

SEQ ID NO: 12200 - DNA, 20 bp, synthetic construct
  misc_feature 1..20: note = Description of Artificial Sequence: Synthetic oligonucleotide
  misc_feature 1..20: note = Target: FXN; (-) strand; PAM type: NRG; PAM sequence: GAG
  source 1..20: mol_type = other DNA
ctgaggtggaacgatcactt

SEQ ID NO: 12201 - DNA, 20 bp, synthetic construct
  misc_feature 1..20: note = Description of Artificial Sequence: Synthetic oligonucleotide
  misc_feature 1..20: note = Target: FXN; (-) strand; PAM type: NRG; PAM sequence: TGG
  source 1..20: mol_type = other DNA
agctactagggaggctgagg

SEQ ID NO: 12202 - DNA, 20 bp, synthetic construct
  misc_feature 1..20: note = Description of Artificial Sequence: Synthetic oligonucleotide
  misc_feature 1..20: note = Target: FXN; (-) strand; PAM type: NRG; PAM sequence: AGG
  source 1..20: mol_type = other DNA
cccagctactagggaggctg

SEQ ID NO: 12203 - DNA, 20 bp, synthetic construct
  misc_feature 1..20: note = Description of Artificial Sequence: Synthetic oligonucleotide
  misc_feature 1..20: note = Target: FXN; (-) strand; PAM type: NRG; PAM sequence: GAG
  source 1..20: mol_type = other DNA
tcccagctactagggaggct

SEQ ID NO: 12204 - DNA, 20 bp, synthetic construct
  misc_feature 1..20: note = Description of Artificial Sequence: Synthetic oligonucleotide
  misc_feature 1..20: note = Target: FXN; (-) strand; PAM type: NRG; PAM sequence: AGG
  source 1..20: mol_type = other DNA
tgtagtcccagctactaggg

SEQ ID NO: 12205 - DNA, 20 bp, synthetic construct
  misc_feature 1..20: note = Description of Artificial Sequence: Synthetic oligonucleotide
  misc_feature 1..20: note = Target: FXN; (-) strand; PAM type: NRG; PAM sequence: GAG
  source 1..20: mol_type = other DNA
ctgtagtcccagctactagg

SEQ ID NO: 12206 - DNA, 20 bp, synthetic construct
  misc_feature 1..20: note = Description of Artificial Sequence: Synthetic oligonucleotide
  misc_feature 1..20: note = Target: FXN; (-) strand; PAM type: NRG; PAM sequence: GGG
  source 1..20: mol_type = other DNA
gcctgtagtcccagctacta

SEQ ID NO: 12207 - DNA, 20 bp, synthetic construct
  misc_feature 1..20: note = Description of Artificial Sequence: Synthetic oligonucleotide
  misc_feature 1..20: note = Target: FXN; (-) strand; PAM type: NRG; PAM sequence: AGG
  source 1..20: mol_type = other DNA
tgcctgtagtcccagctact

SEQ ID NO: 12208 - DNA, 20 bp, synthetic construct
  misc_feature 1..20: note = Description of Artificial Sequence: Synthetic oligonucleotide
  misc_feature 1..20: note = Target: FXN; (-) strand; PAM type: NRG; PAM sequence: TAG
  source 1..20: mol_type = other DNA
gtgcctgtagtcccagctac

SEQ ID NO: 12209 - DNA, 20 bp, synthetic construct
  misc_feature 1..20: note = Description of Artificial Sequence: Synthetic oligonucleotide
  misc_feature 1..20: note = Target: FXN; (-) strand; PAM type: NRG; PAM sequence: CAG
  source 1..20: mol_type = other DNA
gtggcatgtgcctgtagtcc

SEQ ID NO: 12210 - DNA, 20 bp, synthetic construct
  misc_feature 1..20: note = Description of Artificial Sequence: Synthetic oligonucleotide
  misc_feature 1..20: note = Target: FXN; (-) strand; PAM type: NRG; PAM sequence: TAG
  source 1..20: mol_type = other DNA
agtatggtggcatgtgcctg

SEQ ID NO: 12211 - DNA, 20 bp, synthetic construct
  misc_feature 1..20: note = Description of Artificial Sequence: Synthetic oligonucleotide
  misc_feature 1..20: note = Target: FXN; (-) strand; PAM type: NRG; PAM sequence: TGG
  source 1..20: mol_type = other DNA
aaataattagccgagtatgg

SEQ ID NO: 12212 - DNA, 20 bp, synthetic construct
  misc_feature 1..20: note = Description of Artificial Sequence: Synthetic oligonucleotide
  misc_feature 1..20: note = Target: FXN; (-) strand; PAM type: NRG; PAM sequence: TGG
  source 1..20: mol_type = other DNA
ataaaataattagccgagta

SEQ ID NO: 12213 - DNA, 20 bp, synthetic construct
  misc_feature 1..20: note = Description of Artificial Sequence: Synthetic oligonucleotide
  misc_feature 1..20: note = Target: FXN; (-) strand; PAM type: NRG; PAM sequence: GAG
  source 1..20: mol_type = other DNA
ataaaataaaataattagcc

SEQ ID NO: 12214 - DNA, 20 bp, synthetic construct
  misc_feature 1..20: note = Description of Artificial Sequence: Synthetic oligonucleotide
  misc_feature 1..20: note = Target: FXN; (-) strand; PAM type: NRG; PAM sequence: TAG
  source 1..20: mol_type = other DNA
cataaataaaataaaataat

SEQ ID NO: 12215 - DNA, 20 bp, synthetic construct
  misc_feature 1..20: note = Description of Artificial Sequence: Synthetic oligonucleotide
  misc_feature 1..20: note = Target: FXN; (-) strand; PAM type: NRG; PAM sequence: GAG
  source 1..20: mol_type = other DNA
accagcctgggaaacatagc

SEQ ID NO: 12216 - DNA, 20 bp, synthetic construct
  misc_feature 1..20: note = Description of Artificial Sequence: Synthetic oligonucleotide
  misc_feature 1..20: note = Target: FXN; (-) strand; PAM type: NRG; PAM sequence: TAG
  source 1..20: mol_type = other DNA
tgagaccagcctgggaaaca

SEQ ID NO: 12217 - DNA, 20 bp, synthetic construct
  misc_feature 1..20: note = Description of Artificial Sequence: Synthetic oligonucleotide
  misc_feature 1..20: note = Target: FXN; (-) strand; PAM type: NRG; PAM sequence: GGG
  source 1..20: mol_type = other DNA
caggagtttgagaccagcct

SEQ ID NO: 12218 - DNA, 20 bp, synthetic construct
  misc_feature 1..20: note = Description of Artificial Sequence: Synthetic oligonucleotide
  misc_feature 1..20: note = Target: FXN; (-) strand; PAM type: NRG; PAM sequence: TGG
  source 1..20: mol_type = other DNA
ccaggagtttgagaccagcc

SEQ ID NO: 12219 - DNA, 20 bp, synthetic construct
  misc_feature 1..20: note = Description of Artificial Sequence: Synthetic oligonucleotide
  misc_feature 1..20: note = Target: FXN; (-) strand; PAM type: NRG; PAM sequence: CAG
  source 1..20: mol_type = other DNA
tgaggccaggagtttgagac

SEQ ID NO: 12220 - DNA, 20 bp, synthetic construct
  misc_feature 1..20: note = Description of Artificial Sequence: Synthetic oligonucleotide
  misc_feature 1..20: note = Target: FXN; (-) strand; PAM type: NRG; PAM sequence: GAG
  source 1..20: mol_type = other DNA
tcgcttgaggccaggagttt

SEQ ID NO: 12221 - DNA, 20 bp, synthetic construct
  misc_feature 1..20: note = Description of Artificial Sequence: Synthetic oligonucleotide
  misc_feature 1..20: note = Target: FXN; (-) strand; PAM type: NRG; PAM sequence: GAG
  source 1..20: mol_type = other DNA
agagaatcgcttgaggccag

SEQ ID NO: 12222 - DNA, 20 bp, synthetic construct
  misc_feature 1..20: note = Description of Artificial Sequence: Synthetic oligonucleotide
  misc_feature 1..20: note = Target: FXN; (-) strand; PAM type: NRG; PAM sequence: AGG
  source 1..20: mol_type = other DNA
tgagagaatcgcttgaggcc

SEQ ID NO: 12223 - DNA, 20 bp, synthetic construct
  misc_feature 1..20: note = Description of Artificial Sequence: Synthetic oligonucleotide
  misc_feature 1..20: note = Target: FXN; (-) strand; PAM type: NRG; PAM sequence: CAG
  source 1..20: mol_type = other DNA
gtgagagaatcgcttgaggc

SEQ ID NO: 12224 - DNA, 20 bp, synthetic construct
  misc_feature 1..20: note = Description of Artificial Sequence: Synthetic oligonucleotide
  misc_feature 1..20: note = Target: FXN; (-) strand; PAM type: NRG; PAM sequence: AGG
  source 1..20: mol_type = other DNA
cgaggtgagagaatcgcttg

SEQ ID NO: 12225 - DNA, 20 bp, synthetic construct
  misc_feature 1..20: note = Description of Artificial Sequence: Synthetic oligonucleotide
  misc_feature 1..20: note = Target: FXN; (-) strand; PAM type: NRG; PAM sequence: GAG
  source 1..20: mol_type = other DNA
ccgaggtgagagaatcgctt

SEQ ID NO: 12226 - DNA, 20 bp, synthetic construct
  misc_feature 1..20: note = Description of Artificial Sequence: Synthetic oligonucleotide
  misc_feature 1..20: note = Target: FXN; (-) strand; PAM type: NRG; PAM sequence: GAG
  source 1..20: mol_type = other DNA
gctttgggaggccgaggtga

SEQ ID NO: 12227 - DNA, 20 bp, synthetic construct
  misc_feature 1..20: note = Description of Artificial Sequence: Synthetic oligonucleotide
  misc_feature 1..20: note = Target: FXN; (-) strand; PAM type: NRG; PAM sequence: GAG
  source 1..20: mol_type = other DNA
gtgctttgggaggccgaggt

SEQ ID NO: 12228 - DNA, 20 bp, synthetic construct
  misc_feature 1..20: note = Description of Artificial Sequence: Synthetic oligonucleotide
  misc_feature 1..20: note = Target: FXN; (-) strand; PAM type: NRG; PAM sequence: AGG
  source 1..20: mol_type = other DNA
cccggtgctttgggaggccg

SEQ ID NO: 12229 - DNA, 20 bp, synthetic construct
  misc_feature 1..20: note = Description of Artificial Sequence: Synthetic oligonucleotide
  misc_feature 1..20: note = Target: FXN; (-) strand; PAM type: NRG; PAM sequence: GAG
  source 1..20: mol_type = other DNA
tcccggtgctttgggaggcc

SEQ ID NO: 12230 - DNA, 20 bp, synthetic construct
  misc_feature 1..20: note = Description of Artificial Sequence: Synthetic oligonucleotide
  misc_feature 1..20: note = Target: FXN; (-) strand; PAM type: NRG; PAM sequence: AGG
  source 1..20: mol_type = other DNA
tgtaatcccggtgctttggg

SEQ ID NO: 12231 - DNA, 20 bp, synthetic construct
  misc_feature 1..20: note = Description of Artificial Sequence: Synthetic oligonucleotide
  misc_feature 1..20: note = Target: FXN; (-) strand; PAM type: NRG; PAM sequence: GAG
  source 1..20: mol_type = other DNA
ctgtaatcccggtgctttgg

SEQ ID NO: 12232 - DNA, 20 bp, synthetic construct
  misc_feature 1..20: note = Description of Artificial Sequence: Synthetic oligonucleotide
  misc_feature 1..20: note = Target: FXN; (-) strand; PAM type: NRG; PAM sequence: GGG
  source 1..20: mol_type = other DNA
acctgtaatcccggtgcttt

SEQ ID NO: 12233 - DNA, 20 bp, synthetic construct
  misc_feature 1..20: note = Description of Artificial Sequence: Synthetic oligonucleotide
  misc_feature 1..20: note = Target: FXN; (-) strand; PAM type: NRG; PAM sequence: TGG
  source 1..20: mol_type = other DNA
cacctgtaatcccggtgctt

SEQ ID NO: 12234 - DNA, 20 bp, synthetic construct
  misc_feature 1..20: note = Description of Artificial Sequence: Synthetic oligonucleotide
  misc_feature 1..20: note = Target: FXN; (-) strand; PAM type: NRG; PAM sequence: CGG
  source 1..20: mol_type = other DNA
ctggcacacacctgtaatcc

SEQ ID NO: 12235 - DNA, 20 bp, synthetic construct
  misc_feature 1..20: note = Description of Artificial Sequence: Synthetic oligonucleotide
  misc_feature 1..20: note = Target: FXN; (-) strand; PAM type: NRG; PAM sequence: TGG
  source 1..20: mol_type = other DNA
agatttgtggctgggtgtgc

SEQ ID NO: 12236 - DNA, 20 bp, synthetic construct
  misc_feature 1..20: note = Description of Artificial Sequence: Synthetic oligonucleotide
  misc_feature 1..20: note = Target: FXN; (-) strand; PAM type: NRG; PAM sequence: GGG
  source 1..20: mol_type = other DNA
aaatttatagatttgtggct

SEQ ID NO: 12237 - DNA, 20 bp, synthetic construct
  misc_feature 1..20: note = Description of Artificial Sequence: Synthetic oligonucleotide
  misc_feature 1..20: note = Target: FXN; (-) strand; PAM type: NRG; PAM sequence: TGG
  source 1..20: mol_type = other DNA
taaatttatagatttgtggc

SEQ ID NO: 12238 - DNA, 20 bp, synthetic construct
  misc_feature 1..20: note = Description of Artificial Sequence: Synthetic oligonucleotide
  misc_feature 1..20: note = Target: FXN; (-) strand; PAM type: NRG; PAM sequence: TGG
  source 1..20: mol_type = other DNA
tttctaaatttatagatttg

SEQ ID NO: 12239 - DNA, 20 bp, synthetic construct
  misc_feature 1..20: note = Description of Artificial Sequence: Synthetic oligonucleotide
  misc_feature 1..20: note = Target: FXN; (-) strand; PAM type: NRG; PAM sequence: TAG
  source 1..20: mol_type = other DNA
agtcctcctttctaaattta

SEQ ID NO: 12240 - DNA, 20 bp, synthetic construct
  misc_feature 1..20: note = Description of Artificial Sequence: Synthetic oligonucleotide
  misc_feature 1..20: note = Target: FXN; (-) strand; PAM type: NRG; PAM sequence: TAG
  source 1..20: mol_type = other DNA
agtgggaccctctttagaaa

SEQ ID NO: 12241 - DNA, 20 bp, synthetic construct
  misc_feature 1..20: note = Description of Artificial Sequence: Synthetic oligonucleotide
  misc_feature 1..20: note = Target: FXN; (-) strand; PAM type: NRG; PAM sequence: TAG
  source 1..20: mol_type = other DNA
acaggtagtgggaccctctt

SEQ ID NO: 12242 - DNA, 20 bp, synthetic construct
  misc_feature 1..20: note = Description of Artificial Sequence: Synthetic oligonucleotide
  misc_feature 1..20: note = Target: FXN; (-) strand; PAM type: NRG; PAM sequence: GGG
  source 1..20: mol_type = other DNA
gcttcctgcctacaggtagt

SEQ ID NO: 12243 - DNA, 20 bp, synthetic construct
  misc_feature 1..20: note = Description of Artificial Sequence: Synthetic oligonucleotide
  misc_feature 1..20: note = Target: FXN; (-) strand; PAM type: NRG; PAM sequence: TGG
  source 1..20: mol_type = other DNA
tgcttcctgcctacaggtag

SEQ ID NO: 12244 - DNA, 20 bp, synthetic construct
  misc_feature 1..20: note = Description of Artificial Sequence: Synthetic oligonucleotide
  misc_feature 1..20: note = Target: FXN; (-) strand; PAM type: NRG; PAM sequence: TAG
  source 1..20: mol_type = other DNA
ctctgcttcctgcctacagg

SEQ ID NO: 12245 - DNA, 20 bp, synthetic construct
  misc_feature 1..20: note = Description of Artificial Sequence: Synthetic oligonucleotide
  misc_feature 1..20: note = Target: FXN; (-) strand; PAM type: NRG; PAM sequence: AGG
  source 1..20: mol_type = other DNA
aggctctgcttcctgcctac

SEQ ID NO: 12246 - DNA, 20 bp, synthetic construct
  misc_feature 1..20: note = Description of Artificial Sequence: Synthetic oligonucleotide
  misc_feature 1..20: note = Target: FXN; (-) strand; PAM type: NRG; PAM sequence: CAG
  source 1..20: mol_type = other DNA
gaggctctgcttcctgccta

SEQ ID NO: 12247 - DNA, 20 bp, synthetic construct
  misc_feature 1..20: note = Description of Artificial Sequence: Synthetic oligonucleotide
  misc_feature 1..20: note = Target: FXN; (-) strand; PAM type: NRG; PAM sequence: AGG
  source 1..20: mol_type = other DNA
tgtttttcagttatggccag

SEQ ID NO: 12248 - DNA, 20 bp, synthetic construct
  misc_feature 1..20: note = Description of Artificial Sequence: Synthetic oligonucleotide
  misc_feature 1..20: note = Target: FXN; (-) strand; PAM type: NRG; PAM sequence: GAG
  source 1..20: mol_type = other DNA
ttgtttttcagttatggcca

SEQ ID NO: 12249 - DNA, 20 bp, synthetic construct
  misc_feature 1..20: note = Description of Artificial Sequence: Synthetic oligonucleotide
  misc_feature 1..20: note = Target: FXN; (-) strand; PAM type: NRG; PAM sequence: CAG
  source 1..20: mol_type = other DNA
gcttgtttttcagttatggc

SEQ ID NO: 12250 - DNA, 20 bp, synthetic construct
  misc_feature 1..20: note = Description of Artificial Sequence: Synthetic oligonucleotide
  misc_feature 1..20: note = Target: FXN; (-) strand; PAM type: NRG; PAM sequence: TGG
  source 1..20: mol_type = other DNA
aagtgcttgtttttcagtta

SEQ ID NO: 12251 - DNA, 20 bp, synthetic construct
  misc_feature 1..20: note = Description of Artificial Sequence: Synthetic oligonucleotide
  misc_feature 1..20: note = Target: FXN; (-) strand; PAM type: NRG; PAM sequence: CAG
  source 1..20: mol_type = other DNA
tcttggaagtgcttgttttt

SEQ ID NO: 12252 - DNA, 20 bp, synthetic construct
  misc_feature 1..20: note = Description of Artificial Sequence: Synthetic oligonucleotide
  misc_feature 1..20: note = Target: FXN; (-) strand; PAM type: NRG; PAM sequence: AAG
  source 1..20: mol_type = other DNA
ttccctttgccccttcttgg

SEQ ID NO: 12253 - DNA, 20 bp, synthetic construct
  misc_feature 1..20: note = Description of Artificial Sequence: Synthetic oligonucleotide
  misc_feature 1..20: note = Target: FXN; (-) strand; PAM type: NRG; PAM sequence: TGG
  source 1..20: mol_type = other DNA
atgttccctttgccccttct

SEQ ID NO: 12254 - DNA, 20 bp, synthetic construct
  misc_feature 1..20: note = Description of Artificial Sequence: Synthetic oligonucleotide
  misc_feature 1..20: note = Target: FXN; (-) strand; PAM type: NRG; PAM sequence: CAG
  source 1..20: mol_type = other DNA
gtatgcttagctacgcctct

SEQ ID NO: 12255 - DNA, 20 bp, synthetic construct
  misc_feature 1..20: note = Description of Artificial Sequence: Synthetic oligonucleotide
  misc_feature 1..20: note = Target: FXN; (-) strand; PAM type: NRG; PAM sequence: TAG
  source 1..20: mol_type = other DNA
atctgttgaatatgtatgct

SEQ ID NO: 12256 - DNA, 20 bp, synthetic construct
  misc_feature 1..20: note = Description of Artificial Sequence: Synthetic oligonucleotide
  misc_feature 1..20: note = Target: FXN; (-) strand; PAM type: NRG; PAM sequence: TAG
  source 1..20: mol_type = other DNA
cctccctttgtgaatattca

SEQ ID NO: 12257 - DNA, 20 bp, synthetic construct
  misc_feature 1..20: note = Description of Artificial Sequence: Synthetic oligonucleotide
  misc_feature 1..20: note = Target: FXN; (-) strand; PAM type: NRG; PAM sequence: TAG
  source 1..20: mol_type = other DNA
tccacatgtgtgcatattca

SEQ ID NO: 12258 - DNA, 20 bp, synthetic construct
  misc_feature 1..20: note = Description of Artificial Sequence: Synthetic oligonucleotide
  misc_feature 1..20: note = Target: FXN; (-) strand; PAM type: NRG; PAM sequence: TAG
  source 1..20: mol_type = other DNA
gggagacatgctgcacacgt

SEQ ID NO: 12259 - DNA, 20 bp, synthetic construct
  misc_feature 1..20: note = Description of Artificial Sequence: Synthetic oligonucleotide
  misc_feature 1..20: note = Target: FXN; (-) strand; PAM type: NRG; PAM sequence: GAG
  source 1..20: mol_type = other DNA
tctgcctaaggtgaacatgg

SEQ ID NO: 12260 - DNA, 20 bp, synthetic construct
  misc_feature 1..20: note = Description of Artificial Sequence: Synthetic oligonucleotide
  misc_feature 1..20: note = Target: FXN; (-) strand; PAM type: NRG; PAM sequence: GGG
  source 1..20: mol_type = other DNA
tttctgcctaaggtgaacat

SEQ ID NO: 12261 - DNA, 20 bp, synthetic construct
  misc_feature 1..20: note = Description of Artificial Sequence: Synthetic oligonucleotide
  misc_feature 1..20: note = Target: FXN; (-) strand; PAM type: NRG; PAM sequence: TGG
  source 1..20: mol_type = other DNA
gtttctgcctaaggtgaaca

SEQ ID NO: 12262 - DNA, 20 bp, synthetic construct
  misc_feature 1..20: note = Description of Artificial Sequence: Synthetic oligonucleotide
  misc_feature 1..20: note = Target: FXN; (-) strand; PAM type: NRG; PAM sequence: AGG
  source 1..20: mol_type = other DNA
tagtgttaagtttctgccta

SEQ ID NO: 12263 - DNA, 20 bp, synthetic construct
  misc_feature 1..20: note = Description of Artificial Sequence: Synthetic oligonucleotide
  misc_feature 1..20: note = Target: FXN; (-) strand; PAM type: NRG; PAM sequence: AAG
  source 1..20: mol_type = other DNA
ttagtgttaagtttctgcct

SEQ ID NO: 12264 - DNA, 20 bp, synthetic construct
  misc_feature 1..20: note = Description of Artificial Sequence: Synthetic oligonucleotide
  misc_feature 1..20: note = Target: FXN; (-) strand; PAM type: NRG; PAM sequence: AAG
  source 1..20: mol_type = other DNA
ctgtaatacatgttagtgtt

SEQ ID NO: 12265 - DNA, 20 bp, synthetic construct
  misc_feature 1..20: note = Description of Artificial Sequence: Synthetic oligonucleotide
  misc_feature 1..20: note = Target: FXN; (-) strand; PAM type: NRG; PAM sequence: TAG
  source 1..20: mol_type = other DNA
tgttgccctgtaatacatgt

SEQ ID NO: 12266 - DNA, 20 bp, synthetic construct
  misc_feature 1..20: note = Description of Artificial Sequence: Synthetic oligonucleotide
  misc_feature 1..20: note = Target: FXN; (-) strand; PAM type: NRG; PAM sequence: CAG
  source 1..20: mol_type = other DNA
agctaggttatgtagatatg

SEQ ID NO: 12267 - DNA, 20 bp, synthetic construct
  misc_feature 1..20: note = Description of Artificial Sequence: Synthetic oligonucleotide
  misc_feature 1..20: note = Target: FXN; (-) strand; PAM type: NRG; PAM sequence: TAG
  source 1..20: mol_type = other DNA
taccaaatagctaggttatg

SEQ ID NO: 12268 - DNA, 20 bp, synthetic construct
  misc_feature 1..20: note = Description of Artificial Sequence: Synthetic oligonucleotide
  misc_feature 1..20: note = Target: FXN; (-) strand; PAM type: NRG; PAM sequence: AGG
  source 1..20: mol_type = other DNA
cttcagcctaccaaatagct

SEQ ID NO: 12269 - DNA, 20 bp, synthetic construct
  misc_feature 1..20: note = Description of Artificial Sequence: Synthetic oligonucleotide
  misc_feature 1..20: note = Target: FXN; (-) strand; PAM type: NRG; PAM sequence: TAG
  source 1..20: mol_type = other DNA
gcttcagcctaccaaatagc

SEQ ID NO: 12270 - DNA, 20 bp, synthetic construct
  misc_feature 1..20: note = Description of Artificial Sequence: Synthetic oligonucleotide
  misc_feature 1..20: note = Target: FXN; (-) strand; PAM type: NRG; PAM sequence: TAG
  source 1..20: mol_type = other DNA
tcctgcttcagcctaccaaa

SEQ ID NO: 12271 - DNA, 20 bp, synthetic construct
  misc_feature 1..20: note = Description of Artificial Sequence: Synthetic oligonucleotide
  misc_feature 1..20: note = Target: FXN; (-) strand; PAM type: NRG; PAM sequence: CAG
  source 1..20: mol_type = other DNA
cttaagtgatgctcctgctt

SEQ ID NO: 12272 - DNA, 20 bp, synthetic construct
  misc_feature 1..20: note = Description of Artificial Sequence: Synthetic oligonucleotide
  misc_feature 1..20: note = Target: FXN; (-) strand; PAM type: NRG; PAM sequence: AAG
  source 1..20: mol_type = other DNA
tgcctcgaactcccagtctt

SEQ ID NO: 12273 - DNA, 20 bp, synthetic construct
  misc_feature 1..20: note = Description of Artificial Sequence: Synthetic oligonucleotide
  misc_feature 1..20: note = Target: FXN; (-) strand; PAM type: NRG; PAM sequence: CAG
  source 1..20: mol_type = other DNA
tcacagctgcctcgaactcc

SEQ ID NO: 12274 - DNA, 20 bp, synthetic construct
  misc_feature 1..20: note = Description of Artificial Sequence: Synthetic oligonucleotide
  misc_feature 1..20: note = Target: FXN; (-) strand; PAM type: NRG; PAM sequence: CAG
  source 1..20: mol_type = other DNA
agtggtgcgatcatggctca

SEQ ID NO: 12275 - DNA, 20 bp, synthetic construct
  misc_feature 1..20: note = Description of Artificial Sequence: Synthetic oligonucleotide
  misc_feature 1..20: note = Target: FXN; (-) strand; PAM type: NRG; PAM sequence: TGG
  source 1..20: mol_type = other DNA
ggagaacagtggtgcgatca

SEQ ID NO: 12276 - DNA, 20 bp, synthetic construct
  misc_feature 1..20: note = Description of Artificial Sequence: Synthetic oligonucleotide
  misc_feature 1..20: note = Target: FXN; (-) strand; PAM type: NRG; PAM sequence: TGG
  source 1..20: mol_type = other DNA
tcatcctggctggagaacag

SEQ ID NO: 12277 - DNA, 20 bp, synthetic construct
  misc_feature 1..20: note = Description of Artificial Sequence: Synthetic oligonucleotide
  misc_feature 1..20: note = Target: FXN; (-) strand; PAM type: NRG; PAM sequence: CAG
  source 1..20: mol_type = other DNA
ctgtcatcctggctggagaa

SEQ ID NO: 12278 - DNA, 20 bp, synthetic construct
  misc_feature 1..20: note = Description of Artificial Sequence: Synthetic oligonucleotide
  misc_feature 1..20: note = Target: FXN; (-) strand; PAM type: NRG; PAM sequence: GAG
  source 1..20: mol_type = other DNA
ttgccctgtcatcctggctg

SEQ ID NO: 12279 - DNA, 20 bp, synthetic construct
  misc_feature 1..20: note = Description of Artificial Sequence: Synthetic oligonucleotide
  misc_feature 1..20: note = Target: FXN; (-) strand; PAM type: NRG; PAM sequence: TGG
  source 1..20: mol_type = other DNA
tcttgccctgtcatcctggc

SEQ ID NO: 12280 - DNA, 20 bp, synthetic construct
  misc_feature 1..20: note = Description of Artificial Sequence: Synthetic oligonucleotide
  misc_feature 1..20: note = Target: FXN; (-) strand; PAM type: NRG; PAM sequence: TGG
  source 1..20: mol_type = other DNA
agggtcttgccctgtcatcc

SEQ ID NO: 12281 - DNA, 20 bp, synthetic construct
  misc_feature 1..20: note = Description of Artificial Sequence: Synthetic oligonucleotide
  misc_feature 1..20: note = Target: FXN; (-) strand; PAM type: NRG; PAM sequence: GGG
  source 1..20: mol_type = other DNA
ccacagagtggtctaagaca

SEQ ID NO: 12282 - DNA, 20 bp, synthetic construct
  misc_feature 1..20: note = Description of Artificial Sequence: Synthetic oligonucleotide
  misc_feature 1..20: note = Target: FXN; (-) strand; PAM type: NRG; PAM sequence: AGG
  source 1..20: mol_type = other DNA
accacagagtggtctaagac

SEQ ID NO: 12283 - DNA, 20 bp, synthetic construct
  misc_feature 1..20: note = Description of Artificial Sequence: Synthetic oligonucleotide
  misc_feature 1..20: note = Target: FXN; (-) strand; PAM type: NRG; PAM sequence: CAG
  source 1..20: mol_type = other DNA
gaccacagagtggtctaaga

SEQ ID NO: 12284 - DNA, 20 bp, synthetic construct
  misc_feature 1..20: note = Description of Artificial Sequence: Synthetic oligonucleotide
  misc_feature 1..20: note = Target: FXN; (-) strand; PAM type: NRG; PAM sequence: AAG
  source 1..20: mol_type = other DNA
cactgaccacagagtggtct

SEQ ID NO: 12285 - DNA, 20 bp, synthetic construct
  misc_feature 1..20: note = Description of Artificial Sequence: Synthetic oligonucleotide
  misc_feature 1..20: note = Target: FXN; (-) strand; PAM type: NRG; PAM sequence: TGG
  source 1..20: mol_type = other DNA
gataaccactgaccacagag

SEQ ID NO: 12286 - DNA, 20 bp, synthetic construct
  misc_feature 1..20: note = Description of Artificial Sequence: Synthetic oligonucleotide
  misc_feature 1..20: note = Target: FXN; (-) strand; PAM type: NRG; PAM sequence: GAG
  source 1..20: mol_type = other DNA
cctgataaccactgaccaca

SEQ ID NO: 12287 - DNA, 20 bp, synthetic construct
  misc_feature 1..20: note = Description of Artificial Sequence: Synthetic oligonucleotide
  misc_feature 1..20: note = Target: FXN; (-) strand; PAM type: NRG; PAM sequence: CAG
  source 1..20: mol_type = other DNA
ttcctgataaccactgacca

SEQ ID NO: 12288 - DNA, 20 bp, synthetic construct
  misc_feature 1..20: note = Description of Artificial Sequence: Synthetic oligonucleotide
  misc_feature 1..20: note = Target: FXN; (-) strand; PAM type: NRG; PAM sequence: TAG
  source 1..20: mol_type = other DNA
gtggtttcagcacaactgac

SEQ ID NO: 12289 - DNA, 20 bp, synthetic construct
  misc_feature 1..20: note = Description of Artificial Sequence: Synthetic oligonucleotide
  misc_feature 1..20: note = Target: FXN; (-) strand; PAM type: NRG; PAM sequence: CAG
  source 1..20: mol_type = other DNA
cccttcctttttagtggttt

SEQ ID NO: 12290 - DNA, 20 bp, synthetic construct
  misc_feature 1..20: note = Description of Artificial Sequence: Synthetic oligonucleotide
  misc_feature 1..20: note = Target: FXN; (-) strand; PAM type: NRG; PAM sequence: TGG
  source 1..20: mol_type = other DNA
attctgcccttcctttttag

SEQ ID NO: 12291 - DNA, 20 bp, synthetic construct
  misc_feature 1..20: note = Description of Artificial Sequence: Synthetic oligonucleotide
  misc_feature 1..20: note = Target: FXN; (-) strand; PAM type: NRG; PAM sequence: TAG
  source 1..20: mol_type = other DNA
ctaattctgcccttcctttt

SEQ ID NO: 12292 - DNA, 20 bp, synthetic construct
  misc_feature 1..20: note = Description of Artificial Sequence: Synthetic oligonucleotide
  misc_feature 1..20: note = Target: FXN; (-) strand; PAM type: NRG; PAM sequence: TGG
  source 1..20: mol_type = other DNA
aaaaagactcacttcaccac

SEQ ID NO: 12293 - DNA, 20 bp, synthetic construct
  misc_feature 1..20: note = Description of Artificial Sequence: Synthetic oligonucleotide
  misc_feature 1..20: note = Target: FXN; (-) strand; PAM type: NRG; PAM sequence: AAG
  source 1..20: mol_type = other DNA
tcaaaaagaaaaaaaaaaaa

SEQ ID NO: 12294 - DNA, 20 bp, synthetic construct
  misc_feature 1..20: note = Description of Artificial Sequence: Synthetic oligonucleotide
  misc_feature 1..20: note = Target: FXN; (-) strand; PAM type: NRG; PAM sequence: AAG
  source 1..20: mol_type = other DNA
gagcaagactccatctcaaa

SEQ ID NO: 12295 - DNA, 20 bp, synthetic construct
  misc_feature 1..20: note = Description of Artificial Sequence: Synthetic oligonucleotide
  misc_feature 1..20: note = Target: FXN; (-) strand; PAM type: NRG; PAM sequence: AAG
  source 1..20: mol_type = other DNA
tccagcctgggcaacagagc

SEQ ID NO: 12296 - DNA, 20 bp, synthetic construct
  misc_feature 1..20: note = Description of Artificial Sequence: Synthetic oligonucleotide
  misc_feature 1..20: note = Target: FXN; (-) strand; PAM type: NRG; PAM sequence: GAG
  source 1..20: mol_type = other DNA
acactccagcctgggcaaca

SEQ ID NO: 12297 - DNA, 20 bp, synthetic construct
  misc_feature 1..20: note = Description of Artificial Sequence: Synthetic oligonucleotide
  misc_feature 1..20: note = Target: FXN; (-) strand; PAM type: NRG; PAM sequence: CAG
  source 1..20: mol_type = other DNA
ctacactccagcctgggcaa

SEQ ID NO: 12298 - DNA, 20 bp, synthetic construct
  misc_feature 1..20: note = Description of Artificial Sequence: Synthetic oligonucleotide
  misc_feature 1..20: note = Target: FXN; (-) strand; PAM type: NRG; PAM sequence: GGG
  source 1..20: mol_type = other DNA
acaccactacactccagcct

SEQ ID NO: 12299 - DNA, 20 bp, synthetic construct
  misc_feature 1..20: note = Description of Artificial Sequence: Synthetic oligonucleotide
  misc_feature 1..20: note = Target: FXN; (-) strand; PAM type: NRG; PAM sequence: TGG
  source 1..20: mol_type = other DNA
cacaccactacactccagcc

SEQ ID NO: 12300 - DNA, 20 bp, synthetic construct
  misc_feature 1..20: note = Description of Artificial Sequence: Synthetic oligonucleotide
  misc_feature 1..20: note = Target: FXN; (-) strand; PAM type: NRG; PAM sequence: CAG
  source 1..20: mol_type = other DNA
gagatcacaccactacactc

SEQ ID NO: 12301 - DNA, 20 bp, synthetic construct
  misc_feature 1..20: note = Description of Artificial Sequence: Synthetic oligonucleotide
  misc_feature 1..20: note = Target: FXN; (-) strand; PAM type: NRG; PAM sequence: GAG
  source 1..20: mol_type = other DNA
ggtggaggttgcgatgagct

SEQ ID NO: 12302 - DNA, 20 bp, synthetic construct
  misc_feature 1..20: note = Description of Artificial Sequence: Synthetic oligonucleotide
  misc_feature 1..20: note = Target: FXN; (-) strand; PAM type: NRG; PAM sequence: GAG
  source 1..20: mol_type = other DNA
caggaggtggaggttgcgat

SEQ ID NO: 12303 - DNA, 20 bp, synthetic construct
  misc_feature 1..20: note = Description of Artificial Sequence: Synthetic oligonucleotide
  misc_feature 1..20: note = Target: FXN; (-) strand; PAM type: NRG; PAM sequence: AGG
  source 1..20: mol_type = other DNA
cacttgaacccaggaggtgg

SEQ ID NO: 12304 - DNA, 20 bp, synthetic construct
  misc_feature 1..20: note = Description of Artificial Sequence: Synthetic oligonucleotide
  misc_feature 1..20: note = Target: FXN; (-) strand; PAM type: NRG; PAM sequence: GAG
  source 1..20: mol_type = other DNA
tcacttgaacccaggaggtg

SEQ ID NO: 12305 - DNA, 20 bp, synthetic construct
  misc_feature 1..20: note = Description of Artificial Sequence: Synthetic oligonucleotide
  misc_feature 1..20: note = Target: FXN; (-) strand; PAM type: NRG; PAM sequence: TGG
  source 1..20: mol_type = other DNA
aatcacttgaacccaggagg

SEQ ID NO: 12306 - DNA, 20 bp, synthetic construct
  misc_feature 1..20: note = Description of Artificial Sequence: Synthetic oligonucleotide
  misc_feature 1..20: note = Target: FXN; (-) strand; PAM type: NRG; PAM sequence: AGG
  source 1..20: mol_type = other DNA
gagaatcacttgaacccagg

SEQ ID NO: 12307 - DNA, 20 bp, synthetic construct
  misc_feature 1..20: note = Description of Artificial Sequence: Synthetic oligonucleotide
  misc_feature 1..20: note = Target: FXN; (-) strand; PAM type: NRG; PAM sequence: GAG
  source 1..20: mol_type = other DNA
agagaatcacttgaacccag

SEQ ID NO: 12308 - DNA, 20 bp, synthetic construct
  misc_feature 1..20: note = Description of Artificial Sequence: Synthetic oligonucleotide
  misc_feature 1..20: note = Target: FXN; (-) strand; PAM type: NRG; PAM sequence: AGG
  source 1..20: mol_type = other DNA
caagagaatcacttgaaccc

SEQ ID NO: 12309 - DNA, 20 bp, synthetic construct
  misc_feature 1..20: note = Description of Artificial Sequence: Synthetic oligonucleotide
  misc_feature 1..20: note = Target: FXN; (-) strand; PAM type: NRG; PAM sequence: CAG
  source 1..20: mol_type = other DNA
gcaagagaatcacttgaacc

SEQ ID NO: 12310 - DNA, 20 bp, synthetic construct
  misc_feature 1..20: note = Description of Artificial Sequence: Synthetic oligonucleotide
  misc_feature 1..20: note = Target: FXN; (-) strand; PAM type: NRG; PAM sequence: GAG
  source 1..20: mol_type = other DNA
tactcgggaggctgaggcaa

SEQ ID NO: 12311 - DNA, 20 bp, synthetic construct
  misc_feature 1..20: note = Description of Artificial Sequence: Synthetic oligonucleotide
  misc_feature 1..20: note = Target: FXN; (-) strand; PAM type: NRG; PAM sequence: AAG
  source 1..20: mol_type = other DNA
gctactcgggaggctgaggc

SEQ ID NO: 12312 - DNA, 20 bp, synthetic construct
  misc_feature 1..20: note = Description of Artificial Sequence: Synthetic oligonucleotide
  misc_feature 1..20: note = Target: FXN; (-) strand; PAM type: NRG; PAM sequence: AGG
  source 1..20: mol_type = other DNA
cccagctactcgggaggctg

SEQ ID NO: 12313 - DNA, 20 bp, synthetic construct
  misc_feature 1..20: note = Description of Artificial Sequence: Synthetic oligonucleotide
  misc_feature 1..20: note = Target: FXN; (-) strand; PAM type: NRG; PAM sequence: GAG
  source 1..20: mol_type = other DNA
tcccagctactcgggaggct

SEQ ID NO: 12314 - DNA, 20 bp, synthetic construct
  misc_feature 1..20: note = Description of Artificial Sequence: Synthetic oligonucleotide
  misc_feature 1..20: note = Target: FXN; (-) strand; PAM type: NRG; PAM sequence: AGG
  source 1..20: mol_type = other DNA
tgtaatcccagctactcggg

SEQ ID NO: 12315 - DNA, 20 bp, synthetic construct
  misc_feature 1..20: note = Description of Artificial Sequence: Synthetic oligonucleotide
  misc_feature 1..20: note = Target: FXN; (-) strand; PAM type: NRG; PAM sequence: GAG
  source 1..20: mol_type = other DNA
ctgtaatcccagctactcgg

SEQ ID NO: 12316 - DNA, 20 bp, synthetic construct
  misc_feature 1..20: note = Description of Artificial Sequence: Synthetic oligonucleotide
  misc_feature 1..20: note = Target: FXN; (-) strand; PAM type: NRG; PAM sequence: GGG
  source 1..20: mol_type = other DNA
gcctgtaatcccagctactc

SEQ ID NO: 12317 - DNA, 20 bp, synthetic construct
  misc_feature 1..20: note = Description of Artificial Sequence: Synthetic oligonucleotide
  misc_feature 1..20: note = Target: FXN; (-) strand; PAM type: NRG; PAM sequence: CGG
  source 1..20: mol_type = other DNA
cgcctgtaatcccagctact

SEQ ID NO: 12318 - DNA, 20 bp, synthetic construct
  misc_feature 1..20: note = Description of Artificial Sequence: Synthetic oligonucleotide
  misc_feature 1..20: note = Target: FXN; (-) strand; PAM type: NRG; PAM sequence: CAG
  source 1..20: mol_type = other DNA
gtggcaggcgcctgtaatcc

SEQ ID NO: 12319 - DNA, 20 bp, synthetic construct
  misc_feature 1..20: note = Description of Artificial Sequence: Synthetic oligonucleotide
  misc_feature 1..20: note = Target: FXN; (-) strand; PAM type: NRG; PAM sequence: AGG
  source 1..20: mol_type = other DNA
aattagccaggcgtggtggc

SEQ ID NO: 12320 - DNA, 20 bp, synthetic construct
  misc_feature 1..20: note = Description of Artificial Sequence: Synthetic oligonucleotide
  misc_feature 1..20: note = Target: FXN; (-) strand; PAM type: NRG; PAM sequence: CAG
  source 1..20: mol_type = other DNA
aaattagccaggcgtggtgg

SEQ ID NO: 12321 - DNA, 20 bp, synthetic construct
  misc_feature 1..20: note = Description of Artificial Sequence: Synthetic oligonucleotide
  misc_feature 1..20: note = Target: FXN; (-) strand; PAM type: NRG; PAM sequence: TGG
  source 1..20: mol_type = other DNA
aaaaaattagccaggcgtgg

SEQ ID NO: 12322 - DNA, 20 bp, synthetic construct
  misc_feature 1..20: note = Description of Artificial Sequence: Synthetic oligonucleotide
  misc_feature 1..20: note = Target: FXN; (-) strand; PAM type: NRG; PAM sequence: TGG
  source 1..20: mol_type = other DNA
ataaaaaaattagccaggcg

SEQ ID NO: 12323 - DNA, 20 bp, synthetic construct
  misc_feature 1..20: note = Description of Artificial Sequence: Synthetic oligonucleotide
  misc_feature 1..20: note = Target: FXN; (-) strand; PAM type: NRG; PAM sequence: AGG
  source 1..20: mol_type = other DNA
aaaatataaaaaaattagcc

SEQ ID NO: 12324 - DNA, 20 bp, synthetic construct
  misc_feature 1..20: note = Description of Artificial Sequence: Synthetic oligonucleotide
  misc_feature 1..20: note = Target: FXN; (-) strand; PAM type: NRG; PAM sequence: CAG
  source 1..20: mol_type = other DNA
aaaaatataaaaaaattagc

SEQ ID NO: 12325 - DNA, 20 bp, synthetic construct
  misc_feature 1..20: note = Description of Artificial Sequence: Synthetic oligonucleotide
  misc_feature 1..20: note = Target: FXN; (-) strand; PAM type: NRG; PAM sequence: TAG
  source 1..20: mol_type = other DNA
tactaaaaatataaaaaaat

SEQ ID NO: 12326 - DNA, 20 bp, synthetic construct
  misc_feature 1..20: note = Description of Artificial Sequence: Synthetic oligonucleotide
  misc_feature 1..20: note = Target: FXN; (-) strand; PAM type: NRG; PAM sequence: CAG
  source 1..20: mol_type = other DNA
cctgacaacatggcaaaacc

SEQ ID NO: 12327 - DNA, 20 bp, synthetic construct
  misc_feature 1..20: note = Description of Artificial Sequence: Synthetic oligonucleotide
  misc_feature 1..20: note = Target: FXN; (-) strand; PAM type: NRG; PAM sequence: TGG
  source 1..20: mol_type = other DNA
tcaagactagcctgacaaca

SEQ ID NO: 12328 - DNA, 20 bp, synthetic construct
  misc_feature 1..20: note = Description of Artificial Sequence: Synthetic oligonucleotide
  misc_feature 1..20: note = Target: FXN; (-) strand; PAM type: NRG; PAM sequence: TAG
  source 1..20: mol_type = other DNA
tgaggtcaggagttcaagac

SEQ ID NO: 12329 - DNA, 20 bp, synthetic construct
  misc_feature 1..20: note = Description of Artificial Sequence: Synthetic oligonucleotide
  misc_feature 1..20: note = Target: FXN; (-) strand; PAM type: NRG; PAM sequence: AAG
  source 1..20: mol_type = other DNA
ttacctgaggtcaggagttc

SEQ ID NO: 12330 - DNA, 20 bp, synthetic construct
  misc_feature 1..20: note = Description of Artificial Sequence: Synthetic oligonucleotide
  misc_feature 1..20: note = Target: FXN; (-) strand; PAM type: NRG; PAM sequence: GAG
  source 1..20: mol_type = other DNA
gttggattacctgaggtcag

SEQ ID NO: 12331 - DNA, 20 bp, synthetic construct
  misc_feature 1..20: note = Description of Artificial Sequence: Synthetic oligonucleotide
  misc_feature 1..20: note = Target: FXN; (-) strand; PAM type: NRG; PAM sequence: AGG
  source 1..20: mol_type = other DNA
cagttggattacctgaggtc

SEQ ID NO: 12332 - DNA, 20 bp, synthetic construct
  misc_feature 1..20: note = Description of Artificial Sequence: Synthetic oligonucleotide
  misc_feature 1..20: note = Target: FXN; (-) strand; PAM type: NRG; PAM sequence: CAG
  source 1..20: mol_type = other DNA
gcagttggattacctgaggt

SEQ ID NO: 12333 - DNA, 20 bp, synthetic construct
  misc_feature 1..20: note = Description of Artificial Sequence: Synthetic oligonucleotide
  misc_feature 1..20: note = Target: FXN; (-) strand; PAM type: NRG; PAM sequence: AGG
  source 1..20: mol_type = other DNA
caaagcagttggattacctg

SEQ ID NO: 12334 - DNA, 20 bp, synthetic construct
  misc_feature 1..20: note = Description of Artificial Sequence: Synthetic oligonucleotide
  misc_feature 1..20: note = Target: FXN; (-) strand; PAM type: NRG; PAM sequence: GAG
  source 1..20: mol_type = other DNA
ccaaagcagttggattacct

SEQ ID NO: 12335 - DNA, 20 bp, synthetic construct
  misc_feature 1..20: note = Description of Artificial Sequence: Synthetic oligonucleotide
  misc_feature 1..20: note = Target: FXN; (-) strand; PAM type: NRG; PAM sequence: TGG
  source 1..20: mol_type = other DNA
ctttgggaggccaaagcagt

SEQ ID NO: 12336 - DNA, 20 bp, synthetic construct
  misc_feature 1..20: note = Description of Artificial Sequence: Synthetic oligonucleotide
  misc_feature 1..20: note = Target: FXN; (-) strand; PAM type: NRG; PAM sequence: CAG
  source 1..20: mol_type = other DNA
agcactttgggaggccaaag

SEQ ID NO: 12337 - DNA, 20 bp, synthetic construct
  misc_feature 1..20: note = Description of Artificial Sequence: Synthetic oligonucleotide
  misc_feature 1..20: note = Target: FXN; (-) strand; PAM type: NRG; PAM sequence: AAG
  source 1..20: mol_type = other DNA
cccagcactttgggaggcca

SEQ ID NO: 12338 - DNA, 20 bp, synthetic construct
  misc_feature 1..20: note = Description of Artificial Sequence: Synthetic oligonucleotide
  misc_feature 1..20: note = Target: FXN; (-) strand; PAM type: NRG; PAM sequence: AGG
  source 1..20: mol_type = other DNA
tgtaatcccagcactttggg

SEQ ID NO: 12339 - DNA, 20 bp, synthetic construct
  misc_feature 1..20: note = Description of Artificial Sequence: Synthetic oligonucleotide
  misc_feature 1..20: note = Target: FXN; (-) strand; PAM type: NRG; PAM sequence: GAG
  source 1..20: mol_type = other DNA
ctgtaatcccagcactttgg

SEQ ID NO: 12340 - DNA, 20 bp, synthetic construct
  misc_feature 1..20: note = Description of Artificial Sequence: Synthetic oligonucleotide
  misc_feature 1..20: note = Target: FXN; (-) strand; PAM type: NRG; PAM sequence: GGG
  source 1..20: mol_type = other DNA
gcctgtaatcccagcacttt

SEQ ID NO: 12341 - DNA, 20 bp, synthetic construct
  misc_feature 1..20: note = Description of Artificial Sequence: Synthetic oligonucleotide
  misc_feature 1..20: note = Target: FXN; (-) strand; PAM type: NRG; PAM sequence: TGG
  source 1..20: mol_type = other DNA
tgcctgtaatcccagcactt

SEQ ID NO: 12342 - DNA, 20 bp, synthetic construct
  misc_feature 1..20: note = Description of Artificial Sequence: Synthetic oligonucleotide
  misc_feature 1..20: note = Target: FXN; (-) strand; PAM type: NRG; PAM sequence: CAG
  source 1..20: mol_type = other DNA
tttggagctgcctgtaatcc

SEQ ID NO: 12343 - DNA, 20 bp, synthetic construct
  misc_feature 1..20: note = Description of Artificial Sequence: Synthetic oligonucleotide
  misc_feature 1..20: note = Target: FXN; (-) strand; PAM type: NRG; PAM sequence: GAG
  source 1..20: mol_type = other DNA
cctgtaatcccagcactttg

SEQ ID NO: 12344 - DNA, 20 bp, synthetic construct
  misc_feature 1..20: note = Description of Artificial Sequence: Synthetic oligonucleotide
  misc_feature 1..20: note = Target: FXN; (-) strand; PAM type: NRG; PAM sequence: TGG
  source 1..20: mol_type = other DNA
tgcctgtaatcccagcactt

SEQ ID NO: 12345 - DNA, 20 bp, synthetic construct
  misc_feature 1..20: note = Description of Artificial Sequence: Synthetic oligonucleotide
  misc_feature 1..20: note = Target: FXN; (-) strand; PAM type: NRG; PAM sequence: CAG
  source 1..20: mol_type = other DNA
gtggctcatgcctgtaatcc

SEQ ID NO: 12346 - DNA, 20 bp, synthetic construct
  misc_feature 1..20: note = Description of Artificial Sequence: Synthetic oligonucleotide
  misc_feature 1..20: note = Target: FXN; (-) strand; PAM type: NRG; PAM sequence: TGG
  source 1..20: mol_type = other DNA
ttatttcaggccatgcatgg

SEQ ID NO: 12347 - DNA, 20 bp, synthetic construct
  misc_feature 1..20: note = Description of Artificial Sequence: Synthetic oligonucleotide
  misc_feature 1..20: note = Target: FXN; (-) strand; PAM type: NRG; PAM sequence: TGG
  source 1..20: mol_type = other DNA
aaattatttcaggccatgca

SEQ ID NO: 12348 - DNA, 20 bp, synthetic construct
  misc_feature 1..20: note = Description of Artificial Sequence: Synthetic oligonucleotide
  misc_feature 1..20: note = Target: FXN; (-) strand; PAM type: NRG; PAM sequence: AGG
  source 1..20: mol_type = other DNA
cctttcaaaaaaattatttc

SEQ ID NO: 12349 - DNA, 20 bp, synthetic construct
  misc_feature 1..20: note = Description of Artificial Sequence: Synthetic oligonucleotide
  misc_feature 1..20: note = Target: FXN; (-) strand; PAM type: NRG; PAM sequence: CAG
  source 1..20: mol_type = other DNA
ccctttcaaaaaaattattt

SEQ ID NO: 12350 - DNA, 20 bp, synthetic construct
  misc_feature 1..20: note = Description of Artificial Sequence: Synthetic oligonucleotide
  misc_feature 1..20: note = Target: FXN; (-) strand; PAM type: NRG; PAM sequence: TAG
  source 1..20: mol_type = other DNA
cctaagggctaaatagaaac

SEQ ID NO: 12351 - DNA, 20 bp, synthetic construct
  misc_feature 1..20: note = Description of Artificial Sequence: Synthetic oligonucleotide
  misc_feature 1..20: note = Target: FXN; (-) strand; PAM type: NRG; PAM sequence: TAG
  source 1..20: mol_type = other DNA
tttttcccctaagggctaaa

SEQ ID NO: 12352 - DNA, 20 bp, synthetic construct
  misc_feature 1..20: note = Description of Artificial Sequence: Synthetic oligonucleotide
  misc_feature 1..20: note = Target: FXN; (-) strand; PAM type: NRG; PAM sequence: GGG
  source 1..20: mol_type = other DNA
attagttttttttcccctaa

SEQ ID NO: 12353 - DNA, 20 bp, synthetic construct
  misc_feature 1..20: note = Description of Artificial Sequence: Synthetic oligonucleotide
  misc_feature 1..20: note = Target: FXN; (-) strand; PAM type: NRG; PAM sequence: AGG
  source 1..20: mol_type = other DNA
cattagttttttttccccta

SEQ ID NO: 12354 - DNA, 20 bp, synthetic construct
  misc_feature 1..20: note = Description of Artificial Sequence: Synthetic oligonucleotide
  misc_feature 1..20: note = Target: FXN; (-) strand; PAM type: NRG; PAM sequence: AAG
  source 1..20: mol_type = other DNA
ccattagttttttttcccct

SEQ ID NO: 12355 - DNA, 20 bp, synthetic construct
  misc_feature 1..20: note = Description of Artificial Sequence: Synthetic oligonucleotide
  misc_feature 1..20: note = Target: FXN; (-) strand; PAM type: NRG; PAM sequence: TAG
  source 1..20: mol_type = other DNA
attccctccctaactgccat

SEQ ID NO: 12356 - DNA, 20 bp, synthetic construct
  misc_feature 1..20: note = Description of Artificial Sequence: Synthetic oligonucleotide
  misc_feature 1..20: note = Target: FXN; (-) strand; PAM type: NRG; PAM sequence: AGG
  source 1..20: mol_type = other DNA
gatgggaaaggagttcaaac

SEQ ID NO: 12357 - DNA, 20 bp, synthetic construct
  misc_feature 1..20: note = Description of Artificial Sequence: Synthetic oligonucleotide
  misc_feature 1..20: note = Target: FXN; (-) strand; PAM type: NRG; PAM sequence: CAG
  source 1..20: mol_type = other DNA
tgatgggaaaggagttcaaa

SEQ ID NO: 12358 - DNA, 20 bp, synthetic construct
  misc_feature 1..20: note = Description of Artificial Sequence: Synthetic oligonucleotide
  misc_feature 1..20: note = Target: FXN; (-) strand; PAM type: NRG; PAM sequence: GAG
  source 1..20: mol_type = other DNA
ttttggccatgatgggaaag

SEQ ID NO: 12359 - DNA, 20 bp, synthetic construct
  misc_feature 1..20: note = Description of Artificial Sequence: Synthetic oligonucleotide
  misc_feature 1..20: note = Target: FXN; (-) strand; PAM type: NRG; PAM sequence: AGG
  source 1..20: mol_type = other DNA
agttttggccatgatgggaa

SEQ ID NO: 12360 - DNA, 20 bp, synthetic construct
  misc_feature 1..20: note = Description of Artificial Sequence: Synthetic oligonucleotide
  misc_feature 1..20: note = Target: FXN; (-) strand; PAM type: NRG; PAM sequence: AAG
  source 1..20: mol_type = other DNA
aagttttggccatgatggga

SEQ ID NO: 12361 - DNA, 20 bp, synthetic construct
  misc_feature 1..20: note = Description of Artificial Sequence: Synthetic oligonucleotide
  misc_feature 1..20: note = Target: FXN; (-) strand; PAM type: NRG; PAM sequence: GGG
  source 1..20: mol_type = other DNA
ttttaagttttggccatgat

SEQ ID NO: 12362 - DNA, 20 bp, synthetic construct
  misc_feature 1..20: note = Description of Artificial Sequence: Synthetic oligonucleotide
  misc_feature 1..20: note = Target: FXN; (-) strand; PAM type: NRG; PAM sequence: TGG
  source 1..20: mol_type = other DNA
attttaagttttggccatga

SEQ ID NO: 12363 - DNA, 20 bp, synthetic construct
  misc_feature 1..20: note = Description of Artificial Sequence: Synthetic oligonucleotide
  misc_feature 1..20: note = Target: FXN; (-) strand; PAM type: NRG; PAM sequence: TGG
  source 1..20: mol_type = other DNA
ctaaaaaaaattttaagttt

SEQ ID NO: 12364 - DNA, 20 bp, synthetic construct
  misc_feature 1..20: note = Description of Artificial Sequence: Synthetic oligonucleotide
  misc_feature 1..20: note = Target: FXN; (-) strand; PAM type: NRG; PAM sequence: AAG
  source 1..20: mol_type = other DNA
agatatctaaaaaaaatttt

SEQ ID NO: 12365 - DNA, 20 bp, synthetic construct
  misc_feature 1..20: note = Description of Artificial Sequence: Synthetic oligonucleotide
  misc_feature 1..20: note = Target: FXN; (-) strand; PAM type: NRG; PAM sequence: GAG
  source 1..20: mol_type = other DNA
ttttggccaaggggagccca

SEQ ID NO: 12366 - DNA, 20 bp, synthetic construct
  misc_feature 1..20: note = Description of Artificial Sequence: Synthetic oligonucleotide
  misc_feature 1..20: note = Target: FXN; (-) strand; PAM type: NRG; PAM sequence: CAG
  source 1..20: mol_type = other DNA
tcttttggccaaggggagcc

SEQ ID NO: 12367 - DNA, 20 bp, synthetic construct
  misc_feature 1..20: note = Description of Artificial Sequence: Synthetic oligonucleotide
  misc_feature 1..20: note = Target: FXN; (-) strand; PAM type: NRG; PAM sequence: GAG
  source 1..20: mol_type = other DNA
aactatcttttggccaaggg

SEQ ID NO: 12368 - DNA, 20 bp, synthetic construct
  misc_feature 1..20: note = Description of Artificial Sequence: Synthetic oligonucleotide
  misc_feature 1..20: note = Target: FXN; (-) strand; PAM type: NRG; PAM sequence: GGG
  source 1..20: mol_type = other DNA
caaactatcttttggccaag

SEQ ID NO: 12369 - DNA, 20 bp, synthetic construct
  misc_feature 1..20: note = Description of Artificial Sequence: Synthetic oligonucleotide
  misc_feature 1..20: note = Target: FXN; (-) strand; PAM type: NRG; PAM sequence: GGG
  source 1..20: mol_type = other DNA
acaaactatcttttggccaa

SEQ ID NO: 12370 - DNA, 20 bp, synthetic construct
  misc_feature 1..20: note = Description of Artificial Sequence: Synthetic oligonucleotide
  misc_feature 1..20: note = Target: FXN; (-) strand; PAM type: NRG; PAM sequence: AGG
  source 1..20: mol_type = other DNA
aacaaactatcttttggcca

SEQ ID NO: 12371 - DNA, 20 bp, synthetic construct
  misc_feature 1..20: note = Description of Artificial Sequence: Synthetic oligonucleotide
  misc_feature 1..20: note = Target: FXN; (-) strand; PAM type: NRG; PAM sequence: AAG
  source 1..20: mol_type = other DNA
caacaaactatcttttggcc

SEQ ID NO: 12372 - DNA, 20 bp, synthetic construct
  misc_feature 1..20: note = Description of Artificial Sequence: Synthetic oligonucleotide
  misc_feature 1..20: note = Target: FXN; (-) strand; PAM type: NRG; PAM sequence: TGG
  source 1..20: mol_type = other DNA
tgactcaacaaactatcttt

SEQ ID NO: 12373 - DNA, 20 bp, synthetic construct
  misc_feature 1..20: note = Description of Artificial Sequence: Synthetic oligonucleotide
  misc_feature 1..20: note = Target: FXN; (-) strand; PAM type: NRG; PAM sequence: AAG
  source 1..20: mol_type = other DNA
agaaataaaaacaaaattct

SEQ ID NO: 12374 - DNA, 20 bp, synthetic construct
  misc_feature 1..20: note = Description of Artificial Sequence: Synthetic oligonucleotide
  misc_feature 1..20: note = Target: FXN; (-) strand; PAM type: NRG; PAM sequence: GAG
  source 1..20: mol_type = other DNA
tcaaattgattcaatgatgt

SEQ ID NO: 12375 - DNA, 20 bp, synthetic construct
  misc_feature 1..20: note = Description of Artificial Sequence: Synthetic oligonucleotide
  misc_feature 1..20: note = Target: FXN; (-) strand; PAM type: NRG; PAM sequence: TGG
  source 1..20: mol_type = other DNA
gagcagaaggttttgtcgcc

SEQ ID NO: 12376 - DNA, 20 bp, synthetic construct
  misc_feature 1..20: note = Description of Artificial Sequence: Synthetic oligonucleotide
  misc_feature 1..20: note = Target: FXN; (-) strand; PAM type: NRG; PAM sequence: AGG
  source 1..20: mol_type = other DNA
gacccactactgggagcaga

SEQ ID NO: 12377 - DNA, 20 bp, synthetic construct
  misc_feature 1..20: note = Description of Artificial Sequence: Synthetic oligonucleotide
  misc_feature 1..20: note = Target: FXN; (-) strand; PAM type: NRG; PAM sequence: AAG
  source 1..20: mol_type = other DNA
tgacccactactgggagcag

SEQ ID NO: 12378 - DNA, 20 bp, synthetic construct
  misc_feature 1..20: note = Description of Artificial Sequence: Synthetic oligonucleotide
  misc_feature 1..20: note = Target: FXN; (-) strand; PAM type: NRG; PAM sequence: CAG
  source 1..20: mol_type = other DNA
ctctgacccactactgggag

SEQ ID NO: 12379 - DNA, 20 bp, synthetic construct
  misc_feature 1..20: note = Description of Artificial Sequence: Synthetic oligonucleotide
  misc_feature 1..20: note = Target: FXN; (-) strand; PAM type: NRG; PAM sequence: GAG
  source 1..20: mol_type = other DNA
gttctctgacccactactgg

SEQ ID NO: 12380 - DNA, 20 bp, synthetic construct
  misc_feature 1..20: note = Description of Artificial Sequence: Synthetic oligonucleotide
  misc_feature 1..20: note = Target: FXN; (-) strand; PAM type: NRG; PAM sequence: GGG
  source 1..20: mol_type = other DNA
aggttctctgacccactact

SEQ ID NO: 12381 - DNA, 20 bp, synthetic construct
  misc_feature 1..20: note = Description of Artificial Sequence: Synthetic oligonucleotide
  misc_feature 1..20: note = Target: FXN; (-) strand; PAM type: NRG; PAM sequence: TGG
  source 1..20: mol_type = other DNA
aaggttctctgacccactac

SEQ ID NO: 12382 - DNA, 20 bp, synthetic construct
  misc_feature 1..20: note = Description of Artificial Sequence: Synthetic oligonucleotide
  misc_feature 1..20: note = Target: FXN; (-) strand; PAM type: NRG; PAM sequence: AGG
  source 1..20: mol_type = other DNA
tctcagggcaggaatcagga

SEQ ID NO: 12383 - DNA, 20 bp, synthetic construct
  misc_feature 1..20: note = Description of Artificial Sequence: Synthetic oligonucleotide
  misc_feature 1..20: note = Target: FXN; (-) strand; PAM type: NRG; PAM sequence: AAG
  source 1..20: mol_type = other DNA
atctcagggcaggaatcagg

SEQ ID NO: 12384 - DNA, 20 bp, synthetic construct
  misc_feature 1..20: note = Description of Artificial Sequence: Synthetic oligonucleotide
  misc_feature 1..20: note = Target: FXN; (-) strand; PAM type: NRG; PAM sequence: AGG
  source 1..20: mol_type = other DNA
acaatctcagggcaggaatc

SEQ ID NO: 12385 - DNA, 20 bp, synthetic construct
  misc_feature 1..20: note = Description of Artificial Sequence: Synthetic oligonucleotide
  misc_feature 1..20: note = Target: FXN; (-) strand; PAM type: NRG; PAM sequence: CAG
  source 1..20: mol_type = other DNA
gacaatctcagggcaggaat

SEQ ID NO: 12386 - DNA, 20 bp, synthetic construct
  misc_feature 1..20: note = Description of Artificial Sequence: Synthetic oligonucleotide
  misc_feature 1..20: note = Target: FXN; (-) strand; PAM type: NRG; PAM sequence: AGG
  source 1..20: mol_type = other DNA
cagagagacaatctcagggc

SEQ ID NO: 12387 - DNA, 20 bp, synthetic construct
  misc_feature 1..20: note = Description of Artificial Sequence: Synthetic oligonucleotide
  misc_feature 1..20: note = Target: FXN; (-) strand; PAM type: NRG; PAM sequence: CAG
  source 1..20: mol_type = other DNA
tcagagagacaatctcaggg

SEQ ID NO: 12388 - DNA, 20 bp, synthetic construct
  misc_feature 1..20: note = Description of Artificial Sequence: Synthetic oligonucleotide
  misc_feature 1..20: note = Target: FXN; (-) strand; PAM type: NRG; PAM sequence: GGG
  source 1..20: mol_type = other DNA
tcttcagagagacaatctca

SEQ ID NO: 12389 - DNA, 20 bp, synthetic construct
  misc_feature 1..20: note = Description of Artificial Sequence: Synthetic oligonucleotide
  misc_feature 1..20: note = Target: FXN; (-) strand; PAM type: NRG; PAM sequence: AGG
  source 1..20: mol_type = other DNA
gtcttcagagagacaatctc

SEQ ID NO: 12390 - DNA, 20 bp, synthetic construct
  misc_feature 1..20: note = Description of Artificial Sequence: Synthetic oligonucleotide
  misc_feature 1..20: note = Target: FXN; (-) strand; PAM type: NRG; PAM sequence: CAG
  source 1..20: mol_type = other DNA
tgtcttcagagagacaatct

SEQ ID NO: 12391 - DNA, 20 bp, synthetic construct
  misc_feature 1..20: note = Description of Artificial Sequence: Synthetic oligonucleotide
  misc_feature 1..20: note = Target: FXN; (-) strand; PAM type: NRG; PAM sequence: GAG
  source 1..20: mol_type = other DNA
agcctaatgttgtcttcaga

SEQ ID NO: 12392 - DNA, 20 bp, synthetic construct
  misc_feature 1..20: note = Description of Artificial Sequence: Synthetic oligonucleotide
  misc_feature 1..20: note = Target: FXN; (-) strand; PAM type: NRG; PAM sequence: GAG
  source 1..20: mol_type = other DNA
ctagcctaatgttgtcttca

SEQ ID NO: 12393 - DNA, 20 bp, synthetic construct
  misc_feature 1..20: note = Description of Artificial Sequence: Synthetic oligonucleotide
  misc_feature 1..20: note = Target: FXN; (-) strand; PAM type: NRG; PAM sequence: CAG
  source 1..20: mol_type = other DNA
tactagcctaatgttgtctt

SEQ ID NO: 12394 - DNA, 20 bp, synthetic construct
  misc_feature 1..20: note = Description of Artificial Sequence: Synthetic oligonucleotide
  misc_feature 1..20: note = Target: FXN; (-) strand; PAM type: NRG; PAM sequence: TAG
  source 1..20: mol_type = other DNA
acagaatctggaaagcctac

SEQ ID NO: 12395 - DNA, 20 bp, synthetic construct
  misc_feature 1..20: note = Description of Artificial Sequence: Synthetic oligonucleotide
  misc_feature 1..20: note = Target: FXN; (-) strand; PAM type: NRG; PAM sequence: AAG
  source 1..20: mol_type = other DNA
aatgggttacagaatctgga

SEQ ID NO: 12396 - DNA, 20 bp, synthetic construct
  misc_feature 1..20: note = Description of Artificial Sequence: Synthetic oligonucleotide
  misc_feature 1..20: note = Target: FXN; (-) strand; PAM type: NRG; PAM sequence: TGG
  source 1..20: mol_type = other DNA
aaagaatgggttacagaatc

SEQ ID NO: 12397 - DNA, 20 bp, synthetic construct
  misc_feature 1..20: note = Description of Artificial Sequence: Synthetic oligonucleotide
  misc_feature 1..20: note = Target: FXN; (-) strand; PAM type: NRG; PAM sequence: CAG
  source 1..20: mol_type = other DNA
tcctttgaaagaatgggtta

SEQ ID NO: 12398 - DNA, 20 bp, synthetic construct
  misc_feature 1..20: note = Description of Artificial Sequence: Synthetic oligonucleotide
  misc_feature 1..20: note = Target: FXN; (-) strand; PAM type: NRG; PAM sequence: GGG
  source 1..20: mol_type = other DNA
atctcttcctttgaaagaat

SEQ ID NO: 12399 - DNA, 20 bp, synthetic construct
  misc_feature 1..20: note = Description of Artificial Sequence: Synthetic oligonucleotide
  misc_feature 1..20: note = Target: FXN; (-) strand; PAM type: NRG; PAM sequence: TGG
  source 1..20: mol_type = other DNA
catctcttcctttgaaagaa

SEQ ID NO: 12400 - DNA, 20 bp, synthetic construct
  misc_feature 1..20: note = Description of Artificial Sequence: Synthetic oligonucleotide
  misc_feature 1..20: note = Target: FXN; (-) strand; PAM type: NRG; PAM sequence: AAG
  source 1..20: mol_type = other DNA
ataggcatctcttcctttga

SEQ ID NO: 12401 - DNA, 20 bp, synthetic construct
  misc_feature 1..20: note = Description of Artificial Sequence: Synthetic oligonucleotide
  misc_feature 1..20: note = Target: FXN; (-) strand; PAM type: NRG; PAM sequence: AGG
  source 1..20: mol_type = other DNA
tgaattggctagaaaaatat

SEQ ID NO: 12402 - DNA, 20 bp, synthetic construct
  misc_feature 1..20: note = Description of Artificial Sequence: Synthetic oligonucleotide
  misc_feature 1..20: note = Target: FXN; (-) strand; PAM type: NRG; PAM sequence: TAG
  source 1..20: mol_type = other DNA
atgaattggctagaaaaata

SEQ ID NO: 12403 - DNA, 20 bp, synthetic construct
  misc_feature 1..20: note = Description of Artificial Sequence: Synthetic oligonucleotide
  misc_feature 1..20: note = Target: FXN; (-) strand; PAM type: NRG; PAM sequence: TAG
  source 1..20: mol_type = other DNA
ctcaaggtatatgaattggc

SEQ ID NO: 12404 - DNA, 20 bp, synthetic construct
  misc_feature 1..20: note = Description of Artificial Sequence: Synthetic oligonucleotide
  misc_feature 1..20: note = Target: FXN; (-) strand; PAM type: NRG; PAM sequence: TGG
  source 1..20: mol_type = other DNA
gatactcaaggtatatgaat

SEQ ID NO: 12405 - DNA, 20 bp, synthetic construct
  misc_feature 1..20: note = Description of Artificial Sequence: Synthetic oligonucleotide
  misc_feature 1..20: note = Target: FXN; (-) strand; PAM type: NRG; PAM sequence: AGG
  source 1..20: mol_type = other DNA
ttgcccttgagtgatactca

SEQ ID NO: 12406 - DNA, 20 bp, synthetic construct
  misc_feature 1..20: note = Description of Artificial Sequence: Synthetic oligonucleotide
  misc_feature 1..20: note = Target: FXN; (-) strand; PAM type: NRG; PAM sequence: AAG
  source 1..20: mol_type = other DNA
tttgcccttgagtgatactc

SEQ ID NO: 12407 - DNA, 20 bp, synthetic construct
  misc_feature 1..20: note = Description of Artificial Sequence: Synthetic oligonucleotide
  misc_feature 1..20: note = Target: FXN; (-) strand; PAM type: NRG; PAM sequence: GAG
  source 1..20: mol_type = other DNA
ttagaaataattttgccctt

SEQ ID NO: 12408 - DNA, 20 bp, synthetic construct
  misc_feature 1..20: note = Description of Artificial Sequence: Synthetic oligonucleotide
  misc_feature 1..20: note = Target: FXN; (-) strand; PAM type: NRG; PAM sequence: TAG
  source 1..20: mol_type = other DNA
ctaattagtaaatgatttgt

SEQ ID NO: 12409 - DNA, 20 bp, synthetic construct
  misc_feature 1..20: note = Description of Artificial Sequence: Synthetic oligonucleotide
  misc_feature 1..20: note = Target: FXN; (-) strand; PAM type: NRG; PAM sequence: TAG
  source 1..20: mol_type = other DNA
acacttaagcatttgctaat

SEQ ID NO: 12410 - DNA, 20 bp, synthetic construct
  misc_feature 1..20: note = Description of Artificial Sequence: Synthetic oligonucleotide
  misc_feature 1..20: note = Target: FXN; (-) strand; PAM type: NRG; PAM sequence: AAG
  source 1..20: mol_type = other DNA
agctttctaaatctacactt

SEQ ID NO: 12411 - DNA, 20 bp, synthetic construct
  misc_feature 1..20: note = Description of Artificial Sequence: Synthetic oligonucleotide
  misc_feature 1..20: note = Target: FXN; (-) strand; PAM type: NRG; PAM sequence: TAG
  source 1..20: mol_type = other DNA
tggcagccactgtatagctt

SEQ ID NO: 12412 - DNA, 20 bp, synthetic construct
  misc_feature 1..20: note = Description of Artificial Sequence: Synthetic oligonucleotide
  misc_feature 1..20: note = Target: FXN; (-) strand; PAM type: NRG; PAM sequence: TAG
  source 1..20: mol_type = other DNA
tatagatggcagccactgta

SEQ ID NO: 12413 - DNA, 20 bp, synthetic construct
  misc_feature 1..20: note = Description of Artificial Sequence: Synthetic oligonucleotide
  misc_feature 1..20: note = Target: FXN; (-) strand; PAM type: NRG; PAM sequence: CAG
  source 1..20: mol_type = other DNA
caagtccaaactatagatgg

SEQ ID NO: 12414 - DNA, 20 bp, synthetic construct
  misc_feature 1..20: note = Description of Artificial Sequence: Synthetic oligonucleotide
  misc_feature 1..20: note = Target: FXN; (-) strand; PAM type: NRG; PAM sequence: TGG
  source 1..20: mol_type = other DNA
tcacaagtccaaactataga

SEQ ID NO: 12415 - DNA, 20 bp, synthetic construct
  misc_feature 1..20: note = Description of Artificial Sequence: Synthetic oligonucleotide
  misc_feature 1..20: note = Target: FXN; (-) strand; PAM type: NRG; PAM sequence: TAG
  source 1..20: mol_type = other DNA
ttaatcacaagtccaaacta

SEQ ID NO: 12416 - DNA, 20 bp, synthetic construct
  misc_feature 1..20: note = Description of Artificial Sequence: Synthetic oligonucleotide
  misc_feature 1..20: note = Target: FXN; (-) strand; PAM type: NRG; PAM sequence: AAG
  source 1..20: mol_type = other DNA
atttcaatgtagttaatcac

SEQ ID NO: 12417 - DNA, 20 bp, synthetic construct
  misc_feature 1..20: note = Description of Artificial Sequence: Synthetic oligonucleotide
  misc_feature 1..20: note = Target: FXN; (-) strand; PAM type: NRG; PAM sequence: TAG
  source 1..20: mol_type = other DNA
acagagttagcatttcaatg

SEQ ID NO: 12418 - DNA, 20 bp, synthetic construct
  misc_feature 1..20: note = Description of Artificial Sequence: Synthetic oligonucleotide
  misc_feature 1..20: note = Target: FXN; (-) strand; PAM type: NRG; PAM sequence: TAG
  source 1..20: mol_type = other DNA
catactctagggtacagagt

SEQ ID NO: 12419 - DNA, 20 bp, synthetic construct
  misc_feature 1..20: note = Description of Artificial Sequence: Synthetic oligonucleotide
  misc_feature 1..20: note = Target: FXN; (-) strand; PAM type: NRG; PAM sequence: GAG
  source 1..20: mol_type = other DNA
aattcatactctagggtaca

SEQ ID NO: 12420 - DNA, 20 bp, synthetic construct
  misc_feature 1..20: note = Description of Artificial Sequence: Synthetic oligonucleotide
  misc_feature 1..20: note = Target: FXN; (-) strand; PAM type: NRG; PAM sequence: CAG
  source 1..20: mol_type = other DNA
ggaattcatactctagggta

SEQ ID NO: 12421 - DNA, 20 bp, synthetic construct
  misc_feature 1..20: note = Description of Artificial Sequence: Synthetic oligonucleotide
  misc_feature 1..20: note = Target: FXN; (-) strand; PAM type: NRG; PAM sequence: GGG
  source 1..20: mol_type = other DNA
aatcaggaattcatactcta

SEQ ID NO: 12422 - DNA, 20 bp, synthetic construct
  misc_feature 1..20: note = Description of Artificial Sequence: Synthetic oligonucleotide
  misc_feature 1..20: note = Target: FXN; (-) strand; PAM type: NRG; PAM sequence: AGG
  source 1..20: mol_type = other DNA
taatcaggaattcatactct

SEQ ID NO: 12423 - DNA, 20 bp, synthetic construct
  misc_feature 1..20: note = Description of Artificial Sequence: Synthetic oligonucleotide
  misc_feature 1..20: note = Target: FXN; (-) strand; PAM type: NRG; PAM sequence: TAG
  source 1..20: mol_type = other DNA
ctaatcaggaattcatactc

SEQ ID NO: 12424 - DNA, 20 bp, synthetic construct
  misc_feature 1..20: note = Description of Artificial Sequence: Synthetic oligonucleotide
  misc_feature 1..20: note = Target: FXN; (-) strand; PAM type: NRG; PAM sequence: AGG
  source 1..20: mol_type = other DNA
gcacctgaaggactctaatc

SEQ ID NO: 12425 - DNA, 20 bp, synthetic construct
  misc_feature 1..20: note = Description of Artificial Sequence: Synthetic oligonucleotide
  misc_feature 1..20: note = Target: FXN; (-) strand; PAM type: NRG; PAM sequence: CAG
  source 1..20: mol_type = other DNA
agcacctgaaggactctaat

SEQ ID NO: 12426 - DNA, 20 bp, synthetic construct
  misc_feature 1..20: note = Description of Artificial Sequence: Synthetic oligonucleotide
  misc_feature 1..20: note = Target: FXN; (-) strand; PAM type: NRG; PAM sequence: AGG
  source 1..20: mol_type = other DNA
ataaattagttagcacctga

SEQ ID NO: 12427 - DNA, 20 bp, synthetic construct
  misc_feature 1..20: note = Description of Artificial Sequence: Synthetic oligonucleotide
  misc_feature 1..20: note = Target: FXN; (-) strand; PAM type: NRG; PAM sequence: AAG
  source 1..20: mol_type = other DNA
cataaattagttagcacctg

SEQ ID NO: 12428 - DNA, 20 bp, synthetic construct
  misc_feature 1..20: note = Description of Artificial Sequence: Synthetic oligonucleotide
  misc_feature 1..20: note = Target: FXN; (-) strand; PAM type: NRG; PAM sequence: TAG
  source 1..20: mol_type = other DNA
catgaaatacataaattagt

SEQ ID NO: 12429 - DNA, 20 bp, synthetic construct
  misc_feature 1..20: note = Description of Artificial Sequence: Synthetic oligonucleotide
  misc_feature 1..20: note = Target: FXN; (-) strand; PAM type: NRG; PAM sequence: TAG
  source 1..20: mol_type = other DNA
caaacatgaaatacataaat

SEQ ID NO: 12430 - DNA, 20 bp, synthetic construct
  misc_feature 1..20: note = Description of Artificial Sequence: Synthetic oligonucleotide
  misc_feature 1..20: note = Target: FXN; (-) strand; PAM type: NRG; PAM sequence: AAG
  source 1..20: mol_type = other DNA
actgctctcccacaaagctc

SEQ ID NO: 12431 - DNA, 20 bp, synthetic construct
  misc_feature 1..20: note = Description of Artificial Sequence: Synthetic oligonucleotide
  misc_feature 1..20: note = Target: FXN; (-) strand; PAM type: NRG; PAM sequence: AAG
  source 1..20: mol_type = other DNA
gaaaagactgctctcccaca

SEQ ID NO: 12432 - DNA, 20 bp, synthetic construct
  misc_feature 1..20: note = Description of Artificial Sequence: Synthetic oligonucleotide
  misc_feature 1..20: note = Target: FXN; (-) strand; PAM type: NRG; PAM sequence: AAG
  source 1..20: mol_type = other DNA
gctatatctcaggggaggaa

SEQ ID NO: 12433 - DNA, 20 bp, synthetic construct
  misc_feature 1..20: note = Description of Artificial Sequence: Synthetic oligonucleotide
  misc_feature 1..20: note = Target: FXN; (-) strand; PAM type: NRG; PAM sequence: AGG
  source 1..20: mol_type = other DNA
ttctagctatatctcagggg

SEQ ID NO: 12434 - DNA, 20 bp, synthetic construct
  misc_feature 1..20: note = Description of Artificial Sequence: Synthetic oligonucleotide
  misc_feature 1..20: note = Target: FXN; (-) strand; PAM type: NRG; PAM sequence: GAG
  source 1..20: mol_type = other DNA
cttctagctatatctcaggg

SEQ ID NO: 12435 - DNA, 20 bp, synthetic construct
  misc_feature 1..20: note = Description of Artificial Sequence: Synthetic oligonucleotide
  misc_feature 1..20: note = Target: FXN; (-) strand; PAM type: NRG; PAM sequence: GGG
  source 1..20: mol_type = other DNA
aacttctagctatatctcag

SEQ ID NO: 12436 - DNA, 20 bp, synthetic construct
  misc_feature 1..20: note = Description of Artificial Sequence: Synthetic oligonucleotide
  misc_feature 1..20: note = Target: FXN; (-) strand; PAM type: NRG; PAM sequence: GGG
  source 1..20: mol_type = other DNA
taacttctagctatatctca

SEQ ID NO: 12437 - DNA, 20 bp, synthetic construct
  misc_feature 1..20: note = Description of Artificial Sequence: Synthetic oligonucleotide
  misc_feature 1..20: note = Target: FXN; (-) strand; PAM type: NRG; PAM sequence: AGG
  source 1..20: mol_type = other DNA
gtaacttctagctatatctc

SEQ ID NO: 12438 - DNA, 20 bp, synthetic construct
  misc_feature 1..20: note = Description of Artificial Sequence: Synthetic oligonucleotide
  misc_feature 1..20: note = Target: FXN; (-) strand; PAM type: NRG; PAM sequence: CAG
  source 1..20: mol_type = other DNA
ggtaacttctagctatatct

SEQ ID NO: 12439 - DNA, 20 bp, synthetic construct
  misc_feature 1..20: note = Description of Artificial Sequence: Synthetic oligonucleotide
  misc_feature 1..20: note = Target: FXN; (-) strand; PAM type: NRG; PAM sequence: TAG
  source 1..20: mol_type = other DNA
ttcacaaaggaggtaacttc

SEQ ID NO: 12440 - DNA, 20 bp, synthetic construct
  misc_feature 1..20: note = Description of Artificial Sequence: Synthetic oligonucleotide
  misc_feature 1..20: note = Target: FXN; (-) strand; PAM type: NRG; PAM sequence: AGG
  source 1..20: mol_type = other DNA
ctaggaaggcttcacaaagg

SEQ ID NO: 12441 - DNA, 20 bp, synthetic construct
  misc_feature 1..20: note = Description of Artificial Sequence: Synthetic oligonucleotide
  misc_feature 1..20: note = Target: FXN; (-) strand; PAM type: NRG; PAM sequence: GAG
  source 1..20: mol_type = other DNA
tctaggaaggcttcacaaag

SEQ ID NO: 12442 - DNA, 20 bp, synthetic construct
  misc_feature 1..20: note = Description of Artificial Sequence: Synthetic oligonucleotide
  misc_feature 1..20: note = Target: FXN; (-) strand; PAM type: NRG; PAM sequence: AGG
  source 1..20: mol_type = other DNA
tatctaggaaggcttcacaa

SEQ ID NO: 12443 - DNA, 20 bp, synthetic construct
  misc_feature 1..20: note = Description of Artificial Sequence: Synthetic oligonucleotide
  misc_feature 1..20: note = Target: FXN; (-) strand; PAM type: NRG; PAM sequence: AAG
  source 1..20: mol_type = other DNA
gtatctaggaaggcttcaca

SEQ ID NO: 12444 - DNA, 20 bp, synthetic construct
  misc_feature 1..20: note = Description of Artificial Sequence: Synthetic oligonucleotide
  misc_feature 1..20: note = Target: FXN; (-) strand; PAM type: NRG; PAM sequence: AGG
  source 1..20: mol_type = other DNA
tctgcttggagtatctagga

SEQ ID NO: 12445 - DNA, 20 bp, synthetic construct
  misc_feature 1..20: note = Description of Artificial Sequence: Synthetic oligonucleotide
  misc_feature 1..20: note = Target: FXN; (-) strand; PAM type: NRG; PAM sequence: AAG
  source 1..20: mol_type = other DNA
gtctgcttggagtatctagg

SEQ ID NO: 12446 - DNA, 20 bp, synthetic construct
  misc_feature 1..20: note = Description of Artificial Sequence: Synthetic oligonucleotide
  misc_feature 1..20: note = Target: FXN; (-) strand; PAM type: NRG; PAM sequence: AGG
  source 1..20: mol_type = other DNA
cgtgtctgcttggagtatct

SEQ ID NO: 12447 - DNA, 20 bp, synthetic construct
  misc_feature 1..20: note = Description of Artificial Sequence: Synthetic oligonucleotide
  misc_feature 1..20: note = Target: FXN; (-) strand; PAM type: NRG; PAM sequence: TAG
  source 1..20: mol_type = other DNA
ccgtgtctgcttggagtatc

SEQ ID NO: 12448 - DNA, 20 bp, synthetic construct
  misc_feature 1..20: note = Description of Artificial Sequence: Synthetic oligonucleotide
  misc_feature 1..20: note = Target: FXN; (-) strand; PAM type: NRG; PAM sequence: GAG
  source 1..20: mol_type = other DNA
ggaaggaccgtgtctgcttg

SEQ ID NO: 12449 - DNA, 20 bp, synthetic construct
  misc_feature 1..20: note = Description of Artificial Sequence: Synthetic oligonucleotide
  misc_feature 1..20: note = Target: FXN; (-) strand; PAM type: NRG; PAM sequence: TGG
  source 1..20: mol_type = other DNA
aaggaaggaccgtgtctgct

SEQ ID NO: 12450 - DNA, 20 bp, synthetic construct
  misc_feature 1..20: note = Description of Artificial Sequence: Synthetic oligonucleotide
  misc_feature 1..20: note = Target: FXN; (-) strand; PAM type: NRG; PAM sequence: AGG
  source 1..20: mol_type = other DNA
gctgggcaagggagaaagga

SEQ ID NO: 12451 - DNA, 20 bp, synthetic construct
  misc_feature 1..20: note = Description of Artificial Sequence: Synthetic oligonucleotide
  misc_feature 1..20: note = Target: FXN; (-) strand; PAM type: NRG; PAM sequence: AAG
  source 1..20: mol_type = other DNA
tgctgggcaagggagaaagg

SEQ ID NO: 12452 - DNA, 20 bp, synthetic construct
  misc_feature 1..20: note = Description of Artificial Sequence: Synthetic oligonucleotide
  misc_feature 1..20: note = Target: FXN; (-) strand; PAM type: NRG; PAM sequence: AGG
  source 1..20: mol_type = other DNA
gagtgctgggcaagggagaa

SEQ ID NO: 12453 - DNA, 20 bp, synthetic construct
  misc_feature 1..20: note = Description of Artificial Sequence: Synthetic oligonucleotide
  misc_feature 1..20: note = Target: FXN; (-) strand; PAM type: NRG; PAM sequence: AAG
  source 1..20: mol_type = other DNA
agagtgctgggcaagggaga

SEQ ID NO: 12454 - DNA, 20 bp, synthetic construct
  misc_feature 1..20: note = Description of Artificial Sequence: Synthetic oligonucleotide
  misc_feature 1..20: note = Target: FXN; (-) strand; PAM type: NRG; PAM sequence: GAG
  source 1..20: mol_type = other DNA
cctcagagtgctgggcaagg

SEQ ID NO: 12455 - DNA, 20 bp, synthetic construct
  misc_feature 1..20: note = Description of Artificial Sequence: Synthetic oligonucleotide
  misc_feature 1..20: note = Target: FXN; (-) strand; PAM type: NRG; PAM sequence: GGG
  source 1..20: mol_type = other DNA
aacctcagagtgctgggcaa

SEQ ID NO: 12456 - DNA, 20 bp, synthetic construct
  misc_feature 1..20: note = Description of Artificial Sequence: Synthetic oligonucleotide
  misc_feature 1..20: note = Target: FXN; (-) strand; PAM type: NRG; PAM sequence: AGG
  source 1..20: mol_type = other DNA
caacctcagagtgctgggca

SEQ ID NO: 12457 - DNA, 20 bp, synthetic construct
  misc_feature 1..20: note = Description of Artificial Sequence: Synthetic oligonucleotide
  misc_feature 1..20: note = Target: FXN; (-) strand; PAM type: NRG; PAM sequence: AAG
  source 1..20: mol_type = other DNA
tcaacctcagagtgctgggc

SEQ ID NO: 12458 - DNA, 20 bp, synthetic construct
  misc_feature 1..20: note = Description of Artificial Sequence: Synthetic oligonucleotide
  misc_feature 1..20: note = Target: FXN; (-) strand; PAM type: NRG; PAM sequence: GGG
  source 1..20: mol_type = other DNA
agagtcaacctcagagtgct

SEQ ID NO: 12459 - DNA, 20 bp, synthetic construct
  misc_feature 1..20: note = Description of Artificial Sequence: Synthetic oligonucleotide
  misc_feature 1..20: note = Target: FXN; (-) strand; PAM type: NRG; PAM sequence: TGG
  source 1..20: mol_type = other DNA
cagagtcaacctcagagtgc

SEQ ID NO: 12460 - DNA, 20 bp, synthetic construct
  misc_feature 1..20: note = Description of Artificial Sequence: Synthetic oligonucleotide
  misc_feature 1..20: note = Target: FXN; (-) strand; PAM type: NRG; PAM sequence: GAG
  source 1..20: mol_type = other DNA
gctccacagagtcaacctca

SEQ ID NO: 12461 - DNA, 20 bp, synthetic construct
  misc_feature 1..20: note = Description of Artificial Sequence: Synthetic oligonucleotide
  misc_feature 1..20: note = Target: FXN; (-) strand; PAM type: NRG; PAM sequence: CAG
  source 1..20: mol_type = other DNA
gtgctccacagagtcaacct

SEQ ID NO: 12462 - DNA, 20 bp, synthetic construct
  misc_feature 1..20: note = Description of Artificial Sequence: Synthetic oligonucleotide
  misc_feature 1..20: note = Target: FXN; (-) strand; PAM type: NRG; PAM sequence: GAG
  source 1..20: mol_type = other DNA
agagggatcagtgctccaca

SEQ ID NO: 12463 - DNA, 20 bp, synthetic construct
  misc_feature 1..20: note = Description of Artificial Sequence: Synthetic oligonucleotide
  misc_feature 1..20: note = Target: FXN; (-) strand; PAM type: NRG; PAM sequence: CAG
  source 1..20: mol_type = other DNA
acagagggatcagtgctcca

SEQ ID NO: 12464 - DNA, 20 bp, synthetic construct
  misc_feature 1..20: note = Description of Artificial Sequence: Synthetic oligonucleotide
  misc_feature 1..20: note = Target: FXN; (-) strand; PAM type: NRG; PAM sequence: CAG
  source 1..20: mol_type = other DNA
caattataacacagagggat

SEQ ID NO: 12465 - DNA, 20 bp, synthetic construct
  misc_feature 1..20: note = Description of Artificial Sequence: Synthetic oligonucleotide
  misc_feature 1..20: note = Target: FXN; (-) strand; PAM type: NRG; PAM sequence: GGG
  source 1..20: mol_type = other DNA
atagacaattataacacaga

SEQ ID NO: 12466 - DNA, 20 bp, synthetic construct
  misc_feature 1..20: note = Description of Artificial Sequence: Synthetic oligonucleotide
  misc_feature 1..20: note = Target: FXN; (-) strand; PAM type: NRG; PAM sequence: AGG
  source 1..20: mol_type = other DNA
aatagacaattataacacag

SEQ ID NO: 12467 - DNA, 20 bp, synthetic construct
  misc_feature 1..20: note = Description of Artificial Sequence: Synthetic oligonucleotide
  misc_feature 1..20: note = Target: FXN; (-) strand; PAM type: NRG; PAM sequence: GAG
  source 1..20: mol_type = other DNA
aaatagacaattataacaca

SEQ ID NO: 12468 - DNA, 20 bp, synthetic construct
  misc_feature 1..20: note = Description of Artificial Sequence: Synthetic oligonucleotide
  misc_feature 1..20: note = Target: FXN; (-) strand; PAM type: NRG; PAM sequence: CAG
  source 1..20: mol_type = other DNA
gtaaatagacaattataaca

SEQ ID NO: 12469 - DNA, 20 bp, synthetic construct
  misc_feature 1..20: note = Description of Artificial Sequence: Synthetic oligonucleotide
  misc_feature 1..20: note = Target: FXN; (-) strand; PAM type: NRG; PAM sequence: TAG
  source 1..20: mol_type = other DNA
ggtggtagctgacgtgtaaa

SEQ ID NO: 12470 - DNA, 20 bp, synthetic construct
  misc_feature 1..20: note = Description of Artificial Sequence: Synthetic oligonucleotide
  misc_feature 1..20: note = Target: FXN; (-) strand; PAM type: NRG; PAM sequence: TAG
  source 1..20: mol_type = other DNA
actcagtgtgttataggtgg

SEQ ID NO: 12471 - DNA, 20 bp, synthetic construct
  misc_feature 1..20: note = Description of Artificial Sequence: Synthetic oligonucleotide
  misc_feature 1..20: note = Target: FXN; (-) strand; PAM type: NRG; PAM sequence: TGG
  source 1..20: mol_type = other DNA
ggaactcagtgtgttatagg

SEQ ID NO: 12472 - DNA, 20 bp, synthetic construct
  misc_feature 1..20: note = Description of Artificial Sequence: Synthetic oligonucleotide
  misc_feature 1..20: note = Target: FXN; (-) strand; PAM type: NRG; PAM sequence: AGG
  source 1..20: mol_type = other DNA
tgaggaactcagtgtgttat

SEQ ID NO: 12473 - DNA, 20 bp, synthetic construct
  misc_feature 1..20: note = Description of Artificial Sequence: Synthetic oligonucleotide
  misc_feature 1..20: note = Target: FXN; (-) strand; PAM type: NRG; PAM sequence: TAG
  source 1..20: mol_type = other DNA
ttgaggaactcagtgtgtta

SEQ ID NO: 12474 - DNA, 20 bp, synthetic construct
  misc_feature 1..20: note = Description of Artificial Sequence: Synthetic oligonucleotide
  misc_feature 1..20: note = Target: FXN; (-) strand; PAM type: NRG; PAM sequence: CAG
  source 1..20: mol_type = other DNA
gtccctgctgttgaggaact

SEQ ID NO: 12475 - DNA, 20 bp, synthetic construct
  misc_feature 1..20: note = Description of Artificial Sequence: Synthetic oligonucleotide
  misc_feature 1..20: note = Target: FXN; (-) strand; PAM type: NRG; PAM sequence: AGG
  source 1..20: mol_type = other DNA
ggacagtgtccctgctgttg

SEQ ID NO: 12476 - DNA, 20 bp, synthetic construct
  misc_feature 1..20: note = Description of Artificial Sequence: Synthetic oligonucleotide
  misc_feature 1..20: note = Target: FXN; (-) strand; PAM type: NRG; PAM sequence: GAG
  source 1..20: mol_type = other DNA
tggacagtgtccctgctgtt

SEQ ID NO: 12477 - DNA, 20 bp, synthetic construct
  misc_feature 1..20: note = Description of Artificial Sequence: Synthetic oligonucleotide
  misc_feature 1..20: note = Target: FXN; (-) strand; PAM type: NRG; PAM sequence: CAG
  source 1..20: mol_type = other DNA
cactgggatcaaagaatgga

SEQ ID NO: 12478 - DNA, 20 bp, synthetic construct
  misc_feature 1..20: note = Description of Artificial Sequence: Synthetic oligonucleotide
  misc_feature 1..20: note = Target: FXN; (-) strand; PAM type: NRG; PAM sequence: TGG
  source 1..20: mol_type = other DNA
cagacactgggatcaaagaa

SEQ ID NO: 12479 - DNA, 20 bp, synthetic construct
  misc_feature 1..20: note = Description of Artificial Sequence: Synthetic oligonucleotide
  misc_feature 1..20: note = Target: FXN; (-) strand; PAM type: NRG; PAM sequence: AAG
  source 1..20: mol_type = other DNA
tgttccagacactgggatca

SEQ ID NO: 12480 - DNA, 20 bp, synthetic construct
  misc_feature 1..20: note = Description of Artificial Sequence: Synthetic oligonucleotide
  misc_feature 1..20: note = Target: FXN; (-) strand; PAM type: NRG; PAM sequence: GGG
  source 1..20: mol_type = other DNA
ttggcactgttccagacact

SEQ ID NO: 12481 - DNA, 20 bp, synthetic construct
  misc_feature 1..20: note = Description of Artificial Sequence: Synthetic oligonucleotide
  misc_feature 1..20: note = Target: FXN; (-) strand; PAM type: NRG; PAM sequence: TGG
  source 1..20: mol_type = other DNA
cttggcactgttccagacac

SEQ ID NO: 12482 - DNA, 20 bp, synthetic construct
  misc_feature 1..20: note = Description of Artificial Sequence: Synthetic oligonucleotide
  misc_feature 1..20: note = Target: FXN; (-) strand; PAM type: NRG; PAM sequence: CAG
  source 1..20: mol_type = other DNA
ctatgtacttggcactgttc

SEQ ID NO: 12483 - DNA, 20 bp, synthetic construct
  misc_feature 1..20: note = Description of Artificial Sequence: Synthetic oligonucleotide
  misc_feature 1..20: note = Target: FXN; (-) strand; PAM type: NRG; PAM sequence: TGG
  source 1..20: mol_type = other DNA
ttaagtccctactatgtact

SEQ ID NO: 12484 - DNA, 20 bp, synthetic construct
  misc_feature 1..20: note = Description of Artificial Sequence: Synthetic oligonucleotide
  misc_feature 1..20: note = Target: FXN; (-) strand; PAM type: NRG; PAM sequence: AAG
  source 1..20: mol_type = other DNA
catatgaatcaatatttatt

SEQ ID NO: 12485 - DNA, 20 bp, synthetic construct
  misc_feature 1..20: note = Description of Artificial Sequence: Synthetic oligonucleotide
  misc_feature 1..20: note = Target: FXN; (-) strand; PAM type: NRG; PAM sequence: AAG
  source 1..20: mol_type = other DNA
aacgaaagcatgttttggaa

SEQ ID NO: 12486 - DNA, 20 bp, synthetic construct
  misc_feature 1..20: note = Description of Artificial Sequence: Synthetic oligonucleotide
  misc_feature 1..20: note = Target: FXN; (-) strand; PAM type: NRG; PAM sequence: TGG
  source 1..20: mol_type = other DNA
gcatcaacgaaagcatgttt

SEQ ID NO: 12487 - DNA, 20 bp, synthetic construct
  misc_feature 1..20: note = Description of Artificial Sequence: Synthetic oligonucleotide
  misc_feature 1..20: note = Target: FXN; (-) strand; PAM type: NRG; PAM sequence: AAG
  source 1..20: mol_type = other DNA
atgctgagaggcatcaacga

SEQ ID NO: 12488 - DNA, 20 bp, synthetic construct
  misc_feature 1..20: note = Description of Artificial Sequence: Synthetic oligonucleotide
  misc_feature 1..20: note = Target: FXN; (-) strand; PAM type: NRG; PAM sequence: AGG
  source 1..20: mol_type = other DNA
aaaggtgtataaatgctgag

SEQ ID NO: 12489 - DNA, 20 bp, synthetic construct
  misc_feature 1..20: note = Description of Artificial Sequence: Synthetic oligonucleotide
  misc_feature 1..20: note = Target: FXN; (-) strand; PAM type: NRG; PAM sequence: GAG
  source 1..20: mol_type = other DNA
aaaaggtgtataaatgctga

SEQ ID NO: 12490 - DNA, 20 bp, synthetic construct
  misc_feature 1..20: note = Description of Artificial Sequence: Synthetic oligonucleotide
  misc_feature 1..20: note = Target: FXN; (-) strand; PAM type: NRG; PAM sequence: GAG
  source 1..20: mol_type = other DNA
gtaaaaggtgtataaatgct

SEQ ID NO: 12491 - DNA, 20 bp, synthetic construct
  misc_feature 1..20: note = Description of Artificial Sequence: Synthetic oligonucleotide
  misc_feature 1..20: note = Target: FXN; (-) strand; PAM type: NRG; PAM sequence: AGG
  source 1..20: mol_type = other DNA
gccagtagcgagttggtaaa

SEQ ID NO: 12492 - DNA, 20 bp, synthetic construct
  misc_feature 1..20: note = Description of Artificial Sequence: Synthetic oligonucleotide
  misc_feature 1..20: note = Target: FXN; (-) strand; PAM type: NRG; PAM sequence: AAG
  source 1..20: mol_type = other DNA
ggccagtagcgagttggtaa

SEQ ID NO: 12493 - DNA, 20 bp, synthetic construct
  misc_feature 1..20: note = Description of Artificial Sequence: Synthetic oligonucleotide
  misc_feature 1..20: note = Target: FXN; (-) strand; PAM type: NRG; PAM sequence: TGG
  source 1..20: mol_type = other DNA
ctatgtggccagtagcgagt

SEQ ID NO: 12494 - DNA, 20 bp, synthetic construct
  misc_feature 1..20: note = Description of Artificial Sequence: Synthetic oligonucleotide
  misc_feature 1..20: note = Target: FXN; (-) strand; PAM type: NRG; PAM sequence: GAG
  source 1..20: mol_type = other DNA
ttgtctatgtggccagtagc

SEQ ID NO: 12495 - DNA, 20 bp, synthetic construct
  misc_feature 1..20: note = Description of Artificial Sequence: Synthetic oligonucleotide
  misc_feature 1..20: note = Target: FXN; (-) strand; PAM type: NRG; PAM sequence: TAG
  source 1..20: mol_type = other DNA
tcatttgtctatgtggccag

SEQ ID NO: 12496 - DNA, 20 bp, synthetic construct
  misc_feature 1..20: note = Description of Artificial Sequence: Synthetic oligonucleotide
  misc_feature 1..20: note = Target: FXN; (-) strand; PAM type: NRG; PAM sequence: CAG
  source 1..20: mol_type = other DNA
ctttcatttgtctatgtggc

SEQ ID NO: 12497 - DNA, 20 bp, synthetic construct
  misc_feature 1..20: note = Description of Artificial Sequence: Synthetic oligonucleotide
  misc_feature 1..20: note = Target: FXN; (-) strand; PAM type: NRG; PAM sequence: TGG
  source 1..20: mol_type = other DNA
actgctttcatttgtctatg

SEQ ID NO: 12498 - DNA, 20 bp, synthetic construct
  misc_feature 1..20: note = Description of Artificial Sequence: Synthetic oligonucleotide
  misc_feature 1..20: note = Target: FXN; (-) strand; PAM type: NRG; PAM sequence: TGG
  source 1..20: mol_type = other DNA
gatgtcctcttgggtgtatc

SEQ ID NO: 12499 - DNA, 20 bp, synthetic construct
  misc_feature 1..20: note = Description of Artificial Sequence: Synthetic oligonucleotide
  misc_feature 1..20: note = Target: FXN; (-) strand; PAM type: NRG; PAM sequence: GGG
  source 1..20: mol_type = other DNA
aaaagaacagatgtcctctt

SEQ ID NO: 12500 - DNA, 20 bp, synthetic construct
  misc_feature 1..20: note = Description of Artificial Sequence: Synthetic oligonucleotide
  misc_feature 1..20: note = Target: FXN; (-) strand; PAM type: NRG; PAM sequence: TGG
  source 1..20: mol_type = other DNA
aaaaagaacagatgtcctct

SEQ ID NO: 12501 - DNA, 20 bp, synthetic construct
  misc_feature 1..20: note = Description of Artificial Sequence: Synthetic oligonucleotide
  misc_feature 1..20: note = Target: FXN; (-) strand; PAM type: NRG; PAM sequence: CAG
  source 1..20: mol_type = other DNA
tccacagagagaaaaaagaa

SEQ ID NO: 12502 - DNA, 20 bp, synthetic construct
  misc_feature 1..20: note = Description of Artificial Sequence: Synthetic oligonucleotide
  misc_feature 1..20: note = Target: FXN; (-) strand; PAM type: NRG; PAM sequence: AAG
  source 1..20: mol_type = other DNA
cccactccacagagagaaaa

SEQ ID NO: 12503 - DNA, 20 bp, synthetic construct
  misc_feature 1..20: note = Description of Artificial Sequence: Synthetic oligonucleotide
  misc_feature 1..20: note = Target: FXN; (-) strand; PAM type: NRG; PAM sequence: GAG
  source 1..20: mol_type = other DNA
taagtctcccactccacaga

SEQ ID NO: 12504 - DNA, 20 bp, synthetic construct
  misc_feature 1..20: note = Description of Artificial Sequence: Synthetic oligonucleotide
  misc_feature 1..20: note = Target: FXN; (-) strand; PAM type: NRG; PAM sequence: GAG
  source 1..20: mol_type = other DNA
cttaagtctcccactccaca

SEQ ID NO: 12505 - DNA, 20 bp, synthetic construct
  misc_feature 1..20: note = Description of Artificial Sequence: Synthetic oligonucleotide
  misc_feature 1..20: note = Target: FXN; (-) strand; PAM type: NRG; PAM sequence: CAG
  source 1..20: mol_type = other DNA
cacttaagtctcccactcca

SEQ ID NO: 12506 - DNA, 20 bp, synthetic construct
  misc_feature 1..20: note = Description of Artificial Sequence: Synthetic oligonucleotide
  misc_feature 1..20: note = Target: FXN; (-) strand; PAM type: NRG; PAM sequence: AAG
  source 1..20: mol_type = other DNA
caccagttaagaagccactt

SEQ ID NO: 12507 - DNA, 20 bp, synthetic construct
  misc_feature 1..20: note = Description of Artificial Sequence: Synthetic oligonucleotide
  misc_feature 1..20: note = Target: FXN; (-) strand; PAM type: NRG; PAM sequence: AAG
  source 1..20: mol_type = other DNA
cagacgacacaccagttaag

SEQ ID NO: 12508 - DNA, 20 bp, synthetic construct
  misc_feature 1..20: note = Description of Artificial Sequence: Synthetic oligonucleotide
  misc_feature 1..20: note = Target: FXN; (-) strand; PAM type: NRG; PAM sequence: AAG
  source 1..20: mol_type = other DNA
gatcagacgacacaccagtt

SEQ ID NO: 12509 - DNA, 20 bp, synthetic construct
  misc_feature 1..20: note = Description of Artificial Sequence: Synthetic oligonucleotide
  misc_feature 1..20: note = Target: FXN; (-) strand; PAM type: NRG; PAM sequence: CAG
  source 1..20: mol_type = other DNA
cacttgatcagacgacacac

SEQ ID NO: 12510 - DNA, 20 bp, synthetic construct
  misc_feature 1..20: note = Description of Artificial Sequence: Synthetic oligonucleotide
  misc_feature 1..20: note = Target: FXN; (-) strand; PAM type: NRG; PAM sequence: CAG
  source 1..20: mol_type = other DNA
tgttacctggaccacttgat

SEQ ID NO: 12511 - DNA, 20 bp, synthetic construct
  misc_feature 1..20: note = Description of Artificial Sequence: Synthetic oligonucleotide
  misc_feature 1..20: note = Target: FXN; (-) strand; PAM type: NRG; PAM sequence: TGG
  source 1..20: mol_type = other DNA
attggcatccacctgttacc

SEQ ID NO: 12512 - DNA, 20 bp, synthetic construct
  misc_feature 1..20: note = Description of Artificial Sequence: Synthetic oligonucleotide
  misc_feature 1..20: note = Target: FXN; (-) strand; PAM type: NRG; PAM sequence: TGG
  source 1..20: mol_type = other DNA
gtgatgcctgggccagacat

SEQ ID NO: 12513 - DNA, 20 bp, synthetic construct
  misc_feature 1..20: note = Description of Artificial Sequence: Synthetic oligonucleotide
  misc_feature 1..20: note = Target: FXN; (-) strand; PAM type: NRG; PAM sequence: CAG
  source 1..20: mol_type = other DNA
gtaaggggtgatgcctgggc

SEQ ID NO: 12514 - DNA, 20 bp, synthetic construct
  misc_feature 1..20: note = Description of Artificial Sequence: Synthetic oligonucleotide
  misc_feature 1..20: note = Target: FXN; (-) strand; PAM type: NRG; PAM sequence: GGG
  source 1..20: mol_type = other DNA
gccagtaaggggtgatgcct

SEQ ID NO: 12515 - DNA, 20 bp, synthetic construct
  misc_feature 1..20: note = Description of Artificial Sequence: Synthetic oligonucleotide
  misc_feature 1..20: note = Target: FXN; (-) strand; PAM type: NRG; PAM sequence: TGG
  source 1..20: mol_type = other DNA
tgccagtaaggggtgatgcc

SEQ ID NO: 12516 - DNA, 20 bp, synthetic construct
  misc_feature 1..20: note = Description of Artificial Sequence: Synthetic oligonucleotide
  misc_feature 1..20: note = Target: FXN; (-) strand; PAM type: NRG; PAM sequence: GGG
  source 1..20: mol_type = other DNA
taatgaccagtgccagtaag

SEQ ID NO: 12517 - DNA, 20 bp, synthetic construct
  misc_feature 1..20: note = Description of Artificial Sequence: Synthetic oligonucleotide
  misc_feature 1..20: note = Target: FXN; (-) strand; PAM type: NRG; PAM sequence: GGG
  source 1..20: mol_type = other DNA
gtaatgaccagtgccagtaa

SEQ ID NO: 12518 - DNA, 20 bp, synthetic construct
  misc_feature 1..20: note = Description of Artificial Sequence: Synthetic oligonucleotide
  misc_feature 1..20: note = Target: FXN; (-) strand; PAM type: NRG; PAM sequence: AGG
  source 1..20: mol_type = other DNA
tgtaatgaccagtgccagta

SEQ ID NO: 12519 - DNA, 20 bp, synthetic construct
  misc_feature 1..20: note = Description of Artificial Sequence: Synthetic oligonucleotide
  misc_feature 1..20: note = Target: FXN; (-) strand; PAM type: NRG; PAM sequence: AAG
  source 1..20: mol_type = other DNA
ctgtaatgaccagtgccagt

SEQ ID NO: 12520 - DNA, 20 bp, synthetic construct
  misc_feature 1..20: note = Description of Artificial Sequence: Synthetic oligonucleotide
  misc_feature 1..20: note = Target: FXN; (-) strand; PAM type: NRG; PAM sequence: CAG
  source 1..20: mol_type = other DNA
tcttctgtaatgaccagtgc

SEQ ID NO: 12521 - DNA, 20 bp, synthetic construct
  misc_feature 1..20: note = Description of Artificial Sequence: Synthetic oligonucleotide
  misc_feature 1..20: note = Target: FXN; (-) strand; PAM type: NRG; PAM sequence: CAG
  source 1..20: mol_type = other DNA
agagtgtcttctgtaatgac

SEQ ID NO: 12522 - DNA, 20 bp, synthetic construct
  misc_feature 1..20: note = Description of Artificial Sequence: Synthetic oligonucleotide
  misc_feature 1..20: note = Target: FXN; (-) strand; PAM type: NRG; PAM sequence: GAG
  source 1..20: mol_type = other DNA
aggtcctttcagctctggta

SEQ ID NO: 12523 - DNA, 20 bp, synthetic construct
  misc_feature 1..20: note = Description of Artificial Sequence: Synthetic oligonucleotide
  misc_feature 1..20: note = Target: FXN; (-) strand; PAM type: NRG; PAM sequence: TAG
  source 1..20: mol_type = other DNA
agaggtcctttcagctctgg

SEQ ID NO: 12524 - DNA, 20 bp, synthetic construct
  misc_feature 1..20: note = Description of Artificial Sequence: Synthetic oligonucleotide
  misc_feature 1..20: note = Target: FXN; (-) strand; PAM type: NRG; PAM sequence: TGG
  source 1..20: mol_type = other DNA
acaagaggtcctttcagctc

SEQ ID NO: 12525 - DNA, 20 bp, synthetic construct
  misc_feature 1..20: note = Description of Artificial Sequence: Synthetic oligonucleotide
  misc_feature 1..20: note = Target: FXN; (-) strand; PAM type: NRG; PAM sequence: CAG
  source 1..20: mol_type = other DNA
ctagtgacaagaggtccttt

SEQ ID NO: 12526 - DNA, 20 bp, synthetic construct
  misc_feature 1..20: note = Description of Artificial Sequence: Synthetic oligonucleotide
  misc_feature 1..20: note = Target: FXN; (-) strand; PAM type: NRG; PAM sequence: AGG
  source 1..20: mol_type = other DNA
cacagctgcctagtgacaag

SEQ ID NO: 12527 - DNA, 20 bp, synthetic construct
  misc_feature 1..20: note = Description of Artificial Sequence: Synthetic oligonucleotide
  misc_feature 1..20: note = Target: FXN; (-) strand; PAM type: NRG; PAM sequence: GAG
  source 1..20: mol_type = other DNA
ccacagctgcctagtgacaa

SEQ ID NO: 12528 - DNA, 20 bp, synthetic construct
  misc_feature 1..20: note = Description of Artificial Sequence: Synthetic oligonucleotide
  misc_feature 1..20: note = Target: FXN; (-) strand; PAM type: NRG; PAM sequence: AAG
  source 1..20: mol_type = other DNA
ctccacagctgcctagtgac

SEQ ID NO: 12529 - DNA, 20 bp, synthetic construct
  misc_feature 1..20: note = Description of Artificial Sequence: Synthetic oligonucleotide
  misc_feature 1..20: note = Target: FXN; (-) strand; PAM type: NRG; PAM sequence: TAG
  source 1..20: mol_type = other DNA
gagcggactccacagctgcc

SEQ ID NO: 12530 - DNA, 20 bp, synthetic construct
  misc_feature 1..20: note = Description of Artificial Sequence: Synthetic oligonucleotide
  misc_feature 1..20: note = Target: FXN; (-) strand; PAM type: NRG; PAM sequence: CAG
  source 1..20: mol_type = other DNA
gtcaagtagagcggactcca

SEQ ID NO: 12531 - DNA, 20 bp, synthetic construct
  misc_feature 1..20: note = Description of Artificial Sequence: Synthetic oligonucleotide
  misc_feature 1..20: note = Target: FXN; (-) strand; PAM type: NRG; PAM sequence: CGG
  source 1..20: mol_type = other DNA
ttttactaggtcaagtagag

SEQ ID NO: 12532 - DNA, 20 bp, synthetic construct
  misc_feature 1..20: note = Description of Artificial Sequence: Synthetic oligonucleotide
  misc_feature 1..20: note = Target: FXN; (-) strand; PAM type: NRG; PAM sequence: GAG
  source 1..20: mol_type = other DNA
agattttactaggtcaagta

SEQ ID NO: 12533 - DNA, 20 bp, synthetic construct
  misc_feature 1..20: note = Description of Artificial Sequence: Synthetic oligonucleotide
  misc_feature 1..20: note = Target: FXN; (-) strand; PAM type: NRG; PAM sequence: TAG
  source 1..20: mol_type = other DNA
gcagattttactaggtcaag

SEQ ID NO: 12534 - DNA, 20 bp, synthetic construct
  misc_feature 1..20: note = Description of Artificial Sequence: Synthetic oligonucleotide
  misc_feature 1..20: note = Target: FXN; (-) strand; PAM type: NRG; PAM sequence: AAG
  source 1..20: mol_type = other DNA
caggcagattttactaggtc

SEQ ID NO: 12535 - DNA, 20 bp, synthetic construct
  misc_feature 1..20: note = Description of Artificial Sequence: Synthetic oligonucleotide
  misc_feature 1..20: note = Target: FXN; (-) strand; PAM type: NRG; PAM sequence: AGG
  source 1..20: mol_type = other DNA
gtctccaggcagattttact

SEQ ID NO: 12536 - DNA, 20 bp, synthetic construct
  misc_feature 1..20: note = Description of Artificial Sequence: Synthetic oligonucleotide
  misc_feature 1..20: note = Target: FXN; (-) strand; PAM type: NRG; PAM sequence: TAG
  source 1..20: mol_type = other DNA
agtctccaggcagattttac

SEQ ID NO: 12537 - DNA, 20 bp, synthetic construct
  misc_feature 1..20: note = Description of Artificial Sequence: Synthetic oligonucleotide
  misc_feature 1..20: note = Target: FXN; (-) strand; PAM type: NRG; PAM sequence: CAG
  source 1..20: mol_type = other DNA
tgactctaacagtctccagg

SEQ ID NO: 12538 - DNA, 20 bp, synthetic construct
  misc_feature 1..20: note = Description of Artificial Sequence: Synthetic oligonucleotide
  misc_feature 1..20: note = Target: FXN; (-) strand; PAM type: NRG; PAM sequence: AGG
  source 1..20: mol_type = other DNA
gggtgactctaacagtctcc

SEQ ID NO: 12539 - DNA, 20 bp, synthetic construct
  misc_feature 1..20: note = Description of Artificial Sequence: Synthetic oligonucleotide
  misc_feature 1..20: note = Target: FXN; (-) strand; PAM type: NRG; PAM sequence: CAG
  source 1..20: mol_type = other DNA
ggggtgactctaacagtctc

SEQ ID NO: 12540 - DNA, 20 bp, synthetic construct
  misc_feature 1..20: note = Description of Artificial Sequence: Synthetic oligonucleotide
  misc_feature 1..20: note = Target: FXN; (-) strand; PAM type: NRG; PAM sequence: CAG
  source 1..20: mol_type = other DNA
aggtagtggggtgactctaa

SEQ ID NO: 12541 - DNA, 20 bp, synthetic construct
  misc_feature 1..20: note = Description of Artificial Sequence: Synthetic oligonucleotide
  misc_feature 1..20: note = Target: FXN; (-) strand; PAM type: NRG; PAM sequence: GGG
  source 1..20: mol_type = other DNA
ggaggtaacttcaggtagtg

SEQ ID NO: 12542 - DNA, 20 bp, synthetic construct
  misc_feature 1..20: note = Description of Artificial Sequence: Synthetic oligonucleotide
  misc_feature 1..20: note = Target: FXN; (-) strand; PAM type: NRG; PAM sequence: GGG
  source 1..20: mol_type = other DNA
tggaggtaacttcaggtagt

SEQ ID NO: 12543 - DNA, 20 bp, synthetic construct
  misc_feature 1..20: note = Description of Artificial Sequence: Synthetic oligonucleotide
  misc_feature 1..20: note = Target: FXN; (-) strand; PAM type: NRG; PAM sequence: TGG
  source 1..20: mol_type = other DNA
ctggaggtaacttcaggtag

SEQ ID NO: 12544 - DNA, 20 bp, synthetic construct
  misc_feature 1..20: note = Description of Artificial Sequence: Synthetic oligonucleotide
  misc_feature 1..20: note = Target: FXN; (-) strand; PAM type: NRG; PAM sequence: TAG
  source 1..20: mol_type = other DNA
agcctggaggtaacttcagg

SEQ ID NO: 12545 - DNA, 20 bp, synthetic construct
  misc_feature 1..20: note = Description of Artificial Sequence: Synthetic oligonucleotide
  misc_feature 1..20: note = Target: FXN; (-) strand; PAM type: NRG; PAM sequence: AGG
  source 1..20: mol_type = other DNA
gtcagcctggaggtaacttc

SEQ ID NO: 12546 - DNA, 20 bp, synthetic construct
  misc_feature 1..20: note = Description of Artificial Sequence: Synthetic oligonucleotide
  misc_feature 1..20: note = Target: FXN; (-) strand; PAM type: NRG; PAM sequence: CAG
  source 1..20: mol_type = other DNA
ggtcagcctggaggtaactt

SEQ ID NO: 12547 - DNA, 20 bp, synthetic construct
  misc_feature 1..20: note = Description of Artificial Sequence: Synthetic oligonucleotide
  misc_feature 1..20: note = Target: FXN; (-) strand; PAM type: NRG; PAM sequence: AGG
  source 1..20: mol_type = other DNA
aaaaaaagaggtcagcctgg

SEQ ID NO: 12548 - DNA, 20 bp, synthetic construct
  misc_feature 1..20: note = Description of Artificial Sequence: Synthetic oligonucleotide
  misc_feature 1..20: note = Target: FXN; (-) strand; PAM type: NRG; PAM sequence: GAG
  source 1..20: mol_type = other DNA
aaaaaaaagaggtcagcctg

SEQ ID NO: 12549 - DNA, 20 bp, synthetic construct
  misc_feature 1..20: note = Description of Artificial Sequence: Synthetic oligonucleotide
  misc_feature 1..20: note = Target: FXN; (-) strand; PAM type: NRG; PAM sequence: TGG
  source 1..20: mol_type = other DNA
ggaaaaaaaagaggtcagcc

SEQ ID NO: 12550 - DNA, 20 bp, synthetic construct
  misc_feature 1..20: note = Description of Artificial Sequence: Synthetic oligonucleotide
  misc_feature 1..20: note = Target: FXN; (-) strand; PAM type: NRG; PAM sequence: CAG
  source 1..20: mol_type = other DNA
acctgggaaaaaaaagaggt

SEQ ID NO: 12551 - DNA, 20 bp, synthetic construct
  misc_feature 1..20: note = Description of Artificial Sequence: Synthetic oligonucleotide
  misc_feature 1..20: note = Target: FXN; (-) strand; PAM type: NRG; PAM sequence: AGG
  source 1..20: mol_type = other DNA
ctccacctgggaaaaaaaag

SEQ ID NO: 12552 - DNA, 20 bp, synthetic construct
  misc_feature 1..20: note = Description of Artificial Sequence: Synthetic oligonucleotide
  misc_feature 1..20: note = Target: FXN; (-) strand; PAM type: NRG; PAM sequence: GAG
  source 1..20: mol_type = other DNA
actccacctgggaaaaaaaa

SEQ ID NO: 12553 - DNA, 20 bp, synthetic construct
  misc_feature 1..20: note = Description of Artificial Sequence: Synthetic oligonucleotide
  misc_feature 1..20: note = Target: FXN; (-) strand; PAM type: NRG; PAM sequence: AAG
  source 1..20: mol_type = other DNA
ggactccacctgggaaaaaa

SEQ ID NO: 12554 - DNA, 20 bp, synthetic construct
  misc_feature 1..20: note = Description of Artificial Sequence: Synthetic oligonucleotide
  misc_feature 1..20: note = Target: FXN; (-) strand; PAM type: NRG; PAM sequence: GGG
  source 1..20: mol_type = other DNA
aagatgccaggactccacct

SEQ ID NO: 12555 - DNA, 20 bp, synthetic construct
  misc_feature 1..20: note = Description of Artificial Sequence: Synthetic oligonucleotide
  misc_feature 1..20: note = Target: FXN; (-) strand; PAM type: NRG; PAM sequence: TGG
  source 1..20: mol_type = other DNA
taagatgccaggactccacc

SEQ ID NO: 12556 - DNA, 20 bp, synthetic construct
  misc_feature 1..20: note = Description of Artificial Sequence: Synthetic oligonucleotide
  misc_feature 1..20: note = Target: FXN; (-) strand; PAM type: NRG; PAM sequence: AGG
  source 1..20: mol_type = other DNA
attaaaatatctaagatgcc

SEQ ID NO: 12557 - DNA, 20 bp, synthetic construct
  misc_feature 1..20: note = Description of Artificial Sequence: Synthetic oligonucleotide
  misc_feature 1..20: note = Target: FXN; (-) strand; PAM type: NRG; PAM sequence: CAG
  source 1..20: mol_type = other DNA
tattaaaatatctaagatgc

SEQ ID NO: 12558 - DNA, 20 bp, synthetic construct
  misc_feature 1..20: note = Description of Artificial Sequence: Synthetic oligonucleotide
  misc_feature 1..20: note = Target: FXN; (-) strand; PAM type: NRG; PAM sequence: AAG
  source 1..20: mol_type = other DNA
aaatccttattaaaatatct

SEQ ID NO: 12559 - DNA, 20 bp, synthetic construct
  misc_feature 1..20: note = Description of Artificial Sequence: Synthetic oligonucleotide
  misc_feature 1..20: note = Target: FXN; (-) strand; PAM type: NRG; PAM sequence: AAG
  source 1..20: mol_type = other DNA
tgaataaagaacatgtcaac

SEQ ID NO: 12560 - DNA, 20 bp, synthetic construct
  misc_feature 1..20: note = Description of Artificial Sequence: Synthetic oligonucleotide
  misc_feature 1..20: note = Target: FXN; (-) strand; PAM type: NRG; PAM sequence: AAG
  source 1..20: mol_type = other DNA
tgctgacaccttagtgaata

SEQ ID NO: 12561 - DNA, 20 bp, synthetic construct
  misc_feature 1..20: note = Description of Artificial Sequence: Synthetic oligonucleotide
  misc_feature 1..20: note = Target: FXN; (-) strand; PAM type: NRG; PAM sequence: TAG
  source 1..20: mol_type = other DNA
acagtaatatgctgacacct

SEQ ID NO: 12562 - DNA, 20 bp, synthetic construct
  misc_feature 1..20: note = Description of Artificial Sequence: Synthetic oligonucleotide
  misc_feature 1..20: note = Target: FXN; (-) strand; PAM type: NRG; PAM sequence: CAG
  source 1..20: mol_type = other DNA
aagaaccctcagttctaaga

SEQ ID NO: 12563 - DNA, 20 bp, synthetic construct
  misc_feature 1..20: note = Description of Artificial Sequence: Synthetic oligonucleotide
  misc_feature 1..20: note = Target: FXN; (-) strand; PAM type: NRG; PAM sequence: AAG
  source 1..20: mol_type = other DNA
gatgaagaaccctcagttct

SEQ ID NO: 12564 - DNA, 20 bp, synthetic construct
  misc_feature 1..20: note = Description of Artificial Sequence: Synthetic oligonucleotide
  misc_feature 1..20: note = Target: FXN; (-) strand; PAM type: NRG; PAM sequence: CAG
  source 1..20: mol_type = other DNA
caaaaaagatgaagaaccct

SEQ ID NO: 12565 - DNA, 20 bp, synthetic construct
  misc_feature 1..20: note = Description of Artificial Sequence: Synthetic oligonucleotide
  misc_feature 1..20: note = Target: FXN; (-) strand; PAM type: NRG; PAM sequence: AAG
  source 1..20: mol_type = other DNA
gtcctgatccaaaaaagatg

SEQ ID NO: 12566 - DNA, 20 bp, synthetic construct
  misc_feature 1..20: note = Description of Artificial Sequence: Synthetic oligonucleotide
  misc_feature 1..20: note = Target: FXN; (-) strand; PAM type: NRG; PAM sequence: AAG
  source 1..20: mol_type = other DNA
agggaggtcctgatccaaaa

SEQ ID NO: 12567 - DNA, 20 bp, synthetic construct
  misc_feature 1..20: note = Description of Artificial Sequence: Synthetic oligonucleotide
  misc_feature 1..20: note = Target: FXN; (-) strand; PAM type: NRG; PAM sequence: AGG
  source 1..20: mol_type = other DNA
gtcatcagattcttagaggg

SEQ ID NO: 12568 - DNA, 20 bp, synthetic construct
  misc_feature 1..20: note = Description of Artificial Sequence: Synthetic oligonucleotide
  misc_feature 1..20: note = Target: FXN; (-) strand; PAM type: NRG; PAM sequence: GAG
  source 1..20: mol_type = other DNA
agtcatcagattcttagagg

SEQ ID NO: 12569 - DNA, 20 bp, synthetic construct
  misc_feature 1..20: note = Description of Artificial Sequence: Synthetic oligonucleotide
  misc_feature 1..20: note = Target: FXN; (-) strand; PAM type: NRG; PAM sequence: GGG
  source 1..20: mol_type = other DNA
gcagtcatcagattcttaga

SEQ ID NO: 12570 - DNA, 20 bp, synthetic construct
  misc_feature 1..20: note = Description of Artificial Sequence: Synthetic oligonucleotide
  misc_feature 1..20: note = Target: FXN; (-) strand; PAM type: NRG; PAM sequence: AGG
  source 1..20: mol_type = other DNA
agcagtcatcagattcttag

SEQ ID NO: 12571 - DNA, 20 bp, synthetic construct
  misc_feature 1..20: note = Description of Artificial Sequence: Synthetic oligonucleotide
  misc_feature 1..20: note = Target: FXN; (-) strand; PAM type: NRG; PAM sequence: GAG
  source 1..20: mol_type = other DNA
gagcagtcatcagattctta

SEQ ID NO: 12572 - DNA, 20 bp, synthetic construct
  misc_feature 1..20: note = Description of Artificial Sequence: Synthetic oligonucleotide
  misc_feature 1..20: note = Target: FXN; (-) strand; PAM type: NRG; PAM sequence: TAG
  source 1..20: mol_type = other DNA
cagagcagtcatcagattct

SEQ ID NO: 12573 - DNA, 20 bp, synthetic construct
  misc_feature 1..20: note = Description of Artificial Sequence: Synthetic oligonucleotide
  misc_feature 1..20: note = Target: FXN; (-) strand; PAM type: NRG; PAM sequence: CAG
  source 1..20: mol_type = other DNA
agagggaccagagcagtcat

SEQ ID NO: 12574 - DNA, 20 bp, synthetic construct
  misc_feature 1..20: note = Description of Artificial Sequence: Synthetic oligonucleotide
  misc_feature 1..20: note = Target: FXN; (-) strand; PAM type: NRG; PAM sequence: CAG
  source 1..20: mol_type = other DNA
tattgggagagggaccagag

SEQ ID NO: 12575 - DNA, 20 bp, synthetic construct
  misc_feature 1..20: note = Description of Artificial Sequence: Synthetic oligonucleotide
  misc_feature 1..20: note = Target: FXN; (-) strand; PAM type: NRG; PAM sequence: GAG
  source 1..20: mol_type = other DNA
ttttattgggagagggacca

SEQ ID NO: 12576 - DNA, 20 bp, synthetic construct
  misc_feature 1..20: note = Description of Artificial Sequence: Synthetic oligonucleotide
  misc_feature 1..20: note = Target: FXN; (-) strand; PAM type: NRG; PAM sequence: CAG
  source 1..20: mol_type = other DNA
gtttttattgggagagggac

SEQ ID NO: 12577 - DNA, 20 bp, synthetic construct
  misc_feature 1..20: note = Description of Artificial Sequence: Synthetic oligonucleotide
  misc_feature 1..20: note = Target: FXN; (-) strand; PAM type: NRG; PAM sequence: GGG
  source 1..20: mol_type = other DNA
tggaagtttttattgggaga

SEQ ID NO: 12578 - DNA, 20 bp, synthetic construct
  misc_feature 1..20: note = Description of Artificial Sequence: Synthetic oligonucleotide
  misc_feature 1..20: note = Target: FXN; (-) strand; PAM type: NRG; PAM sequence: AGG
  source 1..20: mol_type = other DNA
atggaagtttttattgggag

SEQ ID NO: 12579 - DNA, 20 bp, synthetic construct
  misc_feature 1..20: note = Description of Artificial Sequence: Synthetic oligonucleotide
  misc_feature 1..20: note = Target: FXN; (-) strand; PAM type: NRG; PAM sequence: GAG
  source 1..20: mol_type = other DNA
tatggaagtttttattggga

SEQ ID NO: 12580 - DNA, 20 bp, synthetic construct
  misc_feature 1..20: note = Description of Artificial Sequence: Synthetic oligonucleotide
  misc_feature 1..20: note = Target: FXN; (-) strand; PAM type: NRG; PAM sequence: GAG
  source 1..20: mol_type = other DNA
agtatggaagtttttattgg

SEQ ID NO: 12581 - DNA, 20 bp, synthetic construct
  misc_feature 1..20: note = Description of Artificial Sequence: Synthetic oligonucleotide
  misc_feature 1..20: note = Target: FXN; (-) strand; PAM type: NRG; PAM sequence: GGG
  source 1..20: mol_type = other DNA
tgagtatggaagtttttatt

SEQ ID NO: 12582 - DNA, 20 bp, synthetic construct
  misc_feature 1..20: note = Description of Artificial Sequence: Synthetic oligonucleotide
  misc_feature 1..20: note = Target: FXN; (-) strand; PAM type: NRG; PAM sequence: TGG
  source 1..20: mol_type = other DNA
gtgagtatggaagtttttat

SEQ ID NO: 12583 - DNA, 20 bp, synthetic construct
  misc_feature 1..20: note = Description of Artificial Sequence: Synthetic oligonucleotide
  misc_feature 1..20: note = Target: FXN; (-) strand; PAM type: NRG; PAM sequence: AAG
  source 1..20: mol_type = other DNA
tttttaacaggtgagtatgg

SEQ ID NO: 12584 - DNA, 20 bp, synthetic construct
  misc_feature 1..20: note = Description of Artificial Sequence: Synthetic oligonucleotide
  misc_feature 1..20: note = Target: FXN; (-) strand; PAM type: NRG; PAM sequence: TGG
  source 1..20: mol_type = other DNA
ttttttttaacaggtgagta

SEQ ID NO: 12585 - DNA, 20 bp, synthetic construct
  misc_feature 1..20: note = Description of Artificial Sequence: Synthetic oligonucleotide
  misc_feature 1..20: note = Target: FXN; (-) strand; PAM type: NRG; PAM sequence: GAG
  source 1..20: mol_type = other DNA
tttttttttttttaacaggt

SEQ ID NO: 12586 - DNA, 20 bp, synthetic construct
  misc_feature 1..20: note = Description of Artificial Sequence: Synthetic oligonucleotide
  misc_feature 1..20: note = Target: FXN; (-) strand; PAM type: NRG; PAM sequence: AGG
  source 1..20: mol_type = other DNA
aagttttttttttttttaac

SEQ ID NO: 12587 - DNA, 20 bp, synthetic construct
  misc_feature 1..20: note = Description of Artificial Sequence: Synthetic oligonucleotide
  misc_feature 1..20: note = Target: FXN; (-) strand; PAM type: NRG; PAM sequence: CAG
  source 1..20: mol_type = other DNA
aaagttttttttttttttaa

SEQ ID NO: 12588 - DNA, 20 bp, synthetic construct
  misc_feature 1..20: note = Description of Artificial Sequence: Synthetic oligonucleotide
  misc_feature 1..20: note = Target: FXN; (-) strand; PAM type: NRG; PAM sequence: AAG
  source 1..20: mol_type = other DNA
aaactctgttaatttgttta

SEQ ID NO: 12589 - DNA, 20 bp, synthetic construct
  misc_feature 1..20: note = Description of Artificial Sequence: Synthetic oligonucleotide
  misc_feature 1..20: note = Target: FXN; (-) strand; PAM type: NRG; PAM sequence: CAG
  source 1..20: mol_type = other DNA
ctctgaacctattctggttg

SEQ ID NO: 12590 - DNA, 20 bp, synthetic construct
  misc_feature 1..20: note = Description of Artificial Sequence: Synthetic oligonucleotide
  misc_feature 1..20: note = Target: FXN; (-) strand; PAM type: NRG; PAM sequence: TGG
  source 1..20: mol_type = other DNA
gagtctctctgaacctattc

SEQ ID NO: 12591 - DNA, 20 bp, synthetic construct
  misc_feature 1..20: note = Description of Artificial Sequence: Synthetic oligonucleotide
  misc_feature 1..20: note = Target: FXN; (-) strand; PAM type: NRG; PAM sequence: GAG
  source 1..20: mol_type = other DNA
caaccacgtggcacaccgtg

SEQ ID NO: 12592 - DNA, 20 bp, synthetic construct
  misc_feature 1..20: note = Description of Artificial Sequence: Synthetic oligonucleotide
  misc_feature 1..20: note = Target: FXN; (-) strand; PAM type: NRG; PAM sequence: TGG
  source 1..20: mol_type = other DNA
tccaaccacgtggcacaccg

SEQ ID NO: 12593 - DNA, 20 bp, synthetic construct
  misc_feature 1..20: note = Description of Artificial Sequence: Synthetic oligonucleotide
  misc_feature 1..20: note = Target: FXN; (-) strand; PAM type: NRG; PAM sequence: TGG
  source 1..20: mol_type = other DNA
ctaaatcctctccaaccacg

SEQ ID NO: 12594 - DNA, 20 bp, synthetic construct
  misc_feature 1..20: note = Description of Artificial Sequence: Synthetic oligonucleotide
  misc_feature 1..20: note = Target: FXN; (-) strand; PAM type: NRG; PAM sequence: AGG
  source 1..20: mol_type = other DNA
tgaggcaccgcaccagcacc

SEQ ID NO: 12595 - DNA, 20 bp, synthetic construct
  misc_feature 1..20: note = Description of Artificial Sequence: Synthetic oligonucleotide
  misc_feature 1..20: note = Target: FXN; (-) strand; PAM type: NRG; PAM sequence: CAG
  source 1..20: mol_type = other DNA
gtgaggcaccgcaccagcac

SEQ ID NO: 12596 - DNA, 20 bp, synthetic construct
  misc_feature 1..20: note = Description of Artificial Sequence: Synthetic oligonucleotide
  misc_feature 1..20: note = Target: FXN; (-) strand; PAM type: NRG; PAM sequence: CAG
  source 1..20: mol_type = other DNA
acaggcgtgaggcaccgcac

SEQ ID NO: 12597 - DNA, 20 bp, synthetic construct
  misc_feature 1..20: note = Description of Artificial Sequence: Synthetic oligonucleotide
  misc_feature 1..20: note = Target: FXN; (-) strand; PAM type: NRG; PAM sequence: AGG
  source 1..20: mol_type = other DNA
gtgctgggattacaggcgtg

SEQ ID NO: 12598 - DNA, 20 bp, synthetic construct
  misc_feature 1..20: note = Description of Artificial Sequence: Synthetic oligonucleotide
  misc_feature 1..20: note = Target: FXN; (-) strand; PAM type: NRG; PAM sequence: GAG
  source 1..20: mol_type = other DNA
agtgctgggattacaggcgt

SEQ ID NO: 12599 - DNA, 20 bp, synthetic construct
  misc_feature 1..20: note = Description of Artificial Sequence: Synthetic oligonucleotide
  misc_feature 1..20: note = Target: FXN; (-) strand; PAM type: NRG; PAM sequence: AGG
  source 1..20: mol_type = other DNA
tcccaaagtgctgggattac

SEQ ID NO: 12600 - DNA, 20 bp, synthetic construct
  misc_feature 1..20: note = Description of Artificial Sequence: Synthetic oligonucleotide
  misc_feature 1..20: note = Target: FXN; (-) strand; PAM type: NRG; PAM sequence: CAG
  source 1..20: mol_type = other DNA
ctcccaaagtgctgggatta

SEQ ID NO: 12601 - DNA, 20 bp, synthetic construct
  misc_feature 1..20: note = Description of Artificial Sequence: Synthetic oligonucleotide
  misc_feature 1..20: note = Target: FXN; (-) strand; PAM type: NRG; PAM sequence: GGG
  source 1..20: mol_type = other DNA
cctcggcctcccaaagtgct

SEQ ID NO: 12602 - DNA, 20 bp, synthetic construct
  misc_feature 1..20: note = Description of Artificial Sequence: Synthetic oligonucleotide
  misc_feature 1..20: note = Target: FXN; (-) strand; PAM type: NRG; PAM sequence: TGG
  source 1..20: mol_type = other DNA
gcctcggcctcccaaagtgc

SEQ ID NO: 12603 - DNA, 20 bp, synthetic construct
  misc_feature 1..20: note = Description of Artificial Sequence: Synthetic oligonucleotide
  misc_feature 1..20: note = Target: FXN; (-) strand; PAM type: NRG; PAM sequence: AAG
  source 1..20: mol_type = other DNA
ctgcccgcctcggcctccca

SEQ ID NO: 12604 - DNA, 20 bp, synthetic construct
  misc_feature 1..20: note = Description of Artificial Sequence: Synthetic oligonucleotide
  misc_feature 1..20: note = Target: FXN; (-) strand; PAM type: NRG; PAM sequence: CGG
  source 1..20: mol_type = other DNA
acctcatgatctgcccgcct

SEQ ID NO: 12605 - DNA, 20 bp, synthetic construct
  misc_feature 1..20: note = Description of Artificial Sequence: Synthetic oligonucleotide
  misc_feature 1..20: note = Target: FXN; (-) strand; PAM type: NRG; PAM sequence: TGG
  source 1..20: mol_type = other DNA
tttcaccgtgttagccagga

SEQ ID NO: 12606 - DNA, 20 bp, synthetic construct
  misc_feature 1..20: note = Description of Artificial Sequence: Synthetic oligonucleotide
  misc_feature 1..20: note = Target: FXN; (-) strand; PAM type: NRG; PAM sequence: AGG
  source 1..20: mol_type = other DNA
agggtttcaccgtgttagcc

SEQ ID NO: 12607 - DNA, 20 bp, synthetic construct
  misc_feature 1..20: note = Description of Artificial Sequence: Synthetic oligonucleotide
  misc_feature 1..20: note = Target: FXN; (-) strand; PAM type: NRG; PAM sequence: CAG
  source 1..20: mol_type = other DNA
cagggtttcaccgtgttagc

SEQ ID NO: 12608 - DNA, 20 bp, synthetic construct
  misc_feature 1..20: note = Description of Artificial Sequence: Synthetic oligonucleotide
  misc_feature 1..20: note = Target: FXN; (-) strand; PAM type: NRG; PAM sequence: TAG
  source 1..20: mol_type = other DNA
gagacagggtttcaccgtgt

SEQ ID NO: 12609 - DNA, 20 bp, synthetic construct
  misc_feature 1..20: note = Description of Artificial Sequence: Synthetic oligonucleotide
  misc_feature 1..20: note = Target: FXN; (-) strand; PAM type: NRG; PAM sequence: GGG
  source 1..20: mol_type = other DNA
ttgcatttttagtagagaca

SEQ ID NO: 12610 - DNA, 20 bp, synthetic construct
  misc_feature 1..20: note = Description of Artificial Sequence: Synthetic oligonucleotide
  misc_feature 1..20: note = Target: FXN; (-) strand; PAM type: NRG; PAM sequence: AGG
  source 1..20: mol_type = other DNA
tttgcatttttagtagagac

SEQ ID NO: 12611 - DNA, 20 bp, synthetic construct
  misc_feature 1..20: note = Description of Artificial Sequence: Synthetic oligonucleotide
  misc_feature 1..20: note = Target: FXN; (-) strand; PAM type: NRG; PAM sequence: CAG
  source 1..20: mol_type = other DNA
ttttgcatttttagtagaga

SEQ ID NO: 12612 - DNA, 20 bp, synthetic construct
  misc_feature 1..20: note = Description of Artificial Sequence: Synthetic oligonucleotide
  misc_feature 1..20: note = Target: FXN; (-) strand; PAM type: NRG; PAM sequence: GAG
  source 1..20: mol_type = other DNA
aagtttttgcatttttagta

SEQ ID NO: 12613 - DNA, 20 bp, synthetic construct
  misc_feature 1..20: note = Description of Artificial Sequence: Synthetic oligonucleotide
  misc_feature 1..20: note = Target: FXN; (-) strand; PAM type: NRG; PAM sequence: TAG
  source 1..20: mol_type = other DNA
ctaagtttttgcatttttag

SEQ ID NO: 12614 - DNA, 20 bp, synthetic construct
  misc_feature 1..20: note = Description of Artificial Sequence: Synthetic oligonucleotide
  misc_feature 1..20: note = Target: FXN; (-) strand; PAM type: NRG; PAM sequence: TAG
  source 1..20: mol_type = other DNA
cggctaagtttttgcatttt

SEQ ID NO: 12615 - DNA, 20 bp, synthetic construct
  misc_feature 1..20: note = Description of Artificial Sequence: Synthetic oligonucleotide
  misc_feature 1..20: note = Target: FXN; (-) strand; PAM type: NRG; PAM sequence: AAG
  source 1..20: mol_type = other DNA
gcctgccaccacgcccggct

SEQ ID NO: 12616 - DNA, 20 bp, synthetic construct
  misc_feature 1..20: note = Description of Artificial Sequence: Synthetic oligonucleotide
  misc_feature 1..20: note = Target: FXN; (-) strand; PAM type: NRG; PAM sequence: CGG
  source 1..20: mol_type = other DNA
caggtgcctgccaccacgcc

SEQ ID NO: 12617 - DNA, 20 bp, synthetic construct
  misc_feature 1..20: note = Description of Artificial Sequence: Synthetic oligonucleotide
  misc_feature 1..20: note = Target: FXN; (-) strand; PAM type: NRG; PAM sequence: AGG
  source 1..20: mol_type = other DNA
tcccaagtagctgggactac

SEQ ID NO: 12618 - DNA, 20 bp, synthetic construct
  misc_feature 1..20: note = Description of Artificial Sequence: Synthetic oligonucleotide
  misc_feature 1..20: note = Target: FXN; (-) strand; PAM type: NRG; PAM sequence: CAG
  source 1..20: mol_type = other DNA
ctcccaagtagctgggacta

SEQ ID NO: 12619 - DNA, 20 bp, synthetic construct
  misc_feature 1..20: note = Description of Artificial Sequence: Synthetic oligonucleotide
  misc_feature 1..20: note = Target: FXN; (-) strand; PAM type: NRG; PAM sequence: GGG
  source 1..20: mol_type = other DNA
cctcagcctcccaagtagct

SEQ ID NO: 12620 - DNA, 20 bp, synthetic construct
  misc_feature 1..20: note = Description of Artificial Sequence: Synthetic oligonucleotide
  misc_feature 1..20: note = Target: FXN; (-) strand; PAM type: NRG; PAM sequence: TGG
  source 1..20: mol_type = other DNA
gcctcagcctcccaagtagc

SEQ ID NO: 12621 - DNA, 20 bp, synthetic construct
  misc_feature 1..20: note = Description of Artificial Sequence: Synthetic oligonucleotide
  misc_feature 1..20: note = Target: FXN; (-) strand; PAM type: NRG; PAM sequence: TAG
  source 1..20: mol_type = other DNA
tcctgcctcagcctcccaag

SEQ ID NO: 12622 - DNA, 20 bp, synthetic construct
  misc_feature 1..20: note = Description of Artificial Sequence: Synthetic oligonucleotide
  misc_feature 1..20: note = Target: FXN; (-) strand; PAM type: NRG; PAM sequence: AAG
  source 1..20: mol_type = other DNA
ttctcctgcctcagcctccc

SEQ ID NO: 12623 - DNA, 20 bp, synthetic construct
  misc_feature 1..20: note = Description of Artificial Sequence: Synthetic oligonucleotide
  misc_feature 1..20: note = Target: FXN; (-) strand; PAM type: NRG; PAM sequence: CAG
  source 1..20: mol_type = other DNA
ttcacaccattctcctgcct

SEQ ID NO: 12624 - DNA, 20 bp, synthetic construct
  misc_feature 1..20: note = Description of Artificial Sequence: Synthetic oligonucleotide
  misc_feature 1..20: note = Target: FXN; (-) strand; PAM type: NRG; PAM sequence: AGG
  source 1..20: mol_type = other DNA
cactgcaagctccgcctccc

SEQ ID NO: 12625 - DNA, 20 bp, synthetic construct
  misc_feature 1..20: note = Description of Artificial Sequence: Synthetic oligonucleotide
  misc_feature 1..20: note = Target: FXN; (-) strand; PAM type: NRG; PAM sequence: CAG
  source 1..20: mol_type = other DNA
tcactgcaagctccgcctcc

SEQ ID NO: 12626 - DNA, 20 bp, synthetic construct
  misc_feature 1..20: note = Description of Artificial Sequence: Synthetic oligonucleotide
  misc_feature 1..20: note = Target: FXN; (-) strand; PAM type: NRG; PAM sequence: AAG
  source 1..20: mol_type = other DNA
gcgggatcctggctcactgc

SEQ ID NO: 12627 - DNA, 20 bp, synthetic construct
  misc_feature 1..20: note = Description of Artificial Sequence: Synthetic oligonucleotide
  misc_feature 1..20: note = Target: FXN; (-) strand; PAM type: NRG; PAM sequence: TGG
  source 1..20: mol_type = other DNA
ggagtgcagtggcgggatcc

SEQ ID NO: 12628 - DNA, 20 bp, synthetic construct
  misc_feature 1..20: note = Description of Artificial Sequence: Synthetic oligonucleotide
  misc_feature 1..20: note = Target: FXN; (-) strand; PAM type: NRG; PAM sequence: GGG
  source 1..20: mol_type = other DNA
ccaggctggagtgcagtggc

SEQ ID NO: 12629 - DNA, 20 bp, synthetic construct
  misc_feature 1..20: note = Description of Artificial Sequence: Synthetic oligonucleotide
  misc_feature 1..20: note = Target: FXN; (-) strand; PAM type: NRG; PAM sequence: CGG
  source 1..20: mol_type = other DNA
cccaggctggagtgcagtgg

SEQ ID NO: 12630 - DNA, 20 bp, synthetic construct
  misc_feature 1..20: note = Description of Artificial Sequence: Synthetic oligonucleotide
  misc_feature 1..20: note = Target: FXN; (-) strand; PAM type: NRG; PAM sequence: TGG
  source 1..20: mol_type = other DNA
tcgcccaggctggagtgcag

SEQ ID NO: 12631 - DNA, 20 bp, synthetic construct
  misc_feature 1..20: note = Description of Artificial Sequence: Synthetic oligonucleotide
  misc_feature 1..20: note = Target: FXN; (-) strand; PAM type: NRG; PAM sequence: CAG
  source 1..20: mol_type = other DNA
ctgtcgcccaggctggagtg

SEQ ID NO: 12632 - DNA, 20 bp, synthetic construct
  misc_feature 1..20: note = Description of Artificial Sequence: Synthetic oligonucleotide
  misc_feature 1..20: note = Target: FXN; (-) strand; PAM type: NRG; PAM sequence: GAG
  source 1..20: mol_type = other DNA
tcgctctgtcgcccaggctg

SEQ ID NO: 12633 - DNA, 20 bp, synthetic construct
  misc_feature 1..20: note = Description of Artificial Sequence: Synthetic oligonucleotide
  misc_feature 1..20: note = Target: FXN; (-) strand; PAM type: NRG; PAM sequence: TGG
  source 1..20: mol_type = other DNA
tctcgctctgtcgcccaggc

SEQ ID NO: 12634 - DNA, 20 bp, synthetic construct
  misc_feature 1..20: note = Description of Artificial Sequence: Synthetic oligonucleotide
  misc_feature 1..20: note = Target: FXN; (-) strand; PAM type: NRG; PAM sequence: AGG
  source 1..20: mol_type = other DNA
gaagtctcgctctgtcgccc

SEQ ID NO: 12635 - DNA, 20 bp, synthetic construct
  misc_feature 1..20: note = Description of Artificial Sequence: Synthetic oligonucleotide
  misc_feature 1..20: note = Target: FXN; (-) strand; PAM type: NRG; PAM sequence: CAG
  source 1..20: mol_type = other DNA
tgaagtctcgctctgtcgcc

SEQ ID NO: 12636 - DNA, 20 bp, synthetic construct
  misc_feature 1..20: note = Description of Artificial Sequence: Synthetic oligonucleotide
  misc_feature 1..20: note = Target: FXN; (-) strand; PAM type: NRG; PAM sequence: AAG
  source 1..20: mol_type = other DNA
ttttctttttttttaagatg

SEQ ID NO: 12637 - DNA, 20 bp, synthetic construct
  misc_feature 1..20: note = Description of Artificial Sequence: Synthetic oligonucleotide
  misc_feature 1..20: note = Target: FXN; (-) strand; PAM type: NRG; PAM sequence: AAG
  source 1..20: mol_type = other DNA
tttttcttttcttttttttt

SEQ ID NO: 12638 - DNA, 20 bp, synthetic construct
  misc_feature 1..20: note = Description of Artificial Sequence: Synthetic oligonucleotide
  misc_feature 1..20: note = Target: FXN; (-) strand; PAM type: NRG; PAM sequence: TGG
  source 1..20: mol_type = other DNA
acaccaagctgtaaccaacc

SEQ ID NO: 12639 - DNA, 20 bp, synthetic construct
  misc_feature 1..20: note = Description of Artificial Sequence: Synthetic oligonucleotide
  misc_feature 1..20: note = Target: FXN; (-) strand; PAM type: NRG; PAM sequence: AAG
  source 1..20: mol_type = other DNA
ccaagtttaaggcaaacacc

SEQ ID NO: 12640 - DNA, 20 bp, synthetic construct
  misc_feature 1..20: note = Description of Artificial Sequence: Synthetic oligonucleotide
  misc_feature 1..20: note = Target: FXN; (-) strand; PAM type: NRG; PAM sequence: AGG
  source 1..20: mol_type = other DNA
aactgttcaaaccaagttta

SEQ ID NO: 12641 - DNA, 20 bp, synthetic construct
  misc_feature 1..20: note = Description of Artificial Sequence: Synthetic oligonucleotide
  misc_feature 1..20: note = Target: FXN; (-) strand; PAM type: NRG; PAM sequence: AAG
  source 1..20: mol_type = other DNA
caactgttcaaaccaagttt

SEQ ID NO: 12642 - DNA, 20 bp, synthetic construct
  misc_feature 1..20: note = Description of Artificial Sequence: Synthetic oligonucleotide
  misc_feature 1..20: note = Target: FXN; (-) strand; PAM type: NRG; PAM sequence: AAG
  source 1..20: mol_type = other DNA
ggcggccaactgttcaaacc

SEQ ID NO: 12643 - DNA, 20 bp, synthetic construct
  misc_feature 1..20: note = Description of Artificial Sequence: Synthetic oligonucleotide
  misc_feature 1..20: note = Target: FXN; (-) strand; PAM type: NRG; PAM sequence: CGG
  source 1..20: mol_type = other DNA
gagttttggctaatcaaagg

SEQ ID NO: 12644 - DNA, 20 bp, synthetic construct
  misc_feature 1..20: note = Description of Artificial Sequence: Synthetic oligonucleotide
  misc_feature 1..20: note = Target: FXN; (-) strand; PAM type: NRG; PAM sequence: AGG
  source 1..20: mol_type = other DNA
accgagttttggctaatcaa

SEQ ID NO: 12645 - DNA, 20 bp, synthetic construct
  misc_feature 1..20: note = Description of Artificial Sequence: Synthetic oligonucleotide
  misc_feature 1..20: note = Target: FXN; (-) strand; PAM type: NRG; PAM sequence: AAG
  source 1..20: mol_type = other DNA
caccgagttttggctaatca

SEQ ID NO: 12646 - DNA, 20 bp, synthetic construct
  misc_feature 1..20: note = Description of Artificial Sequence: Synthetic oligonucleotide
  misc_feature 1..20: note = Target: FXN; (-) strand; PAM type: NRG; PAM sequence: TGG
  source 1..20: mol_type = other DNA
ttgtaccaatcaccgagttt

SEQ ID NO: 12647 - DNA, 20 bp, synthetic construct
  misc_feature 1..20: note = Description of Artificial Sequence: Synthetic oligonucleotide
  misc_feature 1..20: note = Target: FXN; (-) strand; PAM type: NRG; PAM sequence: GAG
  source 1..20: mol_type = other DNA
ctactcttgtaccaatcacc

SEQ ID NO: 12648 - DNA, 20 bp, synthetic construct
  misc_feature 1..20: note = Description of Artificial Sequence: Synthetic oligonucleotide
  misc_feature 1..20: note = Target: FXN; (-) strand; PAM type: NRG; PAM sequence: TAG
  source 1..20: mol_type = other DNA
tctaagggcttctctgtaca

SEQ ID NO: 12649 - DNA, 20 bp, synthetic construct
  misc_feature 1..20: note = Description of Artificial Sequence: Synthetic oligonucleotide
  misc_feature 1..20: note = Target: FXN; (-) strand; PAM type: NRG; PAM sequence: GGG
  source 1..20: mol_type = other DNA
tattttgagttcggatctaa

SEQ ID NO: 12650 - DNA, 20 bp, synthetic construct
  misc_feature 1..20: note = Description of Artificial Sequence: Synthetic oligonucleotide
  misc_feature 1..20: note = Target: FXN; (-) strand; PAM type: NRG; PAM sequence: AGG
  source 1..20: mol_type = other DNA
ctattttgagttcggatcta

SEQ ID NO: 12651 - DNA, 20 bp, synthetic construct
  misc_feature 1..20: note = Description of Artificial Sequence: Synthetic oligonucleotide
  misc_feature 1..20: note = Target: FXN; (-) strand; PAM type: NRG; PAM sequence: AAG
  source 1..20: mol_type = other DNA
cctattttgagttcggatct

SEQ ID NO: 12652 - DNA, 20 bp, synthetic construct
  misc_feature 1..20: note = Description of Artificial Sequence: Synthetic oligonucleotide
  misc_feature 1..20: note = Target: FXN; (-) strand; PAM type: NRG; PAM sequence: CGG
  source 1..20: mol_type = other DNA
ctccttacctattttgagtt

SEQ ID NO: 12653 - DNA, 20 bp, synthetic construct
  misc_feature 1..20: note = Description of Artificial Sequence: Synthetic oligonucleotide
  misc_feature 1..20: note = Target: FXN; (-) strand; PAM type: NRG; PAM sequence: GAG
  source 1..20: mol_type = other DNA
actgcctccttacctatttt

SEQ ID NO: 12654 - DNA, 20 bp, synthetic construct
  misc_feature 1..20: note = Description of Artificial Sequence: Synthetic oligonucleotide
  misc_feature 1..20: note = Target: FXN; (-) strand; PAM type: NRG; PAM sequence: TAG
  source 1..20: mol_type = other DNA
tgagtatgttaacttaagtg

SEQ ID NO: 12655 - DNA, 20 bp, synthetic construct
  misc_feature 1..20: note = Description of Artificial Sequence: Synthetic oligonucleotide
  misc_feature 1..20: note = Target: FXN; (-) strand; PAM type: NRG; PAM sequence: AAG
  source 1..20: mol_type = other DNA
actcctgagtatgttaactt

SEQ ID NO: 12656 - DNA, 20 bp, synthetic construct
  misc_feature 1..20: note = Description of Artificial Sequence: Synthetic oligonucleotide
  misc_feature 1..20: note = Target: FXN; (-) strand; PAM type: NRG; PAM sequence: GAG
  source 1..20: mol_type = other DNA
gaagctggaatggtactcct

SEQ ID NO: 12657 - DNA, 20 bp, synthetic construct
  misc_feature 1..20: note = Description of Artificial Sequence: Synthetic oligonucleotide
  misc_feature 1..20: note = Target: FXN; (-) strand; PAM type: NRG; PAM sequence: TGG
  source 1..20: mol_type = other DNA
cttccagcttgaagctggaa

SEQ ID NO: 12658 - DNA, 20 bp, synthetic construct
  misc_feature 1..20: note = Description of Artificial Sequence: Synthetic oligonucleotide
  misc_feature 1..20: note = Target: FXN; (-) strand; PAM type: NRG; PAM sequence: TGG
  source 1..20: mol_type = other DNA
agacacttccagcttgaagc

SEQ ID NO: 12659 - DNA, 20 bp, synthetic construct
  misc_feature 1..20: note = Description of Artificial Sequence: Synthetic oligonucleotide
  misc_feature 1..20: note = Target: FXN; (-) strand; PAM type: NRG; PAM sequence: AAG
  source 1..20: mol_type = other DNA
ctgcagacacttccagcttg

SEQ ID NO: 12660 - DNA, 20 bp, synthetic construct
  misc_feature 1..20: note = Description of Artificial Sequence: Synthetic oligonucleotide
  misc_feature 1..20: note = Target: FXN; (-) strand; PAM type: NRG; PAM sequence: CAG
  source 1..20: mol_type = other DNA
cagggggctgcagacacttc

SEQ ID NO: 12661 - DNA, 20 bp, synthetic construct
  misc_feature 1..20: note = Description of Artificial Sequence: Synthetic oligonucleotide
  misc_feature 1..20: note = Target: FXN; (-) strand; PAM type: NRG; PAM sequence: CAG
  source 1..20: mol_type = other DNA
taagtggtctcagggggctg

SEQ ID NO: 12662 - DNA, 20 bp, synthetic construct
  misc_feature 1..20: note = Description of Artificial Sequence: Synthetic oligonucleotide
  misc_feature 1..20: note = Target: FXN; (-) strand; PAM type: NRG; PAM sequence: GGG
  source 1..20: mol_type = other DNA
tgggattaagtggtctcagg

SEQ ID NO: 12663 - DNA, 20 bp, synthetic construct
  misc_feature 1..20: note = Description of Artificial Sequence: Synthetic oligonucleotide
  misc_feature 1..20: note = Target: FXN; (-) strand; PAM type: NRG; PAM sequence: GGG
  source 1..20: mol_type = other DNA
ttgggattaagtggtctcag

SEQ ID NO: 12664 - DNA, 20 bp, synthetic construct
  misc_feature 1..20: note = Description of Artificial Sequence: Synthetic oligonucleotide
  misc_feature 1..20: note = Target: FXN; (-) strand; PAM type: NRG; PAM sequence: GGG
  source 1..20: mol_type = other DNA
cttgggattaagtggtctca

SEQ ID NO: 12665 - DNA, 20 bp, synthetic construct
  misc_feature 1..20: note = Description of Artificial Sequence: Synthetic oligonucleotide
  misc_feature 1..20: note = Target: FXN; (-) strand; PAM type: NRG; PAM sequence: AGG
  source 1..20: mol_type = other DNA
acttgggattaagtggtctc

SEQ ID NO: 12666 - DNA, 20 bp, synthetic construct
  misc_feature 1..20: note = Description of Artificial Sequence: Synthetic oligonucleotide
  misc_feature 1..20: note = Target: FXN; (-) strand; PAM type: NRG; PAM sequence: CAG
  source 1..20: mol_type = other DNA
aacttgggattaagtggtct

SEQ ID NO: 12667 - DNA, 20 bp, synthetic construct
  misc_feature 1..20: note = Description of Artificial Sequence: Synthetic oligonucleotide
  misc_feature 1..20: note = Target: FXN; (-) strand; PAM type: NRG; PAM sequence: TGG
  source 1..20: mol_type = other DNA
gtttttaacttgggattaag

SEQ ID NO: 12668 - DNA, 20 bp, synthetic construct
  misc_feature 1..20: note = Description of Artificial Sequence: Synthetic oligonucleotide
  misc_feature 1..20: note = Target: FXN; (-) strand; PAM type: NRG; PAM sequence: AAG
  source 1..20: mol_type = other DNA
ggggtttttaacttgggatt

SEQ ID NO: 12669 - DNA, 20 bp, synthetic construct
  misc_feature 1..20: note = Description of Artificial Sequence: Synthetic oligonucleotide
  misc_feature 1..20: note = Target: FXN; (-) strand; PAM type: NRG; PAM sequence: GGG
  source 1..20: mol_type = other DNA
tgagcaggggtttttaactt

SEQ ID NO: 12670 - DNA, 20 bp, synthetic construct
  misc_feature 1..20: note = Description of Artificial Sequence: Synthetic oligonucleotide
  misc_feature 1..20: note = Target: FXN; (-) strand; PAM type: NRG; PAM sequence: TGG
  source 1..20: mol_type = other DNA
ctgagcaggggtttttaact

SEQ ID NO: 12671 - DNA, 20 bp, synthetic construct
  misc_feature 1..20: note = Description of Artificial Sequence: Synthetic oligonucleotide
  misc_feature 1..20: note = Target: FXN; (-) strand; PAM type: NRG; PAM sequence: GGG
  source 1..20: mol_type = other DNA
aagatgctgcctctgagcag

SEQ ID NO: 12672 - DNA, 20 bp, synthetic construct
  misc_feature 1..20: note = Description of Artificial Sequence: Synthetic oligonucleotide
  misc_feature 1..20: note = Target: FXN; (-) strand; PAM type: NRG; PAM sequence: GGG
  source 1..20: mol_type = other DNA
aaagatgctgcctctgagca

SEQ ID NO: 12673 - DNA, 20 bp, synthetic construct
  misc_feature 1..20: note = Description of Artificial Sequence: Synthetic oligonucleotide
  misc_feature 1..20: note = Target: FXN; (-) strand; PAM type: NRG; PAM sequence: AGG
  source 1..20: mol_type = other DNA
aaaagatgctgcctctgagc

SEQ ID NO: 12674 - DNA, 20 bp, synthetic construct
  misc_feature 1..20: note = Description of Artificial Sequence: Synthetic oligonucleotide
  misc_feature 1..20: note = Target: FXN; (-) strand; PAM type: NRG; PAM sequence: CAG
  source 1..20: mol_type = other DNA
aaaaagatgctgcctctgag

SEQ ID NO: 12675 - DNA, 20 bp, synthetic construct
  misc_feature 1..20: note = Description of Artificial Sequence: Synthetic oligonucleotide
  misc_feature 1..20: note = Target: FXN; (-) strand; PAM type: NRG; PAM sequence: GAG
  source 1..20: mol_type = other DNA
aaaaaaaagatgctgcctct

SEQ ID NO: 12676 - DNA, 20 bp, synthetic construct
  misc_feature 1..20: note = Description of Artificial Sequence: Synthetic oligonucleotide
  misc_feature 1..20: note = Target: FXN; (-) strand; PAM type: NRG; PAM sequence: AAG
  source 1..20: mol_type = other DNA
aaaaaaaaaaaaaaaaaaaa

SEQ ID NO: 12677 - DNA, 20 bp, synthetic construct
  misc_feature 1..20: note = Description of Artificial Sequence: Synthetic oligonucleotide
  misc_feature 1..20: note = Target: FXN; (-) strand; PAM type: NRG; PAM sequence: GAG
  source 1..20: mol_type = other DNA
tccagcctgggtgacagagt

SEQ ID NO: 12678 - DNA, 20 bp, synthetic construct
  misc_feature 1..20: note = Description of Artificial Sequence: Synthetic oligonucleotide
  misc_feature 1..20: note = Target: FXN; (-) strand; PAM type: NRG; PAM sequence: GAG
  source 1..20: mol_type = other DNA
gcactccagcctgggtgaca

SEQ ID NO: 12679 - DNA, 20 bp, synthetic construct
  misc_feature 1..20: note = Description of Artificial Sequence: Synthetic oligonucleotide
  misc_feature 1..20: note = Target: FXN; (-) strand; PAM type: NRG; PAM sequence: CAG
  source 1..20: mol_type = other DNA
ctgcactccagcctgggtga

SEQ ID NO: 12680 - DNA, 20 bp, synthetic construct
  misc_feature 1..20: note = Description of Artificial Sequence: Synthetic oligonucleotide
  misc_feature 1..20: note = Target: FXN; (-) strand; PAM type: NRG; PAM sequence: GGG
  source 1..20: mol_type = other DNA
gtgccactgcactccagcct

SEQ ID NO: 12681 - DNA, 20 bp, synthetic construct
  misc_feature 1..20: note = Description of Artificial Sequence: Synthetic oligonucleotide
  misc_feature 1..20: note = Target: FXN; (-) strand; PAM type: NRG; PAM sequence: TGG
  source 1..20: mol_type = other DNA
cgtgccactgcactccagcc

SEQ ID NO: 12682 - DNA, 20 bp, synthetic construct
  misc_feature 1..20: note = Description of Artificial Sequence: Synthetic oligonucleotide
  misc_feature 1..20: note = Target: FXN; (-) strand; PAM type: NRG; PAM sequence: CAG
  source 1..20: mol_type = other DNA
gagatcgtgccactgcactc

SEQ ID NO: 12683 - DNA, 20 bp, synthetic construct
  misc_feature 1..20: note = Description of Artificial Sequence: Synthetic oligonucleotide
  misc_feature 1..20: note = Target: FXN; (-) strand; PAM type: NRG; PAM sequence: GAG
  source 1..20: mol_type = other DNA
ggtggtggttgcagtgagct

SEQ ID NO: 12684 - DNA, 20 bp, synthetic construct
  misc_feature 1..20: note = Description of Artificial Sequence: Synthetic oligonucleotide
  misc_feature 1..20: note = Target: FXN; (-) strand; PAM type: NRG; PAM sequence: GAG
  source 1..20: mol_type = other DNA
caggaggtggtggttgcagt

SEQ ID NO: 12685 - DNA, 20 bp, synthetic construct
  misc_feature 1..20: note = Description of Artificial Sequence: Synthetic oligonucleotide
  misc_feature 1..20: note = Target: FXN; (-) strand; PAM type: NRG; PAM sequence: CAG
  source 1..20: mol_type = other DNA
agcccaggaggtggtggttg

SEQ ID NO: 12686 - DNA, 20 bp, synthetic construct
  misc_feature 1..20: note = Description of Artificial Sequence: Synthetic oligonucleotide
  misc_feature 1..20: note = Target: FXN; (-) strand; PAM type: NRG; PAM sequence: TGG
  source 1..20: mol_type = other DNA
cccttgagcccaggaggtgg

SEQ ID NO: 12687 - DNA, 20 bp, synthetic construct
  misc_feature 1..20: note = Description of Artificial Sequence: Synthetic oligonucleotide
  misc_feature 1..20: note = Target: FXN; (-) strand; PAM type: NRG; PAM sequence: TGG
  source 1..20: mol_type = other DNA
aatcccttgagcccaggagg

SEQ ID NO: 12688 - DNA, 20 bp, synthetic construct
  misc_feature 1..20: note = Description of Artificial Sequence: Synthetic oligonucleotide
  misc_feature 1..20: note = Target: FXN; (-) strand; PAM type: NRG; PAM sequence: AGG
  source 1..20: mol_type = other DNA
gagaatcccttgagcccagg

SEQ ID NO: 12689 - DNA, 20 bp, synthetic construct
  misc_feature 1..20: note = Description of Artificial Sequence: Synthetic oligonucleotide
  misc_feature 1..20: note = Target: FXN; (-) strand; PAM type: NRG; PAM sequence: GAG
  source 1..20: mol_type = other DNA
agagaatcccttgagcccag

SEQ ID NO: 12690 - DNA, 20 bp, synthetic construct
  misc_feature 1..20: note = Description of Artificial Sequence: Synthetic oligonucleotide
  misc_feature 1..20: note = Target: FXN; (-) strand; PAM type: NRG; PAM sequence: AGG
  source 1..20: mol_type = other DNA
caagagaatcccttgagccc

SEQ ID NO: 12691 - DNA, 20 bp, synthetic construct
  misc_feature 1..20: note = Description of Artificial Sequence: Synthetic oligonucleotide
  misc_feature 1..20: note = Target: FXN; (-) strand; PAM type: NRG; PAM sequence: CAG
  source 1..20: mol_type = other DNA
gcaagagaatcccttgagcc

SEQ ID NO: 12692 - DNA, 20 bp, synthetic construct
  misc_feature 1..20: note = Description of Artificial Sequence: Synthetic oligonucleotide
  misc_feature 1..20: note = Target: FXN; (-) strand; PAM type: NRG; PAM sequence: GAG
  source 1..20: mol_type = other DNA
ctgaggcaagagaatccctt

SEQ ID NO: 12693 - DNA, 20 bp, synthetic construct
  misc_feature 1..20: note = Description of Artificial Sequence: Synthetic oligonucleotide
  misc_feature 1..20: note = Target: FXN; (-) strand; PAM type: NRG; PAM sequence: GAG
  source 1..20: mol_type = other DNA
tactcgggagactgaggcaa

SEQ ID NO: 12694 - DNA, 20 bp, synthetic construct
  misc_feature 1..20: note = Description of Artificial Sequence: Synthetic oligonucleotide
  misc_feature 1..20: note = Target: FXN; (-) strand; PAM type: NRG; PAM sequence: AAG
  source 1..20: mol_type = other DNA
gttactcgggagactgaggc

SEQ ID NO: 12695 - DNA, 20 bp, synthetic construct
  misc_feature 1..20: note = Description of Artificial Sequence: Synthetic oligonucleotide
  misc_feature 1..20: note = Target: FXN; (-) strand; PAM type: NRG; PAM sequence: AGG
  source 1..20: mol_type = other DNA
cccagttactcgggagactg

SEQ ID NO: 12696 - DNA, 20 bp, synthetic construct
  misc_feature 1..20: note = Description of Artificial Sequence: Synthetic oligonucleotide
  misc_feature 1..20: note = Target: FXN; (-) strand; PAM type: NRG; PAM sequence: GAG
  source 1..20: mol_type = other DNA
tcccagttactcgggagact

SEQ ID NO: 12697 - DNA, 20 bp, synthetic construct
  misc_feature 1..20: note = Description of Artificial Sequence: Synthetic oligonucleotide
  misc_feature 1..20: note = Target: FXN; (-) strand; PAM type: NRG; PAM sequence: GAG
  source 1..20: mol_type = other DNA
ctgtaatcccagttactcgg

SEQ ID NO: 12698 - DNA, 20 bp, synthetic construct
  misc_feature 1..20: note = Description of Artificial Sequence: Synthetic oligonucleotide
  misc_feature 1..20: note = Target: FXN; (-) strand; PAM type: NRG; PAM sequence: GGG
  source 1..20: mol_type = other DNA
gcctgtaatcccagttactc

SEQ ID NO: 12699 - DNA, 20 bp, synthetic construct
  misc_feature 1..20: note = Description of Artificial Sequence: Synthetic oligonucleotide
  misc_feature 1..20: note = Target: FXN; (-) strand; PAM type: NRG; PAM sequence: CGG
  source 1..20: mol_type = other DNA
cgcctgtaatcccagttact

SEQ ID NO: 12700 - DNA, 20 bp, synthetic construct
  misc_feature 1..20: note = Description of Artificial Sequence: Synthetic oligonucleotide
  misc_feature 1..20: note = Target: FXN; (-) strand; PAM type: NRG; PAM sequence: CAG
  source 1..20: mol_type = other DNA
gtggcacgcgcctgtaatcc

SEQ ID NO: 12701 - DNA, 20 bp, synthetic construct
  misc_feature 1..20: note = Description of Artificial Sequence: Synthetic oligonucleotide
  misc_feature 1..20: note = Target: FXN; (-) strand; PAM type: NRG; PAM sequence: TGG
  source 1..20: mol_type = other DNA
aaaaaattagctggacatag

SEQ ID NO: 12702 - DNA, 20 bp, synthetic construct
  misc_feature 1..20: note = Description of Artificial Sequence: Synthetic oligonucleotide
  misc_feature 1..20: note = Target: FXN; (-) strand; PAM type: NRG; PAM sequence: TAG
  source 1..20: mol_type = other DNA
aaaaaaaaattagctggaca

SEQ ID NO: 12703 - DNA, 20 bp, synthetic construct
  misc_feature 1..20: note = Description of Artificial Sequence: Synthetic oligonucleotide
  misc_feature 1..20: note = Target: FXN; (-) strand; PAM type: NRG; PAM sequence: TGG
  source 1..20: mol_type = other DNA
atacaaaaaaaaaaattagc

SEQ ID NO: 12704 - DNA, 20 bp, synthetic construct
  misc_feature 1..20: note = Description of Artificial Sequence: Synthetic oligonucleotide
  misc_feature 1..20: note = Target: FXN; (-) strand; PAM type: NRG; PAM sequence: TAG
  source 1..20: mol_type = other DNA
aaaaatacaaaaaaaaaaat

SEQ ID NO: 12705 - DNA, 20 bp, synthetic construct
  misc_feature 1..20: note = Description of Artificial Sequence: Synthetic oligonucleotide
  misc_feature 1..20: note = Target: FXN; (-) strand; PAM type: NRG; PAM sequence: TGG
  source 1..20: mol_type = other DNA
caagaccagccaggccaaca

SEQ ID NO: 12706 - DNA, 20 bp, synthetic construct
  misc_feature 1..20: note = Description of Artificial Sequence: Synthetic oligonucleotide
  misc_feature 1..20: note = Target: FXN; (-) strand; PAM type: NRG; PAM sequence: AGG
  source 1..20: mol_type = other DNA
tcaagagttcaagaccagcc

SEQ ID NO: 12707 - DNA, 20 bp, synthetic construct
  misc_feature 1..20: note = Description of Artificial Sequence: Synthetic oligonucleotide
  misc_feature 1..20: note = Target: FXN; (-) strand; PAM type: NRG; PAM sequence: CAG
  source 1..20: mol_type = other DNA
gtcaagagttcaagaccagc

SEQ ID NO: 12708 - DNA, 20 bp, synthetic construct
  misc_feature 1..20: note = Description of Artificial Sequence: Synthetic oligonucleotide
  misc_feature 1..20: note = Target: FXN; (-) strand; PAM type: NRG; PAM sequence: CAG
  source 1..20: mol_type = other DNA
tgaggtcaagagttcaagac

SEQ ID NO: 12709 - DNA, 20 bp, synthetic construct
  misc_feature 1..20: note = Description of Artificial Sequence: Synthetic oligonucleotide
  misc_feature 1..20: note = Target: FXN; (-) strand; PAM type: NRG; PAM sequence: AAG
  source 1..20: mol_type = other DNA
tcacttgaggtcaagagttc

SEQ ID NO: 12710 - DNA, 20 bp, synthetic construct
  misc_feature 1..20: note = Description of Artificial Sequence: Synthetic oligonucleotide
  misc_feature 1..20: note = Target: FXN; (-) strand; PAM type: NRG; PAM sequence: GAG
  source 1..20: mol_type = other DNA
agtggatcacttgaggtcaa

SEQ ID NO: 12711 - DNA, 20 bp, synthetic construct
  misc_feature 1..20: note = Description of Artificial Sequence: Synthetic oligonucleotide
  misc_feature 1..20: note = Target: FXN; (-) strand; PAM type: NRG; PAM sequence: AAG
  source 1..20: mol_type = other DNA
ccagtggatcacttgaggtc

SEQ ID NO: 12712 - DNA, 20 bp, synthetic construct
  misc_feature 1..20: note = Description of Artificial Sequence: Synthetic oligonucleotide
  misc_feature 1..20: note = Target: FXN; (-) strand; PAM type: NRG; PAM sequence: AGG
  source 1..20: mol_type = other DNA
tgaggccagtggatcacttg

SEQ ID NO: 12713 - DNA, 20 bp, synthetic construct
  misc_feature 1..20: note = Description of Artificial Sequence: Synthetic oligonucleotide
  misc_feature 1..20: note = Target: FXN; (-) strand; PAM type: NRG; PAM sequence: GAG
  source 1..20: mol_type = other DNA
ctgaggccagtggatcactt

SEQ ID NO: 12714 - DNA, 20 bp, synthetic construct
  misc_feature 1..20: note = Description of Artificial Sequence: Synthetic oligonucleotide
  misc_feature 1..20: note = Target: FXN; (-) strand; PAM type: NRG; PAM sequence: TGG
  source 1..20: mol_type = other DNA
ctttgggaggctgaggccag

SEQ ID NO: 12715 - DNA, 20 bp, synthetic construct
  misc_feature 1..20: note = Description of Artificial Sequence: Synthetic oligonucleotide
  misc_feature 1..20: note = Target: FXN; (-) strand; PAM type: NRG; PAM sequence: CAG
  source 1..20: mol_type = other DNA
gcactttgggaggctgaggc

SEQ ID NO: 12716 - DNA, 20 bp, synthetic construct
  misc_feature 1..20: note = Description of Artificial Sequence: Synthetic oligonucleotide
  misc_feature 1..20: note = Target: FXN; (-) strand; PAM type: NRG; PAM sequence: AGG
  source 1..20: mol_type = other DNA
gccagcactttgggaggctg

SEQ ID NO: 12717 - DNA, 20 bp, synthetic construct
  misc_feature 1..20: note = Description of Artificial Sequence: Synthetic oligonucleotide
  misc_feature 1..20: note = Target: FXN; (-) strand; PAM type: NRG; PAM sequence: GAG
  source 1..20: mol_type = other DNA
tgccagcactttgggaggct

SEQ ID NO: 12718 - DNA, 20 bp, synthetic construct
  misc_feature 1..20: note = Description of Artificial Sequence: Synthetic oligonucleotide
  misc_feature 1..20: note = Target: FXN; (-) strand; PAM type: NRG; PAM sequence: AGG
  source 1..20: mol_type = other DNA
tctaatgccagcactttggg

SEQ ID NO: 12719 - DNA, 20 bp, synthetic construct
  misc_feature 1..20: note = Description of Artificial Sequence: Synthetic oligonucleotide
  misc_feature 1..20: note = Target: FXN; (-) strand; PAM type: NRG; PAM sequence: GAG
  source 1..20: mol_type = other DNA
ctctaatgccagcactttgg

SEQ ID NO: 12720 - DNA, 20 bp, synthetic construct
  misc_feature 1..20: note = Description of Artificial Sequence: Synthetic oligonucleotide
  misc_feature 1..20: note = Target: FXN; (-) strand; PAM type: NRG; PAM sequence: GGG
  source 1..20: mol_type = other DNA
acctctaatgccagcacttt

SEQ ID NO: 12721 - DNA, 20 bp, synthetic construct
  misc_feature 1..20: note = Description of Artificial Sequence: Synthetic oligonucleotide
  misc_feature 1..20: note = Target: FXN; (-) strand; PAM type: NRG; PAM sequence: TGG
  source 1..20: mol_type = other DNA
cacctctaatgccagcactt

SEQ ID NO: 12722 - DNA, 20 bp, synthetic construct
  misc_feature 1..20: note = Description of Artificial Sequence: Synthetic oligonucleotide
  misc_feature 1..20: note = Target: FXN; (-) strand; PAM type: NRG; PAM sequence: CAG
  source 1..20: mol_type = other DNA
gtgactcacacctctaatgc

SEQ ID NO: 12723 - DNA, 20 bp, synthetic construct
  misc_feature 1..20: note = Description of Artificial Sequence: Synthetic oligonucleotide
  misc_feature 1..20: note = Target: FXN; (-) strand; PAM type: NRG; PAM sequence: CAG
  source 1..20: mol_type = other DNA
gtgcctcactgggccaggaa

SEQ ID NO: 12724 - DNA, 20 bp, synthetic construct
  misc_feature 1..20: note = Description of Artificial Sequence: Synthetic oligonucleotide
  misc_feature 1..20: note = Target: FXN; (-) strand; PAM type: NRG; PAM sequence: AGG
  source 1..20: mol_type = other DNA
agatggtgcctcactgggcc

SEQ ID NO: 12725 - DNA, 20 bp, synthetic construct
  misc_feature 1..20: note = Description of Artificial Sequence: Synthetic oligonucleotide
  misc_feature 1..20: note = Target: FXN; (-) strand; PAM type: NRG; PAM sequence: CAG
  source 1..20: mol_type = other DNA
gagatggtgcctcactgggc

SEQ ID NO: 12726 - DNA, 20 bp, synthetic construct
  misc_feature 1..20: note = Description of Artificial Sequence: Synthetic oligonucleotide
  misc_feature 1..20: note = Target: FXN; (-) strand; PAM type: NRG; PAM sequence: GGG
  source 1..20: mol_type = other DNA
caatgagatggtgcctcact

SEQ ID NO: 12727 - DNA, 20 bp, synthetic construct
  misc_feature 1..20: note = Description of Artificial Sequence: Synthetic oligonucleotide
  misc_feature 1..20: note = Target: FXN; (-) strand; PAM type: NRG; PAM sequence: TGG
  source 1..20: mol_type = other DNA
ccaatgagatggtgcctcac

SEQ ID NO: 12728 - DNA, 20 bp, synthetic construct
  misc_feature 1..20: note = Description of Artificial Sequence: Synthetic oligonucleotide
  misc_feature 1..20: note = Target: FXN; (-) strand; PAM type: NRG; PAM sequence: TGG
  source 1..20: mol_type = other DNA
tgtctccatatccaatgaga

SEQ ID NO: 12729 - DNA, 20 bp, synthetic construct
  misc_feature 1..20: note = Description of Artificial Sequence: Synthetic oligonucleotide
  misc_feature 1..20: note = Target: FXN; (-) strand; PAM type: NRG; PAM sequence: GAG
  source 1..20: mol_type = other DNA
cctttgtctccatatccaat

SEQ ID NO: 12730 - DNA, 20 bp, synthetic construct
  misc_feature 1..20: note = Description of Artificial Sequence: Synthetic oligonucleotide
  misc_feature 1..20: note = Target: FXN; (-) strand; PAM type: NRG; PAM sequence: CAG
  source 1..20: mol_type = other DNA
acaaatccaggatgctaagc

SEQ ID NO: 12731 - DNA, 20 bp, synthetic construct
  misc_feature 1..20: note = Description of Artificial Sequence: Synthetic oligonucleotide
  misc_feature 1..20: note = Target: FXN; (-) strand; PAM type: NRG; PAM sequence: AAG
  source 1..20: mol_type = other DNA
aaatacaaatccaggatgct

SEQ ID NO: 12732 - DNA, 20 bp, synthetic construct
  misc_feature 1..20: note = Description of Artificial Sequence: Synthetic oligonucleotide
  misc_feature 1..20: note = Target: FXN; (-) strand; PAM type: NRG; PAM sequence: AGG
  source 1..20: mol_type = other DNA
tggaaagaaaatacaaatcc

SEQ ID NO: 12733 - DNA, 20 bp, synthetic construct
  misc_feature 1..20: note = Description of Artificial Sequence: Synthetic oligonucleotide
  misc_feature 1..20: note = Target: FXN; (-) strand; PAM type: NRG; PAM sequence: CAG
  source 1..20: mol_type = other DNA
ttggaaagaaaatacaaatc

SEQ ID NO: 12734 - DNA, 20 bp, synthetic construct
  misc_feature 1..20: note = Description of Artificial Sequence: Synthetic oligonucleotide
  misc_feature 1..20: note = Target: FXN; (-) strand; PAM type: NRG; PAM sequence: AAG
  source 1..20: mol_type = other DNA
atcacttaaggactcttgga

SEQ ID NO: 12735 - DNA, 20 bp, synthetic construct
  misc_feature 1..20: note = Description of Artificial Sequence: Synthetic oligonucleotide
  misc_feature 1..20: note = Target: FXN; (-) strand; PAM type: NRG; PAM sequence: TGG
  source 1..20: mol_type = other DNA
agatatcacttaaggactct

SEQ ID NO: 12736 - DNA, 20 bp, synthetic construct
  misc_feature 1..20: note = Description of Artificial Sequence: Synthetic oligonucleotide
  misc_feature 1..20: note = Target: FXN; (-) strand; PAM type: NRG; PAM sequence: AGG
  source 1..20: mol_type = other DNA
caaaagttagatatcactta

SEQ ID NO: 12737 - DNA, 20 bp, synthetic construct
  misc_feature 1..20: note = Description of Artificial Sequence: Synthetic oligonucleotide
  misc_feature 1..20: note = Target: FXN; (-) strand; PAM type: NRG; PAM sequence: AAG
  source 1..20: mol_type = other DNA
gcaaaagttagatatcactt

SEQ ID NO: 12738 - DNA, 20 bp, synthetic construct
  misc_feature 1..20: note = Description of Artificial Sequence: Synthetic oligonucleotide
  misc_feature 1..20: note = Target: FXN; (-) strand; PAM type: NRG; PAM sequence: TAG
  source 1..20: mol_type = other DNA
aaactgcagctcgcaaaagt

SEQ ID NO: 12739 - DNA, 20 bp, synthetic construct
  misc_feature 1..20: note = Description of Artificial Sequence: Synthetic oligonucleotide
  misc_feature 1..20: note = Target: FXN; (-) strand; PAM type: NRG; PAM sequence: AAG
  source 1..20: mol_type = other DNA
gaggaaactgcagctcgcaa

SEQ ID NO: 12740 - DNA, 20 bp, synthetic construct
  misc_feature 1..20: note = Description of Artificial Sequence: Synthetic oligonucleotide
  misc_feature 1..20: note = Target: FXN; (-) strand; PAM type: NRG; PAM sequence: CAG
  source 1..20: mol_type = other DNA
tctcatagctgaggaaactg

SEQ ID NO: 12741 - DNA, 20 bp, synthetic construct
  misc_feature 1..20: note = Description of Artificial Sequence: Synthetic oligonucleotide
  misc_feature 1..20: note = Target: FXN; (-) strand; PAM type: NRG; PAM sequence: AGG
  source 1..20: mol_type = other DNA
tgtcactcatctcatagctg

SEQ ID NO: 12742 - DNA, 20 bp, synthetic construct
  misc_feature 1..20: note = Description of Artificial Sequence: Synthetic oligonucleotide
  misc_feature 1..20: note = Target: FXN; (-) strand; PAM type: NRG; PAM sequence: GAG
  source 1..20: mol_type = other DNA
atgtcactcatctcatagct

SEQ ID NO: 12743 - DNA, 20 bp, synthetic construct
  misc_feature 1..20: note = Description of Artificial Sequence: Synthetic oligonucleotide
  misc_feature 1..20: note = Target: FXN; (-) strand; PAM type: NRG; PAM sequence: TAG
  source 1..20: mol_type = other DNA
ggttaatgtcactcatctca

SEQ ID NO: 12744 - DNA, 20 bp, synthetic construct
  misc_feature 1..20: note = Description of Artificial Sequence: Synthetic oligonucleotide
  misc_feature 1..20: note = Target: FXN; (-) strand; PAM type: NRG; PAM sequence: AGG
  source 1..20: mol_type = other DNA
cttataaatctgaagagagg

SEQ ID NO: 12745 - DNA, 20 bp, synthetic construct
  misc_feature 1..20: note = Description of Artificial Sequence: Synthetic oligonucleotide
  misc_feature 1..20: note = Target: FXN; (-) strand; PAM type: NRG; PAM sequence: GAG
  source 1..20: mol_type = other DNA
tcttataaatctgaagagag

SEQ ID NO: 12746 - DNA, 20 bp, synthetic construct
  misc_feature 1..20: note = Description of Artificial Sequence: Synthetic oligonucleotide
  misc_feature 1..20: note = Target: FXN; (-) strand; PAM type: NRG; PAM sequence: AGG
  source 1..20: mol_type = other DNA
cctcttataaatctgaagag

SEQ ID NO: 12747 - DNA, 20 bp, synthetic construct
  misc_feature 1..20: note = Description of Artificial Sequence: Synthetic oligonucleotide
  misc_feature 1..20: note = Target: FXN; (-) strand; PAM type: NRG; PAM sequence: GAG
  source 1..20: mol_type = other DNA
tcctcttataaatctgaaga

SEQ ID NO: 12748 - DNA, 20 bp, synthetic construct
  misc_feature 1..20: note = Description of Artificial Sequence: Synthetic oligonucleotide
  misc_feature 1..20: note = Target: FXN; (-) strand; PAM type: NRG; PAM sequence: GAG
  source 1..20: mol_type = other DNA
gatcctcttataaatctgaa

SEQ ID NO: 12749 - DNA, 20 bp, synthetic construct
  misc_feature 1..20: note = Description of Artificial Sequence: Synthetic oligonucleotide
  misc_feature 1..20: note = Target: FXN; (-) strand; PAM type: NRG; PAM sequence: AAG
  source 1..20: mol_type = other DNA
ttgatcctcttataaatctg

SEQ ID NO: 12750 - DNA, 20 bp, synthetic construct
  misc_feature 1..20: note = Description of Artificial Sequence: Synthetic oligonucleotide
  misc_feature 1..20: note = Target: FXN; (-) strand; PAM type: NRG; PAM sequence: AGG
  source 1..20: mol_type = other DNA
aaagtagataccaacttgct

SEQ ID NO: 12751 - DNA, 20 bp, synthetic construct
  misc_feature 1..20: note = Description of Artificial Sequence: Synthetic oligonucleotide
  misc_feature 1..20: note = Target: FXN; (-) strand; PAM type: NRG; PAM sequence: TAG
  source 1..20: mol_type = other DNA
taaagtagataccaacttgc

SEQ ID NO: 12752 - DNA, 20 bp, synthetic construct
  misc_feature 1..20: note = Description of Artificial Sequence: Synthetic oligonucleotide
  misc_feature 1..20: note = Target: FXN; (-) strand; PAM type: NRG; PAM sequence: TAG
  source 1..20: mol_type = other DNA
gacctccttcatttctaaag

SEQ ID NO: 12753 - DNA, 20 bp, synthetic construct
  misc_feature 1..20: note = Description of Artificial Sequence: Synthetic oligonucleotide
  misc_feature 1..20: note = Target: FXN; (-) strand; PAM type: NRG; PAM sequence: AAG
  source 1..20: mol_type = other DNA
tatgacctccttcatttcta

SEQ ID NO: 12754 - DNA, 20 bp, synthetic construct
  misc_feature 1..20: note = Description of Artificial Sequence: Synthetic oligonucleotide
  misc_feature 1..20: note = Target: FXN; (-) strand; PAM type: NRG; PAM sequence: GAG
  source 1..20: mol_type = other DNA
aagatggcatgttgggtctg

SEQ ID NO: 12755 - DNA, 20 bp, synthetic construct
  misc_feature 1..20: note = Description of Artificial Sequence: Synthetic oligonucleotide
  misc_feature 1..20: note = Target: FXN; (-) strand; PAM type: NRG; PAM sequence: TGG
  source 1..20: mol_type = other DNA
ataagatggcatgttgggtc

SEQ ID NO: 12756 - DNA, 20 bp, synthetic construct
  misc_feature 1..20: note = Description of Artificial Sequence: Synthetic oligonucleotide
  misc_feature 1..20: note = Target: FXN; (-) strand; PAM type: NRG; PAM sequence: GGG
  source 1..20: mol_type = other DNA
cacatataagatggcatgtt

SEQ ID NO: 12757 - DNA, 20 bp, synthetic construct
  misc_feature 1..20: note = Description of Artificial Sequence: Synthetic oligonucleotide
  misc_feature 1..20: note = Target: FXN; (-) strand; PAM type: NRG; PAM sequence: TGG
  source 1..20: mol_type = other DNA
acacatataagatggcatgt

SEQ ID NO: 12758 - DNA, 20 bp, synthetic construct
  misc_feature 1..20: note = Description of Artificial Sequence: Synthetic oligonucleotide
  misc_feature 1..20: note = Target: FXN; (-) strand; PAM type: NRG; PAM sequence: TGG
  source 1..20: mol_type = other DNA
agaaatagacacatataaga

SEQ ID NO: 12759 - DNA, 20 bp, synthetic construct
  misc_feature 1..20: note = Description of Artificial Sequence: Synthetic oligonucleotide
  misc_feature 1..20: note = Target: FXN; (-) strand; PAM type: NRG; PAM sequence: AAG
  source 1..20: mol_type = other DNA
ttgtagaaatagacacatat

SEQ ID NO: 12760 - DNA, 20 bp, synthetic construct
  misc_feature 1..20: note = Description of Artificial Sequence: Synthetic oligonucleotide
  misc_feature 1..20: note = Target: FXN; (-) strand; PAM type: NRG; PAM sequence: TAG
  source 1..20: mol_type = other DNA
cactagctcacttgtagaaa

SEQ ID NO: 12761 - DNA, 20 bp, synthetic construct
  misc_feature 1..20: note = Description of Artificial Sequence: Synthetic oligonucleotide
  misc_feature 1..20: note = Target: FXN; (-) strand; PAM type: NRG; PAM sequence: TAG
  source 1..20: mol_type = other DNA
tgttgtcactagctcacttg

SEQ ID NO: 12762 - DNA, 20 bp, synthetic construct
  misc_feature 1..20: note = Description of Artificial Sequence: Synthetic oligonucleotide
  misc_feature 1..20: note = Target: FXN; (-) strand; PAM type: NRG; PAM sequence: TAG
  source 1..20: mol_type = other DNA
atagcaattactgttgtcac

SEQ ID NO: 12763 - DNA, 20 bp, synthetic construct
  misc_feature 1..20: note = Description of Artificial Sequence: Synthetic oligonucleotide
  misc_feature 1..20: note = Target: FXN; (-) strand; PAM type: NRG; PAM sequence: TAG
  source 1..20: mol_type = other DNA
tacccatgtaggagcaaaaa

SEQ ID NO: 12764 - DNA, 20 bp, synthetic construct
  misc_feature 1..20: note = Description of Artificial Sequence: Synthetic oligonucleotide
  misc_feature 1..20: note = Target: FXN; (-) strand; PAM type: NRG; PAM sequence: GAG
  source 1..20: mol_type = other DNA
gatcagccctacccatgtag

SEQ ID NO: 12765 - DNA, 20 bp, synthetic construct
  misc_feature 1..20: note = Description of Artificial Sequence: Synthetic oligonucleotide
  misc_feature 1..20: note = Target: FXN; (-) strand; PAM type: NRG; PAM sequence: AGG
  source 1..20: mol_type = other DNA
aagatcagccctacccatgt

SEQ ID NO: 12766 - DNA, 20 bp, synthetic construct
  misc_feature 1..20: note = Description of Artificial Sequence: Synthetic oligonucleotide
  misc_feature 1..20: note = Target: FXN; (-) strand; PAM type: NRG; PAM sequence: TAG
  source 1..20: mol_type = other DNA
caagatcagccctacccatg

SEQ ID NO: 12767 - DNA, 20 bp, synthetic construct
  misc_feature 1..20: note = Description of Artificial Sequence: Synthetic oligonucleotide
  misc_feature 1..20: note = Target: FXN; (-) strand; PAM type: NRG; PAM sequence: CAG
  source 1..20: mol_type = other DNA
tgactcctcctagtcaagat

SEQ ID NO: 12768 - DNA, 20 bp, synthetic construct
  misc_feature 1..20: note = Description of Artificial Sequence: Synthetic oligonucleotide
  misc_feature 1..20: note = Target: FXN; (-) strand; PAM type: NRG; PAM sequence: AAG
  source 1..20: mol_type = other DNA
cttattgactcctcctagtc

SEQ ID NO: 12769 - DNA, 20 bp, synthetic construct
  misc_feature 1..20: note = Description of Artificial Sequence: Synthetic oligonucleotide
  misc_feature 1..20: note = Target: FXN; (-) strand; PAM type: NRG; PAM sequence: TAG
  source 1..20: mol_type = other DNA
tgagtcttattgactcctcc

SEQ ID NO: 12770 - DNA, 20 bp, synthetic construct
  misc_feature 1..20: note = Description of Artificial Sequence: Synthetic oligonucleotide
  misc_feature 1..20: note = Target: FXN; (-) strand; PAM type: NRG; PAM sequence: GAG
  source 1..20: mol_type = other DNA
agccaccacgcccggctggt

SEQ ID NO: 12771 - DNA, 20 bp, synthetic construct
  misc_feature 1..20: note = Description of Artificial Sequence: Synthetic oligonucleotide
  misc_feature 1..20: note = Target: FXN; (-) strand; PAM type: NRG; PAM sequence: TGG
  source 1..20: mol_type = other DNA
cgtgagccaccacgcccggc

SEQ ID NO: 12772 - DNA, 20 bp, synthetic construct
  misc_feature 1..20: note = Description of Artificial Sequence: Synthetic oligonucleotide
  misc_feature 1..20: note = Target: FXN; (-) strand; PAM type: NRG; PAM sequence: CGG
  source 1..20: mol_type = other DNA
caggcgtgagccaccacgcc

SEQ ID NO: 12773 - DNA, 20 bp, synthetic construct
  misc_feature 1..20: note = Description of Artificial Sequence: Synthetic oligonucleotide
  misc_feature 1..20: note = Target: FXN; (-) strand; PAM type: NRG; PAM sequence: GAG
  source 1..20: mol_type = other DNA
agtgctgggattacaggcgt

SEQ ID NO: 12774 - DNA, 20 bp, synthetic construct
  misc_feature 1..20: note = Description of Artificial Sequence: Synthetic oligonucleotide
  misc_feature 1..20: note = Target: FXN; (-) strand; PAM type: NRG; PAM sequence: AGG
  source 1..20: mol_type = other DNA
tcccaaagtgctgggattac

SEQ ID NO: 12775 - DNA, 20 bp, synthetic construct
  misc_feature 1..20: note = Description of Artificial Sequence: Synthetic oligonucleotide
  misc_feature 1..20: note = Target: FXN; (-) strand; PAM type: NRG; PAM sequence: CAG
  source 1..20: mol_type = other DNA
ctcccaaagtgctgggatta

SEQ ID NO: 12776 - DNA, 20 bp, synthetic construct
  misc_feature 1..20: note = Description of Artificial Sequence: Synthetic oligonucleotide
  misc_feature 1..20: note = Target: FXN; (-) strand; PAM type: NRG; PAM sequence: GGG
  source 1..20: mol_type = other DNA
ccttggcctcccaaagtgct

SEQ ID NO: 12777 - DNA, 20 bp, synthetic construct
  misc_feature 1..20: note = Description of Artificial Sequence: Synthetic oligonucleotide
  misc_feature 1..20: note = Target: FXN; (-) strand; PAM type: NRG; PAM sequence: TGG
  source 1..20: mol_type = other DNA
gccttggcctcccaaagtgc

SEQ ID NO: 12778 - DNA, 20 bp, synthetic construct
  misc_feature 1..20: note = Description of Artificial Sequence: Synthetic oligonucleotide
  misc_feature 1..20: note = Target: FXN; (-) strand; PAM type: NRG; PAM sequence: AAG
  source 1..20: mol_type = other DNA
ccgcccgccttggcctccca

SEQ ID NO: 12779 - DNA, 20 bp, synthetic construct
  misc_feature 1..20: note = Description of Artificial Sequence: Synthetic oligonucleotide
  misc_feature 1..20: note = Target: FXN; (-) strand; PAM type: NRG; PAM sequence: TGG
  source 1..20: mol_type = other DNA
acctcgtgatccgcccgcct

SEQ ID NO: 12780 - DNA, 20 bp, synthetic construct
  misc_feature 1..20: note = Description of Artificial Sequence: Synthetic oligonucleotide
  misc_feature 1..20: note = Target: FXN; (-) strand; PAM type: NRG; PAM sequence: TGG
  source 1..20: mol_type = other DNA
tttcaccgtgttagccagaa

SEQ ID NO: 12781 - DNA, 20 bp, synthetic construct
  misc_feature 1..20: note = Description of Artificial Sequence: Synthetic oligonucleotide
  misc_feature 1..20: note = Target: FXN; (-) strand; PAM type: NRG; PAM sequence: CAG
  source 1..20: mol_type = other DNA
cggggtttcaccgtgttagc

SEQ ID NO: 12782 - DNA, 20 bp, synthetic construct
  misc_feature 1..20: note = Description of Artificial Sequence: Synthetic oligonucleotide
  misc_feature 1..20: note = Target: FXN; (-) strand; PAM type: NRG; PAM sequence: TAG
  source 1..20: mol_type = other DNA
gagacggggtttcaccgtgt

SEQ ID NO: 12783 - DNA, 20 bp, synthetic construct
  misc_feature 1..20: note = Description of Artificial Sequence: Synthetic oligonucleotide
  misc_feature 1..20: note = Target: FXN; (-) strand; PAM type: NRG; PAM sequence: GGG
  source 1..20: mol_type = other DNA
gtatttttttagtagagacg

SEQ ID NO: 12784 - DNA, 20 bp, synthetic construct
  misc_feature 1..20: note = Description of Artificial Sequence: Synthetic oligonucleotide
  misc_feature 1..20: note = Target: FXN; (-) strand; PAM type: NRG; PAM sequence: GGG
  source 1..20: mol_type = other DNA
tgtatttttttagtagagac

SEQ ID NO: 12785 - DNA, 20 bp, synthetic construct
  misc_feature 1..20: note = Description of Artificial Sequence: Synthetic oligonucleotide
  misc_feature 1..20: note = Target: FXN; (-) strand; PAM type: NRG; PAM sequence: CGG
  source 1..20: mol_type = other DNA
ttgtatttttttagtagaga

SEQ ID NO: 12786 - DNA, 20 bp, synthetic construct
  misc_feature 1..20: note = Description of Artificial Sequence: Synthetic oligonucleotide
  misc_feature 1..20: note = Target: FXN; (-) strand; PAM type: NRG; PAM sequence: GAG
  source 1..20: mol_type = other DNA
ttttttgtatttttttagta

SEQ ID NO: 12787 - DNA, 20 bp, synthetic construct
  misc_feature 1..20: note = Description of Artificial Sequence: Synthetic oligonucleotide
  misc_feature 1..20: note = Target: FXN; (-) strand; PAM type: NRG; PAM sequence: TAG
  source 1..20: mol_type = other DNA
atttttttgtatttttttag

SEQ ID NO: 12788 - DNA, 20 bp, synthetic construct
  misc_feature 1..20: note = Description of Artificial Sequence: Synthetic oligonucleotide
  misc_feature 1..20: note = Target: FXN; (-) strand; PAM type: NRG; PAM sequence: TAG
  source 1..20: mol_type = other DNA
ctaatttttttgtatttttt

SEQ ID NO: 12789 - DNA, 20 bp, synthetic construct
  misc_feature 1..20: note = Description of Artificial Sequence: Synthetic oligonucleotide
  misc_feature 1..20: note = Target: FXN; (-) strand; PAM type: NRG; PAM sequence: CAG
  source 1..20: mol_type = other DNA
caggcgcccaccaccacgcc

SEQ ID NO: 12790 - DNA, 20 bp, synthetic construct
  misc_feature 1..20: note = Description of Artificial Sequence: Synthetic oligonucleotide
  misc_feature 1..20: note = Target: FXN; (-) strand; PAM type: NRG; PAM sequence: AGG
  source 1..20: mol_type = other DNA
tcccgagtagctgggactac

SEQ ID NO: 12791 - DNA, 20 bp, synthetic construct
  misc_feature 1..20: note = Description of Artificial Sequence: Synthetic oligonucleotide
  misc_feature 1..20: note = Target: FXN; (-) strand; PAM type: NRG; PAM sequence: CAG
  source 1..20: mol_type = other DNA
ttcccgagtagctgggacta

SEQ ID NO: 12792 - DNA, 20 bp, synthetic construct
  misc_feature 1..20: note = Description of Artificial Sequence: Synthetic oligonucleotide
  misc_feature 1..20: note = Target: FXN; (-) strand; PAM type: NRG; PAM sequence: GGG
  source 1..20: mol_type = other DNA
cctcagcttcccgagtagct

SEQ ID NO: 12793 - DNA, 20 bp, synthetic construct
  misc_feature 1..20: note = Description of Artificial Sequence: Synthetic oligonucleotide
  misc_feature 1..20: note = Target: FXN; (-) strand; PAM type: NRG; PAM sequence: TGG
  source 1..20: mol_type = other DNA
gcctcagcttcccgagtagc

SEQ ID NO: 12794 - DNA, 20 bp, synthetic construct
  misc_feature 1..20: note = Description of Artificial Sequence: Synthetic oligonucleotide
  misc_feature 1..20: note = Target: FXN; (-) strand; PAM type: NRG; PAM sequence: TAG
  source 1..20: mol_type = other DNA
tcctgcctcagcttcccgag

SEQ ID NO: 12795 - DNA, 20 bp, synthetic construct
  misc_feature 1..20: note = Description of Artificial Sequence: Synthetic oligonucleotide
  misc_feature 1..20: note = Target: FXN; (-) strand; PAM type: NRG; PAM sequence: GAG
  source 1..20: mol_type = other DNA
ttctcctgcctcagcttccc

SEQ ID NO: 12796 - DNA, 20 bp, synthetic construct
  misc_feature 1..20: note = Description of Artificial Sequence: Synthetic oligonucleotide
  misc_feature 1..20: note = Target: FXN; (-) strand; PAM type: NRG; PAM sequence: CAG
  source 1..20: mol_type = other DNA
ttcacgccattctcctgcct

SEQ ID NO: 12797 - DNA, 20 bp, synthetic construct
  misc_feature 1..20: note = Description of Artificial Sequence: Synthetic oligonucleotide
  misc_feature 1..20: note = Target: FXN; (-) strand; PAM type: NRG; PAM sequence: GGG
  source 1..20: mol_type = other DNA
cactgcaagctctgcctccc

SEQ ID NO: 12798 - DNA, 20 bp, synthetic construct
  misc_feature 1..20: note = Description of Artificial Sequence: Synthetic oligonucleotide
  misc_feature 1..20: note = Target: FXN; (-) strand; PAM type: NRG; PAM sequence: CGG
  source 1..20: mol_type = other DNA
tcactgcaagctctgcctcc

SEQ ID NO: 12799 - DNA, 20 bp, synthetic construct
  misc_feature 1..20: note = Description of Artificial Sequence: Synthetic oligonucleotide
  misc_feature 1..20: note = Target: FXN; (-) strand; PAM type: NRG; PAM sequence: AAG
  source 1..20: mol_type = other DNA
gctcgatcttggttcactgc

SEQ ID NO: 12800 - DNA, 20 bp, synthetic construct
  misc_feature 1..20: note = Description of Artificial Sequence: Synthetic oligonucleotide
  misc_feature 1..20: note = Target: FXN; (-) strand; PAM type: NRG; PAM sequence: TGG
  source 1..20: mol_type = other DNA
agagtgcagtggctcgatct

SEQ ID NO: 12801 - DNA, 20 bp, synthetic construct
  misc_feature 1..20: note = Description of Artificial Sequence: Synthetic oligonucleotide
  misc_feature 1..20: note = Target: FXN; (-) strand; PAM type: NRG; PAM sequence: TGG
  source 1..20: mol_type = other DNA
tcacccaggctagagtgcag

SEQ ID NO: 12802 - DNA, 20 bp, synthetic construct
  misc_feature 1..20: note = Description of Artificial Sequence: Synthetic oligonucleotide
  misc_feature 1..20: note = Target: FXN; (-) strand; PAM type: NRG; PAM sequence: CAG
  source 1..20: mol_type = other DNA
ctgtcacccaggctagagtg

SEQ ID NO: 12803 - DNA, 20 bp, synthetic construct
  misc_feature 1..20: note = Description of Artificial Sequence: Synthetic oligonucleotide
  misc_feature 1..20: note = Target: FXN; (-) strand; PAM type: NRG; PAM sequence: GAG
  source 1..20: mol_type = other DNA
tcgctctgtcacccaggcta

SEQ ID NO: 12804 - DNA, 20 bp, synthetic construct
  misc_feature 1..20: note = Description of Artificial Sequence: Synthetic oligonucleotide
  misc_feature 1..20: note = Target: FXN; (-) strand; PAM type: NRG; PAM sequence: TAG
  source 1..20: mol_type = other DNA
tctcgctctgtcacccaggc

SEQ ID NO: 12805 - DNA, 20 bp, synthetic construct
  misc_feature 1..20: note = Description of Artificial Sequence: Synthetic oligonucleotide
  misc_feature 1..20: note = Target: FXN; (-) strand; PAM type: NRG; PAM sequence: AGG
  source 1..20: mol_type = other DNA
ggagtctcgctctgtcaccc

SEQ ID NO: 12806 - DNA, 20 bp, synthetic construct
  misc_feature 1..20: note = Description of Artificial Sequence: Synthetic oligonucleotide
  misc_feature 1..20: note = Target: FXN; (-) strand; PAM type: NRG; PAM sequence: CAG
  source 1..20: mol_type = other DNA
tggagtctcgctctgtcacc

SEQ ID NO: 12807 - DNA, 20 bp, synthetic construct
  misc_feature 1..20: note = Description of Artificial Sequence: Synthetic oligonucleotide
  misc_feature 1..20: note = Target: FXN; (-) strand; PAM type: NRG; PAM sequence: GAG
  source 1..20: mol_type = other DNA
ttttttttttttttgagatg

SEQ ID NO: 12808 - DNA, 20 bp, synthetic construct
  misc_feature 1..20: note = Description of Artificial Sequence: Synthetic oligonucleotide
  misc_feature 1..20: note = Target: FXN; (-) strand; PAM type: NRG; PAM sequence: TGG
  source 1..20: mol_type = other DNA
tcttttttttttttttgaga

SEQ ID NO: 12809 - DNA, 20 bp, synthetic construct
  misc_feature 1..20: note = Description of Artificial Sequence: Synthetic oligonucleotide
  misc_feature 1..20: note = Target: FXN; (-) strand; PAM type: NRG; PAM sequence: GAG
  source 1..20: mol_type = other DNA
tgagtctttttttttttttt

SEQ ID NO: 12810 - DNA, 20 bp, synthetic construct
  misc_feature 1..20: note = Description of Artificial Sequence: Synthetic oligonucleotide
  misc_feature 1..20: note = Target: FXN; (-) strand; PAM type: NRG; PAM sequence: GAG
  source 1..20: mol_type = other DNA
agacagtggccacagctggt

SEQ ID NO: 12811 - DNA, 20 bp, synthetic construct
  misc_feature 1..20: note = Description of Artificial Sequence: Synthetic oligonucleotide
  misc_feature 1..20: note = Target: FXN; (-) strand; PAM type: NRG; PAM sequence: TGG
  source 1..20: mol_type = other DNA
gcacagacagtggccacagc

SEQ ID NO: 12812 - DNA, 20 bp, synthetic construct
  misc_feature 1..20: note = Description of Artificial Sequence: Synthetic oligonucleotide
  misc_feature 1..20: note = Target: FXN; (-) strand; PAM type: NRG; PAM sequence: CAG
  source 1..20: mol_type = other DNA
attagcacagacagtggcca

SEQ ID NO: 12813 - DNA, 20 bp, synthetic construct
  misc_feature 1..20: note = Description of Artificial Sequence: Synthetic oligonucleotide
  misc_feature 1..20: note = Target: FXN; (-) strand; PAM type: NRG; PAM sequence: TGG
  source 1..20: mol_type = other DNA
tagccaattagcacagacag

SEQ ID NO: 12814 - DNA, 20 bp, synthetic construct
  misc_feature 1..20: note = Description of Artificial Sequence: Synthetic oligonucleotide
  misc_feature 1..20: note = Target: FXN; (-) strand; PAM type: NRG; PAM sequence: CAG
  source 1..20: mol_type = other DNA
cactagccaattagcacaga

SEQ ID NO: 12815 - DNA, 20 bp, synthetic construct
  misc_feature 1..20: note = Description of Artificial Sequence: Synthetic oligonucleotide
  misc_feature 1..20: note = Target: FXN; (-) strand; PAM type: NRG; PAM sequence: CAG
  source 1..20: mol_type = other DNA
caggcactagccaattagca

SEQ ID NO: 12816 - DNA, 20 bp, synthetic construct
  misc_feature 1..20: note = Description of Artificial Sequence: Synthetic oligonucleotide
  misc_feature 1..20: note = Target: FXN; (-) strand; PAM type: NRG; PAM sequence: TAG
  source 1..20: mol_type = other DNA
agatgcaggcactagccaat

SEQ ID NO: 12817 - DNA, 20 bp, synthetic construct
  misc_feature 1..20: note = Description ofArtificial Sequence: Synthetic oligonucleotide
  misc_feature 1..20: note = Target: FXN; (-) strand; PAM type: NRG; PAM sequence: TAG
  source 1..20: mol_type = other DNA
agtttctgagatgcaggcac

SEQ ID NO: 12818 - DNA, 20 bp, synthetic construct
  misc_feature 1..20: note = Description of Artificial Sequence: Synthetic oligonucleotide
  misc_feature 1..20: note = Target: FXN; (-) strand; PAM type: NRG; PAM sequence: AGG
  source 1..20: mol_type = other DNA
tgtagcagtttctgagatgc

SEQ ID NO: 12819 - DNA, 20 bp, synthetic construct
  misc_feature 1..20: note = Description of Artificial Sequence: Synthetic oligonucleotide
  misc_feature 1..20: note = Target: FXN; (-) strand; PAM type: NRG; PAM sequence: CAG
  source 1..20: mol_type = other DNA
atgtagcagtttctgagatg

SEQ ID NO: 12820 - DNA, 20 bp, synthetic construct
  misc_feature 1..20: note = Description of Artificial Sequence: Synthetic oligonucleotide
  misc_feature 1..20: note = Target: FXN; (-) strand; PAM type: NRG; PAM sequence: GAG
  source 1..20: mol_type = other DNA
caaaatatgtagcagtttct

SEQ ID NO: 12821 - DNA, 20 bp, synthetic construct
  misc_feature 1..20: note = Description of Artificial Sequence: Synthetic oligonucleotide
  misc_feature 1..20: note = Target: FXN; (-) strand; PAM type: NRG; PAM sequence: CAG
  source 1..20: mol_type = other DNA
ggaatagtcaaaatatgtag

SEQ ID NO: 12822 - DNA, 20 bp, synthetic construct
  misc_feature 1..20: note = Description of Artificial Sequence: Synthetic oligonucleotide
  misc_feature 1..20: note = Target: FXN; (-) strand; PAM type: NRG; PAM sequence: TAG
  source 1..20: mol_type = other DNA
gggggaatagtcaaaatatg

SEQ ID NO: 12823 - DNA, 20 bp, synthetic construct
  misc_feature 1..20: note = Description of Artificial Sequence: Synthetic oligonucleotide
  misc_feature 1..20: note = Target: FXN; (-) strand; PAM type: NRG; PAM sequence: TAG
  source 1..20: mol_type = other DNA
gcccttaagtgcagggggaa

SEQ ID NO: 12824 - DNA, 20 bp, synthetic construct
  misc_feature 1..20: note = Description of Artificial Sequence: Synthetic oligonucleotide
  misc_feature 1..20: note = Target: FXN; (-) strand; PAM type: NRG; PAM sequence: GGG
  source 1..20: mol_type = other DNA
tgcatgcccttaagtgcagg

SEQ ID NO: 12825 - DNA, 20 bp, synthetic construct
  misc_feature 1..20: note = Description of Artificial Sequence: Synthetic oligonucleotide
  misc_feature 1..20: note = Target: FXN; (-) strand; PAM type: NRG; PAM sequence: GGG
  source 1..20: mol_type = other DNA
gtgcatgcccttaagtgcag

SEQ ID NO: 12826 - DNA, 20 bp, synthetic construct
  misc_feature 1..20: note = Description of Artificial Sequence: Synthetic oligonucleotide
  misc_feature 1..20: note = Target: FXN; (-) strand; PAM type: NRG; PAM sequence: GGG
  source 1..20: mol_type = other DNA
tgtgcatgcccttaagtgca

SEQ ID NO: 12827 - DNA, 20 bp, synthetic construct
  misc_feature 1..20: note = Description of Artificial Sequence: Synthetic oligonucleotide
  misc_feature 1..20: note = Target: FXN; (-) strand; PAM type: NRG; PAM sequence: AGG
  source 1..20: mol_type = other DNA
gtgtgcatgcccttaagtgc

SEQ ID NO: 12828 - DNA, 20 bp, synthetic construct
  misc_feature 1..20: note = Description of Artificial Sequence: Synthetic oligonucleotide
  misc_feature 1..20: note = Target: FXN; (-) strand; PAM type: NRG; PAM sequence: CAG
  source 1..20: mol_type = other DNA
agtgtgcatgcccttaagtg

SEQ ID NO: 12829 - DNA, 20 bp, synthetic construct
  misc_feature 1..20: note = Description of Artificial Sequence: Synthetic oligonucleotide
  misc_feature 1..20: note = Target: FXN; (-) strand; PAM type: NRG; PAM sequence: AAG
  source 1..20: mol_type = other DNA
ttgggagtgtgcatgccctt

SEQ ID NO: 12830 - DNA, 20 bp, synthetic construct
  misc_feature 1..20: note = Description of Artificial Sequence: Synthetic oligonucleotide
  misc_feature 1..20: note = Target: FXN; (-) strand; PAM type: NRG; PAM sequence: GAG
  source 1..20: mol_type = other DNA
acaatctgagtctattttgg

SEQ ID NO: 12831 - DNA, 20 bp, synthetic construct
  misc_feature 1..20: note = Description of Artificial Sequence: Synthetic oligonucleotide
  misc_feature 1..20: note = Target: FXN; (-) strand; PAM type: NRG; PAM sequence: GGG
  source 1..20: mol_type = other DNA
agacaatctgagtctatttt

SEQ ID NO: 12832 - DNA, 20 bp, synthetic construct
  misc_feature 1..20: note = Description of Artificial Sequence: Synthetic oligonucleotide
  misc_feature 1..20: note = Target: FXN; (-) strand; PAM type: NRG; PAM sequence: TGG
  source 1..20: mol_type = other DNA
tagacaatctgagtctattt

SEQ ID NO: 12833 - DNA, 20 bp, synthetic construct
  misc_feature 1..20: note = Description of Artificial Sequence: Synthetic oligonucleotide
  misc_feature 1..20: note = Target: FXN; (-) strand; PAM type: NRG; PAM sequence: GAG
  source 1..20: mol_type = other DNA
cattattccttagacaatct

SEQ ID NO: 12834 - DNA, 20 bp, synthetic construct
  misc_feature 1..20: note = Description of Artificial Sequence: Synthetic oligonucleotide
  misc_feature 1..20: note = Target: FXN; (-) strand; PAM type: NRG; PAM sequence: TAG
  source 1..20: mol_type = other DNA
tcatcatcatcattattcct

SEQ ID NO: 12835 - DNA, 20 bp, synthetic construct
  misc_feature 1..20: note = Description of Artificial Sequence: Synthetic oligonucleotide
  misc_feature 1..20: note = Target: FXN; (-) strand; PAM type: NRG; PAM sequence: GGG
  source 1..20: mol_type = other DNA
acaaatagaccagataaaga

SEQ ID NO: 12836 - DNA, 20 bp, synthetic construct
  misc_feature 1..20: note = Description of Artificial Sequence: Synthetic oligonucleotide
  misc_feature 1..20: note = Target: FXN; (-) strand; PAM type: NRG; PAM sequence: AGG
  source 1..20: mol_type = other DNA
tacaaatagaccagataaag

SEQ ID NO: 12837 - DNA, 20 bp, synthetic construct
  misc_feature 1..20: note = Description of Artificial Sequence: Synthetic oligonucleotide
  misc_feature 1..20: note = Target: FXN; (-) strand; PAM type: NRG; PAM sequence: GAG
  source 1..20: mol_type = other DNA
ctacaaatagaccagataaa

SEQ ID NO: 12838 - DNA, 20 bp, synthetic construct
  misc_feature 1..20: note = Description of Artificial Sequence: Synthetic oligonucleotide
  misc_feature 1..20: note = Target: FXN; (-) strand; PAM type: NRG; PAM sequence: AAG
  source 1..20: mol_type = other DNA
gactacaaatagaccagata

SEQ ID NO: 12839 - DNA, 20 bp, synthetic construct
  misc_feature 1..20: note = Description of Artificial Sequence: Synthetic oligonucleotide
  misc_feature 1..20: note = Target: FXN; (-) strand; PAM type: NRG; PAM sequence: CAG
  source 1..20: mol_type = other DNA
ggaactgactacaaatagac

SEQ ID NO: 12840 - DNA, 20 bp, synthetic construct
  misc_feature 1..20: note = Description of Artificial Sequence: Synthetic oligonucleotide
  misc_feature 1..20: note = Target: FXN; (-) strand; PAM type: NRG; PAM sequence: TAG
  source 1..20: mol_type = other DNA
cttttggaactgactacaaa

SEQ ID NO: 12841 - DNA, 20 bp, synthetic construct
  misc_feature 1..20: note = Description of Artificial Sequence: Synthetic oligonucleotide
  misc_feature 1..20: note = Target: FXN; (-) strand; PAM type: NRG; PAM sequence: TGG
  source 1..20: mol_type = other DNA
gcagaaattcttaatgcttt

SEQ ID NO: 12842 - DNA, 20 bp, synthetic construct
  misc_feature 1..20: note = Description of Artificial Sequence: Synthetic oligonucleotide
  misc_feature 1..20: note = Target: FXN; (-) strand; PAM type: NRG; PAM sequence: CAG
  source 1..20: mol_type = other DNA
aactagctgcattagttcag

SEQ ID NO: 12843 - DNA, 20 bp, synthetic construct
  misc_feature 1..20: note = Description of Artificial Sequence: Synthetic oligonucleotide
  misc_feature 1..20: note = Target: FXN; (-) strand; PAM type: NRG; PAM sequence: CAG
  source 1..20: mol_type = other DNA
agaaactagctgcattagtt

SEQ ID NO: 12844 - DNA, 20 bp, synthetic construct
  misc_feature 1..20: note = Description of Artificial Sequence: Synthetic oligonucleotide
  misc_feature 1..20: note = Target: FXN; (-) strand; PAM type: NRG; PAM sequence: TAG
  source 1..20: mol_type = other DNA
aggaaagaaactagctgcat

SEQ ID NO: 12845 - DNA, 20 bp, synthetic construct
  misc_feature 1..20: note = Description of Artificial Sequence: Synthetic oligonucleotide
  misc_feature 1..20: note = Target: FXN; (-) strand; PAM type: NRG; PAM sequence: TAG
  source 1..20: mol_type = other DNA
agtggtgacaggaaagaaac

SEQ ID NO: 12846 - DNA, 20 bp, synthetic construct
  misc_feature 1..20: note = Description of Artificial Sequence: Synthetic oligonucleotide
  misc_feature 1..20: note = Target: FXN; (-) strand; PAM type: NRG; PAM sequence: AAG
  source 1..20: mol_type = other DNA
gaaggaaagtggtgacagga

SEQ ID NO: 12847 - DNA, 20 bp, synthetic construct
  misc_feature 1..20: note = Description of Artificial Sequence: Synthetic oligonucleotide
  misc_feature 1..20: note = Target: FXN; (-) strand; PAM type: NRG; PAM sequence: AGG
  source 1..20: mol_type = other DNA
tttggaaggaaagtggtgac

SEQ ID NO: 12848 - DNA, 20 bp, synthetic construct
  misc_feature 1..20: note = Description of Artificial Sequence: Synthetic oligonucleotide
  misc_feature 1..20: note = Target: FXN; (-) strand; PAM type: NRG; PAM sequence: CAG
  source 1..20: mol_type = other DNA
ttttggaaggaaagtggtga

SEQ ID NO: 12849 - DNA, 20 bp, synthetic construct
  misc_feature 1..20: note = Description of Artificial Sequence: Synthetic oligonucleotide
  misc_feature 1..20: note = Target: FXN; (-) strand; PAM type: NRG; PAM sequence: TGG
  source 1..20: mol_type = other DNA
aaactattttggaaggaaag

SEQ ID NO: 12850 - DNA, 20 bp, synthetic construct
  misc_feature 1..20: note = Description of Artificial Sequence: Synthetic oligonucleotide
  misc_feature 1..20: note = Target: FXN; (-) strand; PAM type: NRG; PAM sequence: AAG
  source 1..20: mol_type = other DNA
ttgaaactattttggaagga

SEQ ID NO: 12851 - DNA, 20 bp, synthetic construct
  misc_feature 1..20: note = Description of Artificial Sequence: Synthetic oligonucleotide
  misc_feature 1..20: note = Target: FXN; (-) strand; PAM type: NRG; PAM sequence: AGG
  source 1..20: mol_type = other DNA
gatcttgaaactattttgga

SEQ ID NO: 12852 - DNA, 20 bp, synthetic construct
  misc_feature 1..20: note = Description of Artificial Sequence: Synthetic oligonucleotide
  misc_feature 1..20: note = Target: FXN; (-) strand; PAM type: NRG; PAM sequence: AAG
  source 1..20: mol_type = other DNA
agatcttgaaactattttgg

SEQ ID NO: 12853 - DNA, 20 bp, synthetic construct
  misc_feature 1..20: note = Description of Artificial Sequence: Synthetic oligonucleotide
  misc_feature 1..20: note = Target: FXN; (-) strand; PAM type: NRG; PAM sequence: TGG
  source 1..20: mol_type = other DNA
cacagatcttgaaactattt

SEQ ID NO: 12854 - DNA, 20 bp, synthetic construct
  misc_feature 1..20: note = Description of Artificial Sequence: Synthetic oligonucleotide
  misc_feature 1..20: note = Target: FXN; (-) strand; PAM type: NRG; PAM sequence: CAG
  source 1..20: mol_type = other DNA
taaatagattttttccccca

SEQ ID NO: 12855 - DNA, 20 bp, synthetic construct
  misc_feature 1..20: note = Description of Artificial Sequence: Synthetic oligonucleotide
  misc_feature 1..20: note = Target: FXN; (-) strand; PAM type: NRG; PAM sequence: TAG
  source 1..20: mol_type = other DNA
accagtctgttcactgtaaa

SEQ ID NO: 12856 - DNA, 20 bp, synthetic construct
  misc_feature 1..20: note = Description of Artificial Sequence: Synthetic oligonucleotide
  misc_feature 1..20: note = Target: FXN; (-) strand; PAM type: NRG; PAM sequence: CAG
  source 1..20: mol_type = other DNA
aatgctcaacttcctcccac

SEQ ID NO: 12857 - DNA, 20 bp, synthetic construct
  misc_feature 1..20: note = Description of Artificial Sequence: Synthetic oligonucleotide
  misc_feature 1..20: note = Target: FXN; (-) strand; PAM type: NRG; PAM sequence: CAG
  source 1..20: mol_type = other DNA
tagggcaaggttacacaggg

SEQ ID NO: 12858 - DNA, 20 bp, synthetic construct
  misc_feature 1..20: note = Description of Artificial Sequence: Synthetic oligonucleotide
  misc_feature 1..20: note = Target: FXN; (-) strand; PAM type: NRG; PAM sequence: GGG
  source 1..20: mol_type = other DNA
acttagggcaaggttacaca

SEQ ID NO: 12859 - DNA, 20 bp, synthetic construct
  misc_feature 1..20: note = Description of Artificial Sequence: Synthetic oligonucleotide
  misc_feature 1..20: note = Target: FXN; (-) strand; PAM type: NRG; PAM sequence: AGG
  source 1..20: mol_type = other DNA
aacttagggcaaggttacac

SEQ ID NO: 12860 - DNA, 20 bp, synthetic construct
  misc_feature 1..20: note = Description of Artificial Sequence: Synthetic oligonucleotide
  misc_feature 1..20: note = Target: FXN; (-) strand; PAM type: NRG; PAM sequence: CAG
  source 1..20: mol_type = other DNA
caacttagggcaaggttaca

SEQ ID NO: 12861 - DNA, 20 bp, synthetic construct
  misc_feature 1..20: note = Description of Artificial Sequence: Synthetic oligonucleotide
  misc_feature 1..20: note = Target: FXN; (-) strand; PAM type: NRG; PAM sequence: AGG
  source 1..20: mol_type = other DNA
catctgcccaacttagggca

SEQ ID NO: 12862 - DNA, 20 bp, synthetic construct
  misc_feature 1..20: note = Description of Artificial Sequence: Synthetic oligonucleotide
  misc_feature 1..20: note = Target: FXN; (-) strand; PAM type: NRG; PAM sequence: AAG
  source 1..20: mol_type = other DNA
ccatctgcccaacttagggc

SEQ ID NO: 12863 - DNA, 20 bp, synthetic construct
  misc_feature 1..20: note = Description of Artificial Sequence: Synthetic oligonucleotide
  misc_feature 1..20: note = Target: FXN; (-) strand; PAM type: NRG; PAM sequence: GGG
  source 1..20: mol_type = other DNA
gataccatctgcccaactta

SEQ ID NO: 12864 - DNA, 20 bp, synthetic construct
  misc_feature 1..20: note = Description of Artificial Sequence: Synthetic oligonucleotide
  misc_feature 1..20: note = Target: FXN; (-) strand; PAM type: NRG; PAM sequence: AGG
  source 1..20: mol_type = other DNA
tgataccatctgcccaactt

SEQ ID NO: 12865 - DNA, 20 bp, synthetic construct
  misc_feature 1..20: note = Description of Artificial Sequence: Synthetic oligonucleotide
  misc_feature 1..20: note = Target: FXN; (-) strand; PAM type: NRG; PAM sequence: TAG
  source 1..20: mol_type = other DNA
gtgataccatctgcccaact

SEQ ID NO: 12866 - DNA, 20 bp, synthetic construct
  misc_feature 1..20: note = Description of Artificial Sequence: Synthetic oligonucleotide
  misc_feature 1..20: note = Target: FXN; (-) strand; PAM type: NRG; PAM sequence: TAG
  source 1..20: mol_type = other DNA
atgagcagatgatgtccagg

SEQ ID NO: 12867 - DNA, 20 bp, synthetic construct
  misc_feature 1..20: note = Description of Artificial Sequence: Synthetic oligonucleotide
  misc_feature 1..20: note = Target: FXN; (-) strand; PAM type: NRG; PAM sequence: AGG
  source 1..20: mol_type = other DNA
tgaatgagcagatgatgtcc

SEQ ID NO: 12868 - DNA, 20 bp, synthetic construct
  misc_feature 1..20: note = Description of Artificial Sequence: Synthetic oligonucleotide
  misc_feature 1..20: note = Target: FXN; (-) strand; PAM type: NRG; PAM sequence: CAG
  source 1..20: mol_type = other DNA
gtgaatgagcagatgatgtc

SEQ ID NO: 12869 - DNA, 20 bp, synthetic construct
  misc_feature 1..20: note = Description of Artificial Sequence: Synthetic oligonucleotide
  misc_feature 1..20: note = Target: FXN; (-) strand; PAM type: NRG; PAM sequence: CAG
  source 1..20: mol_type = other DNA
ctggtcaaatagtgaatgag

SEQ ID NO: 12870 - DNA, 20 bp, synthetic construct
  misc_feature 1..20: note = Description of Artificial Sequence: Synthetic oligonucleotide
  misc_feature 1..20: note = Target: FXN; (-) strand; PAM type: NRG; PAM sequence: GAG
  source 1..20: mol_type = other DNA
caactggtcaaatagtgaat

SEQ ID NO: 12871 - DNA, 20 bp, synthetic construct
  misc_feature 1..20: note = Description of Artificial Sequence: Synthetic oligonucleotide
  misc_feature 1..20: note = Target: FXN; (-) strand; PAM type: NRG; PAM sequence: TAG
  source 1..20: mol_type = other DNA
tgaatgaccaactggtcaaa

SEQ ID NO: 12872 - DNA, 20 bp, synthetic construct
  misc_feature 1..20: note = Description of Artificial Sequence: Synthetic oligonucleotide
  misc_feature 1..20: note = Target: FXN; (-) strand; PAM type: NRG; PAM sequence: TGG
  source 1..20: mol_type = other DNA
tttgtgaatgaatgaccaac

SEQ ID NO: 12873 - DNA, 20 bp, synthetic construct
  misc_feature 1..20: note = Description of Artificial Sequence: Synthetic oligonucleotide
  misc_feature 1..20: note = Target: FXN; (-) strand; PAM type: NRG; PAM sequence: AGG
  source 1..20: mol_type = other DNA
cctccatccctcctgcaaaa

SEQ ID NO: 12874 - DNA, 20 bp, synthetic construct
  misc_feature 1..20: note = Description of Artificial Sequence: Synthetic oligonucleotide
  misc_feature 1..20: note = Target: FXN; (-) strand; PAM type: NRG; PAM sequence: AAG
  source 1..20: mol_type = other DNA
acctccatccctcctgcaaa

SEQ ID NO: 12875 - DNA, 20 bp, synthetic construct
  misc_feature 1..20: note = Description of Artificial Sequence: Synthetic oligonucleotide
  misc_feature 1..20: note = Target: FXN; (-) strand; PAM type: NRG; PAM sequence: TAG
  source 1..20: mol_type = other DNA
catgctagcatctgcaggtc

SEQ ID NO: 12876 - DNA, 20 bp, synthetic construct
  misc_feature 1..20: note = Description of Artificial Sequence: Synthetic oligonucleotide
  misc_feature 1..20: note = Target: FXN; (-) strand; PAM type: NRG; PAM sequence: AGG
  source 1..20: mol_type = other DNA
cttttcatgctagcatctgc

SEQ ID NO: 12877 - DNA, 20 bp, synthetic construct
  misc_feature 1..20: note = Description of Artificial Sequence: Synthetic oligonucleotide
  misc_feature 1..20: note = Target: FXN; (-) strand; PAM type: NRG; PAM sequence: CAG
  source 1..20: mol_type = other DNA
tcttttcatgctagcatctg

SEQ ID NO: 12878 - DNA, 20 bp, synthetic construct
  misc_feature 1..20: note = Description of Artificial Sequence: Synthetic oligonucleotide
  misc_feature 1..20: note = Target: FXN; (-) strand; PAM type: NRG; PAM sequence: TAG
  source 1..20: mol_type = other DNA
ggagatctgtcttttcatgc

SEQ ID NO: 12879 - DNA, 20 bp, synthetic construct
  misc_feature 1..20: note = Description of Artificial Sequence: Synthetic oligonucleotide
  misc_feature 1..20: note = Target: FXN; (-) strand; PAM type: NRG; PAM sequence: GAG
  source 1..20: mol_type = other DNA
tttaagcaccttagcagcag

SEQ ID NO: 12880 - DNA, 20 bp, synthetic construct
  misc_feature 1..20: note = Description of Artificial Sequence: Synthetic oligonucleotide
  misc_feature 1..20: note = Target: FXN; (-) strand; PAM type: NRG; PAM sequence: AGG
  source 1..20: mol_type = other DNA
actttaagcaccttagcagc

SEQ ID NO: 12881 - DNA, 20 bp, synthetic construct
  misc_feature 1..20: note = Description of Artificial Sequence: Synthetic oligonucleotide
  misc_feature 1..20: note = Target: FXN; (-) strand; PAM type: NRG; PAM sequence: CAG
  source 1..20: mol_type = other DNA
tactttaagcaccttagcag

SEQ ID NO: 12882 - DNA, 20 bp, synthetic construct
  misc_feature 1..20: note = Description of Artificial Sequence: Synthetic oligonucleotide
  misc_feature 1..20: note = Target: FXN; (-) strand; PAM type: NRG; PAM sequence: CAG
  source 1..20: mol_type = other DNA
cactactttaagcaccttag

SEQ ID NO: 12883 - DNA, 20 bp, synthetic construct
  misc_feature 1..20: note = Description of Artificial Sequence: Synthetic oligonucleotide
  misc_feature 1..20: note = Target: FXN; (-) strand; PAM type: NRG; PAM sequence: TAG
  source 1..20: mol_type = other DNA
ctccactactttaagcacct

SEQ ID NO: 12884 - DNA, 20 bp, synthetic construct
  misc_feature 1..20: note = Description of Artificial Sequence: Synthetic oligonucleotide
  misc_feature 1..20: note = Target: FXN; (-) strand; PAM type: NRG; PAM sequence: AAG
  source 1..20: mol_type = other DNA
cccctgacctccactacttt

SEQ ID NO: 12885 - DNA, 20 bp, synthetic construct
  misc_feature 1..20: note = Description of Artificial Sequence: Synthetic oligonucleotide
  misc_feature 1..20: note = Target: FXN; (-) strand; PAM type: NRG; PAM sequence: GAG
  source 1..20: mol_type = other DNA
gcttcctgcctctgcattca

SEQ ID NO: 12886 - DNA, 20 bp, synthetic construct
  misc_feature 1..20: note = Description of Artificial Sequence: Synthetic oligonucleotide
  misc_feature 1..20: note = Target: FXN; (-) strand; PAM type: NRG; PAM sequence: CAG
  source 1..20: mol_type = other DNA
gtgcttcctgcctctgcatt

SEQ ID NO: 12887 - DNA, 20 bp, synthetic construct
  misc_feature 1..20: note = Description of Artificial Sequence: Synthetic oligonucleotide
  misc_feature 1..20: note = Target: FXN; (-) strand; PAM type: NRG; PAM sequence: TGG
  source 1..20: mol_type = other DNA
ctgtgggtcccattgcctcg

SEQ ID NO: 12888 - DNA, 20 bp, synthetic construct
  misc_feature 1..20: note = Description of Artificial Sequence: Synthetic oligonucleotide
  misc_feature 1..20: note = Target: FXN; (-) strand; PAM type: NRG; PAM sequence: GGG
  source 1..20: mol_type = other DNA
ctaccctgctacccctctgt

SEQ ID NO: 12889 - DNA, 20 bp, synthetic construct
  misc_feature 1..20: note = Description of Artificial Sequence: Synthetic oligonucleotide
  misc_feature 1..20: note = Target: FXN; (-) strand; PAM type: NRG; PAM sequence: TGG
  source 1..20: mol_type = other DNA
tctaccctgctacccctctg

SEQ ID NO: 12890 - DNA, 20 bp, synthetic construct
  misc_feature 1..20: note = Description of Artificial Sequence: Synthetic oligonucleotide
  misc_feature 1..20: note = Target: FXN; (-) strand; PAM type: NRG; PAM sequence: GAG
  source 1..20: mol_type = other DNA
aacttcctccctccccacat

SEQ ID NO: 12891 - DNA, 20 bp, synthetic construct
  misc_feature 1..20: note = Description of Artificial Sequence: Synthetic oligonucleotide
  misc_feature 1..20: note = Target: FXN; (-) strand; PAM type: NRG; PAM sequence: CAG
  source 1..20: mol_type = other DNA
accccctggcaccttctctg

SEQ ID NO: 12892 - DNA, 20 bp, synthetic construct
  misc_feature 1..20: note = Description of Artificial Sequence: Synthetic oligonucleotide
  misc_feature 1..20: note = Target: FXN; (-) strand; PAM type: NRG; PAM sequence: TGG
  source 1..20: mol_type = other DNA
ctcaagctattttcaccccc

SEQ ID NO: 12893 - DNA, 20 bp, synthetic construct
  misc_feature 1..20: note = Description of Artificial Sequence: Synthetic oligonucleotide
  misc_feature 1..20: note = Target: FXN; (-) strand; PAM type: NRG; PAM sequence: AAG
  source 1..20: mol_type = other DNA
cttctagctccacagctctc

SEQ ID NO: 12894 - DNA, 20 bp, synthetic construct
  misc_feature 1..20: note = Description of Artificial Sequence: Synthetic oligonucleotide
  misc_feature 1..20: note = Target: FXN; (-) strand; PAM type: NRG; PAM sequence: CAG
  source 1..20: mol_type = other DNA
tgagagcccttctagctcca

SEQ ID NO: 12895 - DNA, 20 bp, synthetic construct
  misc_feature 1..20: note = Description of Artificial Sequence: Synthetic oligonucleotide
  misc_feature 1..20: note = Target: FXN; (-) strand; PAM type: NRG; PAM sequence: TAG
  source 1..20: mol_type = other DNA
agcaaatgtgagagcccttc

SEQ ID NO: 12896 - DNA, 20 bp, synthetic construct
  misc_feature 1..20: note = Description of Artificial Sequence: Synthetic oligonucleotide
  misc_feature 1..20: note = Target: FXN; (-) strand; PAM type: NRG; PAM sequence: GAG
  source 1..20: mol_type = other DNA
atattaataagcaaatgtga

SEQ ID NO: 12897 - DNA, 20 bp, synthetic construct
  misc_feature 1..20: note = Description of Artificial Sequence: Synthetic oligonucleotide
  misc_feature 1..20: note = Target: FXN; (-) strand; PAM type: NRG; PAM sequence: GAG
  source 1..20: mol_type = other DNA
gcatattaataagcaaatgt

SEQ ID NO: 12898 - DNA, 20 bp, synthetic construct
  misc_feature 1..20: note = Description of Artificial Sequence: Synthetic oligonucleotide
  misc_feature 1..20: note = Target: FXN; (-) strand; PAM type: NRG; PAM sequence: AAG
  source 1..20: mol_type = other DNA
ttttcaaagggcatattaat

SEQ ID NO: 12899 - DNA, 20 bp, synthetic construct
  misc_feature 1..20: note = Description of Artificial Sequence: Synthetic oligonucleotide
  misc_feature 1..20: note = Target: FXN; (-) strand; PAM type: NRG; PAM sequence: GGG
  source 1..20: mol_type = other DNA
tcaggccactctttttcaaa

SEQ ID NO: 12900 - DNA, 20 bp, synthetic construct
  misc_feature 1..20: note = Description of Artificial Sequence: Synthetic oligonucleotide
  misc_feature 1..20: note = Target: FXN; (-) strand; PAM type: NRG; PAM sequence: AGG
  source 1..20: mol_type = other DNA
atcaggccactctttttcaa

SEQ ID NO: 12901 - DNA, 20 bp, synthetic construct
  misc_feature 1..20: note = Description of Artificial Sequence: Synthetic oligonucleotide
  misc_feature 1..20: note = Target: FXN; (-) strand; PAM type: NRG; PAM sequence: AAG
  source 1..20: mol_type = other DNA
tatcaggccactctttttca

SEQ ID NO: 12902 - DNA, 20 bp, synthetic construct
  misc_feature 1..20: note = Description of Artificial Sequence: Synthetic oligonucleotide
  misc_feature 1..20: note = Target: FXN; (-) strand; PAM type: NRG; PAM sequence: AGG
  source 1..20: mol_type = other DNA
tttgagtgactccaggtatc

SEQ ID NO: 12903 - DNA, 20 bp, synthetic construct
  misc_feature 1..20: note = Description of Artificial Sequence: Synthetic oligonucleotide
  misc_feature 1..20: note = Target: FXN; (-) strand; PAM type: NRG; PAM sequence: CAG
  source 1..20: mol_type = other DNA
ttttgagtgactccaggtat

SEQ ID NO: 12904 - DNA, 20 bp, synthetic construct
  misc_feature 1..20: note = Description of Artificial Sequence: Synthetic oligonucleotide
  misc_feature 1..20: note = Target: FXN; (-) strand; PAM type: NRG; PAM sequence: AGG
  source 1..20: mol_type = other DNA
gaaatcttttgagtgactcc

SEQ ID NO: 12905 - DNA, 20 bp, synthetic construct
  misc_feature 1..20: note = Description of Artificial Sequence: Synthetic oligonucleotide
  misc_feature 1..20: note = Target: FXN; (-) strand; PAM type: NRG; PAM sequence: CAG
  source 1..20: mol_type = other DNA
ggaaatcttttgagtgactc

SEQ ID NO: 12906 - DNA, 20 bp, synthetic construct
  misc_feature 1..20: note = Description of Artificial Sequence: Synthetic oligonucleotide
  misc_feature 1..20: note = Target: FXN; (-) strand; PAM type: NRG; PAM sequence: GAG
  source 1..20: mol_type = other DNA
atcggaattggaaatctttt

SEQ ID NO: 12907 - DNA, 20 bp, synthetic construct
  misc_feature 1..20: note = Description of Artificial Sequence: Synthetic oligonucleotide
  misc_feature 1..20: note = Target: FXN; (-) strand; PAM type: NRG; PAM sequence: TGG
  source 1..20: mol_type = other DNA
tgactttttcctatcggaat

SEQ ID NO: 12908 - DNA, 20 bp, synthetic construct
  misc_feature 1..20: note = Description of Artificial Sequence: Synthetic oligonucleotide
  misc_feature 1..20: note = Target: FXN; (-) strand; PAM type: NRG; PAM sequence: CGG
  source 1..20: mol_type = other DNA
caaaattgactttttcctat

SEQ ID NO: 12909 - DNA, 20 bp, synthetic construct
  misc_feature 1..20: note = Description of Artificial Sequence: Synthetic oligonucleotide
  misc_feature 1..20: note = Target: FXN; (-) strand; PAM type: NRG; PAM sequence: AAG
  source 1..20: mol_type = other DNA
gggtgcacatgcaaccactg

SEQ ID NO: 12910 - DNA, 20 bp, synthetic construct
  misc_feature 1..20: note = Description of Artificial Sequence: Synthetic oligonucleotide
  misc_feature 1..20: note = Target: FXN; (-) strand; PAM type: NRG; PAM sequence: GGG
  source 1..20: mol_type = other DNA
tcagcatacagcaaatcagg

SEQ ID NO: 12911 - DNA, 20 bp, synthetic construct
  misc_feature 1..20: note = Description of Artificial Sequence: Synthetic oligonucleotide
  misc_feature 1..20: note = Target: FXN; (-) strand; PAM type: NRG; PAM sequence: GGG
  source 1..20: mol_type = other DNA
ctcagcatacagcaaatcag

SEQ ID NO: 12912 - DNA, 20 bp, synthetic construct
  misc_feature 1..20: note = Description of Artificial Sequence: Synthetic oligonucleotide
  misc_feature 1..20: note = Target: FXN; (-) strand; PAM type: NRG; PAM sequence: GGG
  source 1..20: mol_type = other DNA
cctcagcatacagcaaatca

SEQ ID NO: 12913 - DNA, 20 bp, synthetic construct
  misc_feature 1..20: note = Description of Artificial Sequence: Synthetic oligonucleotide
  misc_feature 1..20: note = Target: FXN; (-) strand; PAM type: NRG; PAM sequence: AGG
  source 1..20: mol_type = other DNA
gcctcagcatacagcaaatc

SEQ ID NO: 12914 - DNA, 20 bp, synthetic construct
  misc_feature 1..20: note = Description of Artificial Sequence: Synthetic oligonucleotide
  misc_feature 1..20: note = Target: FXN; (-) strand; PAM type: NRG; PAM sequence: CAG
  source 1..20: mol_type = other DNA
tgcctcagcatacagcaaat

SEQ ID NO: 12915 - DNA, 20 bp, synthetic construct
  misc_feature 1..20: note = Description of Artificial Sequence: Synthetic oligonucleotide
  misc_feature 1..20: note = Target: FXN; (-) strand; PAM type: NRG; PAM sequence: CAG
  source 1..20: mol_type = other DNA
caccacaatgcctcagcata

SEQ ID NO: 12916 - DNA, 20 bp, synthetic construct
  misc_feature 1..20: note = Description of Artificial Sequence: Synthetic oligonucleotide
  misc_feature 1..20: note = Target: FXN; (-) strand; PAM type: NRG; PAM sequence: CAG
  source 1..20: mol_type = other DNA
cgtccatcaccacaatgcct

SEQ ID NO: 12917 - DNA, 20 bp, synthetic construct
  misc_feature 1..20: note = Description of Artificial Sequence: Synthetic oligonucleotide
  misc_feature 1..20: note = Target: FXN; (-) strand; PAM type: NRG; PAM sequence: AGG
  source 1..20: mol_type = other DNA
taggggcagatgcgtgctca

SEQ ID NO: 12918 - DNA, 20 bp, synthetic construct
  misc_feature 1..20: note = Description of Artificial Sequence: Synthetic oligonucleotide
  misc_feature 1..20: note = Target: FXN; (-) strand; PAM type: NRG; PAM sequence: AAG
  source 1..20: mol_type = other DNA
ctaggggcagatgcgtgctc

SEQ ID NO: 12919 - DNA, 20 bp, synthetic construct
  misc_feature 1..20: note = Description of Artificial Sequence: Synthetic oligonucleotide
  misc_feature 1..20: note = Target: FXN; (-) strand; PAM type: NRG; PAM sequence: CAG
  source 1..20: mol_type = other DNA
ctcagggcaagaactagggg

SEQ ID NO: 12920 - DNA, 20 bp, synthetic construct
  misc_feature 1..20: note = Description of Artificial Sequence: Synthetic oligonucleotide
  misc_feature 1..20: note = Target: FXN; (-) strand; PAM type: NRG; PAM sequence: GGG
  source 1..20: mol_type = other DNA
ggactcagggcaagaactag

SEQ ID NO: 12921 - DNA, 20 bp, synthetic construct
  misc_feature 1..20: note = Description of Artificial Sequence: Synthetic oligonucleotide
  misc_feature 1..20: note = Target: FXN; (-) strand; PAM type: NRG; PAM sequence: GGG
  source 1..20: mol_type = other DNA
aggactcagggcaagaacta

SEQ ID NO: 12922 - DNA, 20 bp, synthetic construct
  misc_feature 1..20: note = Description of Artificial Sequence: Synthetic oligonucleotide
  misc_feature 1..20: note = Target: FXN; (-) strand; PAM type: NRG; PAM sequence: AGG
  source 1..20: mol_type = other DNA
gaggactcagggcaagaact

SEQ ID NO: 12923 - DNA, 20 bp, synthetic construct
  misc_feature 1..20: note = Description of Artificial Sequence: Synthetic oligonucleotide
  misc_feature 1..20: note = Target: FXN; (-) strand; PAM type: NRG; PAM sequence: TAG
  source 1..20: mol_type = other DNA
cgaggactcagggcaagaac

SEQ ID NO: 12924 - DNA, 20 bp, synthetic construct
  misc_feature 1..20: note = Description of Artificial Sequence: Synthetic oligonucleotide
  misc_feature 1..20: note = Target: FXN; (-) strand; PAM type: NRG; PAM sequence: AAG
  source 1..20: mol_type = other DNA
ctccttcgaggactcagggc

SEQ ID NO: 12925 - DNA, 20 bp, synthetic construct
  misc_feature 1..20: note = Description of Artificial Sequence: Synthetic oligonucleotide
  misc_feature 1..20: note = Target: FXN; (-) strand; PAM type: NRG; PAM sequence: GGG
  source 1..20: mol_type = other DNA
ctgcctccttcgaggactca

SEQ ID NO: 12926 - DNA, 20 bp, synthetic construct
  misc_feature 1..20: note = Description of Artificial Sequence: Synthetic oligonucleotide
  misc_feature 1..20: note = Target: FXN; (-) strand; PAM type: NRG; PAM sequence: AGG
  source 1..20: mol_type = other DNA
cctgcctccttcgaggactc

SEQ ID NO: 12927 - DNA, 20 bp, synthetic construct
  misc_feature 1..20: note = Description of Artificial Sequence: Synthetic oligonucleotide
  misc_feature 1..20: note = Target: FXN; (-) strand; PAM type: NRG; PAM sequence: CAG
  source 1..20: mol_type = other DNA
tcctgcctccttcgaggact

SEQ ID NO: 12928 - DNA, 20 bp, synthetic construct
  misc_feature 1..20: note = Description of Artificial Sequence: Synthetic oligonucleotide
  misc_feature 1..20: note = Target: FXN; (-) strand; PAM type: NRG; PAM sequence: AGG
  source 1..20: mol_type = other DNA
tgtctctcctgcctccttcg

SEQ ID NO: 12929 - DNA, 20 bp, synthetic construct
  misc_feature 1..20: note = Description of Artificial Sequence: Synthetic oligonucleotide
  misc_feature 1..20: note = Target: FXN; (-) strand; PAM type: NRG; PAM sequence: GAG
  source 1..20: mol_type = other DNA
atgtctctcctgcctccttc

SEQ ID NO: 12930 - DNA, 20 bp, synthetic construct
  misc_feature 1..20: note = Description of Artificial Sequence: Synthetic oligonucleotide
  misc_feature 1..20: note = Target: FXN; (-) strand; PAM type: NRG; PAM sequence: CGG
  source 1..20: mol_type = other DNA
ctggtctcatcactgatgag

SEQ ID NO: 12931 - DNA, 20 bp, synthetic construct
  misc_feature 1..20: note = Description of Artificial Sequence: Synthetic oligonucleotide
  misc_feature 1..20: note = Target: FXN; (-) strand; PAM type: NRG; PAM sequence: GAG
  source 1..20: mol_type = other DNA
ggtctggtctcatcactgat

SEQ ID NO: 12932 - DNA, 20 bp, synthetic construct
  misc_feature 1..20: note = Description of Artificial Sequence: Synthetic oligonucleotide
  misc_feature 1..20: note = Target: FXN; (-) strand; PAM type: NRG; PAM sequence: TGG
  source 1..20: mol_type = other DNA
taagacgcgagttccaggtc

SEQ ID NO: 12933 - DNA, 20 bp, synthetic construct
  misc_feature 1..20: note = Description of Artificial Sequence: Synthetic oligonucleotide
  misc_feature 1..20: note = Target: FXN; (-) strand; PAM type: NRG; PAM sequence: AGG
  source 1..20: mol_type = other DNA
gagtataagacgcgagttcc

SEQ ID NO: 12934 - DNA, 20 bp, synthetic construct
  misc_feature 1..20: note = Description of Artificial Sequence: Synthetic oligonucleotide
  misc_feature 1..20: note = Target: FXN; (-) strand; PAM type: NRG; PAM sequence: CAG
  source 1..20: mol_type = other DNA
tgagtataagacgcgagttc

SEQ ID NO: 12935 - DNA, 20 bp, synthetic construct
  misc_feature 1..20: note = Description of Artificial Sequence: Synthetic oligonucleotide
  misc_feature 1..20: note = Target: FXN; (-) strand; PAM type: NRG; PAM sequence: GAG
  source 1..20: mol_type = other DNA
gaggactgagtataagacgc

SEQ ID NO: 12936 - DNA, 20 bp, synthetic construct
  misc_feature 1..20: note = Description of Artificial Sequence: Synthetic oligonucleotide
  misc_feature 1..20: note = Target: FXN; (-) strand; PAM type: NRG; PAM sequence: AAG
  source 1..20: mol_type = other DNA
aagggcagaggactgagtat

SEQ ID NO: 12937 - DNA, 20 bp, synthetic construct
  misc_feature 1..20: note = Description of Artificial Sequence: Synthetic oligonucleotide
  misc_feature 1..20: note = Target: FXN; (-) strand; PAM type: NRG; PAM sequence: GAG
  source 1..20: mol_type = other DNA
agcagaaagggcagaggact

SEQ ID NO: 12938 - DNA, 20 bp, synthetic construct
  misc_feature 1..20: note = Description of Artificial Sequence: Synthetic oligonucleotide
  misc_feature 1..20: note = Target: FXN; (-) strand; PAM type: NRG; PAM sequence: AGG
  source 1..20: mol_type = other DNA
caatccagcagaaagggcag

SEQ ID NO: 12939 - DNA, 20 bp, synthetic construct
  misc_feature 1..20: note = Description of Artificial Sequence: Synthetic oligonucleotide
  misc_feature 1..20: note = Target: FXN; (-) strand; PAM type: NRG; PAM sequence: GAG
  source 1..20: mol_type = other DNA
acaatccagcagaaagggca

SEQ ID NO: 12940 - DNA, 20 bp, synthetic construct
  misc_feature 1..20: note = Description of Artificial Sequence: Synthetic oligonucleotide
  misc_feature 1..20: note = Target: FXN; (-) strand; PAM type: NRG; PAM sequence: CAG
  source 1..20: mol_type = other DNA
ccacaatccagcagaaaggg

SEQ ID NO: 12941 - DNA, 20 bp, synthetic construct
  misc_feature 1..20: note = Description of Artificial Sequence: Synthetic oligonucleotide
  misc_feature 1..20: note = Target: FXN; (-) strand; PAM type: NRG; PAM sequence: GGG
  source 1..20: mol_type = other DNA
gggccacaatccagcagaaa

SEQ ID NO: 12942 - DNA, 20 bp, synthetic construct
  misc_feature 1..20: note = Description of Artificial Sequence: Synthetic oligonucleotide
  misc_feature 1..20: note = Target: FXN; (-) strand; PAM type: NRG; PAM sequence: AGG
  source 1..20: mol_type = other DNA
ggggccacaatccagcagaa

SEQ ID NO: 12943 - DNA, 20 bp, synthetic construct
  misc_feature 1..20: note = Description of Artificial Sequence: Synthetic oligonucleotide
  misc_feature 1..20: note = Target: FXN; (-) strand; PAM type: NRG; PAM sequence: AAG
  source 1..20: mol_type = other DNA
gggggccacaatccagcaga

SEQ ID NO: 12944 - DNA, 20 bp, synthetic construct
  misc_feature 1..20: note = Description of Artificial Sequence: Synthetic oligonucleotide
  misc_feature 1..20: note = Target: FXN; (-) strand; PAM type: NRG; PAM sequence: CAG
  source 1..20: mol_type = other DNA
actggggggccacaatccag

SEQ ID NO: 12945 - DNA, 20 bp, synthetic construct
  misc_feature 1..20: note = Description of Artificial Sequence: Synthetic oligonucleotide
  misc_feature 1..20: note = Target: FXN; (-) strand; PAM type: NRG; PAM sequence: CAG
  source 1..20: mol_type = other DNA
tatactggggggccacaatc

SEQ ID NO: 12946 - DNA, 20 bp, synthetic construct
  misc_feature 1..20: note = Description of Artificial Sequence: Synthetic oligonucleotide
  misc_feature 1..20: note = Target: FXN; (-) strand; PAM type: NRG; PAM sequence: GGG
  source 1..20: mol_type = other DNA
gtgttgcaccctatactggg

SEQ ID NO: 12947 - DNA, 20 bp, synthetic construct
  misc_feature 1..20: note = Description of Artificial Sequence: Synthetic oligonucleotide
  misc_feature 1..20: note = Target: FXN; (-) strand; PAM type: NRG; PAM sequence: GGG
  source 1..20: mol_type = other DNA
tgtgttgcaccctatactgg

SEQ ID NO: 12948 - DNA, 20 bp, synthetic construct
  misc_feature 1..20: note = Description of Artificial Sequence: Synthetic oligonucleotide
  misc_feature 1..20: note = Target: FXN; (-) strand; PAM type: NRG; PAM sequence: GGG
  source 1..20: mol_type = other DNA
gtgtgttgcaccctatactg

SEQ ID NO: 12949 - DNA, 20 bp, synthetic construct
  misc_feature 1..20: note = Description of Artificial Sequence: Synthetic oligonucleotide
  misc_feature 1..20: note = Target: FXN; (-) strand; PAM type: NRG; PAM sequence: GGG
  source 1..20: mol_type = other DNA
tgtgtgttgcaccctatact

SEQ ID NO: 12950 - DNA, 20 bp, synthetic construct
  misc_feature 1..20: note = Description of Artificial Sequence: Synthetic oligonucleotide
  misc_feature 1..20: note = Target: FXN; (-) strand; PAM type: NRG; PAM sequence: TGG
  source 1..20: mol_type = other DNA
ttgtgtgttgcaccctatac

SEQ ID NO: 12951 - DNA, 20 bp, synthetic construct
  misc_feature 1..20: note = Description of Artificial Sequence: Synthetic oligonucleotide
  misc_feature 1..20: note = Target: FXN; (-) strand; PAM type: NRG; PAM sequence: CAG
  source 1..20: mol_type = other DNA
tttgtggcccttaaatgctc

SEQ ID NO: 12952 - DNA, 20 bp, synthetic construct
  misc_feature 1..20: note = Description of Artificial Sequence: Synthetic oligonucleotide
  misc_feature 1..20: note = Target: FXN; (-) strand; PAM type: NRG; PAM sequence: TGG
  source 1..20: mol_type = other DNA
ttggtaatttgttctctttg

SEQ ID NO: 12953 - DNA, 20 bp, synthetic construct
  misc_feature 1..20: note = Description of Artificial Sequence: Synthetic oligonucleotide
  misc_feature 1..20: note = Target: FXN; (-) strand; PAM type: NRG; PAM sequence: TGG
  source 1..20: mol_type = other DNA
aagaatcaacacacaatcat

SEQ ID NO: 12954 - DNA, 20 bp, synthetic construct
  misc_feature 1..20: note = Description of Artificial Sequence: Synthetic oligonucleotide
  misc_feature 1..20: note = Target: FXN; (-) strand; PAM type: NRG; PAM sequence: AAG
  source 1..20: mol_type = other DNA
taataaaaaaaaagagctca

SEQ ID NO: 12955 - DNA, 20 bp, synthetic construct
  misc_feature 1..20: note = Description of Artificial Sequence: Synthetic oligonucleotide
  misc_feature 1..20: note = Target: FXN; (-) strand; PAM type: NRG; PAM sequence: GAG
  source 1..20: mol_type = other DNA
agtataataataaaaaaaaa

SEQ ID NO: 12956 - DNA, 20 bp, synthetic construct
  misc_feature 1..20: note = Description of Artificial Sequence: Synthetic oligonucleotide
  misc_feature 1..20: note = Target: FXN; (-) strand; PAM type: NRG; PAM sequence: AAG
  source 1..20: mol_type = other DNA
aaagtataataataaaaaaa

SEQ ID NO: 12957 - DNA, 20 bp, synthetic construct
  misc_feature 1..20: note = Description of Artificial Sequence: Synthetic oligonucleotide
  misc_feature 1..20: note = Target: FXN; (-) strand; PAM type: NRG; PAM sequence: AAG
  source 1..20: mol_type = other DNA
cacatgtaccctaacactta

SEQ ID NO: 12958 - DNA, 20 bp, synthetic construct
  misc_feature 1..20: note = Description of Artificial Sequence: Synthetic oligonucleotide
  misc_feature 1..20: note = Target: FXN; (-) strand; PAM type: NRG; PAM sequence: TGG
  source 1..20: mol_type = other DNA
atgggtgcagcacaccagca

SEQ ID NO: 12959 - DNA, 20 bp, synthetic construct
  misc_feature 1..20: note = Description of Artificial Sequence: Synthetic oligonucleotide
  misc_feature 1..20: note = Target: FXN; (-) strand; PAM type: NRG; PAM sequence: CAG
  source 1..20: mol_type = other DNA
agttaatgggtgcagcacac

SEQ ID NO: 12960 - DNA, 20 bp, synthetic construct
  misc_feature 1..20: note = Description of Artificial Sequence: Synthetic oligonucleotide
  misc_feature 1..20: note = Target: FXN; (-) strand; PAM type: NRG; PAM sequence: CAG
  source 1..20: mol_type = other DNA
aaatgacgagttaatgggtg

SEQ ID NO: 12961 - DNA, 20 bp, synthetic construct
  misc_feature 1..20: note = Description of Artificial Sequence: Synthetic oligonucleotide
  misc_feature 1..20: note = Target: FXN; (-) strand; PAM type: NRG; PAM sequence: GGG
  source 1..20: mol_type = other DNA
atgctaaatgacgagttaat

SEQ ID NO: 12962 - DNA, 20 bp, synthetic construct
  misc_feature 1..20: note = Description of Artificial Sequence: Synthetic oligonucleotide
  misc_feature 1..20: note = Target: FXN; (-) strand; PAM type: NRG; PAM sequence: TGG
  source 1..20: mol_type = other DNA
aatgctaaatgacgagttaa

SEQ ID NO: 12963 - DNA, 20 bp, synthetic construct
  misc_feature 1..20: note = Description of Artificial Sequence: Synthetic oligonucleotide
  misc_feature 1..20: note = Target: FXN; (-) strand; PAM type: NRG; PAM sequence: GAG
  source 1..20: mol_type = other DNA
tatacctaatgctaaatgac

SEQ ID NO: 12964 - DNA, 20 bp, synthetic construct
  misc_feature 1..20: note = Description of Artificial Sequence: Synthetic oligonucleotide
  misc_feature 1..20: note = Target: FXN; (-) strand; PAM type: NRG; PAM sequence: GAG
  source 1..20: mol_type = other DNA
ggggggagggatagctttag

SEQ ID NO: 12965 - DNA, 20 bp, synthetic construct
  misc_feature 1..20: note = Description of Artificial Sequence: Synthetic oligonucleotide
  misc_feature 1..20: note = Target: FXN; (-) strand; PAM type: NRG; PAM sequence: AGG
  source 1..20: mol_type = other DNA
aaggggggagggatagcttt

SEQ ID NO: 12966 - DNA, 20 bp, synthetic construct
  misc_feature 1..20: note = Description of Artificial Sequence: Synthetic oligonucleotide
  misc_feature 1..20: note = Target: FXN; (-) strand; PAM type: NRG; PAM sequence: TAG
  source 1..20: mol_type = other DNA
gaaggggggagggatagctt

SEQ ID NO: 12967 - DNA, 20 bp, synthetic construct
  misc_feature 1..20: note = Description of Artificial Sequence: Synthetic oligonucleotide
  misc_feature 1..20: note = Target: FXN; (-) strand; PAM type: NRG; PAM sequence: TAG
  source 1..20: mol_type = other DNA
gagggggaaggggggaggga

SEQ ID NO: 12968 - DNA, 20 bp, synthetic construct
  misc_feature 1..20: note = Description of Artificial Sequence: Synthetic oligonucleotide
  misc_feature 1..20: note = Target: FXN; (-) strand; PAM type: NRG; PAM sequence: GGG
  source 1..20: mol_type = other DNA
gagggagggggaagggggga

SEQ ID NO: 12969 - DNA, 20 bp, synthetic construct
  misc_feature 1..20: note = Description of Artificial Sequence: Synthetic oligonucleotide
  misc_feature 1..20: note = Target: FXN; (-) strand; PAM type: NRG; PAM sequence: AGG
  source 1..20: mol_type = other DNA
ggagggagggggaagggggg

SEQ ID NO: 12970 - DNA, 20 bp, synthetic construct
  misc_feature 1..20: note = Description of Artificial Sequence: Synthetic oligonucleotide
  misc_feature 1..20: note = Target: FXN; (-) strand; PAM type: NRG; PAM sequence: GAG
  source 1..20: mol_type = other DNA
tggagggagggggaaggggg

SEQ ID NO: 12971 - DNA, 20 bp, synthetic construct
  misc_feature 1..20: note = Description of Artificial Sequence: Synthetic oligonucleotide
  misc_feature 1..20: note = Target: FXN; (-) strand; PAM type: NRG; PAM sequence: GGG
  source 1..20: mol_type = other DNA
ggtggagggagggggaaggg

SEQ ID NO: 12972 - DNA, 20 bp, synthetic construct
  misc_feature 1..20: note = Description of Artificial Sequence: Synthetic oligonucleotide
  misc_feature 1..20: note = Target: FXN; (-) strand; PAM type: NRG; PAM sequence: GGG
  source 1..20: mol_type = other DNA
gggtggagggagggggaagg

SEQ ID NO: 12973 - DNA, 20 bp, synthetic construct
  misc_feature 1..20: note = Description of Artificial Sequence: Synthetic oligonucleotide
  misc_feature 1..20: note = Target: FXN; (-) strand; PAM type: NRG; PAM sequence: GGG
  source 1..20: mol_type = other DNA
ggggtggagggagggggaag

SEQ ID NO: 12974 - DNA, 20 bp, synthetic construct
  misc_feature 1..20: note = Description of Artificial Sequence: Synthetic oligonucleotide
  misc_feature 1..20: note = Target: FXN; (-) strand; PAM type: NRG; PAM sequence: GGG
  source 1..20: mol_type = other DNA
tggggtggagggagggggaa

SEQ ID NO: 12975 - DNA, 20 bp, synthetic construct
  misc_feature 1..20: note = Description of Artificial Sequence: Synthetic oligonucleotide
  misc_feature 1..20: note = Target: FXN; (-) strand; PAM type: NRG; PAM sequence: AGG
  source 1..20: mol_type = other DNA
gtggggtggagggaggggga

SEQ ID NO: 12976 - DNA, 20 bp, synthetic construct
  misc_feature 1..20: note = Description of Artificial Sequence: Synthetic oligonucleotide
  misc_feature 1..20: note = Target: FXN; (-) strand; PAM type: NRG; PAM sequence: AAG
  source 1..20: mol_type = other DNA
tgtggggtggagggaggggg

SEQ ID NO: 12977 - DNA, 20 bp, synthetic construct
  misc_feature 1..20: note = Description of Artificial Sequence: Synthetic oligonucleotide
  misc_feature 1..20: note = Target: FXN; (-) strand; PAM type: NRG; PAM sequence: GGG
  source 1..20: mol_type = other DNA
tgttgtggggtggagggagg

SEQ ID NO: 12978 - DNA, 20 bp, synthetic construct
  misc_feature 1..20: note = Description of Artificial Sequence: Synthetic oligonucleotide
  misc_feature 1..20: note = Target: FXN; (-) strand; PAM type: NRG; PAM sequence: GGG
  source 1..20: mol_type = other DNA
ctgttgtggggtggagggag

SEQ ID NO: 12979 - DNA, 20 bp, synthetic construct
  misc_feature 1..20: note = Description of Artificial Sequence: Synthetic oligonucleotide
  misc_feature 1..20: note = Target: FXN; (-) strand; PAM type: NRG; PAM sequence: GGG
  source 1..20: mol_type = other DNA
actgttgtggggtggaggga

SEQ ID NO: 12980 - DNA, 20 bp, synthetic construct
  misc_feature 1..20: note = Description of Artificial Sequence: Synthetic oligonucleotide
  misc_feature 1..20: note = Target: FXN; (-) strand; PAM type: NRG; PAM sequence: AGG
  source 1..20: mol_type = other DNA
gactgttgtggggtggaggg

SEQ ID NO: 12981 - DNA, 20 bp, synthetic construct
  misc_feature 1..20: note = Description of Artificial Sequence: Synthetic oligonucleotide
  misc_feature 1..20: note = Target: FXN; (-) strand; PAM type: NRG; PAM sequence: GAG
  source 1..20: mol_type = other DNA
ggactgttgtggggtggagg

SEQ ID NO: 12982 - DNA, 20 bp, synthetic construct
  misc_feature 1..20: note = Description of Artificial Sequence: Synthetic oligonucleotide
  misc_feature 1..20: note = Target: FXN; (-) strand; PAM type: NRG; PAM sequence: GGG
  source 1..20: mol_type = other DNA
ggggactgttgtggggtgga

SEQ ID NO: 12983 - DNA, 20 bp, synthetic construct
  misc_feature 1..20: note = Description of Artificial Sequence: Synthetic oligonucleotide
  misc_feature 1..20: note = Target: FXN; (-) strand; PAM type: NRG; PAM sequence: AGG
  source 1..20: mol_type = other DNA
tggggactgttgtggggtgg

SEQ ID NO: 12984 - DNA, 20 bp, synthetic construct
  misc_feature 1..20: note = Description of Artificial Sequence: Synthetic oligonucleotide
  misc_feature 1..20: note = Target: FXN; (-) strand; PAM type: NRG; PAM sequence: GAG
  source 1..20: mol_type = other DNA
ctggggactgttgtggggtg

SEQ ID NO: 12985 - DNA, 20 bp, synthetic construct
  misc_feature 1..20: note = Description of Artificial Sequence: Synthetic oligonucleotide
  misc_feature 1..20: note = Target: FXN; (-) strand; PAM type: NRG; PAM sequence: TGG
  source 1..20: mol_type = other DNA
ctctggggactgttgtgggg

SEQ ID NO: 12986 - DNA, 20 bp, synthetic construct
  misc_feature 1..20: note = Description of Artificial Sequence: Synthetic oligonucleotide
  misc_feature 1..20: note = Target: FXN; (-) strand; PAM type: NRG; PAM sequence: GGG
  source 1..20: mol_type = other DNA
acactctggggactgttgtg

SEQ ID NO: 12987 - DNA, 20 bp, synthetic construct
  misc_feature 1..20: note = Description of Artificial Sequence: Synthetic oligonucleotide
  misc_feature 1..20: note = Target: FXN; (-) strand; PAM type: NRG; PAM sequence: GGG
  source 1..20: mol_type = other DNA
cacactctggggactgttgt

SEQ ID NO: 12988 - DNA, 20 bp, synthetic construct
  misc_feature 1..20: note = Description of Artificial Sequence: Synthetic oligonucleotide
  misc_feature 1..20: note = Target: FXN; (-) strand; PAM type: NRG; PAM sequence: TGG
  source 1..20: mol_type = other DNA
tcacactctggggactgttg

SEQ ID NO: 12989 - DNA, 20 bp, synthetic construct
  misc_feature 1..20: note = Description of Artificial Sequence: Synthetic oligonucleotide
  misc_feature 1..20: note = Target: FXN; (-) strand; PAM type: NRG; PAM sequence: GGG
  source 1..20: mol_type = other DNA
aaggggaacatcacactctg

SEQ ID NO: 12990 - DNA, 20 bp, synthetic construct
  misc_feature 1..20: note = Description of Artificial Sequence: Synthetic oligonucleotide
  misc_feature 1..20: note = Target: FXN; (-) strand; PAM type: NRG; PAM sequence: GGG
  source 1..20: mol_type = other DNA
gaaggggaacatcacactct

SEQ ID NO: 12991 - DNA, 20 bp, synthetic construct
  misc_feature 1..20: note = Description of Artificial Sequence: Synthetic oligonucleotide
  misc_feature 1..20: note = Target: FXN; (-) strand; PAM type: NRG; PAM sequence: TGG
  source 1..20: mol_type = other DNA
ggaaggggaacatcacactc

SEQ ID NO: 12992 - DNA, 20 bp, synthetic construct
  misc_feature 1..20: note = Description of Artificial Sequence: Synthetic oligonucleotide
  misc_feature 1..20: note = Target: FXN; (-) strand; PAM type: NRG; PAM sequence: GGG
  source 1..20: mol_type = other DNA
gaacacatggtcacaggaag

SEQ ID NO: 12993 - DNA, 20 bp, synthetic construct
  misc_feature 1..20: note = Description of Artificial Sequence: Synthetic oligonucleotide
  misc_feature 1..20: note = Target: FXN; (-) strand; PAM type: NRG; PAM sequence: GGG
  source 1..20: mol_type = other DNA
agaacacatggtcacaggaa

SEQ ID NO: 12994 - DNA, 20 bp, synthetic construct
  misc_feature 1..20: note = Description of Artificial Sequence: Synthetic oligonucleotide
  misc_feature 1..20: note = Target: FXN; (-) strand; PAM type: NRG; PAM sequence: AGG
  source 1..20: mol_type = other DNA
gagaacacatggtcacagga

SEQ ID NO: 12995 - DNA, 20 bp, synthetic construct
  misc_feature 1..20: note = Description of Artificial Sequence: Synthetic oligonucleotide
  misc_feature 1..20: note = Target: FXN; (-) strand; PAM type: NRG; PAM sequence: AAG
  source 1..20: mol_type = other DNA
tgagaacacatggtcacagg

SEQ ID NO: 12996 - DNA, 20 bp, synthetic construct
  misc_feature 1..20: note = Description of Artificial Sequence: Synthetic oligonucleotide
  misc_feature 1..20: note = Target: FXN; (-) strand; PAM type: NRG; PAM sequence: AGG
  source 1..20: mol_type = other DNA
caatgagaacacatggtcac

SEQ ID NO: 12997 - DNA, 20 bp, synthetic construct
  misc_feature 1..20: note = Description of Artificial Sequence: Synthetic oligonucleotide
  misc_feature 1..20: note = Target: FXN; (-) strand; PAM type: NRG; PAM sequence: CAG
  source 1..20: mol_type = other DNA
acaatgagaacacatggtca

SEQ ID NO: 12998 - DNA, 20 bp, synthetic construct
  misc_feature 1..20: note = Description of Artificial Sequence: Synthetic oligonucleotide
  misc_feature 1..20: note = Target: FXN; (-) strand; PAM type: NRG; PAM sequence: TGG
  source 1..20: mol_type = other DNA
aactgaacaatgagaacaca

SEQ ID NO: 12999 - DNA, 20 bp, synthetic construct
  misc_feature 1..20: note = Description of Artificial Sequence: Synthetic oligonucleotide
  misc_feature 1..20: note = Target: FXN; (-) strand; PAM type: NRG; PAM sequence: GAG
  source 1..20: mol_type = other DNA
ataggtgggaactgaacaat

SEQ ID NO: 13000 - DNA, 20 bp, synthetic construct
  misc_feature 1..20: note = Description of Artificial Sequence: Synthetic oligonucleotide
  misc_feature 1..20: note = Target: FXN; (-) strand; PAM type: NRG; PAM sequence: GGG
  source 1..20: mol_type = other DNA
gcatattctcactcataggt

SEQ ID NO: 13001 - DNA, 20 bp, synthetic construct
  misc_feature 1..20: note = Description of Artificial Sequence: Synthetic oligonucleotide
  misc_feature 1..20: note = Target: FXN; (-) strand; PAM type: NRG; PAM sequence: TGG
  source 1..20: mol_type = other DNA
tgcatattctcactcatagg

SEQ ID NO: 13002 - DNA, 20 bp, synthetic construct
  misc_feature 1..20: note = Description of Artificial Sequence: Synthetic oligonucleotide
  misc_feature 1..20: note = Target: FXN; (-) strand; PAM type: NRG; PAM sequence: AGG
  source 1..20: mol_type = other DNA
cactgcatattctcactcat

SEQ ID NO: 13003 - DNA, 20 bp, synthetic construct
  misc_feature 1..20: note = Description of Artificial Sequence: Synthetic oligonucleotide
  misc_feature 1..20: note = Target: FXN; (-) strand; PAM type: NRG; PAM sequence: TAG
  source 1..20: mol_type = other DNA
acactgcatattctcactca

SEQ ID NO: 13004 - DNA, 20 bp, synthetic construct
  misc_feature 1..20: note = Description of Artificial Sequence: Synthetic oligonucleotide
  misc_feature 1..20: note = Target: FXN; (-) strand; PAM type: NRG; PAM sequence: AAG
  source 1..20: mol_type = other DNA
cattctcagtaaactatcgc

SEQ ID NO: 13005 - DNA, 20 bp, synthetic construct
  misc_feature 1..20: note = Description of Artificial Sequence: Synthetic oligonucleotide
  misc_feature 1..20: note = Target: FXN; (-) strand; PAM type: NRG; PAM sequence: CAG
  source 1..20: mol_type = other DNA
aaactggaaatcatcattct

SEQ ID NO: 13006 - DNA, 20 bp, synthetic construct
  misc_feature 1..20: note = Description of Artificial Sequence: Synthetic oligonucleotide
  misc_feature 1..20: note = Target: FXN; (-) strand; PAM type: NRG; PAM sequence: TGG
  source 1..20: mol_type = other DNA
tgtagggacatggatgaaac

SEQ ID NO: 13007 - DNA, 20 bp, synthetic construct
  misc_feature 1..20: note = Description of Artificial Sequence: Synthetic oligonucleotide
  misc_feature 1..20: note = Target: FXN; (-) strand; PAM type: NRG; PAM sequence: TGG
  source 1..20: mol_type = other DNA
tcatgtcctttgtagggaca

SEQ ID NO: 13008 - DNA, 20 bp, synthetic construct
  misc_feature 1..20: note = Description of Artificial Sequence: Synthetic oligonucleotide
  misc_feature 1..20: note = Target: FXN; (-) strand; PAM type: NRG; PAM sequence: GGG
  source 1..20: mol_type = other DNA
atgagttcatgtcctttgta

SEQ ID NO: 13009 - DNA, 20 bp, synthetic construct
  misc_feature 1..20: note = Description of Artificial Sequence: Synthetic oligonucleotide
  misc_feature 1..20: note = Target: FXN; (-) strand; PAM type: NRG; PAM sequence: AGG
  source 1..20: mol_type = other DNA
gatgagttcatgtcctttgt

SEQ ID NO: 13010 - DNA, 20 bp, synthetic construct
  misc_feature 1..20: note = Description of Artificial Sequence: Synthetic oligonucleotide
  misc_feature 1..20: note = Target: FXN; (-) strand; PAM type: NRG; PAM sequence: TAG
  source 1..20: mol_type = other DNA
tgatgagttcatgtcctttg

SEQ ID NO: 13011 - DNA, 20 bp, synthetic construct
  misc_feature 1..20: note = Description of Artificial Sequence: Synthetic oligonucleotide
  misc_feature 1..20: note = Target: FXN; (-) strand; PAM type: NRG; PAM sequence: GAG
  source 1..20: mol_type = other DNA
atgcagcaataaaaaatgat

SEQ ID NO: 13012 - DNA, 20 bp, synthetic construct
  misc_feature 1..20: note = Description of Artificial Sequence: Synthetic oligonucleotide
  misc_feature 1..20: note = Target: FXN; (-) strand; PAM type: NRG; PAM sequence: CAG
  source 1..20: mol_type = other DNA
atacaccatggaatactatg

SEQ ID NO: 13013 - DNA, 20 bp, synthetic construct
  misc_feature 1..20: note = Description of Artificial Sequence: Synthetic oligonucleotide
  misc_feature 1..20: note = Target: FXN; (-) strand; PAM type: NRG; PAM sequence: TGG
  source 1..20: mol_type = other DNA
aatgtggcacatatacacca

SEQ ID NO: 13014 - DNA, 20 bp, synthetic construct
  misc_feature 1..20: note = Description of Artificial Sequence: Synthetic oligonucleotide
  misc_feature 1..20: note = Target: FXN; (-) strand; PAM type: NRG; PAM sequence: TGG
  source 1..20: mol_type = other DNA
tagactggattaagaaaatg

SEQ ID NO: 13015 - DNA, 20 bp, synthetic construct
  misc_feature 1..20: note = Description of Artificial Sequence: Synthetic oligonucleotide
  misc_feature 1..20: note = Target: FXN; (-) strand; PAM type: NRG; PAM sequence: AAG
  source 1..20: mol_type = other DNA
caacaatgatagactggatt

SEQ ID NO: 13016 - DNA, 20 bp, synthetic construct
  misc_feature 1..20: note = Description of Artificial Sequence: Synthetic oligonucleotide
  misc_feature 1..20: note = Target: FXN; (-) strand; PAM type: NRG; PAM sequence: TGG
  source 1..20: mol_type = other DNA
ctcatccaacaatgatagac

SEQ ID NO: 13017 - DNA, 20 bp, synthetic construct
  misc_feature 1..20: note = Description of Artificial Sequence: Synthetic oligonucleotide
  misc_feature 1..20: note = Target: FXN; (-) strand; PAM type: NRG; PAM sequence: TAG
  source 1..20: mol_type = other DNA
aagagctcatccaacaatga

SEQ ID NO: 13018 - DNA, 20 bp, synthetic construct
  misc_feature 1..20: note = Description of Artificial Sequence: Synthetic oligonucleotide
  misc_feature 1..20: note = Target: FXN; (-) strand; PAM type: NRG; PAM sequence: GAG
  source 1..20: mol_type = other DNA
ttatttttccatgagataaa

SEQ ID NO: 13019 - DNA, 20 bp, synthetic construct
  misc_feature 1..20: note = Description of Artificial Sequence: Synthetic oligonucleotide
  misc_feature 1..20: note = Target: FXN; (-) strand; PAM type: NRG; PAM sequence: AAG
  source 1..20: mol_type = other DNA
aattatttttccatgagata

SEQ ID NO: 13020 - DNA, 20 bp, synthetic construct
  misc_feature 1..20: note = Description of Artificial Sequence: Synthetic oligonucleotide
  misc_feature 1..20: note = Target: FXN; (-) strand; PAM type: NRG; PAM sequence: GAG
  source 1..20: mol_type = other DNA
tttataaattatttttccat

SEQ ID NO: 13021 - DNA, 20 bp, synthetic construct
  misc_feature 1..20: note = Description of Artificial Sequence: Synthetic oligonucleotide
  misc_feature 1..20: note = Target: FXN; (-) strand; PAM type: NRG; PAM sequence: GAG
  source 1..20: mol_type = other DNA
tttcccactcctctcataca

SEQ ID NO: 13022 - DNA, 20 bp, synthetic construct
  misc_feature 1..20: note = Description of Artificial Sequence: Synthetic oligonucleotide
  misc_feature 1..20: note = Target: FXN; (-) strand; PAM type: NRG; PAM sequence: CAG
  source 1..20: mol_type = other DNA
tatttcccactcctctcata

SEQ ID NO: 13023 - DNA, 20 bp, synthetic construct
  misc_feature 1..20: note = Description of Artificial Sequence: Synthetic oligonucleotide
  misc_feature 1..20: note = Target: FXN; (-) strand; PAM type: NRG; PAM sequence: AAG
  source 1..20: mol_type = other DNA
gctatttccattgtcccaaa

SEQ ID NO: 13024 - DNA, 20 bp, synthetic construct
  misc_feature 1..20: note = Description of Artificial Sequence: Synthetic oligonucleotide
  misc_feature 1..20: note = Target: FXN; (-) strand; PAM type: NRG; PAM sequence: CAG
  source 1..20: mol_type = other DNA
acatcaccactatctaattc

SEQ ID NO: 13025 - DNA, 20 bp, synthetic construct
  misc_feature 1..20: note = Description of Artificial Sequence: Synthetic oligonucleotide
  misc_feature 1..20: note = Target: FXN; (-) strand; PAM type: NRG; PAM sequence: AAG
  source 1..20: mol_type = other DNA
ggagtttttagtatttcaca

SEQ ID NO: 13026 - DNA, 20 bp, synthetic construct
  misc_feature 1..20: note = Description of Artificial Sequence: Synthetic oligonucleotide
  misc_feature 1..20: note = Target: FXN; (-) strand; PAM type: NRG; PAM sequence: TAG
  source 1..20: mol_type = other DNA
ctgtataattcaggagtttt

SEQ ID NO: 13027 - DNA, 20 bp, synthetic construct
  misc_feature 1..20: note = Description of Artificial Sequence: Synthetic oligonucleotide
  misc_feature 1..20: note = Target: FXN; (-) strand; PAM type: NRG; PAM sequence: GAG
  source 1..20: mol_type = other DNA
cttaaaactgtataattcag

SEQ ID NO: 13028 - DNA, 20 bp, synthetic construct
  misc_feature 1..20: note = Description of Artificial Sequence: Synthetic oligonucleotide
  misc_feature 1..20: note = Target: FXN; (-) strand; PAM type: NRG; PAM sequence: AGG
  source 1..20: mol_type = other DNA
ttcttaaaactgtataattc

SEQ ID NO: 13029 - DNA, 20 bp, synthetic construct
  misc_feature 1..20: note = Description of Artificial Sequence: Synthetic oligonucleotide
  misc_feature 1..20: note = Target: FXN; (-) strand; PAM type: NRG; PAM sequence: CAG
  source 1..20: mol_type = other DNA
tttcttaaaactgtataatt

SEQ ID NO: 13030 - DNA, 20 bp, synthetic construct
  misc_feature 1..20: note = Description of Artificial Sequence: Synthetic oligonucleotide
  misc_feature 1..20: note = Target: FXN; (-) strand; PAM type: NRG; PAM sequence: AAG
  source 1..20: mol_type = other DNA
tctcaaaaacaaataaataa

SEQ ID NO: 13031 - DNA, 20 bp, synthetic construct
  misc_feature 1..20: note = Description of Artificial Sequence: Synthetic oligonucleotide
  misc_feature 1..20: note = Target: FXN; (-) strand; PAM type: NRG; PAM sequence: GAG
  source 1..20: mol_type = other DNA
acttcagcctgggtgacaca

SEQ ID NO: 13032 - DNA, 20 bp, synthetic construct
  misc_feature 1..20: note = Description of Artificial Sequence: Synthetic oligonucleotide
  misc_feature 1..20: note = Target: FXN; (-) strand; PAM type: NRG; PAM sequence: CAG
  source 1..20: mol_type = other DNA
acacttcagcctgggtgaca

SEQ ID NO: 13033 - DNA, 20 bp, synthetic construct
  misc_feature 1..20: note = Description of Artificial Sequence: Synthetic oligonucleotide
  misc_feature 1..20: note = Target: FXN; (-) strand; PAM type: NRG; PAM sequence: GGG
  source 1..20: mol_type = other DNA
acgccaccacacttcagcct

SEQ ID NO: 13034 - DNA, 20 bp, synthetic construct
  misc_feature 1..20: note = Description of Artificial Sequence: Synthetic oligonucleotide
  misc_feature 1..20: note = Target: FXN; (-) strand; PAM type: NRG; PAM sequence: TGG
  source 1..20: mol_type = other DNA
cacgccaccacacttcagcc

SEQ ID NO: 13035 - DNA, 20 bp, synthetic construct
  misc_feature 1..20: note = Description of Artificial Sequence: Synthetic oligonucleotide
  misc_feature 1..20: note = Target: FXN; (-) strand; PAM type: NRG; PAM sequence: CAG
  source 1..20: mol_type = other DNA
gtgatcacgccaccacactt

SEQ ID NO: 13036 - DNA, 20 bp, synthetic construct
  misc_feature 1..20: note = Description of Artificial Sequence: Synthetic oligonucleotide
  misc_feature 1..20: note = Target: FXN; (-) strand; PAM type: NRG; PAM sequence: CGG
  source 1..20: mol_type = other DNA
gagattgaggctgcaataac

SEQ ID NO: 13037 - DNA, 20 bp, synthetic construct
  misc_feature 1..20: note = Description of Artificial Sequence: Synthetic oligonucleotide
  misc_feature 1..20: note = Target: FXN; (-) strand; PAM type: NRG; PAM sequence: AGG
  source 1..20: mol_type = other DNA
cgcttgagcctcagagattg

SEQ ID NO: 13038 - DNA, 20 bp, synthetic construct
  misc_feature 1..20: note = Description of Artificial Sequence: Synthetic oligonucleotide
  misc_feature 1..20: note = Target: FXN; (-) strand; PAM type: NRG; PAM sequence: GAG
  source 1..20: mol_type = other DNA
tcgcttgagcctcagagatt

SEQ ID NO: 13039 - DNA, 20 bp, synthetic construct
  misc_feature 1..20: note = Description of Artificial Sequence: Synthetic oligonucleotide
  misc_feature 1..20: note = Target: FXN; (-) strand; PAM type: NRG; PAM sequence: GAG
  source 1..20: mol_type = other DNA
ggagaatcgcttgagcctca

SEQ ID NO: 13040 - DNA, 20 bp, synthetic construct
  misc_feature 1..20: note = Description of Artificial Sequence: Synthetic oligonucleotide
  misc_feature 1..20: note = Target: FXN; (-) strand; PAM type: NRG; PAM sequence: CAG
  source 1..20: mol_type = other DNA
tgggagaatcgcttgagcct

SEQ ID NO: 13041 - DNA, 20 bp, synthetic construct
  misc_feature 1..20: note = Description of Artificial Sequence: Synthetic oligonucleotide
  misc_feature 1..20: note = Target: FXN; (-) strand; PAM type: NRG; PAM sequence: GAG
  source 1..20: mol_type = other DNA
ctgaggtgggagaatcgctt

SEQ ID NO: 13042 - DNA, 20 bp, synthetic construct
  misc_feature 1..20: note = Description of Artificial Sequence: Synthetic oligonucleotide
  misc_feature 1..20: note = Target: FXN; (-) strand; PAM type: NRG; PAM sequence: GAG
  source 1..20: mol_type = other DNA
tacttggtaggctgaggtgg

SEQ ID NO: 13043 - DNA, 20 bp, synthetic construct
  misc_feature 1..20: note = Description of Artificial Sequence: Synthetic oligonucleotide
  misc_feature 1..20: note = Target: FXN; (-) strand; PAM type: NRG; PAM sequence: GGG
  source 1..20: mol_type = other DNA
tctacttggtaggctgaggt

SEQ ID NO: 13044 - DNA, 20 bp, synthetic construct
  misc_feature 1..20: note = Description of Artificial Sequence: Synthetic oligonucleotide
  misc_feature 1..20: note = Target: FXN; (-) strand; PAM type: NRG; PAM sequence: TGG
  source 1..20: mol_type = other DNA
atctacttggtaggctgagg

SEQ ID NO: 13045 - DNA, 20 bp, synthetic construct
  misc_feature 1..20: note = Description of Artificial Sequence: Synthetic oligonucleotide
  misc_feature 1..20: note = Target: FXN; (-) strand; PAM type: NRG; PAM sequence: AGG
  source 1..20: mol_type = other DNA
cacatctacttggtaggctg

SEQ ID NO: 13046 - DNA, 20 bp, synthetic construct
  misc_feature 1..20: note = Description of Artificial Sequence: Synthetic oligonucleotide
  misc_feature 1..20: note = Target: FXN; (-) strand; PAM type: NRG; PAM sequence: GAG
  source 1..20: mol_type = other DNA
tcacatctacttggtaggct

SEQ ID NO: 13047 - DNA, 20 bp, synthetic construct
  misc_feature 1..20: note = Description of Artificial Sequence: Synthetic oligonucleotide
  misc_feature 1..20: note = Target: FXN; (-) strand; PAM type: NRG; PAM sequence: AGG
  source 1..20: mol_type = other DNA
tatagtcacatctacttggt

SEQ ID NO: 13048 - DNA, 20 bp, synthetic construct
  misc_feature 1..20: note = Description of Artificial Sequence: Synthetic oligonucleotide
  misc_feature 1..20: note = Target: FXN; (-) strand; PAM type: NRG; PAM sequence: TAG
  source 1..20: mol_type = other DNA
ctatagtcacatctacttgg

SEQ ID NO: 13049 - DNA, 20 bp, synthetic construct
  misc_feature 1..20: note = Description of Artificial Sequence: Synthetic oligonucleotide
  misc_feature 1..20: note = Target: FXN; (-) strand; PAM type: NRG; PAM sequence: TGG
  source 1..20: mol_type = other DNA
cacctatagtcacatctact

SEQ ID NO: 13050 - DNA, 20 bp, synthetic construct
  misc_feature 1..20: note = Description of Artificial Sequence: Synthetic oligonucleotide
  misc_feature 1..20: note = Target: FXN; (-) strand; PAM type: NRG; PAM sequence: TAG
  source 1..20: mol_type = other DNA
ggtgtggtggtgcgcaccta

SEQ ID NO: 13051 - DNA, 20 bp, synthetic construct
  misc_feature 1..20: note = Description of Artificial Sequence: Synthetic oligonucleotide
  misc_feature 1..20: note = Target: FXN; (-) strand; PAM type: NRG; PAM sequence: TGG
  source 1..20: mol_type = other DNA
tacaaattcactgggtgtgg

SEQ ID NO: 13052 - DNA, 20 bp, synthetic construct
  misc_feature 1..20: note = Description of Artificial Sequence: Synthetic oligonucleotide
  misc_feature 1..20: note = Target: FXN; (-) strand; PAM type: NRG; PAM sequence: TGG
  source 1..20: mol_type = other DNA
aattacaaattcactgggtg

SEQ ID NO: 13053 - DNA, 20 bp, synthetic construct
  misc_feature 1..20: note = Description of Artificial Sequence: Synthetic oligonucleotide
  misc_feature 1..20: note = Target: FXN; (-) strand; PAM type: NRG; PAM sequence: GGG
  source 1..20: mol_type = other DNA
caaaaaattacaaattcact

SEQ ID NO: 13054 - DNA, 20 bp, synthetic construct
  misc_feature 1..20: note = Description of Artificial Sequence: Synthetic oligonucleotide
  misc_feature 1..20: note = Target: FXN; (-) strand; PAM type: NRG; PAM sequence: TGG
  source 1..20: mol_type = other DNA
acaaaaaattacaaattcac

SEQ ID NO: 13055 - DNA, 20 bp, synthetic construct
  misc_feature 1..20: note = Description of Artificial Sequence: Synthetic oligonucleotide
  misc_feature 1..20: note = Target: FXN; (-) strand; PAM type: NRG; PAM sequence: TGG
  source 1..20: mol_type = other DNA
caagaccagactgggcaaca

SEQ ID NO: 13056 - DNA, 20 bp, synthetic construct
  misc_feature 1..20: note = Description of Artificial Sequence: Synthetic oligonucleotide
  misc_feature 1..20: note = Target: FXN; (-) strand; PAM type: NRG; PAM sequence: GGG
  source 1..20: mol_type = other DNA
caggagttcaagaccagact

SEQ ID NO: 13057 - DNA, 20 bp, synthetic construct
  misc_feature 1..20: note = Description of Artificial Sequence: Synthetic oligonucleotide
  misc_feature 1..20: note = Target: FXN; (-) strand; PAM type: NRG; PAM sequence: TGG
  source 1..20: mol_type = other DNA
ccaggagttcaagaccagac

SEQ ID NO: 13058 - DNA, 20 bp, synthetic construct
  misc_feature 1..20: note = Description of Artificial Sequence: Synthetic oligonucleotide
  misc_feature 1..20: note = Target: FXN; (-) strand; PAM type: NRG; PAM sequence: CAG
  source 1..20: mol_type = other DNA
tgggcccaggagttcaagac

SEQ ID NO: 13059 - DNA, 20 bp, synthetic construct
  misc_feature 1..20: note = Description of Artificial Sequence: Synthetic oligonucleotide
  misc_feature 1..20: note = Target: FXN; (-) strand; PAM type: NRG; PAM sequence: AAG
  source 1..20: mol_type = other DNA
tcgcttgggcccaggagttc

SEQ ID NO: 13060 - DNA, 20 bp, synthetic construct
  misc_feature 1..20: note = Description of Artificial Sequence: Synthetic oligonucleotide
  misc_feature 1..20: note = Target: FXN; (-) strand; PAM type: NRG; PAM sequence: GAG
  source 1..20: mol_type = other DNA
ggaggatcgcttgggcccag

SEQ ID NO: 13061 - DNA, 20 bp, synthetic construct
  misc_feature 1..20: note = Description of Artificial Sequence: Synthetic oligonucleotide
  misc_feature 1..20: note = Target: FXN; (-) strand; PAM type: NRG; PAM sequence: AGG
  source 1..20: mol_type = other DNA
agggaggatcgcttgggccc

SEQ ID NO: 13062 - DNA, 20 bp, synthetic construct
  misc_feature 1..20: note = Description of Artificial Sequence: Synthetic oligonucleotide
  misc_feature 1..20: note = Target: FXN; (-) strand; PAM type: NRG; PAM sequence: CAG
  source 1..20: mol_type = other DNA
gagggaggatcgcttgggcc

SEQ ID NO: 13063 - DNA, 20 bp, synthetic construct
  misc_feature 1..20: note = Description of Artificial Sequence: Synthetic oligonucleotide
  misc_feature 1..20: note = Target: FXN; (-) strand; PAM type: NRG; PAM sequence: GGG
  source 1..20: mol_type = other DNA
ccaaggagggaggatcgctt

SEQ ID NO: 13064 - DNA, 20 bp, synthetic construct
  misc_feature 1..20: note = Description of Artificial Sequence: Synthetic oligonucleotide
  misc_feature 1..20: note = Target: FXN; (-) strand; PAM type: NRG; PAM sequence: TGG
  source 1..20: mol_type = other DNA
cccaaggagggaggatcgct

SEQ ID NO: 13065 - DNA, 20 bp, synthetic construct
  misc_feature 1..20: note = Description of Artificial Sequence: Synthetic oligonucleotide
  misc_feature 1..20: note = Target: FXN; (-) strand; PAM type: NRG; PAM sequence: AGG
  source 1..20: mol_type = other DNA
cttcgggagcccaaggaggg

SEQ ID NO: 13066 - DNA, 20 bp, synthetic construct
  misc_feature 1..20: note = Description of Artificial Sequence: Synthetic oligonucleotide
  misc_feature 1..20: note = Target: FXN; (-) strand; PAM type: NRG; PAM sequence: GAG
  source 1..20: mol_type = other DNA
acttcgggagcccaaggagg

SEQ ID NO: 13067 - DNA, 20 bp, synthetic construct
  misc_feature 1..20: note = Description of Artificial Sequence: Synthetic oligonucleotide
  misc_feature 1..20: note = Target: FXN; (-) strand; PAM type: NRG; PAM sequence: GGG
  source 1..20: mol_type = other DNA
gcacttcgggagcccaagga

SEQ ID NO: 13068 - DNA, 20 bp, synthetic construct
  misc_feature 1..20: note = Description of Artificial Sequence: Synthetic oligonucleotide
  misc_feature 1..20: note = Target: FXN; (-) strand; PAM type: NRG; PAM sequence: AGG
  source 1..20: mol_type = other DNA
ggcacttcgggagcccaagg

SEQ ID NO: 13069 - DNA, 20 bp, synthetic construct
  misc_feature 1..20: note = Description of Artificial Sequence: Synthetic oligonucleotide
  misc_feature 1..20: note = Target: FXN; (-) strand; PAM type: NRG; PAM sequence: GAG
  source 1..20: mol_type = other DNA
tggcacttcgggagcccaag

SEQ ID NO: 13070 - DNA, 20 bp, synthetic construct
  misc_feature 1..20: note = Description of Artificial Sequence: Synthetic oligonucleotide
  misc_feature 1..20: note = Target: FXN; (-) strand; PAM type: NRG; PAM sequence: AGG
  source 1..20: mol_type = other DNA
cctggcacttcgggagccca

SEQ ID NO: 13071 - DNA, 20 bp, synthetic construct
  misc_feature 1..20: note = Description of Artificial Sequence: Synthetic oligonucleotide
  misc_feature 1..20: note = Target: FXN; (-) strand; PAM type: NRG; PAM sequence: AAG
  source 1..20: mol_type = other DNA
tcctggcacttcgggagccc

SEQ ID NO: 13072 - DNA, 20 bp, synthetic construct
  misc_feature 1..20: note = Description of Artificial Sequence: Synthetic oligonucleotide
  misc_feature 1..20: note = Target: FXN; (-) strand; PAM type: NRG; PAM sequence: GAG
  source 1..20: mol_type = other DNA
cttgtatcctggcacttcgg

SEQ ID NO: 13073 - DNA, 20 bp, synthetic construct
  misc_feature 1..20: note = Description of Artificial Sequence: Synthetic oligonucleotide
  misc_feature 1..20: note = Target: FXN; (-) strand; PAM type: NRG; PAM sequence: GGG
  source 1..20: mol_type = other DNA
tgcttgtatcctggcacttc

SEQ ID NO: 13074 - DNA, 20 bp, synthetic construct
  misc_feature 1..20: note = Description of Artificial Sequence: Synthetic oligonucleotide
  misc_feature 1..20: note = Target: FXN; (-) strand; PAM type: NRG; PAM sequence: CGG
  source 1..20: mol_type = other DNA
atgcttgtatcctggcactt

SEQ ID NO: 13075 - DNA, 20 bp, synthetic construct
  misc_feature 1..20: note = Description of Artificial Sequence: Synthetic oligonucleotide
  misc_feature 1..20: note = Target: FXN; (-) strand; PAM type: NRG; PAM sequence: TGG
  source 1..20: mol_type = other DNA
ggtgactcatgcttgtatcc

SEQ ID NO: 13076 - DNA, 20 bp, synthetic construct
  misc_feature 1..20: note = Description of Artificial Sequence: Synthetic oligonucleotide
  misc_feature 1..20: note = Target: FXN; (-) strand; PAM type: NRG; PAM sequence: TGG
  source 1..20: mol_type = other DNA
cttaaaactgaggctgcatg

SEQ ID NO: 13077 - DNA, 20 bp, synthetic construct
  misc_feature 1..20: note = Description of Artificial Sequence: Synthetic oligonucleotide
  misc_feature 1..20: note = Target: FXN; (-) strand; PAM type: NRG; PAM sequence: AGG
  source 1..20: mol_type = other DNA
ttaaaagtttcttaaaactg

SEQ ID NO: 13078 - DNA, 20 bp, synthetic construct
  misc_feature 1..20: note = Description of Artificial Sequence: Synthetic oligonucleotide
  misc_feature 1..20: note = Target: FXN; (-) strand; PAM type: NRG; PAM sequence: GAG
  source 1..20: mol_type = other DNA
tttaaaagtttcttaaaact

SEQ ID NO: 13079 - DNA, 20 bp, synthetic construct
  misc_feature 1..20: note = Description of Artificial Sequence: Synthetic oligonucleotide
  misc_feature 1..20: note = Target: FXN; (-) strand; PAM type: NRG; PAM sequence: AAG
  source 1..20: mol_type = other DNA
actatatttcatttatttaa

SEQ ID NO: 13080 - DNA, 20 bp, synthetic construct
  misc_feature 1..20: note = Description of Artificial Sequence: Synthetic oligonucleotide
  misc_feature 1..20: note = Target: FXN; (-) strand; PAM type: NRG; PAM sequence: TGG
  source 1..20: mol_type = other DNA
gaaacccatttttactgttt

SEQ ID NO: 13081 - DNA, 20 bp, synthetic construct
  misc_feature 1..20: note = Description of Artificial Sequence: Synthetic oligonucleotide
  misc_feature 1..20: note = Target: FXN; (-) strand; PAM type: NRG; PAM sequence: AAG
  source 1..20: mol_type = other DNA
gctgggattatacaatacgt

SEQ ID NO: 13082 - DNA, 20 bp, synthetic construct
  misc_feature 1..20: note = Description of Artificial Sequence: Synthetic oligonucleotide
  misc_feature 1..20: note = Target: FXN; (-) strand; PAM type: NRG; PAM sequence: GGG
  source 1..20: mol_type = other DNA
aagcattttttaaaagggct

SEQ ID NO: 13083 - DNA, 20 bp, synthetic construct
  misc_feature 1..20: note = Description of Artificial Sequence: Synthetic oligonucleotide
  misc_feature 1..20: note = Target: FXN; (-) strand; PAM type: NRG; PAM sequence: TGG
  source 1..20: mol_type = other DNA
aaagcattttttaaaagggc

SEQ ID NO: 13084 - DNA, 20 bp, synthetic construct
  misc_feature 1..20: note = Description of Artificial Sequence: Synthetic oligonucleotide
  misc_feature 1..20: note = Target: FXN; (-) strand; PAM type: NRG; PAM sequence: GGG
  source 1..20: mol_type = other DNA
tttgaaagcattttttaaaa

SEQ ID NO: 13085 - DNA, 20 bp, synthetic construct
  misc_feature 1..20: note = Description of Artificial Sequence: Synthetic oligonucleotide
  misc_feature 1..20: note = Target: FXN; (-) strand; PAM type: NRG; PAM sequence: AGG
  source 1..20: mol_type = other DNA
ttttgaaagcattttttaaa

SEQ ID NO: 13086 - DNA, 20 bp, synthetic construct
  misc_feature 1..20: note = Description of Artificial Sequence: Synthetic oligonucleotide
  misc_feature 1..20: note = Target: FXN; (-) strand; PAM type: NRG; PAM sequence: AAG
  source 1..20: mol_type = other DNA
tttttgaaagcattttttaa

SEQ ID NO: 13087 - DNA, 20 bp, synthetic construct
  misc_feature 1..20: note = Description of Artificial Sequence: Synthetic oligonucleotide
  misc_feature 1..20: note = Target: FXN; (-) strand; PAM type: NRG; PAM sequence: AAG
  source 1..20: mol_type = other DNA
agttgactgccagtttttga

SEQ ID NO: 13088 - DNA, 20 bp, synthetic construct
  misc_feature 1..20: note = Description of Artificial Sequence: Synthetic oligonucleotide
  misc_feature 1..20: note = Target: FXN; (-) strand; PAM type: NRG; PAM sequence: CAG
  source 1..20: mol_type = other DNA
tccttttatgagttgactgc

SEQ ID NO: 13089 - DNA, 20 bp, synthetic construct
  misc_feature 1..20: note = Description of Artificial Sequence: Synthetic oligonucleotide
  misc_feature 1..20: note = Target: FXN; (-) strand; PAM type: NRG; PAM sequence: GAG
  source 1..20: mol_type = other DNA
ataagtatttgtccttttat

SEQ ID NO: 13090 - DNA, 20 bp, synthetic construct
  misc_feature 1..20: note = Description of Artificial Sequence: Synthetic oligonucleotide
  misc_feature 1..20: note = Target: FXN; (-) strand; PAM type: NRG; PAM sequence: AAG
  source 1..20: mol_type = other DNA
tacttcatcagtggaatcat

SEQ ID NO: 13091 - DNA, 20 bp, synthetic construct
  misc_feature 1..20: note = Description of Artificial Sequence: Synthetic oligonucleotide
  misc_feature 1..20: note = Target: FXN; (-) strand; PAM type: NRG; PAM sequence: TGG
  source 1..20: mol_type = other DNA
acttttgactacttcatcag

SEQ ID NO: 13092 - DNA, 20 bp, synthetic construct
  misc_feature 1..20: note = Description of Artificial Sequence: Synthetic oligonucleotide
  misc_feature 1..20: note = Target: FXN; (-) strand; PAM type: NRG; PAM sequence: CAG
  source 1..20: mol_type = other DNA
actacttttgactacttcat

SEQ ID NO: 13093 - DNA, 20 bp, synthetic construct
  misc_feature 1..20: note = Description of Artificial Sequence: Synthetic oligonucleotide
  misc_feature 1..20: note = Target: FXN; (-) strand; PAM type: NRG; PAM sequence: TGG
  source 1..20: mol_type = other DNA
taaaaattatacatttatgg

SEQ ID NO: 13094 - DNA, 20 bp, synthetic construct
  misc_feature 1..20: note = Description of Artificial Sequence: Synthetic oligonucleotide
  misc_feature 1..20: note = Target: FXN; (-) strand; PAM type: NRG; PAM sequence: TGG
  source 1..20: mol_type = other DNA
aaataaaaattatacattta

SEQ ID NO: 13095 - DNA, 20 bp, synthetic construct
  misc_feature 1..20: note = Description of Artificial Sequence: Synthetic oligonucleotide
  misc_feature 1..20: note = Target: FXN; (-) strand; PAM type: NRG; PAM sequence: AAG
  source 1..20: mol_type = other DNA
ctatgattttgactaaaaaa

SEQ ID NO: 13096 - DNA, 20 bp, synthetic construct
  misc_feature 1..20: note = Description of Artificial Sequence: Synthetic oligonucleotide
  misc_feature 1..20: note = Target: FXN; (-) strand; PAM type: NRG; PAM sequence: TAG
  source 1..20: mol_type = other DNA
tttccccatcccatagccct

SEQ ID NO: 13097 - DNA, 20 bp, synthetic construct
  misc_feature 1..20: note = Description of Artificial Sequence: Synthetic oligonucleotide
  misc_feature 1..20: note = Target: FXN; (-) strand; PAM type: NRG; PAM sequence: TAG
  source 1..20: mol_type = other DNA
acactaatttccccatccca

SEQ ID NO: 13098 - DNA, 20 bp, synthetic construct
  misc_feature 1..20: note = Description of Artificial Sequence: Synthetic oligonucleotide
  misc_feature 1..20: note = Target: FXN; (-) strand; PAM type: NRG; PAM sequence: TAG
  source 1..20: mol_type = other DNA
cactgaaactctatgcccat

SEQ ID NO: 13099 - DNA, 20 bp, synthetic construct
  misc_feature 1..20: note = Description of Artificial Sequence: Synthetic oligonucleotide
  misc_feature 1..20: note = Target: FXN; (-) strand; PAM type: NRG; PAM sequence: TAG
  source 1..20: mol_type = other DNA
actgctgggcagcataactc

SEQ ID NO: 13100 - DNA, 20 bp, synthetic construct
  misc_feature 1..20: note = Description of Artificial Sequence: Synthetic oligonucleotide
  misc_feature 1..20: note = Target: FXN; (-) strand; PAM type: NRG; PAM sequence: CAG
  source 1..20: mol_type = other DNA
agtatattcacactgctggg

SEQ ID NO: 13101 - DNA, 20 bp, synthetic construct
  misc_feature 1..20: note = Description of Artificial Sequence: Synthetic oligonucleotide
  misc_feature 1..20: note = Target: FXN; (-) strand; PAM type: NRG; PAM sequence: GGG
  source 1..20: mol_type = other DNA
taaagtatattcacactgct

SEQ ID NO: 13102 - DNA, 20 bp, synthetic construct
  misc_feature 1..20: note = Description of Artificial Sequence: Synthetic oligonucleotide
  misc_feature 1..20: note = Target: FXN; (-) strand; PAM type: NRG; PAM sequence: TGG
  source 1..20: mol_type = other DNA
ataaagtatattcacactgc

SEQ ID NO: 13103 - DNA, 20 bp, synthetic construct
  misc_feature 1..20: note = Description of Artificial Sequence: Synthetic oligonucleotide
  misc_feature 1..20: note = Target: FXN; (-) strand; PAM type: NRG; PAM sequence: AAG
  source 1..20: mol_type = other DNA
gttaagtgtacagaacaata

SEQ ID NO: 13104 - DNA, 20 bp, synthetic construct
  misc_feature 1..20: note = Description of Artificial Sequence: Synthetic oligonucleotide
  misc_feature 1..20: note = Target: FXN; (-) strand; PAM type: NRG; PAM sequence: CAG
  source 1..20: mol_type = other DNA
tattaaccatgttaagtgta

SEQ ID NO: 13105 - DNA, 20 bp, synthetic construct
  misc_feature 1..20: note = Description of Artificial Sequence: Synthetic oligonucleotide
  misc_feature 1..20: note = Target: FXN; (-) strand; PAM type: NRG; PAM sequence: AAG
  source 1..20: mol_type = other DNA
tttaccatattaaccatgtt

SEQ ID NO: 13106 - DNA, 20 bp, synthetic construct
  misc_feature 1..20: note = Description of Artificial Sequence: Synthetic oligonucleotide
  misc_feature 1..20: note = Target: FXN; (-) strand; PAM type: NRG; PAM sequence: AAG
  source 1..20: mol_type = other DNA
tttaattttactatagtaaa

SEQ ID NO: 13107 - DNA, 20 bp, synthetic construct
  misc_feature 1..20: note = Description of Artificial Sequence: Synthetic oligonucleotide
  misc_feature 1..20: note = Target: FXN; (-) strand; PAM type: NRG; PAM sequence: TAG
  source 1..20: mol_type = other DNA
ttttttttttaattttacta

SEQ ID NO: 13108 - DNA, 20 bp, synthetic construct
  misc_feature 1..20: note = Description of Artificial Sequence: Synthetic oligonucleotide
  misc_feature 1..20: note = Target: FXN; (-) strand; PAM type: NRG; PAM sequence: CGG
  source 1..20: mol_type = other DNA
caggtgtgagctactgcact

SEQ ID NO: 13109 - DNA, 20 bp, synthetic construct
  misc_feature 1..20: note = Description of Artificial Sequence: Synthetic oligonucleotide
  misc_feature 1..20: note = Target: FXN; (-) strand; PAM type: NRG; PAM sequence: GAG
  source 1..20: mol_type = other DNA
tgggattatgttacaggtgt

SEQ ID NO: 13110 - DNA, 20 bp, synthetic construct
  misc_feature 1..20: note = Description of Artificial Sequence: Synthetic oligonucleotide
  misc_feature 1..20: note = Target: FXN; (-) strand; PAM type: NRG; PAM sequence: AGG
  source 1..20: mol_type = other DNA
aagtgctgggattatgttac

SEQ ID NO: 13111 - DNA, 20 bp, synthetic construct
  misc_feature 1..20: note = Description of Artificial Sequence: Synthetic oligonucleotide
  misc_feature 1..20: note = Target: FXN; (-) strand; PAM type: NRG; PAM sequence: CAG
  source 1..20: mol_type = other DNA
aaagtgctgggattatgtta

SEQ ID NO: 13112 - DNA, 20 bp, synthetic construct
  misc_feature 1..20: note = Description of Artificial Sequence: Synthetic oligonucleotide
  misc_feature 1..20: note = Target: FXN; (-) strand; PAM type: NRG; PAM sequence: GGG
  source 1..20: mol_type = other DNA
cctcggcctcccaaagtgct

SEQ ID NO: 13113 - DNA, 20 bp, synthetic construct
  misc_feature 1..20: note = Description of Artificial Sequence: Synthetic oligonucleotide
  misc_feature 1..20: note = Target: FXN; (-) strand; PAM type: NRG; PAM sequence: TGG
  source 1..20: mol_type = other DNA
acctcggcctcccaaagtgc

SEQ ID NO: 13114 - DNA, 20 bp, synthetic construct
  misc_feature 1..20: note = Description of Artificial Sequence: Synthetic oligonucleotide
  misc_feature 1..20: note = Target: FXN; (-) strand; PAM type: NRG; PAM sequence: AAG
  source 1..20: mol_type = other DNA
cctcctacctcggcctccca

SEQ ID NO: 13115 - DNA, 20 bp, synthetic construct
  misc_feature 1..20: note = Description of Artificial Sequence: Synthetic oligonucleotide
  misc_feature 1..20: note = Target: FXN; (-) strand; PAM type: NRG; PAM sequence: CGG
  source 1..20: mol_type = other DNA
ctcaagtgatcctcctacct

SEQ ID NO: 13116 - DNA, 20 bp, synthetic construct
  misc_feature 1..20: note = Description of Artificial Sequence: Synthetic oligonucleotide
  misc_feature 1..20: note = Target: FXN; (-) strand; PAM type: NRG; PAM sequence: AAG
  source 1..20: mol_type = other DNA
ggtttcaaacttctggcctc

SEQ ID NO: 13117 - DNA, 20 bp, synthetic construct
  misc_feature 1..20: note = Description of Artificial Sequence: Synthetic oligonucleotide
  misc_feature 1..20: note = Target: FXN; (-) strand; PAM type: NRG; PAM sequence: TGG
  source 1..20: mol_type = other DNA
ccaggctggtttcaaacttc

SEQ ID NO: 13118 - DNA, 20 bp, synthetic construct
  misc_feature 1..20: note = Description of Artificial Sequence: Synthetic oligonucleotide
  misc_feature 1..20: note = Target: FXN; (-) strand; PAM type: NRG; PAM sequence: TGG
  source 1..20: mol_type = other DNA
tctcgctatattgaccaggc

SEQ ID NO: 13119 - DNA, 20 bp, synthetic construct
  misc_feature 1..20: note = Description of Artificial Sequence: Synthetic oligonucleotide
  misc_feature 1..20: note = Target: FXN; (-) strand; PAM type: NRG; PAM sequence: AGG
  source 1..20: mol_type = other DNA
gaggtctcgctatattgacc

SEQ ID NO: 13120 - DNA, 20 bp, synthetic construct
  misc_feature 1..20: note = Description of Artificial Sequence: Synthetic oligonucleotide
  misc_feature 1..20: note = Target: FXN; (-) strand; PAM type: NRG; PAM sequence: CAG
  source 1..20: mol_type = other DNA
tgaggtctcgctatattgac

SEQ ID NO: 13121 - DNA, 20 bp, synthetic construct
  misc_feature 1..20: note = Description of Artificial Sequence: Synthetic oligonucleotide
  misc_feature 1..20: note = Target: FXN; (-) strand; PAM type: NRG; PAM sequence: AGG
  source 1..20: mol_type = other DNA
atttttcttttgtagagatg

SEQ ID NO: 13122 - DNA, 20 bp, synthetic construct
  misc_feature 1..20: note = Description of Artificial Sequence: Synthetic oligonucleotide
  misc_feature 1..20: note = Target: FXN; (-) strand; PAM type: NRG; PAM sequence: GAG
  source 1..20: mol_type = other DNA
catttttcttttgtagagat

SEQ ID NO: 13123 - DNA, 20 bp, synthetic construct
  misc_feature 1..20: note = Description of Artificial Sequence: Synthetic oligonucleotide
  misc_feature 1..20: note = Target: FXN; (-) strand; PAM type: NRG; PAM sequence: GAG
  source 1..20: mol_type = other DNA
tttaacatttttcttttgta

SEQ ID NO: 13124 - DNA, 20 bp, synthetic construct
  misc_feature 1..20: note = Description of Artificial Sequence: Synthetic oligonucleotide
  misc_feature 1..20: note = Target: FXN; (-) strand; PAM type: NRG; PAM sequence: TAG
  source 1..20: mol_type = other DNA
attttaacatttttcttttg

SEQ ID NO: 13125 - DNA, 20 bp, synthetic construct
  misc_feature 1..20: note = Description of Artificial Sequence: Synthetic oligonucleotide
  misc_feature 1..20: note = Target: FXN; (-) strand; PAM type: NRG; PAM sequence: CAG
  source 1..20: mol_type = other DNA
cctccagagagctgggacta

SEQ ID NO: 13126 - DNA, 20 bp, synthetic construct
  misc_feature 1..20: note = Description of Artificial Sequence: Synthetic oligonucleotide
  misc_feature 1..20: note = Target: FXN; (-) strand; PAM type: NRG; PAM sequence: GGG
  source 1..20: mol_type = other DNA
gtccctgcctccagagagct

SEQ ID NO: 13127 - DNA, 20 bp, synthetic construct
  misc_feature 1..20: note = Description of Artificial Sequence: Synthetic oligonucleotide
  misc_feature 1..20: note = Target: FXN; (-) strand; PAM type: NRG; PAM sequence: TGG
  source 1..20: mol_type = other DNA
agtccctgcctccagagagc

SEQ ID NO: 13128 - DNA, 20 bp, synthetic construct
  misc_feature 1..20: note = Description of Artificial Sequence: Synthetic oligonucleotide
  misc_feature 1..20: note = Target: FXN; (-) strand; PAM type: NRG; PAM sequence: GAG
  source 1..20: mol_type = other DNA
actcagtccctgcctccaga

SEQ ID NO: 13129 - DNA, 20 bp, synthetic construct
  misc_feature 1..20: note = Description of Artificial Sequence: Synthetic oligonucleotide
  misc_feature 1..20: note = Target: FXN; (-) strand; PAM type: NRG; PAM sequence: GAG
  source 1..20: mol_type = other DNA
tgactcagtccctgcctcca

SEQ ID NO: 13130 - DNA, 20 bp, synthetic construct
  misc_feature 1..20: note = Description of Artificial Sequence: Synthetic oligonucleotide
  misc_feature 1..20: note = Target: FXN; (-) strand; PAM type: NRG; PAM sequence: CAG
  source 1..20: mol_type = other DNA
tctgactcagtccctgcctc

SEQ ID NO: 13131 - DNA, 20 bp, synthetic construct
  misc_feature 1..20: note = Description of Artificial Sequence: Synthetic oligonucleotide
  misc_feature 1..20: note = Target: FXN; (-) strand; PAM type: NRG; PAM sequence: CAG
  source 1..20: mol_type = other DNA
gctcaagtgatcctctgact

SEQ ID NO: 13132 - DNA, 20 bp, synthetic construct
  misc_feature 1..20: note = Description of Artificial Sequence: Synthetic oligonucleotide
  misc_feature 1..20: note = Target: FXN; (-) strand; PAM type: NRG; PAM sequence: AAG
  source 1..20: mol_type = other DNA
agcctcaaacccctatgctc

SEQ ID NO: 13133 - DNA, 20 bp, synthetic construct
  misc_feature 1..20: note = Description of Artificial Sequence: Synthetic oligonucleotide
  misc_feature 1..20: note = Target: FXN; (-) strand; PAM type: NRG; PAM sequence: CAG
  source 1..20: mol_type = other DNA
ggcaggatcatggctcactg

SEQ ID NO: 13134 - DNA, 20 bp, synthetic construct
  misc_feature 1..20: note = Description of Artificial Sequence: Synthetic oligonucleotide
  misc_feature 1..20: note = Target: FXN; (-) strand; PAM type: NRG; PAM sequence: TGG
  source 1..20: mol_type = other DNA
ctgcagcagtggcaggatca

SEQ ID NO: 13135 - DNA, 20 bp, synthetic construct
  misc_feature 1..20: note = Description of Artificial Sequence: Synthetic oligonucleotide
  misc_feature 1..20: note = Target: FXN; (-) strand; PAM type: NRG; PAM sequence: AGG
  source 1..20: mol_type = other DNA
gctcaggctgcagcagtggc

SEQ ID NO: 13136 - DNA, 20 bp, synthetic construct
  misc_feature 1..20: note = Description of Artificial Sequence: Synthetic oligonucleotide
  misc_feature 1..20: note = Target: FXN; (-) strand; PAM type: NRG; PAM sequence: CAG
  source 1..20: mol_type = other DNA
tgctcaggctgcagcagtgg

SEQ ID NO: 13137 - DNA, 20 bp, synthetic construct
  misc_feature 1..20: note = Description of Artificial Sequence: Synthetic oligonucleotide
  misc_feature 1..20: note = Target: FXN; (-) strand; PAM type: NRG; PAM sequence: TGG
  source 1..20: mol_type = other DNA
tgttgctcaggctgcagcag

SEQ ID NO: 13138 - DNA, 20 bp, synthetic construct
  misc_feature 1..20: note = Description of Artificial Sequence: Synthetic oligonucleotide
  misc_feature 1..20: note = Target: FXN; (-) strand; PAM type: NRG; PAM sequence: CAG
  source 1..20: mol_type = other DNA
ctctgttgctcaggctgcag

SEQ ID NO: 13139 - DNA, 20 bp, synthetic construct
  misc_feature 1..20: note = Description of Artificial Sequence: Synthetic oligonucleotide
  misc_feature 1..20: note = Target: FXN; (-) strand; PAM type: NRG; PAM sequence: CAG
  source 1..20: mol_type = other DNA
ttgctctgttgctcaggctg

SEQ ID NO: 13140 - DNA, 20 bp, synthetic construct
  misc_feature 1..20: note = Description of Artificial Sequence: Synthetic oligonucleotide
  misc_feature 1..20: note = Target: FXN; (-) strand; PAM type: NRG; PAM sequence: AGG
  source 1..20: mol_type = other DNA
agggtcttgctctgttgctc

SEQ ID NO: 13141 - DNA, 20 bp, synthetic construct
  misc_feature 1..20: note = Description of Artificial Sequence: Synthetic oligonucleotide
  misc_feature 1..20: note = Target: FXN; (-) strand; PAM type: NRG; PAM sequence: CAG
  source 1..20: mol_type = other DNA
cagggtcttgctctgttgct

SEQ ID NO: 13142 - DNA, 20 bp, synthetic construct
  misc_feature 1..20: note = Description of Artificial Sequence: Synthetic oligonucleotide
  misc_feature 1..20: note = Target: FXN; (-) strand; PAM type: NRG; PAM sequence: GGG
  source 1..20: mol_type = other DNA
gtttgtttgtttttacaaca

SEQ ID NO: 13143 - DNA, 20 bp, synthetic construct
  misc_feature 1..20: note = Description of Artificial Sequence: Synthetic oligonucleotide
  misc_feature 1..20: note = Target: FXN; (-) strand; PAM type: NRG; PAM sequence: AGG
  source 1..20: mol_type = other DNA
tgtttgtttgtttttacaac

SEQ ID NO: 13144 - DNA, 20 bp, synthetic construct
  misc_feature 1..20: note = Description of Artificial Sequence: Synthetic oligonucleotide
  misc_feature 1..20: note = Target: FXN; (-) strand; PAM type: NRG; PAM sequence: CAG
  source 1..20: mol_type = other DNA
ttgtttgtttgtttttacaa

SEQ ID NO: 13145 - DNA, 20 bp, synthetic construct
  misc_feature 1..20: note = Description of Artificial Sequence: Synthetic oligonucleotide
  misc_feature 1..20: note = Target: FXN; (-) strand; PAM type: NRG; PAM sequence: CAG
  source 1..20: mol_type = other DNA
cactctcaggtatcagctgc

SEQ ID NO: 13146 - DNA, 20 bp, synthetic construct
  misc_feature 1..20: note = Description of Artificial Sequence: Synthetic oligonucleotide
  misc_feature 1..20: note = Target: FXN; (-) strand; PAM type: NRG; PAM sequence: CAG
  source 1..20: mol_type = other DNA
agatattcactctcaggtat

SEQ ID NO: 13147 - DNA, 20 bp, synthetic construct
  misc_feature 1..20: note = Description of Artificial Sequence: Synthetic oligonucleotide
  misc_feature 1..20: note = Target: FXN; (-) strand; PAM type: NRG; PAM sequence: AGG
  source 1..20: mol_type = other DNA
gataaaagatattcactctc

SEQ ID NO: 13148 - DNA, 20 bp, synthetic construct
  misc_feature 1..20: note = Description of Artificial Sequence: Synthetic oligonucleotide
  misc_feature 1..20: note = Target: FXN; (-) strand; PAM type: NRG; PAM sequence: CAG
  source 1..20: mol_type = other DNA
cgataaaagatattcactct

SEQ ID NO: 13149 - DNA, 20 bp, synthetic construct
  misc_feature 1..20: note = Description of Artificial Sequence: Synthetic oligonucleotide
  misc_feature 1..20: note = Target: FXN; (-) strand; PAM type: NRG; PAM sequence: AAG
  source 1..20: mol_type = other DNA
atcccattaaccagcgataa

SEQ ID NO: 13150 - DNA, 20 bp, synthetic construct
  misc_feature 1..20: note = Description of Artificial Sequence: Synthetic oligonucleotide
  misc_feature 1..20: note = Target: FXN; (-) strand; PAM type: NRG; PAM sequence: CAG
  source 1..20: mol_type = other DNA
attctctcaatcccattaac

SEQ ID NO: 13151 - DNA, 20 bp, synthetic construct
  misc_feature 1..20: note = Description of Artificial Sequence: Synthetic oligonucleotide
  misc_feature 1..20: note = Target: FXN; (-) strand; PAM type: NRG; PAM sequence: AAG
  source 1..20: mol_type = other DNA
actgttctttctataagatg

SEQ ID NO: 13152 - DNA, 20 bp, synthetic construct
  misc_feature 1..20: note = Description of Artificial Sequence: Synthetic oligonucleotide
  misc_feature 1..20: note = Target: FXN; (-) strand; PAM type: NRG; PAM sequence: AAG
  source 1..20: mol_type = other DNA
aaagacactgttctttctat

SEQ ID NO: 13153 - DNA, 20 bp, synthetic construct
  misc_feature 1..20: note = Description of Artificial Sequence: Synthetic oligonucleotide
  misc_feature 1..20: note = Target: FXN; (-) strand; PAM type: NRG; PAM sequence: AAG
  source 1..20: mol_type = other DNA
tccaggtctctgtgggtcca

SEQ ID NO: 13154 - DNA, 20 bp, synthetic construct
  misc_feature 1..20: note = Description of Artificial Sequence: Synthetic oligonucleotide
  misc_feature 1..20: note = Target: FXN; (-) strand; PAM type: NRG; PAM sequence: GGG
  source 1..20: mol_type = other DNA
tcttaaatccaggtctctgt

SEQ ID NO: 13155 - DNA, 20 bp, synthetic construct
  misc_feature 1..20: note = Description of Artificial Sequence: Synthetic oligonucleotide
  misc_feature 1..20: note = Target: FXN; (-) strand; PAM type: NRG; PAM sequence: TGG
  source 1..20: mol_type = other DNA
atcttaaatccaggtctctg

SEQ ID NO: 13156 - DNA, 20 bp, synthetic construct
  misc_feature 1..20: note = Description of Artificial Sequence: Synthetic oligonucleotide
  misc_feature 1..20: note = Target: FXN; (-) strand; PAM type: NRG; PAM sequence: AGG
  source 1..20: mol_type = other DNA
gcagagctaatcttaaatcc

SEQ ID NO: 13157 - DNA, 20 bp, synthetic construct
  misc_feature 1..20: note = Description of Artificial Sequence: Synthetic oligonucleotide
  misc_feature 1..20: note = Target: FXN; (-) strand; PAM type: NRG; PAM sequence: CAG
  source 1..20: mol_type = other DNA
ggcagagctaatcttaaatc

SEQ ID NO: 13158 - DNA, 20 bp, synthetic construct
  misc_feature 1..20: note = Description of Artificial Sequence: Synthetic oligonucleotide
  misc_feature 1..20: note = Target: FXN; (-) strand; PAM type: NRG; PAM sequence: GAG
  source 1..20: mol_type = other DNA
agagtactcagtaattggca

SEQ ID NO: 13159 - DNA, 20 bp, synthetic construct
  misc_feature 1..20: note = Description of Artificial Sequence: Synthetic oligonucleotide
  misc_feature 1..20: note = Target: FXN; (-) strand; PAM type: NRG; PAM sequence: CAG
  source 1..20: mol_type = other DNA
aaagagtactcagtaattgg

SEQ ID NO: 13160 - DNA, 20 bp, synthetic construct
  misc_feature 1..20: note = Description of Artificial Sequence: Synthetic oligonucleotide
  misc_feature 1..20: note = Target: FXN; (-) strand; PAM type: NRG; PAM sequence: TGG
  source 1..20: mol_type = other DNA
agtaaagagtactcagtaat

SEQ ID NO: 13161 - DNA, 20 bp, synthetic construct
  misc_feature 1..20: note = Description of Artificial Sequence: Synthetic oligonucleotide
  misc_feature 1..20: note = Target: FXN; (-) strand; PAM type: NRG; PAM sequence: CAG
  source 1..20: mol_type = other DNA
ggttcatagtaaagagtact

SEQ ID NO: 13162 - DNA, 20 bp, synthetic construct
  misc_feature 1..20: note = Description of Artificial Sequence: Synthetic oligonucleotide
  misc_feature 1..20: note = Target: FXN; (-) strand; PAM type: NRG; PAM sequence: GAG
  source 1..20: mol_type = other DNA
aaacagaggttcatagtaaa

SEQ ID NO: 13163 - DNA, 20 bp, synthetic construct
  misc_feature 1..20: note = Description of Artificial Sequence: Synthetic oligonucleotide
  misc_feature 1..20: note = Target: FXN; (-) strand; PAM type: NRG; PAM sequence: AAG
  source 1..20: mol_type = other DNA
gaaaacagaggttcatagta

SEQ ID NO: 13164 - DNA, 20 bp, synthetic construct
  misc_feature 1..20: note = Description of Artificial Sequence: Synthetic oligonucleotide
  misc_feature 1..20: note = Target: FXN; (-) strand; PAM type: NRG; PAM sequence: TAG
  source 1..20: mol_type = other DNA
atgaggaaaacagaggttca

SEQ ID NO: 13165 - DNA, 20 bp, synthetic construct
  misc_feature 1..20: note = Description of Artificial Sequence: Synthetic oligonucleotide
  misc_feature 1..20: note = Target: FXN; (-) strand; PAM type: NRG; PAM sequence: AGG
  source 1..20: mol_type = other DNA
ttcacagatgaggaaaacag

SEQ ID NO: 13166 - DNA, 20 bp, synthetic construct
  misc_feature 1..20: note = Description of Artificial Sequence: Synthetic oligonucleotide
  misc_feature 1..20: note = Target: FXN; (-) strand; PAM type: NRG; PAM sequence: GAG
  source 1..20: mol_type = other DNA
tttcacagatgaggaaaaca

SEQ ID NO: 13167 - DNA, 20 bp, synthetic construct
  misc_feature 1..20: note = Description of Artificial Sequence: Synthetic oligonucleotide
  misc_feature 1..20: note = Target: FXN; (-) strand; PAM type: NRG; PAM sequence: CAG
  source 1..20: mol_type = other DNA
agtttcacagatgaggaaaa

SEQ ID NO: 13168 - DNA, 20 bp, synthetic construct
  misc_feature 1..20: note = Description of Artificial Sequence: Synthetic oligonucleotide
  misc_feature 1..20: note = Target: FXN; (-) strand; PAM type: NRG; PAM sequence: AGG
  source 1..20: mol_type = other DNA
ttattccagtttcacagatg

SEQ ID NO: 13169 - DNA, 20 bp, synthetic construct
  misc_feature 1..20: note = Description of Artificial Sequence: Synthetic oligonucleotide
  misc_feature 1..20: note = Target: FXN; (-) strand; PAM type: NRG; PAM sequence: GAG
  source 1..20: mol_type = other DNA
attattccagtttcacagat

SEQ ID NO: 13170 - DNA, 20 bp, synthetic construct
  misc_feature 1..20: note = Description of Artificial Sequence: Synthetic oligonucleotide
  misc_feature 1..20: note = Target: FXN; (-) strand; PAM type: NRG; PAM sequence: CAG
  source 1..20: mol_type = other DNA
gattcattattccagtttca

SEQ ID NO: 13171 - DNA, 20 bp, synthetic construct
  misc_feature 1..20: note = Description of Artificial Sequence: Synthetic oligonucleotide
  misc_feature 1..20: note = Target: FXN; (-) strand; PAM type: NRG; PAM sequence: CAG
  source 1..20: mol_type = other DNA
ggcggtaggattcattattc

SEQ ID NO: 13172 - DNA, 20 bp, synthetic construct
  misc_feature 1..20: note = Description of Artificial Sequence: Synthetic oligonucleotide
  misc_feature 1..20: note = Target: FXN; (-) strand; PAM type: NRG; PAM sequence: AGG
  source 1..20: mol_type = other DNA
tgactacaattgttggcggt

SEQ ID NO: 13173 - DNA, 20 bp, synthetic construct
  misc_feature 1..20: note = Description of Artificial Sequence: Synthetic oligonucleotide
  misc_feature 1..20: note = Target: FXN; (-) strand; PAM type: NRG; PAM sequence: TAG
  source 1..20: mol_type = other DNA
ttgactacaattgttggcgg

SEQ ID NO: 13174 - DNA, 20 bp, synthetic construct
  misc_feature 1..20: note = Description of Artificial Sequence: Synthetic oligonucleotide
  misc_feature 1..20: note = Target: FXN; (-) strand; PAM type: NRG; PAM sequence: CGG
  source 1..20: mol_type = other DNA
aacttgactacaattgttgg

SEQ ID NO: 13175 - DNA, 20 bp, synthetic construct
  misc_feature 1..20: note = Description of Artificial Sequence: Synthetic oligonucleotide
  misc_feature 1..20: note = Target: FXN; (-) strand; PAM type: NRG; PAM sequence: TGG
  source 1..20: mol_type = other DNA
tccaacttgactacaattgt

SEQ ID NO: 13176 - DNA, 20 bp, synthetic construct
  misc_feature 1..20: note = Description of Artificial Sequence: Synthetic oligonucleotide
  misc_feature 1..20: note = Target: FXN; (-) strand; PAM type: NRG; PAM sequence: TGG
  source 1..20: mol_type = other DNA
actgtgccaggcttggtgtt

SEQ ID NO: 13177 - DNA, 20 bp, synthetic construct
  misc_feature 1..20: note = Description of Artificial Sequence: Synthetic oligonucleotide
  misc_feature 1..20: note = Target: FXN; (-) strand; PAM type: NRG; PAM sequence: TGG
  source 1..20: mol_type = other DNA
ggttcctactgtgccaggct

SEQ ID NO: 13178 - DNA, 20 bp, synthetic construct
  misc_feature 1..20: note = Description of Artificial Sequence: Synthetic oligonucleotide
  misc_feature 1..20: note = Target: FXN; (-) strand; PAM type: NRG; PAM sequence: AGG
  source 1..20: mol_type = other DNA
tactcggttcctactgtgcc

SEQ ID NO: 13179 - DNA, 20 bp, synthetic construct
  misc_feature 1..20: note = Description of Artificial Sequence: Synthetic oligonucleotide
  misc_feature 1..20: note = Target: FXN; (-) strand; PAM type: NRG; PAM sequence: CAG
  source 1..20: mol_type = other DNA
ttactcggttcctactgtgc

SEQ ID NO: 13180 - DNA, 20 bp, synthetic construct
  misc_feature 1..20: note = Description of Artificial Sequence: Synthetic oligonucleotide
  misc_feature 1..20: note = Target: FXN; (-) strand; PAM type: NRG; PAM sequence: CGG
  source 1..20: mol_type = other DNA
aatattaaccactatttact

SEQ ID NO: 13181 - DNA, 20 bp, synthetic construct
  misc_feature 1..20: note = Description of Artificial Sequence: Synthetic oligonucleotide
  misc_feature 1..20: note = Target: FXN; (-) strand; PAM type: NRG; PAM sequence: CAG
  source 1..20: mol_type = other DNA
tgatggagacgtcagcaatg

SEQ ID NO: 13182 - DNA, 20 bp, synthetic construct
  misc_feature 1..20: note = Description of Artificial Sequence: Synthetic oligonucleotide
  misc_feature 1..20: note = Target: FXN; (-) strand; PAM type: NRG; PAM sequence: CAG
  source 1..20: mol_type = other DNA
tatagaaatgatggagacgt

SEQ ID NO: 13183 - DNA, 20 bp, synthetic construct
  misc_feature 1..20: note = Description of Artificial Sequence: Synthetic oligonucleotide
  misc_feature 1..20: note = Target: FXN; (-) strand; PAM type: NRG; PAM sequence: GAG
  source 1..20: mol_type = other DNA
acaaatgtatagaaatgatg

SEQ ID NO: 13184 - DNA, 20 bp, synthetic construct
  misc_feature 1..20: note = Description of Artificial Sequence: Synthetic oligonucleotide
  misc_feature 1..20: note = Target: FXN; (-) strand; PAM type: NRG; PAM sequence: TGG
  source 1..20: mol_type = other DNA
aaacaaatgtatagaaatga

SEQ ID NO: 13185 - DNA, 20 bp, synthetic construct
  misc_feature 1..20: note = Description of Artificial Sequence: Synthetic oligonucleotide
  misc_feature 1..20: note = Target: FXN; (-) strand; PAM type: NRG; PAM sequence: TAG
  source 1..20: mol_type = other DNA
ctgattcaaaaacaaatgta

SEQ ID NO: 13186 - DNA, 20 bp, synthetic construct
  misc_feature 1..20: note = Description of Artificial Sequence: Synthetic oligonucleotide
  misc_feature 1..20: note = Target: FXN; (-) strand; PAM type: NRG; PAM sequence: GGG
  source 1..20: mol_type = other DNA
atgggacaaggggcactact

SEQ ID NO: 13187 - DNA, 20 bp, synthetic construct
  misc_feature 1..20: note = Description of Artificial Sequence: Synthetic oligonucleotide
  misc_feature 1..20: note = Target: FXN; (-) strand; PAM type: NRG; PAM sequence: TGG
  source 1..20: mol_type = other DNA
aatgggacaaggggcactac

SEQ ID NO: 13188 - DNA, 20 bp, synthetic construct
  misc_feature 1..20: note = Description of Artificial Sequence: Synthetic oligonucleotide
  misc_feature 1..20: note = Target: FXN; (-) strand; PAM type: NRG; PAM sequence: GGG
  source 1..20: mol_type = other DNA
actgataggaatgggacaag

SEQ ID NO: 13189 - DNA, 20 bp, synthetic construct
  misc_feature 1..20: note = Description of Artificial Sequence: Synthetic oligonucleotide
  misc_feature 1..20: note = Target: FXN; (-) strand; PAM type: NRG; PAM sequence: GGG
  source 1..20: mol_type = other DNA
aactgataggaatgggacaa

SEQ ID NO: 13190 - DNA, 20 bp, synthetic construct
  misc_feature 1..20: note = Description of Artificial Sequence: Synthetic oligonucleotide
  misc_feature 1..20: note = Target: FXN; (-) strand; PAM type: NRG; PAM sequence: AGG
  source 1..20: mol_type = other DNA
taactgataggaatgggaca

SEQ ID NO: 13191 - DNA, 20 bp, synthetic construct
  misc_feature 1..20: note = Description of Artificial Sequence: Synthetic oligonucleotide
  misc_feature 1..20: note = Target: FXN; (-) strand; PAM type: NRG; PAM sequence: AAG
  source 1..20: mol_type = other DNA
ataactgataggaatgggac

SEQ ID NO: 13192 - DNA, 20 bp, synthetic construct
  misc_feature 1..20: note = Description of Artificial Sequence: Synthetic oligonucleotide
  misc_feature 1..20: note = Target: FXN; (-) strand; PAM type: NRG; PAM sequence: GGG
  source 1..20: mol_type = other DNA
ataatataactgataggaat

SEQ ID NO: 13193 - DNA, 20 bp, synthetic construct
  misc_feature 1..20: note = Description of Artificial Sequence: Synthetic oligonucleotide
  misc_feature 1..20: note = Target: FXN; (-) strand; PAM type: NRG; PAM sequence: TGG
  source 1..20: mol_type = other DNA
aataatataactgataggaa

SEQ ID NO: 13194 - DNA, 20 bp, synthetic construct
  misc_feature 1..20: note = Description of Artificial Sequence: Synthetic oligonucleotide
  misc_feature 1..20: note = Target: FXN; (-) strand; PAM type: NRG; PAM sequence: AGG
  source 1..20: mol_type = other DNA
acaataataatataactgat

SEQ ID NO: 13195 - DNA, 20 bp, synthetic construct
  misc_feature 1..20: note = Description of Artificial Sequence: Synthetic oligonucleotide
  misc_feature 1..20: note = Target: FXN; (-) strand; PAM type: NRG; PAM sequence: TAG
  source 1..20: mol_type = other DNA
aacaataataatataactga

SEQ ID NO: 13196 - DNA, 20 bp, synthetic construct
  misc_feature 1..20: note = Description of Artificial Sequence: Synthetic oligonucleotide
  misc_feature 1..20: note = Target: FXN; (-) strand; PAM type: NRG; PAM sequence: TAG
  source 1..20: mol_type = other DNA
gttattgaaattccagaggg

SEQ ID NO: 13197 - DNA, 20 bp, synthetic construct
  misc_feature 1..20: note = Description of Artificial Sequence: Synthetic oligonucleotide
  misc_feature 1..20: note = Target: FXN; (-) strand; PAM type: NRG; PAM sequence: GGG
  source 1..20: mol_type = other DNA
agagttattgaaattccaga

SEQ ID NO: 13198 - DNA, 20 bp, synthetic construct
  misc_feature 1..20: note = Description of Artificial Sequence: Synthetic oligonucleotide
  misc_feature 1..20: note = Target: FXN; (-) strand; PAM type: NRG; PAM sequence: AGG
  source 1..20: mol_type = other DNA
aagagttattgaaattccag

SEQ ID NO: 13199 - DNA, 20 bp, synthetic construct
  misc_feature 1..20: note = Description of Artificial Sequence: Synthetic oligonucleotide
  misc_feature 1..20: note = Target: FXN; (-) strand; PAM type: NRG; PAM sequence: GAG
  source 1..20: mol_type = other DNA
aaagagttattgaaattcca

SEQ ID NO: 13200 - DNA, 20 bp, synthetic construct
  misc_feature 1..20: note = Description of Artificial Sequence: Synthetic oligonucleotide
  misc_feature 1..20: note = Target: FXN; (-) strand; PAM type: NRG; PAM sequence: CAG
  source 1..20: mol_type = other DNA
acaaagagttattgaaattc

SEQ ID NO: 13201 - DNA, 20 bp, synthetic construct
  misc_feature 1..20: note = Description of Artificial Sequence: Synthetic oligonucleotide
  misc_feature 1..20: note = Target: FXN; (-) strand; PAM type: NRG; PAM sequence: GAG
  source 1..20: mol_type = other DNA
caaaaaacccaaaaaacaaa

SEQ ID NO: 13202 - DNA, 20 bp, synthetic construct
  misc_feature 1..20: note = Description of Artificial Sequence: Synthetic oligonucleotide
  misc_feature 1..20: note = Target: FXN; (-) strand; PAM type: NRG; PAM sequence: AAG
  source 1..20: mol_type = other DNA
aacaaaaaacccaaaaaaca

SEQ ID NO: 13203 - DNA, 20 bp, synthetic construct
  misc_feature 1..20: note = Description of Artificial Sequence: Synthetic oligonucleotide
  misc_feature 1..20: note = Target: FXN; (-) strand; PAM type: NRG; PAM sequence: AAG
  source 1..20: mol_type = other DNA
gagatcctgtctcaaaagca

SEQ ID NO: 13204 - DNA, 20 bp, synthetic construct
  misc_feature 1..20: note = Description of Artificial Sequence: Synthetic oligonucleotide
  misc_feature 1..20: note = Target: FXN; (-) strand; PAM type: NRG; PAM sequence: AAG
  source 1..20: mol_type = other DNA
cgacagagatcctgtctcaa

SEQ ID NO: 13205 - DNA, 20 bp, synthetic construct
  misc_feature 1..20: note = Description of Artificial Sequence: Synthetic oligonucleotide
  misc_feature 1..20: note = Target: FXN; (-) strand; PAM type: NRG; PAM sequence: GAG
  source 1..20: mol_type = other DNA
acacaccagactgggcgaca

SEQ ID NO: 13206 - DNA, 20 bp, synthetic construct
  misc_feature 1..20: note = Description of Artificial Sequence: Synthetic oligonucleotide
  misc_feature 1..20: note = Target: FXN; (-) strand; PAM type: NRG; PAM sequence: CAG
  source 1..20: mol_type = other DNA
ctacacaccagactgggcga

SEQ ID NO: 13207 - DNA, 20 bp, synthetic construct
  misc_feature 1..20: note = Description of Artificial Sequence: Synthetic oligonucleotide
  misc_feature 1..20: note = Target: FXN; (-) strand; PAM type: NRG; PAM sequence: GGG
  source 1..20: mol_type = other DNA
acaccactacacaccagact

SEQ ID NO: 13208 - DNA, 20 bp, synthetic construct
  misc_feature 1..20: note = Description of Artificial Sequence: Synthetic oligonucleotide
  misc_feature 1..20: note = Target: FXN; (-) strand; PAM type: NRG; PAM sequence: TGG
  source 1..20: mol_type = other DNA
cacaccactacacaccagac

SEQ ID NO: 13209 - DNA, 20 bp, synthetic construct
  misc_feature 1..20: note = Description of Artificial Sequence: Synthetic oligonucleotide
  misc_feature 1..20: note = Target: FXN; (-) strand; PAM type: NRG; PAM sequence: CAG
  source 1..20: mol_type = other DNA
gagatcacaccactacacac

SEQ ID NO: 13210 - DNA, 20 bp, synthetic construct
  misc_feature 1..20: note = Description of Artificial Sequence: Synthetic oligonucleotide
  misc_feature 1..20: note = Target: FXN; (-) strand; PAM type: NRG; PAM sequence: GAG
  source 1..20: mol_type = other DNA
ggttgaggctgcagtgagct

SEQ ID NO: 13211 - DNA, 20 bp, synthetic construct
  misc_feature 1..20: note = Description of Artificial Sequence: Synthetic oligonucleotide
  misc_feature 1..20: note = Target: FXN; (-) strand; PAM type: NRG; PAM sequence: GAG
  source 1..20: mol_type = other DNA
caggaggttgaggctgcagt

SEQ ID NO: 13212 - DNA, 20 bp, synthetic construct
  misc_feature 1..20: note = Description of Artificial Sequence: Synthetic oligonucleotide
  misc_feature 1..20: note = Target: FXN; (-) strand; PAM type: NRG; PAM sequence: CAG
  source 1..20: mol_type = other DNA
agcccaggaggttgaggctg

SEQ ID NO: 13213 - DNA, 20 bp, synthetic construct
  misc_feature 1..20: note = Description of Artificial Sequence: Synthetic oligonucleotide
  misc_feature 1..20: note = Target: FXN; (-) strand; PAM type: NRG; PAM sequence: AGG
  source 1..20: mol_type = other DNA
cacctgagcccaggaggttg

SEQ ID NO: 13214 - DNA, 20 bp, synthetic construct
  misc_feature 1..20: note = Description of Artificial Sequence: Synthetic oligonucleotide
  misc_feature 1..20: note = Target: FXN; (-) strand; PAM type: NRG; PAM sequence: GAG
  source 1..20: mol_type = other DNA
tcacctgagcccaggaggtt

SEQ ID NO: 13215 - DNA, 20 bp, synthetic construct
  misc_feature 1..20: note = Description of Artificial Sequence: Synthetic oligonucleotide
  misc_feature 1..20: note = Target: FXN; (-) strand; PAM type: NRG; PAM sequence: AGG
  source 1..20: mol_type = other DNA
gaggatcacctgagcccagg

SEQ ID NO: 13216 - DNA, 20 bp, synthetic construct
  misc_feature 1..20: note = Description of Artificial Sequence: Synthetic oligonucleotide
  misc_feature 1..20: note = Target: FXN; (-) strand; PAM type: NRG; PAM sequence: GAG
  source 1..20: mol_type = other DNA
ggaggatcacctgagcccag

SEQ ID NO: 13217 - DNA, 20 bp, synthetic construct
  misc_feature 1..20: note = Description of Artificial Sequence: Synthetic oligonucleotide
  misc_feature 1..20: note = Target: FXN; (-) strand; PAM type: NRG; PAM sequence: AGG
  source 1..20: mol_type = other DNA
tgggaggatcacctgagccc

SEQ ID NO: 13218 - DNA, 20 bp, synthetic construct
  misc_feature 1..20: note = Description of Artificial Sequence: Synthetic oligonucleotide
  misc_feature 1..20: note = Target: FXN; (-) strand; PAM type: NRG; PAM sequence: CAG
  source 1..20: mol_type = other DNA
gtgggaggatcacctgagcc

SEQ ID NO: 13219 - DNA, 20 bp, synthetic construct
  misc_feature 1..20: note = Description of Artificial Sequence: Synthetic oligonucleotide
  misc_feature 1..20: note = Target: FXN; (-) strand; PAM type: NRG; PAM sequence: GAG
  source 1..20: mol_type = other DNA
ctgaagtgggaggatcacct

SEQ ID NO: 13220 - DNA, 20 bp, synthetic construct
  misc_feature 1..20: note = Description of Artificial Sequence: Synthetic oligonucleotide
  misc_feature 1..20: note = Target: FXN; (-) strand; PAM type: NRG; PAM sequence: AGG
  source 1..20: mol_type = other DNA
acttgggaggctgaagtggg

SEQ ID NO: 13221 - DNA, 20 bp, synthetic construct
  misc_feature 1..20: note = Description of Artificial Sequence: Synthetic oligonucleotide
  misc_feature 1..20: note = Target: FXN; (-) strand; PAM type: NRG; PAM sequence: GAG
  source 1..20: mol_type = other DNA
tacttgggaggctgaagtgg

SEQ ID NO: 13222 - DNA, 20 bp, synthetic construct
  misc_feature 1..20: note = Description of Artificial Sequence: Synthetic oligonucleotide
  misc_feature 1..20: note = Target: FXN; (-) strand; PAM type: NRG; PAM sequence: GGG
  source 1..20: mol_type = other DNA
gctacttgggaggctgaagt

SEQ ID NO: 13223 - DNA, 20 bp, synthetic construct
  misc_feature 1..20: note = Description of Artificial Sequence: Synthetic oligonucleotide
  misc_feature 1..20: note = Target: FXN; (-) strand; PAM type: NRG; PAM sequence: TGG
  source 1..20: mol_type = other DNA
agctacttgggaggctgaag

SEQ ID NO: 13224 - DNA, 20 bp, synthetic construct
  misc_feature 1..20: note = Description of Artificial Sequence: Synthetic oligonucleotide
  misc_feature 1..20: note = Target: FXN; (-) strand; PAM type: NRG; PAM sequence: AAG
  source 1..20: mol_type = other DNA
cccagctacttgggaggctg

SEQ ID NO: 13225 - DNA, 20 bp, synthetic construct
  misc_feature 1..20: note = Description of Artificial Sequence: Synthetic oligonucleotide
  misc_feature 1..20: note = Target: FXN; (-) strand; PAM type: NRG; PAM sequence: AGG
  source 1..20: mol_type = other DNA
tgtggtcccagctacttggg

SEQ ID NO: 13226 - DNA, 20 bp, synthetic construct
  misc_feature 1..20: note = Description of Artificial Sequence: Synthetic oligonucleotide
  misc_feature 1..20: note = Target: FXN; (-) strand; PAM type: NRG; PAM sequence: GAG
  source 1..20: mol_type = other DNA
ctgtggtcccagctacttgg

SEQ ID NO: 13227 - DNA, 20 bp, synthetic construct
  misc_feature 1..20: note = Description of Artificial Sequence: Synthetic oligonucleotide
  misc_feature 1..20: note = Target: FXN; (-) strand; PAM type: NRG; PAM sequence: GGG
  source 1..20: mol_type = other DNA
gcctgtggtcccagctactt

SEQ ID NO: 13228 - DNA, 20 bp, synthetic construct
  misc_feature 1..20: note = Description of Artificial Sequence: Synthetic oligonucleotide
  misc_feature 1..20: note = Target: FXN; (-) strand; PAM type: NRG; PAM sequence: TGG
  source 1..20: mol_type = other DNA
cgcctgtggtcccagctact

SEQ ID NO: 13229 - DNA, 20 bp, synthetic construct
  misc_feature 1..20: note = Description of Artificial Sequence: Synthetic oligonucleotide
  misc_feature 1..20: note = Target: FXN; (-) strand; PAM type: NRG; PAM sequence: CAG
  source 1..20: mol_type = other DNA
gtggcatgcgcctgtggtcc

SEQ ID NO: 13230 - DNA, 20 bp, synthetic construct
  misc_feature 1..20: note = Description of Artificial Sequence: Synthetic oligonucleotide
  misc_feature 1..20: note = Target: FXN; (-) strand; PAM type: NRG; PAM sequence: TGG
  source 1..20: mol_type = other DNA
agtgtggtggcatgcgcctg

SEQ ID NO: 13231 - DNA, 20 bp, synthetic construct
  misc_feature 1..20: note = Description of Artificial Sequence: Synthetic oligonucleotide
  misc_feature 1..20: note = Target: FXN; (-) strand; PAM type: NRG; PAM sequence: TGG
  source 1..20: mol_type = other DNA
caaaaattagccaagtgtgg

SEQ ID NO: 13232 - DNA, 20 bp, synthetic construct
  misc_feature 1..20: note = Description of Artificial Sequence: Synthetic oligonucleotide
  misc_feature 1..20: note = Target: FXN; (-) strand; PAM type: NRG; PAM sequence: TGG
  source 1..20: mol_type = other DNA
atgcaaaaattagccaagtg

SEQ ID NO: 13233 - DNA, 20 bp, synthetic construct
  misc_feature 1..20: note = Description of Artificial Sequence: Synthetic oligonucleotide
  misc_feature 1..20: note = Target: FXN; (-) strand; PAM type: NRG; PAM sequence: AAG
  source 1..20: mol_type = other DNA
taaaaatgcaaaaattagcc

SEQ ID NO: 13234 - DNA, 20 bp, synthetic construct
  misc_feature 1..20: note = Description of Artificial Sequence: Synthetic oligonucleotide
  misc_feature 1..20: note = Target: FXN; (-) strand; PAM type: NRG; PAM sequence: TAG
  source 1..20: mol_type = other DNA
tctactaaaaatgcaaaaat

SEQ ID NO: 13235 - DNA, 20 bp, synthetic construct
  misc_feature 1..20: note = Description of Artificial Sequence: Synthetic oligonucleotide
  misc_feature 1..20: note = Target: FXN; (-) strand; PAM type: NRG; PAM sequence: TGG
  source 1..20: mol_type = other DNA
ccagaccggcctaggcaata

SEQ ID NO: 13236 - DNA, 20 bp, synthetic construct
  misc_feature 1..20: note = Description of Artificial Sequence: Synthetic oligonucleotide
  misc_feature 1..20: note = Target: FXN; (-) strand; PAM type: NRG; PAM sequence: AGG
  source 1..20: mol_type = other DNA
cagaagttccagaccggcct

SEQ ID NO: 13237 - DNA, 20 bp, synthetic construct
  misc_feature 1..20: note = Description of Artificial Sequence: Synthetic oligonucleotide
  misc_feature 1..20: note = Target: FXN; (-) strand; PAM type: NRG; PAM sequence: TAG
  source 1..20: mol_type = other DNA
ccagaagttccagaccggcc

SEQ ID NO: 13238 - DNA, 20 bp, synthetic construct
  misc_feature 1..20: note = Description of Artificial Sequence: Synthetic oligonucleotide
  misc_feature 1..20: note = Target: FXN; (-) strand; PAM type: NRG; PAM sequence: CGG
  source 1..20: mol_type = other DNA
tgagcccagaagttccagac

SEQ ID NO: 13239 - DNA, 20 bp, synthetic construct
  misc_feature 1..20: note = Description of Artificial Sequence: Synthetic oligonucleotide
  misc_feature 1..20: note = Target: FXN; (-) strand; PAM type: NRG; PAM sequence: CAG
  source 1..20: mol_type = other DNA
tggcttgagcccagaagttc

SEQ ID NO: 13240 - DNA, 20 bp, synthetic construct
  misc_feature 1..20: note = Description of Artificial Sequence: Synthetic oligonucleotide
  misc_feature 1..20: note = Target: FXN; (-) strand; PAM type: NRG; PAM sequence: AAG
  source 1..20: mol_type = other DNA
ggcagatggcttgagcccag

SEQ ID NO: 13241 - DNA, 20 bp, synthetic construct
  misc_feature 1..20: note = Description of Artificial Sequence: Synthetic oligonucleotide
  misc_feature 1..20: note = Target: FXN; (-) strand; PAM type: NRG; PAM sequence: CAG
  source 1..20: mol_type = other DNA
gcaggcagatggcttgagcc

SEQ ID NO: 13242 - DNA, 20 bp, synthetic construct
  misc_feature 1..20: note = Description of Artificial Sequence: Synthetic oligonucleotide
  misc_feature 1..20: note = Target: FXN; (-) strand; PAM type: NRG; PAM sequence: GAG
  source 1..20: mol_type = other DNA
ccgaggcaggcagatggctt

SEQ ID NO: 13243 - DNA, 20 bp, synthetic construct
  misc_feature 1..20: note = Description of Artificial Sequence: Synthetic oligonucleotide
  misc_feature 1..20: note = Target: FXN; (-) strand; PAM type: NRG; PAM sequence: TGG
  source 1..20: mol_type = other DNA
gggaggccgaggcaggcaga

SEQ ID NO: 13244 - DNA, 20 bp, synthetic construct
  misc_feature 1..20: note = Description of Artificial Sequence: Synthetic oligonucleotide
  misc_feature 1..20: note = Target: FXN; (-) strand; PAM type: NRG; PAM sequence: CAG
  source 1..20: mol_type = other DNA
ctttgggaggccgaggcagg

SEQ ID NO: 13245 - DNA, 20 bp, synthetic construct
  misc_feature 1..20: note = Description of Artificial Sequence: Synthetic oligonucleotide
  misc_feature 1..20: note = Target: FXN; (-) strand; PAM type: NRG; PAM sequence: AGG
  source 1..20: mol_type = other DNA
gcactttgggaggccgaggc

SEQ ID NO: 13246 - DNA, 20 bp, synthetic construct
  misc_feature 1..20: note = Description of Artificial Sequence: Synthetic oligonucleotide
  misc_feature 1..20: note = Target: FXN; (-) strand; PAM type: NRG; PAM sequence: CAG
  source 1..20: mol_type = other DNA
agcactttgggaggccgagg

SEQ ID NO: 13247 - DNA, 20 bp, synthetic construct
  misc_feature 1..20: note = Description of Artificial Sequence: Synthetic oligonucleotide
  misc_feature 1..20: note = Target: FXN; (-) strand; PAM type: NRG; PAM sequence: AGG
  source 1..20: mol_type = other DNA
tccagcactttgggaggccg

SEQ ID NO: 13248 - DNA, 20 bp, synthetic construct
  misc_feature 1..20: note = Description of Artificial Sequence: Synthetic oligonucleotide
  misc_feature 1..20: note = Target: FXN; (-) strand; PAM type: NRG; PAM sequence: GAG
  source 1..20: mol_type = other DNA
ttccagcactttgggaggcc

SEQ ID NO: 13249 - DNA, 20 bp, synthetic construct
  misc_feature 1..20: note = Description of Artificial Sequence: Synthetic oligonucleotide
  misc_feature 1..20: note = Target: FXN; (-) strand; PAM type: NRG; PAM sequence: AGG
  source 1..20: mol_type = other DNA
tgaaattccagcactttggg

SEQ ID NO: 13250 - DNA, 20 bp, synthetic construct
  misc_feature 1..20: note = Description of Artificial Sequence: Synthetic oligonucleotide
  misc_feature 1..20: note = Target: FXN; (-) strand; PAM type: NRG; PAM sequence: GAG
  source 1..20: mol_type = other DNA
ctgaaattccagcactttgg

SEQ ID NO: 13251 - DNA, 20 bp, synthetic construct
  misc_feature 1..20: note = Description of Artificial Sequence: Synthetic oligonucleotide
  misc_feature 1..20: note = Target: FXN; (-) strand; PAM type: NRG; PAM sequence: GGG
  source 1..20: mol_type = other DNA
gcctgaaattccagcacttt

SEQ ID NO: 13252 - DNA, 20 bp, synthetic construct
  misc_feature 1..20: note = Description of Artificial Sequence: Synthetic oligonucleotide
  misc_feature 1..20: note = Target: FXN; (-) strand; PAM type: NRG; PAM sequence: TGG
  source 1..20: mol_type = other DNA
tgcctgaaattccagcactt

SEQ ID NO: 13253 - DNA, 20 bp, synthetic construct
  misc_feature 1..20: note = Description of Artificial Sequence: Synthetic oligonucleotide
  misc_feature 1..20: note = Target: FXN; (-) strand; PAM type: NRG; PAM sequence: CAG
  source 1..20: mol_type = other DNA
atggctcatgcctgaaattc

SEQ ID NO: 13254 - DNA, 20 bp, synthetic construct
  misc_feature 1..20: note = Description of Artificial Sequence: Synthetic oligonucleotide
  misc_feature 1..20: note = Target: FXN; (-) strand; PAM type: NRG; PAM sequence: TGG
  source 1..20: mol_type = other DNA
agagctatttaggccaggca

SEQ ID NO: 13255 - DNA, 20 bp, synthetic construct
  misc_feature 1..20: note = Description of Artificial Sequence: Synthetic oligonucleotide
  misc_feature 1..20: note = Target: FXN; (-) strand; PAM type: NRG; PAM sequence: AGG
  source 1..20: mol_type = other DNA
cacagagagctatttaggcc

SEQ ID NO: 13256 - DNA, 20 bp, synthetic construct
  misc_feature 1..20: note = Description of Artificial Sequence: Synthetic oligonucleotide
  misc_feature 1..20: note = Target: FXN; (-) strand; PAM type: NRG; PAM sequence: CAG
  source 1..20: mol_type = other DNA
acacagagagctatttaggc

SEQ ID NO: 13257 - DNA, 20 bp, synthetic construct
  misc_feature 1..20: note = Description of Artificial Sequence: Synthetic oligonucleotide
  misc_feature 1..20: note = Target: FXN; (-) strand; PAM type: NRG; PAM sequence: AGG
  source 1..20: mol_type = other DNA
gcaaacacagagagctattt

SEQ ID NO: 13258 - DNA, 20 bp, synthetic construct
  misc_feature 1..20: note = Description of Artificial Sequence: Synthetic oligonucleotide
  misc_feature 1..20: note = Target: FXN; (-) strand; PAM type: NRG; PAM sequence: TAG
  source 1..20: mol_type = other DNA
tgcaaacacagagagctatt

SEQ ID NO: 13259 - DNA, 20 bp, synthetic construct
  misc_feature 1..20: note = Description of Artificial Sequence: Synthetic oligonucleotide
  misc_feature 1..20: note = Target: FXN; (-) strand; PAM type: NRG; PAM sequence: GAG
  source 1..20: mol_type = other DNA
cacacttttgcaaacacaga

SEQ ID NO: 13260 - DNA, 20 bp, synthetic construct
  misc_feature 1..20: note = Description of Artificial Sequence: Synthetic oligonucleotide
  misc_feature 1..20: note = Target: FXN; (-) strand; PAM type: NRG; PAM sequence: GAG
  source 1..20: mol_type = other DNA
aacacacttttgcaaacaca

SEQ ID NO: 13261 - DNA, 20 bp, synthetic construct
  misc_feature 1..20: note = Description of Artificial Sequence: Synthetic oligonucleotide
  misc_feature 1..20: note = Target: FXN; (-) strand; PAM type: NRG; PAM sequence: CAG
  source 1..20: mol_type = other DNA
ataacacacttttgcaaaca

SEQ ID NO: 13262 - DNA, 20 bp, synthetic construct
  misc_feature 1..20: note = Description of Artificial Sequence: Synthetic oligonucleotide
  misc_feature 1..20: note = Target: FXN; (-) strand; PAM type: NRG; PAM sequence: AGG
  source 1..20: mol_type = other DNA
agagcctccatccaatcgag

SEQ ID NO: 13263 - DNA, 20 bp, synthetic construct
  misc_feature 1..20: note = Description of Artificial Sequence: Synthetic oligonucleotide
  misc_feature 1..20: note = Target: FXN; (-) strand; PAM type: NRG; PAM sequence: GAG
  source 1..20: mol_type = other DNA
tagagcctccatccaatcga

SEQ ID NO: 13264 - DNA, 20 bp, synthetic construct
  misc_feature 1..20: note = Description of Artificial Sequence: Synthetic oligonucleotide
  misc_feature 1..20: note = Target: FXN; (-) strand; PAM type: NRG; PAM sequence: GAG
  source 1..20: mol_type = other DNA
tctagagcctccatccaatc

SEQ ID NO: 13265 - DNA, 20 bp, synthetic construct
  misc_feature 1..20: note = Description of Artificial Sequence: Synthetic oligonucleotide
  misc_feature 1..20: note = Target: FXN; (-) strand; PAM type: NRG; PAM sequence: GAG
  source 1..20: mol_type = other DNA
gcctttttctgtgcattcta

SEQ ID NO: 13266 - DNA, 20 bp, synthetic construct
  misc_feature 1..20: note = Description of Artificial Sequence: Synthetic oligonucleotide
  misc_feature 1..20: note = Target: FXN; (-) strand; PAM type: NRG; PAM sequence: TAG
  source 1..20: mol_type = other DNA
cagcctttttctgtgcattc

SEQ ID NO: 13267 - DNA, 20 bp, synthetic construct
  misc_feature 1..20: note = Description of Artificial Sequence: Synthetic oligonucleotide
  misc_feature 1..20: note = Target: FXN; (-) strand; PAM type: NRG; PAM sequence: CAG
  source 1..20: mol_type = other DNA
cttgcagagatacacggtgg

SEQ ID NO: 13268 - DNA, 20 bp, synthetic construct
  misc_feature 1..20: note = Description of Artificial Sequence: Synthetic oligonucleotide
  misc_feature 1..20: note = Target: FXN; (-) strand; PAM type: NRG; PAM sequence: TGG
  source 1..20: mol_type = other DNA
tgacttgcagagatacacgg

SEQ ID NO: 13269 - DNA, 20 bp, synthetic construct
  misc_feature 1..20: note = Description of Artificial Sequence: Synthetic oligonucleotide
  misc_feature 1..20: note = Target: FXN; (-) strand; PAM type: NRG; PAM sequence: CGG
  source 1..20: mol_type = other DNA
gcatgacttgcagagataca

SEQ ID NO: 13270 - DNA, 20 bp, synthetic construct
  misc_feature 1..20: note = Description of Artificial Sequence: Synthetic oligonucleotide
  misc_feature 1..20: note = Target: FXN; (-) strand; PAM type: NRG; PAM sequence: GAG
  source 1..20: mol_type = other DNA
catcttgtgcatgacttgca

SEQ ID NO: 13271 - DNA, 20 bp, synthetic construct
  misc_feature 1..20: note = Description of Artificial Sequence: Synthetic oligonucleotide
  misc_feature 1..20: note = Target: FXN; (-) strand; PAM type: NRG; PAM sequence: CAG
  source 1..20: mol_type = other DNA
cccatcttgtgcatgacttg

SEQ ID NO: 13272 - DNA, 20 bp, synthetic construct
  misc_feature 1..20: note = Description of Artificial Sequence: Synthetic oligonucleotide
  misc_feature 1..20: note = Target: FXN; (-) strand; PAM type: NRG; PAM sequence: AAG
  source 1..20: mol_type = other DNA
ttgaactggtaagcaggggg

SEQ ID NO: 13273 - DNA, 20 bp, synthetic construct
  misc_feature 1..20: note = Description of Artificial Sequence: Synthetic oligonucleotide
  misc_feature 1..20: note = Target: FXN; (-) strand; PAM type: NRG; PAM sequence: GGG
  source 1..20: mol_type = other DNA
tatttgaactggtaagcagg

SEQ ID NO: 13274 - DNA, 20 bp, synthetic construct
  misc_feature 1..20: note = Description of Artificial Sequence: Synthetic oligonucleotide
  misc_feature 1..20: note = Target: FXN; (-) strand; PAM type: NRG; PAM sequence: GGG
  source 1..20: mol_type = other DNA
gtatttgaactggtaagcag

SEQ ID NO: 13275 - DNA, 20 bp, synthetic construct
  misc_feature 1..20: note = Description of Artificial Sequence: Synthetic oligonucleotide
  misc_feature 1..20: note = Target: FXN; (-) strand; PAM type: NRG; PAM sequence: GGG
  source 1..20: mol_type = other DNA
tgtatttgaactggtaagca

SEQ ID NO: 13276 - DNA, 20 bp, synthetic construct
  misc_feature 1..20: note = Description of Artificial Sequence: Synthetic oligonucleotide
  misc_feature 1..20: note = Target: FXN; (-) strand; PAM type: NRG; PAM sequence: AGG
  source 1..20: mol_type = other DNA
ctgtatttgaactggtaagc

SEQ ID NO: 13277 - DNA, 20 bp, synthetic construct
  misc_feature 1..20: note = Description of Artificial Sequence: Synthetic oligonucleotide
  misc_feature 1..20: note = Target: FXN; (-) strand; PAM type: NRG; PAM sequence: CAG
  source 1..20: mol_type = other DNA
tctgtatttgaactggtaag

SEQ ID NO: 13278 - DNA, 20 bp, synthetic construct
  misc_feature 1..20: note = Description of Artificial Sequence: Synthetic oligonucleotide
  misc_feature 1..20: note = Target: FXN; (-) strand; PAM type: NRG; PAM sequence: AAG
  source 1..20: mol_type = other DNA
ttctctgtatttgaactggt

SEQ ID NO: 13279 - DNA, 20 bp, synthetic construct
  misc_feature 1..20: note = Description of Artificial Sequence: Synthetic oligonucleotide
  misc_feature 1..20: note = Target: FXN; (-) strand; PAM type: NRG; PAM sequence: TGG
  source 1..20: mol_type = other DNA
ctagttctctgtatttgaac

SEQ ID NO: 13280 - DNA, 20 bp, synthetic construct
  misc_feature 1..20: note = Description of Artificial Sequence: Synthetic oligonucleotide
  misc_feature 1..20: note = Target: FXN; (-) strand; PAM type: NRG; PAM sequence: TAG
  source 1..20: mol_type = other DNA
gaaagaaacagctacagggc

SEQ ID NO: 13281 - DNA, 20 bp, synthetic construct
  misc_feature 1..20: note = Description of Artificial Sequence: Synthetic oligonucleotide
  misc_feature 1..20: note = Target: FXN; (-) strand; PAM type: NRG; PAM sequence: GGG
  source 1..20: mol_type = other DNA
atatgaaagaaacagctaca

SEQ ID NO: 13282 - DNA, 20 bp, synthetic construct
  misc_feature 1..20: note = Description of Artificial Sequence: Synthetic oligonucleotide
  misc_feature 1..20: note = Target: FXN; (-) strand; PAM type: NRG; PAM sequence: AGG
  source 1..20: mol_type = other DNA
gatatgaaagaaacagctac

SEQ ID NO: 13283 - DNA, 20 bp, synthetic construct
  misc_feature 1..20: note = Description of Artificial Sequence: Synthetic oligonucleotide
  misc_feature 1..20: note = Target: FXN; (-) strand; PAM type: NRG; PAM sequence: CAG
  source 1..20: mol_type = other DNA
agatatgaaagaaacagcta

SEQ ID NO: 13284 - DNA, 20 bp, synthetic construct
  misc_feature 1..20: note = Description of Artificial Sequence: Synthetic oligonucleotide
  misc_feature 1..20: note = Target: FXN; (-) strand; PAM type: NRG; PAM sequence: CAG
  source 1..20: mol_type = other DNA
tgggtgagatatgaaagaaa

SEQ ID NO: 13285 - DNA, 20 bp, synthetic construct
  misc_feature 1..20: note = Description of Artificial Sequence: Synthetic oligonucleotide
  misc_feature 1..20: note = Target: FXN; (-) strand; PAM type: NRG; PAM sequence: AAG
  source 1..20: mol_type = other DNA
ttagaatgggtgagatatga

SEQ ID NO: 13286 - DNA, 20 bp, synthetic construct
  misc_feature 1..20: note = Description of Artificial Sequence: Synthetic oligonucleotide
  misc_feature 1..20: note = Target: FXN; (-) strand; PAM type: NRG; PAM sequence: GAG
  source 1..20: mol_type = other DNA
gtggtctctttagaatgggt

SEQ ID NO: 13287 - DNA, 20 bp, synthetic construct
  misc_feature 1..20: note = Description of Artificial Sequence: Synthetic oligonucleotide
  misc_feature 1..20: note = Target: FXN; (-) strand; PAM type: NRG; PAM sequence: GGG
  source 1..20: mol_type = other DNA
gcctgtggtctctttagaat

SEQ ID NO: 13288 - DNA, 20 bp, synthetic construct
  misc_feature 1..20: note = Description of Artificial Sequence: Synthetic oligonucleotide
  misc_feature 1..20: note = Target: FXN; (-) strand; PAM type: NRG; PAM sequence: TGG
  source 1..20: mol_type = other DNA
ggcctgtggtctctttagaa

SEQ ID NO: 13289 - DNA, 20 bp, synthetic construct
  misc_feature 1..20: note = Description of Artificial Sequence: Synthetic oligonucleotide
  misc_feature 1..20: note = Target: FXN; (-) strand; PAM type: NRG; PAM sequence: TAG
  source 1..20: mol_type = other DNA
tctaaggcctgtggtctctt

SEQ ID NO: 13290 - DNA, 20 bp, synthetic construct
  misc_feature 1..20: note = Description of Artificial Sequence: Synthetic oligonucleotide
  misc_feature 1..20: note = Target: FXN; (-) strand; PAM type: NRG; PAM sequence: TGG
  source 1..20: mol_type = other DNA
tcctttacttctaaggcctg

SEQ ID NO: 13291 - DNA, 20 bp, synthetic construct
  misc_feature 1..20: note = Description of Artificial Sequence: Synthetic oligonucleotide
  misc_feature 1..20: note = Target: FXN; (-) strand; PAM type: NRG; PAM sequence: AGG
  source 1..20: mol_type = other DNA
aaaagagtcctttacttcta

SEQ ID NO: 13292 - DNA, 20 bp, synthetic construct
  misc_feature 1..20: note = Description of Artificial Sequence: Synthetic oligonucleotide
  misc_feature 1..20: note = Target: FXN; (-) strand; PAM type: NRG; PAM sequence: AAG
  source 1..20: mol_type = other DNA
caaaagagtcctttacttct

SEQ ID NO: 13293 - DNA, 20 bp, synthetic construct
  misc_feature 1..20: note = Description of Artificial Sequence: Synthetic oligonucleotide
  misc_feature 1..20: note = Target: FXN; (-) strand; PAM type: NRG; PAM sequence: GAG
  source 1..20: mol_type = other DNA
aaaacactctttcaacaaaa

SEQ ID NO: 13294 - DNA, 20 bp, synthetic construct
  misc_feature 1..20: note = Description of Artificial Sequence: Synthetic oligonucleotide
  misc_feature 1..20: note = Target: FXN; (-) strand; PAM type: NRG; PAM sequence: AAG
  source 1..20: mol_type = other DNA
tgaaaacactctttcaacaa

SEQ ID NO: 13295 - DNA, 20 bp, synthetic construct
  misc_feature 1..20: note = Description of Artificial Sequence: Synthetic oligonucleotide
  misc_feature 1..20: note = Target: FXN; (-) strand; PAM type: NRG; PAM sequence: TGG
  source 1..20: mol_type = other DNA
gaattcttcaaaagactagt

SEQ ID NO: 13296 - DNA, 20 bp, synthetic construct
  misc_feature 1..20: note = Description of Artificial Sequence: Synthetic oligonucleotide
  misc_feature 1..20: note = Target: FXN; (-) strand; PAM type: NRG; PAM sequence: TAG
  source 1..20: mol_type = other DNA
ccttgaattcttcaaaagac

SEQ ID NO: 13297 - DNA, 20 bp, synthetic construct
  misc_feature 1..20: note = Description of Artificial Sequence: Synthetic oligonucleotide
  misc_feature 1..20: note = Target: FXN; (-) strand; PAM type: NRG; PAM sequence: AAG
  source 1..20: mol_type = other DNA
aagagccttgaattcttcaa

SEQ ID NO: 13298 - DNA, 20 bp, synthetic construct
  misc_feature 1..20: note = Description of Artificial Sequence: Synthetic oligonucleotide
  misc_feature 1..20: note = Target: FXN; (-) strand; PAM type: NRG; PAM sequence: GAG
  source 1..20: mol_type = other DNA
aggctttatttttctctaaa

SEQ ID NO: 13299 - DNA, 20 bp, synthetic construct
  misc_feature 1..20: note = Description of Artificial Sequence: Synthetic oligonucleotide
  misc_feature 1..20: note = Target: FXN; (-) strand; PAM type: NRG; PAM sequence: AAG
  source 1..20: mol_type = other DNA
caaggctttatttttctcta

SEQ ID NO: 13300 - DNA, 20 bp, synthetic construct
  misc_feature 1..20: note = Description of Artificial Sequence: Synthetic oligonucleotide
  misc_feature 1..20: note = Target: FXN; (-) strand; PAM type: NRG; PAM sequence: AGG
  source 1..20: mol_type = other DNA
gcttctcagatactcctcca

SEQ ID NO: 13301 - DNA, 20 bp, synthetic construct
  misc_feature 1..20: note = Description of Artificial Sequence: Synthetic oligonucleotide
  misc_feature 1..20: note = Target: FXN; (-) strand; PAM type: NRG; PAM sequence: AAG
  source 1..20: mol_type = other DNA
agcttctcagatactcctcc

SEQ ID NO: 13302 - DNA, 20 bp, synthetic construct
  misc_feature 1..20: note = Description of Artificial Sequence: Synthetic oligonucleotide
  misc_feature 1..20: note = Target: FXN; (-) strand; PAM type: NRG; PAM sequence: CAG
  source 1..20: mol_type = other DNA
cacgcatctaacaagcttct

SEQ ID NO: 13303 - DNA, 20 bp, synthetic construct
  misc_feature 1..20: note = Description of Artificial Sequence: Synthetic oligonucleotide
  misc_feature 1..20: note = Target: FXN; (-) strand; PAM type: NRG; PAM sequence: AAG
  source 1..20: mol_type = other DNA
actcttcccacgcatctaac

SEQ ID NO: 13304 - DNA, 20 bp, synthetic construct
  misc_feature 1..20: note = Description of Artificial Sequence: Synthetic oligonucleotide
  misc_feature 1..20: note = Target: FXN; (-) strand; PAM type: NRG; PAM sequence: CAG
  source 1..20: mol_type = other DNA
cagatgaagttttttatttc

SEQ ID NO: 13305 - DNA, 20 bp, synthetic construct
  misc_feature 1..20: note = Description of Artificial Sequence: Synthetic oligonucleotide
  misc_feature 1..20: note = Target: FXN; (-) strand; PAM type: NRG; PAM sequence: AAG
  source 1..20: mol_type = other DNA
gaaggcagaaactccagatg

SEQ ID NO: 13306 - DNA, 20 bp, synthetic construct
  misc_feature 1..20: note = Description of Artificial Sequence: Synthetic oligonucleotide
  misc_feature 1..20: note = Target: FXN; (-) strand; PAM type: NRG; PAM sequence: CAG
  source 1..20: mol_type = other DNA
ttggtagaaggcagaaactc

SEQ ID NO: 13307 - DNA, 20 bp, synthetic construct
  misc_feature 1..20: note = Description of Artificial Sequence: Synthetic oligonucleotide
  misc_feature 1..20: note = Target: FXN; (-) strand; PAM type: NRG; PAM sequence: CAG
  source 1..20: mol_type = other DNA
tcagctctgttggtagaagg

SEQ ID NO: 13308 - DNA, 20 bp, synthetic construct
  misc_feature 1..20: note = Description of Artificial Sequence: Synthetic oligonucleotide
  misc_feature 1..20: note = Target: FXN; (-) strand; PAM type: NRG; PAM sequence: AGG
  source 1..20: mol_type = other DNA
gcttcagctctgttggtaga

SEQ ID NO: 13309 - DNA, 20 bp, synthetic construct
  misc_feature 1..20: note = Description of Artificial Sequence: Synthetic oligonucleotide
  misc_feature 1..20: note = Target: FXN; (-) strand; PAM type: NRG; PAM sequence: AAG
  source 1..20: mol_type = other DNA
agcttcagctctgttggtag

SEQ ID NO: 13310 - DNA, 20 bp, synthetic construct
  misc_feature 1..20: note = Description of Artificial Sequence: Synthetic oligonucleotide
  misc_feature 1..20: note = Target: FXN; (-) strand; PAM type: NRG; PAM sequence: TAG
  source 1..20: mol_type = other DNA
attagcttcagctctgttgg

SEQ ID NO: 13311 - DNA, 20 bp, synthetic construct
  misc_feature 1..20: note = Description of Artificial Sequence: Synthetic oligonucleotide
  misc_feature 1..20: note = Target: FXN; (-) strand; PAM type: NRG; PAM sequence: TGG
  source 1..20: mol_type = other DNA
agcattagcttcagctctgt

SEQ ID NO: 13312 - DNA, 20 bp, synthetic construct
  misc_feature 1..20: note = Description of Artificial Sequence: Synthetic oligonucleotide
  misc_feature 1..20: note = Target: FXN; (-) strand; PAM type: NRG; PAM sequence: CAG
  source 1..20: mol_type = other DNA
tcttaggagagcattagctt

SEQ ID NO: 13313 - DNA, 20 bp, synthetic construct
  misc_feature 1..20: note = Description of Artificial Sequence: Synthetic oligonucleotide
  misc_feature 1..20: note = Target: FXN; (-) strand; PAM type: NRG; PAM sequence: TAG
  source 1..20: mol_type = other DNA
tgcttgtcttaggagagcat

SEQ ID NO: 13314 - DNA, 20 bp, synthetic construct
  misc_feature 1..20: note = Description of Artificial Sequence: Synthetic oligonucleotide
  misc_feature 1..20: note = Target: FXN; (-) strand; PAM type: NRG; PAM sequence: GAG
  source 1..20: mol_type = other DNA
ctgctttgcttgtcttagga

SEQ ID NO: 13315 - DNA, 20 bp, synthetic construct
  misc_feature 1..20: note = Description of Artificial Sequence: Synthetic oligonucleotide
  misc_feature 1..20: note = Target: FXN; (-) strand; PAM type: NRG; PAM sequence: GAG
  source 1..20: mol_type = other DNA
atctgctttgcttgtcttag

SEQ ID NO: 13316 - DNA, 20 bp, synthetic construct
  misc_feature 1..20: note = Description of Artificial Sequence: Synthetic oligonucleotide
  misc_feature 1..20: note = Target: FXN; (-) strand; PAM type: NRG; PAM sequence: AGG
  source 1..20: mol_type = other DNA
ccatctgctttgcttgtctt

SEQ ID NO: 13317 - DNA, 20 bp, synthetic construct
  misc_feature 1..20: note = Description of Artificial Sequence: Synthetic oligonucleotide
  misc_feature 1..20: note = Target: FXN; (-) strand; PAM type: NRG; PAM sequence: TAG
  source 1..20: mol_type = other DNA
accatctgctttgcttgtct

SEQ ID NO: 13318 - DNA, 20 bp, synthetic construct
  misc_feature 1..20: note = Description of Artificial Sequence: Synthetic oligonucleotide
  misc_feature 1..20: note = Target: FXN; (-) strand; PAM type: NRG; PAM sequence: AAG
  source 1..20: mol_type = other DNA
gaagtaaaaggaaggtaagg

SEQ ID NO: 13319 - DNA, 20 bp, synthetic construct
  misc_feature 1..20: note = Description of Artificial Sequence: Synthetic oligonucleotide
  misc_feature 1..20: note = Target: FXN; (-) strand; PAM type: NRG; PAM sequence: AGG
  source 1..20: mol_type = other DNA
gaggaagtaaaaggaaggta

SEQ ID NO: 13320 - DNA, 20 bp, synthetic construct
  misc_feature 1..20: note = Description of Artificial Sequence: Synthetic oligonucleotide
  misc_feature 1..20: note = Target: FXN; (-) strand; PAM type: NRG; PAM sequence: AAG
  source 1..20: mol_type = other DNA
agaggaagtaaaaggaaggt

SEQ ID NO: 13321 - DNA, 20 bp, synthetic construct
  misc_feature 1..20: note = Description of Artificial Sequence: Synthetic oligonucleotide
  misc_feature 1..20: note = Target: FXN; (-) strand; PAM type: NRG; PAM sequence: AGG
  source 1..20: mol_type = other DNA
ttacagaggaagtaaaagga

SEQ ID NO: 13322 - DNA, 20 bp, synthetic construct
  misc_feature 1..20: note = Description of Artificial Sequence: Synthetic oligonucleotide
  misc_feature 1..20: note = Target: FXN; (-) strand; PAM type: NRG; PAM sequence: AAG
  source 1..20: mol_type = other DNA
attacagaggaagtaaaagg

SEQ ID NO: 13323 - DNA, 20 bp, synthetic construct
  misc_feature 1..20: note = Description of Artificial Sequence: Synthetic oligonucleotide
  misc_feature 1..20: note = Target: FXN; (-) strand; PAM type: NRG; PAM sequence: AGG
  source 1..20: mol_type = other DNA
tctattacagaggaagtaaa

SEQ ID NO: 13324 - DNA, 20 bp, synthetic construct
  misc_feature 1..20: note = Description of Artificial Sequence: Synthetic oligonucleotide
  misc_feature 1..20: note = Target: FXN; (-) strand; PAM type: NRG; PAM sequence: AAG
  source 1..20: mol_type = other DNA
gtctattacagaggaagtaa

SEQ ID NO: 13325 - DNA, 20 bp, synthetic construct
  misc_feature 1..20: note = Description of Artificial Sequence: Synthetic oligonucleotide
  misc_feature 1..20: note = Target: FXN; (-) strand; PAM type: NRG; PAM sequence: AAG
  source 1..20: mol_type = other DNA
tgacaagtctattacagagg

SEQ ID NO: 13326 - DNA, 20 bp, synthetic construct
  misc_feature 1..20: note = Description of Artificial Sequence: Synthetic oligonucleotide
  misc_feature 1..20: note = Target: FXN; (-) strand; PAM type: NRG; PAM sequence: AGG
  source 1..20: mol_type = other DNA
acatgacaagtctattacag

SEQ ID NO: 13327 - DNA, 20 bp, synthetic construct
  misc_feature 1..20: note = Description of Artificial Sequence: Synthetic oligonucleotide
  misc_feature 1..20: note = Target: FXN; (-) strand; PAM type: NRG; PAM sequence: GAG
  source 1..20: mol_type = other DNA
gacatgacaagtctattaca

SEQ ID NO: 13328 - DNA, 20 bp, synthetic construct
  misc_feature 1..20: note = Description of Artificial Sequence: Synthetic oligonucleotide
  misc_feature 1..20: note = Target: FXN; (-) strand; PAM type: NRG; PAM sequence: CAG
  source 1..20: mol_type = other DNA
cagacatgacaagtctatta

SEQ ID NO: 13329 - DNA, 20 bp, synthetic construct
  misc_feature 1..20: note = Description of Artificial Sequence: Synthetic oligonucleotide
  misc_feature 1..20: note = Target: FXN; (-) strand; PAM type: NRG; PAM sequence: AAG
  source 1..20: mol_type = other DNA
actcaaacatcagacatgac

SEQ ID NO: 13330 - DNA, 20 bp, synthetic construct
  misc_feature 1..20: note = Description of Artificial Sequence: Synthetic oligonucleotide
  misc_feature 1..20: note = Target: FXN; (-) strand; PAM type: NRG; PAM sequence: CAG
  source 1..20: mol_type = other DNA
taccacgtcaactcaaacat

SEQ ID NO: 13331 - DNA, 20 bp, synthetic construct
  misc_feature 1..20: note = Description of Artificial Sequence: Synthetic oligonucleotide
  misc_feature 1..20: note = Target: FXN; (-) strand; PAM type: NRG; PAM sequence: GAG
  source 1..20: mol_type = other DNA
tgcagactctaactctatta

SEQ ID NO: 13332 - DNA, 20 bp, synthetic construct
  misc_feature 1..20: note = Description of Artificial Sequence: Synthetic oligonucleotide
  misc_feature 1..20: note = Target: FXN; (-) strand; PAM type: NRG; PAM sequence: TAG
  source 1..20: mol_type = other DNA
aatgcagactctaactctat

SEQ ID NO: 13333 - DNA, 20 bp, synthetic construct
  misc_feature 1..20: note = Description of Artificial Sequence: Synthetic oligonucleotide
  misc_feature 1..20: note = Target: FXN; (-) strand; PAM type: NRG; PAM sequence: CAG
  source 1..20: mol_type = other DNA
tagaggacataaaaaaaatg

SEQ ID NO: 13334 - DNA, 20 bp, synthetic construct
  misc_feature 1..20: note = Description of Artificial Sequence: Synthetic oligonucleotide
  misc_feature 1..20: note = Target: FXN; (-) strand; PAM type: NRG; PAM sequence: AGG
  source 1..20: mol_type = other DNA
catcaaccagaacatactag

SEQ ID NO: 13335 - DNA, 20 bp, synthetic construct
  misc_feature 1..20: note = Description of Artificial Sequence: Synthetic oligonucleotide
  misc_feature 1..20: note = Target: FXN; (-) strand; PAM type: NRG; PAM sequence: GAG
  source 1..20: mol_type = other DNA
ccatcaaccagaacatacta

SEQ ID NO: 13336 - DNA, 20 bp, synthetic construct
  misc_feature 1..20: note = Description of Artificial Sequence: Synthetic oligonucleotide
  misc_feature 1..20: note = Target: FXN; (-) strand; PAM type: NRG; PAM sequence: TAG
  source 1..20: mol_type = other DNA
aaccatcaaccagaacatac

SEQ ID NO: 13337 - DNA, 20 bp, synthetic construct
  misc_feature 1..20: note = Description of Artificial Sequence: Synthetic oligonucleotide
  misc_feature 1..20: note = Target: FXN; (-) strand; PAM type: NRG; PAM sequence: CAG
  source 1..20: mol_type = other DNA
tgttgccctcaaccatcaac

SEQ ID NO: 13338 - DNA, 20 bp, synthetic construct
  misc_feature 1..20: note = Description of Artificial Sequence: Synthetic oligonucleotide
  misc_feature 1..20: note = Target: FXN; (-) strand; PAM type: NRG; PAM sequence: TGG
  source 1..20: mol_type = other DNA
gtgctggcatctgggactgc

SEQ ID NO: 13339 - DNA, 20 bp, synthetic construct
  misc_feature 1..20: note = Description of Artificial Sequence: Synthetic oligonucleotide
  misc_feature 1..20: note = Target: FXN; (-) strand; PAM type: NRG; PAM sequence: GGG
  source 1..20: mol_type = other DNA
aggtcttggtgctggcatct

SEQ ID NO: 13340 - DNA, 20 bp, synthetic construct
  misc_feature 1..20: note = Description of Artificial Sequence: Synthetic oligonucleotide
  misc_feature 1..20: note = Target: FXN; (-) strand; PAM type: NRG; PAM sequence: TGG
  source 1..20: mol_type = other DNA
caggtcttggtgctggcatc

SEQ ID NO: 13341 - DNA, 20 bp, synthetic construct
  misc_feature 1..20: note = Description of Artificial Sequence: Synthetic oligonucleotide
  misc_feature 1..20: note = Target: FXN; (-) strand; PAM type: NRG; PAM sequence: TGG
  source 1..20: mol_type = other DNA
cctgtctcaggtcttggtgc

SEQ ID NO: 13342 - DNA, 20 bp, synthetic construct
  misc_feature 1..20: note = Description of Artificial Sequence: Synthetic oligonucleotide
  misc_feature 1..20: note = Target: FXN; (-) strand; PAM type: NRG; PAM sequence: TGG
  source 1..20: mol_type = other DNA
aagtgacctgtctcaggtct

SEQ ID NO: 13343 - DNA, 20 bp, synthetic construct
  misc_feature 1..20: note = Description of Artificial Sequence: Synthetic oligonucleotide
  misc_feature 1..20: note = Target: FXN; (-) strand; PAM type: NRG; PAM sequence: AGG
  source 1..20: mol_type = other DNA
agagttaagtgacctgtctc

SEQ ID NO: 13344 - DNA, 20 bp, synthetic construct
  misc_feature 1..20: note = Description of Artificial Sequence: Synthetic oligonucleotide
  misc_feature 1..20: note = Target: FXN; (-) strand; PAM type: NRG; PAM sequence: CAG
  source 1..20: mol_type = other DNA
gagagttaagtgacctgtct

SEQ ID NO: 13345 - DNA, 20 bp, synthetic construct
  misc_feature 1..20: note = Description of Artificial Sequence: Synthetic oligonucleotide
  misc_feature 1..20: note = Target: FXN; (-) strand; PAM type: NRG; PAM sequence: AAG
  source 1..20: mol_type = other DNA
gtggtgaagctcggagagtt

SEQ ID NO: 13346 - DNA, 20 bp, synthetic construct
  misc_feature 1..20: note = Description of Artificial Sequence: Synthetic oligonucleotide
  misc_feature 1..20: note = Target: FXN; (-) strand; PAM type: NRG; PAM sequence: GAG
  source 1..20: mol_type = other DNA
gaatggtggtgaagctcgga

SEQ ID NO: 13347 - DNA, 20 bp, synthetic construct
  misc_feature 1..20: note = Description of Artificial Sequence: Synthetic oligonucleotide
  misc_feature 1..20: note = Target: FXN; (-) strand; PAM type: NRG; PAM sequence: GAG
  source 1..20: mol_type = other DNA
gagaatggtggtgaagctcg

SEQ ID NO: 13348 - DNA, 20 bp, synthetic construct
  misc_feature 1..20: note = Description of Artificial Sequence: Synthetic oligonucleotide
  misc_feature 1..20: note = Target: FXN; (-) strand; PAM type: NRG; PAM sequence: CGG
  source 1..20: mol_type = other DNA
gtgagaatggtggtgaagct

SEQ ID NO: 13349 - DNA, 20 bp, synthetic construct
  misc_feature 1..20: note = Description of Artificial Sequence: Synthetic oligonucleotide
  misc_feature 1..20: note = Target: FXN; (-) strand; PAM type: NRG; PAM sequence: AAG
  source 1..20: mol_type = other DNA
gcaaggtgagaatggtggtg

SEQ ID NO: 13350 - DNA, 20 bp, synthetic construct
  misc_feature 1..20: note = Description of Artificial Sequence: Synthetic oligonucleotide
  misc_feature 1..20: note = Target: FXN; (-) strand; PAM type: NRG; PAM sequence: TGG
  source 1..20: mol_type = other DNA
ggtctgcaaggtgagaatgg

SEQ ID NO: 13351 - DNA, 20 bp, synthetic construct
  misc_feature 1..20: note = Description of Artificial Sequence: Synthetic oligonucleotide
  misc_feature 1..20: note = Target: FXN; (-) strand; PAM type: NRG; PAM sequence: TGG
  source 1..20: mol_type = other DNA
tgaggtctgcaaggtgagaa

SEQ ID NO: 13352 - DNA, 20 bp, synthetic construct
  misc_feature 1..20: note = Description of Artificial Sequence: Synthetic oligonucleotide
  misc_feature 1..20: note = Target: FXN; (-) strand; PAM type: NRG; PAM sequence: GAG
  source 1..20: mol_type = other DNA
ccctgtgaggtctgcaaggt

SEQ ID NO: 13353 - DNA, 20 bp, synthetic construct
  misc_feature 1..20: note = Description of Artificial Sequence: Synthetic oligonucleotide
  misc_feature 1..20: note = Target: FXN; (-) strand; PAM type: NRG; PAM sequence: AGG
  source 1..20: mol_type = other DNA
tgttccctgtgaggtctgca

SEQ ID NO: 13354 - DNA, 20 bp, synthetic construct
  misc_feature 1..20: note = Description of Artificial Sequence: Synthetic oligonucleotide
  misc_feature 1..20: note = Target: FXN; (-) strand; PAM type: NRG; PAM sequence: AAG
  source 1..20: mol_type = other DNA
ctgttccctgtgaggtctgc

SEQ ID NO: 13355 - DNA, 20 bp, synthetic construct
  misc_feature 1..20: note = Description of Artificial Sequence: Synthetic oligonucleotide
  misc_feature 1..20: note = Target: FXN; (-) strand; PAM type: NRG; PAM sequence: AGG
  source 1..20: mol_type = other DNA
agctttccctgttccctgtg

SEQ ID NO: 13356 - DNA, 20 bp, synthetic construct
  misc_feature 1..20: note = Description of Artificial Sequence: Synthetic oligonucleotide
  misc_feature 1..20: note = Target: FXN; (-) strand; PAM type: NRG; PAM sequence: GAG
  source 1..20: mol_type = other DNA
gagctttccctgttccctgt

SEQ ID NO: 13357 - DNA, 20 bp, synthetic construct
  misc_feature 1..20: note = Description of Artificial Sequence: Synthetic oligonucleotide
  misc_feature 1..20: note = Target: FXN; (-) strand; PAM type: NRG; PAM sequence: GAG
  source 1..20: mol_type = other DNA
taatgatgttgtatctcata

SEQ ID NO: 13358 - DNA, 20 bp, synthetic construct
  misc_feature 1..20: note = Description of Artificial Sequence: Synthetic oligonucleotide
  misc_feature 1..20: note = Target: FXN; (-) strand; PAM type: NRG; PAM sequence: TAG
  source 1..20: mol_type = other DNA
cataatgatgttgtatctca

SEQ ID NO: 13359 - DNA, 20 bp, synthetic construct
  misc_feature 1..20: note = Description of Artificial Sequence: Synthetic oligonucleotide
  misc_feature 1..20: note = Target: FXN; (-) strand; PAM type: NRG; PAM sequence: AGG
  source 1..20: mol_type = other DNA
tttgctttcagaatcagaat

SEQ ID NO: 13360 - DNA, 20 bp, synthetic construct
  misc_feature 1..20: note = Description of Artificial Sequence: Synthetic oligonucleotide
  misc_feature 1..20: note = Target: FXN; (-) strand; PAM type: NRG; PAM sequence: TAG
  source 1..20: mol_type = other DNA
ctttgctttcagaatcagaa

SEQ ID NO: 13361 - DNA, 20 bp, synthetic construct
  misc_feature 1..20: note = Description of Artificial Sequence: Synthetic oligonucleotide
  misc_feature 1..20: note = Target: FXN; (-) strand; PAM type: NRG; PAM sequence: CAG
  source 1..20: mol_type = other DNA
aagagctttgctttcagaat

SEQ ID NO: 13362 - DNA, 20 bp, synthetic construct
  misc_feature 1..20: note = Description of Artificial Sequence: Synthetic oligonucleotide
  misc_feature 1..20: note = Target: FXN; (-) strand; PAM type: NRG; PAM sequence: CAG
  source 1..20: mol_type = other DNA
tgtaggaagagctttgcttt

SEQ ID NO: 13363 - DNA, 20 bp, synthetic construct
  misc_feature 1..20: note = Description of Artificial Sequence: Synthetic oligonucleotide
  misc_feature 1..20: note = Target: FXN; (-) strand; PAM type: NRG; PAM sequence: GAG
  source 1..20: mol_type = other DNA
aataggagtttgtgtaggaa

SEQ ID NO: 13364 - DNA, 20 bp, synthetic construct
  misc_feature 1..20: note = Description of Artificial Sequence: Synthetic oligonucleotide
  misc_feature 1..20: note = Target: FXN; (-) strand; PAM type: NRG; PAM sequence: AAG
  source 1..20: mol_type = other DNA
gaaataggagtttgtgtagg

SEQ ID NO: 13365 - DNA, 20 bp, synthetic construct
  misc_feature 1..20: note = Description of Artificial Sequence: Synthetic oligonucleotide
  misc_feature 1..20: note = Target: FXN; (-) strand; PAM type: NRG; PAM sequence: AGG
  source 1..20: mol_type = other DNA
ttagaaataggagtttgtgt

SEQ ID NO: 13366 - DNA, 20 bp, synthetic construct
  misc_feature 1..20: note = Description of Artificial Sequence: Synthetic oligonucleotide
  misc_feature 1..20: note = Target: FXN; (-) strand; PAM type: NRG; PAM sequence: TAG
  source 1..20: mol_type = other DNA
tttagaaataggagtttgtg

SEQ ID NO: 13367 - DNA, 20 bp, synthetic construct
  misc_feature 1..20: note = Description of Artificial Sequence: Synthetic oligonucleotide
  misc_feature 1..20: note = Target: FXN; (-) strand; PAM type: NRG; PAM sequence: GAG
  source 1..20: mol_type = other DNA
cttttagtatttagaaatag

SEQ ID NO: 13368 - DNA, 20 bp, synthetic construct
  misc_feature 1..20: note = Description of Artificial Sequence: Synthetic oligonucleotide
  misc_feature 1..20: note = Target: FXN; (-) strand; PAM type: NRG; PAM sequence: AGG
  source 1..20: mol_type = other DNA
gtcttttagtatttagaaat

SEQ ID NO: 13369 - DNA, 20 bp, synthetic construct
  misc_feature 1..20: note = Description of Artificial Sequence: Synthetic oligonucleotide
  misc_feature 1..20: note = Target: FXN; (-) strand; PAM type: NRG; PAM sequence: TAG
  source 1..20: mol_type = other DNA
tgtcttttagtatttagaaa

SEQ ID NO: 13370 - DNA, 20 bp, synthetic construct
  misc_feature 1..20: note = Description of Artificial Sequence: Synthetic oligonucleotide
  misc_feature 1..20: note = Target: FXN; (-) strand; PAM type: NRG; PAM sequence: TAG
  source 1..20: mol_type = other DNA
aagaaatgtcttttagtatt

SEQ ID NO: 13371 - DNA, 20 bp, synthetic construct
  misc_feature 1..20: note = Description of Artificial Sequence: Synthetic oligonucleotide
  misc_feature 1..20: note = Target: FXN; (-) strand; PAM type: NRG; PAM sequence: TAG
  source 1..20: mol_type = other DNA
caccataaagaaatgtcttt

SEQ ID NO: 13372 - DNA, 20 bp, synthetic construct
  misc_feature 1..20: note = Description of Artificial Sequence: Synthetic oligonucleotide
  misc_feature 1..20: note = Target: FXN; (-) strand; PAM type: NRG; PAM sequence: AAG
  source 1..20: mol_type = other DNA
agtacacaaaatacaccata

SEQ ID NO: 13373 - DNA, 20 bp, synthetic construct
  misc_feature 1..20: note = Description of Artificial Sequence: Synthetic oligonucleotide
  misc_feature 1..20: note = Target: FXN; (-) strand; PAM type: NRG; PAM sequence: AAG
  source 1..20: mol_type = other DNA
tcaacactttccatttctac

SEQ ID NO: 13374 - DNA, 20 bp, synthetic construct
  misc_feature 1..20: note = Description of Artificial Sequence: Synthetic oligonucleotide
  misc_feature 1..20: note = Target: FXN; (-) strand; PAM type: NRG; PAM sequence: TAG
  source 1..20: mol_type = other DNA
aaattaaaacaagaaaaagt

SEQ ID NO: 13375 - DNA, 20 bp, synthetic construct
  misc_feature 1..20: note = Description of Artificial Sequence: Synthetic oligonucleotide
  misc_feature 1..20: note = Target: FXN; (-) strand; PAM type: NRG; PAM sequence: AAG
  source 1..20: mol_type = other DNA
aaagaaattaaaacaagaaa

SEQ ID NO: 13376 - DNA, 20 bp, synthetic construct
  misc_feature 1..20: note = Description of Artificial Sequence: Synthetic oligonucleotide
  misc_feature 1..20: note = Target: FXN; (-) strand; PAM type: NRG; PAM sequence: AAG
  source 1..20: mol_type = other DNA
aagcataaagaaattaaaac

SEQ ID NO: 13377 - DNA, 20 bp, synthetic construct
  misc_feature 1..20: note = Description of Artificial Sequence: Synthetic oligonucleotide
  misc_feature 1..20: note = Target: FXN; (-) strand; PAM type: NRG; PAM sequence: AAG
  source 1..20: mol_type = other DNA
ttaggtggaaaaaaagcata

SEQ ID NO: 13378 - DNA, 20 bp, synthetic construct
  misc_feature 1..20: note = Description of Artificial Sequence: Synthetic oligonucleotide
  misc_feature 1..20: note = Target: FXN; (-) strand; PAM type: NRG; PAM sequence: AAG
  source 1..20: mol_type = other DNA
taggggattaggtggaaaaa

SEQ ID NO: 13379 - DNA, 20 bp, synthetic construct
  misc_feature 1..20: note = Description of Artificial Sequence: Synthetic oligonucleotide
  misc_feature 1..20: note = Target: FXN; (-) strand; PAM type: NRG; PAM sequence: TGG
  source 1..20: mol_type = other DNA
caccactctaggggattagg

SEQ ID NO: 13380 - DNA, 20 bp, synthetic construct
  misc_feature 1..20: note = Description of Artificial Sequence: Synthetic oligonucleotide
  misc_feature 1..20: note = Target: FXN; (-) strand; PAM type: NRG; PAM sequence: AGG
  source 1..20: mol_type = other DNA
agacaccactctaggggatt

SEQ ID NO: 13381 - DNA, 20 bp, synthetic construct
  misc_feature 1..20: note = Description of Artificial Sequence: Synthetic oligonucleotide
  misc_feature 1..20: note = Target: FXN; (-) strand; PAM type: NRG; PAM sequence: TAG
  source 1..20: mol_type = other DNA
aagacaccactctaggggat

SEQ ID NO: 13382 - DNA, 20 bp, synthetic construct
  misc_feature 1..20: note = Description of Artificial Sequence: Synthetic oligonucleotide
  misc_feature 1..20: note = Target: FXN; (-) strand; PAM type: NRG; PAM sequence: GGG
  source 1..20: mol_type = other DNA
cagttaagacaccactctag

SEQ ID NO: 13383 - DNA, 20 bp, synthetic construct
  misc_feature 1..20: note = Description of Artificial Sequence: Synthetic oligonucleotide
  misc_feature 1..20: note = Target: FXN; (-) strand; PAM type: NRG; PAM sequence: GGG
  source 1..20: mol_type = other DNA
acagttaagacaccactcta

SEQ ID NO: 13384 - DNA, 20 bp, synthetic construct
  misc_feature 1..20: note = Description of Artificial Sequence: Synthetic oligonucleotide
  misc_feature 1..20: note = Target: FXN; (-) strand; PAM type: NRG; PAM sequence: AGG
  source 1..20: mol_type = other DNA
gacagttaagacaccactct

SEQ ID NO: 13385 - DNA, 20 bp, synthetic construct
  misc_feature 1..20: note = Description of Artificial Sequence: Synthetic oligonucleotide
  misc_feature 1..20: note = Target: FXN; (-) strand; PAM type: NRG; PAM sequence: TAG
  source 1..20: mol_type = other DNA
tgacagttaagacaccactc

SEQ ID NO: 13386 - DNA, 20 bp, synthetic construct
  misc_feature 1..20: note = Description of Artificial Sequence: Synthetic oligonucleotide
  misc_feature 1..20: note = Target: FXN; (-) strand; PAM type: NRG; PAM sequence: AAG
  source 1..20: mol_type = other DNA
ctccacccagtttgacagtt

SEQ ID NO: 13387 - DNA, 20 bp, synthetic construct
  misc_feature 1..20: note = Description of Artificial Sequence: Synthetic oligonucleotide
  misc_feature 1..20: note = Target: FXN; (-) strand; PAM type: NRG; PAM sequence: CAG
  source 1..20: mol_type = other DNA
tagatctccacccagtttga

SEQ ID NO: 13388 - DNA, 20 bp, synthetic construct
  misc_feature 1..20: note = Description of Artificial Sequence: Synthetic oligonucleotide
  misc_feature 1..20: note = Target: FXN; (-) strand; PAM type: NRG; PAM sequence: CAG
  source 1..20: mol_type = other DNA
taggttcctagatctccacc

SEQ ID NO: 13389 - DNA, 20 bp, synthetic construct
  misc_feature 1..20: note = Description of Artificial Sequence: Synthetic oligonucleotide
  misc_feature 1..20: note = Target: FXN; (-) strand; PAM type: NRG; PAM sequence: TAG
  source 1..20: mol_type = other DNA
ttgttgatcacataggttcc

SEQ ID NO: 13390 - DNA, 20 bp, synthetic construct
  misc_feature 1..20: note = Description of Artificial Sequence: Synthetic oligonucleotide
  misc_feature 1..20: note = Target: FXN; (-) strand; PAM type: NRG; PAM sequence: AGG
  source 1..20: mol_type = other DNA
cgtctgcttgttgatcacat

SEQ ID NO: 13391 - DNA, 20 bp, synthetic construct
  misc_feature 1..20: note = Description of Artificial Sequence: Synthetic oligonucleotide
  misc_feature 1..20: note = Target: FXN; (-) strand; PAM type: NRG; PAM sequence: TAG
  source 1..20: mol_type = other DNA
gcgtctgcttgttgatcaca

SEQ ID NO: 13392 - DNA, 20 bp, synthetic construct
  misc_feature 1..20: note = Description of Artificial Sequence: Synthetic oligonucleotide
  misc_feature 1..20: note = Target: FXN; (-) strand; PAM type: NRG; PAM sequence: TGG
  source 1..20: mol_type = other DNA
gatagccagatttgcttgtt

SEQ ID NO: 13393 - DNA, 20 bp, synthetic construct
  misc_feature 1..20: note = Description of Artificial Sequence: Synthetic oligonucleotide
  misc_feature 1..20: note = Target: FXN; (-) strand; PAM type: NRG; PAM sequence: CAG
  source 1..20: mol_type = other DNA
acctggatggagaagatagc

SEQ ID NO: 13394 - DNA, 20 bp, synthetic construct
  misc_feature 1..20: note = Description of Artificial Sequence: Synthetic oligonucleotide
  misc_feature 1..20: note = Target: FXN; (-) strand; PAM type: NRG; PAM sequence: TAG
  source 1..20: mol_type = other DNA
acatacctggatggagaaga

SEQ ID NO: 13395 - DNA, 20 bp, synthetic construct
  misc_feature 1..20: note = Description of Artificial Sequence: Synthetic oligonucleotide
  misc_feature 1..20: note = Target: FXN; (-) strand; PAM type: NRG; PAM sequence: AAG
  source 1..20: mol_type = other DNA
acctacatacctggatggag

SEQ ID NO: 13396 - DNA, 20 bp, synthetic construct
  misc_feature 1..20: note = Description of Artificial Sequence: Synthetic oligonucleotide
  misc_feature 1..20: note = Target: FXN; (-) strand; PAM type: NRG; PAM sequence: GAG
  source 1..20: mol_type = other DNA
catacctacatacctggatg

SEQ ID NO: 13397 - DNA, 20 bp, synthetic construct
  misc_feature 1..20: note = Description of Artificial Sequence: Synthetic oligonucleotide
  misc_feature 1..20: note = Target: FXN; (-) strand; PAM type: NRG; PAM sequence: TGG
  source 1..20: mol_type = other DNA
aacatacctacatacctgga

SEQ ID NO: 13398 - DNA, 20 bp, synthetic construct
  misc_feature 1..20: note = Description of Artificial Sequence: Synthetic oligonucleotide
  misc_feature 1..20: note = Target: FXN; (-) strand; PAM type: NRG; PAM sequence: TGG
  source 1..20: mol_type = other DNA
tctgaacatacctacatacc

SEQ ID NO: 13399 - DNA, 20 bp, synthetic construct
  misc_feature 1..20: note = Description of Artificial Sequence: Synthetic oligonucleotide
  misc_feature 1..20: note = Target: FXN; (-) strand; PAM type: NRG; PAM sequence: AAG
  source 1..20: mol_type = other DNA
gtcacatttcggaagtcttt

SEQ ID NO: 13400 - DNA, 20 bp, synthetic construct
  misc_feature 1..20: note = Description of Artificial Sequence: Synthetic oligonucleotide
  misc_feature 1..20: note = Target: FXN; (-) strand; PAM type: NRG; PAM sequence: AAG
  source 1..20: mol_type = other DNA
tccacaatgtcacatttcgg

SEQ ID NO: 13401 - DNA, 20 bp, synthetic construct
  misc_feature 1..20: note = Description of Artificial Sequence: Synthetic oligonucleotide
  misc_feature 1..20: note = Target: FXN; (-) strand; PAM type: NRG; PAM sequence: CGG
  source 1..20: mol_type = other DNA
tggtccacaatgtcacattt

SEQ ID NO: 13402 - DNA, 20 bp, synthetic construct
  misc_feature 1..20: note = Description of Artificial Sequence: Synthetic oligonucleotide
  misc_feature 1..20: note = Target: FXN; (-) strand; PAM type: NRG; PAM sequence: TGG
  source 1..20: mol_type = other DNA
ctcagccgacatttcttaaa

SEQ ID NO: 13403 - DNA, 20 bp, synthetic construct
  misc_feature 1..20: note = Description of Artificial Sequence: Synthetic oligonucleotide
  misc_feature 1..20: note = Target: FXN; (-) strand; PAM type: NRG; PAM sequence: CAG
  source 1..20: mol_type = other DNA
caggtgtcagccactgtgct

SEQ ID NO: 13404 - DNA, 20 bp, synthetic construct
  misc_feature 1..20: note = Description of Artificial Sequence: Synthetic oligonucleotide
  misc_feature 1..20: note = Target: FXN; (-) strand; PAM type: NRG; PAM sequence: CAG
  source 1..20: mol_type = other DNA
agtgttgggattacaggtgt

SEQ ID NO: 13405 - DNA, 20 bp, synthetic construct
  misc_feature 1..20: note = Description of Artificial Sequence: Synthetic oligonucleotide
  misc_feature 1..20: note = Target: FXN; (-) strand; PAM type: NRG; PAM sequence: AGG
  source 1..20: mol_type = other DNA
tctcaaagtgttgggattac

SEQ ID NO: 13406 - DNA, 20 bp, synthetic construct
  misc_feature 1..20: note = Description of Artificial Sequence: Synthetic oligonucleotide
  misc_feature 1..20: note = Target: FXN; (-) strand; PAM type: NRG; PAM sequence: CAG
  source 1..20: mol_type = other DNA
ctctcaaagtgttgggatta

SEQ ID NO: 13407 - DNA, 20 bp, synthetic construct
  misc_feature 1..20: note = Description of Artificial Sequence: Synthetic oligonucleotide
  misc_feature 1..20: note = Target: FXN; (-) strand; PAM type: NRG; PAM sequence: GGG
  source 1..20: mol_type = other DNA
cctcagcctctcaaagtgtt

SEQ ID NO: 13408 - DNA, 20 bp, synthetic construct
  misc_feature 1..20: note = Description of Artificial Sequence: Synthetic oligonucleotide
  misc_feature 1..20: note = Target: FXN; (-) strand; PAM type: NRG; PAM sequence: TGG
  source 1..20: mol_type = other DNA
acctcagcctctcaaagtgt

SEQ ID NO: 13409 - DNA, 20 bp, synthetic construct
  misc_feature 1..20: note = Description of Artificial Sequence: Synthetic oligonucleotide
  misc_feature 1..20: note = Target: FXN; (-) strand; PAM type: NRG; PAM sequence: AAG
  source 1..20: mol_type = other DNA
cctcctacctcagcctctca

SEQ ID NO: 13410 - DNA, 20 bp, synthetic construct
  misc_feature 1..20: note = Description of Artificial Sequence: Synthetic oligonucleotide
  misc_feature 1..20: note = Target: FXN; (-) strand; PAM type: NRG; PAM sequence: CAG
  source 1..20: mol_type = other DNA
ctcaagtgatcctcctacct

SEQ ID NO: 13411 - DNA, 20 bp, synthetic construct
  misc_feature 1..20: note = Description of Artificial Sequence: Synthetic oligonucleotide
  misc_feature 1..20: note = Target: FXN; (-) strand; PAM type: NRG; PAM sequence: AAG
  source 1..20: mol_type = other DNA
ggttctgaactcctgtcctc

SEQ ID NO: 13412 - DNA, 20 bp, synthetic construct
  misc_feature 1..20: note = Description of Artificial Sequence: Synthetic oligonucleotide
  misc_feature 1..20: note = Target: FXN; (-) strand; PAM type: NRG; PAM sequence: TGG
  source 1..20: mol_type = other DNA
actcactatgttgcccagga

SEQ ID NO: 13413 - DNA, 20 bp, synthetic construct
  misc_feature 1..20: note = Description of Artificial Sequence: Synthetic oligonucleotide
  misc_feature 1..20: note = Target: FXN; (-) strand; PAM type: NRG; PAM sequence: AGG
  source 1..20: mol_type = other DNA
agggactcactatgttgccc

SEQ ID NO: 13414 - DNA, 20 bp, synthetic construct
  misc_feature 1..20: note = Description of Artificial Sequence: Synthetic oligonucleotide
  misc_feature 1..20: note = Target: FXN; (-) strand; PAM type: NRG; PAM sequence: CAG
  source 1..20: mol_type = other DNA
cagggactcactatgttgcc

SEQ ID NO: 13415 - DNA, 20 bp, synthetic construct
  misc_feature 1..20: note = Description of Artificial Sequence: Synthetic oligonucleotide
  misc_feature 1..20: note = Target: FXN; (-) strand; PAM type: NRG; PAM sequence: GGG
  source 1..20: mol_type = other DNA
ttattttctttacagagaca

SEQ ID NO: 13416 - DNA, 20 bp, synthetic construct
  misc_feature 1..20: note = Description of Artificial Sequence: Synthetic oligonucleotide
  misc_feature 1..20: note = Target: FXN; (-) strand; PAM type: NRG; PAM sequence: AGG
  source 1..20: mol_type = other DNA
tttattttctttacagagac

SEQ ID NO: 13417 - DNA, 20 bp, synthetic construct
  misc_feature 1..20: note = Description of Artificial Sequence: Synthetic oligonucleotide
  misc_feature 1..20: note = Target: FXN; (-) strand; PAM type: NRG; PAM sequence: CAG
  source 1..20: mol_type = other DNA
ttttattttctttacagaga

SEQ ID NO: 13418 - DNA, 20 bp, synthetic construct
  misc_feature 1..20: note = Description of Artificial Sequence: Synthetic oligonucleotide
  misc_feature 1..20: note = Target: FXN; (-) strand; PAM type: NRG; PAM sequence: GAG
  source 1..20: mol_type = other DNA
ttatttttattttctttaca

SEQ ID NO: 13419 - DNA, 20 bp, synthetic construct
  misc_feature 1..20: note = Description of Artificial Sequence: Synthetic oligonucleotide
  misc_feature 1..20: note = Target: FXN; (-) strand; PAM type: NRG; PAM sequence: CAG
  source 1..20: mol_type = other DNA
ctttatttttattttcttta

SEQ ID NO: 13420 - DNA, 20 bp, synthetic construct
  misc_feature 1..20: note = Description of Artificial Sequence: Synthetic oligonucleotide
  misc_feature 1..20: note = Target: FXN; (-) strand; PAM type: NRG; PAM sequence: CAG
  source 1..20: mol_type = other DNA
tacaggtgtaagcctgcacc

SEQ ID NO: 13421 - DNA, 20 bp, synthetic construct
  misc_feature 1..20: note = Description of Artificial Sequence: Synthetic oligonucleotide
  misc_feature 1..20: note = Target: FXN; (-) strand; PAM type: NRG; PAM sequence: AAG
  source 1..20: mol_type = other DNA
agtgctgggattacaggtgt

SEQ ID NO: 13422 - DNA, 20 bp, synthetic construct
  misc_feature 1..20: note = Description of Artificial Sequence: Synthetic oligonucleotide
  misc_feature 1..20: note = Target: FXN; (-) strand; PAM type: NRG; PAM sequence: AGG
  source 1..20: mol_type = other DNA
tcccaaagtgctgggattac

SEQ ID NO: 13423 - DNA, 20 bp, synthetic construct
  misc_feature 1..20: note = Description of Artificial Sequence: Synthetic oligonucleotide
  misc_feature 1..20: note = Target: FXN; (-) strand; PAM type: NRG; PAM sequence: CAG
  source 1..20: mol_type = other DNA
ctcccaaagtgctgggatta

SEQ ID NO: 13424 - DNA, 20 bp, synthetic construct
  misc_feature 1..20: note = Description of Artificial Sequence: Synthetic oligonucleotide
  misc_feature 1..20: note = Target: FXN; (-) strand; PAM type: NRG; PAM sequence: GGG
  source 1..20: mol_type = other DNA
ccttggcctcccaaagtgct

SEQ ID NO: 13425 - DNA, 20 bp, synthetic construct
  misc_feature 1..20: note = Description of Artificial Sequence: Synthetic oligonucleotide
  misc_feature 1..20: note = Target: FXN; (-) strand; PAM type: NRG; PAM sequence: TGG
  source 1..20: mol_type = other DNA
gccttggcctcccaaagtgc

SEQ ID NO: 13426 - DNA, 20 bp, synthetic construct
  misc_feature 1..20: note = Description of Artificial Sequence: Synthetic oligonucleotide
  misc_feature 1..20: note = Target: FXN; (-) strand; PAM type: NRG; PAM sequence: AAG
  source 1..20: mol_type = other DNA
ccacaggccttggcctccca

SEQ ID NO: 13427 - DNA, 20 bp, synthetic construct
  misc_feature 1..20: note = Description of Artificial Sequence: Synthetic oligonucleotide
  misc_feature 1..20: note = Target: FXN; (-) strand; PAM type: NRG; PAM sequence: TGG
  source 1..20: mol_type = other DNA
ctcaagtgatccacaggcct

SEQ ID NO: 13428 - DNA, 20 bp, synthetic construct
  misc_feature 1..20: note = Description of Artificial Sequence: Synthetic oligonucleotide
  misc_feature 1..20: note = Target: FXN; (-) strand; PAM type: NRG; PAM sequence: AGG
  source 1..20: mol_type = other DNA
cctgagctcaagtgatccac

SEQ ID NO: 13429 - DNA, 20 bp, synthetic construct
  misc_feature 1..20: note = Description of Artificial Sequence: Synthetic oligonucleotide
  misc_feature 1..20: note = Target: FXN; (-) strand; PAM type: NRG; PAM sequence: CAG
  source 1..20: mol_type = other DNA
tcctgagctcaagtgatcca

SEQ ID NO: 13430 - DNA, 20 bp, synthetic construct
  misc_feature 1..20: note = Description of Artificial Sequence: Synthetic oligonucleotide
  misc_feature 1..20: note = Target: FXN; (-) strand; PAM type: NRG; PAM sequence: AAG
  source 1..20: mol_type = other DNA
ggtctcaaactcctgagctc

SEQ ID NO: 13431 - DNA, 20 bp, synthetic construct
  misc_feature 1..20: note = Description of Artificial Sequence: Synthetic oligonucleotide
  misc_feature 1..20: note = Target: FXN; (-) strand; PAM type: NRG; PAM sequence: GAG
  source 1..20: mol_type = other DNA
caggctggtctcaaactcct

SEQ ID NO: 13432 - DNA, 20 bp, synthetic construct
  misc_feature 1..20: note = Description of Artificial Sequence: Synthetic oligonucleotide
  misc_feature 1..20: note = Target: FXN; (-) strand; PAM type: NRG; PAM sequence: TGG
  source 1..20: mol_type = other DNA
ctttgtgacattgcccaggc

SEQ ID NO: 13433 - DNA, 20 bp, synthetic construct
  misc_feature 1..20: note = Description of Artificial Sequence: Synthetic oligonucleotide
  misc_feature 1..20: note = Target: FXN; (-) strand; PAM type: NRG; PAM sequence: AGG
  source 1..20: mol_type = other DNA
ggggctttgtgacattgccc

SEQ ID NO: 13434 - DNA, 20 bp, synthetic construct
  misc_feature 1..20: note = Description of Artificial Sequence: Synthetic oligonucleotide
  misc_feature 1..20: note = Target: FXN; (-) strand; PAM type: NRG; PAM sequence: CAG
  source 1..20: mol_type = other DNA
tggggctttgtgacattgcc

SEQ ID NO: 13435 - DNA, 20 bp, synthetic construct
  misc_feature 1..20: note = Description of Artificial Sequence: Synthetic oligonucleotide
  misc_feature 1..20: note = Target: FXN; (-) strand; PAM type: NRG; PAM sequence: GGG
  source 1..20: mol_type = other DNA
ttatatttttagtagaggtg

SEQ ID NO: 13436 - DNA, 20 bp, synthetic construct
  misc_feature 1..20: note = Description of Artificial Sequence: Synthetic oligonucleotide
  misc_feature 1..20: note = Target: FXN; (-) strand; PAM type: NRG; PAM sequence: GGG
  source 1..20: mol_type = other DNA
tttatatttttagtagaggt

SEQ ID NO: 13437 - DNA, 20 bp, synthetic construct
  misc_feature 1..20: note = Description of Artificial Sequence: Synthetic oligonucleotide
  misc_feature 1..20: note = Target: FXN; (-) strand; PAM type: NRG; PAM sequence: TGG
  source 1..20: mol_type = other DNA
ttttatatttttagtagagg

SEQ ID NO: 13438 - DNA, 20 bp, synthetic construct
  misc_feature 1..20: note = Description of Artificial Sequence: Synthetic oligonucleotide
  misc_feature 1..20: note = Target: FXN; (-) strand; PAM type: NRG; PAM sequence: AGG
  source 1..20: mol_type = other DNA
aatttttatatttttagtag

SEQ ID NO: 13439 - DNA, 20 bp, synthetic construct
  misc_feature 1..20: note = Description of Artificial Sequence: Synthetic oligonucleotide
  misc_feature 1..20: note = Target: FXN; (-) strand; PAM type: NRG; PAM sequence: GAG
  source 1..20: mol_type = other DNA
taatttttatatttttagta

SEQ ID NO: 13440 - DNA, 20 bp, synthetic construct
  misc_feature 1..20: note = Description of Artificial Sequence: Synthetic oligonucleotide
  misc_feature 1..20: note = Target: FXN; (-) strand; PAM type: NRG; PAM sequence: TAG
  source 1..20: mol_type = other DNA
gctaatttttatatttttag

SEQ ID NO: 13441 - DNA, 20 bp, synthetic construct
  misc_feature 1..20: note = Description of Artificial Sequence: Synthetic oligonucleotide
  misc_feature 1..20: note = Target: FXN; (-) strand; PAM type: NRG; PAM sequence: TAG
  source 1..20: mol_type = other DNA
ctggctaatttttatatttt

SEQ ID NO: 13442 - DNA, 20 bp, synthetic construct
  misc_feature 1..20: note = Description of Artificial Sequence: Synthetic oligonucleotide
  misc_feature 1..20: note = Target: FXN; (-) strand; PAM type: NRG; PAM sequence: TGG
  source 1..20: mol_type = other DNA
taggcgtgtgccaccacacc

SEQ ID NO: 13443 - DNA, 20 bp, synthetic construct
  misc_feature 1..20: note = Description of Artificial Sequence: Synthetic oligonucleotide
  misc_feature 1..20: note = Target: FXN; (-) strand; PAM type: NRG; PAM sequence: AGG
  source 1..20: mol_type = other DNA
ttccaagtagttgggactat

SEQ ID NO: 13444 - DNA, 20 bp, synthetic construct
  misc_feature 1..20: note = Description of Artificial Sequence: Synthetic oligonucleotide
  misc_feature 1..20: note = Target: FXN; (-) strand; PAM type: NRG; PAM sequence: TAG
  source 1..20: mol_type = other DNA
cttccaagtagttgggacta

SEQ ID NO: 13445 - DNA, 20 bp, synthetic construct
  misc_feature 1..20: note = Description of Artificial Sequence: Synthetic oligonucleotide
  misc_feature 1..20: note = Target: FXN; (-) strand; PAM type: NRG; PAM sequence: GGG
  source 1..20: mol_type = other DNA
cctcagccttccaagtagtt

SEQ ID NO: 13446 - DNA, 20 bp, synthetic construct
  misc_feature 1..20: note = Description of Artificial Sequence: Synthetic oligonucleotide
  misc_feature 1..20: note = Target: FXN; (-) strand; PAM type: NRG; PAM sequence: TGG
  source 1..20: mol_type = other DNA
acctcagccttccaagtagt

SEQ ID NO: 13447 - DNA, 20 bp, synthetic construct
  misc_feature 1..20: note = Description of Artificial Sequence: Synthetic oligonucleotide
  misc_feature 1..20: note = Target: FXN; (-) strand; PAM type: NRG; PAM sequence: TAG
  source 1..20: mol_type = other DNA
ctcaacctcagccttccaag

SEQ ID NO: 13448 - DNA, 20 bp, synthetic construct
  misc_feature 1..20: note = Description of Artificial Sequence: Synthetic oligonucleotide
  misc_feature 1..20: note = Target: FXN; (-) strand; PAM type: NRG; PAM sequence: AAG
  source 1..20: mol_type = other DNA
aggctcaacctcagccttcc

SEQ ID NO: 13449 - DNA, 20 bp, synthetic construct
  misc_feature 1..20: note = Description of Artificial Sequence: Synthetic oligonucleotide
  misc_feature 1..20: note = Target: FXN; (-) strand; PAM type: NRG; PAM sequence: CAG
  source 1..20: mol_type = other DNA
ctcaggctgaggctcaacct

SEQ ID NO: 13450 - DNA, 20 bp, synthetic construct
  misc_feature 1..20: note = Description of Artificial Sequence: Synthetic oligonucleotide
  misc_feature 1..20: note = Target: FXN; (-) strand; PAM type: NRG; PAM sequence: AGG
  source 1..20: mol_type = other DNA
cacctcctgggctcaggctg

SEQ ID NO: 13451 - DNA, 20 bp, synthetic construct
  misc_feature 1..20: note = Description of Artificial Sequence: Synthetic oligonucleotide
  misc_feature 1..20: note = Target: FXN; (-) strand; PAM type: NRG; PAM sequence: GAG
  source 1..20: mol_type = other DNA
ccacctcctgggctcaggct

SEQ ID NO: 13452 - DNA, 20 bp, synthetic construct
  misc_feature 1..20: note = Description of Artificial Sequence: Synthetic oligonucleotide
  misc_feature 1..20: note = Target: FXN; (-) strand; PAM type: NRG; PAM sequence: AGG
  source 1..20: mol_type = other DNA
aacctccacctcctgggctc

SEQ ID NO: 13453 - DNA, 20 bp, synthetic construct
  misc_feature 1..20: note = Description of Artificial Sequence: Synthetic oligonucleotide
  misc_feature 1..20: note = Target: FXN; (-) strand; PAM type: NRG; PAM sequence: CAG
  source 1..20: mol_type = other DNA
caacctccacctcctgggct

SEQ ID NO: 13454 - DNA, 20 bp, synthetic construct
  misc_feature 1..20: note = Description of Artificial Sequence: Synthetic oligonucleotide
  misc_feature 1..20: note = Target: FXN; (-) strand; PAM type: NRG; PAM sequence: GGG
  source 1..20: mol_type = other DNA
cactgcaacctccacctcct

SEQ ID NO: 13455 - DNA, 20 bp, synthetic construct
  misc_feature 1..20: note = Description of Artificial Sequence: Synthetic oligonucleotide
  misc_feature 1..20: note = Target: FXN; (-) strand; PAM type: NRG; PAM sequence: TGG
  source 1..20: mol_type = other DNA
tcactgcaacctccacctcc

SEQ ID NO: 13456 - DNA, 20 bp, synthetic construct
  misc_feature 1..20: note = Description of Artificial Sequence: Synthetic oligonucleotide
  misc_feature 1..20: note = Target: FXN; (-) strand; PAM type: NRG; PAM sequence: TGG
  source 1..20: mol_type = other DNA
ggagtgcagtggcgcgatct

SEQ ID NO: 13457 - DNA, 20 bp, synthetic construct
  misc_feature 1..20: note = Description of Artificial Sequence: Synthetic oligonucleotide
  misc_feature 1..20: note = Target: FXN; (-) strand; PAM type: NRG; PAM sequence: TGG
  source 1..20: mol_type = other DNA
ttgcccaggctggagtgcag

SEQ ID NO: 13458 - DNA, 20 bp, synthetic construct
  misc_feature 1..20: note = Description of Artificial Sequence: Synthetic oligonucleotide
  misc_feature 1..20: note = Target: FXN; (-) strand; PAM type: NRG; PAM sequence: CAG
  source 1..20: mol_type = other DNA
ctgttgcccaggctggagtg

SEQ ID NO: 13459 - DNA, 20 bp, synthetic construct
  misc_feature 1..20: note = Description of Artificial Sequence: Synthetic oligonucleotide
  misc_feature 1..20: note = Target: FXN; (-) strand; PAM type: NRG; PAM sequence: GAG
  source 1..20: mol_type = other DNA
tggccctgttgcccaggctg

SEQ ID NO: 13460 - DNA, 20 bp, synthetic construct
  misc_feature 1..20: note = Description of Artificial Sequence: Synthetic oligonucleotide
  misc_feature 1..20: note = Target: FXN; (-) strand; PAM type: NRG; PAM sequence: TGG
  source 1..20: mol_type = other DNA
tctggccctgttgcccaggc

SEQ ID NO: 13461 - DNA, 20 bp, synthetic construct
  misc_feature 1..20: note = Description of Artificial Sequence: Synthetic oligonucleotide
  misc_feature 1..20: note = Target: FXN; (-) strand; PAM type: NRG; PAM sequence: AGG
  source 1..20: mol_type = other DNA
agggtctggccctgttgccc

SEQ ID NO: 13462 - DNA, 20 bp, synthetic construct
  misc_feature 1..20: note = Description of Artificial Sequence: Synthetic oligonucleotide
  misc_feature 1..20: note = Target: FXN; (-) strand; PAM type: NRG; PAM sequence: CAG
  source 1..20: mol_type = other DNA
cagggtctggccctgttgcc

SEQ ID NO: 13463 - DNA, 20 bp, synthetic construct
  misc_feature 1..20: note = Description of Artificial Sequence: Synthetic oligonucleotide
  misc_feature 1..20: note = Target: FXN; (-) strand; PAM type: NRG; PAM sequence: TGG
  source 1..20: mol_type = other DNA
tttttttttgggacagggtc

SEQ ID NO: 13464 - DNA, 20 bp, synthetic construct
  misc_feature 1..20: note = Description of Artificial Sequence: Synthetic oligonucleotide
  misc_feature 1..20: note = Target: FXN; (-) strand; PAM type: NRG; PAM sequence: GGG
  source 1..20: mol_type = other DNA
ttttttttttttttgggaca

SEQ ID NO: 13465 - DNA, 20 bp, synthetic construct
  misc_feature 1..20: note = Description of Artificial Sequence: Synthetic oligonucleotide
  misc_feature 1..20: note = Target: FXN; (-) strand; PAM type: NRG; PAM sequence: AGG
  source 1..20: mol_type = other DNA
tttttttttttttttgggac

SEQ ID NO: 13466 - DNA, 20 bp, synthetic construct
  misc_feature 1..20: note = Description of Artificial Sequence: Synthetic oligonucleotide
  misc_feature 1..20: note = Target: FXN; (-) strand; PAM type: NRG; PAM sequence: CAG
  source 1..20: mol_type = other DNA
ctttttttttttttttggga

SEQ ID NO: 13467 - DNA, 20 bp, synthetic construct
  misc_feature 1..20: note = Description of Artificial Sequence: Synthetic oligonucleotide
  misc_feature 1..20: note = Target: FXN; (-) strand; PAM type: NRG; PAM sequence: GGG
  source 1..20: mol_type = other DNA
atgacttttttttttttttt

SEQ ID NO: 13468 - DNA, 20 bp, synthetic construct
  misc_feature 1..20: note = Description of Artificial Sequence: Synthetic oligonucleotide
  misc_feature 1..20: note = Target: FXN; (-) strand; PAM type: NRG; PAM sequence: TGG
  source 1..20: mol_type = other DNA
gatgactttttttttttttt

SEQ ID NO: 13469 - DNA, 20 bp, synthetic construct
  misc_feature 1..20: note = Description of Artificial Sequence: Synthetic oligonucleotide
  misc_feature 1..20: note = Target: FXN; (-) strand; PAM type: NRG; PAM sequence: AAG
  source 1..20: mol_type = other DNA
acttacaaggatgctaacat

SEQ ID NO: 13470 - DNA, 20 bp, synthetic construct
  misc_feature 1..20: note = Description of Artificial Sequence: Synthetic oligonucleotide
  misc_feature 1..20: note = Target: FXN; (-) strand; PAM type: NRG; PAM sequence: AGG
  source 1..20: mol_type = other DNA
tcaggaaaggctcacttaca

SEQ ID NO: 13471 - DNA, 20 bp, synthetic construct
  misc_feature 1..20: note = Description of Artificial Sequence: Synthetic oligonucleotide
  misc_feature 1..20: note = Target: FXN; (-) strand; PAM type: NRG; PAM sequence: AAG
  source 1..20: mol_type = other DNA
atcaggaaaggctcacttac

SEQ ID NO: 13472 - DNA, 20 bp, synthetic construct
  misc_feature 1..20: note = Description of Artificial Sequence: Synthetic oligonucleotide
  misc_feature 1..20: note = Target: FXN; (-) strand; PAM type: NRG; PAM sequence: AGG
  source 1..20: mol_type = other DNA
aggctgcaaaatatcaggaa

SEQ ID NO: 13473 - DNA, 20 bp, synthetic construct
  misc_feature 1..20: note = Description of Artificial Sequence: Synthetic oligonucleotide
  misc_feature 1..20: note = Target: FXN; (-) strand; PAM type: NRG; PAM sequence: AAG
  source 1..20: mol_type = other DNA
caggctgcaaaatatcagga

SEQ ID NO: 13474 - DNA, 20 bp, synthetic construct
  misc_feature 1..20: note = Description of Artificial Sequence: Synthetic oligonucleotide
  misc_feature 1..20: note = Target: FXN; (-) strand; PAM type: NRG; PAM sequence: AGG
  source 1..20: mol_type = other DNA
gagacaggctgcaaaatatc

SEQ ID NO: 13475 - DNA, 20 bp, synthetic construct
  misc_feature 1..20: note = Description of Artificial Sequence: Synthetic oligonucleotide
  misc_feature 1..20: note = Target: FXN; (-) strand; PAM type: NRG; PAM sequence: CAG
  source 1..20: mol_type = other DNA
tgagacaggctgcaaaatat

SEQ ID NO: 13476 - DNA, 20 bp, synthetic construct
  misc_feature 1..20: note = Description of Artificial Sequence: Synthetic oligonucleotide
  misc_feature 1..20: note = Target: FXN; (-) strand; PAM type: NRG; PAM sequence: AGG
  source 1..20: mol_type = other DNA
ttttctactgagaatgagac

SEQ ID NO: 13477 - DNA, 20 bp, synthetic construct
  misc_feature 1..20: note = Description of Artificial Sequence: Synthetic oligonucleotide
  misc_feature 1..20: note = Target: FXN; (-) strand; PAM type: NRG; PAM sequence: CAG
  source 1..20: mol_type = other DNA
cttttctactgagaatgaga

SEQ ID NO: 13478 - DNA, 20 bp, synthetic construct
  misc_feature 1..20: note = Description of Artificial Sequence: Synthetic oligonucleotide
  misc_feature 1..20: note = Target: FXN; (-) strand; PAM type: NRG; PAM sequence: GAG
  source 1..20: mol_type = other DNA
taaacttttctactgagaat

SEQ ID NO: 13479 - DNA, 20 bp, synthetic construct
  misc_feature 1..20: note = Description of Artificial Sequence: Synthetic oligonucleotide
  misc_feature 1..20: note = Target: FXN; (-) strand; PAM type: NRG; PAM sequence: GAG
  source 1..20: mol_type = other DNA
ctagagtaaacttttctact

SEQ ID NO: 13480 - DNA, 20 bp, synthetic construct
  misc_feature 1..20: note = Description of Artificial Sequence: Synthetic oligonucleotide
  misc_feature 1..20: note = Target: FXN; (-) strand; PAM type: NRG; PAM sequence: GAG
  source 1..20: mol_type = other DNA
agggagaagttatgtaacta

SEQ ID NO: 13481 - DNA, 20 bp, synthetic construct
  misc_feature 1..20: note = Description of Artificial Sequence: Synthetic oligonucleotide
  misc_feature 1..20: note = Target: FXN; (-) strand; PAM type: NRG; PAM sequence: TAG
  source 1..20: mol_type = other DNA
gcagggagaagttatgtaac

SEQ ID NO: 13482 - DNA, 20 bp, synthetic construct
  misc_feature 1..20: note = Description of Artificial Sequence: Synthetic oligonucleotide
  misc_feature 1..20: note = Target: FXN; (-) strand; PAM type: NRG; PAM sequence: AAG
  source 1..20: mol_type = other DNA
tccaaattgtcagcagggag

SEQ ID NO: 13483 - DNA, 20 bp, synthetic construct
  misc_feature 1..20: note = Description of Artificial Sequence: Synthetic oligonucleotide
  misc_feature 1..20: note = Target: FXN; (-) strand; PAM type: NRG; PAM sequence: GAG
  source 1..20: mol_type = other DNA
gtatccaaattgtcagcagg

SEQ ID NO: 13484 - DNA, 20 bp, synthetic construct
  misc_feature 1..20: note = Description of Artificial Sequence: Synthetic oligonucleotide
  misc_feature 1..20: note = Target: FXN; (-) strand; PAM type: NRG; PAM sequence: GGG
  source 1..20: mol_type = other DNA
cagtatccaaattgtcagca

SEQ ID NO: 13485 - DNA, 20 bp, synthetic construct
  misc_feature 1..20: note = Description of Artificial Sequence: Synthetic oligonucleotide
  misc_feature 1..20: note = Target: FXN; (-) strand; PAM type: NRG; PAM sequence: AGG
  source 1..20: mol_type = other DNA
acagtatccaaattgtcagc

SEQ ID NO: 13486 - DNA, 20 bp, synthetic construct
  misc_feature 1..20: note = Description of Artificial Sequence: Synthetic oligonucleotide
  misc_feature 1..20: note = Target: FXN; (-) strand; PAM type: NRG; PAM sequence: CAG
  source 1..20: mol_type = other DNA
tacagtatccaaattgtcag

SEQ ID NO: 13487 - DNA, 20 bp, synthetic construct
  misc_feature 1..20: note = Description of Artificial Sequence: Synthetic oligonucleotide
  misc_feature 1..20: note = Target: FXN; (-) strand; PAM type: NRG; PAM sequence: CAG
  source 1..20: mol_type = other DNA
gcttacagtatccaaattgt

SEQ ID NO: 13488 - DNA, 20 bp, synthetic construct
  misc_feature 1..20: note = Description of Artificial Sequence: Synthetic oligonucleotide
  misc_feature 1..20: note = Target: FXN; (-) strand; PAM type: NRG; PAM sequence: CAG
  source 1..20: mol_type = other DNA
aatatcctgatgcctgctta

SEQ ID NO: 13489 - DNA, 20 bp, synthetic construct
  misc_feature 1..20: note = Description of Artificial Sequence: Synthetic oligonucleotide
  misc_feature 1..20: note = Target: FXN; (-) strand; PAM type: NRG; PAM sequence: CAG
  source 1..20: mol_type = other DNA
aagttataagctactcactt

SEQ ID NO: 13490 - DNA, 20 bp, synthetic construct
  misc_feature 1..20: note = Description of Artificial Sequence: Synthetic oligonucleotide
  misc_feature 1..20: note = Target: FXN; (-) strand; PAM type: NRG; PAM sequence: AAG
  source 1..20: mol_type = other DNA
gctggatttggaaaagttat

SEQ ID NO: 13491 - DNA, 20 bp, synthetic construct
  misc_feature 1..20: note = Description of Artificial Sequence: Synthetic oligonucleotide
  misc_feature 1..20: note = Target: FXN; (-) strand; PAM type: NRG; PAM sequence: AAG
  source 1..20: mol_type = other DNA
tgtctaggctggatttggaa

SEQ ID NO: 13492 - DNA, 20 bp, synthetic construct
  misc_feature 1..20: note = Description of Artificial Sequence: Synthetic oligonucleotide
  misc_feature 1..20: note = Target: FXN; (-) strand; PAM type: NRG; PAM sequence: TGG
  source 1..20: mol_type = other DNA
aaaactgtctaggctggatt

SEQ ID NO: 13493 - DNA, 20 bp, synthetic construct
  misc_feature 1..20: note = Description of Artificial Sequence: Synthetic oligonucleotide
  misc_feature 1..20: note = Target: FXN; (-) strand; PAM type: NRG; PAM sequence: TGG
  source 1..20: mol_type = other DNA
tagaggaaaactgtctaggc

SEQ ID NO: 13494 - DNA, 20 bp, synthetic construct
  misc_feature 1..20: note = Description of Artificial Sequence: Synthetic oligonucleotide
  misc_feature 1..20: note = Target: FXN; (-) strand; PAM type: NRG; PAM sequence: AGG
  source 1..20: mol_type = other DNA
ttaatagaggaaaactgtct

SEQ ID NO: 13495 - DNA, 20 bp, synthetic construct
  misc_feature 1..20: note = Description of Artificial Sequence: Synthetic oligonucleotide
  misc_feature 1..20: note = Target: FXN; (-) strand; PAM type: NRG; PAM sequence: TAG
  source 1..20: mol_type = other DNA
tttaatagaggaaaactgtc

SEQ ID NO: 13496 - DNA, 20 bp, synthetic construct
  misc_feature 1..20: note = Description of Artificial Sequence: Synthetic oligonucleotide
  misc_feature 1..20: note = Target: FXN; (-) strand; PAM type: NRG; PAM sequence: AGG
  source 1..20: mol_type = other DNA
tcagggcaataatttaatag

SEQ ID NO: 13497 - DNA, 20 bp, synthetic construct
  misc_feature 1..20: note = Description of Artificial Sequence: Synthetic oligonucleotide
  misc_feature 1..20: note = Target: FXN; (-) strand; PAM type: NRG; PAM sequence: GAG
  source 1..20: mol_type = other DNA
gtcagggcaataatttaata

SEQ ID NO: 13498 - DNA, 20 bp, synthetic construct
  misc_feature 1..20: note = Description of Artificial Sequence: Synthetic oligonucleotide
  misc_feature 1..20: note = Target: FXN; (-) strand; PAM type: NRG; PAM sequence: TAG
  source 1..20: mol_type = other DNA
aagtcagggcaataatttaa

SEQ ID NO: 13499 - DNA, 20 bp, synthetic construct
  misc_feature 1..20: note = Description of Artificial Sequence: Synthetic oligonucleotide
  misc_feature 1..20: note = Target: FXN; (-) strand; PAM type: NRG; PAM sequence: GGG
  source 1..20: mol_type = other DNA
agtagcttcttttaaagtca

SEQ ID NO: 13500 - DNA, 20 bp, synthetic construct
  misc_feature 1..20: note = Description of Artificial Sequence: Synthetic oligonucleotide
  misc_feature 1..20: note = Target: FXN; (-) strand; PAM type: NRG; PAM sequence: AGG
  source 1..20: mol_type = other DNA
aagtagcttcttttaaagtc

SEQ ID NO: 13501 - DNA, 20 bp, synthetic construct
  misc_feature 1..20: note = Description of Artificial Sequence: Synthetic oligonucleotide
  misc_feature 1..20: note = Target: FXN; (-) strand; PAM type: NRG; PAM sequence: CAG
  source 1..20: mol_type = other DNA
aaagtagcttcttttaaagt

SEQ ID NO: 13502 - DNA, 20 bp, synthetic construct
  misc_feature 1..20: note = Description of Artificial Sequence: Synthetic oligonucleotide
  misc_feature 1..20: note = Target: FXN; (-) strand; PAM type: NRG; PAM sequence: AAG
  source 1..20: mol_type = other DNA
gtcaaaagtagcttctttta

SEQ ID NO: 13503 - DNA, 20 bp, synthetic construct
  misc_feature 1..20: note = Description of Artificial Sequence: Synthetic oligonucleotide
  misc_feature 1..20: note = Target: FXN; (-) strand; PAM type: NRG; PAM sequence: TAG
  source 1..20: mol_type = other DNA
aaacgctacaaggtcaaaag

SEQ ID NO: 13504 - DNA, 20 bp, synthetic construct
  misc_feature 1..20: note = Description of Artificial Sequence: Synthetic oligonucleotide
  misc_feature 1..20: note = Target: FXN; (-) strand; PAM type: NRG; PAM sequence: AAG
  source 1..20: mol_type = other DNA
ttcaaacgctacaaggtcaa

SEQ ID NO: 13505 - DNA, 20 bp, synthetic construct
  misc_feature 1..20: note = Description of Artificial Sequence: Synthetic oligonucleotide
  misc_feature 1..20: note = Target: FXN; (-) strand; PAM type: NRG; PAM sequence: AGG
  source 1..20: mol_type = other DNA
caacttgttcaaacgctaca

SEQ ID NO: 13506 - DNA, 20 bp, synthetic construct
  misc_feature 1..20: note = Description of Artificial Sequence: Synthetic oligonucleotide
  misc_feature 1..20: note = Target: FXN; (-) strand; PAM type: NRG; PAM sequence: AAG
  source 1..20: mol_type = other DNA
gcaacttgttcaaacgctac

SEQ ID NO: 13507 - DNA, 20 bp, synthetic construct
  misc_feature 1..20: note = Description of Artificial Sequence: Synthetic oligonucleotide
  misc_feature 1..20: note = Target: FXN; (-) strand; PAM type: NRG; PAM sequence: AAG
  source 1..20: mol_type = other DNA
tttaacttgctttgaagaca

SEQ ID NO: 13508 - DNA, 20 bp, synthetic construct
  misc_feature 1..20: note = Description of Artificial Sequence: Synthetic oligonucleotide
  misc_feature 1..20: note = Target: FXN; (-) strand; PAM type: NRG; PAM sequence: AAG
  source 1..20: mol_type = other DNA
tcaaactttaacttgctttg

SEQ ID NO: 13509 - DNA, 20 bp, synthetic construct
  misc_feature 1..20: note = Description of Artificial Sequence: Synthetic oligonucleotide
  misc_feature 1..20: note = Target: FXN; (-) strand; PAM type: NRG; PAM sequence: AGG
  source 1..20: mol_type = other DNA
gagaggctcaaaacaagtag

SEQ ID NO: 13510 - DNA, 20 bp, synthetic construct
  misc_feature 1..20: note = Description of Artificial Sequence: Synthetic oligonucleotide
  misc_feature 1..20: note = Target: FXN; (-) strand; PAM type: NRG; PAM sequence: GAG
  source 1..20: mol_type = other DNA
tgagaggctcaaaacaagta

SEQ ID NO: 13511 - DNA, 20 bp, synthetic construct
  misc_feature 1..20: note = Description of Artificial Sequence: Synthetic oligonucleotide
  misc_feature 1..20: note = Target: FXN; (-) strand; PAM type: NRG; PAM sequence: TAG
  source 1..20: mol_type = other DNA
cctgagaggctcaaaacaag

SEQ ID NO: 13512 - DNA, 20 bp, synthetic construct
  misc_feature 1..20: note = Description of Artificial Sequence: Synthetic oligonucleotide
  misc_feature 1..20: note = Target: FXN; (-) strand; PAM type: NRG; PAM sequence: AAG
  source 1..20: mol_type = other DNA
ttacctgagaggctcaaaac

SEQ ID NO: 13513 - DNA, 20 bp, synthetic construct
  misc_feature 1..20: note = Description of Artificial Sequence: Synthetic oligonucleotide
  misc_feature 1..20: note = Target: FXN; (-) strand; PAM type: NRG; PAM sequence: AGG
  source 1..20: mol_type = other DNA
caaataaccctttacctgag

SEQ ID NO: 13514 - DNA, 20 bp, synthetic construct
  misc_feature 1..20: note = Description of Artificial Sequence: Synthetic oligonucleotide
  misc_feature 1..20: note = Target: FXN; (-) strand; PAM type: NRG; PAM sequence: GAG
  source 1..20: mol_type = other DNA
tcaaataaccctttacctga

SEQ ID NO: 13515 - DNA, 20 bp, synthetic construct
  misc_feature 1..20: note = Description of Artificial Sequence: Synthetic oligonucleotide
  misc_feature 1..20: note = Target: FXN; (-) strand; PAM type: NRG; PAM sequence: GAG
  source 1..20: mol_type = other DNA
attcaaataaccctttacct

SEQ ID NO: 13516 - DNA, 20 bp, synthetic construct
  misc_feature 1..20: note = Description of Artificial Sequence: Synthetic oligonucleotide
  misc_feature 1..20: note = Target: FXN; (-) strand; PAM type: NRG; PAM sequence: GGG
  source 1..20: mol_type = other DNA
acacaaccccaacctgcaaa

SEQ ID NO: 13517 - DNA, 20 bp, synthetic construct
  misc_feature 1..20: note = Description of Artificial Sequence: Synthetic oligonucleotide
  misc_feature 1..20: note = Target: FXN; (-) strand; PAM type: NRG; PAM sequence: AGG
  source 1..20: mol_type = other DNA
tacacaaccccaacctgcaa

SEQ ID NO: 13518 - DNA, 20 bp, synthetic construct
  misc_feature 1..20: note = Description of Artificial Sequence: Synthetic oligonucleotide
  misc_feature 1..20: note = Target: FXN; (-) strand; PAM type: NRG; PAM sequence: AAG
  source 1..20: mol_type = other DNA
gtacacaaccccaacctgca

SEQ ID NO: 13519 - DNA, 20 bp, synthetic construct
  misc_feature 1..20: note = Description of Artificial Sequence: Synthetic oligonucleotide
  misc_feature 1..20: note = Target: FXN; (-) strand; PAM type: NRG; PAM sequence: GGG
  source 1..20: mol_type = other DNA
aacactctaccacctccaca

SEQ ID NO: 13520 - DNA, 20 bp, synthetic construct
  misc_feature 1..20: note = Description of Artificial Sequence: Synthetic oligonucleotide
  misc_feature 1..20: note = Target: FXN; (-) strand; PAM type: NRG; PAM sequence: AGG
  source 1..20: mol_type = other DNA
taacactctaccacctccac

SEQ ID NO: 13521 - DNA, 20 bp, synthetic construct
  misc_feature 1..20: note = Description of Artificial Sequence: Synthetic oligonucleotide
  misc_feature 1..20: note = Target: FXN; (-) strand; PAM type: NRG; PAM sequence: CAG
  source 1..20: mol_type = other DNA
ataacactctaccacctcca

SEQ ID NO: 13522 - DNA, 20 bp, synthetic construct
  misc_feature 1..20: note = Description of Artificial Sequence: Synthetic oligonucleotide
  misc_feature 1..20: note = Target: FXN; (-) strand; PAM type: NRG; PAM sequence: CAG
  source 1..20: mol_type = other DNA
agggattaaatgccctggag

SEQ ID NO: 13523 - DNA, 20 bp, synthetic construct
  misc_feature 1..20: note = Description of Artificial Sequence: Synthetic oligonucleotide
  misc_feature 1..20: note = Target: FXN; (-) strand; PAM type: NRG; PAM sequence: GAG
  source 1..20: mol_type = other DNA
aggagggattaaatgccctg

SEQ ID NO: 13524 - DNA, 20 bp, synthetic construct
  misc_feature 1..20: note = Description of Artificial Sequence: Synthetic oligonucleotide
  misc_feature 1..20: note = Target: FXN; (-) strand; PAM type: NRG; PAM sequence: TGG
  source 1..20: mol_type = other DNA
gcaggagggattaaatgccc

SEQ ID NO: 13525 - DNA, 20 bp, synthetic construct
  misc_feature 1..20: note = Description of Artificial Sequence: Synthetic oligonucleotide
  misc_feature 1..20: note = Target: FXN; (-) strand; PAM type: NRG; PAM sequence: GGG
  source 1..20: mol_type = other DNA
catcaatggaaaaggcagga

SEQ ID NO: 13526 - DNA, 20 bp, synthetic construct
  misc_feature 1..20: note = Description of Artificial Sequence: Synthetic oligonucleotide
  misc_feature 1..20: note = Target: FXN; (-) strand; PAM type: NRG; PAM sequence: AGG
  source 1..20: mol_type = other DNA
acatcaatggaaaaggcagg

SEQ ID NO: 13527 - DNA, 20 bp, synthetic construct
  misc_feature 1..20: note = Description of Artificial Sequence: Synthetic oligonucleotide
  misc_feature 1..20: note = Target: FXN; (-) strand; PAM type: NRG; PAM sequence: GAG
  source 1..20: mol_type = other DNA
cacatcaatggaaaaggcag

SEQ ID NO: 13528 - DNA, 20 bp, synthetic construct
  misc_feature 1..20: note = Description of Artificial Sequence: Synthetic oligonucleotide
  misc_feature 1..20: note = Target: FXN; (-) strand; PAM type: NRG; PAM sequence: AGG
  source 1..20: mol_type = other DNA
agcacatcaatggaaaaggc

SEQ ID NO: 13529 - DNA, 20 bp, synthetic construct
  misc_feature 1..20: note = Description of Artificial Sequence: Synthetic oligonucleotide
  misc_feature 1..20: note = Target: FXN; (-) strand; PAM type: NRG; PAM sequence: CAG
  source 1..20: mol_type = other DNA
aagcacatcaatggaaaagg

SEQ ID NO: 13530 - DNA, 20 bp, synthetic construct
  misc_feature 1..20: note = Description of Artificial Sequence: Synthetic oligonucleotide
  misc_feature 1..20: note = Target: FXN; (-) strand; PAM type: NRG; PAM sequence: AGG
  source 1..20: mol_type = other DNA
tgaaagcacatcaatggaaa

SEQ ID NO: 13531 - DNA, 20 bp, synthetic construct
  misc_feature 1..20: note = Description of Artificial Sequence: Synthetic oligonucleotide
  misc_feature 1..20: note = Target: FXN; (-) strand; PAM type: NRG; PAM sequence: AAG
  source 1..20: mol_type = other DNA
ttgaaagcacatcaatggaa

SEQ ID NO: 13532 - DNA, 20 bp, synthetic construct
  misc_feature 1..20: note = Description of Artificial Sequence: Synthetic oligonucleotide
  misc_feature 1..20: note = Target: FXN; (-) strand; PAM type: NRG; PAM sequence: TGG
  source 1..20: mol_type = other DNA
ctagattgaaagcacatcaa

SEQ ID NO: 13533 - DNA, 20 bp, synthetic construct
  misc_feature 1..20: note = Description of Artificial Sequence: Synthetic oligonucleotide
  misc_feature 1..20: note = Target: FXN; (-) strand; PAM type: NRG; PAM sequence: AAG
  source 1..20: mol_type = other DNA
cttttattcctctagattga

SEQ ID NO: 13534 - DNA, 20 bp, synthetic construct
  misc_feature 1..20: note = Description of Artificial Sequence: Synthetic oligonucleotide
  misc_feature 1..20: note = Target: FXN; (-) strand; PAM type: NRG; PAM sequence: TAG
  source 1..20: mol_type = other DNA
aacacaatcttttattcctc

SEQ ID NO: 13535 - DNA, 20 bp, synthetic construct
  misc_feature 1..20: note = Description of Artificial Sequence: Synthetic oligonucleotide
  misc_feature 1..20: note = Target: FXN; (-) strand; PAM type: NRG; PAM sequence: AGG
  source 1..20: mol_type = other DNA
caggctttcagatgctatgc

SEQ ID NO: 13536 - DNA, 20 bp, synthetic construct
  misc_feature 1..20: note = Description of Artificial Sequence: Synthetic oligonucleotide
  misc_feature 1..20: note = Target: FXN; (-) strand; PAM type: NRG; PAM sequence: CAG
  source 1..20: mol_type = other DNA
tcaggctttcagatgctatg

SEQ ID NO: 13537 - DNA, 20 bp, synthetic construct
  misc_feature 1..20: note = Description of Artificial Sequence: Synthetic oligonucleotide
  misc_feature 1..20: note = Target: FXN; (-) strand; PAM type: NRG; PAM sequence: CAG
  source 1..20: mol_type = other DNA
cctgcatgttctcaggcttt

SEQ ID NO: 13538 - DNA, 20 bp, synthetic construct
  misc_feature 1..20: note = Description of Artificial Sequence: Synthetic oligonucleotide
  misc_feature 1..20: note = Target: FXN; (-) strand; PAM type: NRG; PAM sequence: AGG
  source 1..20: mol_type = other DNA
gtctctccctgcatgttctc

SEQ ID NO: 13539 - DNA, 20 bp, synthetic construct
  misc_feature 1..20: note = Description of Artificial Sequence: Synthetic oligonucleotide
  misc_feature 1..20: note = Target: FXN; (-) strand; PAM type: NRG; PAM sequence: CAG
  source 1..20: mol_type = other DNA
tgtctctccctgcatgttct

SEQ ID NO: 13540 - DNA, 20 bp, synthetic construct
  misc_feature 1..20: note = Description of Artificial Sequence: Synthetic oligonucleotide
  misc_feature 1..20: note = Target: FXN; (-) strand; PAM type: NRG; PAM sequence: GGG
  source 1..20: mol_type = other DNA
gccaggctgctgagggatga

SEQ ID NO: 13541 - DNA, 20 bp, synthetic construct
  misc_feature 1..20: note = Description of Artificial Sequence: Synthetic oligonucleotide
  misc_feature 1..20: note = Target: FXN; (-) strand; PAM type: NRG; PAM sequence: AGG
  source 1..20: mol_type = other DNA
agccaggctgctgagggatg

SEQ ID NO: 13542 - DNA, 20 bp, synthetic construct
  misc_feature 1..20: note = Description of Artificial Sequence: Synthetic oligonucleotide
  misc_feature 1..20: note = Target: FXN; (-) strand; PAM type: NRG; PAM sequence: GAG
  source 1..20: mol_type = other DNA
cagccaggctgctgagggat

SEQ ID NO: 13543 - DNA, 20 bp, synthetic construct
  misc_feature 1..20: note = Description of Artificial Sequence: Synthetic oligonucleotide
  misc_feature 1..20: note = Target: FXN; (-) strand; PAM type: NRG; PAM sequence: GGG
  source 1..20: mol_type = other DNA
aacagcagccaggctgctga

SEQ ID NO: 13544 - DNA, 20 bp, synthetic construct
  misc_feature 1..20: note = Description of Artificial Sequence: Synthetic oligonucleotide
  misc_feature 1..20: note = Target: FXN; (-) strand; PAM type: NRG; PAM sequence: AGG
  source 1..20: mol_type = other DNA
caacagcagccaggctgctg

SEQ ID NO: 13545 - DNA, 20 bp, synthetic construct
  misc_feature 1..20: note = Description of Artificial Sequence: Synthetic oligonucleotide
  misc_feature 1..20: note = Target: FXN; (-) strand; PAM type: NRG; PAM sequence: GAG
  source 1..20: mol_type = other DNA
tcaacagcagccaggctgct

SEQ ID NO: 13546 - DNA, 20 bp, synthetic construct
  misc_feature 1..20: note = Description of Artificial Sequence: Synthetic oligonucleotide
  misc_feature 1..20: note = Target: FXN; (-) strand; PAM type: NRG; PAM sequence: AGG
  source 1..20: mol_type = other DNA
caaccacttcaacagcagcc

SEQ ID NO: 13547 - DNA, 20 bp, synthetic construct
  misc_feature 1..20: note = Description of Artificial Sequence: Synthetic oligonucleotide
  misc_feature 1..20: note = Target: FXN; (-) strand; PAM type: NRG; PAM sequence: CAG
  source 1..20: mol_type = other DNA
acaaccacttcaacagcagc

SEQ ID NO: 13548 - DNA, 20 bp, synthetic construct
  misc_feature 1..20: note = Description of Artificial Sequence: Synthetic oligonucleotide
  misc_feature 1..20: note = Target: FXN; (-) strand; PAM type: NRG; PAM sequence: CAG
  source 1..20: mol_type = other DNA
tcttacaaccacttcaacag

SEQ ID NO: 13549 - DNA, 20 bp, synthetic construct
  misc_feature 1..20: note = Description of Artificial Sequence: Synthetic oligonucleotide
  misc_feature 1..20: note = Target: FXN; (-) strand; PAM type: NRG; PAM sequence: CAG
  source 1..20: mol_type = other DNA
ctttcttacaaccacttcaa

SEQ ID NO: 13550 - DNA, 20 bp, synthetic construct
  misc_feature 1..20: note = Description of Artificial Sequence: Synthetic oligonucleotide
  misc_feature 1..20: note = Target: FXN; (-) strand; PAM type: NRG; PAM sequence: GGG
  source 1..20: mol_type = other DNA
tggatctgagaacgttttgt

SEQ ID NO: 13551 - DNA, 20 bp, synthetic construct
  misc_feature 1..20: note = Description of Artificial Sequence: Synthetic oligonucleotide
  misc_feature 1..20: note = Target: FXN; (-) strand; PAM type: NRG; PAM sequence: TGG
  source 1..20: mol_type = other DNA
ctggatctgagaacgttttg

SEQ ID NO: 13552 - DNA, 20 bp, synthetic construct
  misc_feature 1..20: note = Description of Artificial Sequence: Synthetic oligonucleotide
  misc_feature 1..20: note = Target: FXN; (-) strand; PAM type: NRG; PAM sequence: GAG
  source 1..20: mol_type = other DNA
gctaatgaatgactggatct

SEQ ID NO: 13553 - DNA, 20 bp, synthetic construct
  misc_feature 1..20: note = Description of Artificial Sequence: Synthetic oligonucleotide
  misc_feature 1..20: note = Target: FXN; (-) strand; PAM type: NRG; PAM sequence: TGG
  source 1..20: mol_type = other DNA
tggaagtgctaatgaatgac

SEQ ID NO: 13554 - DNA, 20 bp, synthetic construct
  misc_feature 1..20: note = Description of Artificial Sequence: Synthetic oligonucleotide
  misc_feature 1..20: note = Target: FXN; (-) strand; PAM type: NRG; PAM sequence: AAG
  source 1..20: mol_type = other DNA
agtcaacatgctctctttgg

SEQ ID NO: 13555 - DNA, 20 bp, synthetic construct
  misc_feature 1..20: note = Description of Artificial Sequence: Synthetic oligonucleotide
  misc_feature 1..20: note = Target: FXN; (-) strand; PAM type: NRG; PAM sequence: TGG
  source 1..20: mol_type = other DNA
cacagtcaacatgctctctt

SEQ ID NO: 13556 - DNA, 20 bp, synthetic construct
  misc_feature 1..20: note = Description of Artificial Sequence: Synthetic oligonucleotide
  misc_feature 1..20: note = Target: FXN; (-) strand; PAM type: NRG; PAM sequence: CAG
  source 1..20: mol_type = other DNA
tctggccctttcccaattca

SEQ ID NO: 13557 - DNA, 20 bp, synthetic construct
  misc_feature 1..20: note = Description of Artificial Sequence: Synthetic oligonucleotide
  misc_feature 1..20: note = Target: FXN; (-) strand; PAM type: NRG; PAM sequence: TGG
  source 1..20: mol_type = other DNA
aattctatgctagttttatc

SEQ ID NO: 13558 - DNA, 20 bp, synthetic construct
  misc_feature 1..20: note = Description of Artificial Sequence: Synthetic oligonucleotide
  misc_feature 1..20: note = Target: FXN; (-) strand; PAM type: NRG; PAM sequence: TAG
  source 1..20: mol_type = other DNA
tctttcaaagaattctatgc

SEQ ID NO: 13559 - DNA, 20 bp, synthetic construct
  misc_feature 1..20: note = Description of Artificial Sequence: Synthetic oligonucleotide
  misc_feature 1..20: note = Target: FXN; (-) strand; PAM type: NRG; PAM sequence: AAG
  source 1..20: mol_type = other DNA
caaataccgttagtctttca

SEQ ID NO: 13560 - DNA, 20 bp, synthetic construct
  misc_feature 1..20: note = Description of Artificial Sequence: Synthetic oligonucleotide
  misc_feature 1..20: note = Target: FXN; (-) strand; PAM type: NRG; PAM sequence: TAG
  source 1..20: mol_type = other DNA
ttaaaaaatgcaaataccgt

SEQ ID NO: 13561 - DNA, 20 bp, synthetic construct
  misc_feature 1..20: note = Description of Artificial Sequence: Synthetic oligonucleotide
  misc_feature 1..20: note = Target: FXN; (-) strand; PAM type: NRG; PAM sequence: AGG
  source 1..20: mol_type = other DNA
caatgttagggggtagagta

SEQ ID NO: 13562 - DNA, 20 bp, synthetic construct
  misc_feature 1..20: note = Description of Artificial Sequence: Synthetic oligonucleotide
  misc_feature 1..20: note = Target: FXN; (-) strand; PAM type: NRG; PAM sequence: AAG
  source 1..20: mol_type = other DNA
tcaatgttagggggtagagt

SEQ ID NO: 13563 - DNA, 20 bp, synthetic construct
  misc_feature 1..20: note = Description of Artificial Sequence: Synthetic oligonucleotide
  misc_feature 1..20: note = Target: FXN; (-) strand; PAM type: NRG; PAM sequence: GAG
  source 1..20: mol_type = other DNA
gatgtcaatgttagggggta

SEQ ID NO: 13564 - DNA, 20 bp, synthetic construct
  misc_feature 1..20: note = Description of Artificial Sequence: Synthetic oligonucleotide
  misc_feature 1..20: note = Target: FXN; (-) strand; PAM type: NRG; PAM sequence: TAG
  source 1..20: mol_type = other DNA
atgatgtcaatgttaggggg

SEQ ID NO: 13565 - DNA, 20 bp, synthetic construct
  misc_feature 1..20: note = Description of Artificial Sequence: Synthetic oligonucleotide
  misc_feature 1..20: note = Target: FXN; (-) strand; PAM type: NRG; PAM sequence: GGG
  source 1..20: mol_type = other DNA
aaaatgatgtcaatgttagg

SEQ ID NO: 13566 - DNA, 20 bp, synthetic construct
  misc_feature 1..20: note = Description of Artificial Sequence: Synthetic oligonucleotide
  misc_feature 1..20: note = Target: FXN; (-) strand; PAM type: NRG; PAM sequence: GGG
  source 1..20: mol_type = other DNA
aaaaatgatgtcaatgttag

SEQ ID NO: 13567 - DNA, 20 bp, synthetic construct
  misc_feature 1..20: note = Description of Artificial Sequence: Synthetic oligonucleotide
  misc_feature 1..20: note = Target: FXN; (-) strand; PAM type: NRG; PAM sequence: GGG
  source 1..20: mol_type = other DNA
taaaaatgatgtcaatgtta

SEQ ID NO: 13568 - DNA, 20 bp, synthetic construct
  misc_feature 1..20: note = Description of Artificial Sequence: Synthetic oligonucleotide
  misc_feature 1..20: note = Target: FXN; (-) strand; PAM type: NRG; PAM sequence: AGG
  source 1..20: mol_type = other DNA
ctaaaaatgatgtcaatgtt

SEQ ID NO: 13569 - DNA, 20 bp, synthetic construct
  misc_feature 1..20: note = Description of Artificial Sequence: Synthetic oligonucleotide
  misc_feature 1..20: note = Target: FXN; (-) strand; PAM type: NRG; PAM sequence: TAG
  source 1..20: mol_type = other DNA
cctaaaaatgatgtcaatgt

SEQ ID NO: 13570 - DNA, 20 bp, synthetic construct
  misc_feature 1..20: note = Description of Artificial Sequence: Synthetic oligonucleotide
  misc_feature 1..20: note = Target: FXN; (-) strand; PAM type: NRG; PAM sequence: GGG
  source 1..20: mol_type = other DNA
gagatcacagaataataaat

SEQ ID NO: 13571 - DNA, 20 bp, synthetic construct
  misc_feature 1..20: note = Description of Artificial Sequence: Synthetic oligonucleotide
  misc_feature 1..20: note = Target: FXN; (-) strand; PAM type: NRG; PAM sequence: TGG
  source 1..20: mol_type = other DNA
agagatcacagaataataaa

SEQ ID NO: 13572 - DNA, 20 bp, synthetic construct
  misc_feature 1..20: note = Description of Artificial Sequence: Synthetic oligonucleotide
  misc_feature 1..20: note = Target: FXN; (-) strand; PAM type: NRG; PAM sequence: CAG
  source 1..20: mol_type = other DNA
gaacaaagcattagagatca

SEQ ID NO: 13573 - DNA, 20 bp, synthetic construct
  misc_feature 1..20: note = Description of Artificial Sequence: Synthetic oligonucleotide
  misc_feature 1..20: note = Target: FXN; (-) strand; PAM type: NRG; PAM sequence: GAG
  source 1..20: mol_type = other DNA
ttattctgaacaaagcatta

SEQ ID NO: 13574 - DNA, 20 bp, synthetic construct
  misc_feature 1..20: note = Description of Artificial Sequence: Synthetic oligonucleotide
  misc_feature 1..20: note = Target: FXN; (-) strand; PAM type: NRG; PAM sequence: TAG
  source 1..20: mol_type = other DNA
atttattctgaacaaagcat

SEQ ID NO: 13575 - DNA, 20 bp, synthetic construct
  misc_feature 1..20: note = Description of Artificial Sequence: Synthetic oligonucleotide
  misc_feature 1..20: note = Target: FXN; (-) strand; PAM type: NRG; PAM sequence: AAG
  source 1..20: mol_type = other DNA
cacactatttattctgaaca

SEQ ID NO: 13576 - DNA, 20 bp, synthetic construct
  misc_feature 1..20: note = Description of Artificial Sequence: Synthetic oligonucleotide
  misc_feature 1..20: note = Target: FXN; (-) strand; PAM type: NRG; PAM sequence: AGG
  source 1..20: mol_type = other DNA
ttggatgaaagtgtggggaa

SEQ ID NO: 13577 - DNA, 20 bp, synthetic construct
  misc_feature 1..20: note = Description of Artificial Sequence: Synthetic oligonucleotide
  misc_feature 1..20: note = Target: FXN; (-) strand; PAM type: NRG; PAM sequence: AAG
  source 1..20: mol_type = other DNA
cttggatgaaagtgtgggga

SEQ ID NO: 13578 - DNA, 20 bp, synthetic construct
  misc_feature 1..20: note = Description of Artificial Sequence: Synthetic oligonucleotide
  misc_feature 1..20: note = Target: FXN; (-) strand; PAM type: NRG; PAM sequence: GGG
  source 1..20: mol_type = other DNA
acttcttggatgaaagtgtg

SEQ ID NO: 13579 - DNA, 20 bp, synthetic construct
  misc_feature 1..20: note = Description of Artificial Sequence: Synthetic oligonucleotide
  misc_feature 1..20: note = Target: FXN; (-) strand; PAM type: NRG; PAM sequence: GGG
  source 1..20: mol_type = other DNA
cacttcttggatgaaagtgt

SEQ ID NO: 13580 - DNA, 20 bp, synthetic construct
  misc_feature 1..20: note = Description of Artificial Sequence: Synthetic oligonucleotide
  misc_feature 1..20: note = Target: FXN; (-) strand; PAM type: NRG; PAM sequence: TGG
  source 1..20: mol_type = other DNA
acacttcttggatgaaagtg

SEQ ID NO: 13581 - DNA, 20 bp, synthetic construct
  misc_feature 1..20: note = Description of Artificial Sequence: Synthetic oligonucleotide
  misc_feature 1..20: note = Target: FXN; (-) strand; PAM type: NRG; PAM sequence: AAG
  source 1..20: mol_type = other DNA
ctagcacacttcttggatga

SEQ ID NO: 13582 - DNA, 20 bp, synthetic construct
  misc_feature 1..20: note = Description of Artificial Sequence: Synthetic oligonucleotide
  misc_feature 1..20: note = Target: FXN; (-) strand; PAM type: NRG; PAM sequence: TGG
  source 1..20: mol_type = other DNA
ttgaactctagcacacttct

SEQ ID NO: 13583 - DNA, 20 bp, synthetic construct
  misc_feature 1..20: note = Description of Artificial Sequence: Synthetic oligonucleotide
  misc_feature 1..20: note = Target: FXN; (-) strand; PAM type: NRG; PAM sequence: TAG
  source 1..20: mol_type = other DNA
gtgctgtttttgttgaactc

SEQ ID NO: 13584 - DNA, 20 bp, synthetic construct
  misc_feature 1..20: note = Description of Artificial Sequence: Synthetic oligonucleotide
  misc_feature 1..20: note = Target: FXN; (-) strand; PAM type: NRG; PAM sequence: TAG
  source 1..20: mol_type = other DNA
cctagaatgacagtgatttc

SEQ ID NO: 13585 - DNA, 20 bp, synthetic construct
  misc_feature 1..20: note = Description of Artificial Sequence: Synthetic oligonucleotide
  misc_feature 1..20: note = Target: FXN; (-) strand; PAM type: NRG; PAM sequence: CAG
  source 1..20: mol_type = other DNA
ttagggccttcctagaatga

SEQ ID NO: 13586 - DNA, 20 bp, synthetic construct
  misc_feature 1..20: note = Description of Artificial Sequence: Synthetic oligonucleotide
  misc_feature 1..20: note = Target: FXN; (-) strand; PAM type: NRG; PAM sequence: TAG
  source 1..20: mol_type = other DNA
tctgtgaattagggccttcc

SEQ ID NO: 13587 - DNA, 20 bp, synthetic construct
  misc_feature 1..20: note = Description of Artificial Sequence: Synthetic oligonucleotide
  misc_feature 1..20: note = Target: FXN; (-) strand; PAM type: NRG; PAM sequence: GGG
  source 1..20: mol_type = other DNA
ccaatacaatctgtgaatta

SEQ ID NO: 13588 - DNA, 20 bp, synthetic construct
  misc_feature 1..20: note = Description of Artificial Sequence: Synthetic oligonucleotide
  misc_feature 1..20: note = Target: FXN; (-) strand; PAM type: NRG; PAM sequence: AGG
  source 1..20: mol_type = other DNA
accaatacaatctgtgaatt

SEQ ID NO: 13589 - DNA, 20 bp, synthetic construct
  misc_feature 1..20: note = Description of Artificial Sequence: Synthetic oligonucleotide
  misc_feature 1..20: note = Target: FXN; (-) strand; PAM type: NRG; PAM sequence: TAG
  source 1..20: mol_type = other DNA
aaccaatacaatctgtgaat

SEQ ID NO: 13590 - DNA, 20 bp, synthetic construct
  misc_feature 1..20: note = Description of Artificial Sequence: Synthetic oligonucleotide
  misc_feature 1..20: note = Target: FXN; (-) strand; PAM type: NRG; PAM sequence: GGG
  source 1..20: mol_type = other DNA
caacctccagcacactaact

SEQ ID NO: 13591 - DNA, 20 bp, synthetic construct
  misc_feature 1..20: note = Description of Artificial Sequence: Synthetic oligonucleotide
  misc_feature 1..20: note = Target: FXN; (-) strand; PAM type: NRG; PAM sequence: TGG
  source 1..20: mol_type = other DNA
ccaacctccagcacactaac

SEQ ID NO: 13592 - DNA, 20 bp, synthetic construct
  misc_feature 1..20: note = Description of Artificial Sequence: Synthetic oligonucleotide
  misc_feature 1..20: note = Target: FXN; (-) strand; PAM type: NRG; PAM sequence: CAG
  source 1..20: mol_type = other DNA
ggttaaaatcctccaacctc

SEQ ID NO: 13593 - DNA, 20 bp, synthetic construct
  misc_feature 1..20: note = Description of Artificial Sequence: Synthetic oligonucleotide
  misc_feature 1..20: note = Target: FXN; (-) strand; PAM type: NRG; PAM sequence: AGG
  source 1..20: mol_type = other DNA
agaggctagttggcccacag

SEQ ID NO: 13594 - DNA, 20 bp, synthetic construct
  misc_feature 1..20: note = Description of Artificial Sequence: Synthetic oligonucleotide
  misc_feature 1..20: note = Target: FXN; (-) strand; PAM type: NRG; PAM sequence: GAG
  source 1..20: mol_type = other DNA
cagaggctagttggcccaca

SEQ ID NO: 13595 - DNA, 20 bp, synthetic construct
  misc_feature 1..20: note = Description of Artificial Sequence: Synthetic oligonucleotide
  misc_feature 1..20: note = Target: FXN; (-) strand; PAM type: NRG; PAM sequence: CAG
  source 1..20: mol_type = other DNA
cacagaggctagttggccca

SEQ ID NO: 13596 - DNA, 20 bp, synthetic construct
  misc_feature 1..20: note = Description of Artificial Sequence: Synthetic oligonucleotide
  misc_feature 1..20: note = Target: FXN; (-) strand; PAM type: NRG; PAM sequence: TGG
  source 1..20: mol_type = other DNA
ctgaggccacagaggctagt

SEQ ID NO: 13597 - DNA, 20 bp, synthetic construct
  misc_feature 1..20: note = Description of Artificial Sequence: Synthetic oligonucleotide
  misc_feature 1..20: note = Target: FXN; (-) strand; PAM type: NRG; PAM sequence: TAG
  source 1..20: mol_type = other DNA
atgactgaggccacagaggc

SEQ ID NO: 13598 - DNA, 20 bp, synthetic construct
  misc_feature 1..20: note = Description of Artificial Sequence: Synthetic oligonucleotide
  misc_feature 1..20: note = Target: FXN; (-) strand; PAM type: NRG; PAM sequence: AGG
  source 1..20: mol_type = other DNA
aagaatgactgaggccacag

SEQ ID NO: 13599 - DNA, 20 bp, synthetic construct
  misc_feature 1..20: note = Description of Artificial Sequence: Synthetic oligonucleotide
  misc_feature 1..20: note = Target: FXN; (-) strand; PAM type: NRG; PAM sequence: GAG
  source 1..20: mol_type = other DNA
gaagaatgactgaggccaca

SEQ ID NO: 13600 - DNA, 20 bp, synthetic construct
  misc_feature 1..20: note = Description of Artificial Sequence: Synthetic oligonucleotide
  misc_feature 1..20: note = Target: FXN; (-) strand; PAM type: NRG; PAM sequence: CAG
  source 1..20: mol_type = other DNA
aggaagaatgactgaggcca

SEQ ID NO: 13601 - DNA, 20 bp, synthetic construct
  misc_feature 1..20: note = Description of Artificial Sequence: Synthetic oligonucleotide
  misc_feature 1..20: note = Target: FXN; (-) strand; PAM type: NRG; PAM sequence: AGG
  source 1..20: mol_type = other DNA
agggtcaggaagaatgactg

SEQ ID NO: 13602 - DNA, 20 bp, synthetic construct
  misc_feature 1..20: note = Description of Artificial Sequence: Synthetic oligonucleotide
  misc_feature 1..20: note = Target: FXN; (-) strand; PAM type: NRG; PAM sequence: GAG
  source 1..20: mol_type = other DNA
cagggtcaggaagaatgact

SEQ ID NO: 13603 - DNA, 20 bp, synthetic construct
  misc_feature 1..20: note = Description of Artificial Sequence: Synthetic oligonucleotide
  misc_feature 1..20: note = Target: FXN; (-) strand; PAM type: NRG; PAM sequence: AAG
  source 1..20: mol_type = other DNA
caagcacagccagggtcagg

SEQ ID NO: 13604 - DNA, 20 bp, synthetic construct
  misc_feature 1..20: note = Description of Artificial Sequence: Synthetic oligonucleotide
  misc_feature 1..20: note = Target: FXN; (-) strand; PAM type: NRG; PAM sequence: AGG
  source 1..20: mol_type = other DNA
gctcaagcacagccagggtc

SEQ ID NO: 13605 - DNA, 20 bp, synthetic construct
  misc_feature 1..20: note = Description of Artificial Sequence: Synthetic oligonucleotide
  misc_feature 1..20: note = Target: FXN; (-) strand; PAM type: NRG; PAM sequence: CAG
  source 1..20: mol_type = other DNA
ggctcaagcacagccagggt

SEQ ID NO: 13606 - DNA, 20 bp, synthetic construct
  misc_feature 1..20: note = Description of Artificial Sequence: Synthetic oligonucleotide
  misc_feature 1..20: note = Target: FXN; (-) strand; PAM type: NRG; PAM sequence: GGG
  source 1..20: mol_type = other DNA
cacaggctcaagcacagcca

SEQ ID NO: 13607 - DNA, 20 bp, synthetic construct
  misc_feature 1..20: note = Description of Artificial Sequence: Synthetic oligonucleotide
  misc_feature 1..20: note = Target: FXN; (-) strand; PAM type: NRG; PAM sequence: AGG
  source 1..20: mol_type = other DNA
acacaggctcaagcacagcc

SEQ ID NO: 13608 - DNA, 20 bp, synthetic construct
  misc_feature 1..20: note = Description of Artificial Sequence: Synthetic oligonucleotide
  misc_feature 1..20: note = Target: FXN; (-) strand; PAM type: NRG; PAM sequence: CAG
  source 1..20: mol_type = other DNA
cacacaggctcaagcacagc

SEQ ID NO: 13609 - DNA, 20 bp, synthetic construct
  misc_feature 1..20: note = Description of Artificial Sequence: Synthetic oligonucleotide
  misc_feature 1..20: note = Target: FXN; (-) strand; PAM type: NRG; PAM sequence: CAG
  source 1..20: mol_type = other DNA
agaacacacaggctcaagca

SEQ ID NO: 13610 - DNA, 20 bp, synthetic construct
  misc_feature 1..20: note = Description of Artificial Sequence: Synthetic oligonucleotide
  misc_feature 1..20: note = Target: FXN; (-) strand; PAM type: NRG; PAM sequence: AAG
  source 1..20: mol_type = other DNA
ggataagaacacacaggctc

SEQ ID NO: 13611 - DNA, 20 bp, synthetic construct
  misc_feature 1..20: note = Description of Artificial Sequence: Synthetic oligonucleotide
  misc_feature 1..20: note = Target: FXN; (-) strand; PAM type: NRG; PAM sequence: AGG
  source 1..20: mol_type = other DNA
gatgaaggataagaacacac

SEQ ID NO: 13612 - DNA, 20 bp, synthetic construct
  misc_feature 1..20: note = Description of Artificial Sequence: Synthetic oligonucleotide
  misc_feature 1..20: note = Target: FXN; (-) strand; PAM type: NRG; PAM sequence: CAG
  source 1..20: mol_type = other DNA
agatgaaggataagaacaca

SEQ ID NO: 13613 - DNA, 20 bp, synthetic construct
  misc_feature 1..20: note = Description of Artificial Sequence: Synthetic oligonucleotide
  misc_feature 1..20: note = Target: FXN; (-) strand; PAM type: NRG; PAM sequence: AAG
  source 1..20: mol_type = other DNA
ttcccccggagatgaaggat

SEQ ID NO: 13614 - DNA, 20 bp, synthetic construct
  misc_feature 1..20: note = Description of Artificial Sequence: Synthetic oligonucleotide
  misc_feature 1..20: note = Target: FXN; (-) strand; PAM type: NRG; PAM sequence: AGG
  source 1..20: mol_type = other DNA
cttcgttcccccggagatga

SEQ ID NO: 13615 - DNA, 20 bp, synthetic construct
  misc_feature 1..20: note = Description of Artificial Sequence: Synthetic oligonucleotide
  misc_feature 1..20: note = Target: FXN; (-) strand; PAM type: NRG; PAM sequence: AAG
  source 1..20: mol_type = other DNA
acttcgttcccccggagatg

SEQ ID NO: 13616 - DNA, 20 bp, synthetic construct
  misc_feature 1..20: note = Description of Artificial Sequence: Synthetic oligonucleotide
  misc_feature 1..20: note = Target: FXN; (-) strand; PAM type: NRG; PAM sequence: GAG
  source 1..20: mol_type = other DNA
tgatccacttcgttcccccg

SEQ ID NO: 13617 - DNA, 20 bp, synthetic construct
  misc_feature 1..20: note = Description of Artificial Sequence: Synthetic oligonucleotide
  misc_feature 1..20: note = Target: FXN; (-) strand; PAM type: NRG; PAM sequence: CGG
  source 1..20: mol_type = other DNA
gctgatccacttcgttcccc

SEQ ID NO: 13618 - DNA, 20 bp, synthetic construct
  misc_feature 1..20: note = Description of Artificial Sequence: Synthetic oligonucleotide
  misc_feature 1..20: note = Target: FXN; (-) strand; PAM type: NRG; PAM sequence: GAG
  source 1..20: mol_type = other DNA
ccaaaagtgatcgctggacc

SEQ ID NO: 13619 - DNA, 20 bp, synthetic construct
  misc_feature 1..20: note = Description of Artificial Sequence: Synthetic oligonucleotide
  misc_feature 1..20: note = Target: FXN; (-) strand; PAM type: NRG; PAM sequence: TGG
  source 1..20: mol_type = other DNA
tgatccccaaaagtgatcgc

SEQ ID NO: 13620 - DNA, 20 bp, synthetic construct
  misc_feature 1..20: note = Description of Artificial Sequence: Synthetic oligonucleotide
  misc_feature 1..20: note = Target: FXN; (-) strand; PAM type: NRG; PAM sequence: AAG
  source 1..20: mol_type = other DNA
acaaagccactgatccccaa

SEQ ID NO: 13621 - DNA, 20 bp, synthetic construct
  misc_feature 1..20: note = Description of Artificial Sequence: Synthetic oligonucleotide
  misc_feature 1..20: note = Target: FXN; (-) strand; PAM type: NRG; PAM sequence: AAG
  source 1..20: mol_type = other DNA
gtgcctgcccgatatctaca

SEQ ID NO: 13622 - DNA, 20 bp, synthetic construct
  misc_feature 1..20: note = Description of Artificial Sequence: Synthetic oligonucleotide
  misc_feature 1..20: note = Target: FXN; (-) strand; PAM type: NRG; PAM sequence: AAG
  source 1..20: mol_type = other DNA
ggggaaagttcttttggggt

SEQ ID NO: 13623 - DNA, 20 bp, synthetic construct
  misc_feature 1..20: note = Description of Artificial Sequence: Synthetic oligonucleotide
  misc_feature 1..20: note = Target: FXN; (-) strand; PAM type: NRG; PAM sequence: GGG
  source 1..20: mol_type = other DNA
atatggggaaagttcttttg

SEQ ID NO: 13624 - DNA, 20 bp, synthetic construct
  misc_feature 1..20: note = Description of Artificial Sequence: Synthetic oligonucleotide
  misc_feature 1..20: note = Target: FXN; (-) strand; PAM type: NRG; PAM sequence: GGG
  source 1..20: mol_type = other DNA
gatatggggaaagttctttt

SEQ ID NO: 13625 - DNA, 20 bp, synthetic construct
  misc_feature 1..20: note = Description of Artificial Sequence: Synthetic oligonucleotide
  misc_feature 1..20: note = Target: FXN; (-) strand; PAM type: NRG; PAM sequence: TGG
  source 1..20: mol_type = other DNA
agatatggggaaagttcttt

SEQ ID NO: 13626 - DNA, 20 bp, synthetic construct
  misc_feature 1..20: note = Description of Artificial Sequence: Synthetic oligonucleotide
  misc_feature 1..20: note = Target: FXN; (-) strand; PAM type: NRG; PAM sequence: AAG
  source 1..20: mol_type = other DNA
tcagtcttcagatatgggga

SEQ ID NO: 13627 - DNA, 20 bp, synthetic construct
  misc_feature 1..20: note = Description of Artificial Sequence: Synthetic oligonucleotide
  misc_feature 1..20: note = Target: FXN; (-) strand; PAM type: NRG; PAM sequence: GGG
  source 1..20: mol_type = other DNA
gttttcagtcttcagatatg

SEQ ID NO: 13628 - DNA, 20 bp, synthetic construct
  misc_feature 1..20: note = Description of Artificial Sequence: Synthetic oligonucleotide
  misc_feature 1..20: note = Target: FXN; (-) strand; PAM type: NRG; PAM sequence: GGG
  source 1..20: mol_type = other DNA
cgttttcagtcttcagatat

SEQ ID NO: 13629 - DNA, 20 bp, synthetic construct
  misc_feature 1..20: note = Description of Artificial Sequence: Synthetic oligonucleotide
  misc_feature 1..20: note = Target: FXN; (-) strand; PAM type: NRG; PAM sequence: TGG
  source 1..20: mol_type = other DNA
acgttttcagtcttcagata

SEQ ID NO: 13630 - DNA, 20 bp, synthetic construct
  misc_feature 1..20: note = Description of Artificial Sequence: Synthetic oligonucleotide
  misc_feature 1..20: note = Target: FXN; (-) strand; PAM type: NRG; PAM sequence: CAG
  source 1..20: mol_type = other DNA
atatggacgttttcagtctt

SEQ ID NO: 13631 - DNA, 20 bp, synthetic construct
  misc_feature 1..20: note = Description of Artificial Sequence: Synthetic oligonucleotide
  misc_feature 1..20: note = Target: FXN; (-) strand; PAM type: NRG; PAM sequence: CAG
  source 1..20: mol_type = other DNA
aaatacgatatggacgtttt

SEQ ID NO: 13632 - DNA, 20 bp, synthetic construct
  misc_feature 1..20: note = Description of Artificial Sequence: Synthetic oligonucleotide
  misc_feature 1..20: note = Target: FXN; (-) strand; PAM type: NRG; PAM sequence: TGG
  source 1..20: mol_type = other DNA
cagtgtgtccaaatacgata

SEQ ID NO: 13633 - DNA, 20 bp, synthetic construct
  misc_feature 1..20: note = Description of Artificial Sequence: Synthetic oligonucleotide
  misc_feature 1..20: note = Target: FXN; (-) strand; PAM type: NRG; PAM sequence: CAG
  source 1..20: mol_type = other DNA
agctagagcgtattgctggg

SEQ ID NO: 13634 - DNA, 20 bp, synthetic construct
  misc_feature 1..20: note = Description of Artificial Sequence: Synthetic oligonucleotide
  misc_feature 1..20: note = Target: FXN; (-) strand; PAM type: NRG; PAM sequence: GGG
  source 1..20: mol_type = other DNA
cacagctagagcgtattgct

SEQ ID NO: 13635 - DNA, 20 bp, synthetic construct
  misc_feature 1..20: note = Description of Artificial Sequence: Synthetic oligonucleotide
  misc_feature 1..20: note = Target: FXN; (-) strand; PAM type: NRG; PAM sequence: TGG
  source 1..20: mol_type = other DNA
acacagctagagcgtattgc

SEQ ID NO: 13636 - DNA, 20 bp, synthetic construct
  misc_feature 1..20: note = Description of Artificial Sequence: Synthetic oligonucleotide
  misc_feature 1..20: note = Target: FXN; (-) strand; PAM type: NRG; PAM sequence: GAG
  source 1..20: mol_type = other DNA
catgcttctgaacacagcta

SEQ ID NO: 13637 - DNA, 20 bp, synthetic construct
  misc_feature 1..20: note = Description of Artificial Sequence: Synthetic oligonucleotide
  misc_feature 1..20: note = Target: FXN; (-) strand; PAM type: NRG; PAM sequence: TAG
  source 1..20: mol_type = other DNA
cccatgcttctgaacacagc

SEQ ID NO: 13638 - DNA, 20 bp, synthetic construct
  misc_feature 1..20: note = Description of Artificial Sequence: Synthetic oligonucleotide
  misc_feature 1..20: note = Target: FXN; (-) strand; PAM type: NRG; PAM sequence: CAG
  source 1..20: mol_type = other DNA
aattcccatgcttctgaaca

SEQ ID NO: 13639 - DNA, 20 bp, synthetic construct
  misc_feature 1..20: note = Description of Artificial Sequence: Synthetic oligonucleotide
  misc_feature 1..20: note = Target: FXN; (-) strand; PAM type: NRG; PAM sequence: CAG
  source 1..20: mol_type = other DNA
acagtaaacggcatgctcag

SEQ ID NO: 13640 - DNA, 20 bp, synthetic construct
  misc_feature 1..20: note = Description of Artificial Sequence: Synthetic oligonucleotide
  misc_feature 1..20: note = Target: FXN; (-) strand; PAM type: NRG; PAM sequence: CAG
  source 1..20: mol_type = other DNA
gtgacagtaaacggcatgct

SEQ ID NO: 13641 - DNA, 20 bp, synthetic construct
  misc_feature 1..20: note = Description of Artificial Sequence: Synthetic oligonucleotide
  misc_feature 1..20: note = Target: FXN; (-) strand; PAM type: NRG; PAM sequence: CGG
  source 1..20: mol_type = other DNA
atagtatctgtgacagtaaa

SEQ ID NO: 13642 - DNA, 20 bp, synthetic construct
  misc_feature 1..20: note = Description of Artificial Sequence: Synthetic oligonucleotide
  misc_feature 1..20: note = Target: FXN; (-) strand; PAM type: NRG; PAM sequence: CAG
  source 1..20: mol_type = other DNA
gaggaagatagtatctgtga

SEQ ID NO: 13643 - DNA, 20 bp, synthetic construct
  misc_feature 1..20: note = Description of Artificial Sequence: Synthetic oligonucleotide
  misc_feature 1..20: note = Target: FXN; (-) strand; PAM type: NRG; PAM sequence: TAG
  source 1..20: mol_type = other DNA
ttttttttttttgaggaaga

SEQ ID NO: 13644 - DNA, 20 bp, synthetic construct
  misc_feature 1..20: note = Description of Artificial Sequence: Synthetic oligonucleotide
  misc_feature 1..20: note = Target: FXN; (-) strand; PAM type: NRG; PAM sequence: AAG
  source 1..20: mol_type = other DNA
tatattttttttttttgagg

SEQ ID NO: 13645 - DNA, 20 bp, synthetic construct
  misc_feature 1..20: note = Description of Artificial Sequence: Synthetic oligonucleotide
  misc_feature 1..20: note = Target: FXN; (-) strand; PAM type: NRG; PAM sequence: AGG
  source 1..20: mol_type = other DNA
atatatattttttttttttg

SEQ ID NO: 13646 - DNA, 20 bp, synthetic construct
  misc_feature 1..20: note = Description of Artificial Sequence: Synthetic oligonucleotide
  misc_feature 1..20: note = Target: FXN; (-) strand; PAM type: NRG; PAM sequence: GAG
  source 1..20: mol_type = other DNA
tatatatatttttttttttt

SEQ ID NO: 13647 - DNA, 20 bp, synthetic construct
  misc_feature 1..20: note = Description of Artificial Sequence: Synthetic oligonucleotide
  misc_feature 1..20: note = Target: FXN; (-) strand; PAM type: NRG; PAM sequence: CAG
  source 1..20: mol_type = other DNA
ggcacctcttcagtctcacc

SEQ ID NO: 13648 - DNA, 20 bp, synthetic construct
  misc_feature 1..20: note = Description of Artificial Sequence: Synthetic oligonucleotide
  misc_feature 1..20: note = Target: FXN; (-) strand; PAM type: NRG; PAM sequence: CAG
  source 1..20: mol_type = other DNA
ctctggccaaggcacctctt

SEQ ID NO: 13649 - DNA, 20 bp, synthetic construct
  misc_feature 1..20: note = Description of Artificial Sequence: Synthetic oligonucleotide
  misc_feature 1..20: note = Target: FXN; (-) strand; PAM type: NRG; PAM sequence: AGG
  source 1..20: mol_type = other DNA
ggtgtggcctgctctggcca

SEQ ID NO: 13650 - DNA, 20 bp, synthetic construct
  misc_feature 1..20: note = Description of Artificial Sequence: Synthetic oligonucleotide
  misc_feature 1..20: note = Target: FXN; (-) strand; PAM type: NRG; PAM sequence: AAG
  source 1..20: mol_type = other DNA
gggtgtggcctgctctggcc

SEQ ID NO: 13651 - DNA, 20 bp, synthetic construct
  misc_feature 1..20: note = Description of Artificial Sequence: Synthetic oligonucleotide
  misc_feature 1..20: note = Target: FXN; (-) strand; PAM type: NRG; PAM sequence: TGG
  source 1..20: mol_type = other DNA
tctctgggtgtggcctgctc

SEQ ID NO: 13652 - DNA, 20 bp, synthetic construct
  misc_feature 1..20: note = Description of Artificial Sequence: Synthetic oligonucleotide
  misc_feature 1..20: note = Target: FXN; (-) strand; PAM type: NRG; PAM sequence: TGG
  source 1..20: mol_type = other DNA
gagcctgtggtctctgggtg

SEQ ID NO: 13653 - DNA, 20 bp, synthetic construct
  misc_feature 1..20: note = Description of Artificial Sequence: Synthetic oligonucleotide
  misc_feature 1..20: note = Target: FXN; (-) strand; PAM type: NRG; PAM sequence: GGG
  source 1..20: mol_type = other DNA
ccggggagcctgtggtctct

SEQ ID NO: 13654 - DNA, 20 bp, synthetic construct
  misc_feature 1..20: note = Description of Artificial Sequence: Synthetic oligonucleotide
  misc_feature 1..20: note = Target: FXN; (-) strand; PAM type: NRG; PAM sequence: TGG
  source 1..20: mol_type = other DNA
accggggagcctgtggtctc

SEQ ID NO: 13655 - DNA, 20 bp, synthetic construct
  misc_feature 1..20: note = Description of Artificial Sequence: Synthetic oligonucleotide
  misc_feature 1..20: note = Target: FXN; (-) strand; PAM type: NRG; PAM sequence: TGG
  source 1..20: mol_type = other DNA
gaggtggaccggggagcctg

SEQ ID NO: 13656 - DNA, 20 bp, synthetic construct
  misc_feature 1..20: note = Description of Artificial Sequence: Synthetic oligonucleotide
  misc_feature 1..20: note = Target: FXN; (-) strand; PAM type: NRG; PAM sequence: GAG
  source 1..20: mol_type = other DNA
ggggcctgaggtggaccggg

SEQ ID NO: 13657 - DNA, 20 bp, synthetic construct
  misc_feature 1..20: note = Description of Artificial Sequence: Synthetic oligonucleotide
  misc_feature 1..20: note = Target: FXN; (-) strand; PAM type: NRG; PAM sequence: GGG
  source 1..20: mol_type = other DNA
gaggggcctgaggtggaccg

SEQ ID NO: 13658 - DNA, 20 bp, synthetic construct
  misc_feature 1..20: note = Description of Artificial Sequence: Synthetic oligonucleotide
  misc_feature 1..20: note = Target: FXN; (-) strand; PAM type: NRG; PAM sequence: GGG
  source 1..20: mol_type = other DNA
ggaggggcctgaggtggacc

SEQ ID NO: 13659 - DNA, 20 bp, synthetic construct
  misc_feature 1..20: note = Description of Artificial Sequence: Synthetic oligonucleotide
  misc_feature 1..20: note = Target: FXN; (-) strand; PAM type: NRG; PAM sequence: CGG
  source 1..20: mol_type = other DNA
gggaggggcctgaggtggac

SEQ ID NO: 13660 - DNA, 20 bp, synthetic construct
  misc_feature 1..20: note = Description of Artificial Sequence: Synthetic oligonucleotide
  misc_feature 1..20: note = Target: FXN; (-) strand; PAM type: NRG; PAM sequence: TGG
  source 1..20: mol_type = other DNA
ggaaggggaggggcctgagg

SEQ ID NO: 13661 - DNA, 20 bp, synthetic construct
  misc_feature 1..20: note = Description of Artificial Sequence: Synthetic oligonucleotide
  misc_feature 1..20: note = Target: FXN; (-) strand; PAM type: NRG; PAM sequence: AGG
  source 1..20: mol_type = other DNA
gcaggaaggggaggggcctg

SEQ ID NO: 13662 - DNA, 20 bp, synthetic construct
  misc_feature 1..20: note = Description of Artificial Sequence: Synthetic oligonucleotide
  misc_feature 1..20: note = Target: FXN; (-) strand; PAM type: NRG; PAM sequence: GAG
  source 1..20: mol_type = other DNA
cgcaggaaggggaggggcct

SEQ ID NO: 13663 - DNA, 20 bp, synthetic construct
  misc_feature 1..20: note = Description of Artificial Sequence: Synthetic oligonucleotide
  misc_feature 1..20: note = Target: FXN; (-) strand; PAM type: NRG; PAM sequence: GGG
  source 1..20: mol_type = other DNA
aaacggcgcaggaaggggag

SEQ ID NO: 13664 - DNA, 20 bp, synthetic construct
  misc_feature 1..20: note = Description of Artificial Sequence: Synthetic oligonucleotide
  misc_feature 1..20: note = Target: FXN; (-) strand; PAM type: NRG; PAM sequence: GGG
  source 1..20: mol_type = other DNA
gaaacggcgcaggaagggga

SEQ ID NO: 13665 - DNA, 20 bp, synthetic construct
  misc_feature 1..20: note = Description of Artificial Sequence: Synthetic oligonucleotide
  misc_feature 1..20: note = Target: FXN; (-) strand; PAM type: NRG; PAM sequence: AGG
  source 1..20: mol_type = other DNA
ggaaacggcgcaggaagggg

SEQ ID NO: 13666 - DNA, 20 bp, synthetic construct
  misc_feature 1..20: note = Description of Artificial Sequence: Synthetic oligonucleotide
  misc_feature 1..20: note = Target: FXN; (-) strand; PAM type: NRG; PAM sequence: GAG
  source 1..20: mol_type = other DNA
cggaaacggcgcaggaaggg

SEQ ID NO: 13667 - DNA, 20 bp, synthetic construct
  misc_feature 1..20: note = Description of Artificial Sequence: Synthetic oligonucleotide
  misc_feature 1..20: note = Target: FXN; (-) strand; PAM type: NRG; PAM sequence: GGG
  source 1..20: mol_type = other DNA
gccggaaacggcgcaggaag

SEQ ID NO: 13668 - DNA, 20 bp, synthetic construct
  misc_feature 1..20: note = Description of Artificial Sequence: Synthetic oligonucleotide
  misc_feature 1..20: note = Target: FXN; (-) strand; PAM type: NRG; PAM sequence: GGG
  source 1..20: mol_type = other DNA
tgccggaaacggcgcaggaa

SEQ ID NO: 13669 - DNA, 20 bp, synthetic construct
  misc_feature 1..20: note = Description of Artificial Sequence: Synthetic oligonucleotide
  misc_feature 1..20: note = Target: FXN; (-) strand; PAM type: NRG; PAM sequence: AGG
  source 1..20: mol_type = other DNA
ctgccggaaacggcgcagga

SEQ ID NO: 13670 - DNA, 20 bp, synthetic construct
  misc_feature 1..20: note = Description of Artificial Sequence: Synthetic oligonucleotide
  misc_feature 1..20: note = Target: FXN; (-) strand; PAM type: NRG; PAM sequence: AAG
  source 1..20: mol_type = other DNA
tctgccggaaacggcgcagg

SEQ ID NO: 13671 - DNA, 20 bp, synthetic construct
  misc_feature 1..20: note = Description of Artificial Sequence: Synthetic oligonucleotide
  misc_feature 1..20: note = Target: FXN; (-) strand; PAM type: NRG; PAM sequence: AGG
  source 1..20: mol_type = other DNA
ggatctgccggaaacggcgc

SEQ ID NO: 13672 - DNA, 20 bp, synthetic construct
  misc_feature 1..20: note = Description of Artificial Sequence: Synthetic oligonucleotide
  misc_feature 1..20: note = Target: FXN; (-) strand; PAM type: NRG; PAM sequence: CAG
  source 1..20: mol_type = other DNA
tggatctgccggaaacggcg

SEQ ID NO: 13673 - DNA, 20 bp, synthetic construct
  misc_feature 1..20: note = Description of Artificial Sequence: Synthetic oligonucleotide
  misc_feature 1..20: note = Target: FXN; (-) strand; PAM type: NRG; PAM sequence: CGG
  source 1..20: mol_type = other DNA
cactctggatctgccggaaa

SEQ ID NO: 13674 - DNA, 20 bp, synthetic construct
  misc_feature 1..20: note = Description of Artificial Sequence: Synthetic oligonucleotide
  misc_feature 1..20: note = Target: FXN; (-) strand; PAM type: NRG; PAM sequence: CGG
  source 1..20: mol_type = other DNA
ggtggccactctggatctgc

SEQ ID NO: 13675 - DNA, 20 bp, synthetic construct
  misc_feature 1..20: note = Description of Artificial Sequence: Synthetic oligonucleotide
  misc_feature 1..20: note = Target: FXN; (-) strand; PAM type: NRG; PAM sequence: TGG
  source 1..20: mol_type = other DNA
ccatccggcggtggccactc

SEQ ID NO: 13676 - DNA, 20 bp, synthetic construct
  misc_feature 1..20: note = Description of Artificial Sequence: Synthetic oligonucleotide
  misc_feature 1..20: note = Target: FXN; (-) strand; PAM type: NRG; PAM sequence: TGG
  source 1..20: mol_type = other DNA
ccccgactcccatccggcgg

SEQ ID NO: 13677 - DNA, 20 bp, synthetic construct
  misc_feature 1..20: note = Description of Artificial Sequence: Synthetic oligonucleotide
  misc_feature 1..20: note = Target: FXN; (-) strand; PAM type: NRG; PAM sequence: CGG
  source 1..20: mol_type = other DNA
ttcccccgactcccatccgg

SEQ ID NO: 13678 - DNA, 20 bp, synthetic construct
  misc_feature 1..20: note = Description of Artificial Sequence: Synthetic oligonucleotide
  misc_feature 1..20: note = Target: FXN; (-) strand; PAM type: NRG; PAM sequence: CGG
  source 1..20: mol_type = other DNA
cccttcccccgactcccatc

SEQ ID NO: 13679 - DNA, 20 bp, synthetic construct
  misc_feature 1..20: note = Description of Artificial Sequence: Synthetic oligonucleotide
  misc_feature 1..20: note = Target: FXN; (-) strand; PAM type: NRG; PAM sequence: GGG
  source 1..20: mol_type = other DNA
gcactgagagcttgtcctca

SEQ ID NO: 13680 - DNA, 20 bp, synthetic construct
  misc_feature 1..20: note = Description of Artificial Sequence: Synthetic oligonucleotide
  misc_feature 1..20: note = Target: FXN; (-) strand; PAM type: NRG; PAM sequence: AGG
  source 1..20: mol_type = other DNA
agcactgagagcttgtcctc

SEQ ID NO: 13681 - DNA, 20 bp, synthetic construct
  misc_feature 1..20: note = Description of Artificial Sequence: Synthetic oligonucleotide
  misc_feature 1..20: note = Target: FXN; (-) strand; PAM type: NRG; PAM sequence: CAG
  source 1..20: mol_type = other DNA
aagcactgagagcttgtcct

SEQ ID NO: 13682 - DNA, 20 bp, synthetic construct
  misc_feature 1..20: note = Description of Artificial Sequence: Synthetic oligonucleotide
  misc_feature 1..20: note = Target: FXN; (-) strand; PAM type: NRG; PAM sequence: GAG
  source 1..20: mol_type = other DNA
acttcccacagaagcactga

SEQ ID NO: 13683 - DNA, 20 bp, synthetic construct
  misc_feature 1..20: note = Description of Artificial Sequence: Synthetic oligonucleotide
  misc_feature 1..20: note = Target: FXN; (-) strand; PAM type: NRG; PAM sequence: GAG
  source 1..20: mol_type = other DNA
ccacttcccacagaagcact

SEQ ID NO: 13684 - DNA, 20 bp, synthetic construct
  misc_feature 1..20: note = Description of Artificial Sequence: Synthetic oligonucleotide
  misc_feature 1..20: note = Target: FXN; (-) strand; PAM type: NRG; PAM sequence: AAG
  source 1..20: mol_type = other DNA
cttgccgccacttcccacag

SEQ ID NO: 13685 - DNA, 20 bp, synthetic construct
  misc_feature 1..20: note = Description of Artificial Sequence: Synthetic oligonucleotide
  misc_feature 1..20: note = Target: FXN; (-) strand; PAM type: NRG; PAM sequence: CAG
  source 1..20: mol_type = other DNA
cgtcttgccgccacttccca

SEQ ID NO: 13686 - DNA, 20 bp, synthetic construct
  misc_feature 1..20: note = Description of Artificial Sequence: Synthetic oligonucleotide
  misc_feature 1..20: note = Target: FXN; (-) strand; PAM type: NRG; PAM sequence: GAG
  source 1..20: mol_type = other DNA
cggcctccatcccccgctgg

SEQ ID NO: 13687 - DNA, 20 bp, synthetic construct
  misc_feature 1..20: note = Description of Artificial Sequence: Synthetic oligonucleotide
  misc_feature 1..20: note = Target: FXN; (-) strand; PAM type: NRG; PAM sequence: GGG
  source 1..20: mol_type = other DNA
ctcggcctccatcccccgct

SEQ ID NO: 13688 - DNA, 20 bp, synthetic construct
  misc_feature 1..20: note = Description of Artificial Sequence: Synthetic oligonucleotide
  misc_feature 1..20: note = Target: FXN; (-) strand; PAM type: NRG; PAM sequence: TGG
  source 1..20: mol_type = other DNA
actcggcctccatcccccgc

SEQ ID NO: 13689 - DNA, 20 bp, synthetic construct
  misc_feature 1..20: note = Description of Artificial Sequence: Synthetic oligonucleotide
  misc_feature 1..20: note = Target: FXN; (-) strand; PAM type: NRG; PAM sequence: CGG
  source 1..20: mol_type = other DNA
cagtgaccagcagactgact

SEQ ID NO: 13690 - DNA, 20 bp, synthetic construct
  misc_feature 1..20: note = Description of Artificial Sequence: Synthetic oligonucleotide
  misc_feature 1..20: note = Target: FXN; (-) strand; PAM type: NRG; PAM sequence: CAG
  source 1..20: mol_type = other DNA
tcctggcctccagtgaccag

SEQ ID NO: 13691 - DNA, 20 bp, synthetic construct
  misc_feature 1..20: note = Description of Artificial Sequence: Synthetic oligonucleotide
  misc_feature 1..20: note = Target: FXN; (-) strand; PAM type: NRG; PAM sequence: CAG
  source 1..20: mol_type = other DNA
gcatcctggcctccagtgac

SEQ ID NO: 13692 - DNA, 20 bp, synthetic construct
  misc_feature 1..20: note = Description of Artificial Sequence: Synthetic oligonucleotide
  misc_feature 1..20: note = Target: FXN; (-) strand; PAM type: NRG; PAM sequence: CAG
  source 1..20: mol_type = other DNA
ttaggcagcatcctggcctc

SEQ ID NO: 13693 - DNA, 20 bp, synthetic construct
  misc_feature 1..20: note = Description of Artificial Sequence: Synthetic oligonucleotide
  misc_feature 1..20: note = Target: FXN; (-) strand; PAM type: NRG; PAM sequence: TGG
  source 1..20: mol_type = other DNA
ggctgtgttaggcagcatcc

SEQ ID NO: 13694 - DNA, 20 bp, synthetic construct
  misc_feature 1..20: note = Description of Artificial Sequence: Synthetic oligonucleotide
  misc_feature 1..20: note = Target: FXN; (-) strand; PAM type: NRG; PAM sequence: CAG
  source 1..20: mol_type = other DNA
agcgggacggctgtgttagg

SEQ ID NO: 13695 - DNA, 20 bp, synthetic construct
  misc_feature 1..20: note = Description of Artificial Sequence: Synthetic oligonucleotide
  misc_feature 1..20: note = Target: FXN; (-) strand; PAM type: NRG; PAM sequence: AGG
  source 1..20: mol_type = other DNA
cggagcgggacggctgtgtt

SEQ ID NO: 13696 - DNA, 20 bp, synthetic construct
  misc_feature 1..20: note = Description of Artificial Sequence: Synthetic oligonucleotide
  misc_feature 1..20: note = Target: FXN; (-) strand; PAM type: NRG; PAM sequence: TAG
  source 1..20: mol_type = other DNA
ccggagcgggacggctgtgt

SEQ ID NO: 13697 - DNA, 20 bp, synthetic construct
  misc_feature 1..20: note = Description of Artificial Sequence: Synthetic oligonucleotide
  misc_feature 1..20: note = Target: FXN; (-) strand; PAM type: NRG; PAM sequence: CGG
  source 1..20: mol_type = other DNA
tggtgaggcccggagcggga

SEQ ID NO: 13698 - DNA, 20 bp, synthetic construct
  misc_feature 1..20: note = Description of Artificial Sequence: Synthetic oligonucleotide
  misc_feature 1..20: note = Target: FXN; (-) strand; PAM type: NRG; PAM sequence: GGG
  source 1..20: mol_type = other DNA
ctggtggtgaggcccggagc

SEQ ID NO: 13699 - DNA, 20 bp, synthetic construct
  misc_feature 1..20: note = Description of Artificial Sequence: Synthetic oligonucleotide
  misc_feature 1..20: note = Target: FXN; (-) strand; PAM type: NRG; PAM sequence: CGG
  source 1..20: mol_type = other DNA
cctggtggtgaggcccggag

SEQ ID NO: 13700 - DNA, 20 bp, synthetic construct
  misc_feature 1..20: note = Description of Artificial Sequence: Synthetic oligonucleotide
  misc_feature 1..20: note = Target: FXN; (-) strand; PAM type: NRG; PAM sequence: GAG
  source 1..20: mol_type = other DNA
cgccctggtggtgaggcccg

SEQ ID NO: 13701 - DNA, 20 bp, synthetic construct
  misc_feature 1..20: note = Description of Artificial Sequence: Synthetic oligonucleotide
  misc_feature 1..20: note = Target: FXN; (-) strand; PAM type: NRG; PAM sequence: CGG
  source 1..20: mol_type = other DNA
gccgccctggtggtgaggcc

SEQ ID NO: 13702 - DNA, 20 bp, synthetic construct
  misc_feature 1..20: note = Description of Artificial Sequence: Synthetic oligonucleotide
  misc_feature 1..20: note = Target: FXN; (-) strand; PAM type: NRG; PAM sequence: AGG
  source 1..20: mol_type = other DNA
ggagagccgccctggtggtg

SEQ ID NO: 13703 - DNA, 20 bp, synthetic construct
  misc_feature 1..20: note = Description of Artificial Sequence: Synthetic oligonucleotide
  misc_feature 1..20: note = Target: FXN; (-) strand; PAM type: NRG; PAM sequence: GAG
  source 1..20: mol_type = other DNA
gggagagccgccctggtggt

SEQ ID NO: 13704 - DNA, 20 bp, synthetic construct
  misc_feature 1..20: note = Description of Artificial Sequence: Synthetic oligonucleotide
  misc_feature 1..20: note = Target: FXN; (-) strand; PAM type: NRG; PAM sequence: TGG
  source 1..20: mol_type = other DNA
agtggggagagccgccctgg

SEQ ID NO: 13705 - DNA, 20 bp, synthetic construct
  misc_feature 1..20: note = Description of Artificial Sequence: Synthetic oligonucleotide
  misc_feature 1..20: note = Target: FXN; (-) strand; PAM type: NRG; PAM sequence: TGG
  source 1..20: mol_type = other DNA
gggagtggggagagccgccc

SEQ ID NO: 13706 - DNA, 20 bp, synthetic construct
  misc_feature 1..20: note = Description of Artificial Sequence: Synthetic oligonucleotide
  misc_feature 1..20: note = Target: FXN; (-) strand; PAM type: NRG; PAM sequence: GAG
  source 1..20: mol_type = other DNA
cagcaggccgggagtgggga

SEQ ID NO: 13707 - DNA, 20 bp, synthetic construct
  misc_feature 1..20: note = Description of Artificial Sequence: Synthetic oligonucleotide
  misc_feature 1..20: note = Target: FXN; (-) strand; PAM type: NRG; PAM sequence: GAG
  source 1..20: mol_type = other DNA
ggcagcaggccgggagtggg

SEQ ID NO: 13708 - DNA, 20 bp, synthetic construct
  misc_feature 1..20: note = Description of Artificial Sequence: Synthetic oligonucleotide
  misc_feature 1..20: note = Target: FXN; (-) strand; PAM type: NRG; PAM sequence: GGG
  source 1..20: mol_type = other DNA
tgggcagcaggccgggagtg

SEQ ID NO: 13709 - DNA, 20 bp, synthetic construct
  misc_feature 1..20: note = Description of Artificial Sequence: Synthetic oligonucleotide
  misc_feature 1..20: note = Target: FXN; (-) strand; PAM type: NRG; PAM sequence: GGG
  source 1..20: mol_type = other DNA
gtgggcagcaggccgggagt

SEQ ID NO: 13710 - DNA, 20 bp, synthetic construct
  misc_feature 1..20: note = Description of Artificial Sequence: Synthetic oligonucleotide
  misc_feature 1..20: note = Target: FXN; (-) strand; PAM type: NRG; PAM sequence: TGG
  source 1..20: mol_type = other DNA
tgtgggcagcaggccgggag

SEQ ID NO: 13711 - DNA, 20 bp, synthetic construct
  misc_feature 1..20: note = Description of Artificial Sequence: Synthetic oligonucleotide
  misc_feature 1..20: note = Target: FXN; (-) strand; PAM type: NRG; PAM sequence: GAG
  source 1..20: mol_type = other DNA
ctgtgtgggcagcaggccgg

SEQ ID NO: 13712 - DNA, 20 bp, synthetic construct
  misc_feature 1..20: note = Description of Artificial Sequence: Synthetic oligonucleotide
  misc_feature 1..20: note = Target: FXN; (-) strand; PAM type: NRG; PAM sequence: GGG
  source 1..20: mol_type = other DNA
gtctgtgtgggcagcaggcc

SEQ ID NO: 13713 - DNA, 20 bp, synthetic construct
  misc_feature 1..20: note = Description of Artificial Sequence: Synthetic oligonucleotide
  misc_feature 1..20: note = Target: FXN; (-) strand; PAM type: NRG; PAM sequence: CGG
  source 1..20: mol_type = other DNA
agtctgtgtgggcagcaggc

SEQ ID NO: 13714 - DNA, 20 bp, synthetic construct
  misc_feature 1..20: note = Description of Artificial Sequence: Synthetic oligonucleotide
  misc_feature 1..20: note = Target: FXN; (-) strand; PAM type: NRG; PAM sequence: AGG
  source 1..20: mol_type = other DNA
ccgcagtctgtgtgggcagc

SEQ ID NO: 13715 - DNA, 20 bp, synthetic construct
  misc_feature 1..20: note = Description of Artificial Sequence: Synthetic oligonucleotide
  misc_feature 1..20: note = Target: FXN; (-) strand; PAM type: NRG; PAM sequence: CAG
  source 1..20: mol_type = other DNA
cccgcagtctgtgtgggcag

SEQ ID NO: 13716 - DNA, 20 bp, synthetic construct
  misc_feature 1..20: note = Description of Artificial Sequence: Synthetic oligonucleotide
  misc_feature 1..20: note = Target: FXN; (-) strand; PAM type: NRG; PAM sequence: CAG
  source 1..20: mol_type = other DNA
aaccccgcagtctgtgtggg

SEQ ID NO: 13717 - DNA, 20 bp, synthetic construct
  misc_feature 1..20: note = Description of Artificial Sequence: Synthetic oligonucleotide
  misc_feature 1..20: note = Target: FXN; (-) strand; PAM type: NRG; PAM sequence: GGG
  source 1..20: mol_type = other DNA
cggaaccccgcagtctgtgt

SEQ ID NO: 13718 - DNA, 20 bp, synthetic construct
  misc_feature 1..20: note = Description of Artificial Sequence: Synthetic oligonucleotide
  misc_feature 1..20: note = Target: FXN; (-) strand; PAM type: NRG; PAM sequence: TGG
  source 1..20: mol_type = other DNA
ccggaaccccgcagtctgtg

SEQ ID NO: 13719 - DNA, 20 bp, synthetic construct
  misc_feature 1..20: note = Description of Artificial Sequence: Synthetic oligonucleotide
  misc_feature 1..20: note = Target: FXN; (-) strand; PAM type: NRG; PAM sequence: CAG
  source 1..20: mol_type = other DNA
cctgctcccccggaaccccg

SEQ ID NO: 13720 - DNA, 20 bp, synthetic construct
  misc_feature 1..20: note = Description of Artificial Sequence: Synthetic oligonucleotide
  misc_feature 1..20: note = Target: FXN; (-) strand; PAM type: NRG; PAM sequence: CGG
  source 1..20: mol_type = other DNA
cggcctgggtcctgctcccc

SEQ ID NO: 13721 - DNA, 20 bp, synthetic construct
  misc_feature 1..20: note = Description of Artificial Sequence: Synthetic oligonucleotide
  misc_feature 1..20: note = Target: FXN; (-) strand; PAM type: NRG; PAM sequence: GGG
  source 1..20: mol_type = other DNA
agacaggcgcagaacggcct

SEQ ID NO: 13722 - DNA, 20 bp, synthetic construct
  misc_feature 1..20: note = Description of Artificial Sequence: Synthetic oligonucleotide
  misc_feature 1..20: note = Target: FXN; (-) strand; PAM type: NRG; PAM sequence: TGG
  source 1..20: mol_type = other DNA
aagacaggcgcagaacggcc

SEQ ID NO: 13723 - DNA, 20 bp, synthetic construct
  misc_feature 1..20: note = Description of Artificial Sequence: Synthetic oligonucleotide
  misc_feature 1..20: note = Target: FXN; (-) strand; PAM type: NRG; PAM sequence: CGG
  source 1..20: mol_type = other DNA
ccaagaagacaggcgcagaa

SEQ ID NO: 13724 - DNA, 20 bp, synthetic construct
  misc_feature 1..20: note = Description of Artificial Sequence: Synthetic oligonucleotide
  misc_feature 1..20: note = Target: FXN; (-) strand; PAM type: NRG; PAM sequence: CAG
  source 1..20: mol_type = other DNA
tccttccaagaagacaggcg

SEQ ID NO: 13725 - DNA, 20 bp, synthetic construct
  misc_feature 1..20: note = Description of Artificial Sequence: Synthetic oligonucleotide
  misc_feature 1..20: note = Target: FXN; (-) strand; PAM type: NRG; PAM sequence: AGG
  source 1..20: mol_type = other DNA
cctgctccttccaagaagac

SEQ ID NO: 13726 - DNA, 20 bp, synthetic construct
  misc_feature 1..20: note = Description of Artificial Sequence: Synthetic oligonucleotide
  misc_feature 1..20: note = Target: FXN; (-) strand; PAM type: NRG; PAM sequence: CAG
  source 1..20: mol_type = other DNA
gcctgctccttccaagaaga

SEQ ID NO: 13727 - DNA, 20 bp, synthetic construct
  misc_feature 1..20: note = Description of Artificial Sequence: Synthetic oligonucleotide
  misc_feature 1..20: note = Target: FXN; (-) strand; PAM type: NRG; PAM sequence: AAG
  source 1..20: mol_type = other DNA
tccggcctgctccttccaag

SEQ ID NO: 13728 - DNA, 20 bp, synthetic construct
  misc_feature 1..20: note = Description of Artificial Sequence: Synthetic oligonucleotide
  misc_feature 1..20: note = Target: FXN; (-) strand; PAM type: NRG; PAM sequence: AAG
  source 1..20: mol_type = other DNA
cgctccggcctgctccttcc

SEQ ID NO: 13729 - DNA, 20 bp, synthetic construct
  misc_feature 1..20: note = Description of Artificial Sequence: Synthetic oligonucleotide
  misc_feature 1..20: note = Target: FXN; (-) strand; PAM type: NRG; PAM sequence: CGG
  source 1..20: mol_type = other DNA
tacacggcgctcccgcgctc

SEQ ID NO: 13730 - DNA, 20 bp, synthetic construct
  misc_feature 1..20: note = Description of Artificial Sequence: Synthetic oligonucleotide
  misc_feature 1..20: note = Target: FXN; (-) strand; PAM type: NRG; PAM sequence: CGG
  source 1..20: mol_type = other DNA
ccttcgcaggtacagctaca

SEQ ID NO: 13731 - DNA, 20 bp, synthetic construct
  misc_feature 1..20: note = Description of Artificial Sequence: Synthetic oligonucleotide
  misc_feature 1..20: note = Target: FXN; (-) strand; PAM type: NRG; PAM sequence: CAG
  source 1..20: mol_type = other DNA
atcctgtgccttcgcaggta

SEQ ID NO: 13732 - DNA, 20 bp, synthetic construct
  misc_feature 1..20: note = Description of Artificial Sequence: Synthetic oligonucleotide
  misc_feature 1..20: note = Target: FXN; (-) strand; PAM type: NRG; PAM sequence: AGG
  source 1..20: mol_type = other DNA
gcggaatcctgtgccttcgc

SEQ ID NO: 13733 - DNA, 20 bp, synthetic construct
  misc_feature 1..20: note = Description of Artificial Sequence: Synthetic oligonucleotide
  misc_feature 1..20: note = Target: FXN; (-) strand; PAM type: NRG; PAM sequence: CAG
  source 1..20: mol_type = other DNA
cgcggaatcctgtgccttcg

SEQ ID NO: 13734 - DNA, 20 bp, synthetic construct
  misc_feature 1..20: note = Description of Artificial Sequence: Synthetic oligonucleotide
  misc_feature 1..20: note = Target: FXN; (-) strand; PAM type: NRG; PAM sequence: CGG
  source 1..20: mol_type = other DNA
gaaactgcgggatcttcccg

SEQ ID NO: 13735 - DNA, 20 bp, synthetic construct
  misc_feature 1..20: note = Description of Artificial Sequence: Synthetic oligonucleotide
  misc_feature 1..20: note = Target: FXN; (-) strand; PAM type: NRG; PAM sequence: GGG
  source 1..20: mol_type = other DNA
tgacgacggcccgaaactgc

SEQ ID NO: 13736 - DNA, 20 bp, synthetic construct
  misc_feature 1..20: note = Description of Artificial Sequence: Synthetic oligonucleotide
  misc_feature 1..20: note = Target: FXN; (-) strand; PAM type: NRG; PAM sequence: CGG
  source 1..20: mol_type = other DNA
atgacgacggcccgaaactg

SEQ ID NO: 13737 - DNA, 20 bp, synthetic construct
  misc_feature 1..20: note = Description of Artificial Sequence: Synthetic oligonucleotide
  misc_feature 1..20: note = Target: FXN; (-) strand; PAM type: NRG; PAM sequence: CGG
  source 1..20: mol_type = other DNA
aggtataaaaacaatgacga

SEQ ID NO: 13738 - DNA, 20 bp, synthetic construct
  misc_feature 1..20: note = Description of Artificial Sequence: Synthetic oligonucleotide
  misc_feature 1..20: note = Target: FXN; (-) strand; PAM type: NRG; PAM sequence: AGG
  source 1..20: mol_type = other DNA
ctggtcatgccatttgccac

SEQ ID NO: 13739 - DNA, 20 bp, synthetic construct
  misc_feature 1..20: note = Description of Artificial Sequence: Synthetic oligonucleotide
  misc_feature 1..20: note = Target: FXN; (-) strand; PAM type: NRG; PAM sequence: CAG
  source 1..20: mol_type = other DNA
tctggtcatgccatttgcca

SEQ ID NO: 13740 - DNA, 20 bp, synthetic construct
  misc_feature 1..20: note = Description of Artificial Sequence: Synthetic oligonucleotide
  misc_feature 1..20: note = Target: FXN; (-) strand; PAM type: NRG; PAM sequence: TGG
  source 1..20: mol_type = other DNA
tccagacataaccgtgtgtc

SEQ ID NO: 13741 - DNA, 20 bp, synthetic construct
  misc_feature 1..20: note = Description of Artificial Sequence: Synthetic oligonucleotide
  misc_feature 1..20: note = Target: FXN; (-) strand; PAM type: NRG; PAM sequence: CAG
  source 1..20: mol_type = other DNA
ctcctctacaggggtttctc

SEQ ID NO: 13742 - DNA, 20 bp, synthetic construct
  misc_feature 1..20: note = Description of Artificial Sequence: Synthetic oligonucleotide
  misc_feature 1..20: note = Target: FXN; (-) strand; PAM type: NRG; PAM sequence: GGG
  source 1..20: mol_type = other DNA
aacctcctgctcctctacag

SEQ ID NO: 13743 - DNA, 20 bp, synthetic construct
  misc_feature 1..20: note = Description of Artificial Sequence: Synthetic oligonucleotide
  misc_feature 1..20: note = Target: FXN; (-) strand; PAM type: NRG; PAM sequence: GGG
  source 1..20: mol_type = other DNA
caacctcctgctcctctaca

SEQ ID NO: 13744 - DNA, 20 bp, synthetic construct
  misc_feature 1..20: note = Description of Artificial Sequence: Synthetic oligonucleotide
  misc_feature 1..20: note = Target: FXN; (-) strand; PAM type: NRG; PAM sequence: AGG
  source 1..20: mol_type = other DNA
acaacctcctgctcctctac

SEQ ID NO: 13745 - DNA, 20 bp, synthetic construct
  misc_feature 1..20: note = Description of Artificial Sequence: Synthetic oligonucleotide
  misc_feature 1..20: note = Target: FXN; (-) strand; PAM type: NRG; PAM sequence: CAG
  source 1..20: mol_type = other DNA
cacaacctcctgctcctcta

SEQ ID NO: 13746 - DNA, 20 bp, synthetic construct
  misc_feature 1..20: note = Description of Artificial Sequence: Synthetic oligonucleotide
  misc_feature 1..20: note = Target: FXN; (-) strand; PAM type: NRG; PAM sequence: CAG
  source 1..20: mol_type = other DNA
ggcagccactgtccgggcca

SEQ ID NO: 13747 - DNA, 20 bp, synthetic construct
  misc_feature 1..20: note = Description of Artificial Sequence: Synthetic oligonucleotide
  misc_feature 1..20: note = Target: FXN; (-) strand; PAM type: NRG; PAM sequence: GGG
  source 1..20: mol_type = other DNA
ctgctcggcagccactgtcc

SEQ ID NO: 13748 - DNA, 20 bp, synthetic construct
  misc_feature 1..20: note = Description of Artificial Sequence: Synthetic oligonucleotide
  misc_feature 1..20: note = Target: FXN; (-) strand; PAM type: NRG; PAM sequence: CGG
  source 1..20: mol_type = other DNA
actgctcggcagccactgtc

SEQ ID NO: 13749 - DNA, 20 bp, synthetic construct
  misc_feature 1..20: note = Description of Artificial Sequence: Synthetic oligonucleotide
  misc_feature 1..20: note = Target: FXN; (-) strand; PAM type: NRG; PAM sequence: CAG
  source 1..20: mol_type = other DNA
tgcaggctccaactgctcgg

SEQ ID NO: 13750 - DNA, 20 bp, synthetic construct
  misc_feature 1..20: note = Description of Artificial Sequence: Synthetic oligonucleotide
  misc_feature 1..20: note = Target: FXN; (-) strand; PAM type: NRG; PAM sequence: CGG
  source 1..20: mol_type = other DNA
gggtgcaggctccaactgct

SEQ ID NO: 13751 - DNA, 20 bp, synthetic construct
  misc_feature 1..20: note = Description of Artificial Sequence: Synthetic oligonucleotide
  misc_feature 1..20: note = Target: FXN; (-) strand; PAM type: NRG; PAM sequence: AGG
  source 1..20: mol_type = other DNA
tagccaagttgggcgggtgc

SEQ ID NO: 13752 - DNA, 20 bp, synthetic construct
  misc_feature 1..20: note = Description of Artificial Sequence: Synthetic oligonucleotide
  misc_feature 1..20: note = Target: FXN; (-) strand; PAM type: NRG; PAM sequence: CAG
  source 1..20: mol_type = other DNA
ttagccaagttgggcgggtg

SEQ ID NO: 13753 - DNA, 20 bp, synthetic construct
  misc_feature 1..20: note = Description of Artificial Sequence: Synthetic oligonucleotide
  misc_feature 1..20: note = Target: FXN; (-) strand; PAM type: NRG; PAM sequence: GGG
  source 1..20: mol_type = other DNA
cttctttagccaagttgggc

SEQ ID NO: 13754 - DNA, 20 bp, synthetic construct
  misc_feature 1..20: note = Description of Artificial Sequence: Synthetic oligonucleotide
  misc_feature 1..20: note = Target: FXN; (-) strand; PAM type: NRG; PAM sequence: CGG
  source 1..20: mol_type = other DNA
acttctttagccaagttggg

SEQ ID NO: 13755 - DNA, 20 bp, synthetic construct
  misc_feature 1..20: note = Description of Artificial Sequence: Synthetic oligonucleotide
  misc_feature 1..20: note = Target: FXN; (-) strand; PAM type: NRG; PAM sequence: GGG
  source 1..20: mol_type = other DNA
gggacttctttagccaagtt

SEQ ID NO: 13756 - DNA, 20 bp, synthetic construct
  misc_feature 1..20: note = Description of Artificial Sequence: Synthetic oligonucleotide
  misc_feature 1..20: note = Target: FXN; (-) strand; PAM type: NRG; PAM sequence: TGG
  source 1..20: mol_type = other DNA
ggggacttctttagccaagt

SEQ ID NO: 13757 - DNA, 20 bp, synthetic construct
  misc_feature 1..20: note = Description of Artificial Sequence: Synthetic oligonucleotide
  misc_feature 1..20: note = Target: FXN; (-) strand; PAM type: NRG; PAM sequence: AAG
  source 1..20: mol_type = other DNA
gtatggggacttctttagcc

SEQ ID NO: 13758 - DNA, 20 bp, synthetic construct
  misc_feature 1..20: note = Description of Artificial Sequence: Synthetic oligonucleotide
  misc_feature 1..20: note = Target: FXN; (-) strand; PAM type: NRG; PAM sequence: TAG
  source 1..20: mol_type = other DNA
agagagtatggggacttctt

SEQ ID NO: 13759 - DNA, 20 bp, synthetic construct
  misc_feature 1..20: note = Description of Artificial Sequence: Synthetic oligonucleotide
  misc_feature 1..20: note = Target: FXN; (-) strand; PAM type: NRG; PAM sequence: GGG
  source 1..20: mol_type = other DNA
tcttttccacagagagtatg

SEQ ID NO: 13760 - DNA, 20 bp, synthetic construct
  misc_feature 1..20: note = Description of Artificial Sequence: Synthetic oligonucleotide
  misc_feature 1..20: note = Target: FXN; (-) strand; PAM type: NRG; PAM sequence: GGG
  source 1..20: mol_type = other DNA
atcttttccacagagagtat

SEQ ID NO: 13761 - DNA, 20 bp, synthetic construct
  misc_feature 1..20: note = Description of Artificial Sequence: Synthetic oligonucleotide
  misc_feature 1..20: note = Target: FXN; (-) strand; PAM type: NRG; PAM sequence: TGG
  source 1..20: mol_type = other DNA
aatcttttccacagagagta

SEQ ID NO: 13762 - DNA, 20 bp, synthetic construct
  misc_feature 1..20: note = Description of Artificial Sequence: Synthetic oligonucleotide
  misc_feature 1..20: note = Target: FXN; (-) strand; PAM type: NRG; PAM sequence: GAG
  source 1..20: mol_type = other DNA
ctggaaatcttttccacaga

SEQ ID NO: 13763 - DNA, 20 bp, synthetic construct
  misc_feature 1..20: note = Description of Artificial Sequence: Synthetic oligonucleotide
  misc_feature 1..20: note = Target: FXN; (-) strand; PAM type: NRG; PAM sequence: GAG
  source 1..20: mol_type = other DNA
ttctggaaatcttttccaca

SEQ ID NO: 13764 - DNA, 20 bp, synthetic construct
  misc_feature 1..20: note = Description of Artificial Sequence: Synthetic oligonucleotide
  misc_feature 1..20: note = Target: FXN; (-) strand; PAM type: NRG; PAM sequence: CAG
  source 1..20: mol_type = other DNA
gcttctggaaatcttttcca

SEQ ID NO: 13765 - DNA, 20 bp, synthetic construct
  misc_feature 1..20: note = Description of Artificial Sequence: Synthetic oligonucleotide
  misc_feature 1..20: note = Target: FXN; (-) strand; PAM type: NRG; PAM sequence: TGG
  source 1..20: mol_type = other DNA
gatattgacacaacagcttc

SEQ ID NO: 13766 - DNA, 20 bp, synthetic construct
  misc_feature 1..20: note = Description of Artificial Sequence: Synthetic oligonucleotide
  misc_feature 1..20: note = Target: FXN; (-) strand; PAM type: NRG; PAM sequence: CAG
  source 1..20: mol_type = other DNA
aggctttgatattgacacaa

SEQ ID NO: 13767 - DNA, 20 bp, synthetic construct
  misc_feature 1..20: note = Description of Artificial Sequence: Synthetic oligonucleotide
  misc_feature 1..20: note = Target: FXN; (-) strand; PAM type: NRG; PAM sequence: AGG
  source 1..20: mol_type = other DNA
ttgttgttgttgttgttttg

SEQ ID NO: 13768 - DNA, 20 bp, synthetic construct
  misc_feature 1..20: note = Description of Artificial Sequence: Synthetic oligonucleotide
  misc_feature 1..20: note = Target: FXN; (-) strand; PAM type: NRG; PAM sequence: GAG
  source 1..20: mol_type = other DNA
gttgttgttgttgttgtttt

SEQ ID NO: 13769 - DNA, 20 bp, synthetic construct
  misc_feature 1..20: note = Description of Artificial Sequence: Synthetic oligonucleotide
  misc_feature 1..20: note = Target: FXN; (-) strand; PAM type: NRG; PAM sequence: AGG
  source 1..20: mol_type = other DNA
tacttttcaaagcagactca

SEQ ID NO: 13770 - DNA, 20 bp, synthetic construct
  misc_feature 1..20: note = Description of Artificial Sequence: Synthetic oligonucleotide
  misc_feature 1..20: note = Target: FXN; (-) strand; PAM type: NRG; PAM sequence: AAG
  source 1..20: mol_type = other DNA
ctacttttcaaagcagactc

SEQ ID NO: 13771 - DNA, 20 bp, synthetic construct
  misc_feature 1..20: note = Description of Artificial Sequence: Synthetic oligonucleotide
  misc_feature 1..20: note = Target: FXN; (-) strand; PAM type: NRG; PAM sequence: CAG
  source 1..20: mol_type = other DNA
tttcaccctacttttcaaag

SEQ ID NO: 13772 - DNA, 20 bp, synthetic construct
  misc_feature 1..20: note = Description of Artificial Sequence: Synthetic oligonucleotide
  misc_feature 1..20: note = Target: FXN; (-) strand; PAM type: NRG; PAM sequence: AAG
  source 1..20: mol_type = other DNA
gaatttcaccctacttttca

SEQ ID NO: 13773 - DNA, 20 bp, synthetic construct
  misc_feature 1..20: note = Description of Artificial Sequence: Synthetic oligonucleotide
  misc_feature 1..20: note = Target: FXN; (-) strand; PAM type: NRG; PAM sequence: CAG
  source 1..20: mol_type = other DNA
ttgccagttgaatgcctctg

SEQ ID NO: 13774 - DNA, 20 bp, synthetic construct
  misc_feature 1..20: note = Description of Artificial Sequence: Synthetic oligonucleotide
  misc_feature 1..20: note = Target: FXN; (-) strand; PAM type: NRG; PAM sequence: CAG
  source 1..20: mol_type = other DNA
ctatgagggtggtatcttgc

SEQ ID NO: 13775 - DNA, 20 bp, synthetic construct
  misc_feature 1..20: note = Description of Artificial Sequence: Synthetic oligonucleotide
  misc_feature 1..20: note = Target: FXN; (-) strand; PAM type: NRG; PAM sequence: TGG
  source 1..20: mol_type = other DNA
tgcagatctggctatgaggg

SEQ ID NO: 13776 - DNA, 20 bp, synthetic construct
  misc_feature 1..20: note = Description of Artificial Sequence: Synthetic oligonucleotide
  misc_feature 1..20: note = Target: FXN; (-) strand; PAM type: NRG; PAM sequence: GGG
  source 1..20: mol_type = other DNA
acctgcagatctggctatga

SEQ ID NO: 13777 - DNA, 20 bp, synthetic construct
  misc_feature 1..20: note = Description of Artificial Sequence: Synthetic oligonucleotide
  misc_feature 1..20: note = Target: FXN; (-) strand; PAM type: NRG; PAM sequence: AGG
  source 1..20: mol_type = other DNA
gacctgcagatctggctatg

SEQ ID NO: 13778 - DNA, 20 bp, synthetic construct
  misc_feature 1..20: note = Description of Artificial Sequence: Synthetic oligonucleotide
  misc_feature 1..20: note = Target: FXN; (-) strand; PAM type: NRG; PAM sequence: GAG
  source 1..20: mol_type = other DNA
agacctgcagatctggctat

SEQ ID NO: 13779 - DNA, 20 bp, synthetic construct
  misc_feature 1..20: note = Description of Artificial Sequence: Synthetic oligonucleotide
  misc_feature 1..20: note = Target: FXN; (-) strand; PAM type: NRG; PAM sequence: TGG
  source 1..20: mol_type = other DNA
atggctgagacctgcagatc

SEQ ID NO: 13780 - DNA, 20 bp, synthetic construct
  misc_feature 1..20: note = Description of Artificial Sequence: Synthetic oligonucleotide
  misc_feature 1..20: note = Target: FXN; (-) strand; PAM type: NRG; PAM sequence: CAG
  source 1..20: mol_type = other DNA
ggcatgatggctgagacctg

SEQ ID NO: 13781 - DNA, 20 bp, synthetic construct
  misc_feature 1..20: note = Description of Artificial Sequence: Synthetic oligonucleotide
  misc_feature 1..20: note = Target: FXN; (-) strand; PAM type: NRG; PAM sequence: GAG
  source 1..20: mol_type = other DNA
ttttccctggcatgatggct

SEQ ID NO: 13782 - DNA, 20 bp, synthetic construct
  misc_feature 1..20: note = Description of Artificial Sequence: Synthetic oligonucleotide
  misc_feature 1..20: note = Target: FXN; (-) strand; PAM type: NRG; PAM sequence: TGG
  source 1..20: mol_type = other DNA
gagcattttccctggcatga

SEQ ID NO: 13783 - DNA, 20 bp, synthetic construct
  misc_feature 1..20: note = Description of Artificial Sequence: Synthetic oligonucleotide
  misc_feature 1..20: note = Target: FXN; (-) strand; PAM type: NRG; PAM sequence: TGG
  source 1..20: mol_type = other DNA
ggtgaatggagcattttccc

SEQ ID NO: 13784 - DNA, 20 bp, synthetic construct
  misc_feature 1..20: note = Description of Artificial Sequence: Synthetic oligonucleotide
  misc_feature 1..20: note = Target: FXN; (-) strand; PAM type: NRG; PAM sequence: GAG
  source 1..20: mol_type = other DNA
aagctgaggagtggtgaatg

SEQ ID NO: 13785 - DNA, 20 bp, synthetic construct
  misc_feature 1..20: note = Description of Artificial Sequence: Synthetic oligonucleotide
  misc_feature 1..20: note = Target: FXN; (-) strand; PAM type: NRG; PAM sequence: TGG
  source 1..20: mol_type = other DNA
agaagctgaggagtggtgaa

SEQ ID NO: 13786 - DNA, 20 bp, synthetic construct
  misc_feature 1..20: note = Description of Artificial Sequence: Synthetic oligonucleotide
  misc_feature 1..20: note = Target: FXN; (-) strand; PAM type: NRG; PAM sequence: TGG
  source 1..20: mol_type = other DNA
cagaagcagaagctgaggag

SEQ ID NO: 13787 - DNA, 20 bp, synthetic construct
  misc_feature 1..20: note = Description of Artificial Sequence: Synthetic oligonucleotide
  misc_feature 1..20: note = Target: FXN; (-) strand; PAM type: NRG; PAM sequence: GAG
  source 1..20: mol_type = other DNA
aaccagaagcagaagctgag

SEQ ID NO: 13788 - DNA, 20 bp, synthetic construct
  misc_feature 1..20: note = Description of Artificial Sequence: Synthetic oligonucleotide
  misc_feature 1..20: note = Target: FXN; (-) strand; PAM type: NRG; PAM sequence: AGG
  source 1..20: mol_type = other DNA
gaaaccagaagcagaagctg

SEQ ID NO: 13789 - DNA, 20 bp, synthetic construct
  misc_feature 1..20: note = Description of Artificial Sequence: Synthetic oligonucleotide
  misc_feature 1..20: note = Target: FXN; (-) strand; PAM type: NRG; PAM sequence: GAG
  source 1..20: mol_type = other DNA
tgaaaccagaagcagaagct

SEQ ID NO: 13790 - DNA, 20 bp, synthetic construct
  misc_feature 1..20: note = Description of Artificial Sequence: Synthetic oligonucleotide
  misc_feature 1..20: note = Target: FXN; (-) strand; PAM type: NRG; PAM sequence: AAG
  source 1..20: mol_type = other DNA
acctctgaaaccagaagcag

SEQ ID NO: 13791 - DNA, 20 bp, synthetic construct
  misc_feature 1..20: note = Description of Artificial Sequence: Synthetic oligonucleotide
  misc_feature 1..20: note = Target: FXN; (-) strand; PAM type: NRG; PAM sequence: CAG
  source 1..20: mol_type = other DNA
gagacctctgaaaccagaag

SEQ ID NO: 13792 - DNA, 20 bp, synthetic construct
  misc_feature 1..20: note = Description of Artificial Sequence: Synthetic oligonucleotide
  misc_feature 1..20: note = Target: FXN; (-) strand; PAM type: NRG; PAM sequence: AAG
  source 1..20: mol_type = other DNA
acagagacctctgaaaccag

SEQ ID NO: 13793 - DNA, 20 bp, synthetic construct
  misc_feature 1..20: note = Description of Artificial Sequence: Synthetic oligonucleotide
  misc_feature 1..20: note = Target: FXN; (-) strand; PAM type: NRG; PAM sequence: CAG
  source 1..20: mol_type = other DNA
aatacagagacctctgaaac

SEQ ID NO: 13794 - DNA, 20 bp, synthetic construct
  misc_feature 1..20: note = Description of Artificial Sequence: Synthetic oligonucleotide
  misc_feature 1..20: note = Target: FXN; (-) strand; PAM type: NRG; PAM sequence: GAG
  source 1..20: mol_type = other DNA
tttaaagcccctccaataca

SEQ ID NO: 13795 - DNA, 20 bp, synthetic construct
  misc_feature 1..20: note = Description of Artificial Sequence: Synthetic oligonucleotide
  misc_feature 1..20: note = Target: FXN; (-) strand; PAM type: NRG; PAM sequence: CAG
  source 1..20: mol_type = other DNA
gctttaaagcccctccaata

SEQ ID NO: 13796 - DNA, 20 bp, synthetic construct
  misc_feature 1..20: note = Description of Artificial Sequence: Synthetic oligonucleotide
  misc_feature 1..20: note = Target: FXN; (-) strand; PAM type: NRG; PAM sequence: AAG
  source 1..20: mol_type = other DNA
taaagacccttcttgcttta

SEQ ID NO: 13797 - DNA, 20 bp, synthetic construct
  misc_feature 1..20: note = Description of Artificial Sequence: Synthetic oligonucleotide
  misc_feature 1..20: note = Target: FXN; (-) strand; PAM type: NRG; PAM sequence: AAG
  source 1..20: mol_type = other DNA
tgaataagagtaagtgggta

SEQ ID NO: 13798 - DNA, 20 bp, synthetic construct
  misc_feature 1..20: note = Description of Artificial Sequence: Synthetic oligonucleotide
  misc_feature 1..20: note = Target: FXN; (-) strand; PAM type: NRG; PAM sequence: GGG
  source 1..20: mol_type = other DNA
atctgtgaataagagtaagt

SEQ ID NO: 13799 - DNA, 20 bp, synthetic construct
  misc_feature 1..20: note = Description of Artificial Sequence: Synthetic oligonucleotide
  misc_feature 1..20: note = Target: FXN; (-) strand; PAM type: NRG; PAM sequence: TGG
  source 1..20: mol_type = other DNA
catctgtgaataagagtaag

SEQ ID NO: 13800 - DNA, 20 bp, synthetic construct
  misc_feature 1..20: note = Description of Artificial Sequence: Synthetic oligonucleotide
  misc_feature 1..20: note = Target: FXN; (-) strand; PAM type: NRG; PAM sequence: AAG
  source 1..20: mol_type = other DNA
tcacatctgtgaataagagt

SEQ ID NO: 13801 - DNA, 20 bp, synthetic construct
  misc_feature 1..20: note = Description of Artificial Sequence: Synthetic oligonucleotide
  misc_feature 1..20: note = Target: FXN; (-) strand; PAM type: NRG; PAM sequence: GAG
  source 1..20: mol_type = other DNA
atattcacatctgtgaataa

SEQ ID NO: 13802 - DNA, 20 bp, synthetic construct
  misc_feature 1..20: note = Description of Artificial Sequence: Synthetic oligonucleotide
  misc_feature 1..20: note = Target: FXN; (-) strand; PAM type: NRG; PAM sequence: AAG
  source 1..20: mol_type = other DNA
gcatattcacatctgtgaat

SEQ ID NO: 13803 - DNA, 20 bp, synthetic construct
  misc_feature 1..20: note = Description of Artificial Sequence: Synthetic oligonucleotide
  misc_feature 1..20: note = Target: FXN; (-) strand; PAM type: NRG; PAM sequence: TGG
  source 1..20: mol_type = other DNA
ggacatgtcactttccccac

SEQ ID NO: 13804 - DNA, 20 bp, synthetic construct
  misc_feature 1..20: note = Description of Artificial Sequence: Synthetic oligonucleotide
  misc_feature 1..20: note = Target: FXN; (-) strand; PAM type: NRG; PAM sequence: AGG
  source 1..20: mol_type = other DNA
tgttgactctattctgactt

SEQ ID NO: 13805 - DNA, 20 bp, synthetic construct
  misc_feature 1..20: note = Description of Artificial Sequence: Synthetic oligonucleotide
  misc_feature 1..20: note = Target: FXN; (-) strand; PAM type: NRG; PAM sequence: TAG
  source 1..20: mol_type = other DNA
ttgttgactctattctgact

SEQ ID NO: 13806 - DNA, 20 bp, synthetic construct
  misc_feature 1..20: note = Description of Artificial Sequence: Synthetic oligonucleotide
  misc_feature 1..20: note = Target: FXN; (-) strand; PAM type: NRG; PAM sequence: GGG
  source 1..20: mol_type = other DNA
actagaggctaagtcatttt

SEQ ID NO: 13807 - DNA, 20 bp, synthetic construct
  misc_feature 1..20: note = Description of Artificial Sequence: Synthetic oligonucleotide
  misc_feature 1..20: note = Target: FXN; (-) strand; PAM type: NRG; PAM sequence: TGG
  source 1..20: mol_type = other DNA
cactagaggctaagtcattt

SEQ ID NO: 13808 - DNA, 20 bp, synthetic construct
  misc_feature 1..20: note = Description of Artificial Sequence: Synthetic oligonucleotide
  misc_feature 1..20: note = Target: FXN; (-) strand; PAM type: NRG; PAM sequence: AAG
  source 1..20: mol_type = other DNA
cccattatacactagaggct

SEQ ID NO: 13809 - DNA, 20 bp, synthetic construct
  misc_feature 1..20: note = Description of Artificial Sequence: Synthetic oligonucleotide
  misc_feature 1..20: note = Target: FXN; (-) strand; PAM type: NRG; PAM sequence: AGG
  source 1..20: mol_type = other DNA
caatgcccattatacactag

SEQ ID NO: 13810 - DNA, 20 bp, synthetic construct
  misc_feature 1..20: note = Description of Artificial Sequence: Synthetic oligonucleotide
  misc_feature 1..20: note = Target: FXN; (-) strand; PAM type: NRG; PAM sequence: GAG
  source 1..20: mol_type = other DNA
tcaatgcccattatacacta

SEQ ID NO: 13811 - DNA, 20 bp, synthetic construct
  misc_feature 1..20: note = Description of Artificial Sequence: Synthetic oligonucleotide
  misc_feature 1..20: note = Target: FXN; (-) strand; PAM type: NRG; PAM sequence: TAG
  source 1..20: mol_type = other DNA
catcaatgcccattatacac

SEQ ID NO: 13812 - DNA, 20 bp, synthetic construct
  misc_feature 1..20: note = Description of Artificial Sequence: Synthetic oligonucleotide
  misc_feature 1..20: note = Target: FXN; (-) strand; PAM type: NRG; PAM sequence: TAG
  source 1..20: mol_type = other DNA
cttcatctctgtatttccag

SEQ ID NO: 13813 - DNA, 20 bp, synthetic construct
  misc_feature 1..20: note = Description of Artificial Sequence: Synthetic oligonucleotide
  misc_feature 1..20: note = Target: FXN; (-) strand; PAM type: NRG; PAM sequence: CAG
  source 1..20: mol_type = other DNA
tttcttcatctctgtatttc

SEQ ID NO: 13814 - DNA, 20 bp, synthetic construct
  misc_feature 1..20: note = Description of Artificial Sequence: Synthetic oligonucleotide
  misc_feature 1..20: note = Target: FXN; (-) strand; PAM type: NRG; PAM sequence: GGG
  source 1..20: mol_type = other DNA
agattgagctccttgaagat

SEQ ID NO: 13815 - DNA, 20 bp, synthetic construct
  misc_feature 1..20: note = Description of Artificial Sequence: Synthetic oligonucleotide
  misc_feature 1..20: note = Target: FXN; (-) strand; PAM type: NRG; PAM sequence: TGG
  source 1..20: mol_type = other DNA
tagattgagctccttgaaga

SEQ ID NO: 13816 - DNA, 20 bp, synthetic construct
  misc_feature 1..20: note = Description of Artificial Sequence: Synthetic oligonucleotide
  misc_feature 1..20: note = Target: FXN; (-) strand; PAM type: NRG; PAM sequence: AAG
  source 1..20: mol_type = other DNA
ttgctagattgagctccttg

SEQ ID NO: 13817 - DNA, 20 bp, synthetic construct
  misc_feature 1..20: note = Description of Artificial Sequence: Synthetic oligonucleotide
  misc_feature 1..20: note = Target: FXN; (-) strand; PAM type: NRG; PAM sequence: GAG
  source 1..20: mol_type = other DNA
tctgtctcccttgctagatt

SEQ ID NO: 13818 - DNA, 20 bp, synthetic construct
  misc_feature 1..20: note = Description of Artificial Sequence: Synthetic oligonucleotide
  misc_feature 1..20: note = Target: FXN; (-) strand; PAM type: NRG; PAM sequence: TAG
  source 1..20: mol_type = other DNA
aaagagtctgtctcccttgc

SEQ ID NO: 13819 - DNA, 20 bp, synthetic construct
  misc_feature 1..20: note = Description of Artificial Sequence: Synthetic oligonucleotide
  misc_feature 1..20: note = Target: FXN; (-) strand; PAM type: NRG; PAM sequence: GAG
  source 1..20: mol_type = other DNA
agcccggtcccacctacaaa

SEQ ID NO: 13820 - DNA, 20 bp, synthetic construct
  misc_feature 1..20: note = Description of Artificial Sequence: Synthetic oligonucleotide
  misc_feature 1..20: note = Target: FXN; (-) strand; PAM type: NRG; PAM sequence: AAG
  source 1..20: mol_type = other DNA
gaagcccggtcccacctaca

SEQ ID NO: 13821 - DNA, 20 bp, synthetic construct
  misc_feature 1..20: note = Description of Artificial Sequence: Synthetic oligonucleotide
  misc_feature 1..20: note = Target: FXN; (-) strand; PAM type: NRG; PAM sequence: CGG
  source 1..20: mol_type = other DNA
ccttctgctgcagggaagcc

SEQ ID NO: 13822 - DNA, 20 bp, synthetic construct
  misc_feature 1..20: note = Description of Artificial Sequence: Synthetic oligonucleotide
  misc_feature 1..20: note = Target: FXN; (-) strand; PAM type: NRG; PAM sequence: AAG
  source 1..20: mol_type = other DNA
agcttccttctgctgcaggg

SEQ ID NO: 13823 - DNA, 20 bp, synthetic construct
  misc_feature 1..20: note = Description of Artificial Sequence: Synthetic oligonucleotide
  misc_feature 1..20: note = Target: FXN; (-) strand; PAM type: NRG; PAM sequence: GGG
  source 1..20: mol_type = other DNA
tcaagcttccttctgctgca

SEQ ID NO: 13824 - DNA, 20 bp, synthetic construct
  misc_feature 1..20: note = Description of Artificial Sequence: Synthetic oligonucleotide
  misc_feature 1..20: note = Target: FXN; (-) strand; PAM type: NRG; PAM sequence: AGG
  source 1..20: mol_type = other DNA
ttcaagcttccttctgctgc

SEQ ID NO: 13825 - DNA, 20 bp, synthetic construct
  misc_feature 1..20: note = Description of Artificial Sequence: Synthetic oligonucleotide
  misc_feature 1..20: note = Target: FXN; (-) strand; PAM type: NRG; PAM sequence: CAG
  source 1..20: mol_type = other DNA
tttcaagcttccttctgctg

SEQ ID NO: 13826 - DNA, 20 bp, synthetic construct
  misc_feature 1..20: note = Description of Artificial Sequence: Synthetic oligonucleotide
  misc_feature 1..20: note = Target: FXN; (-) strand; PAM type: NRG; PAM sequence: AAG
  source 1..20: mol_type = other DNA
tgaggctcgttaccaatttc

SEQ ID NO: 13827 - DNA, 20 bp, synthetic construct
  misc_feature 1..20: note = Description of Artificial Sequence: Synthetic oligonucleotide
  misc_feature 1..20: note = Target: FXN; (-) strand; PAM type: NRG; PAM sequence: AGG
  source 1..20: mol_type = other DNA
gcctgcctctgtcccttctg

SEQ ID NO: 13828 - DNA, 20 bp, synthetic construct
  misc_feature 1..20: note = Description of Artificial Sequence: Synthetic oligonucleotide
  misc_feature 1..20: note = Target: FXN; (-) strand; PAM type: NRG; PAM sequence: GAG
  source 1..20: mol_type = other DNA
ggcctgcctctgtcccttct

SEQ ID NO: 13829 - DNA, 20 bp, synthetic construct
  misc_feature 1..20: note = Description of Artificial Sequence: Synthetic oligonucleotide
  misc_feature 1..20: note = Target: FXN; (-) strand; PAM type: NRG; PAM sequence: TGG
  source 1..20: mol_type = other DNA
atcctctcagggtagcatgg

SEQ ID NO: 13830 - DNA, 20 bp, synthetic construct
  misc_feature 1..20: note = Description of Artificial Sequence: Synthetic oligonucleotide
  misc_feature 1..20: note = Target: FXN; (-) strand; PAM type: NRG; PAM sequence: TGG
  source 1..20: mol_type = other DNA
gcgatcctctcagggtagca

SEQ ID NO: 13831 - DNA, 20 bp, synthetic construct
  misc_feature 1..20: note = Description of Artificial Sequence: Synthetic oligonucleotide
  misc_feature 1..20: note = Target: FXN; (-) strand; PAM type: NRG; PAM sequence: TAG
  source 1..20: mol_type = other DNA
cacatgcgatcctctcaggg

SEQ ID NO: 13832 - DNA, 20 bp, synthetic construct
  misc_feature 1..20: note = Description of Artificial Sequence: Synthetic oligonucleotide
  misc_feature 1..20: note = Target: FXN; (-) strand; PAM type: NRG; PAM sequence: GGG
  source 1..20: mol_type = other DNA
gtccacatgcgatcctctca

SEQ ID NO: 13833 - DNA, 20 bp, synthetic construct
  misc_feature 1..20: note = Description of Artificial Sequence: Synthetic oligonucleotide
  misc_feature 1..20: note = Target: FXN; (-) strand; PAM type: NRG; PAM sequence: AGG
  source 1..20: mol_type = other DNA
tgtccacatgcgatcctctc

SEQ ID NO: 13834 - DNA, 20 bp, synthetic construct
  misc_feature 1..20: note = Description of Artificial Sequence: Synthetic oligonucleotide
  misc_feature 1..20: note = Target: FXN; (-) strand; PAM type: NRG; PAM sequence: CAG
  source 1..20: mol_type = other DNA
gtgtccacatgcgatcctct

SEQ ID NO: 13835 - DNA, 20 bp, synthetic construct
  misc_feature 1..20: note = Description of Artificial Sequence: Synthetic oligonucleotide
  misc_feature 1..20: note = Target: FXN; (-) strand; PAM type: NRG; PAM sequence: TAG
  source 1..20: mol_type = other DNA
gtcaaagcagggccaggtca

SEQ ID NO: 13836 - DNA, 20 bp, synthetic construct
  misc_feature 1..20: note = Description of Artificial Sequence: Synthetic oligonucleotide
  misc_feature 1..20: note = Target: FXN; (-) strand; PAM type: NRG; PAM sequence: AGG
  source 1..20: mol_type = other DNA
tagtgggtcaaagcagggcc

SEQ ID NO: 13837 - DNA, 20 bp, synthetic construct
  misc_feature 1..20: note = Description of Artificial Sequence: Synthetic oligonucleotide
  misc_feature 1..20: note = Target: FXN; (-) strand; PAM type: NRG; PAM sequence: CAG
  source 1..20: mol_type = other DNA
ctagtgggtcaaagcagggc

SEQ ID NO: 13838 - DNA, 20 bp, synthetic construct
  misc_feature 1..20: note = Description of Artificial Sequence: Synthetic oligonucleotide
  misc_feature 1..20: note = Target: FXN; (-) strand; PAM type: NRG; PAM sequence: GGG
  source 1..20: mol_type = other DNA
acagctagtgggtcaaagca

SEQ ID NO: 13839 - DNA, 20 bp, synthetic construct
  misc_feature 1..20: note = Description of Artificial Sequence: Synthetic oligonucleotide
  misc_feature 1..20: note = Target: FXN; (-) strand; PAM type: NRG; PAM sequence: AGG
  source 1..20: mol_type = other DNA
cacagctagtgggtcaaagc

SEQ ID NO: 13840 - DNA, 20 bp, synthetic construct
  misc_feature 1..20: note = Description of Artificial Sequence: Synthetic oligonucleotide
  misc_feature 1..20: note = Target: FXN; (-) strand; PAM type: NRG; PAM sequence: CAG
  source 1..20: mol_type = other DNA
gcacagctagtgggtcaaag

SEQ ID NO: 13841 - DNA, 20 bp, synthetic construct
  misc_feature 1..20: note = Description of Artificial Sequence: Synthetic oligonucleotide
  misc_feature 1..20: note = Target: FXN; (-) strand; PAM type: NRG; PAM sequence: AAG
  source 1..20: mol_type = other DNA
acagcacagctagtgggtca

SEQ ID NO: 13842 - DNA, 20 bp, synthetic construct
  misc_feature 1..20: note = Description of Artificial Sequence: Synthetic oligonucleotide
  misc_feature 1..20: note = Target: FXN; (-) strand; PAM type: NRG; PAM sequence: GGG
  source 1..20: mol_type = other DNA
ggccctacagcacagctagt

SEQ ID NO: 13843 - DNA, 20 bp, synthetic construct
  misc_feature 1..20: note = Description of Artificial Sequence: Synthetic oligonucleotide
  misc_feature 1..20: note = Target: FXN; (-) strand; PAM type: NRG; PAM sequence: TGG
  source 1..20: mol_type = other DNA
tggccctacagcacagctag

SEQ ID NO: 13844 - DNA, 20 bp, synthetic construct
  misc_feature 1..20: note = Description of Artificial Sequence: Synthetic oligonucleotide
  misc_feature 1..20: note = Target: FXN; (-) strand; PAM type: NRG; PAM sequence: TAG
  source 1..20: mol_type = other DNA
acctggccctacagcacagc

SEQ ID NO: 13845 - DNA, 20 bp, synthetic construct
  misc_feature 1..20: note = Description of Artificial Sequence: Synthetic oligonucleotide
  misc_feature 1..20: note = Target: FXN; (-) strand; PAM type: NRG; PAM sequence: CAG
  source 1..20: mol_type = other DNA
ctccacctggccctacagca

SEQ ID NO: 13846 - DNA, 20 bp, synthetic construct
  misc_feature 1..20: note = Description of Artificial Sequence: Synthetic oligonucleotide
  misc_feature 1..20: note = Target: FXN; (-) strand; PAM type: NRG; PAM sequence: CAG
  source 1..20: mol_type = other DNA
ccaggctccacctggcccta

SEQ ID NO: 13847 - DNA, 20 bp, synthetic construct
  misc_feature 1..20: note = Description of Artificial Sequence: Synthetic oligonucleotide
  misc_feature 1..20: note = Target: FXN; (-) strand; PAM type: NRG; PAM sequence: TGG
  source 1..20: mol_type = other DNA
aggccactccaggctccacc

SEQ ID NO: 13848 - DNA, 20 bp, synthetic construct
  misc_feature 1..20: note = Description of Artificial Sequence: Synthetic oligonucleotide
  misc_feature 1..20: note = Target: FXN; (-) strand; PAM type: NRG; PAM sequence: AGG
  source 1..20: mol_type = other DNA
cccttagcacaggccactcc

SEQ ID NO: 13849 - DNA, 20 bp, synthetic construct
  misc_feature 1..20: note = Description of Artificial Sequence: Synthetic oligonucleotide
  misc_feature 1..20: note = Target: FXN; (-) strand; PAM type: NRG; PAM sequence: CAG
  source 1..20: mol_type = other DNA
ccccttagcacaggccactc

SEQ ID NO: 13850 - DNA, 20 bp, synthetic construct
  misc_feature 1..20: note = Description of Artificial Sequence: Synthetic oligonucleotide
  misc_feature 1..20: note = Target: FXN; (-) strand; PAM type: NRG; PAM sequence: AGG
  source 1..20: mol_type = other DNA
tcatagtagccccttagcac

SEQ ID NO: 13851 - DNA, 20 bp, synthetic construct
  misc_feature 1..20: note = Description of Artificial Sequence: Synthetic oligonucleotide
  misc_feature 1..20: note = Target: FXN; (-) strand; PAM type: NRG; PAM sequence: CAG
  source 1..20: mol_type = other DNA
ctcatagtagccccttagca

SEQ ID NO: 13852 - DNA, 20 bp, synthetic construct
  misc_feature 1..20: note = Description of Artificial Sequence: Synthetic oligonucleotide
  misc_feature 1..20: note = Target: FXN; (-) strand; PAM type: NRG; PAM sequence: TAG
  source 1..20: mol_type = other DNA
aagagctcatagtagcccct

SEQ ID NO: 13853 - DNA, 20 bp, synthetic construct
  misc_feature 1..20: note = Description of Artificial Sequence: Synthetic oligonucleotide
  misc_feature 1..20: note = Target: FXN; (-) strand; PAM type: NRG; PAM sequence: TAG
  source 1..20: mol_type = other DNA
ggagtggaaagagctcatag

SEQ ID NO: 13854 - DNA, 20 bp, synthetic construct
  misc_feature 1..20: note = Description of Artificial Sequence: Synthetic oligonucleotide
  misc_feature 1..20: note = Target: FXN; (-) strand; PAM type: NRG; PAM sequence: TAG
  source 1..20: mol_type = other DNA
gggggagtggaaagagctca

SEQ ID NO: 13855 - DNA, 20 bp, synthetic construct
  misc_feature 1..20: note = Description of Artificial Sequence: Synthetic oligonucleotide
  misc_feature 1..20: note = Target: FXN; (-) strand; PAM type: NRG; PAM sequence: GAG
  source 1..20: mol_type = other DNA
atgccttgggggagtggaaa

SEQ ID NO: 13856 - DNA, 20 bp, synthetic construct
  misc_feature 1..20: note = Description of Artificial Sequence: Synthetic oligonucleotide
  misc_feature 1..20: note = Target: FXN; (-) strand; PAM type: NRG; PAM sequence: AAG
  source 1..20: mol_type = other DNA
caatgccttgggggagtgga

SEQ ID NO: 13857 - DNA, 20 bp, synthetic construct
  misc_feature 1..20: note = Description of Artificial Sequence: Synthetic oligonucleotide
  misc_feature 1..20: note = Target: FXN; (-) strand; PAM type: NRG; PAM sequence: TGG
  source 1..20: mol_type = other DNA
tatgcaatgccttgggggag

SEQ ID NO: 13858 - DNA, 20 bp, synthetic construct
  misc_feature 1..20: note = Description of Artificial Sequence: Synthetic oligonucleotide
  misc_feature 1..20: note = Target: FXN; (-) strand; PAM type: NRG; PAM sequence: GAG
  source 1..20: mol_type = other DNA
atttatgcaatgccttgggg

SEQ ID NO: 13859 - DNA, 20 bp, synthetic construct
  misc_feature 1..20: note = Description of Artificial Sequence: Synthetic oligonucleotide
  misc_feature 1..20: note = Target: FXN; (-) strand; PAM type: NRG; PAM sequence: GGG
  source 1..20: mol_type = other DNA
ttatttatgcaatgccttgg

SEQ ID NO: 13860 - DNA, 20 bp, synthetic construct
  misc_feature 1..20: note = Description of Artificial Sequence: Synthetic oligonucleotide
  misc_feature 1..20: note = Target: FXN; (-) strand; PAM type: NRG; PAM sequence: GGG
  source 1..20: mol_type = other DNA
attatttatgcaatgccttg

SEQ ID NO: 13861 - DNA, 20 bp, synthetic construct
  misc_feature 1..20: note = Description of Artificial Sequence: Synthetic oligonucleotide
  misc_feature 1..20: note = Target: FXN; (-) strand; PAM type: NRG; PAM sequence: GGG
  source 1..20: mol_type = other DNA
cattatttatgcaatgcctt

SEQ ID NO: 13862 - DNA, 20 bp, synthetic construct
  misc_feature 1..20: note = Description of Artificial Sequence: Synthetic oligonucleotide
  misc_feature 1..20: note = Target: FXN; (-) strand; PAM type: NRG; PAM sequence: TGG
  source 1..20: mol_type = other DNA
acattatttatgcaatgcct

SEQ ID NO: 13863 - DNA, 20 bp, synthetic construct
  misc_feature 1..20: note = Description of Artificial Sequence: Synthetic oligonucleotide
  misc_feature 1..20: note = Target: FXN; (-) strand; PAM type: NRG; PAM sequence: AAG
  source 1..20: mol_type = other DNA
gattttgctgtgcaaacaga

SEQ ID NO: 13864 - DNA, 20 bp, synthetic construct
  misc_feature 1..20: note = Description of Artificial Sequence: Synthetic oligonucleotide
  misc_feature 1..20: note = Target: FXN; (-) strand; PAM type: NRG; PAM sequence: CAG
  source 1..20: mol_type = other DNA
ccctgattttgctgtgcaaa

SEQ ID NO: 13865 - DNA, 20 bp, synthetic construct
  misc_feature 1..20: note = Description of Artificial Sequence: Synthetic oligonucleotide
  misc_feature 1..20: note = Target: FXN; (-) strand; PAM type: NRG; PAM sequence: TAG
  source 1..20: mol_type = other DNA
aggggaggcaccccatgttc

SEQ ID NO: 13866 - DNA, 20 bp, synthetic construct
  misc_feature 1..20: note = Description of Artificial Sequence: Synthetic oligonucleotide
  misc_feature 1..20: note = Target: FXN; (-) strand; PAM type: NRG; PAM sequence: AGG
  source 1..20: mol_type = other DNA
tgttgggctggggggagggg

SEQ ID NO: 13867 - DNA, 20 bp, synthetic construct
  misc_feature 1..20: note = Description of Artificial Sequence: Synthetic oligonucleotide
  misc_feature 1..20: note = Target: FXN; (-) strand; PAM type: NRG; PAM sequence: GAG
  source 1..20: mol_type = other DNA
ctgttgggctggggggaggg

SEQ ID NO: 13868 - DNA, 20 bp, synthetic construct
  misc_feature 1..20: note = Description of Artificial Sequence: Synthetic oligonucleotide
  misc_feature 1..20: note = Target: FXN; (-) strand; PAM type: NRG; PAM sequence: GGG
  source 1..20: mol_type = other DNA
ttctgttgggctggggggag

SEQ ID NO: 13869 - DNA, 20 bp, synthetic construct
  misc_feature 1..20: note = Description of Artificial Sequence: Synthetic oligonucleotide
  misc_feature 1..20: note = Target: FXN; (-) strand; PAM type: NRG; PAM sequence: GGG
  source 1..20: mol_type = other DNA
cttctgttgggctgggggga

SEQ ID NO: 13870 - DNA, 20 bp, synthetic construct
  misc_feature 1..20: note = Description of Artificial Sequence: Synthetic oligonucleotide
  misc_feature 1..20: note = Target: FXN; (-) strand; PAM type: NRG; PAM sequence: AGG
  source 1..20: mol_type = other DNA
acttctgttgggctgggggg

SEQ ID NO: 13871 - DNA, 20 bp, synthetic construct
  misc_feature 1..20: note = Description of Artificial Sequence: Synthetic oligonucleotide
  misc_feature 1..20: note = Target: FXN; (-) strand; PAM type: NRG; PAM sequence: GAG
  source 1..20: mol_type = other DNA
aacttctgttgggctggggg

SEQ ID NO: 13872 - DNA, 20 bp, synthetic construct
  misc_feature 1..20: note = Description of Artificial Sequence: Synthetic oligonucleotide
  misc_feature 1..20: note = Target: FXN; (-) strand; PAM type: NRG; PAM sequence: GGG
  source 1..20: mol_type = other DNA
agaacttctgttgggctggg

SEQ ID NO: 13873 - DNA, 20 bp, synthetic construct
  misc_feature 1..20: note = Description of Artificial Sequence: Synthetic oligonucleotide
  misc_feature 1..20: note = Target: FXN; (-) strand; PAM type: NRG; PAM sequence: GGG
  source 1..20: mol_type = other DNA
tagaacttctgttgggctgg

SEQ ID NO: 13874 - DNA, 20 bp, synthetic construct
  misc_feature 1..20: note = Description of Artificial Sequence: Synthetic oligonucleotide
  misc_feature 1..20: note = Target: FXN; (-) strand; PAM type: NRG; PAM sequence: GGG
  source 1..20: mol_type = other DNA
gtagaacttctgttgggctg

SEQ ID NO: 13875 - DNA, 20 bp, synthetic construct
  misc_feature 1..20: note = Description of Artificial Sequence: Synthetic oligonucleotide
  misc_feature 1..20: note = Target: FXN; (-) strand; PAM type: NRG; PAM sequence: GGG
  source 1..20: mol_type = other DNA
tgtagaacttctgttgggct

SEQ ID NO: 13876 - DNA, 20 bp, synthetic construct
  misc_feature 1..20: note = Description of Artificial Sequence: Synthetic oligonucleotide
  misc_feature 1..20: note = Target: FXN; (-) strand; PAM type: NRG; PAM sequence: TGG
  source 1..20: mol_type = other DNA
ttgtagaacttctgttgggc

SEQ ID NO: 13877 - DNA, 20 bp, synthetic construct
  misc_feature 1..20: note = Description of Artificial Sequence: Synthetic oligonucleotide
  misc_feature 1..20: note = Target: FXN; (-) strand; PAM type: NRG; PAM sequence: GGG
  source 1..20: mol_type = other DNA
gtcattgtagaacttctgtt

SEQ ID NO: 13878 - DNA, 20 bp, synthetic construct
  misc_feature 1..20: note = Description of Artificial Sequence: Synthetic oligonucleotide
  misc_feature 1..20: note = Target: FXN; (-) strand; PAM type: NRG; PAM sequence: TGG
  source 1..20: mol_type = other DNA
agtcattgtagaacttctgt

SEQ ID NO: 13879 - DNA, 20 bp, synthetic construct
  misc_feature 1..20: note = Description of Artificial Sequence: Synthetic oligonucleotide
  misc_feature 1..20: note = Target: FXN; (-) strand; PAM type: NRG; PAM sequence: TAG
  source 1..20: mol_type = other DNA
caagggcccatcagtcattg

SEQ ID NO: 13880 - DNA, 20 bp, synthetic construct
  misc_feature 1..20: note = Description of Artificial Sequence: Synthetic oligonucleotide
  misc_feature 1..20: note = Target: FXN; (-) strand; PAM type: NRG; PAM sequence: CAG
  source 1..20: mol_type = other DNA
aaacaaaaacaagggcccat

SEQ ID NO: 13881 - DNA, 20 bp, synthetic construct
  misc_feature 1..20: note = Description of Artificial Sequence: Synthetic oligonucleotide
  misc_feature 1..20: note = Target: FXN; (-) strand; PAM type: NRG; PAM sequence: GGG
  source 1..20: mol_type = other DNA
tccgtctcaaacaaaaacaa

SEQ ID NO: 13882 - DNA, 20 bp, synthetic construct
  misc_feature 1..20: note = Description of Artificial Sequence: Synthetic oligonucleotide
  misc_feature 1..20: note = Target: FXN; (-) strand; PAM type: NRG; PAM sequence: AGG
  source 1..20: mol_type = other DNA
ttccgtctcaaacaaaaaca

SEQ ID NO: 13883 - DNA, 20 bp, synthetic construct
  misc_feature 1..20: note = Description of Artificial Sequence: Synthetic oligonucleotide
  misc_feature 1..20: note = Target: FXN; (-) strand; PAM type: NRG; PAM sequence: AAG
  source 1..20: mol_type = other DNA
gttccgtctcaaacaaaaac

SEQ ID NO: 13884 - DNA, 20 bp, synthetic construct
  misc_feature 1..20: note = Description of Artificial Sequence: Synthetic oligonucleotide
  misc_feature 1..20: note = Target: FXN; (-) strand; PAM type: NRG; PAM sequence: GGG
  source 1..20: mol_type = other DNA
tcaccactcggaaccctgtg

SEQ ID NO: 13885 - DNA, 20 bp, synthetic construct
  misc_feature 1..20: note = Description of Artificial Sequence: Synthetic oligonucleotide
  misc_feature 1..20: note = Target: FXN; (-) strand; PAM type: NRG; PAM sequence: GGG
  source 1..20: mol_type = other DNA
atcaccactcggaaccctgt

SEQ ID NO: 13886 - DNA, 20 bp, synthetic construct
  misc_feature 1..20: note = Description of Artificial Sequence: Synthetic oligonucleotide
  misc_feature 1..20: note = Target: FXN; (-) strand; PAM type: NRG; PAM sequence: TGG
  source 1..20: mol_type = other DNA
aatcaccactcggaaccctg

SEQ ID NO: 13887 - DNA, 20 bp, synthetic construct
  misc_feature 1..20: note = Description of Artificial Sequence: Synthetic oligonucleotide
  misc_feature 1..20: note = Target: FXN; (-) strand; PAM type: NRG; PAM sequence: CGG
  source 1..20: mol_type = other DNA
gtgggccacaaatcaccact

SEQ ID NO: 13888 - DNA, 20 bp, synthetic construct
  misc_feature 1..20: note = Description of Artificial Sequence: Synthetic oligonucleotide
  misc_feature 1..20: note = Target: FXN; (-) strand; PAM type: NRG; PAM sequence: GGG
  source 1..20: mol_type = other DNA
tccacttgccagtggcctgt

SEQ ID NO: 13889 - DNA, 20 bp, synthetic construct
  misc_feature 1..20: note = Description of Artificial Sequence: Synthetic oligonucleotide
  misc_feature 1..20: note = Target: FXN; (-) strand; PAM type: NRG; PAM sequence: TGG
  source 1..20: mol_type = other DNA
ctccacttgccagtggcctg

SEQ ID NO: 13890 - DNA, 20 bp, synthetic construct
  misc_feature 1..20: note = Description of Artificial Sequence: Synthetic oligonucleotide
  misc_feature 1..20: note = Target: FXN; (-) strand; PAM type: NRG; PAM sequence: TGG
  source 1..20: mol_type = other DNA
gctctgcctccacttgccag

SEQ ID NO: 13891 - DNA, 20 bp, synthetic construct
  misc_feature 1..20: note = Description of Artificial Sequence: Synthetic oligonucleotide
  misc_feature 1..20: note = Target: FXN; (-) strand; PAM type: NRG; PAM sequence: CAG
  source 1..20: mol_type = other DNA
gcagctctgcctccacttgc

SEQ ID NO: 13892 - DNA, 20 bp, synthetic construct
  misc_feature 1..20: note = Description of Artificial Sequence: Synthetic oligonucleotide
  misc_feature 1..20: note = Target: FXN; (-) strand; PAM type: NRG; PAM sequence: CAG
  source 1..20: mol_type = other DNA
tgtggctcccgagggctctg

SEQ ID NO: 13893 - DNA, 20 bp, synthetic construct
  misc_feature 1..20: note = Description of Artificial Sequence: Synthetic oligonucleotide
  misc_feature 1..20: note = Target: FXN; (-) strand; PAM type: NRG; PAM sequence: GGG
  source 1..20: mol_type = other DNA
aggccctctgtggctcccga

SEQ ID NO: 13894 - DNA, 20 bp, synthetic construct
  misc_feature 1..20: note = Description of Artificial Sequence: Synthetic oligonucleotide
  misc_feature 1..20: note = Target: FXN; (-) strand; PAM type: NRG; PAM sequence: AGG
  source 1..20: mol_type = other DNA
caggccctctgtggctcccg

SEQ ID NO: 13895 - DNA, 20 bp, synthetic construct
  misc_feature 1..20: note = Description of Artificial Sequence: Synthetic oligonucleotide
  misc_feature 1..20: note = Target: FXN; (-) strand; PAM type: NRG; PAM sequence: GAG
  source 1..20: mol_type = other DNA
gcaggccctctgtggctccc

SEQ ID NO: 13896 - DNA, 20 bp, synthetic construct
  misc_feature 1..20: note = Description of Artificial Sequence: Synthetic oligonucleotide
  misc_feature 1..20: note = Target: FXN; (-) strand; PAM type: NRG; PAM sequence: TGG
  source 1..20: mol_type = other DNA
ggcggccagcaggccctctg

SEQ ID NO: 13897 - DNA, 20 bp, synthetic construct
  misc_feature 1..20: note = Description of Artificial Sequence: Synthetic oligonucleotide
  misc_feature 1..20: note = Target: FXN; (-) strand; PAM type: NRG; PAM sequence: AGG
  source 1..20: mol_type = other DNA
ggcatgtcgtggcggccagc

SEQ ID NO: 13898 - DNA, 20 bp, synthetic construct
  misc_feature 1..20: note = Description of Artificial Sequence: Synthetic oligonucleotide
  misc_feature 1..20: note = Target: FXN; (-) strand; PAM type: NRG; PAM sequence: CAG
  source 1..20: mol_type = other DNA
tggcatgtcgtggcggccag

SEQ ID NO: 13899 - DNA, 20 bp, synthetic construct
  misc_feature 1..20: note = Description of Artificial Sequence: Synthetic oligonucleotide
  misc_feature 1..20: note = Target: FXN; (-) strand; PAM type: NRG; PAM sequence: CAG
  source 1..20: mol_type = other DNA
agttggcatgtcgtggcggc

SEQ ID NO: 13900 - DNA, 20 bp, synthetic construct
  misc_feature 1..20: note = Description of Artificial Sequence: Synthetic oligonucleotide
  misc_feature 1..20: note = Target: FXN; (-) strand; PAM type: NRG; PAM sequence: CGG
  source 1..20: mol_type = other DNA
gctgagttggcatgtcgtgg

SEQ ID NO: 13901 - DNA, 20 bp, synthetic construct
  misc_feature 1..20: note = Description of Artificial Sequence: Synthetic oligonucleotide
  misc_feature 1..20: note = Target: FXN; (-) strand; PAM type: NRG; PAM sequence: TGG
  source 1..20: mol_type = other DNA
gcagctgagttggcatgtcg

SEQ ID NO: 13902 - DNA, 20 bp, synthetic construct
  misc_feature 1..20: note = Description of Artificial Sequence: Synthetic oligonucleotide
  misc_feature 1..20: note = Target: FXN; (-) strand; PAM type: NRG; PAM sequence: TGG
  source 1..20: mol_type = other DNA
agggccagcagcagctgagt

SEQ ID NO: 13903 - DNA, 20 bp, synthetic construct
  misc_feature 1..20: note = Description of Artificial Sequence: Synthetic oligonucleotide
  misc_feature 1..20: note = Target: FXN; (-) strand; PAM type: NRG; PAM sequence: GAG
  source 1..20: mol_type = other DNA
caggagggccagcagcagct

SEQ ID NO: 13904 - DNA, 20 bp, synthetic construct
  misc_feature 1..20: note = Description of Artificial Sequence: Synthetic oligonucleotide
  misc_feature 1..20: note = Target: FXN; (-) strand; PAM type: NRG; PAM sequence: CAG
  source 1..20: mol_type = other DNA
gcccacaggagggccagcag

SEQ ID NO: 13905 - DNA, 20 bp, synthetic construct
  misc_feature 1..20: note = Description of Artificial Sequence: Synthetic oligonucleotide
  misc_feature 1..20: note = Target: FXN; (-) strand; PAM type: NRG; PAM sequence: CAG
  source 1..20: mol_type = other DNA
gccgcccacaggagggccag

SEQ ID NO: 13906 - DNA, 20 bp, synthetic construct
  misc_feature 1..20: note = Description of Artificial Sequence: Synthetic oligonucleotide
  misc_feature 1..20: note = Target: FXN; (-) strand; PAM type: NRG; PAM sequence: CAG
  source 1..20: mol_type = other DNA
actgccgcccacaggagggc

SEQ ID NO: 13907 - DNA, 20 bp, synthetic construct
  misc_feature 1..20: note = Description of Artificial Sequence: Synthetic oligonucleotide
  misc_feature 1..20: note = Target: FXN; (-) strand; PAM type: NRG; PAM sequence: GGG
  source 1..20: mol_type = other DNA
tagcactgccgcccacagga

SEQ ID NO: 13908 - DNA, 20 bp, synthetic construct
  misc_feature 1..20: note = Description of Artificial Sequence: Synthetic oligonucleotide
  misc_feature 1..20: note = Target: FXN; (-) strand; PAM type: NRG; PAM sequence: AGG
  source 1..20: mol_type = other DNA
ctagcactgccgcccacagg

SEQ ID NO: 13909 - DNA, 20 bp, synthetic construct
  misc_feature 1..20: note = Description of Artificial Sequence: Synthetic oligonucleotide
  misc_feature 1..20: note = Target: FXN; (-) strand; PAM type: NRG; PAM sequence: GAG
  source 1..20: mol_type = other DNA
actagcactgccgcccacag

SEQ ID NO: 13910 - DNA, 20 bp, synthetic construct
  misc_feature 1..20: note = Description of Artificial Sequence: Synthetic oligonucleotide
  misc_feature 1..20: note = Target: FXN; (-) strand; PAM type: NRG; PAM sequence: AGG
  source 1..20: mol_type = other DNA
tcactagcactgccgcccac

SEQ ID NO: 13911 - DNA, 20 bp, synthetic construct
  misc_feature 1..20: note = Description of Artificial Sequence: Synthetic oligonucleotide
  misc_feature 1..20: note = Target: FXN; (-) strand; PAM type: NRG; PAM sequence: CAG
  source 1..20: mol_type = other DNA
atcactagcactgccgccca

SEQ ID NO: 13912 - DNA, 20 bp, synthetic construct
  misc_feature 1..20: note = Description of Artificial Sequence: Synthetic oligonucleotide
  misc_feature 1..20: note = Target: FXN; (-) strand; PAM type: NRG; PAM sequence: TAG
  source 1..20: mol_type = other DNA
cctaagattctgcacatcac

SEQ ID NO: 13913 - DNA, 20 bp, synthetic construct
  misc_feature 1..20: note = Description of Artificial Sequence: Synthetic oligonucleotide
  misc_feature 1..20: note = Target: FXN; (-) strand; PAM type: NRG; PAM sequence: AAG
  source 1..20: mol_type = other DNA
ggttccttggcactagtcct

SEQ ID NO: 13914 - DNA, 20 bp, synthetic construct
  misc_feature 1..20: note = Description of Artificial Sequence: Synthetic oligonucleotide
  misc_feature 1..20: note = Target: FXN; (-) strand; PAM type: NRG; PAM sequence: TAG
  source 1..20: mol_type = other DNA
atttataggttccttggcac

SEQ ID NO: 13915 - DNA, 20 bp, synthetic construct
  misc_feature 1..20: note = Description of Artificial Sequence: Synthetic oligonucleotide
  misc_feature 1..20: note = Target: FXN; (-) strand; PAM type: NRG; PAM sequence: TGG
  source 1..20: mol_type = other DNA
cagggtatttataggttcct

SEQ ID NO: 13916 - DNA, 20 bp, synthetic construct
  misc_feature 1..20: note = Description of Artificial Sequence: Synthetic oligonucleotide
  misc_feature 1..20: note = Target: FXN; (-) strand; PAM type: NRG; PAM sequence: AGG
  source 1..20: mol_type = other DNA
gggtcacccagggtatttat

SEQ ID NO: 13917 - DNA, 20 bp, synthetic construct
  misc_feature 1..20: note = Description of Artificial Sequence: Synthetic oligonucleotide
  misc_feature 1..20: note = Target: FXN; (-) strand; PAM type: NRG; PAM sequence: TAG
  source 1..20: mol_type = other DNA
tgggtcacccagggtattta

SEQ ID NO: 13918 - DNA, 20 bp, synthetic construct
  misc_feature 1..20: note = Description of Artificial Sequence: Synthetic oligonucleotide
  misc_feature 1..20: note = Target: FXN; (-) strand; PAM type: NRG; PAM sequence: GGG
  source 1..20: mol_type = other DNA
gtgcacgcctgggtcaccca

SEQ ID NO: 13919 - DNA, 20 bp, synthetic construct
  misc_feature 1..20: note = Description of Artificial Sequence: Synthetic oligonucleotide
  misc_feature 1..20: note = Target: FXN; (-) strand; PAM type: NRG; PAM sequence: AGG
  source 1..20: mol_type = other DNA
agtgcacgcctgggtcaccc

SEQ ID NO: 13920 - DNA, 20 bp, synthetic construct
  misc_feature 1..20: note = Description of Artificial Sequence: Synthetic oligonucleotide
  misc_feature 1..20: note = Target: FXN; (-) strand; PAM type: NRG; PAM sequence: CAG
  source 1..20: mol_type = other DNA
cagtgcacgcctgggtcacc

SEQ ID NO: 13921 - DNA, 20 bp, synthetic construct
  misc_feature 1..20: note = Description of Artificial Sequence: Synthetic oligonucleotide
  misc_feature 1..20: note = Target: FXN; (-) strand; PAM type: NRG; PAM sequence: GGG
  source 1..20: mol_type = other DNA
caccacagcagtgcacgcct

SEQ ID NO: 13922 - DNA, 20 bp, synthetic construct
  misc_feature 1..20: note = Description of Artificial Sequence: Synthetic oligonucleotide
  misc_feature 1..20: note = Target: FXN; (-) strand; PAM type: NRG; PAM sequence: TGG
  source 1..20: mol_type = other DNA
ccaccacagcagtgcacgcc

SEQ ID NO: 13923 - DNA, 20 bp, synthetic construct
  misc_feature 1..20: note = Description of Artificial Sequence: Synthetic oligonucleotide
  misc_feature 1..20: note = Target: FXN; (-) strand; PAM type: NRG; PAM sequence: CAG
  source 1..20: mol_type = other DNA
gactgtgaaggccaccacag

SEQ ID NO: 13924 - DNA, 20 bp, synthetic construct
  misc_feature 1..20: note = Description of Artificial Sequence: Synthetic oligonucleotide
  misc_feature 1..20: note = Target: FXN; (-) strand; PAM type: NRG; PAM sequence: CAG
  source 1..20: mol_type = other DNA
tctgactgtgaaggccacca

SEQ ID NO: 13925 - DNA, 20 bp, synthetic construct
  misc_feature 1..20: note = Description of Artificial Sequence: Synthetic oligonucleotide
  misc_feature 1..20: note = Target: FXN; (-) strand; PAM type: NRG; PAM sequence: AGG
  source 1..20: mol_type = other DNA
ttgtcatcttctgactgtga

SEQ ID NO: 13926 - DNA, 20 bp, synthetic construct
  misc_feature 1..20: note = Description of Artificial Sequence: Synthetic oligonucleotide
  misc_feature 1..20: note = Target: FXN; (-) strand; PAM type: NRG; PAM sequence: AAG
  source 1..20: mol_type = other DNA
cttgtcatcttctgactgtg

SEQ ID NO: 13927 - DNA, 20 bp, synthetic construct
  misc_feature 1..20: note = Description of Artificial Sequence: Synthetic oligonucleotide
  misc_feature 1..20: note = Target: FXN; (-) strand; PAM type: NRG; PAM sequence: CAG
  source 1..20: mol_type = other DNA
tgggccgattctccccttct

SEQ ID NO: 13928 - DNA, 20 bp, synthetic construct
  misc_feature 1..20: note = Description of Artificial Sequence: Synthetic oligonucleotide
  misc_feature 1..20: note = Target: FXN; (-) strand; PAM type: NRG; PAM sequence: GGG
  source 1..20: mol_type = other DNA
ctttctgtggatctcacctt

SEQ ID NO: 13929 - DNA, 20 bp, synthetic construct
  misc_feature 1..20: note = Description of Artificial Sequence: Synthetic oligonucleotide
  misc_feature 1..20: note = Target: FXN; (-) strand; PAM type: NRG; PAM sequence: TGG
  source 1..20: mol_type = other DNA
cctttctgtggatctcacct

SEQ ID NO: 13930 - DNA, 20 bp, synthetic construct
  misc_feature 1..20: note = Description of Artificial Sequence: Synthetic oligonucleotide
  misc_feature 1..20: note = Target: FXN; (-) strand; PAM type: NRG; PAM sequence: TGG
  source 1..20: mol_type = other DNA
tcttggccctggcctttctg

SEQ ID NO: 13931 - DNA, 20 bp, synthetic construct
  misc_feature 1..20: note = Description of Artificial Sequence: Synthetic oligonucleotide
  misc_feature 1..20: note = Target: FXN; (-) strand; PAM type: NRG; PAM sequence: TGG
  source 1..20: mol_type = other DNA
tgctggccgcatcttggccc

SEQ ID NO: 13932 - DNA, 20 bp, synthetic construct
  misc_feature 1..20: note = Description of Artificial Sequence: Synthetic oligonucleotide
  misc_feature 1..20: note = Target: FXN; (-) strand; PAM type: NRG; PAM sequence: TGG
  source 1..20: mol_type = other DNA
ctgaggtgctggccgcatct

SEQ ID NO: 13933 - DNA, 20 bp, synthetic construct
  misc_feature 1..20: note = Description of Artificial Sequence: Synthetic oligonucleotide
  misc_feature 1..20: note = Target: FXN; (-) strand; PAM type: NRG; PAM sequence: TGG
  source 1..20: mol_type = other DNA
ccaccaccagcctgaggtgc

SEQ ID NO: 13934 - DNA, 20 bp, synthetic construct
  misc_feature 1..20: note = Description of Artificial Sequence: Synthetic oligonucleotide
  misc_feature 1..20: note = Target: FXN; (-) strand; PAM type: NRG; PAM sequence: AGG
  source 1..20: mol_type = other DNA
gtaagaccaccaccagcctg

SEQ ID NO: 13935 - DNA, 20 bp, synthetic construct
  misc_feature 1..20: note = Description of Artificial Sequence: Synthetic oligonucleotide
  misc_feature 1..20: note = Target: FXN; (-) strand; PAM type: NRG; PAM sequence: GAG
  source 1..20: mol_type = other DNA
cgtaagaccaccaccagcct

SEQ ID NO: 13936 - DNA, 20 bp, synthetic construct
  misc_feature 1..20: note = Description of Artificial Sequence: Synthetic oligonucleotide
  misc_feature 1..20: note = Target: FXN; (-) strand; PAM type: NRG; PAM sequence: CAG
  source 1..20: mol_type = other DNA
ggtcaacgtaagaccaccac

SEQ ID NO: 13937 - DNA, 20 bp, synthetic construct
  misc_feature 1..20: note = Description of Artificial Sequence: Synthetic oligonucleotide
  misc_feature 1..20: note = Target: FXN; (-) strand; PAM type: NRG; PAM sequence: AAG
  source 1..20: mol_type = other DNA
gcctctggcatggtcaacgt

SEQ ID NO: 13938 - DNA, 20 bp, synthetic construct
  misc_feature 1..20: note = Description of Artificial Sequence: Synthetic oligonucleotide
  misc_feature 1..20: note = Target: FXN; (-) strand; PAM type: NRG; PAM sequence: TGG
  source 1..20: mol_type = other DNA
tcaaggactggcctctggca

SEQ ID NO: 13939 - DNA, 20 bp, synthetic construct
  misc_feature 1..20: note = Description of Artificial Sequence: Synthetic oligonucleotide
  misc_feature 1..20: note = Target: FXN; (-) strand; PAM type: NRG; PAM sequence: TGG
  source 1..20: mol_type = other DNA
agcaatcaaggactggcctc

SEQ ID NO: 13940 - DNA, 20 bp, synthetic construct
  misc_feature 1..20: note = Description of Artificial Sequence: Synthetic oligonucleotide
  misc_feature 1..20: note = Target: FXN; (-) strand; PAM type: NRG; PAM sequence: TGG
  source 1..20: mol_type = other DNA
ggtttggagcaatcaaggac

SEQ ID NO: 13941 - DNA, 20 bp, synthetic construct
  misc_feature 1..20: note = Description of Artificial Sequence: Synthetic oligonucleotide
  misc_feature 1..20: note = Target: FXN; (-) strand; PAM type: NRG; PAM sequence: AGG
  source 1..20: mol_type = other DNA
cagagggtttggagcaatca

SEQ ID NO: 13942 - DNA, 20 bp, synthetic construct
  misc_feature 1..20: note = Description of Artificial Sequence: Synthetic oligonucleotide
  misc_feature 1..20: note = Target: FXN; (-) strand; PAM type: NRG; PAM sequence: AAG
  source 1..20: mol_type = other DNA
acagagggtttggagcaatc

SEQ ID NO: 13943 - DNA, 20 bp, synthetic construct
  misc_feature 1..20: note = Description of Artificial Sequence: Synthetic oligonucleotide
  misc_feature 1..20: note = Target: FXN; (-) strand; PAM type: NRG; PAM sequence: GAG
  source 1..20: mol_type = other DNA
accctcgaacagagggtttg

SEQ ID NO: 13944 - DNA, 20 bp, synthetic construct
  misc_feature 1..20: note = Description of Artificial Sequence: Synthetic oligonucleotide
  misc_feature 1..20: note = Target: FXN; (-) strand; PAM type: NRG; PAM sequence: TGG
  source 1..20: mol_type = other DNA
gaaccctcgaacagagggtt

SEQ ID NO: 13945 - DNA, 20 bp, synthetic construct
  misc_feature 1..20: note = Description of Artificial Sequence: Synthetic oligonucleotide
  misc_feature 1..20: note = Target: FXN; (-) strand; PAM type: NRG; PAM sequence: GGG
  source 1..20: mol_type = other DNA
atttggaaccctcgaacaga

SEQ ID NO: 13946 - DNA, 20 bp, synthetic construct
  misc_feature 1..20: note = Description of Artificial Sequence: Synthetic oligonucleotide
  misc_feature 1..20: note = Target: FXN; (-) strand; PAM type: NRG; PAM sequence: AGG
  source 1..20: mol_type = other DNA
catttggaaccctcgaacag

SEQ ID NO: 13947 - DNA, 20 bp, synthetic construct
  misc_feature 1..20: note = Description of Artificial Sequence: Synthetic oligonucleotide
  misc_feature 1..20: note = Target: FXN; (-) strand; PAM type: NRG; PAM sequence: GAG
  source 1..20: mol_type = other DNA
tcatttggaaccctcgaaca

SEQ ID NO: 13948 - DNA, 20 bp, synthetic construct
  misc_feature 1..20: note = Description of Artificial Sequence: Synthetic oligonucleotide
  misc_feature 1..20: note = Target: FXN; (-) strand; PAM type: NRG; PAM sequence: CAG
  source 1..20: mol_type = other DNA
tttcatttggaaccctcgaa

SEQ ID NO: 13949 - DNA, 20 bp, synthetic construct
  misc_feature 1..20: note = Description of Artificial Sequence: Synthetic oligonucleotide
  misc_feature 1..20: note = Target: FXN; (-) strand; PAM type: NRG; PAM sequence: TGG
  source 1..20: mol_type = other DNA
gaggacctgctcatttcatt

SEQ ID NO: 13950 - DNA, 20 bp, synthetic construct
  misc_feature 1..20: note = Description of Artificial Sequence: Synthetic oligonucleotide
  misc_feature 1..20: note = Target: FXN; (-) strand; PAM type: NRG; PAM sequence: AGG
  source 1..20: mol_type = other DNA
ctaacctaggtcctgacacg

SEQ ID NO: 13951 - DNA, 20 bp, synthetic construct
  misc_feature 1..20: note = Description of Artificial Sequence: Synthetic oligonucleotide
  misc_feature 1..20: note = Target: FXN; (-) strand; PAM type: NRG; PAM sequence: GAG
  source 1..20: mol_type = other DNA
actaacctaggtcctgacac

SEQ ID NO: 13952 - DNA, 20 bp, synthetic construct
  misc_feature 1..20: note = Description of Artificial Sequence: Synthetic oligonucleotide
  misc_feature 1..20: note = Target: FXN; (-) strand; PAM type: NRG; PAM sequence: AGG
  source 1..20: mol_type = other DNA
gctttttcagaaactaacct

SEQ ID NO: 13953 - DNA, 20 bp, synthetic construct
  misc_feature 1..20: note = Description of Artificial Sequence: Synthetic oligonucleotide
  misc_feature 1..20: note = Target: FXN; (-) strand; PAM type: NRG; PAM sequence: TAG
  source 1..20: mol_type = other DNA
tgctttttcagaaactaacc

SEQ ID NO: 13954 - DNA, 20 bp, synthetic construct
  misc_feature 1..20: note = Description of Artificial Sequence: Synthetic oligonucleotide
  misc_feature 1..20: note = Target: FXN; (-) strand; PAM type: NRG; PAM sequence: CAG
  source 1..20: mol_type = other DNA
gcctgcttttcatgcttttt

SEQ ID NO: 13955 - DNA, 20 bp, synthetic construct
  misc_feature 1..20: note = Description of Artificial Sequence: Synthetic oligonucleotide
  misc_feature 1..20: note = Target: FXN; (-) strand; PAM type: NRG; PAM sequence: AGG
  source 1..20: mol_type = other DNA
gtcactcggggaagttcagg

SEQ ID NO: 13956 - DNA, 20 bp, synthetic construct
  misc_feature 1..20: note = Description of Artificial Sequence: Synthetic oligonucleotide
  misc_feature 1..20: note = Target: FXN; (-) strand; PAM type: NRG; PAM sequence: GAG
  source 1..20: mol_type = other DNA
agtcactcggggaagttcag

SEQ ID NO: 13957 - DNA, 20 bp, synthetic construct
  misc_feature 1..20: note = Description of Artificial Sequence: Synthetic oligonucleotide
  misc_feature 1..20: note = Target: FXN; (-) strand; PAM type: NRG; PAM sequence: AGG
  source 1..20: mol_type = other DNA
tcagtcactcggggaagttc

SEQ ID NO: 13958 - DNA, 20 bp, synthetic construct
  misc_feature 1..20: note = Description of Artificial Sequence: Synthetic oligonucleotide
  misc_feature 1..20: note = Target: FXN; (-) strand; PAM type: NRG; PAM sequence: CAG
  source 1..20: mol_type = other DNA
atcagtcactcggggaagtt

SEQ ID NO: 13959 - DNA, 20 bp, synthetic construct
  misc_feature 1..20: note = Description of Artificial Sequence: Synthetic oligonucleotide
  misc_feature 1..20: note = Target: FXN; (-) strand; PAM type: NRG; PAM sequence: AAG
  source 1..20: mol_type = other DNA
tttgcatcagtcactcgggg

SEQ ID NO: 13960 - DNA, 20 bp, synthetic construct
  misc_feature 1..20: note = Description of Artificial Sequence: Synthetic oligonucleotide
  misc_feature 1..20: note = Target: FXN; (-) strand; PAM type: NRG; PAM sequence: GGG
  source 1..20: mol_type = other DNA
cactttgcatcagtcactcg

SEQ ID NO: 13961 - DNA, 20 bp, synthetic construct
  misc_feature 1..20: note = Description of Artificial Sequence: Synthetic oligonucleotide
  misc_feature 1..20: note = Target: FXN; (-) strand; PAM type: NRG; PAM sequence: GGG
  source 1..20: mol_type = other DNA
gcactttgcatcagtcactc

SEQ ID NO: 13962 - DNA, 20 bp, synthetic construct
  misc_feature 1..20: note = Description of Artificial Sequence: Synthetic oligonucleotide
  misc_feature 1..20: note = Target: FXN; (-) strand; PAM type: NRG; PAM sequence: CGG
  source 1..20: mol_type = other DNA
cgcactttgcatcagtcact

SEQ ID NO: 13963 - DNA, 20 bp, synthetic construct
  misc_feature 1..20: note = Description of Artificial Sequence: Synthetic oligonucleotide
  misc_feature 1..20: note = Target: FXN; (-) strand; PAM type: NRG; PAM sequence: CAG
  source 1..20: mol_type = other DNA
atgcaggacgcactttgcat

SEQ ID NO: 13964 - DNA, 20 bp, synthetic construct
  misc_feature 1..20: note = Description of Artificial Sequence: Synthetic oligonucleotide
  misc_feature 1..20: note = Target: FXN; (-) strand; PAM type: NRG; PAM sequence: AGG
  source 1..20: mol_type = other DNA
catggtgctgtgaagcatgc

SEQ ID NO: 13965 - DNA, 20 bp, synthetic construct
  misc_feature 1..20: note = Description of Artificial Sequence: Synthetic oligonucleotide
  misc_feature 1..20: note = Target: FXN; (-) strand; PAM type: NRG; PAM sequence: CAG
  source 1..20: mol_type = other DNA
ccatggtgctgtgaagcatg

SEQ ID NO: 13966 - DNA, 20 bp, synthetic construct
  misc_feature 1..20: note = Description of Artificial Sequence: Synthetic oligonucleotide
  misc_feature 1..20: note = Target: FXN; (-) strand; PAM type: NRG; PAM sequence: AAG
  source 1..20: mol_type = other DNA
atcctctccatggtgctgtg

SEQ ID NO: 13967 - DNA, 20 bp, synthetic construct
  misc_feature 1..20: note = Description of Artificial Sequence: Synthetic oligonucleotide
  misc_feature 1..20: note = Target: FXN; (-) strand; PAM type: NRG; PAM sequence: TGG
  source 1..20: mol_type = other DNA
gcccctgaagatcctctcca

SEQ ID NO: 13968 - DNA, 20 bp, synthetic construct
  misc_feature 1..20: note = Description of Artificial Sequence: Synthetic oligonucleotide
  misc_feature 1..20: note = Target: FXN; (-) strand; PAM type: NRG; PAM sequence: AAG
  source 1..20: mol_type = other DNA
tagtctgcagtttgcccctg

SEQ ID NO: 13969 - DNA, 20 bp, synthetic construct
  misc_feature 1..20: note = Description of Artificial Sequence: Synthetic oligonucleotide
  misc_feature 1..20: note = Target: FXN; (-) strand; PAM type: NRG; PAM sequence: CAG
  source 1..20: mol_type = other DNA
gccgtcattcagatagtctg

SEQ ID NO: 13970 - DNA, 20 bp, synthetic construct
  misc_feature 1..20: note = Description of Artificial Sequence: Synthetic oligonucleotide
  misc_feature 1..20: note = Target: FXN; (-) strand; PAM type: NRG; PAM sequence: TAG
  source 1..20: mol_type = other DNA
ggtcagtgccgtcattcaga

SEQ ID NO: 13971 - DNA, 20 bp, synthetic construct
  misc_feature 1..20: note = Description of Artificial Sequence: Synthetic oligonucleotide
  misc_feature 1..20: note = Target: FXN; (-) strand; PAM type: NRG; PAM sequence: CAG
  source 1..20: mol_type = other DNA
tgatggtcagtgccgtcatt

SEQ ID NO: 13972 - DNA, 20 bp, synthetic construct
  misc_feature 1..20: note = Description of Artificial Sequence: Synthetic oligonucleotide
  misc_feature 1..20: note = Target: FXN; (-) strand; PAM type: NRG; PAM sequence: CAG
  source 1..20: mol_type = other DNA
ctctgcggtttgctgatggt

SEQ ID NO: 13973 - DNA, 20 bp, synthetic construct
  misc_feature 1..20: note = Description of Artificial Sequence: Synthetic oligonucleotide
  misc_feature 1..20: note = Target: FXN; (-) strand; PAM type: NRG; PAM sequence: TGG
  source 1..20: mol_type = other DNA
gcagctctgcggtttgctga

SEQ ID NO: 13974 - DNA, 20 bp, synthetic construct
  misc_feature 1..20: note = Description of Artificial Sequence: Synthetic oligonucleotide
  misc_feature 1..20: note = Target: FXN; (-) strand; PAM type: NRG; PAM sequence: CGG
  source 1..20: mol_type = other DNA
ttcttggtcaggcagctctg

SEQ ID NO: 13975 - DNA, 20 bp, synthetic construct
  misc_feature 1..20: note = Description of Artificial Sequence: Synthetic oligonucleotide
  misc_feature 1..20: note = Target: FXN; (-) strand; PAM type: NRG; PAM sequence: CAG
  source 1..20: mol_type = other DNA
ctcgcaatttcttggtcagg

SEQ ID NO: 13976 - DNA, 20 bp, synthetic construct
  misc_feature 1..20: note = Description of Artificial Sequence: Synthetic oligonucleotide
  misc_feature 1..20: note = Target: FXN; (-) strand; PAM type: NRG; PAM sequence: AGG
  source 1..20: mol_type = other DNA
tgtctcgcaatttcttggtc

SEQ ID NO: 13977 - DNA, 20 bp, synthetic construct
  misc_feature 1..20: note = Description of Artificial Sequence: Synthetic oligonucleotide
  misc_feature 1..20: note = Target: FXN; (-) strand; PAM type: NRG; PAM sequence: CAG
  source 1..20: mol_type = other DNA
ctgtctcgcaatttcttggt

SEQ ID NO: 13978 - DNA, 20 bp, synthetic construct
  misc_feature 1..20: note = Description of Artificial Sequence: Synthetic oligonucleotide
  misc_feature 1..20: note = Target: FXN; (-) strand; PAM type: NRG; PAM sequence: TGG
  source 1..20: mol_type = other DNA
gcttctgtctcgcaatttct

SEQ ID NO: 13979 - DNA, 20 bp, synthetic construct
  misc_feature 1..20: note = Description of Artificial Sequence: Synthetic oligonucleotide
  misc_feature 1..20: note = Target: FXN; (-) strand; PAM type: NRG; PAM sequence: AAG
  source 1..20: mol_type = other DNA
gccccttcttcttcgcctgc

SEQ ID NO: 13980 - DNA, 20 bp, synthetic construct
  misc_feature 1..20: note = Description of Artificial Sequence: Synthetic oligonucleotide
  misc_feature 1..20: note = Target: FXN; (-) strand; PAM type: NRG; PAM sequence: TGG
  source 1..20: mol_type = other DNA
caggcgtgagccactgtgtc

SEQ ID NO: 13981 - DNA, 20 bp, synthetic construct
  misc_feature 1..20: note = Description of Artificial Sequence: Synthetic oligonucleotide
  misc_feature 1..20: note = Target: FXN; (-) strand; PAM type: NRG; PAM sequence: GAG
  source 1..20: mol_type = other DNA
agtgctgggattacaggcgt

SEQ ID NO: 13982 - DNA, 20 bp, synthetic construct
  misc_feature 1..20: note = Description of Artificial Sequence: Synthetic oligonucleotide
  misc_feature 1..20: note = Target: FXN; (-) strand; PAM type: NRG; PAM sequence: AGG
  source 1..20: mol_type = other DNA
tcccaaagtgctgggattac

SEQ ID NO: 13983 - DNA, 20 bp, synthetic construct
  misc_feature 1..20: note = Description of Artificial Sequence: Synthetic oligonucleotide
  misc_feature 1..20: note = Target: FXN; (-) strand; PAM type: NRG; PAM sequence: CAG
  source 1..20: mol_type = other DNA
ctcccaaagtgctgggatta

SEQ ID NO: 13984 - DNA, 20 bp, synthetic construct
  misc_feature 1..20: note = Description of Artificial Sequence: Synthetic oligonucleotide
  misc_feature 1..20: note = Target: FXN; (-) strand; PAM type: NRG; PAM sequence: GGG
  source 1..20: mol_type = other DNA
ccttggcctcccaaagtgct

SEQ ID NO: 13985 - DNA, 20 bp, synthetic construct
  misc_feature 1..20: note = Description of Artificial Sequence: Synthetic oligonucleotide
  misc_feature 1..20: note = Target: FXN; (-) strand; PAM type: NRG; PAM sequence: TGG
  source 1..20: mol_type = other DNA
gccttggcctcccaaagtgc

SEQ ID NO: 13986 - DNA, 20 bp, synthetic construct
  misc_feature 1..20: note = Description of Artificial Sequence: Synthetic oligonucleotide
  misc_feature 1..20: note = Target: FXN; (-) strand; PAM type: NRG; PAM sequence: AAG
  source 1..20: mol_type = other DNA
ccgcctgccttggcctccca

SEQ ID NO: 13987 - DNA, 20 bp, synthetic construct
  misc_feature 1..20: note = Description of Artificial Sequence: Synthetic oligonucleotide
  misc_feature 1..20: note = Target: FXN; (-) strand; PAM type: NRG; PAM sequence: TGG
  source 1..20: mol_type = other DNA
ctcaagtgatccgcctgcct

SEQ ID NO: 13988 - DNA, 20 bp, synthetic construct
  misc_feature 1..20: note = Description of Artificial Sequence: Synthetic oligonucleotide
  misc_feature 1..20: note = Target: FXN; (-) strand; PAM type: NRG; PAM sequence: AAG
  source 1..20: mol_type = other DNA
ggtctcaaactcctgacctc

SEQ ID NO: 13989 - DNA, 20 bp, synthetic construct
  misc_feature 1..20: note = Description of Artificial Sequence: Synthetic oligonucleotide
  misc_feature 1..20: note = Target: FXN; (-) strand; PAM type: NRG; PAM sequence: TGG
  source 1..20: mol_type = other DNA
tttcactatgttgcccaggc

SEQ ID NO: 13990 - DNA, 20 bp, synthetic construct
  misc_feature 1..20: note = Description of Artificial Sequence: Synthetic oligonucleotide
  misc_feature 1..20: note = Target: FXN; (-) strand; PAM type: NRG; PAM sequence: AGG
  source 1..20: mol_type = other DNA
agggtttcactatgttgccc

SEQ ID NO: 13991 - DNA, 20 bp, synthetic construct
  misc_feature 1..20: note = Description of Artificial Sequence: Synthetic oligonucleotide
  misc_feature 1..20: note = Target: FXN; (-) strand; PAM type: NRG; PAM sequence: CAG
  source 1..20: mol_type = other DNA
cagggtttcactatgttgcc

SEQ ID NO: 13992 - DNA, 20 bp, synthetic construct
  misc_feature 1..20: note = Description of Artificial Sequence: Synthetic oligonucleotide
  misc_feature 1..20: note = Target: FXN; (-) strand; PAM type: NRG; PAM sequence: GGG
  source 1..20: mol_type = other DNA
ttgtatttttagtagagaca

SEQ ID NO: 13993 - DNA, 20 bp, synthetic construct
  misc_feature 1..20: note = Description of Artificial Sequence: Synthetic oligonucleotide
  misc_feature 1..20: note = Target: FXN; (-) strand; PAM type: NRG; PAM sequence: AGG
  source 1..20: mol_type = other DNA
tttgtatttttagtagagac

SEQ ID NO: 13994 - DNA, 20 bp, synthetic construct
  misc_feature 1..20: note = Description of Artificial Sequence: Synthetic oligonucleotide
  misc_feature 1..20: note = Target: FXN; (-) strand; PAM type: NRG; PAM sequence: CAG
  source 1..20: mol_type = other DNA
ttttgtatttttagtagaga

SEQ ID NO: 13995 - DNA, 20 bp, synthetic construct
  misc_feature 1..20: note = Description of Artificial Sequence: Synthetic oligonucleotide
  misc_feature 1..20: note = Target: FXN; (-) strand; PAM type: NRG; PAM sequence: GAG
  source 1..20: mol_type = other DNA
aattttttgtatttttagta

SEQ ID NO: 13996 - DNA, 20 bp, synthetic construct
  misc_feature 1..20: note = Description of Artificial Sequence: Synthetic oligonucleotide
  misc_feature 1..20: note = Target: FXN; (-) strand; PAM type: NRG; PAM sequence: TAG
  source 1..20: mol_type = other DNA
cgaattttttgtatttttag

SEQ ID NO: 13997 - DNA, 20 bp, synthetic construct
  misc_feature 1..20: note = Description of Artificial Sequence: Synthetic oligonucleotide
  misc_feature 1..20: note = Target: FXN; (-) strand; PAM type: NRG; PAM sequence: TAG
  source 1..20: mol_type = other DNA
tggcgaattttttgtatttt

SEQ ID NO: 13998 - DNA, 20 bp, synthetic construct
  misc_feature 1..20: note = Description of Artificial Sequence: Synthetic oligonucleotide
  misc_feature 1..20: note = Target: FXN; (-) strand; PAM type: NRG; PAM sequence: TGG
  source 1..20: mol_type = other DNA
caggtgcctgccaccatgcc

SEQ ID NO: 13999 - DNA, 20 bp, synthetic construct
  misc_feature 1..20: note = Description of Artificial Sequence: Synthetic oligonucleotide
  misc_feature 1..20: note = Target: FXN; (-) strand; PAM type: NRG; PAM sequence: AGG
  source 1..20: mol_type = other DNA
tcccaagcagctgggattac

SEQ ID NO: 14000 - DNA, 20 bp, synthetic construct
  misc_feature 1..20: note = Description of Artificial Sequence: Synthetic oligonucleotide
  misc_feature 1..20: note = Target: FXN; (-) strand; PAM type: NRG; PAM sequence: CAG
  source 1..20: mol_type = other DNA
ctcccaagcagctgggatta

SEQ ID NO: 14001 - DNA, 20 bp, synthetic construct
  misc_feature 1..20: note = Description of Artificial Sequence: Synthetic oligonucleotide
  misc_feature 1..20: note = Target: FXN; (-) strand; PAM type: NRG; PAM sequence: GGG
  source 1..20: mol_type = other DNA
tctcagtctcccaagcagct

SEQ ID NO: 14002 - DNA, 20 bp, synthetic construct
  misc_feature 1..20: note = Description of Artificial Sequence: Synthetic oligonucleotide
  misc_feature 1..20: note = Target: FXN; (-) strand; PAM type: NRG; PAM sequence: TGG
  source 1..20: mol_type = other DNA
gtctcagtctcccaagcagc

SEQ ID NO: 14003 - DNA, 20 bp, synthetic construct
  misc_feature 1..20: note = Description of Artificial Sequence: Synthetic oligonucleotide
  misc_feature 1..20: note = Target: FXN; (-) strand; PAM type: NRG; PAM sequence: CAG
  source 1..20: mol_type = other DNA
tcctgtctcagtctcccaag

SEQ ID NO: 14004 - DNA, 20 bp, synthetic construct
  misc_feature 1..20: note = Description of Artificial Sequence: Synthetic oligonucleotide
  misc_feature 1..20: note = Target: FXN; (-) strand; PAM type: NRG; PAM sequence: AAG
  source 1..20: mol_type = other DNA
ttctcctgtctcagtctccc

SEQ ID NO: 14005 - DNA, 20 bp, synthetic construct
  misc_feature 1..20: note = Description of Artificial Sequence: Synthetic oligonucleotide
  misc_feature 1..20: note = Target: FXN; (-) strand; PAM type: NRG; PAM sequence: CAG
  source 1..20: mol_type = other DNA
ttcaagcaattctcctgtct

SEQ ID NO: 14006 - DNA, 20 bp, synthetic construct
  misc_feature 1..20: note = Description of Artificial Sequence: Synthetic oligonucleotide
  misc_feature 1..20: note = Target: FXN; (-) strand; PAM type: NRG; PAM sequence: AAG
  source 1..20: mol_type = other DNA
aaccttcgcctcctgggttc

SEQ ID NO: 14007 - DNA, 20 bp, synthetic construct
  misc_feature 1..20: note = Description of Artificial Sequence: Synthetic oligonucleotide
  misc_feature 1..20: note = Target: FXN; (-) strand; PAM type: NRG; PAM sequence: GGG
  source 1..20: mol_type = other DNA
cgttacaaccttcgcctcct

SEQ ID NO: 14008 - DNA, 20 bp, synthetic construct
  misc_feature 1..20: note = Description of Artificial Sequence: Synthetic oligonucleotide
  misc_feature 1..20: note = Target: FXN; (-) strand; PAM type: NRG; PAM sequence: TGG
  source 1..20: mol_type = other DNA
tcgttacaaccttcgcctcc

SEQ ID NO: 14009 - DNA, 20 bp, synthetic construct
  misc_feature 1..20: note = Description of Artificial Sequence: Synthetic oligonucleotide
  misc_feature 1..20: note = Target: FXN; (-) strand; PAM type: NRG; PAM sequence: CAG
  source 1..20: mol_type = other DNA
ggagtgctgtggcacgattt

SEQ ID NO: 14010 - DNA, 20 bp, synthetic construct
  misc_feature 1..20: note = Description of Artificial Sequence: Synthetic oligonucleotide
  misc_feature 1..20: note = Target: FXN; (-) strand; PAM type: NRG; PAM sequence: TGG
  source 1..20: mol_type = other DNA
tcgcccaggatggagtgctg

SEQ ID NO: 14011 - DNA, 20 bp, synthetic construct
  misc_feature 1..20: note = Description of Artificial Sequence: Synthetic oligonucleotide
  misc_feature 1..20: note = Target: FXN; (-) strand; PAM type: NRG; PAM sequence: GAG
  source 1..20: mol_type = other DNA
tcactctgtcgcccaggatg

SEQ ID NO: 14012 - DNA, 20 bp, synthetic construct
  misc_feature 1..20: note = Description of Artificial Sequence: Synthetic oligonucleotide
  misc_feature 1..20: note = Target: FXN; (-) strand; PAM type: NRG; PAM sequence: TGG
  source 1..20: mol_type = other DNA
tctcactctgtcgcccagga

SEQ ID NO: 14013 - DNA, 20 bp, synthetic construct
  misc_feature 1..20: note = Description of Artificial Sequence: Synthetic oligonucleotide
  misc_feature 1..20: note = Target: FXN; (-) strand; PAM type: NRG; PAM sequence: AGG
  source 1..20: mol_type = other DNA
acagtctcactctgtcgccc

SEQ ID NO: 14014 - DNA, 20 bp, synthetic construct
  misc_feature 1..20: note = Description of Artificial Sequence: Synthetic oligonucleotide
  misc_feature 1..20: note = Target: FXN; (-) strand; PAM type: NRG; PAM sequence: CAG
  source 1..20: mol_type = other DNA
gacagtctcactctgtcgcc

SEQ ID NO: 14015 - DNA, 20 bp, synthetic construct
  misc_feature 1..20: note = Description of Artificial Sequence: Synthetic oligonucleotide
  misc_feature 1..20: note = Target: FXN; (-) strand; PAM type: NRG; PAM sequence: CAG
  source 1..20: mol_type = other DNA
ttctcctcctttttttgaga

SEQ ID NO: 14016 - DNA, 20 bp, synthetic construct
  misc_feature 1..20: note = Description of Artificial Sequence: Synthetic oligonucleotide
  misc_feature 1..20: note = Target: FXN; (-) strand; PAM type: NRG; PAM sequence: GAG
  source 1..20: mol_type = other DNA
cttcttctcctccttttttt

SEQ ID NO: 14017 - DNA, 20 bp, synthetic construct
  misc_feature 1..20: note = Description of Artificial Sequence: Synthetic oligonucleotide
  misc_feature 1..20: note = Target: FXN; (-) strand; PAM type: NRG; PAM sequence: TGG
  source 1..20: mol_type = other DNA
ggcctgtttcattcctgcct

SEQ ID NO: 14018 - DNA, 20 bp, synthetic construct
  misc_feature 1..20: note = Description of Artificial Sequence: Synthetic oligonucleotide
  misc_feature 1..20: note = Target: FXN; (-) strand; PAM type: NRG; PAM sequence: TGG
  source 1..20: mol_type = other DNA
ttgcttcactccaacattca

SEQ ID NO: 14019 - DNA, 20 bp, synthetic construct
  misc_feature 1..20: note = Description of Artificial Sequence: Synthetic oligonucleotide
  misc_feature 1..20: note = Target: FXN; (-) strand; PAM type: NRG; PAM sequence: CAG
  source 1..20: mol_type = other DNA
gccgcttagcacgaggaggc

SEQ ID NO: 14020 - DNA, 20 bp, synthetic construct
  misc_feature 1..20: note = Description of Artificial Sequence: Synthetic oligonucleotide
  misc_feature 1..20: note = Target: FXN; (-) strand; PAM type: NRG; PAM sequence: AGG
  source 1..20: mol_type = other DNA
agtagccgcttagcacgagg

SEQ ID NO: 14021 - DNA, 20 bp, synthetic construct
  misc_feature 1..20: note = Description of Artificial Sequence: Synthetic oligonucleotide
  misc_feature 1..20: note = Target: FXN; (-) strand; PAM type: NRG; PAM sequence: GAG
  source 1..20: mol_type = other DNA
cagtagccgcttagcacgag

SEQ ID NO: 14022 - DNA, 20 bp, synthetic construct
  misc_feature 1..20: note = Description of Artificial Sequence: Synthetic oligonucleotide
  misc_feature 1..20: note = Target: FXN; (-) strand; PAM type: NRG; PAM sequence: AGG
  source 1..20: mol_type = other DNA
cacagtagccgcttagcacg

SEQ ID NO: 14023 - DNA, 20 bp, synthetic construct
  misc_feature 1..20: note = Description of Artificial Sequence: Synthetic oligonucleotide
  misc_feature 1..20: note = Target: FXN; (-) strand; PAM type: NRG; PAM sequence: GAG
  source 1..20: mol_type = other DNA
tcacagtagccgcttagcac

SEQ ID NO: 14024 - DNA, 20 bp, synthetic construct
  misc_feature 1..20: note = Description of Artificial Sequence: Synthetic oligonucleotide
  misc_feature 1..20: note = Target: FXN; (-) strand; PAM type: NRG; PAM sequence: TAG
  source 1..20: mol_type = other DNA
aagaactcacagtagccgct

SEQ ID NO: 14025 - DNA, 20 bp, synthetic construct
  misc_feature 1..20: note = Description of Artificial Sequence: Synthetic oligonucleotide
  misc_feature 1..20: note = Target: FXN; (-) strand; PAM type: NRG; PAM sequence: TAG
  source 1..20: mol_type = other DNA
ggagtggaaagaactcacag

SEQ ID NO: 14026 - DNA, 20 bp, synthetic construct
  misc_feature 1..20: note = Description of Artificial Sequence: Synthetic oligonucleotide
  misc_feature 1..20: note = Target: FXN; (-) strand; PAM type: NRG; PAM sequence: CAG
  source 1..20: mol_type = other DNA
gggggagtggaaagaactca

SEQ ID NO: 14027 - DNA, 20 bp, synthetic construct
  misc_feature 1..20: note = Description of Artificial Sequence: Synthetic oligonucleotide
  misc_feature 1..20: note = Target: FXN; (-) strand; PAM type: NRG; PAM sequence: AAG
  source 1..20: mol_type = other DNA
caatgtcttgggggagtgga

SEQ ID NO: 14028 - DNA, 20 bp, synthetic construct
  misc_feature 1..20: note = Description of Artificial Sequence: Synthetic oligonucleotide
  misc_feature 1..20: note = Target: FXN; (-) strand; PAM type: NRG; PAM sequence: TGG
  source 1..20: mol_type = other DNA
tatgcaatgtcttgggggag

SEQ ID NO: 14029 - DNA, 20 bp, synthetic construct
  misc_feature 1..20: note = Description of Artificial Sequence: Synthetic oligonucleotide
  misc_feature 1..20: note = Target: FXN; (-) strand; PAM type: NRG; PAM sequence: GAG
  source 1..20: mol_type = other DNA
atttatgcaatgtcttgggg

SEQ ID NO: 14030 - DNA, 20 bp, synthetic construct
  misc_feature 1..20: note = Description of Artificial Sequence: Synthetic oligonucleotide
  misc_feature 1..20: note = Target: FXN; (-) strand; PAM type: NRG; PAM sequence: GGG
  source 1..20: mol_type = other DNA
ttatttatgcaatgtcttgg

SEQ ID NO: 14031 - DNA, 20 bp, synthetic construct
  misc_feature 1..20: note = Description of Artificial Sequence: Synthetic oligonucleotide
  misc_feature 1..20: note = Target: FXN; (-) strand; PAM type: NRG; PAM sequence: GGG
  source 1..20: mol_type = other DNA
attatttatgcaatgtcttg

SEQ ID NO: 14032 - DNA, 20 bp, synthetic construct
  misc_feature 1..20: note = Description of Artificial Sequence: Synthetic oligonucleotide
  misc_feature 1..20: note = Target: FXN; (-) strand; PAM type: NRG; PAM sequence: GGG
  source 1..20: mol_type = other DNA
cattatttatgcaatgtctt

SEQ ID NO: 14033 - DNA, 20 bp, synthetic construct
  misc_feature 1..20: note = Description of Artificial Sequence: Synthetic oligonucleotide
  misc_feature 1..20: note = Target: FXN; (-) strand; PAM type: NRG; PAM sequence: TGG
  source 1..20: mol_type = other DNA
acattatttatgcaatgtct

SEQ ID NO: 14034 - DNA, 20 bp, synthetic construct
  misc_feature 1..20: note = Description of Artificial Sequence: Synthetic oligonucleotide
  misc_feature 1..20: note = Target: FXN; (-) strand; PAM type: NRG; PAM sequence: AAG
  source 1..20: mol_type = other DNA
tcagcggggtgagtgtcaga

SEQ ID NO: 14035 - DNA, 20 bp, synthetic construct
  misc_feature 1..20: note = Description of Artificial Sequence: Synthetic oligonucleotide
  misc_feature 1..20: note = Target: FXN; (-) strand; PAM type: NRG; PAM sequence: CAG
  source 1..20: mol_type = other DNA
acattcagcggggtgagtgt

SEQ ID NO: 14036 - DNA, 20 bp, synthetic construct
  misc_feature 1..20: note = Description of Artificial Sequence: Synthetic oligonucleotide
  misc_feature 1..20: note = Target: FXN; (-) strand; PAM type: NRG; PAM sequence: GAG
  source 1..20: mol_type = other DNA
ggcaggacattcagcggggt

SEQ ID NO: 14037 - DNA, 20 bp, synthetic construct
  misc_feature 1..20: note = Description of Artificial Sequence: Synthetic oligonucleotide
  misc_feature 1..20: note = Target: FXN; (-) strand; PAM type: NRG; PAM sequence: GGG
  source 1..20: mol_type = other DNA
cagaggcaggacattcagcg

SEQ ID NO: 14038 - DNA, 20 bp, synthetic construct
  misc_feature 1..20: note = Description of Artificial Sequence: Synthetic oligonucleotide
  misc_feature 1..20: note = Target: FXN; (-) strand; PAM type: NRG; PAM sequence: GGG
  source 1..20: mol_type = other DNA
gcagaggcaggacattcagc

SEQ ID NO: 14039 - DNA, 20 bp, synthetic construct
  misc_feature 1..20: note = Description of Artificial Sequence: Synthetic oligonucleotide
  misc_feature 1..20: note = Target: FXN; (-) strand; PAM type: NRG; PAM sequence: CGG
  source 1..20: mol_type = other DNA
agcagaggcaggacattcag

SEQ ID NO: 14040 - DNA, 20 bp, synthetic construct
  misc_feature 1..20: note = Description of Artificial Sequence: Synthetic oligonucleotide
  misc_feature 1..20: note = Target: FXN; (-) strand; PAM type: NRG; PAM sequence: CAG
  source 1..20: mol_type = other DNA
ttgagcagaggcaggacatt

SEQ ID NO: 14041 - DNA, 20 bp, synthetic construct
  misc_feature 1..20: note = Description of Artificial Sequence: Synthetic oligonucleotide
  misc_feature 1..20: note = Target: FXN; (-) strand; PAM type: NRG; PAM sequence: AGG
  source 1..20: mol_type = other DNA
taccacccttgagcagaggc

SEQ ID NO: 14042 - DNA, 20 bp, synthetic construct
  misc_feature 1..20: note = Description of Artificial Sequence: Synthetic oligonucleotide
  misc_feature 1..20: note = Target: FXN; (-) strand; PAM type: NRG; PAM sequence: CAG
  source 1..20: mol_type = other DNA
ataccacccttgagcagagg

SEQ ID NO: 14043 - DNA, 20 bp, synthetic construct
  misc_feature 1..20: note = Description of Artificial Sequence: Synthetic oligonucleotide
  misc_feature 1..20: note = Target: FXN; (-) strand; PAM type: NRG; PAM sequence: AGG
  source 1..20: mol_type = other DNA
atcataccacccttgagcag

SEQ ID NO: 14044 - DNA, 20 bp, synthetic construct
  misc_feature 1..20: note = Description of Artificial Sequence: Synthetic oligonucleotide
  misc_feature 1..20: note = Target: FXN; (-) strand; PAM type: NRG; PAM sequence: GAG
  source 1..20: mol_type = other DNA
catcataccacccttgagca

SEQ ID NO: 14045 - DNA, 20 bp, synthetic construct
  misc_feature 1..20: note = Description of Artificial Sequence: Synthetic oligonucleotide
  misc_feature 1..20: note = Target: FXN; (-) strand; PAM type: NRG; PAM sequence: CAG
  source 1..20: mol_type = other DNA
cccatcataccacccttgag

SEQ ID NO: 14046 - DNA, 20 bp, synthetic construct
  misc_feature 1..20: note = Description of Artificial Sequence: Synthetic oligonucleotide
  misc_feature 1..20: note = Target: FXN; (-) strand; PAM type: NRG; PAM sequence: GAG
  source 1..20: mol_type = other DNA
gtccccatcataccaccctt

SEQ ID NO: 14047 - DNA, 20 bp, synthetic construct
  misc_feature 1..20: note = Description of Artificial Sequence: Synthetic oligonucleotide
  misc_feature 1..20: note = Target: FXN; (-) strand; PAM type: NRG; PAM sequence: AAG
  source 1..20: mol_type = other DNA
ccctgttcccctccactgcc

SEQ ID NO: 14048 - DNA, 20 bp, synthetic construct
  misc_feature 1..20: note = Description of Artificial Sequence: Synthetic oligonucleotide
  misc_feature 1..20: note = Target: FXN; (-) strand; PAM type: NRG; PAM sequence: TGG
  source 1..20: mol_type = other DNA
agcggggagaccaccatgtc

SEQ ID NO: 14049 - DNA, 20 bp, synthetic construct
  misc_feature 1..20: note = Description of Artificial Sequence: Synthetic oligonucleotide
  misc_feature 1..20: note = Target: FXN; (-) strand; PAM type: NRG; PAM sequence: GAG
  source 1..20: mol_type = other DNA
acttgtagccaggaagcggg

SEQ ID NO: 14050 - DNA, 20 bp, synthetic construct
  misc_feature 1..20: note = Description of Artificial Sequence: Synthetic oligonucleotide
  misc_feature 1..20: note = Target: FXN; (-) strand; PAM type: NRG; PAM sequence: GGG
  source 1..20: mol_type = other DNA
ggacttgtagccaggaagcg

SEQ ID NO: 14051 - DNA, 20 bp, synthetic construct
  misc_feature 1..20: note = Description of Artificial Sequence: Synthetic oligonucleotide
  misc_feature 1..20: note = Target: FXN; (-) strand; PAM type: NRG; PAM sequence: GGG
  source 1..20: mol_type = other DNA
gggacttgtagccaggaagc

SEQ ID NO: 14052 - DNA, 20 bp, synthetic construct
  misc_feature 1..20: note = Description of Artificial Sequence: Synthetic oligonucleotide
  misc_feature 1..20: note = Target: FXN; (-) strand; PAM type: NRG; PAM sequence: CGG
  source 1..20: mol_type = other DNA
agggacttgtagccaggaag

SEQ ID NO: 14053 - DNA, 20 bp, synthetic construct
  misc_feature 1..20: note = Description of Artificial Sequence: Synthetic oligonucleotide
  misc_feature 1..20: note = Target: FXN; (-) strand; PAM type: NRG; PAM sequence: AAG
  source 1..20: mol_type = other DNA
cagagggacttgtagccagg

SEQ ID NO: 14054 - DNA, 20 bp, synthetic construct
  misc_feature 1..20: note = Description of Artificial Sequence: Synthetic oligonucleotide
  misc_feature 1..20: note = Target: FXN; (-) strand; PAM type: NRG; PAM sequence: AGG
  source 1..20: mol_type = other DNA
cttcagagggacttgtagcc

SEQ ID NO: 14055 - DNA, 20 bp, synthetic construct
  misc_feature 1..20: note = Description of Artificial Sequence: Synthetic oligonucleotide
  misc_feature 1..20: note = Target: FXN; (-) strand; PAM type: NRG; PAM sequence: CAG
  source 1..20: mol_type = other DNA
tcttcagagggacttgtagc

SEQ ID NO: 14056 - DNA, 20 bp, synthetic construct
  misc_feature 1..20: note = Description of Artificial Sequence: Synthetic oligonucleotide
  misc_feature 1..20: note = Target: FXN; (-) strand; PAM type: NRG; PAM sequence: TAG
  source 1..20: mol_type = other DNA
gatttcttcagagggacttg

SEQ ID NO: 14057 - DNA, 20 bp, synthetic construct
  misc_feature 1..20: note = Description of Artificial Sequence: Synthetic oligonucleotide
  misc_feature 1..20: note = Target: FXN; (-) strand; PAM type: NRG; PAM sequence: GGG
  source 1..20: mol_type = other DNA
ctcctttggatttcttcaga

SEQ ID NO: 14058 - DNA, 20 bp, synthetic construct
  misc_feature 1..20: note = Description of Artificial Sequence: Synthetic oligonucleotide
  misc_feature 1..20: note = Target: FXN; (-) strand; PAM type: NRG; PAM sequence: AGG
  source 1..20: mol_type = other DNA
actcctttggatttcttcag

SEQ ID NO: 14059 - DNA, 20 bp, synthetic construct
  misc_feature 1..20: note = Description of Artificial Sequence: Synthetic oligonucleotide
  misc_feature 1..20: note = Target: FXN; (-) strand; PAM type: NRG; PAM sequence: GAG
  source 1..20: mol_type = other DNA
tactcctttggatttcttca

SEQ ID NO: 14060 - DNA, 20 bp, synthetic construct
  misc_feature 1..20: note = Description of Artificial Sequence: Synthetic oligonucleotide
  misc_feature 1..20: note = Target: FXN; (-) strand; PAM type: NRG; PAM sequence: CAG
  source 1..20: mol_type = other DNA
tttactcctttggatttctt

SEQ ID NO: 14061 - DNA, 20 bp, synthetic construct
  misc_feature 1..20: note = Description of Artificial Sequence: Synthetic oligonucleotide
  misc_feature 1..20: note = Target: FXN; (-) strand; PAM type: NRG; PAM sequence: TGG
  source 1..20: mol_type = other DNA
ctccaagctctttactcctt

SEQ ID NO: 14062 - DNA, 20 bp, synthetic construct
  misc_feature 1..20: note = Description of Artificial Sequence: Synthetic oligonucleotide
  misc_feature 1..20: note = Target: FXN; (-) strand; PAM type: NRG; PAM sequence: AAG
  source 1..20: mol_type = other DNA
cctacagaggcctactctcc

SEQ ID NO: 14063 - DNA, 20 bp, synthetic construct
  misc_feature 1..20: note = Description of Artificial Sequence: Synthetic oligonucleotide
  misc_feature 1..20: note = Target: FXN; (-) strand; PAM type: NRG; PAM sequence: AGG
  source 1..20: mol_type = other DNA
tgtgcccttgcaccctacag

SEQ ID NO: 14064 - DNA, 20 bp, synthetic construct
  misc_feature 1..20: note = Description of Artificial Sequence: Synthetic oligonucleotide
  misc_feature 1..20: note = Target: FXN; (-) strand; PAM type: NRG; PAM sequence: GAG
  source 1..20: mol_type = other DNA
ctgtgcccttgcaccctaca

SEQ ID NO: 14065 - DNA, 20 bp, synthetic construct
  misc_feature 1..20: note = Description of Artificial Sequence: Synthetic oligonucleotide
  misc_feature 1..20: note = Target: FXN; (-) strand; PAM type: NRG; PAM sequence: CAG
  source 1..20: mol_type = other DNA
agctgtgcccttgcacccta

SEQ ID NO: 14066 - DNA, 20 bp, synthetic construct
  misc_feature 1..20: note = Description of Artificial Sequence: Synthetic oligonucleotide
  misc_feature 1..20: note = Target: FXN; (-) strand; PAM type: NRG; PAM sequence: CAG
  source 1..20: mol_type = other DNA
agcctcaggagctccgtctc

SEQ ID NO: 14067 - DNA, 20 bp, synthetic construct
  misc_feature 1..20: note = Description of Artificial Sequence: Synthetic oligonucleotide
  misc_feature 1..20: note = Target: FXN; (-) strand; PAM type: NRG; PAM sequence: GAG
  source 1..20: mol_type = other DNA
agcatcagctgcagcctcag

SEQ ID NO: 14068 - DNA, 20 bp, synthetic construct
  misc_feature 1..20: note = Description of Artificial Sequence: Synthetic oligonucleotide
  misc_feature 1..20: note = Target: FXN; (-) strand; PAM type: NRG; PAM sequence: AGG
  source 1..20: mol_type = other DNA
gcagcatcagctgcagcctc

SEQ ID NO: 14069 - DNA, 20 bp, synthetic construct
  misc_feature 1..20: note = Description of Artificial Sequence: Synthetic oligonucleotide
  misc_feature 1..20: note = Target: FXN; (-) strand; PAM type: NRG; PAM sequence: CAG
  source 1..20: mol_type = other DNA
ggcagcatcagctgcagcct

SEQ ID NO: 14070 - DNA, 20 bp, synthetic construct
  misc_feature 1..20: note = Description of Artificial Sequence: Synthetic oligonucleotide
  misc_feature 1..20: note = Target: FXN; (-) strand; PAM type: NRG; PAM sequence: CAG
  source 1..20: mol_type = other DNA
agagcgggcagcatcagctg

SEQ ID NO: 14071 - DNA, 20 bp, synthetic construct
  misc_feature 1..20: note = Description of Artificial Sequence: Synthetic oligonucleotide
  misc_feature 1..20: note = Target: FXN; (-) strand; PAM type: NRG; PAM sequence: CAG
  source 1..20: mol_type = other DNA
tcaggcagagcgggcagcat

SEQ ID NO: 14072 - DNA, 20 bp, synthetic construct
  misc_feature 1..20: note = Description of Artificial Sequence: Synthetic oligonucleotide
  misc_feature 1..20: note = Target: FXN; (-) strand; PAM type: NRG; PAM sequence: CAG
  source 1..20: mol_type = other DNA
tgcagttcaggcagagcggg

SEQ ID NO: 14073 - DNA, 20 bp, synthetic construct
  misc_feature 1..20: note = Description of Artificial Sequence: Synthetic oligonucleotide
  misc_feature 1..20: note = Target: FXN; (-) strand; PAM type: NRG; PAM sequence: GGG
  source 1..20: mol_type = other DNA
tggtgcagttcaggcagagc

SEQ ID NO: 14074 - DNA, 20 bp, synthetic construct
  misc_feature 1..20: note = Description of Artificial Sequence: Synthetic oligonucleotide
  misc_feature 1..20: note = Target: FXN; (-) strand; PAM type: NRG; PAM sequence: CGG
  source 1..20: mol_type = other DNA
ttggtgcagttcaggcagag

SEQ ID NO: 14075 - DNA, 20 bp, synthetic construct
  misc_feature 1..20: note = Description of Artificial Sequence: Synthetic oligonucleotide
  misc_feature 1..20: note = Target: FXN; (-) strand; PAM type: NRG; PAM sequence: GAG
  source 1..20: mol_type = other DNA
tttttggtgcagttcaggca

SEQ ID NO: 14076 - DNA, 20 bp, synthetic construct
  misc_feature 1..20: note = Description of Artificial Sequence: Synthetic oligonucleotide
  misc_feature 1..20: note = Target: FXN; (-) strand; PAM type: NRG; PAM sequence: CAG
  source 1..20: mol_type = other DNA
cgtttttggtgcagttcagg

SEQ ID NO: 14077 - DNA, 20 bp, synthetic construct
  misc_feature 1..20: note = Description of Artificial Sequence: Synthetic oligonucleotide
  misc_feature 1..20: note = Target: FXN; (-) strand; PAM type: NRG; PAM sequence: AGG
  source 1..20: mol_type = other DNA
tcacgtttttggtgcagttc

SEQ ID NO: 14078 - DNA, 20 bp, synthetic construct
  misc_feature 1..20: note = Description of Artificial Sequence: Synthetic oligonucleotide
  misc_feature 1..20: note = Target: FXN; (-) strand; PAM type: NRG; PAM sequence: CAG
  source 1..20: mol_type = other DNA
atcacgtttttggtgcagtt

SEQ ID NO: 14079 - DNA, 20 bp, synthetic construct
  misc_feature 1..20: note = Description of Artificial Sequence: Synthetic oligonucleotide
  misc_feature 1..20: note = Target: FXN; (-) strand; PAM type: NRG; PAM sequence: CAG
  source 1..20: mol_type = other DNA
gcctcatcacgtttttggtg

SEQ ID NO: 14080 - DNA, 20 bp, synthetic construct
  misc_feature 1..20: note = Description of Artificial Sequence: Synthetic oligonucleotide
  misc_feature 1..20: note = Target: FXN; (-) strand; PAM type: NRG; PAM sequence: TGG
  source 1..20: mol_type = other DNA
ctatggcctcatcacgtttt

SEQ ID NO: 14081 - DNA, 20 bp, synthetic construct
  misc_feature 1..20: note = Description of Artificial Sequence: Synthetic oligonucleotide
  misc_feature 1..20: note = Target: FXN; (-) strand; PAM type: NRG; PAM sequence: TGG
  source 1..20: mol_type = other DNA
tcctccgtggactcccgcta

SEQ ID NO: 14082 - DNA, 20 bp, synthetic construct
  misc_feature 1..20: note = Description of Artificial Sequence: Synthetic oligonucleotide
  misc_feature 1..20: note = Target: FXN; (-) strand; PAM type: NRG; PAM sequence: TGG
  source 1..20: mol_type = other DNA
gcagtaggcatcctcctccg

SEQ ID NO: 14083 - DNA, 20 bp, synthetic construct
  misc_feature 1..20: note = Description of Artificial Sequence: Synthetic oligonucleotide
  misc_feature 1..20: note = Target: FXN; (-) strand; PAM type: NRG; PAM sequence: AGG
  source 1..20: mol_type = other DNA
tctgctagaggtcgggcagt

SEQ ID NO: 14084 - DNA, 20 bp, synthetic construct
  misc_feature 1..20: note = Description of Artificial Sequence: Synthetic oligonucleotide
  misc_feature 1..20: note = Target: FXN; (-) strand; PAM type: NRG; PAM sequence: TAG
  source 1..20: mol_type = other DNA
ctctgctagaggtcgggcag

SEQ ID NO: 14085 - DNA, 20 bp, synthetic construct
  misc_feature 1..20: note = Description of Artificial Sequence: Synthetic oligonucleotide
  misc_feature 1..20: note = Target: FXN; (-) strand; PAM type: NRG; PAM sequence: CAG
  source 1..20: mol_type = other DNA
agtctctgctagaggtcggg

SEQ ID NO: 14086 - DNA, 20 bp, synthetic construct
  misc_feature 1..20: note = Description of Artificial Sequence: Synthetic oligonucleotide
  misc_feature 1..20: note = Target: FXN; (-) strand; PAM type: NRG; PAM sequence: GGG
  source 1..20: mol_type = other DNA
cttagtctctgctagaggtc

SEQ ID NO: 14087 - DNA, 20 bp, synthetic construct
  misc_feature 1..20: note = Description of Artificial Sequence: Synthetic oligonucleotide
  misc_feature 1..20: note = Target: FXN; (-) strand; PAM type: NRG; PAM sequence: CGG
  source 1..20: mol_type = other DNA
gcttagtctctgctagaggt

SEQ ID NO: 14088 - DNA, 20 bp, synthetic construct
  misc_feature 1..20: note = Description of Artificial Sequence: Synthetic oligonucleotide
  misc_feature 1..20: note = Target: FXN; (-) strand; PAM type: NRG; PAM sequence: AGG
  source 1..20: mol_type = other DNA
ccttgcttagtctctgctag

SEQ ID NO: 14089 - DNA, 20 bp, synthetic construct
  misc_feature 1..20: note = Description of Artificial Sequence: Synthetic oligonucleotide
  misc_feature 1..20: note = Target: FXN; (-) strand; PAM type: NRG; PAM sequence: GAG
  source 1..20: mol_type = other DNA
accttgcttagtctctgcta

SEQ ID NO: 14090 - DNA, 20 bp, synthetic construct
  misc_feature 1..20: note = Description of Artificial Sequence: Synthetic oligonucleotide
  misc_feature 1..20: note = Target: FXN; (-) strand; PAM type: NRG; PAM sequence: TAG
  source 1..20: mol_type = other DNA
gcaccttgcttagtctctgc

SEQ ID NO: 14091 - DNA, 20 bp, synthetic construct
  misc_feature 1..20: note = Description of Artificial Sequence: Synthetic oligonucleotide
  misc_feature 1..20: note = Target: FXN; (-) strand; PAM type: NRG; PAM sequence: TAG
  source 1..20: mol_type = other DNA
aagttttcatgcaccttgct

SEQ ID NO: 14092 - DNA, 20 bp, synthetic construct
  misc_feature 1..20: note = Description of Artificial Sequence: Synthetic oligonucleotide
  misc_feature 1..20: note = Target: FXN; (-) strand; PAM type: NRG; PAM sequence: AAG
  source 1..20: mol_type = other DNA
gggtgtgacacatgtggttc

SEQ ID NO: 14093 - DNA, 20 bp, synthetic construct
  misc_feature 1..20: note = Description of Artificial Sequence: Synthetic oligonucleotide
  misc_feature 1..20: note = Target: FXN; (-) strand; PAM type: NRG; PAM sequence: TGG
  source 1..20: mol_type = other DNA
ggtcatgggtgtgacacatg

SEQ ID NO: 14094 - DNA, 20 bp, synthetic construct
  misc_feature 1..20: note = Description of Artificial Sequence: Synthetic oligonucleotide
  misc_feature 1..20: note = Target: FXN; (-) strand; PAM type: NRG; PAM sequence: GGG
  source 1..20: mol_type = other DNA
catcttcatgtagtggtcat

SEQ ID NO: 14095 - DNA, 20 bp, synthetic construct
  misc_feature 1..20: note = Description of Artificial Sequence: Synthetic oligonucleotide
  misc_feature 1..20: note = Target: FXN; (-) strand; PAM type: NRG; PAM sequence: TGG
  source 1..20: mol_type = other DNA
ccatcttcatgtagtggtca

SEQ ID NO: 14096 - DNA, 20 bp, synthetic construct
  misc_feature 1..20: note = Description of Artificial Sequence: Synthetic oligonucleotide
  misc_feature 1..20: note = Target: FXN; (-) strand; PAM type: NRG; PAM sequence: TGG
  source 1..20: mol_type = other DNA
tttgggccatcttcatgtag

SEQ ID NO: 14097 - DNA, 20 bp, synthetic construct
  misc_feature 1..20: note = Description of Artificial Sequence: Synthetic oligonucleotide
  misc_feature 1..20: note = Target: FXN; (-) strand; PAM type: NRG; PAM sequence: TAG
  source 1..20: mol_type = other DNA
ggttttgggccatcttcatg

SEQ ID NO: 14098 - DNA, 20 bp, synthetic construct
  misc_feature 1..20: note = Description of Artificial Sequence: Synthetic oligonucleotide
  misc_feature 1..20: note = Target: FXN; (-) strand; PAM type: NRG; PAM sequence: GGG
  source 1..20: mol_type = other DNA
caattcctgggccaggtttt

SEQ ID NO: 14099 - DNA, 20 bp, synthetic construct
  misc_feature 1..20: note = Description of Artificial Sequence: Synthetic oligonucleotide
  misc_feature 1..20: note = Target: FXN; (-) strand; PAM type: NRG; PAM sequence: TGG
  source 1..20: mol_type = other DNA
tcaattcctgggccaggttt

SEQ ID NO: 14100 - DNA, 20 bp, synthetic construct
  misc_feature 1..20: note = Description of Artificial Sequence: Synthetic oligonucleotide
  misc_feature 1..20: note = Target: FXN; (-) strand; PAM type: NRG; PAM sequence: AGG
  source 1..20: mol_type = other DNA
ctttcttcaattcctgggcc

SEQ ID NO: 14101 - DNA, 20 bp, synthetic construct
  misc_feature 1..20: note = Description of Artificial Sequence: Synthetic oligonucleotide
  misc_feature 1..20: note = Target: FXN; (-) strand; PAM type: NRG; PAM sequence: CAG
  source 1..20: mol_type = other DNA
tctttcttcaattcctgggc

SEQ ID NO: 14102 - DNA, 20 bp, synthetic construct
  misc_feature 1..20: note = Description of Artificial Sequence: Synthetic oligonucleotide
  misc_feature 1..20: note = Target: FXN; (-) strand; PAM type: NRG; PAM sequence: GGG
  source 1..20: mol_type = other DNA
agagtctttcttcaattcct

SEQ ID NO: 14103 - DNA, 20 bp, synthetic construct
  misc_feature 1..20: note = Description of Artificial Sequence: Synthetic oligonucleotide
  misc_feature 1..20: note = Target: FXN; (-) strand; PAM type: NRG; PAM sequence: TGG
  source 1..20: mol_type = other DNA
aagagtctttcttcaattcc

SEQ ID NO: 14104 - DNA, 20 bp, synthetic construct
  misc_feature 1..20: note = Description of Artificial Sequence: Synthetic oligonucleotide
  misc_feature 1..20: note = Target: FXN; (-) strand; PAM type: NRG; PAM sequence: GAG
  source 1..20: mol_type = other DNA
tttcttacagcaaattggaa

SEQ ID NO: 14105 - DNA, 20 bp, synthetic construct
  misc_feature 1..20: note = Description of Artificial Sequence: Synthetic oligonucleotide
  misc_feature 1..20: note = Target: FXN; (-) strand; PAM type: NRG; PAM sequence: AAG
  source 1..20: mol_type = other DNA
attttcttacagcaaattgg

SEQ ID NO: 14106 - DNA, 20 bp, synthetic construct
  misc_feature 1..20: note = Description of Artificial Sequence: Synthetic oligonucleotide
  misc_feature 1..20: note = Target: FXN; (-) strand; PAM type: NRG; PAM sequence: TGG
  source 1..20: mol_type = other DNA
gccattttcttacagcaaat

SEQ ID NO: 14107 - DNA, 20 bp, synthetic construct
  misc_feature 1..20: note = Description of Artificial Sequence: Synthetic oligonucleotide
  misc_feature 1..20: note = Target: FXN; (-) strand; PAM type: NRG; PAM sequence: CAG
  source 1..20: mol_type = other DNA
ccccctgggccattttctta

SEQ ID NO: 14108 - DNA, 20 bp, synthetic construct
  misc_feature 1..20: note = Description of Artificial Sequence: Synthetic oligonucleotide
  misc_feature 1..20: note = Target: FXN; (-) strand; PAM type: NRG; PAM sequence: GGG
  source 1..20: mol_type = other DNA
agctaccgtgcttgccccct

SEQ ID NO: 14109 - DNA, 20 bp, synthetic construct
  misc_feature 1..20: note = Description of Artificial Sequence: Synthetic oligonucleotide
  misc_feature 1..20: note = Target: FXN; (-) strand; PAM type: NRG; PAM sequence: TGG
  source 1..20: mol_type = other DNA
gagctaccgtgcttgccccc

SEQ ID NO: 14110 - DNA, 20 bp, synthetic construct
  misc_feature 1..20: note = Description of Artificial Sequence: Synthetic oligonucleotide
  misc_feature 1..20: note = Target: FXN; (-) strand; PAM type: NRG; PAM sequence: GAG
  source 1..20: mol_type = other DNA
agtgctaggattacaggtgt

SEQ ID NO: 14111 - DNA, 20 bp, synthetic construct
  misc_feature 1..20: note = Description of Artificial Sequence: Synthetic oligonucleotide
  misc_feature 1..20: note = Target: FXN; (-) strand; PAM type: NRG; PAM sequence: AGG
  source 1..20: mol_type = other DNA
tcccaaagtgctaggattac

SEQ ID NO: 14112 - DNA, 20 bp, synthetic construct
  misc_feature 1..20: note = Description of Artificial Sequence: Synthetic oligonucleotide
  misc_feature 1..20: note = Target: FXN; (-) strand; PAM type: NRG; PAM sequence: CAG
  source 1..20: mol_type = other DNA
ttcccaaagtgctaggatta

SEQ ID NO: 14113 - DNA, 20 bp, synthetic construct
  misc_feature 1..20: note = Description of Artificial Sequence: Synthetic oligonucleotide
  misc_feature 1..20: note = Target: FXN; (-) strand; PAM type: NRG; PAM sequence: AGG
  source 1..20: mol_type = other DNA
cgtcagcttcccaaagtgct

SEQ ID NO: 14114 - DNA, 20 bp, synthetic construct
  misc_feature 1..20: note = Description of Artificial Sequence: Synthetic oligonucleotide
  misc_feature 1..20: note = Target: FXN; (-) strand; PAM type: NRG; PAM sequence: TAG
  source 1..20: mol_type = other DNA
gcgtcagcttcccaaagtgc

SEQ ID NO: 14115 - DNA, 20 bp, synthetic construct
  misc_feature 1..20: note = Description of Artificial Sequence: Synthetic oligonucleotide
  misc_feature 1..20: note = Target: FXN; (-) strand; PAM type: NRG; PAM sequence: AAG
  source 1..20: mol_type = other DNA
ctgcctgcgtcagcttccca

SEQ ID NO: 14116 - DNA, 20 bp, synthetic construct
  misc_feature 1..20: note = Description of Artificial Sequence: Synthetic oligonucleotide
  misc_feature 1..20: note = Target: FXN; (-) strand; PAM type: NRG; PAM sequence: CAG
  source 1..20: mol_type = other DNA
ctcaagccatctgcctgcgt

SEQ ID NO: 14117 - DNA, 20 bp, synthetic construct
  misc_feature 1..20: note = Description of Artificial Sequence: Synthetic oligonucleotide
  misc_feature 1..20: note = Target: FXN; (-) strand; PAM type: NRG; PAM sequence: AAG
  source 1..20: mol_type = other DNA
ggtctggaactcctgagctc

SEQ ID NO: 14118 - DNA, 20 bp, synthetic construct
  misc_feature 1..20: note = Description of Artificial Sequence: Synthetic oligonucleotide
  misc_feature 1..20: note = Target: FXN; (-) strand; PAM type: NRG; PAM sequence: GAG
  source 1..20: mol_type = other DNA
caggctggtctggaactcct

SEQ ID NO: 14119 - DNA, 20 bp, synthetic construct
  misc_feature 1..20: note = Description of Artificial Sequence: Synthetic oligonucleotide
  misc_feature 1..20: note = Target: FXN; (-) strand; PAM type: NRG; PAM sequence: TGG
  source 1..20: mol_type = other DNA
ccatgttgcccaggctggtc

SEQ ID NO: 14120 - DNA, 20 bp, synthetic construct
  misc_feature 1..20: note = Description of Artificial Sequence: Synthetic oligonucleotide
  misc_feature 1..20: note = Target: FXN; (-) strand; PAM type: NRG; PAM sequence: TGG
  source 1..20: mol_type = other DNA
tttcaccatgttgcccaggc

SEQ ID NO: 14121 - DNA, 20 bp, synthetic construct
  misc_feature 1..20: note = Description of Artificial Sequence: Synthetic oligonucleotide
  misc_feature 1..20: note = Target: FXN; (-) strand; PAM type: NRG; PAM sequence: AGG
  source 1..20: mol_type = other DNA
ggggtttcaccatgttgccc

SEQ ID NO: 14122 - DNA, 20 bp, synthetic construct
  misc_feature 1..20: note = Description of Artificial Sequence: Synthetic oligonucleotide
  misc_feature 1..20: note = Target: FXN; (-) strand; PAM type: NRG; PAM sequence: CAG
  source 1..20: mol_type = other DNA
cggggtttcaccatgttgcc

SEQ ID NO: 14123 - DNA, 20 bp, synthetic construct
  misc_feature 1..20: note = Description of Artificial Sequence: Synthetic oligonucleotide
  misc_feature 1..20: note = Target: FXN; (-) strand; PAM type: NRG; PAM sequence: GGG
  source 1..20: mol_type = other DNA
ttgtatttttggtagagacg

SEQ ID NO: 14124 - DNA, 20 bp, synthetic construct
  misc_feature 1..20: note = Description of Artificial Sequence: Synthetic oligonucleotide
  misc_feature 1..20: note = Target: FXN; (-) strand; PAM type: NRG; PAM sequence: GGG
  source 1..20: mol_type = other DNA
tttgtatttttggtagagac

SEQ ID NO: 14125 - DNA, 20 bp, synthetic construct
  misc_feature 1..20: note = Description of Artificial Sequence: Synthetic oligonucleotide
  misc_feature 1..20: note = Target: FXN; (-) strand; PAM type: NRG; PAM sequence: CGG
  source 1..20: mol_type = other DNA
ttttgtatttttggtagaga

SEQ ID NO: 14126 - DNA, 20 bp, synthetic construct
  misc_feature 1..20: note = Description of Artificial Sequence: Synthetic oligonucleotide
  misc_feature 1..20: note = Target: FXN; (-) strand; PAM type: NRG; PAM sequence: GAG
  source 1..20: mol_type = other DNA
taatttttgtatttttggta

SEQ ID NO: 14127 - DNA, 20 bp, synthetic construct
  misc_feature 1..20: note = Description of Artificial Sequence: Synthetic oligonucleotide
  misc_feature 1..20: note = Target: FXN; (-) strand; PAM type: NRG; PAM sequence: TAG
  source 1..20: mol_type = other DNA
gctaatttttgtatttttgg

SEQ ID NO: 14128 - DNA, 20 bp, synthetic construct
  misc_feature 1..20: note = Description of Artificial Sequence: Synthetic oligonucleotide
  misc_feature 1..20: note = Target: FXN; (-) strand; PAM type: NRG; PAM sequence: TGG
  source 1..20: mol_type = other DNA
ccggctaatttttgtatttt

SEQ ID NO: 14129 - DNA, 20 bp, synthetic construct
  misc_feature 1..20: note = Description of Artificial Sequence: Synthetic oligonucleotide
  misc_feature 1..20: note = Target: FXN; (-) strand; PAM type: NRG; PAM sequence: CGG
  source 1..20: mol_type = other DNA
caggcatgcatcaccacacc

SEQ ID NO: 14130 - DNA, 20 bp, synthetic construct
  misc_feature 1..20: note = Description of Artificial Sequence: Synthetic oligonucleotide
  misc_feature 1..20: note = Target: FXN; (-) strand; PAM type: NRG; PAM sequence: AGG
  source 1..20: mol_type = other DNA
tcctgagtagctgggaccac

SEQ ID NO: 14131 - DNA, 20 bp, synthetic construct
  misc_feature 1..20: note = Description of Artificial Sequence: Synthetic oligonucleotide
  misc_feature 1..20: note = Target: FXN; (-) strand; PAM type: NRG; PAM sequence: CAG
  source 1..20: mol_type = other DNA
ctcctgagtagctgggacca

SEQ ID NO: 14132 - DNA, 20 bp, synthetic construct
  misc_feature 1..20: note = Description of Artificial Sequence: Synthetic oligonucleotide
  misc_feature 1..20: note = Target: FXN; (-) strand; PAM type: NRG; PAM sequence: GGG
  source 1..20: mol_type = other DNA
cctcagcctcctgagtagct

SEQ ID NO: 14133 - DNA, 20 bp, synthetic construct
  misc_feature 1..20: note = Description of Artificial Sequence: Synthetic oligonucleotide
  misc_feature 1..20: note = Target: FXN; (-) strand; PAM type: NRG; PAM sequence: TGG
  source 1..20: mol_type = other DNA
acctcagcctcctgagtagc

SEQ ID NO: 14134 - DNA, 20 bp, synthetic construct
  misc_feature 1..20: note = Description of Artificial Sequence: Synthetic oligonucleotide
  misc_feature 1..20: note = Target: FXN; (-) strand; PAM type: NRG; PAM sequence: TAG
  source 1..20: mol_type = other DNA
ttccacctcagcctcctgag

SEQ ID NO: 14135 - DNA, 20 bp, synthetic construct
  misc_feature 1..20: note = Description of Artificial Sequence: Synthetic oligonucleotide
  misc_feature 1..20: note = Target: FXN; (-) strand; PAM type: NRG; PAM sequence: GAG
  source 1..20: mol_type = other DNA
tccttccacctcagcctcct

SEQ ID NO: 14136 - DNA, 20 bp, synthetic construct
  misc_feature 1..20: note = Description of Artificial Sequence: Synthetic oligonucleotide
  misc_feature 1..20: note = Target: FXN; (-) strand; PAM type: NRG; PAM sequence: CAG
  source 1..20: mol_type = other DNA
ctcaggcaatccttccacct

SEQ ID NO: 14137 - DNA, 20 bp, synthetic construct
  misc_feature 1..20: note = Description of Artificial Sequence: Synthetic oligonucleotide
  misc_feature 1..20: note = Target: FXN; (-) strand; PAM type: NRG; PAM sequence: AGG
  source 1..20: mol_type = other DNA
aacctctgccccacagactc

SEQ ID NO: 14138 - DNA, 20 bp, synthetic construct
  misc_feature 1..20: note = Description of Artificial Sequence: Synthetic oligonucleotide
  misc_feature 1..20: note = Target: FXN; (-) strand; PAM type: NRG; PAM sequence: CAG
  source 1..20: mol_type = other DNA
caacctctgccccacagact

SEQ ID NO: 14139 - DNA, 20 bp, synthetic construct
  misc_feature 1..20: note = Description of Artificial Sequence: Synthetic oligonucleotide
  misc_feature 1..20: note = Target: FXN; (-) strand; PAM type: NRG; PAM sequence: CAG
  source 1..20: mol_type = other DNA
tcactgcaacctctgcccca

SEQ ID NO: 14140 - DNA, 20 bp, synthetic construct
  misc_feature 1..20: note = Description of Artificial Sequence: Synthetic oligonucleotide
  misc_feature 1..20: note = Target: FXN; (-) strand; PAM type: NRG; PAM sequence: CAG
  source 1..20: mol_type = other DNA
ggagtgcagtggtgtgatct

SEQ ID NO: 14141 - DNA, 20 bp, synthetic construct
  misc_feature 1..20: note = Description of Artificial Sequence: Synthetic oligonucleotide
  misc_feature 1..20: note = Target: FXN; (-) strand; PAM type: NRG; PAM sequence: TGG
  source 1..20: mol_type = other DNA
tcacccaggctggagtgcag

SEQ ID NO: 14142 - DNA, 20 bp, synthetic construct
  misc_feature 1..20: note = Description of Artificial Sequence: Synthetic oligonucleotide
  misc_feature 1..20: note = Target: FXN; (-) strand; PAM type: NRG; PAM sequence: CAG
  source 1..20: mol_type = other DNA
gtgtcacccaggctggagtg

SEQ ID NO: 14143 - DNA, 20 bp, synthetic construct
  misc_feature 1..20: note = Description of Artificial Sequence: Synthetic oligonucleotide
  misc_feature 1..20: note = Target: FXN; (-) strand; PAM type: NRG; PAM sequence: GAG
  source 1..20: mol_type = other DNA
tcactgtgtcacccaggctg

SEQ ID NO: 14144 - DNA, 20 bp, synthetic construct
  misc_feature 1..20: note = Description of Artificial Sequence: Synthetic oligonucleotide
  misc_feature 1..20: note = Target: FXN; (-) strand; PAM type: NRG; PAM sequence: TGG
  source 1..20: mol_type = other DNA
tctcactgtgtcacccaggc

SEQ ID NO: 14145 - DNA, 20 bp, synthetic construct
  misc_feature 1..20: note = Description of Artificial Sequence: Synthetic oligonucleotide
  misc_feature 1..20: note = Target: FXN; (-) strand; PAM type: NRG; PAM sequence: AGG
  source 1..20: mol_type = other DNA
ggggtctcactgtgtcaccc

SEQ ID NO: 14146 - DNA, 20 bp, synthetic construct
  misc_feature 1..20: note = Description of Artificial Sequence: Synthetic oligonucleotide
  misc_feature 1..20: note = Target: FXN; (-) strand; PAM type: NRG; PAM sequence: CAG
  source 1..20: mol_type = other DNA
tggggtctcactgtgtcacc

SEQ ID NO: 14147 - DNA, 20 bp, synthetic construct
  misc_feature 1..20: note = Description of Artificial Sequence: Synthetic oligonucleotide
  misc_feature 1..20: note = Target: FXN; (-) strand; PAM type: NRG; PAM sequence: GGG
  source 1..20: mol_type = other DNA
ttttttttttttttgagatg

SEQ ID NO: 14148 - DNA, 20 bp, synthetic construct
  misc_feature 1..20: note = Description of Artificial Sequence: Synthetic oligonucleotide
  misc_feature 1..20: note = Target: FXN; (-) strand; PAM type: NRG; PAM sequence: GGG
  source 1..20: mol_type = other DNA
cttttttttttttttgagat

SEQ ID NO: 14149 - DNA, 20 bp, synthetic construct
  misc_feature 1..20: note = Description of Artificial Sequence: Synthetic oligonucleotide
  misc_feature 1..20: note = Target: FXN; (-) strand; PAM type: NRG; PAM sequence: TGG
  source 1..20: mol_type = other DNA
tcttttttttttttttgaga

SEQ ID NO: 14150 - DNA, 20 bp, synthetic construct
  misc_feature 1..20: note = Description of Artificial Sequence: Synthetic oligonucleotide
  misc_feature 1..20: note = Target: FXN; (-) strand; PAM type: NRG; PAM sequence: GAG
  source 1..20: mol_type = other DNA
tctttctttttttttttttt

SEQ ID NO: 14151 - DNA, 20 bp, synthetic construct
  misc_feature 1..20: note = Description of Artificial Sequence: Synthetic oligonucleotide
  misc_feature 1..20: note = Target: FXN; (-) strand; PAM type: NRG; PAM sequence: GGG
  source 1..20: mol_type = other DNA
ggcggccctccagccttcct

SEQ ID NO: 14152 - DNA, 20 bp, synthetic construct
  misc_feature 1..20: note = Description of Artificial Sequence: Synthetic oligonucleotide
  misc_feature 1..20: note = Target: FXN; (-) strand; PAM type: NRG; PAM sequence: TGG
  source 1..20: mol_type = other DNA
cggcggccctccagccttcc

SEQ ID NO: 14153 - DNA, 20 bp, synthetic construct
  misc_feature 1..20: note = Description of Artificial Sequence: Synthetic oligonucleotide
  misc_feature 1..20: note = Target: FXN; (-) strand; PAM type: NRG; PAM sequence: CAG
  source 1..20: mol_type = other DNA
caatggacacggcggccctc

SEQ ID NO: 14154 - DNA, 20 bp, synthetic construct
  misc_feature 1..20: note = Description of Artificial Sequence: Synthetic oligonucleotide
  misc_feature 1..20: note = Target: FXN; (-) strand; PAM type: NRG; PAM sequence: CGG
  source 1..20: mol_type = other DNA
cactctctcaatggacacgg

SEQ ID NO: 14155 - DNA, 20 bp, synthetic construct
  misc_feature 1..20: note = Description of Artificial Sequence: Synthetic oligonucleotide
  misc_feature 1..20: note = Target: FXN; (-) strand; PAM type: NRG; PAM sequence: CGG
  source 1..20: mol_type = other DNA
gagcactctctcaatggaca

SEQ ID NO: 14156 - DNA, 20 bp, synthetic construct
  misc_feature 1..20: note = Description of Artificial Sequence: Synthetic oligonucleotide
  misc_feature 1..20: note = Target: FXN; (-) strand; PAM type: NRG; PAM sequence: TGG
  source 1..20: mol_type = other DNA
tgcctggagcactctctcaa

SEQ ID NO: 14157 - DNA, 20 bp, synthetic construct
  misc_feature 1..20: note = Description of Artificial Sequence: Synthetic oligonucleotide
  misc_feature 1..20: note = Target: FXN; (-) strand; PAM type: NRG; PAM sequence: GAG
  source 1..20: mol_type = other DNA
ttttctttttggagtgcctg

SEQ ID NO: 14158 - DNA, 20 bp, synthetic construct
  misc_feature 1..20: note = Description of Artificial Sequence: Synthetic oligonucleotide
  misc_feature 1..20: note = Target: FXN; (-) strand; PAM type: NRG; PAM sequence: TGG
  source 1..20: mol_type = other DNA
cattttctttttggagtgcc

SEQ ID NO: 14159 - DNA, 20 bp, synthetic construct
  misc_feature 1..20: note = Description of Artificial Sequence: Synthetic oligonucleotide
  misc_feature 1..20: note = Target: FXN; (-) strand; PAM type: NRG; PAM sequence: GAG
  source 1..20: mol_type = other DNA
ttgtggtcattttctttttg

SEQ ID NO: 14160 - DNA, 20 bp, synthetic construct
  misc_feature 1..20: note = Description of Artificial Sequence: Synthetic oligonucleotide
  misc_feature 1..20: note = Target: FXN; (-) strand; PAM type: NRG; PAM sequence: TGG
  source 1..20: mol_type = other DNA
cattgtggtcattttctttt

SEQ ID NO: 14161 - DNA, 20 bp, synthetic construct
  misc_feature 1..20: note = Description of Artificial Sequence: Synthetic oligonucleotide
  misc_feature 1..20: note = Target: FXN; (-) strand; PAM type: NRG; PAM sequence: TGG
  source 1..20: mol_type = other DNA
cagctggtttcttcccattg

SEQ ID NO: 14162 - DNA, 20 bp, synthetic construct
  misc_feature 1..20: note = Description of Artificial Sequence: Synthetic oligonucleotide
  misc_feature 1..20: note = Target: FXN; (-) strand; PAM type: NRG; PAM sequence: TGG
  source 1..20: mol_type = other DNA
aacttggtctcatggtcagc

SEQ ID NO: 14163 - DNA, 20 bp, synthetic construct
  misc_feature 1..20: note = Description of Artificial Sequence: Synthetic oligonucleotide
  misc_feature 1..20: note = Target: FXN; (-) strand; PAM type: NRG; PAM sequence: CAG
  source 1..20: mol_type = other DNA
ttggaacttggtctcatggt

SEQ ID NO: 14164 - DNA, 20 bp, synthetic construct
  misc_feature 1..20: note = Description of Artificial Sequence: Synthetic oligonucleotide
  misc_feature 1..20: note = Target: FXN; (-) strand; PAM type: NRG; PAM sequence: TGG
  source 1..20: mol_type = other DNA
aaggttggaacttggtctca

SEQ ID NO: 14165 - DNA, 20 bp, synthetic construct
  misc_feature 1..20: note = Description of Artificial Sequence: Synthetic oligonucleotide
  misc_feature 1..20: note = Target: FXN; (-) strand; PAM type: NRG; PAM sequence: TGG
  source 1..20: mol_type = other DNA
acttgtaaaaggttggaact

SEQ ID NO: 14166 - DNA, 20 bp, synthetic construct
  misc_feature 1..20: note = Description of Artificial Sequence: Synthetic oligonucleotide
  misc_feature 1..20: note = Target: FXN; (-) strand; PAM type: NRG; PAM sequence: TGG
  source 1..20: mol_type = other DNA
acaggccacttgtaaaaggt

SEQ ID NO: 14167 - DNA, 20 bp, synthetic construct
  misc_feature 1..20: note = Description of Artificial Sequence: Synthetic oligonucleotide
  misc_feature 1..20: note = Target: FXN; (-) strand; PAM type: NRG; PAM sequence: AGG
  source 1..20: mol_type = other DNA
agccacaggccacttgtaaa

SEQ ID NO: 14168 - DNA, 20 bp, synthetic construct
  misc_feature 1..20: note = Description of Artificial Sequence: Synthetic oligonucleotide
  misc_feature 1..20: note = Target: FXN; (-) strand; PAM type: NRG; PAM sequence: AAG
  source 1..20: mol_type = other DNA
gagccacaggccacttgtaa

SEQ ID NO: 14169 - DNA, 20 bp, synthetic construct
  misc_feature 1..20: note = Description of Artificial Sequence: Synthetic oligonucleotide
  misc_feature 1..20: note = Target: FXN; (-) strand; PAM type: NRG; PAM sequence: AGG
  source 1..20: mol_type = other DNA
ggcggggcgccaggagccac

SEQ ID NO: 14170 - DNA, 20 bp, synthetic construct
  misc_feature 1..20: note = Description of Artificial Sequence: Synthetic oligonucleotide
  misc_feature 1..20: note = Target: FXN; (-) strand; PAM type: NRG; PAM sequence: CAG
  source 1..20: mol_type = other DNA
gggcggggcgccaggagcca

SEQ ID NO: 14171 - DNA, 20 bp, synthetic construct
  misc_feature 1..20: note = Description of Artificial Sequence: Synthetic oligonucleotide
  misc_feature 1..20: note = Target: FXN; (-) strand; PAM type: NRG; PAM sequence: GAG
  source 1..20: mol_type = other DNA
agctgtgggcggggcgccag

SEQ ID NO: 14172 - DNA, 20 bp, synthetic construct
  misc_feature 1..20: note = Description of Artificial Sequence: Synthetic oligonucleotide
  misc_feature 1..20: note = Target: FXN; (-) strand; PAM type: NRG; PAM sequence: AGG
  source 1..20: mol_type = other DNA
tcagctgtgggcggggcgcc

SEQ ID NO: 14173 - DNA, 20 bp, synthetic construct
  misc_feature 1..20: note = Description of Artificial Sequence: Synthetic oligonucleotide
  misc_feature 1..20: note = Target: FXN; (-) strand; PAM type: NRG; PAM sequence: CAG
  source 1..20: mol_type = other DNA
gtcagctgtgggcggggcgc

SEQ ID NO: 14174 - DNA, 20 bp, synthetic construct
  misc_feature 1..20: note = Description of Artificial Sequence: Synthetic oligonucleotide
  misc_feature 1..20: note = Target: FXN; (-) strand; PAM type: NRG; PAM sequence: GGG
  source 1..20: mol_type = other DNA
gcccctgtcagctgtgggcg

SEQ ID NO: 14175 - DNA, 20 bp, synthetic construct
  misc_feature 1..20: note = Description of Artificial Sequence: Synthetic oligonucleotide
  misc_feature 1..20: note = Target: FXN; (-) strand; PAM type: NRG; PAM sequence: GGG
  source 1..20: mol_type = other DNA
agcccctgtcagctgtgggc

SEQ ID NO: 14176 - DNA, 20 bp, synthetic construct
  misc_feature 1..20: note = Description of Artificial Sequence: Synthetic oligonucleotide
  misc_feature 1..20: note = Target: FXN; (-) strand; PAM type: NRG; PAM sequence: CGG
  source 1..20: mol_type = other DNA
gagcccctgtcagctgtggg

SEQ ID NO: 14177 - DNA, 20 bp, synthetic construct
  misc_feature 1..20: note = Description of Artificial Sequence: Synthetic oligonucleotide
  misc_feature 1..20: note = Target: FXN; (-) strand; PAM type: NRG; PAM sequence: GGG
  source 1..20: mol_type = other DNA
tctgagcccctgtcagctgt

SEQ ID NO: 14178 - DNA, 20 bp, synthetic construct
  misc_feature 1..20: note = Description of Artificial Sequence: Synthetic oligonucleotide
  misc_feature 1..20: note = Target: FXN; (-) strand; PAM type: NRG; PAM sequence: TGG
  source 1..20: mol_type = other DNA
ttctgagcccctgtcagctg

SEQ ID NO: 14179 - DNA, 20 bp, synthetic construct
  misc_feature 1..20: note = Description of Artificial Sequence: Synthetic oligonucleotide
  misc_feature 1..20: note = Target: FXN; (-) strand; PAM type: NRG; PAM sequence: CAG
  source 1..20: mol_type = other DNA
tagcacttctgagcccctgt

SEQ ID NO: 14180 - DNA, 20 bp, synthetic construct
  misc_feature 1..20: note = Description of Artificial Sequence: Synthetic oligonucleotide
  misc_feature 1..20: note = Target: FXN; (-) strand; PAM type: NRG; PAM sequence: GAG
  source 1..20: mol_type = other DNA
atggtccccctagcacttct

SEQ ID NO: 14181 - DNA, 20 bp, synthetic construct
  misc_feature 1..20: note = Description of Artificial Sequence: Synthetic oligonucleotide
  misc_feature 1..20: note = Target: FXN; (-) strand; PAM type: NRG; PAM sequence: TAG
  source 1..20: mol_type = other DNA
ctggtggcccatggtccccc

SEQ ID NO: 14182 - DNA, 20 bp, synthetic construct
  misc_feature 1..20: note = Description of Artificial Sequence: Synthetic oligonucleotide
  misc_feature 1..20: note = Target: FXN; (-) strand; PAM type: NRG; PAM sequence: TGG
  source 1..20: mol_type = other DNA
ctggtggccctggtggccca

SEQ ID NO: 14183 - DNA, 20 bp, synthetic construct
  misc_feature 1..20: note = Description of Artificial Sequence: Synthetic oligonucleotide
  misc_feature 1..20: note = Target: FXN; (-) strand; PAM type: NRG; PAM sequence: TGG
  source 1..20: mol_type = other DNA
ctccctcctggtggccctgg

SEQ ID NO: 14184 - DNA, 20 bp, synthetic construct
  misc_feature 1..20: note = Description of Artificial Sequence: Synthetic oligonucleotide
  misc_feature 1..20: note = Target: FXN; (-) strand; PAM type: NRG; PAM sequence: TGG
  source 1..20: mol_type = other DNA
tgcctccctcctggtggccc

SEQ ID NO: 14185 - DNA, 20 bp, synthetic construct
  misc_feature 1..20: note = Description of Artificial Sequence: Synthetic oligonucleotide
  misc_feature 1..20: note = Target: FXN; (-) strand; PAM type: NRG; PAM sequence: TGG
  source 1..20: mol_type = other DNA
gttacctgcctccctcctgg

SEQ ID NO: 14186 - DNA, 20 bp, synthetic construct
  misc_feature 1..20: note = Description of Artificial Sequence: Synthetic oligonucleotide
  misc_feature 1..20: note = Target: FXN; (-) strand; PAM type: NRG; PAM sequence: TGG
  source 1..20: mol_type = other DNA
atcgttacctgcctccctcc

SEQ ID NO: 14187 - DNA, 20 bp, synthetic construct
  misc_feature 1..20: note = Description of Artificial Sequence: Synthetic oligonucleotide
  misc_feature 1..20: note = Target: FXN; (-) strand; PAM type: NRG; PAM sequence: AAG
  source 1..20: mol_type = other DNA
ccagctggtgttctgcatcc

SEQ ID NO: 14188 - DNA, 20 bp, synthetic construct
  misc_feature 1..20: note = Description of Artificial Sequence: Synthetic oligonucleotide
  misc_feature 1..20: note = Target: FXN; (-) strand; PAM type: NRG; PAM sequence: TGG
  source 1..20: mol_type = other DNA
gaaaacagaatcaaaccagc

SEQ ID NO: 14189 - DNA, 20 bp, synthetic construct
  misc_feature 1..20: note = Description of Artificial Sequence: Synthetic oligonucleotide
  misc_feature 1..20: note = Target: FXN; (-) strand; PAM type: NRG; PAM sequence: CAG
  source 1..20: mol_type = other DNA
cagggaaaacagaatcaaac

SEQ ID NO: 14190 - DNA, 20 bp, synthetic construct
  misc_feature 1..20: note = Description of Artificial Sequence: Synthetic oligonucleotide
  misc_feature 1..20: note = Target: FXN; (-) strand; PAM type: NRG; PAM sequence: CAG
  source 1..20: mol_type = other DNA
ggacccaggtacagggaaaa

SEQ ID NO: 14191 - DNA, 20 bp, synthetic construct
  misc_feature 1..20: note = Description of Artificial Sequence: Synthetic oligonucleotide
  misc_feature 1..20: note = Target: FXN; (-) strand; PAM type: NRG; PAM sequence: GGG
  source 1..20: mol_type = other DNA
gcattcaggacccaggtaca

SEQ ID NO: 14192 - DNA, 20 bp, synthetic construct
  misc_feature 1..20: note = Description of Artificial Sequence: Synthetic oligonucleotide
  misc_feature 1..20: note = Target: FXN; (-) strand; PAM type: NRG; PAM sequence: AGG
  source 1..20: mol_type = other DNA
ggcattcaggacccaggtac

SEQ ID NO: 14193 - DNA, 20 bp, synthetic construct
  misc_feature 1..20: note = Description of Artificial Sequence: Synthetic oligonucleotide
  misc_feature 1..20: note = Target: FXN; (-) strand; PAM type: NRG; PAM sequence: CAG
  source 1..20: mol_type = other DNA
gggcattcaggacccaggta

SEQ ID NO: 14194 - DNA, 20 bp, synthetic construct
  misc_feature 1..20: note = Description of Artificial Sequence: Synthetic oligonucleotide
  misc_feature 1..20: note = Target: FXN; (-) strand; PAM type: NRG; PAM sequence: AGG
  source 1..20: mol_type = other DNA
cctctgggcattcaggaccc

SEQ ID NO: 14195 - DNA, 20 bp, synthetic construct
  misc_feature 1..20: note = Description of Artificial Sequence: Synthetic oligonucleotide
  misc_feature 1..20: note = Target: FXN; (-) strand; PAM type: NRG; PAM sequence: CAG
  source 1..20: mol_type = other DNA
gcctctgggcattcaggacc

SEQ ID NO: 14196 - DNA, 20 bp, synthetic construct
  misc_feature 1..20: note = Description of Artificial Sequence: Synthetic oligonucleotide
  misc_feature 1..20: note = Target: FXN; (-) strand; PAM type: NRG; PAM sequence: AGG
  source 1..20: mol_type = other DNA
ccctgagcctctgggcattc

SEQ ID NO: 14197 - DNA, 20 bp, synthetic construct
  misc_feature 1..20: note = Description of Artificial Sequence: Synthetic oligonucleotide
  misc_feature 1..20: note = Target: FXN; (-) strand; PAM type: NRG; PAM sequence: CAG
  source 1..20: mol_type = other DNA
tccctgagcctctgggcatt

SEQ ID NO: 14198 - DNA, 20 bp, synthetic construct
  misc_feature 1..20: note = Description of Artificial Sequence: Synthetic oligonucleotide
  misc_feature 1..20: note = Target: FXN; (-) strand; PAM type: NRG; PAM sequence: GGG
  source 1..20: mol_type = other DNA
tggtgtttccctgagcctct

SEQ ID NO: 14199 - DNA, 20 bp, synthetic construct
  misc_feature 1..20: note = Description of Artificial Sequence: Synthetic oligonucleotide
  misc_feature 1..20: note = Target: FXN; (-) strand; PAM type: NRG; PAM sequence: TGG
  source 1..20: mol_type = other DNA
ctggtgtttccctgagcctc

SEQ ID NO: 14200 - DNA, 20 bp, synthetic construct
  misc_feature 1..20: note = Description of Artificial Sequence: Synthetic oligonucleotide
  misc_feature 1..20: note = Target: FXN; (-) strand; PAM type: NRG; PAM sequence: GAG
  source 1..20: mol_type = other DNA
gcactggctggtgtttccct

SEQ ID NO: 14201 - DNA, 20 bp, synthetic construct
  misc_feature 1..20: note = Description of Artificial Sequence: Synthetic oligonucleotide
  misc_feature 1..20: note = Target: FXN; (-) strand; PAM type: NRG; PAM sequence: TGG
  source 1..20: mol_type = other DNA
ttaaaggcagcagcactggc

SEQ ID NO: 14202 - DNA, 20 bp, synthetic construct
  misc_feature 1..20: note = Description of Artificial Sequence: Synthetic oligonucleotide
  misc_feature 1..20: note = Target: FXN; (-) strand; PAM type: NRG; PAM sequence: TGG
  source 1..20: mol_type = other DNA
tgctttaaaggcagcagcac

SEQ ID NO: 14203 - DNA, 20 bp, synthetic construct
  misc_feature 1..20: note = Description of Artificial Sequence: Synthetic oligonucleotide
  misc_feature 1..20: note = Target: FXN; (-) strand; PAM type: NRG; PAM sequence: CAG
  source 1..20: mol_type = other DNA
caaaagtgctttaaaggcag

SEQ ID NO: 14204 - DNA, 20 bp, synthetic construct
  misc_feature 1..20: note = Description of Artificial Sequence: Synthetic oligonucleotide
  misc_feature 1..20: note = Target: FXN; (-) strand; PAM type: NRG; PAM sequence: CAG
  source 1..20: mol_type = other DNA
agtcaaaagtgctttaaagg

SEQ ID NO: 14205 - DNA, 20 bp, synthetic construct
  misc_feature 1..20: note = Description of Artificial Sequence: Synthetic oligonucleotide
  misc_feature 1..20: note = Target: FXN; (-) strand; PAM type: NRG; PAM sequence: AGG
  source 1..20: mol_type = other DNA
atcagtcaaaagtgctttaa

SEQ ID NO: 14206 - DNA, 20 bp, synthetic construct
  misc_feature 1..20: note = Description of Artificial Sequence: Synthetic oligonucleotide
  misc_feature 1..20: note = Target: FXN; (-) strand; PAM type: NRG; PAM sequence: AAG
  source 1..20: mol_type = other DNA
gatcagtcaaaagtgcttta

SEQ ID NO: 14207 - DNA, 20 bp, synthetic construct
  misc_feature 1..20: note = Description of Artificial Sequence: Synthetic oligonucleotide
  misc_feature 1..20: note = Target: FXN; (-) strand; PAM type: NRG; PAM sequence: AAG
  source 1..20: mol_type = other DNA
attaacaagagatcagtcaa

SEQ ID NO: 14208 - DNA, 20 bp, synthetic construct
  misc_feature 1..20: note = Description of Artificial Sequence: Synthetic oligonucleotide
  misc_feature 1..20: note = Target: FXN; (-) strand; PAM type: NRG; PAM sequence: CAG
  source 1..20: mol_type = other DNA
ttgctaaattaacaagagat

SEQ ID NO: 14209 - DNA, 20 bp, synthetic construct
  misc_feature 1..20: note = Description of Artificial Sequence: Synthetic oligonucleotide
  misc_feature 1..20: note = Target: FXN; (-) strand; PAM type: NRG; PAM sequence: GAG
  source 1..20: mol_type = other DNA
aacagttgctaaattaacaa

SEQ ID NO: 14210 - DNA, 20 bp, synthetic construct
  misc_feature 1..20: note = Description of Artificial Sequence: Synthetic oligonucleotide
  misc_feature 1..20: note = Target: FXN; (-) strand; PAM type: NRG; PAM sequence: AAG
  source 1..20: mol_type = other DNA
ataacagttgctaaattaac

SEQ ID NO: 14211 - DNA, 20 bp, synthetic construct
  misc_feature 1..20: note = Description of Artificial Sequence: Synthetic oligonucleotide
  misc_feature 1..20: note = Target: FXN; (-) strand; PAM type: NRG; PAM sequence: CAG
  source 1..20: mol_type = other DNA
actgcagcatcaaccaataa

SEQ ID NO: 14212 - DNA, 20 bp, synthetic construct
  misc_feature 1..20: note = Description of Artificial Sequence: Synthetic oligonucleotide
  misc_feature 1..20: note = Target: FXN; (-) strand; PAM type: NRG; PAM sequence: CAG
  source 1..20: mol_type = other DNA
aacttcaataagagcaactg

SEQ ID NO: 14213 - DNA, 20 bp, synthetic construct
  misc_feature 1..20: note = Description of Artificial Sequence: Synthetic oligonucleotide
  misc_feature 1..20: note = Target: FXN; (-) strand; PAM type: NRG; PAM sequence: GAG
  source 1..20: mol_type = other DNA
tatcaatcaaacttcaataa

SEQ ID NO: 14214 - DNA, 20 bp, synthetic construct
  misc_feature 1..20: note = Description of Artificial Sequence: Synthetic oligonucleotide
  misc_feature 1..20: note = Target: FXN; (-) strand; PAM type: NRG; PAM sequence: AAG
  source 1..20: mol_type = other DNA
gctatcaatcaaacttcaat

SEQ ID NO: 14215 - DNA, 20 bp, synthetic construct
  misc_feature 1..20: note = Description of Artificial Sequence: Synthetic oligonucleotide
  misc_feature 1..20: note = Target: FXN; (-) strand; PAM type: NRG; PAM sequence: TAG
  source 1..20: mol_type = other DNA
aacaacctttatttgaaaaa

SEQ ID NO: 14216 - DNA, 20 bp, synthetic construct
  misc_feature 1..20: note = Description of Artificial Sequence: Synthetic oligonucleotide
  misc_feature 1..20: note = Target: FXN; (-) strand; PAM type: NRG; PAM sequence: GAG
  source 1..20: mol_type = other DNA
gaaccaatgtgaaaggctga

SEQ ID NO: 14217 - DNA, 20 bp, synthetic construct
  misc_feature 1..20: note = Description of Artificial Sequence: Synthetic oligonucleotide
  misc_feature 1..20: note = Target: FXN; (-) strand; PAM type: NRG; PAM sequence: GAG
  source 1..20: mol_type = other DNA
ttgaaccaatgtgaaaggct

SEQ ID NO: 14218 - DNA, 20 bp, synthetic construct
  misc_feature 1..20: note = Description of Artificial Sequence: Synthetic oligonucleotide
  misc_feature 1..20: note = Target: FXN; (-) strand; PAM type: NRG; PAM sequence: AGG
  source 1..20: mol_type = other DNA
atattttgaaccaatgtgaa

SEQ ID NO: 14219 - DNA, 20 bp, synthetic construct
  misc_feature 1..20: note = Description of Artificial Sequence: Synthetic oligonucleotide
  misc_feature 1..20: note = Target: FXN; (-) strand; PAM type: NRG; PAM sequence: AAG
  source 1..20: mol_type = other DNA
gatattttgaaccaatgtga

SEQ ID NO: 14220 - DNA, 20 bp, synthetic construct
  misc_feature 1..20: note = Description of Artificial Sequence: Synthetic oligonucleotide
  misc_feature 1..20: note = Target: FXN; (-) strand; PAM type: NRG; PAM sequence: AAG
  source 1..20: mol_type = other DNA
tcagaaatgcagccagatga

SEQ ID NO: 14221 - DNA, 20 bp, synthetic construct
  misc_feature 1..20: note = Description of Artificial Sequence: Synthetic oligonucleotide
  misc_feature 1..20: note = Target: FXN; (-) strand; PAM type: NRG; PAM sequence: CAG
  source 1..20: mol_type = other DNA
acaaaaatcagaaatgcagc

SEQ ID NO: 14222 - DNA, 20 bp, synthetic construct
  misc_feature 1..20: note = Description of Artificial Sequence: Synthetic oligonucleotide
  misc_feature 1..20: note = Target: FXN; (-) strand; PAM type: NRG; PAM sequence: CAG
  source 1..20: mol_type = other DNA
caaaacaaaaatcagaaatg

SEQ ID NO: 14223 - DNA, 20 bp, synthetic construct
  misc_feature 1..20: note = Description of Artificial Sequence: Synthetic oligonucleotide
  misc_feature 1..20: note = Target: FXN; (-) strand; PAM type: NRG; PAM sequence: CAG
  source 1..20: mol_type = other DNA
aaaaaaaacaaaacaaaaat

SEQ ID NO: 14224 - DNA, 20 bp, synthetic construct
  misc_feature 1..20: note = Description of Artificial Sequence: Synthetic oligonucleotide
  misc_feature 1..20: note = Target: FXN; (-) strand; PAM type: NRG; PAM sequence: AAG
  source 1..20: mol_type = other DNA
aattaaaaataaataaaatt

SEQ ID NO: 14225 - DNA, 20 bp, synthetic construct
  misc_feature 1..20: note = Description of Artificial Sequence: Synthetic oligonucleotide
  misc_feature 1..20: note = Target: FXN; (-) strand; PAM type: NRG; PAM sequence: GAG
  source 1..20: mol_type = other DNA
accaacctaggcaacaaagt

SEQ ID NO: 14226 - DNA, 20 bp, synthetic construct
  misc_feature 1..20: note = Description of Artificial Sequence: Synthetic oligonucleotide
  misc_feature 1..20: note = Target: FXN; (-) strand; PAM type: NRG; PAM sequence: AAG
  source 1..20: mol_type = other DNA
tcagaccaacctaggcaaca

SEQ ID NO: 14227 - DNA, 20 bp, synthetic construct
  misc_feature 1..20: note = Description of Artificial Sequence: Synthetic oligonucleotide
  misc_feature 1..20: note = Target: FXN; (-) strand; PAM type: NRG; PAM sequence: AGG
  source 1..20: mol_type = other DNA
cacgagtttcagaccaacct

SEQ ID NO: 14228 - DNA, 20 bp, synthetic construct
  misc_feature 1..20: note = Description of Artificial Sequence: Synthetic oligonucleotide
  misc_feature 1..20: note = Target: FXN; (-) strand; PAM type: NRG; PAM sequence: TAG
  source 1..20: mol_type = other DNA
ccacgagtttcagaccaacc

SEQ ID NO: 14229 - DNA, 20 bp, synthetic construct
  misc_feature 1..20: note = Description of Artificial Sequence: Synthetic oligonucleotide
  misc_feature 1..20: note = Target: FXN; (-) strand; PAM type: NRG; PAM sequence: CAG
  source 1..20: mol_type = other DNA
ttgcttgaagccacgagttt

SEQ ID NO: 14230 - DNA, 20 bp, synthetic construct
  misc_feature 1..20: note = Description of Artificial Sequence: Synthetic oligonucleotide
  misc_feature 1..20: note = Target: FXN; (-) strand; PAM type: NRG; PAM sequence: GAG
  source 1..20: mol_type = other DNA
ggaggattgcttgaagccac

SEQ ID NO: 14231 - DNA, 20 bp, synthetic construct
  misc_feature 1..20: note = Description of Artificial Sequence: Synthetic oligonucleotide
  misc_feature 1..20: note = Target: FXN; (-) strand; PAM type: NRG; PAM sequence: AAG
  source 1..20: mol_type = other DNA
tgatgtgggaggattgcttg

SEQ ID NO: 14232 - DNA, 20 bp, synthetic construct
  misc_feature 1..20: note = Description of Artificial Sequence: Synthetic oligonucleotide
  misc_feature 1..20: note = Target: FXN; (-) strand; PAM type: NRG; PAM sequence: AGG
  source 1..20: mol_type = other DNA
ctttgggaggctgatgtggg

SEQ ID NO: 14233 - DNA, 20 bp, synthetic construct
  misc_feature 1..20: note = Description of Artificial Sequence: Synthetic oligonucleotide
  misc_feature 1..20: note = Target: FXN; (-) strand; PAM type: NRG; PAM sequence: GAG
  source 1..20: mol_type = other DNA
actttgggaggctgatgtgg

SEQ ID NO: 14234 - DNA, 20 bp, synthetic construct
  misc_feature 1..20: note = Description of Artificial Sequence: Synthetic oligonucleotide
  misc_feature 1..20: note = Target: FXN; (-) strand; PAM type: NRG; PAM sequence: GGG
  source 1..20: mol_type = other DNA
gcactttgggaggctgatgt

SEQ ID NO: 14235 - DNA, 20 bp, synthetic construct
  misc_feature 1..20: note = Description of Artificial Sequence: Synthetic oligonucleotide
  misc_feature 1..20: note = Target: FXN; (-) strand; PAM type: NRG; PAM sequence: TGG
  source 1..20: mol_type = other DNA
agcactttgggaggctgatg

SEQ ID NO: 14236 - DNA, 20 bp, synthetic construct
  misc_feature 1..20: note = Description of Artificial Sequence: Synthetic oligonucleotide
  misc_feature 1..20: note = Target: FXN; (-) strand; PAM type: NRG; PAM sequence: AGG
  source 1..20: mol_type = other DNA
cataaccccagcactttggg

SEQ ID NO: 14237 - DNA, 20 bp, synthetic construct
  misc_feature 1..20: note = Description of Artificial Sequence: Synthetic oligonucleotide
  misc_feature 1..20: note = Target: FXN; (-) strand; PAM type: NRG; PAM sequence: GAG
  source 1..20: mol_type = other DNA
ccataaccccagcactttgg

SEQ ID NO: 14238 - DNA, 20 bp, synthetic construct
  misc_feature 1..20: note = Description of Artificial Sequence: Synthetic oligonucleotide
  misc_feature 1..20: note = Target: FXN; (-) strand; PAM type: NRG; PAM sequence: GGG
  source 1..20: mol_type = other DNA
acccataaccccagcacttt

SEQ ID NO: 14239 - DNA, 20 bp, synthetic construct
  misc_feature 1..20: note = Description of Artificial Sequence: Synthetic oligonucleotide
  misc_feature 1..20: note = Target: FXN; (-) strand; PAM type: NRG; PAM sequence: TGG
  source 1..20: mol_type = other DNA
cacccataaccccagcactt

SEQ ID NO: 14240 - DNA, 20 bp, synthetic construct
  misc_feature 1..20: note = Description of Artificial Sequence: Synthetic oligonucleotide
  misc_feature 1..20: note = Target: FXN; (-) strand; PAM type: NRG; PAM sequence: CAG
  source 1..20: mol_type = other DNA
gtggctcacacccataaccc

SEQ ID NO: 14241 - DNA, 20 bp, synthetic construct
  misc_feature 1..20: note = Description of Artificial Sequence: Synthetic oligonucleotide
  misc_feature 1..20: note = Target: FXN; (-) strand; PAM type: NRG; PAM sequence: TGG
  source 1..20: mol_type = other DNA
aaaaaaacaggctgctgcag

SEQ ID NO: 14242 - DNA, 20 bp, synthetic construct
  misc_feature 1..20: note = Description of Artificial Sequence: Synthetic oligonucleotide
  misc_feature 1..20: note = Target: FXN; (-) strand; PAM type: NRG; PAM sequence: CAG
  source 1..20: mol_type = other DNA
acaaaaaaaacaggctgctg

SEQ ID NO: 14243 - DNA, 20 bp, synthetic construct
  misc_feature 1..20: note = Description of Artificial Sequence: Synthetic oligonucleotide
  misc_feature 1..20: note = Target: FXN; (-) strand; PAM type: NRG; PAM sequence: AGG
  source 1..20: mol_type = other DNA
aacaaacaaacaaaaaaaac

SEQ ID NO: 14244 - DNA, 20 bp, synthetic construct
  misc_feature 1..20: note = Description of Artificial Sequence: Synthetic oligonucleotide
  misc_feature 1..20: note = Target: FXN; (-) strand; PAM type: NRG; PAM sequence: CAG
  source 1..20: mol_type = other DNA
aaacaaacaaacaaaaaaaa

SEQ ID NO: 14245 - DNA, 20 bp, synthetic construct
  misc_feature 1..20: note = Description of Artificial Sequence: Synthetic oligonucleotide
  misc_feature 1..20: note = Target: FXN; (-) strand; PAM type: NRG; PAM sequence: AGG
  source 1..20: mol_type = other DNA
ggtaagactgctgatttcac

SEQ ID NO: 14246 - DNA, 20 bp, synthetic construct
  misc_feature 1..20: note = Description of Artificial Sequence: Synthetic oligonucleotide
  misc_feature 1..20: note = Target: FXN; (-) strand; PAM type: NRG; PAM sequence: CAG
  source 1..20: mol_type = other DNA
aggtaagactgctgatttca

SEQ ID NO: 14247 - DNA, 20 bp, synthetic construct
  misc_feature 1..20: note = Description of Artificial Sequence: Synthetic oligonucleotide
  misc_feature 1..20: note = Target: FXN; (-) strand; PAM type: NRG; PAM sequence: AAG
  source 1..20: mol_type = other DNA
gggtgcgcaaggtgggaggt

SEQ ID NO: 14248 - DNA, 20 bp, synthetic construct
  misc_feature 1..20: note = Description of Artificial Sequence: Synthetic oligonucleotide
  misc_feature 1..20: note = Target: FXN; (-) strand; PAM type: NRG; PAM sequence: AGG
  source 1..20: mol_type = other DNA
ctcagggtgcgcaaggtggg

SEQ ID NO: 14249 - DNA, 20 bp, synthetic construct
  misc_feature 1..20: note = Description of Artificial Sequence: Synthetic oligonucleotide
  misc_feature 1..20: note = Target: FXN; (-) strand; PAM type: NRG; PAM sequence: GAG
  source 1..20: mol_type = other DNA
cctcagggtgcgcaaggtgg

SEQ ID NO: 14250 - DNA, 20 bp, synthetic construct
  misc_feature 1..20: note = Description of Artificial Sequence: Synthetic oligonucleotide
  misc_feature 1..20: note = Target: FXN; (-) strand; PAM type: NRG; PAM sequence: GGG
  source 1..20: mol_type = other DNA
ctcctcagggtgcgcaaggt

SEQ ID NO: 14251 - DNA, 20 bp, synthetic construct
  misc_feature 1..20: note = Description of Artificial Sequence: Synthetic oligonucleotide
  misc_feature 1..20: note = Target: FXN; (-) strand; PAM type: NRG; PAM sequence: TGG
  source 1..20: mol_type = other DNA
cctcctcagggtgcgcaagg

SEQ ID NO: 14252 - DNA, 20 bp, synthetic construct
  misc_feature 1..20: note = Description of Artificial Sequence: Synthetic oligonucleotide
  misc_feature 1..20: note = Target: FXN; (-) strand; PAM type: NRG; PAM sequence: AGG
  source 1..20: mol_type = other DNA
caacctcctcagggtgcgca

SEQ ID NO: 14253 - DNA, 20 bp, synthetic construct
  misc_feature 1..20: note = Description of Artificial Sequence: Synthetic oligonucleotide
  misc_feature 1..20: note = Target: FXN; (-) strand; PAM type: NRG; PAM sequence: AAG
  source 1..20: mol_type = other DNA
gcaacctcctcagggtgcgc

SEQ ID NO: 14254 - DNA, 20 bp, synthetic construct
  misc_feature 1..20: note = Description of Artificial Sequence: Synthetic oligonucleotide
  misc_feature 1..20: note = Target: FXN; (-) strand; PAM type: NRG; PAM sequence: GGG
  source 1..20: mol_type = other DNA
tttattctgcaacctcctca

SEQ ID NO: 14255 - DNA, 20 bp, synthetic construct
  misc_feature 1..20: note = Description of Artificial Sequence: Synthetic oligonucleotide
  misc_feature 1..20: note = Target: FXN; (-) strand; PAM type: NRG; PAM sequence: AGG
  source 1..20: mol_type = other DNA
ctttattctgcaacctcctc

SEQ ID NO: 14256 - DNA, 20 bp, synthetic construct
  misc_feature 1..20: note = Description of Artificial Sequence: Synthetic oligonucleotide
  misc_feature 1..20: note = Target: FXN; (-) strand; PAM type: NRG; PAM sequence: CAG
  source 1..20: mol_type = other DNA
cctttattctgcaacctcct

SEQ ID NO: 14257 - DNA, 20 bp, synthetic construct
  misc_feature 1..20: note = Description of Artificial Sequence: Synthetic oligonucleotide
  misc_feature 1..20: note = Target: FXN; (-) strand; PAM type: NRG; PAM sequence: TAG
  source 1..20: mol_type = other DNA
cactgatgcccacgtgtccc

SEQ ID NO: 14258 - DNA, 20 bp, synthetic construct
  misc_feature 1..20: note = Description of Artificial Sequence: Synthetic oligonucleotide
  misc_feature 1..20: note = Target: FXN; (-) strand; PAM type: NRG; PAM sequence: AGG
  source 1..20: mol_type = other DNA
gcctgaggtgctctgagcac

SEQ ID NO: 14259 - DNA, 20 bp, synthetic construct
  misc_feature 1..20: note = Description of Artificial Sequence: Synthetic oligonucleotide
  misc_feature 1..20: note = Target: FXN; (-) strand; PAM type: NRG; PAM sequence: CAG
  source 1..20: mol_type = other DNA
tgcctgaggtgctctgagca

SEQ ID NO: 14260 - DNA, 20 bp, synthetic construct
  misc_feature 1..20: note = Description of Artificial Sequence: Synthetic oligonucleotide
  misc_feature 1..20: note = Target: FXN; (-) strand; PAM type: NRG; PAM sequence: GAG
  source 1..20: mol_type = other DNA
cacactgcctgaggtgctct

SEQ ID NO: 14261 - DNA, 20 bp, synthetic construct
  misc_feature 1..20: note = Description of Artificial Sequence: Synthetic oligonucleotide
  misc_feature 1..20: note = Target: FXN; (-) strand; PAM type: NRG; PAM sequence: AGG
  source 1..20: mol_type = other DNA
agacccctccacactgcctg

SEQ ID NO: 14262 - DNA, 20 bp, synthetic construct
  misc_feature 1..20: note = Description of Artificial Sequence: Synthetic oligonucleotide
  misc_feature 1..20: note = Target: FXN; (-) strand; PAM type: NRG; PAM sequence: GAG
  source 1..20: mol_type = other DNA
tagacccctccacactgcct

SEQ ID NO: 14263 - DNA, 20 bp, synthetic construct
  misc_feature 1..20: note = Description of Artificial Sequence: Synthetic oligonucleotide
  misc_feature 1..20: note = Target: FXN; (-) strand; PAM type: NRG; PAM sequence: TAG
  source 1..20: mol_type = other DNA
ggcagagcctgagtaacctc

SEQ ID NO: 14264 - DNA, 20 bp, synthetic construct
  misc_feature 1..20: note = Description of Artificial Sequence: Synthetic oligonucleotide
  misc_feature 1..20: note = Target: FXN; (-) strand; PAM type: NRG; PAM sequence: GAG
  source 1..20: mol_type = other DNA
cgggttgccaggcagagcct

SEQ ID NO: 14265 - DNA, 20 bp, synthetic construct
  misc_feature 1..20: note = Description of Artificial Sequence: Synthetic oligonucleotide
  misc_feature 1..20: note = Target: FXN; (-) strand; PAM type: NRG; PAM sequence: GAG
  source 1..20: mol_type = other DNA
tgctatcgggttgccaggca

SEQ ID NO: 14266 - DNA, 20 bp, synthetic construct
  misc_feature 1..20: note = Description of Artificial Sequence: Synthetic oligonucleotide
  misc_feature 1..20: note = Target: FXN; (-) strand; PAM type: NRG; PAM sequence: CAG
  source 1..20: mol_type = other DNA
actgctatcgggttgccagg

SEQ ID NO: 14267 - DNA, 20 bp, synthetic construct
  misc_feature 1..20: note = Description of Artificial Sequence: Synthetic oligonucleotide
  misc_feature 1..20: note = Target: FXN; (-) strand; PAM type: NRG; PAM sequence: AGG
  source 1..20: mol_type = other DNA
gatactgctatcgggttgcc

SEQ ID NO: 14268 - DNA, 20 bp, synthetic construct
  misc_feature 1..20: note = Description of Artificial Sequence: Synthetic oligonucleotide
  misc_feature 1..20: note = Target: FXN; (-) strand; PAM type: NRG; PAM sequence: CAG
  source 1..20: mol_type = other DNA
tgatactgctatcgggttgc

SEQ ID NO: 14269 - DNA, 20 bp, synthetic construct
  misc_feature 1..20: note = Description of Artificial Sequence: Synthetic oligonucleotide
  misc_feature 1..20: note = Target: FXN; (-) strand; PAM type: NRG; PAM sequence: GGG
  source 1..20: mol_type = other DNA
tatactctgatactgctatc

SEQ ID NO: 14270 - DNA, 20 bp, synthetic construct
  misc_feature 1..20: note = Description of Artificial Sequence: Synthetic oligonucleotide
  misc_feature 1..20: note = Target: FXN; (-) strand; PAM type: NRG; PAM sequence: CGG
  source 1..20: mol_type = other DNA
ctatactctgatactgctat

SEQ ID NO: 14271 - DNA, 20 bp, synthetic construct
  misc_feature 1..20: note = Description of Artificial Sequence: Synthetic oligonucleotide
  misc_feature 1..20: note = Target: FXN; (-) strand; PAM type: NRG; PAM sequence: TGG
  source 1..20: mol_type = other DNA
aagcccaaggaccgtcccct

SEQ ID NO: 14272 - DNA, 20 bp, synthetic construct
  misc_feature 1..20: note = Description of Artificial Sequence: Synthetic oligonucleotide
  misc_feature 1..20: note = Target: FXN; (-) strand; PAM type: NRG; PAM sequence: AGG
  source 1..20: mol_type = other DNA
aataaaccacaccaagccca

SEQ ID NO: 14273 - DNA, 20 bp, synthetic construct
  misc_feature 1..20: note = Description of Artificial Sequence: Synthetic oligonucleotide
  misc_feature 1..20: note = Target: FXN; (-) strand; PAM type: NRG; PAM sequence: AAG
  source 1..20: mol_type = other DNA
taataaaccacaccaagccc

SEQ ID NO: 14274 - DNA, 20 bp, synthetic construct
  misc_feature 1..20: note = Description of Artificial Sequence: Synthetic oligonucleotide
  misc_feature 1..20: note = Target: FXN; (-) strand; PAM type: NRG; PAM sequence: AAG
  source 1..20: mol_type = other DNA
aaggactaataaaccacacc

SEQ ID NO: 14275 - DNA, 20 bp, synthetic construct
  misc_feature 1..20: note = Description of Artificial Sequence: Synthetic oligonucleotide
  misc_feature 1..20: note = Target: FXN; (-) strand; PAM type: NRG; PAM sequence: AGG
  source 1..20: mol_type = other DNA
accatcagggtcacaggaaa

SEQ ID NO: 14276 - DNA, 20 bp, synthetic construct
  misc_feature 1..20: note = Description of Artificial Sequence: Synthetic oligonucleotide
  misc_feature 1..20: note = Target: FXN; (-) strand; PAM type: NRG; PAM sequence: AAG
  source 1..20: mol_type = other DNA
aaccatcagggtcacaggaa

SEQ ID NO: 14277 - DNA, 20 bp, synthetic construct
  misc_feature 1..20: note = Description of Artificial Sequence: Synthetic oligonucleotide
  misc_feature 1..20: note = Target: FXN; (-) strand; PAM type: NRG; PAM sequence: AGG
  source 1..20: mol_type = other DNA
aaccaaaccatcagggtcac

SEQ ID NO: 14278 - DNA, 20 bp, synthetic construct
  misc_feature 1..20: note = Description of Artificial Sequence: Synthetic oligonucleotide
  misc_feature 1..20: note = Target: FXN; (-) strand; PAM type: NRG; PAM sequence: CAG
  source 1..20: mol_type = other DNA
gaaccaaaccatcagggtca

SEQ ID NO: 14279 - DNA, 20 bp, synthetic construct
  misc_feature 1..20: note = Description of Artificial Sequence: Synthetic oligonucleotide
  misc_feature 1..20: note = Target: FXN; (-) strand; PAM type: NRG; PAM sequence: GGG
  source 1..20: mol_type = other DNA
atgagtgaaccaaaccatca

SEQ ID NO: 14280 - DNA, 20 bp, synthetic construct
  misc_feature 1..20: note = Description of Artificial Sequence: Synthetic oligonucleotide
  misc_feature 1..20: note = Target: FXN; (-) strand; PAM type: NRG; PAM sequence: AGG
  source 1..20: mol_type = other DNA
aatgagtgaaccaaaccatc

SEQ ID NO: 14281 - DNA, 20 bp, synthetic construct
  misc_feature 1..20: note = Description of Artificial Sequence: Synthetic oligonucleotide
  misc_feature 1..20: note = Target: FXN; (-) strand; PAM type: NRG; PAM sequence: CAG
  source 1..20: mol_type = other DNA
aaatgagtgaaccaaaccat

SEQ ID NO: 14282 - DNA, 20 bp, synthetic construct
  misc_feature 1..20: note = Description of Artificial Sequence: Synthetic oligonucleotide
  misc_feature 1..20: note = Target: FXN; (-) strand; PAM type: NRG; PAM sequence: GAG
  source 1..20: mol_type = other DNA
cccagtatggagataaaaat

SEQ ID NO: 14283 - DNA, 20 bp, synthetic construct
  misc_feature 1..20: note = Description of Artificial Sequence: Synthetic oligonucleotide
  misc_feature 1..20: note = Target: FXN; (-) strand; PAM type: NRG; PAM sequence: GAG
  source 1..20: mol_type = other DNA
ttgaacctgttcccagtatg

SEQ ID NO: 14284 - DNA, 20 bp, synthetic construct
  misc_feature 1..20: note = Description of Artificial Sequence: Synthetic oligonucleotide
  misc_feature 1..20: note = Target: FXN; (-) strand; PAM type: NRG; PAM sequence: TGG
  source 1..20: mol_type = other DNA
gcttgaacctgttcccagta

SEQ ID NO: 14285 - DNA, 20 bp, synthetic construct
  misc_feature 1..20: note = Description of Artificial Sequence: Synthetic oligonucleotide
  misc_feature 1..20: note = Target: FXN; (-) strand; PAM type: NRG; PAM sequence: CAG
  source 1..20: mol_type = other DNA
ctggggcttgaacctgttcc

SEQ ID NO: 14286 - DNA, 20 bp, synthetic construct
  misc_feature 1..20: note = Description of Artificial Sequence: Synthetic oligonucleotide
  misc_feature 1..20: note = Target: FXN; (-) strand; PAM type: NRG; PAM sequence: GGG
  source 1..20: mol_type = other DNA
gcattatcaaccaaatgctg

SEQ ID NO: 14287 - DNA, 20 bp, synthetic construct
  misc_feature 1..20: note = Description of Artificial Sequence: Synthetic oligonucleotide
  misc_feature 1..20: note = Target: FXN; (-) strand; PAM type: NRG; PAM sequence: GGG
  source 1..20: mol_type = other DNA
tgcattatcaaccaaatgct

SEQ ID NO: 14288 - DNA, 20 bp, synthetic construct
  misc_feature 1..20: note = Description of Artificial Sequence: Synthetic oligonucleotide
  misc_feature 1..20: note = Target: FXN; (-) strand; PAM type: NRG; PAM sequence: TGG
  source 1..20: mol_type = other DNA
ctgcattatcaaccaaatgc

SEQ ID NO: 14289 - DNA, 20 bp, synthetic construct
  misc_feature 1..20: note = Description of Artificial Sequence: Synthetic oligonucleotide
  misc_feature 1..20: note = Target: FXN; (-) strand; PAM type: NRG; PAM sequence: AGG
  source 1..20: mol_type = other DNA
cttgggcaataaaagtatca

SEQ ID NO: 14290 - DNA, 20 bp, synthetic construct
  misc_feature 1..20: note = Description of Artificial Sequence: Synthetic oligonucleotide
  misc_feature 1..20: note = Target: FXN; (-) strand; PAM type: NRG; PAM sequence: AAG
  source 1..20: mol_type = other DNA
gcttgggcaataaaagtatc

SEQ ID NO: 14291 - DNA, 20 bp, synthetic construct
  misc_feature 1..20: note = Description of Artificial Sequence: Synthetic oligonucleotide
  misc_feature 1..20: note = Target: FXN; (-) strand; PAM type: NRG; PAM sequence: AAG
  source 1..20: mol_type = other DNA
aagggaagcttgggcaataa

SEQ ID NO: 14292 - DNA, 20 bp, synthetic construct
  misc_feature 1..20: note = Description of Artificial Sequence: Synthetic oligonucleotide
  misc_feature 1..20: note = Target: FXN; (-) strand; PAM type: NRG; PAM sequence: GGG
  source 1..20: mol_type = other DNA
gtcaccaggaagggaagctt

SEQ ID NO: 14293 - DNA, 20 bp, synthetic construct
  misc_feature 1..20: note = Description of Artificial Sequence: Synthetic oligonucleotide
  misc_feature 1..20: note = Target: FXN; (-) strand; PAM type: NRG; PAM sequence: TGG
  source 1..20: mol_type = other DNA
ggtcaccaggaagggaagct

SEQ ID NO: 14294 - DNA, 20 bp, synthetic construct
  misc_feature 1..20: note = Description of Artificial Sequence: Synthetic oligonucleotide
  misc_feature 1..20: note = Target: FXN; (-) strand; PAM type: NRG; PAM sequence: AAG
  source 1..20: mol_type = other DNA
gatgaggtcaccaggaaggg

SEQ ID NO: 14295 - DNA, 20 bp, synthetic construct
  misc_feature 1..20: note = Description of Artificial Sequence: Synthetic oligonucleotide
  misc_feature 1..20: note = Target: FXN; (-) strand; PAM type: NRG; PAM sequence: GGG
  source 1..20: mol_type = other DNA
taggatgaggtcaccaggaa

SEQ ID NO: 14296 - DNA, 20 bp, synthetic construct
  misc_feature 1..20: note = Description of Artificial Sequence: Synthetic oligonucleotide
  misc_feature 1..20: note = Target: FXN; (-) strand; PAM type: NRG; PAM sequence: AGG
  source 1..20: mol_type = other DNA
ctaggatgaggtcaccagga

SEQ ID NO: 14297 - DNA, 20 bp, synthetic construct
  misc_feature 1..20: note = Description of Artificial Sequence: Synthetic oligonucleotide
  misc_feature 1..20: note = Target: FXN; (-) strand; PAM type: NRG; PAM sequence: AAG
  source 1..20: mol_type = other DNA
gctaggatgaggtcaccagg

SEQ ID NO: 14298 - DNA, 20 bp, synthetic construct
  misc_feature 1..20: note = Description of Artificial Sequence: Synthetic oligonucleotide
  misc_feature 1..20: note = Target: FXN; (-) strand; PAM type: NRG; PAM sequence: AGG
  source 1..20: mol_type = other DNA
gaggctaggatgaggtcacc

SEQ ID NO: 14299 - DNA, 20 bp, synthetic construct
  misc_feature 1..20: note = Description of Artificial Sequence: Synthetic oligonucleotide
  misc_feature 1..20: note = Target: FXN; (-) strand; PAM type: NRG; PAM sequence: CAG
  source 1..20: mol_type = other DNA
tgaggctaggatgaggtcac

SEQ ID NO: 14300 - DNA, 20 bp, synthetic construct
  misc_feature 1..20: note = Description of Artificial Sequence: Synthetic oligonucleotide
  misc_feature 1..20: note = Target: FXN; (-) strand; PAM type: NRG; PAM sequence: AGG
  source 1..20: mol_type = other DNA
caaagactgaggctaggatg

SEQ ID NO: 14301 - DNA, 20 bp, synthetic construct
  misc_feature 1..20: note = Description of Artificial Sequence: Synthetic oligonucleotide
  misc_feature 1..20: note = Target: FXN; (-) strand; PAM type: NRG; PAM sequence: GAG
  source 1..20: mol_type = other DNA
ccaaagactgaggctaggat

SEQ ID NO: 14302 - DNA, 20 bp, synthetic construct
  misc_feature 1..20: note = Description of Artificial Sequence: Synthetic oligonucleotide
  misc_feature 1..20: note = Target: FXN; (-) strand; PAM type: NRG; PAM sequence: AGG
  source 1..20: mol_type = other DNA
cttttccaaagactgaggct

SEQ ID NO: 14303 - DNA, 20 bp, synthetic construct
  misc_feature 1..20: note = Description of Artificial Sequence: Synthetic oligonucleotide
  misc_feature 1..20: note = Target: FXN; (-) strand; PAM type: NRG; PAM sequence: TAG
  source 1..20: mol_type = other DNA
gcttttccaaagactgaggc

SEQ ID NO: 14304 - DNA, 20 bp, synthetic construct
  misc_feature 1..20: note = Description of Artificial Sequence: Synthetic oligonucleotide
  misc_feature 1..20: note = Target: FXN; (-) strand; PAM type: NRG; PAM sequence: AGG
  source 1..20: mol_type = other DNA
gagggcttttccaaagactg

SEQ ID NO: 14305 - DNA, 20 bp, synthetic construct
  misc_feature 1..20: note = Description of Artificial Sequence: Synthetic oligonucleotide
  misc_feature 1..20: note = Target: FXN; (-) strand; PAM type: NRG; PAM sequence: GAG
  source 1..20: mol_type = other DNA
ggagggcttttccaaagact

SEQ ID NO: 14306 - DNA, 20 bp, synthetic construct
  misc_feature 1..20: note = Description of Artificial Sequence: Synthetic oligonucleotide
  misc_feature 1..20: note = Target: FXN; (-) strand; PAM type: NRG; PAM sequence: AAG
  source 1..20: mol_type = other DNA
actcaaggagggcttttcca

SEQ ID NO: 14307 - DNA, 20 bp, synthetic construct
  misc_feature 1..20: note = Description of Artificial Sequence: Synthetic oligonucleotide
  misc_feature 1..20: note = Target: FXN; (-) strand; PAM type: NRG; PAM sequence: GGG
  source 1..20: mol_type = other DNA
tctgcctgagcactcaagga

SEQ ID NO: 14308 - DNA, 20 bp, synthetic construct
  misc_feature 1..20: note = Description of Artificial Sequence: Synthetic oligonucleotide
  misc_feature 1..20: note = Target: FXN; (-) strand; PAM type: NRG; PAM sequence: AGG
  source 1..20: mol_type = other DNA
gtctgcctgagcactcaagg

SEQ ID NO: 14309 - DNA, 20 bp, synthetic construct
  misc_feature 1..20: note = Description of Artificial Sequence: Synthetic oligonucleotide
  misc_feature 1..20: note = Target: FXN; (-) strand; PAM type: NRG; PAM sequence: GAG
  source 1..20: mol_type = other DNA
agtctgcctgagcactcaag

SEQ ID NO: 14310 - DNA, 20 bp, synthetic construct
  misc_feature 1..20: note = Description of Artificial Sequence: Synthetic oligonucleotide
  misc_feature 1..20: note = Target: FXN; (-) strand; PAM type: NRG; PAM sequence: AGG
  source 1..20: mol_type = other DNA
tgagtctgcctgagcactca

SEQ ID NO: 14311 - DNA, 20 bp, synthetic construct
  misc_feature 1..20: note = Description of Artificial Sequence: Synthetic oligonucleotide
  misc_feature 1..20: note = Target: FXN; (-) strand; PAM type: NRG; PAM sequence: AAG
  source 1..20: mol_type = other DNA
ctgagtctgcctgagcactc

SEQ ID NO: 14312 - DNA, 20 bp, synthetic construct
  misc_feature 1..20: note = Description of Artificial Sequence: Synthetic oligonucleotide
  misc_feature 1..20: note = Target: FXN; (-) strand; PAM type: NRG; PAM sequence: GAG
  source 1..20: mol_type = other DNA
aagggcacctgagtctgcct

SEQ ID NO: 14313 - DNA, 20 bp, synthetic construct
  misc_feature 1..20: note = Description of Artificial Sequence: Synthetic oligonucleotide
  misc_feature 1..20: note = Target: FXN; (-) strand; PAM type: NRG; PAM sequence: GAG
  source 1..20: mol_type = other DNA
gcccagaagaaagggcacct

SEQ ID NO: 14314 - DNA, 20 bp, synthetic construct
  misc_feature 1..20: note = Description of Artificial Sequence: Synthetic oligonucleotide
  misc_feature 1..20: note = Target: FXN; (-) strand; PAM type: NRG; PAM sequence: GGG
  source 1..20: mol_type = other DNA
gcatgggagcccagaagaaa

SEQ ID NO: 14315 - DNA, 20 bp, synthetic construct
  misc_feature 1..20: note = Description of Artificial Sequence: Synthetic oligonucleotide
  misc_feature 1..20: note = Target: FXN; (-) strand; PAM type: NRG; PAM sequence: AGG
  source 1..20: mol_type = other DNA
tgcatgggagcccagaagaa

SEQ ID NO: 14316 - DNA, 20 bp, synthetic construct
  misc_feature 1..20: note = Description of Artificial Sequence: Synthetic oligonucleotide
  misc_feature 1..20: note = Target: FXN; (-) strand; PAM type: NRG; PAM sequence: AAG
  source 1..20: mol_type = other DNA
gtgcatgggagcccagaaga

SEQ ID NO: 14317 - DNA, 20 bp, synthetic construct
  misc_feature 1..20: note = Description of Artificial Sequence: Synthetic oligonucleotide
  misc_feature 1..20: note = Target: FXN; (-) strand; PAM type: NRG; PAM sequence: AAG
  source 1..20: mol_type = other DNA
cagagtgcatgggagcccag

SEQ ID NO: 14318 - DNA, 20 bp, synthetic construct
  misc_feature 1..20: note = Description of Artificial Sequence: Synthetic oligonucleotide
  misc_feature 1..20: note = Target: FXN; (-) strand; PAM type: NRG; PAM sequence: CAG
  source 1..20: mol_type = other DNA
gaacagagtgcatgggagcc

SEQ ID NO: 14319 - DNA, 20 bp, synthetic construct
  misc_feature 1..20: note = Description of Artificial Sequence: Synthetic oligonucleotide
  misc_feature 1..20: note = Target: FXN; (-) strand; PAM type: NRG; PAM sequence: GAG
  source 1..20: mol_type = other DNA
ggtaagaacagagtgcatgg

SEQ ID NO: 14320 - DNA, 20 bp, synthetic construct
  misc_feature 1..20: note = Description of Artificial Sequence: Synthetic oligonucleotide
  misc_feature 1..20: note = Target: FXN; (-) strand; PAM type: NRG; PAM sequence: GGG
  source 1..20: mol_type = other DNA
gaggtaagaacagagtgcat

SEQ ID NO: 14321 - DNA, 20 bp, synthetic construct
  misc_feature 1..20: note = Description of Artificial Sequence: Synthetic oligonucleotide
  misc_feature 1..20: note = Target: FXN; (-) strand; PAM type: NRG; PAM sequence: TGG
  source 1..20: mol_type = other DNA
ggaggtaagaacagagtgca

SEQ ID NO: 14322 - DNA, 20 bp, synthetic construct
  misc_feature 1..20: note = Description of Artificial Sequence: Synthetic oligonucleotide
  misc_feature 1..20: note = Target: FXN; (-) strand; PAM type: NRG; PAM sequence: GAG
  source 1..20: mol_type = other DNA
ccctgatggaggtaagaaca

SEQ ID NO: 14323 - DNA, 20 bp, synthetic construct
  misc_feature 1..20: note = Description of Artificial Sequence: Synthetic oligonucleotide
  misc_feature 1..20: note = Target: FXN; (-) strand; PAM type: NRG; PAM sequence: CAG
  source 1..20: mol_type = other DNA
caccctgatggaggtaagaa

SEQ ID NO: 14324 - DNA, 20 bp, synthetic construct
  misc_feature 1..20: note = Description of Artificial Sequence: Synthetic oligonucleotide
  misc_feature 1..20: note = Target: FXN; (-) strand; PAM type: NRG; PAM sequence: AAG
  source 1..20: mol_type = other DNA
tgtggcaccctgatggaggt

SEQ ID NO: 14325 - DNA, 20 bp, synthetic construct
  misc_feature 1..20: note = Description of Artificial Sequence: Synthetic oligonucleotide
  misc_feature 1..20: note = Target: FXN; (-) strand; PAM type: NRG; PAM sequence: AGG
  source 1..20: mol_type = other DNA
tgcatgtggcaccctgatgg

SEQ ID NO: 14326 - DNA, 20 bp, synthetic construct
  misc_feature 1..20: note = Description of Artificial Sequence: Synthetic oligonucleotide
  misc_feature 1..20: note = Target: FXN; (-) strand; PAM type: NRG; PAM sequence: GAG
  source 1..20: mol_type = other DNA
gtgcatgtggcaccctgatg

SEQ ID NO: 14327 - DNA, 20 bp, synthetic construct
  misc_feature 1..20: note = Description of Artificial Sequence: Synthetic oligonucleotide
  misc_feature 1..20: note = Target: FXN; (-) strand; PAM type: NRG; PAM sequence: TGG
  source 1..20: mol_type = other DNA
tagtgcatgtggcaccctga

SEQ ID NO: 14328 - DNA, 20 bp, synthetic construct
  misc_feature 1..20: note = Description of Artificial Sequence: Synthetic oligonucleotide
  misc_feature 1..20: note = Target: FXN; (-) strand; PAM type: NRG; PAM sequence: TGG
  source 1..20: mol_type = other DNA
gcagataacactagtgcatg

SEQ ID NO: 14329 - DNA, 20 bp, synthetic construct
  misc_feature 1..20: note = Description of Artificial Sequence: Synthetic oligonucleotide
  misc_feature 1..20: note = Target: FXN; (-) strand; PAM type: NRG; PAM sequence: TAG
  source 1..20: mol_type = other DNA
gccacggcagcagataacac

SEQ ID NO: 14330 - DNA, 20 bp, synthetic construct
  misc_feature 1..20: note = Description of Artificial Sequence: Synthetic oligonucleotide
  misc_feature 1..20: note = Target: FXN; (-) strand; PAM type: NRG; PAM sequence: CAG
  source 1..20: mol_type = other DNA
tggatgattggccacggcag

SEQ ID NO: 14331 - DNA, 20 bp, synthetic construct
  misc_feature 1..20: note = Description of Artificial Sequence: Synthetic oligonucleotide
  misc_feature 1..20: note = Target: FXN; (-) strand; PAM type: NRG; PAM sequence: CAG
  source 1..20: mol_type = other DNA
tcatggatgattggccacgg

SEQ ID NO: 14332 - DNA, 20 bp, synthetic construct
  misc_feature 1..20: note = Description of Artificial Sequence: Synthetic oligonucleotide
  misc_feature 1..20: note = Target: FXN; (-) strand; PAM type: NRG; PAM sequence: CGG
  source 1..20: mol_type = other DNA
gcctcatggatgattggcca

SEQ ID NO: 14333 - DNA, 20 bp, synthetic construct
  misc_feature 1..20: note = Description of Artificial Sequence: Synthetic oligonucleotide
  misc_feature 1..20: note = Target: FXN; (-) strand; PAM type: NRG; PAM sequence: TGG
  source 1..20: mol_type = other DNA
ctcatggcctcatggatgat

SEQ ID NO: 14334 - DNA, 20 bp, synthetic construct
  misc_feature 1..20: note = Description of Artificial Sequence: Synthetic oligonucleotide
  misc_feature 1..20: note = Target: FXN; (-) strand; PAM type: NRG; PAM sequence: TGG
  source 1..20: mol_type = other DNA
tccacttcctcatggcctca

SEQ ID NO: 14335 - DNA, 20 bp, synthetic construct
  misc_feature 1..20: note = Description of Artificial Sequence: Synthetic oligonucleotide
  misc_feature 1..20: note = Target: FXN; (-) strand; PAM type: NRG; PAM sequence: TGG
  source 1..20: mol_type = other DNA
atgtacattccacttcctca

SEQ ID NO: 14336 - DNA, 20 bp, synthetic construct
  misc_feature 1..20: note = Description of Artificial Sequence: Synthetic oligonucleotide
  misc_feature 1..20: note = Target: FXN; (-) strand; PAM type: NRG; PAM sequence: CAG
  source 1..20: mol_type = other DNA
tctgccatgtcttcttatac

SEQ ID NO: 14337 - DNA, 20 bp, synthetic construct
  misc_feature 1..20: note = Description of Artificial Sequence: Synthetic oligonucleotide
  misc_feature 1..20: note = Target: FXN; (-) strand; PAM type: NRG; PAM sequence: TGG
  source 1..20: mol_type = other DNA
cgtgtggacagatcggaggc

SEQ ID NO: 14338 - DNA, 20 bp, synthetic construct
  misc_feature 1..20: note = Description of Artificial Sequence: Synthetic oligonucleotide
  misc_feature 1..20: note = Target: FXN; (-) strand; PAM type: NRG; PAM sequence: AGG
  source 1..20: mol_type = other DNA
tattcgtgtggacagatcgg

SEQ ID NO: 14339 - DNA, 20 bp, synthetic construct
  misc_feature 1..20: note = Description of Artificial Sequence: Synthetic oligonucleotide
  misc_feature 1..20: note = Target: FXN; (-) strand; PAM type: NRG; PAM sequence: GAG
  source 1..20: mol_type = other DNA
gtattcgtgtggacagatcg

SEQ ID NO: 14340 - DNA, 20 bp, synthetic construct
  misc_feature 1..20: note = Description of Artificial Sequence: Synthetic oligonucleotide
  misc_feature 1..20: note = Target: FXN; (-) strand; PAM type: NRG; PAM sequence: CGG
  source 1..20: mol_type = other DNA
ctgtattcgtgtggacagat

SEQ ID NO: 14341 - DNA, 20 bp, synthetic construct
  misc_feature 1..20: note = Description of Artificial Sequence: Synthetic oligonucleotide
  misc_feature 1..20: note = Target: FXN; (-) strand; PAM type: NRG; PAM sequence: CAG
  source 1..20: mol_type = other DNA
gaatgctgtattcgtgtgga

SEQ ID NO: 14342 - DNA, 20 bp, synthetic construct
  misc_feature 1..20: note = Description of Artificial Sequence: Synthetic oligonucleotide
  misc_feature 1..20: note = Target: FXN; (-) strand; PAM type: NRG; PAM sequence: TGG
  source 1..20: mol_type = other DNA
ttgggaatgctgtattcgtg

SEQ ID NO: 14343 - DNA, 20 bp, synthetic construct
  misc_feature 1..20: note = Description of Artificial Sequence: Synthetic oligonucleotide
  misc_feature 1..20: note = Target: FXN; (-) strand; PAM type: NRG; PAM sequence: GGG
  source 1..20: mol_type = other DNA
tggcacatgcacgttgcttt

SEQ ID NO: 14344 - DNA, 20 bp, synthetic construct
  misc_feature 1..20: note = Description of Artificial Sequence: Synthetic oligonucleotide
  misc_feature 1..20: note = Target: FXN; (-) strand; PAM type: NRG; PAM sequence: TGG
  source 1..20: mol_type = other DNA
atggcacatgcacgttgctt

SEQ ID NO: 14345 - DNA, 20 bp, synthetic construct
  misc_feature 1..20: note = Description of Artificial Sequence: Synthetic oligonucleotide
  misc_feature 1..20: note = Target: FXN; (-) strand; PAM type: NRG; PAM sequence: TGG
  source 1..20: mol_type = other DNA
caagctcatccagtgaataa

SEQ ID NO: 14346 - DNA, 20 bp, synthetic construct
  misc_feature 1..20: note = Description of Artificial Sequence: Synthetic oligonucleotide
  misc_feature 1..20: note = Target: FXN; (-) strand; PAM type: NRG; PAM sequence: CAG
  source 1..20: mol_type = other DNA
tcatccacctcaagctcatc

SEQ ID NO: 14347 - DNA, 20 bp, synthetic construct
  misc_feature 1..20: note = Description of Artificial Sequence: Synthetic oligonucleotide
  misc_feature 1..20: note = Target: FXN; (-) strand; PAM type: NRG; PAM sequence: AAG
  source 1..20: mol_type = other DNA
tgggctagttcatccacctc

SEQ ID NO: 14348 - DNA, 20 bp, synthetic construct
  misc_feature 1..20: note = Description of Artificial Sequence: Synthetic oligonucleotide
  misc_feature 1..20: note = Target: FXN; (-) strand; PAM type: NRG; PAM sequence: TAG
  source 1..20: mol_type = other DNA
acattgagagcctggtgggc

SEQ ID NO: 14349 - DNA, 20 bp, synthetic construct
  misc_feature 1..20: note = Description of Artificial Sequence: Synthetic oligonucleotide
  misc_feature 1..20: note = Target: FXN; (-) strand; PAM type: NRG; PAM sequence: GGG
  source 1..20: mol_type = other DNA
catgacattgagagcctggt

SEQ ID NO: 14350 - DNA, 20 bp, synthetic construct
  misc_feature 1..20: note = Description of Artificial Sequence: Synthetic oligonucleotide
  misc_feature 1..20: note = Target: FXN; (-) strand; PAM type: NRG; PAM sequence: TGG
  source 1..20: mol_type = other DNA
tcatgacattgagagcctgg

SEQ ID NO: 14351 - DNA, 20 bp, synthetic construct
  misc_feature 1..20: note = Description of Artificial Sequence: Synthetic oligonucleotide
  misc_feature 1..20: note = Target: FXN; (-) strand; PAM type: NRG; PAM sequence: TGG
  source 1..20: mol_type = other DNA
aattcatgacattgagagcc

SEQ ID NO: 14352 - DNA, 20 bp, synthetic construct
  misc_feature 1..20: note = Description of Artificial Sequence: Synthetic oligonucleotide
  misc_feature 1..20: note = Target: FXN; (-) strand; PAM type: NRG; PAM sequence: GAG
  source 1..20: mol_type = other DNA
tgttaaattcatgacattga

SEQ ID NO: 14353 - DNA, 20 bp, synthetic construct
  misc_feature 1..20: note = Description of Artificial Sequence: Synthetic oligonucleotide
  misc_feature 1..20: note = Target: FXN; (-) strand; PAM type: NRG; PAM sequence: GAG
  source 1..20: mol_type = other DNA
agtgttaaattcatgacatt

SEQ ID NO: 14354 - DNA, 20 bp, synthetic construct
  misc_feature 1..20: note = Description of Artificial Sequence: Synthetic oligonucleotide
  misc_feature 1..20: note = Target: FXN; (-) strand; PAM type: NRG; PAM sequence: CAG
  source 1..20: mol_type = other DNA
aaaacatatttttcttaatt

SEQ ID NO: 14355 - DNA, 20 bp, synthetic construct
  misc_feature 1..20: note = Description of Artificial Sequence: Synthetic oligonucleotide
  misc_feature 1..20: note = Target: FXN; (-) strand; PAM type: NRG; PAM sequence: CAG
  source 1..20: mol_type = other DNA
tccttcctctcctagcaccc

SEQ ID NO: 14356 - DNA, 20 bp, synthetic construct
  misc_feature 1..20: note = Description of Artificial Sequence: Synthetic oligonucleotide
  misc_feature 1..20: note = Target: FXN; (-) strand; PAM type: NRG; PAM sequence: TAG
  source 1..20: mol_type = other DNA
ttccccattccttcctctcc

SEQ ID NO: 14357 - DNA, 20 bp, synthetic construct
  misc_feature 1..20: note = Description of Artificial Sequence: Synthetic oligonucleotide
  misc_feature 1..20: note = Target: FXN; (-) strand; PAM type: NRG; PAM sequence: CAG
  source 1..20: mol_type = other DNA
ggccaactatacccattaaa

SEQ ID NO: 14358 - DNA, 20 bp, synthetic construct
  misc_feature 1..20: note = Description of Artificial Sequence: Synthetic oligonucleotide
  misc_feature 1..20: note = Target: FXN; (-) strand; PAM type: NRG; PAM sequence: AGG
  source 1..20: mol_type = other DNA
gtggaacccacagatacaca

SEQ ID NO: 14359 - DNA, 20 bp, synthetic construct
  misc_feature 1..20: note = Description of Artificial Sequence: Synthetic oligonucleotide
  misc_feature 1..20: note = Target: FXN; (-) strand; PAM type: NRG; PAM sequence: AAG
  source 1..20: mol_type = other DNA
tgtggaacccacagatacac

SEQ ID NO: 14360 - DNA, 20 bp, synthetic construct
  misc_feature 1..20: note = Description of Artificial Sequence: Synthetic oligonucleotide
  misc_feature 1..20: note = Target: FXN; (-) strand; PAM type: NRG; PAM sequence: CAG
  source 1..20: mol_type = other DNA
tgaatcagatgtggaaccca

SEQ ID NO: 14361 - DNA, 20 bp, synthetic construct
  misc_feature 1..20: note = Description of Artificial Sequence: Synthetic oligonucleotide
  misc_feature 1..20: note = Target: FXN; (-) strand; PAM type: NRG; PAM sequence: TGG
  source 1..20: mol_type = other DNA
acggttggttgaatcagatg

SEQ ID NO: 14362 - DNA, 20 bp, synthetic construct
  misc_feature 1..20: note = Description of Artificial Sequence: Synthetic oligonucleotide
  misc_feature 1..20: note = Target: FXN; (-) strand; PAM type: NRG; PAM sequence: CAG
  source 1..20: mol_type = other DNA
tgatccacggttggttgaat

SEQ ID NO: 14363 - DNA, 20 bp, synthetic construct
  misc_feature 1..20: note = Description of Artificial Sequence: Synthetic oligonucleotide
  misc_feature 1..20: note = Target: FXN; (-) strand; PAM type: NRG; PAM sequence: TGG
  source 1..20: mol_type = other DNA
caaatattttgatccacggt

SEQ ID NO: 14364 - DNA, 20 bp, synthetic construct
  misc_feature 1..20: note = Description of Artificial Sequence: Synthetic oligonucleotide
  misc_feature 1..20: note = Target: FXN; (-) strand; PAM type: NRG; PAM sequence: CGG
  source 1..20: mol_type = other DNA
ttttcaaatattttgatcca

SEQ ID NO: 14365 - DNA, 20 bp, synthetic construct
  misc_feature 1..20: note = Description of Artificial Sequence: Synthetic oligonucleotide
  misc_feature 1..20: note = Target: FXN; (-) strand; PAM type: NRG; PAM sequence: TGG
  source 1..20: mol_type = other DNA
gctgttaatagttgttatat

SEQ ID NO: 14366 - DNA, 20 bp, synthetic construct
  misc_feature 1..20: note = Description of Artificial Sequence: Synthetic oligonucleotide
  misc_feature 1..20: note = Target: FXN; (-) strand; PAM type: NRG; PAM sequence: TAG
  source 1..20: mol_type = other DNA
tacaatgtaaatgctgttaa

SEQ ID NO: 14367 - DNA, 20 bp, synthetic construct
  misc_feature 1..20: note = Description of Artificial Sequence: Synthetic oligonucleotide
  misc_feature 1..20: note = Target: FXN; (-) strand; PAM type: NRG; PAM sequence: TAG
  source 1..20: mol_type = other DNA
tccagattacttataatgcc

SEQ ID NO: 14368 - DNA, 20 bp, synthetic construct
  misc_feature 1..20: note = Description of Artificial Sequence: Synthetic oligonucleotide
  misc_feature 1..20: note = Target: FXN; (-) strand; PAM type: NRG; PAM sequence: CAG
  source 1..20: mol_type = other DNA
tgtatgctttaagtcatctc

SEQ ID NO: 14369 - DNA, 20 bp, synthetic construct
  misc_feature 1..20: note = Description of Artificial Sequence: Synthetic oligonucleotide
  misc_feature 1..20: note = Target: FXN; (-) strand; PAM type: NRG; PAM sequence: AAG
  source 1..20: mol_type = other DNA
cacatccttctgtatgcttt

SEQ ID NO: 14370 - DNA, 20 bp, synthetic construct
  misc_feature 1..20: note = Description of Artificial Sequence: Synthetic oligonucleotide
  misc_feature 1..20: note = Target: FXN; (-) strand; PAM type: NRG; PAM sequence: AGG
  source 1..20: mol_type = other DNA
acgatacatgcatctaacct

SEQ ID NO: 14371 - DNA, 20 bp, synthetic construct
  misc_feature 1..20: note = Description of Artificial Sequence: Synthetic oligonucleotide
  misc_feature 1..20: note = Target: FXN; (-) strand; PAM type: NRG; PAM sequence: TAG
  source 1..20: mol_type = other DNA
tacgatacatgcatctaacc

SEQ ID NO: 14372 - DNA, 20 bp, synthetic construct
  misc_feature 1..20: note = Description of Artificial Sequence: Synthetic oligonucleotide
  misc_feature 1..20: note = Target: FXN; (-) strand; PAM type: NRG; PAM sequence: TGG
  source 1..20: mol_type = other DNA
ctcaagtccctgatatgaaa

SEQ ID NO: 14373 - DNA, 20 bp, synthetic construct
  misc_feature 1..20: note = Description of Artificial Sequence: Synthetic oligonucleotide
  misc_feature 1..20: note = Target: FXN; (-) strand; PAM type: NRG; PAM sequence: AAG
  source 1..20: mol_type = other DNA
accaaaatccgtgggtactc

SEQ ID NO: 14374 - DNA, 20 bp, synthetic construct
  misc_feature 1..20: note = Description of Artificial Sequence: Synthetic oligonucleotide
  misc_feature 1..20: note = Target: FXN; (-) strand; PAM type: NRG; PAM sequence: GGG
  source 1..20: mol_type = other DNA
ctgcagataccaaaatccgt

SEQ ID NO: 14375 - DNA, 20 bp, synthetic construct
  misc_feature 1..20: note = Description of Artificial Sequence: Synthetic oligonucleotide
  misc_feature 1..20: note = Target: FXN; (-) strand; PAM type: NRG; PAM sequence: TGG
  source 1..20: mol_type = other DNA
tctgcagataccaaaatccg

SEQ ID NO: 14376 - DNA, 20 bp, synthetic construct
  misc_feature 1..20: note = Description of Artificial Sequence: Synthetic oligonucleotide
  misc_feature 1..20: note = Target: FXN; (-) strand; PAM type: NRG; PAM sequence: CAG
  source 1..20: mol_type = other DNA
ggaaggggttccaggatctg

SEQ ID NO: 14377 - DNA, 20 bp, synthetic construct
  misc_feature 1..20: note = Description of Artificial Sequence: Synthetic oligonucleotide
  misc_feature 1..20: note = Target: FXN; (-) strand; PAM type: NRG; PAM sequence: AGG
  source 1..20: mol_type = other DNA
atccatagggaaggggttcc

SEQ ID NO: 14378 - DNA, 20 bp, synthetic construct
  misc_feature 1..20: note = Description of Artificial Sequence: Synthetic oligonucleotide
  misc_feature 1..20: note = Target: FXN; (-) strand; PAM type: NRG; PAM sequence: CAG
  source 1..20: mol_type = other DNA
tatccatagggaaggggttc

SEQ ID NO: 14379 - DNA, 20 bp, synthetic construct
  misc_feature 1..20: note = Description of Artificial Sequence: Synthetic oligonucleotide
  misc_feature 1..20: note = Target: FXN; (-) strand; PAM type: NRG; PAM sequence: GGG
  source 1..20: mol_type = other DNA
ccttggtatccatagggaag

SEQ ID NO: 14380 - DNA, 20 bp, synthetic construct
  misc_feature 1..20: note = Description of Artificial Sequence: Synthetic oligonucleotide
  misc_feature 1..20: note = Target: FXN; (-) strand; PAM type: NRG; PAM sequence: GGG
  source 1..20: mol_type = other DNA
tccttggtatccatagggaa

SEQ ID NO: 14381 - DNA, 20 bp, synthetic construct
  misc_feature 1..20: note = Description of Artificial Sequence: Synthetic oligonucleotide
  misc_feature 1..20: note = Target: FXN; (-) strand; PAM type: NRG; PAM sequence: AGG
  source 1..20: mol_type = other DNA
ttccttggtatccataggga

SEQ ID NO: 14382 - DNA, 20 bp, synthetic construct
  misc_feature 1..20: note = Description of Artificial Sequence: Synthetic oligonucleotide
  misc_feature 1..20: note = Target: FXN; (-) strand; PAM type: NRG; PAM sequence: AAG
  source 1..20: mol_type = other DNA
gttccttggtatccataggg

SEQ ID NO: 14383 - DNA, 20 bp, synthetic construct
  misc_feature 1..20: note = Description of Artificial Sequence: Synthetic oligonucleotide
  misc_feature 1..20: note = Target: FXN; (-) strand; PAM type: NRG; PAM sequence: GGG
  source 1..20: mol_type = other DNA
gttgttccttggtatccata

SEQ ID NO: 14384 - DNA, 20 bp, synthetic construct
  misc_feature 1..20: note = Description of Artificial Sequence: Synthetic oligonucleotide
  misc_feature 1..20: note = Target: FXN; (-) strand; PAM type: NRG; PAM sequence: AGG
  source 1..20: mol_type = other DNA
tgttgttccttggtatccat

SEQ ID NO: 14385 - DNA, 20 bp, synthetic construct
  misc_feature 1..20: note = Description of Artificial Sequence: Synthetic oligonucleotide
  misc_feature 1..20: note = Target: FXN; (-) strand; PAM type: NRG; PAM sequence: TAG
  source 1..20: mol_type = other DNA
ctgttgttccttggtatcca

SEQ ID NO: 14386 - DNA, 20 bp, synthetic construct
  misc_feature 1..20: note = Description of Artificial Sequence: Synthetic oligonucleotide
  misc_feature 1..20: note = Target: FXN; (-) strand; PAM type: NRG; PAM sequence: TGG
  source 1..20: mol_type = other DNA
gacccagtgctgttgttcct

SEQ ID NO: 14387 - DNA, 20 bp, synthetic construct
  misc_feature 1..20: note = Description of Artificial Sequence: Synthetic oligonucleotide
  misc_feature 1..20: note = Target: FXN; (-) strand; PAM type: NRG; PAM sequence: CAG
  source 1..20: mol_type = other DNA
catcaccccaaaaggagacc

SEQ ID NO: 14388 - DNA, 20 bp, synthetic construct
  misc_feature 1..20: note = Description of Artificial Sequence: Synthetic oligonucleotide
  misc_feature 1..20: note = Target: FXN; (-) strand; PAM type: NRG; PAM sequence: GAG
  source 1..20: mol_type = other DNA
catctgcatcaccccaaaag

SEQ ID NO: 14389 - DNA, 20 bp, synthetic construct
  misc_feature 1..20: note = Description of Artificial Sequence: Synthetic oligonucleotide
  misc_feature 1..20: note = Target: FXN; (-) strand; PAM type: NRG; PAM sequence: AGG
  source 1..20: mol_type = other DNA
aacatctgcatcaccccaaa

SEQ ID NO: 14390 - DNA, 20 bp, synthetic construct
  misc_feature 1..20: note = Description of Artificial Sequence: Synthetic oligonucleotide
  misc_feature 1..20: note = Target: FXN; (-) strand; PAM type: NRG; PAM sequence: AAG
  source 1..20: mol_type = other DNA
aaacatctgcatcaccccaa

SEQ ID NO: 14391 - DNA, 20 bp, synthetic construct
  misc_feature 1..20: note = Description of Artificial Sequence: Synthetic oligonucleotide
  misc_feature 1..20: note = Target: FXN; (-) strand; PAM type: NRG; PAM sequence: TAG
  source 1..20: mol_type = other DNA
gtgcaaccactacctctgcc

SEQ ID NO: 14392 - DNA, 20 bp, synthetic construct
  misc_feature 1..20: note = Description of Artificial Sequence: Synthetic oligonucleotide
  misc_feature 1..20: note = Target: FXN; (-) strand; PAM type: NRG; PAM sequence: TAG
  source 1..20: mol_type = other DNA
atgaataatttggtggcatt

SEQ ID NO: 14393 - DNA, 20 bp, synthetic construct
  misc_feature 1..20: note = Description of Artificial Sequence: Synthetic oligonucleotide
  misc_feature 1..20: note = Target: FXN; (-) strand; PAM type: NRG; PAM sequence: TGG
  source 1..20: mol_type = other DNA
tttaaaaatgaataatttgg

SEQ ID NO: 14394 - DNA, 20 bp, synthetic construct
  misc_feature 1..20: note = Description of Artificial Sequence: Synthetic oligonucleotide
  misc_feature 1..20: note = Target: FXN; (-) strand; PAM type: NRG; PAM sequence: TGG
  source 1..20: mol_type = other DNA
ccatttaaaaatgaataatt

SEQ ID NO: 14395 - DNA, 20 bp, synthetic construct
  misc_feature 1..20: note = Description of Artificial Sequence: Synthetic oligonucleotide
  misc_feature 1..20: note = Target: FXN; (-) strand; PAM type: NRG; PAM sequence: AGG
  source 1..20: mol_type = other DNA
tataatattattagttgtta

SEQ ID NO: 14396 - DNA, 20 bp, synthetic construct
  misc_feature 1..20: note = Description of Artificial Sequence: Synthetic oligonucleotide
  misc_feature 1..20: note = Target: FXN; (-) strand; PAM type: NRG; PAM sequence: AAG
  source 1..20: mol_type = other DNA
ctataatattattagttgtt

SEQ ID NO: 14397 - DNA, 20 bp, synthetic construct
  misc_feature 1..20: note = Description of Artificial Sequence: Synthetic oligonucleotide
  misc_feature 1..20: note = Target: FXN; (-) strand; PAM type: NRG; PAM sequence: TAG
  source 1..20: mol_type = other DNA
tgccttacctataatattat

SEQ ID NO: 14398 - DNA, 20 bp, synthetic construct
  misc_feature 1..20: note = Description of Artificial Sequence: Synthetic oligonucleotide
  misc_feature 1..20: note = Target: FXN; (-) strand; PAM type: NRG; PAM sequence: CAG
  source 1..20: mol_type = other DNA
ttagggccatttttgtgcta

SEQ ID NO: 14399 - DNA, 20 bp, synthetic construct
  misc_feature 1..20: note = Description of Artificial Sequence: Synthetic oligonucleotide
  misc_feature 1..20: note = Target: FXN; (-) strand; PAM type: NRG; PAM sequence: GGG
  source 1..20: mol_type = other DNA
gagcagtgttttaaaaatta

SEQ ID NO: 14400 - DNA, 20 bp, synthetic construct
  misc_feature 1..20: note = Description of Artificial Sequence: Synthetic oligonucleotide
  misc_feature 1..20: note = Target: FXN; (-) strand; PAM type: NRG; PAM sequence: AGG
  source 1..20: mol_type = other DNA
ggagcagtgttttaaaaatt

SEQ ID NO: 14401 - DNA, 20 bp, synthetic construct
  misc_feature 1..20: note = Description of Artificial Sequence: Synthetic oligonucleotide
  misc_feature 1..20: note = Target: FXN; (-) strand; PAM type: NRG; PAM sequence: TAG
  source 1..20: mol_type = other DNA
tggagcagtgttttaaaaat

SEQ ID NO: 14402 - DNA, 20 bp, synthetic construct
  misc_feature 1..20: note = Description of Artificial Sequence: Synthetic oligonucleotide
  misc_feature 1..20: note = Target: FXN; (-) strand; PAM type: NRG; PAM sequence: CAG
  source 1..20: mol_type = other DNA
tgatacctgctatgctggag

SEQ ID NO: 14403 - DNA, 20 bp, synthetic construct
  misc_feature 1..20: note = Description of Artificial Sequence: Synthetic oligonucleotide
  misc_feature 1..20: note = Target: FXN; (-) strand; PAM type: NRG; PAM sequence: GAG
  source 1..20: mol_type = other DNA
atgtgatacctgctatgctg

SEQ ID NO: 14404 - DNA, 20 bp, synthetic construct
  misc_feature 1..20: note = Description of Artificial Sequence: Synthetic oligonucleotide
  misc_feature 1..20: note = Target: FXN; (-) strand; PAM type: NRG; PAM sequence: TGG
  source 1..20: mol_type = other DNA
acatgtgatacctgctatgc

SEQ ID NO: 14405 - DNA, 20 bp, synthetic construct
  misc_feature 1..20: note = Description of Artificial Sequence: Synthetic oligonucleotide
  misc_feature 1..20: note = Target: FXN; (-) strand; PAM type: NRG; PAM sequence: CAG
  source 1..20: mol_type = other DNA
aggtatcacactttgatctc

SEQ ID NO: 14406 - DNA, 20 bp, synthetic construct
  misc_feature 1..20: note = Description of Artificial Sequence: Synthetic oligonucleotide
  misc_feature 1..20: note = Target: FXN; (-) strand; PAM type: NRG; PAM sequence: AGG
  source 1..20: mol_type = other DNA
acccttactgataagtctcc

SEQ ID NO: 14407 - DNA, 20 bp, synthetic construct
  misc_feature 1..20: note = Description of Artificial Sequence: Synthetic oligonucleotide
  misc_feature 1..20: note = Target: FXN; (-) strand; PAM type: NRG; PAM sequence: CAG
  source 1..20: mol_type = other DNA
gacccttactgataagtctc

SEQ ID NO: 14408 - DNA, 20 bp, synthetic construct
  misc_feature 1..20: note = Description of Artificial Sequence: Synthetic oligonucleotide
  misc_feature 1..20: note = Target: FXN; (-) strand; PAM type: NRG; PAM sequence: AAG
  source 1..20: mol_type = other DNA
aacatttgacccttactgat

SEQ ID NO: 14409 - DNA, 20 bp, synthetic construct
  misc_feature 1..20: note = Description of Artificial Sequence: Synthetic oligonucleotide
  misc_feature 1..20: note = Target: FXN; (-) strand; PAM type: NRG; PAM sequence: AAG
  source 1..20: mol_type = other DNA
atatcttctggaacaattcc

SEQ ID NO: 14410 - DNA, 20 bp, synthetic construct
  misc_feature 1..20: note = Description of Artificial Sequence: Synthetic oligonucleotide
  misc_feature 1..20: note = Target: FXN; (-) strand; PAM type: NRG; PAM sequence: TGG
  source 1..20: mol_type = other DNA
gagttatacgatatatcttc

SEQ ID NO: 14411 - DNA, 20 bp, synthetic construct
  misc_feature 1..20: note = Description of Artificial Sequence: Synthetic oligonucleotide
  misc_feature 1..20: note = Target: FXN; (-) strand; PAM type: NRG; PAM sequence: GAG
  source 1..20: mol_type = other DNA
cttatcttagcatctaagaa

SEQ ID NO: 14412 - DNA, 20 bp, synthetic construct
  misc_feature 1..20: note = Description of Artificial Sequence: Synthetic oligonucleotide
  misc_feature 1..20: note = Target: FXN; (-) strand; PAM type: NRG; PAM sequence: AAG
  source 1..20: mol_type = other DNA
ttcttatcttagcatctaag

SEQ ID NO: 14413 - DNA, 20 bp, synthetic construct
  misc_feature 1..20: note = Description of Artificial Sequence: Synthetic oligonucleotide
  misc_feature 1..20: note = Target: FXN; (-) strand; PAM type: NRG; PAM sequence: AAG
  source 1..20: mol_type = other DNA
gccttcttatcttagcatct

SEQ ID NO: 14414 - DNA, 20 bp, synthetic construct
  misc_feature 1..20: note = Description of Artificial Sequence: Synthetic oligonucleotide
  misc_feature 1..20: note = Target: FXN; (-) strand; PAM type: NRG; PAM sequence: TAG
  source 1..20: mol_type = other DNA
gtatatctgccttcttatct

SEQ ID NO: 14415 - DNA, 20 bp, synthetic construct
  misc_feature 1..20: note = Description of Artificial Sequence: Synthetic oligonucleotide
  misc_feature 1..20: note = Target: FXN; (-) strand; PAM type: NRG; PAM sequence: TAG
  source 1..20: mol_type = other DNA
gaaaataacacaaaatgagc

SEQ ID NO: 14416 - DNA, 20 bp, synthetic construct
  misc_feature 1..20: note = Description of Artificial Sequence: Synthetic oligonucleotide
  misc_feature 1..20: note = Target: FXN; (-) strand; PAM type: NRG; PAM sequence: GAG
  source 1..20: mol_type = other DNA
tctagaaaataacacaaaat

SEQ ID NO: 14417 - DNA, 20 bp, synthetic construct
  misc_feature 1..20: note = Description of Artificial Sequence: Synthetic oligonucleotide
  misc_feature 1..20: note = Target: FXN; (-) strand; PAM type: NRG; PAM sequence: TAG
  source 1..20: mol_type = other DNA
aattgactggagtaaagctc

SEQ ID NO: 14418 - DNA, 20 bp, synthetic construct
  misc_feature 1..20: note = Description of Artificial Sequence: Synthetic oligonucleotide
  misc_feature 1..20: note = Target: FXN; (-) strand; PAM type: NRG; PAM sequence: AAG
  source 1..20: mol_type = other DNA
ccaagaaattgactggagta

SEQ ID NO: 14419 - DNA, 20 bp, synthetic construct
  misc_feature 1..20: note = Description of Artificial Sequence: Synthetic oligonucleotide
  misc_feature 1..20: note = Target: FXN; (-) strand; PAM type: NRG; PAM sequence: GAG
  source 1..20: mol_type = other DNA
tgcccccaagaaattgactg

SEQ ID NO: 14420 - DNA, 20 bp, synthetic construct
  misc_feature 1..20: note = Description of Artificial Sequence: Synthetic oligonucleotide
  misc_feature 1..20: note = Target: FXN; (-) strand; PAM type: NRG; PAM sequence: TGG
  source 1..20: mol_type = other DNA
gctgcccccaagaaattgac

SEQ ID NO: 14421 - DNA, 20 bp, synthetic construct
  misc_feature 1..20: note = Description of Artificial Sequence: Synthetic oligonucleotide
  misc_feature 1..20: note = Target: FXN; (-) strand; PAM type: NRG; PAM sequence: AAG
  source 1..20: mol_type = other DNA
attccacaaatgctgccccc

SEQ ID NO: 14422 - DNA, 20 bp, synthetic construct
  misc_feature 1..20: note = Description of Artificial Sequence: Synthetic oligonucleotide
  misc_feature 1..20: note = Target: FXN; (-) strand; PAM type: NRG; PAM sequence: CAG
  source 1..20: mol_type = other DNA
aattccacagcacagccctt

SEQ ID NO: 14423 - DNA, 20 bp, synthetic construct
  misc_feature 1..20: note = Description of Artificial Sequence: Synthetic oligonucleotide
  misc_feature 1..20: note = Target: FXN; (-) strand; PAM type: NRG; PAM sequence: CAG
  source 1..20: mol_type = other DNA
tgcatagtaattccacagca

SEQ ID NO: 14424 - DNA, 20 bp, synthetic construct
  misc_feature 1..20: note = Description of Artificial Sequence: Synthetic oligonucleotide
  misc_feature 1..20: note = Target: FXN; (-) strand; PAM type: NRG; PAM sequence: CAG
  source 1..20: mol_type = other DNA
acaaatgcatagtaattcca

SEQ ID NO: 14425 - DNA, 20 bp, synthetic construct
  misc_feature 1..20: note = Description of Artificial Sequence: Synthetic oligonucleotide
  misc_feature 1..20: note = Target: FXN; (-) strand; PAM type: NRG; PAM sequence: TAG
  source 1..20: mol_type = other DNA
tggaagacaaaacaaatgca

SEQ ID NO: 14426 - DNA, 20 bp, synthetic construct
  misc_feature 1..20: note = Description of Artificial Sequence: Synthetic oligonucleotide
  misc_feature 1..20: note = Target: FXN; (-) strand; PAM type: NRG; PAM sequence: AAG
  source 1..20: mol_type = other DNA
ataacgcttaggtccactgg

SEQ ID NO: 14427 - DNA, 20 bp, synthetic construct
  misc_feature 1..20: note = Description of Artificial Sequence: Synthetic oligonucleotide
  misc_feature 1..20: note = Target: FXN; (-) strand; PAM type: NRG; PAM sequence: TGG
  source 1..20: mol_type = other DNA
gtcataacgcttaggtccac

SEQ ID NO: 14428 - DNA, 20 bp, synthetic construct
  misc_feature 1..20: note = Description of Artificial Sequence: Synthetic oligonucleotide
  misc_feature 1..20: note = Target: FXN; (-) strand; PAM type: NRG; PAM sequence: AGG
  source 1..20: mol_type = other DNA
ccagtccagtcataacgctt

SEQ ID NO: 14429 - DNA, 20 bp, synthetic construct
  misc_feature 1..20: note = Description of Artificial Sequence: Synthetic oligonucleotide
  misc_feature 1..20: note = Target: FXN; (-) strand; PAM type: NRG; PAM sequence: TAG
  source 1..20: mol_type = other DNA
cccagtccagtcataacgct

SEQ ID NO: 14430 - DNA, 20 bp, synthetic construct
  misc_feature 1..20: note = Description of Artificial Sequence: Synthetic oligonucleotide
  misc_feature 1..20: note = Target: FXN; (-) strand; PAM type: NRG; PAM sequence: CAG
  source 1..20: mol_type = other DNA
acacccagtttttcccagtc

SEQ ID NO: 14431 - DNA, 20 bp, synthetic construct
  misc_feature 1..20: note = Description of Artificial Sequence: Synthetic oligonucleotide
  misc_feature 1..20: note = Target: FXN; (-) strand; PAM type: NRG; PAM sequence: CAG
  source 1..20: mol_type = other DNA
ggagtacacccagtttttcc

SEQ ID NO: 14432 - DNA, 20 bp, synthetic construct
  misc_feature 1..20: note = Description of Artificial Sequence: Synthetic oligonucleotide
  misc_feature 1..20: note = Target: FXN; (-) strand; PAM type: NRG; PAM sequence: CAG
  source 1..20: mol_type = other DNA
cgccgtcgtgggagtacacc

SEQ ID NO: 14433 - DNA, 20 bp, synthetic construct
  misc_feature 1..20: note = Description of Artificial Sequence: Synthetic oligonucleotide
  misc_feature 1..20: note = Target: FXN; (-) strand; PAM type: NRG; PAM sequence: GAG
  source 1..20: mol_type = other DNA
ggagggacacgccgtcgtgg

SEQ ID NO: 14434 - DNA, 20 bp, synthetic construct
  misc_feature 1..20: note = Description of Artificial Sequence: Synthetic oligonucleotide
  misc_feature 1..20: note = Target: FXN; (-) strand; PAM type: NRG; PAM sequence: GGG
  source 1..20: mol_type = other DNA
atggagggacacgccgtcgt

SEQ ID NO: 14435 - DNA, 20 bp, synthetic construct
  misc_feature 1..20: note = Description of Artificial Sequence: Synthetic oligonucleotide
  misc_feature 1..20: note = Target: FXN; (-) strand; PAM type: NRG; PAM sequence: TGG
  source 1..20: mol_type = other DNA
catggagggacacgccgtcg

SEQ ID NO: 14436 - DNA, 20 bp, synthetic construct
  misc_feature 1..20: note = Description of Artificial Sequence: Synthetic oligonucleotide
  misc_feature 1..20: note = Target: FXN; (-) strand; PAM type: NRG; PAM sequence: GGG
  source 1..20: mol_type = other DNA
tgcggccagcagctcatgga

SEQ ID NO: 14437 - DNA, 20 bp, synthetic construct
  misc_feature 1..20: note = Description of Artificial Sequence: Synthetic oligonucleotide
  misc_feature 1..20: note = Target: FXN; (-) strand; PAM type: NRG; PAM sequence: AGG
  source 1..20: mol_type = other DNA
ctgcggccagcagctcatgg

SEQ ID NO: 14438 - DNA, 20 bp, synthetic construct
  misc_feature 1..20: note = Description of Artificial Sequence: Synthetic oligonucleotide
  misc_feature 1..20: note = Target: FXN; (-) strand; PAM type: NRG; PAM sequence: GAG
  source 1..20: mol_type = other DNA
tctgcggccagcagctcatg

SEQ ID NO: 14439 - DNA, 20 bp, synthetic construct
  misc_feature 1..20: note = Description of Artificial Sequence: Synthetic oligonucleotide
  misc_feature 1..20: note = Target: FXN; (-) strand; PAM type: NRG; PAM sequence: TGG
  source 1..20: mol_type = other DNA
gctctgcggccagcagctca

SEQ ID NO: 14440 - DNA, 20 bp, synthetic construct
  misc_feature 1..20: note = Description of Artificial Sequence: Synthetic oligonucleotide
  misc_feature 1..20: note = Target: FXN; (-) strand; PAM type: NRG; PAM sequence: CAG
  source 1..20: mol_type = other DNA
ttagtgagctctgcggccag

SEQ ID NO: 14441 - DNA, 20 bp, synthetic construct
  misc_feature 1..20: note = Description of Artificial Sequence: Synthetic oligonucleotide
  misc_feature 1..20: note = Target: FXN; (-) strand; PAM type: NRG; PAM sequence: CAG
  source 1..20: mol_type = other DNA
gctttagtgagctctgcggc

SEQ ID NO: 14442 - DNA, 20 bp, synthetic construct
  misc_feature 1..20: note = Description of Artificial Sequence: Synthetic oligonucleotide
  misc_feature 1..20: note = Target: FXN; (-) strand; PAM type: NRG; PAM sequence: CGG
  source 1..20: mol_type = other DNA
taaggctttagtgagctctg

SEQ ID NO: 14443 - DNA, 20 bp, synthetic construct
  misc_feature 1..20: note = Description of Artificial Sequence: Synthetic oligonucleotide
  misc_feature 1..20: note = Target: FXN; (-) strand; PAM type: NRG; PAM sequence: GAG
  source 1..20: mol_type = other DNA
ttggtttttaaggctttagt

SEQ ID NO: 14444 - DNA, 20 bp, synthetic construct
  misc_feature 1..20: note = Description of Artificial Sequence: Synthetic oligonucleotide
  misc_feature 1..20: note = Target: FXN; (-) strand; PAM type: NRG; PAM sequence: TAG
  source 1..20: mol_type = other DNA
cagtttggtttttaaggctt

SEQ ID NO: 14445 - DNA, 20 bp, synthetic construct
  misc_feature 1..20: note = Description of Artificial Sequence: Synthetic oligonucleotide
  misc_feature 1..20: note = Target: FXN; (-) strand; PAM type: NRG; PAM sequence: AGG
  source 1..20: mol_type = other DNA
caagtccagtttggttttta

SEQ ID NO: 14446 - DNA, 20 bp, synthetic construct
  misc_feature 1..20: note = Description of Artificial Sequence: Synthetic oligonucleotide
  misc_feature 1..20: note = Target: FXN; (-) strand; PAM type: NRG; PAM sequence: AAG
  source 1..20: mol_type = other DNA
acaagtccagtttggttttt

SEQ ID NO: 14447 - DNA, 20 bp, synthetic construct
  misc_feature 1..20: note = Description of Artificial Sequence: Synthetic oligonucleotide
  misc_feature 1..20: note = Target: FXN; (-) strand; PAM type: NRG; PAM sequence: TGG
  source 1..20: mol_type = other DNA
caaggaagacaagtccagtt

SEQ ID NO: 14448 - DNA, 20 bp, synthetic construct
  misc_feature 1..20: note = Description of Artificial Sequence: Synthetic oligonucleotide
  misc_feature 1..20: note = Target: FXN; (-) strand; PAM type: NRG; PAM sequence: CAG
  source 1..20: mol_type = other DNA
taggccaaggaagacaagtc

SEQ ID NO: 14449 - DNA, 20 bp, synthetic construct
  misc_feature 1..20: note = Description of Artificial Sequence: Synthetic oligonucleotide
  misc_feature 1..20: note = Target: FXN; (-) strand; PAM type: NRG; PAM sequence: AAG
  source 1..20: mol_type = other DNA
cggaataggccaaggaagac

SEQ ID NO: 14450 - DNA, 20 bp, synthetic construct
  misc_feature 1..20: note = Description of Artificial Sequence: Synthetic oligonucleotide
  misc_feature 1..20: note = Target: FXN; (-) strand; PAM type: NRG; PAM sequence: AAG
  source 1..20: mol_type = other DNA
ttttccggaataggccaagg

SEQ ID NO: 14451 - DNA, 20 bp, synthetic construct
  misc_feature 1..20: note = Description of Artificial Sequence: Synthetic oligonucleotide
  misc_feature 1..20: note = Target: FXN; (-) strand; PAM type: NRG; PAM sequence: AGG
  source 1..20: mol_type = other DNA
atcttttccggaataggcca

SEQ ID NO: 14452 - DNA, 20 bp, synthetic construct
  misc_feature 1..20: note = Description of Artificial Sequence: Synthetic oligonucleotide
  misc_feature 1..20: note = Target: FXN; (-) strand; PAM type: NRG; PAM sequence: AAG
  source 1..20: mol_type = other DNA
catcttttccggaataggcc

SEQ ID NO: 14453 - DNA, 20 bp, synthetic construct
  misc_feature 1..20: note = Description of Artificial Sequence: Synthetic oligonucleotide
  misc_feature 1..20: note = Target: FXN; (-) strand; PAM type: NRG; PAM sequence: AGG
  source 1..20: mol_type = other DNA
tcaagcatcttttccggaat

SEQ ID NO: 14454 - DNA, 20 bp, synthetic construct
  misc_feature 1..20: note = Description of Artificial Sequence: Synthetic oligonucleotide
  misc_feature 1..20: note = Target: FXN; (-) strand; PAM type: NRG; PAM sequence: TAG
  source 1..20: mol_type = other DNA
atcaagcatcttttccggaa

SEQ ID NO: 14455 - DNA, 20 bp, synthetic construct
  misc_feature 1..20: note = Description of Artificial Sequence: Synthetic oligonucleotide
  misc_feature 1..20: note = Target: FXN; (-) strand; PAM type: NRG; PAM sequence: CGG
  source 1..20: mol_type = other DNA
tgggcatcaagcatcttttc

SEQ ID NO: 14456 - DNA, 20 bp, synthetic construct
  misc_feature 1..20: note = Description of Artificial Sequence: Synthetic oligonucleotide
  misc_feature 1..20: note = Target: FXN; (-) strand; PAM type: NRG; PAM sequence: AAG
  source 1..20: mol_type = other DNA
ttaaaacggggctgggcatc

SEQ ID NO: 14457 - DNA, 20 bp, synthetic construct
  misc_feature 1..20: note = Description of Artificial Sequence: Synthetic oligonucleotide
  misc_feature 1..20: note = Target: FXN; (-) strand; PAM type: NRG; PAM sequence: GGG
  source 1..20: mol_type = other DNA
aatgtccttaaaacggggct

SEQ ID NO: 14458 - DNA, 20 bp, synthetic construct
  misc_feature 1..20: note = Description of Artificial Sequence: Synthetic oligonucleotide
  misc_feature 1..20: note = Target: FXN; (-) strand; PAM type: NRG; PAM sequence: TGG
  source 1..20: mol_type = other DNA
taatgtccttaaaacggggc

SEQ ID NO: 14459 - DNA, 20 bp, synthetic construct
  misc_feature 1..20: note = Description of Artificial Sequence: Synthetic oligonucleotide
  misc_feature 1..20: note = Target: FXN; (-) strand; PAM type: NRG; PAM sequence: GGG
  source 1..20: mol_type = other DNA
cttttaatgtccttaaaacg

SEQ ID NO: 14460 - DNA, 20 bp, synthetic construct
  misc_feature 1..20: note = Description of Artificial Sequence: Synthetic oligonucleotide
  misc_feature 1..20: note = Target: FXN; (-) strand; PAM type: NRG; PAM sequence: GGG
  source 1..20: mol_type = other DNA
gcttttaatgtccttaaaac

SEQ ID NO: 14461 - DNA, 20 bp, synthetic construct
  misc_feature 1..20: note = Description of Artificial Sequence: Synthetic oligonucleotide
  misc_feature 1..20: note = Target: FXN; (-) strand; PAM type: NRG; PAM sequence: CGG
  source 1..20: mol_type = other DNA
agcttttaatgtccttaaaa

SEQ ID NO: 14462 - DNA, 20 bp, synthetic construct
  misc_feature 1..20: note = Description of Artificial Sequence: Synthetic oligonucleotide
  misc_feature 1..20: note = Target: FXN; (-) strand; PAM type: NRG; PAM sequence: TAG
  source 1..20: mol_type = other DNA
aagctggggtcttggcctga

SEQ ID NO: 14463 - DNA, 20 bp, synthetic construct
  misc_feature 1..20: note = Description of Artificial Sequence: Synthetic oligonucleotide
  misc_feature 1..20: note = Target: FXN; (-) strand; PAM type: NRG; PAM sequence: TGG
  source 1..20: mol_type = other DNA
gcataatgaagctggggtct

SEQ ID NO: 14464 - DNA, 20 bp, synthetic construct
  misc_feature 1..20: note = Description of Artificial Sequence: Synthetic oligonucleotide
  misc_feature 1..20: note = Target: FXN; (-) strand; PAM type: NRG; PAM sequence: GGG
  source 1..20: mol_type = other DNA
tcagctgcataatgaagctg

SEQ ID NO: 14465 - DNA, 20 bp, synthetic construct
  misc_feature 1..20: note = Description of Artificial Sequence: Synthetic oligonucleotide
  misc_feature 1..20: note = Target: FXN; (-) strand; PAM type: NRG; PAM sequence: GGG
  source 1..20: mol_type = other DNA
ctcagctgcataatgaagct

SEQ ID NO: 14466 - DNA, 20 bp, synthetic construct
  misc_feature 1..20: note = Description of Artificial Sequence: Synthetic oligonucleotide
  misc_feature 1..20: note = Target: FXN; (-) strand; PAM type: NRG; PAM sequence: TGG
  source 1..20: mol_type = other DNA
cctcagctgcataatgaagc

SEQ ID NO: 14467 - DNA, 20 bp, synthetic construct
  misc_feature 1..20: note = Description of Artificial Sequence: Synthetic oligonucleotide
  misc_feature 1..20: note = Target: FXN; (-) strand; PAM type: NRG; PAM sequence: AAG
  source 1..20: mol_type = other DNA
cagacctcagctgcataatg

SEQ ID NO: 14468 - DNA, 20 bp, synthetic construct
  misc_feature 1..20: note = Description of Artificial Sequence: Synthetic oligonucleotide
  misc_feature 1..20: note = Target: FXN; (-) strand; PAM type: NRG; PAM sequence: CAG
  source 1..20: mol_type = other DNA
caacaacaaaaaacagacct

SEQ ID NO: 14469 - DNA, 20 bp, synthetic construct
  misc_feature 1..20: note = Description of Artificial Sequence: Synthetic oligonucleotide
  misc_feature 1..20: note = Target: FXN; (-) strand; PAM type: NRG; PAM sequence: CAG
  source 1..20: mol_type = other DNA
acaacaacaacaacaaaaaa

SEQ ID NO: 14470 - DNA, 20 bp, synthetic construct
  misc_feature 1..20: note = Description of Artificial Sequence: Synthetic oligonucleotide
  misc_feature 1..20: note = Target: FXN; (-) strand; PAM type: NRG; PAM sequence: AGG
  source 1..20: mol_type = other DNA
gcccaactgtcctcaaaagc

SEQ ID NO: 14471 - DNA, 20 bp, synthetic construct
  misc_feature 1..20: note = Description of Artificial Sequence: Synthetic oligonucleotide
  misc_feature 1..20: note = Target: FXN; (-) strand; PAM type: NRG; PAM sequence: CAG
  source 1..20: mol_type = other DNA
agcccaactgtcctcaaaag

SEQ ID NO: 14472 - DNA, 20 bp, synthetic construct
  misc_feature 1..20: note = Description of Artificial Sequence: Synthetic oligonucleotide
  misc_feature 1..20: note = Target: FXN; (-) strand; PAM type: NRG; PAM sequence: AAG
  source 1..20: mol_type = other DNA
catagcccaactgtcctcaa

SEQ ID NO: 14473 - DNA, 20 bp, synthetic construct
  misc_feature 1..20: note = Description of Artificial Sequence: Synthetic oligonucleotide
  misc_feature 1..20: note = Target: FXN; (-) strand; PAM type: NRG; PAM sequence: TAG
  source 1..20: mol_type = other DNA
ttctacagagctgtgacaca

SEQ ID NO: 14474 - DNA, 20 bp, synthetic construct
  misc_feature 1..20: note = Description of Artificial Sequence: Synthetic oligonucleotide
  misc_feature 1..20: note = Target: FXN; (-) strand; PAM type: NRG; PAM sequence: GAG
  source 1..20: mol_type = other DNA
ggcaacacattctttctaca

SEQ ID NO: 14475 - DNA, 20 bp, synthetic construct
  misc_feature 1..20: note = Description of Artificial Sequence: Synthetic oligonucleotide
  misc_feature 1..20: note = Target: FXN; (-) strand; PAM type: NRG; PAM sequence: CAG
  source 1..20: mol_type = other DNA
gaggcaacacattctttcta

SEQ ID NO: 14476 - DNA, 20 bp, synthetic construct
  misc_feature 1..20: note = Description of Artificial Sequence: Synthetic oligonucleotide
  misc_feature 1..20: note = Target: FXN; (-) strand; PAM type: NRG; PAM sequence: AGG
  source 1..20: mol_type = other DNA
gaacttgggggcaaggtagg

SEQ ID NO: 14477 - DNA, 20 bp, synthetic construct
  misc_feature 1..20: note = Description of Artificial Sequence: Synthetic oligonucleotide
  misc_feature 1..20: note = Target: FXN; (-) strand; PAM type: NRG; PAM sequence: GAG
  source 1..20: mol_type = other DNA
agaacttgggggcaaggtag

SEQ ID NO: 14478 - DNA, 20 bp, synthetic construct
  misc_feature 1..20: note = Description of Artificial Sequence: Synthetic oligonucleotide
  misc_feature 1..20: note = Target: FXN; (-) strand; PAM type: NRG; PAM sequence: AGG
  source 1..20: mol_type = other DNA
tcagaacttgggggcaaggt

SEQ ID NO: 14479 - DNA, 20 bp, synthetic construct
  misc_feature 1..20: note = Description of Artificial Sequence: Synthetic oligonucleotide
  misc_feature 1..20: note = Target: FXN; (-) strand; PAM type: NRG; PAM sequence: TAG
  source 1..20: mol_type = other DNA
atcagaacttgggggcaagg

SEQ ID NO: 14480 - DNA, 20 bp, synthetic construct
  misc_feature 1..20: note = Description of Artificial Sequence: Synthetic oligonucleotide
  misc_feature 1..20: note = Target: FXN; (-) strand; PAM type: NRG; PAM sequence: AGG
  source 1..20: mol_type = other DNA
aaaatcagaacttgggggca

SEQ ID NO: 14481 - DNA, 20 bp, synthetic construct
  misc_feature 1..20: note = Description of Artificial Sequence: Synthetic oligonucleotide
  misc_feature 1..20: note = Target: FXN; (-) strand; PAM type: NRG; PAM sequence: AAG
  source 1..20: mol_type = other DNA
aaaaatcagaacttgggggc

SEQ ID NO: 14482 - DNA, 20 bp, synthetic construct
  misc_feature 1..20: note = Description of Artificial Sequence: Synthetic oligonucleotide
  misc_feature 1..20: note = Target: FXN; (-) strand; PAM type: NRG; PAM sequence: GGG
  source 1..20: mol_type = other DNA
aattaaaaatcagaacttgg

SEQ ID NO: 14483 - DNA, 20 bp, synthetic construct
  misc_feature 1..20: note = Description of Artificial Sequence: Synthetic oligonucleotide
  misc_feature 1..20: note = Target: FXN; (-) strand; PAM type: NRG; PAM sequence: GGG
  source 1..20: mol_type = other DNA
aaattaaaaatcagaacttg

SEQ ID NO: 14484 - DNA, 20 bp, synthetic construct
  misc_feature 1..20: note = Description of Artificial Sequence: Synthetic oligonucleotide
  misc_feature 1..20: note = Target: FXN; (-) strand; PAM type: NRG; PAM sequence: GGG
  source 1..20: mol_type = other DNA
gaaattaaaaatcagaactt

SEQ ID NO: 14485 - DNA, 20 bp, synthetic construct
  misc_feature 1..20: note = Description of Artificial Sequence: Synthetic oligonucleotide
  misc_feature 1..20: note = Target: FXN; (-) strand; PAM type: NRG; PAM sequence: TGG
  source 1..20: mol_type = other DNA
agaaattaaaaatcagaact

SEQ ID NO: 14486 - DNA, 20 bp, synthetic construct
  misc_feature 1..20: note = Description of Artificial Sequence: Synthetic oligonucleotide
  misc_feature 1..20: note = Target: FXN; (-) strand; PAM type: NRG; PAM sequence: CAG
  source 1..20: mol_type = other DNA
cttccatagaaattaaaaat

SEQ ID NO: 14487 - DNA, 20 bp, synthetic construct
  misc_feature 1..20: note = Description of Artificial Sequence: Synthetic oligonucleotide
  misc_feature 1..20: note = Target: FXN; (-) strand; PAM type: NRG; PAM sequence: TAG
  source 1..20: mol_type = other DNA
acaatccaaaaaatcttcca

SEQ ID NO: 14488 - DNA, 20 bp, synthetic construct
  misc_feature 1..20: note = Description of Artificial Sequence: Synthetic oligonucleotide
  misc_feature 1..20: note = Target: FXN; (-) strand; PAM type: NRG; PAM sequence: AGG
  source 1..20: mol_type = other DNA
taaggggtatcatgtgaggg

SEQ ID NO: 14489 - DNA, 20 bp, synthetic construct
  misc_feature 1..20: note = Description of Artificial Sequence: Synthetic oligonucleotide
  misc_feature 1..20: note = Target: FXN; (-) strand; PAM type: NRG; PAM sequence: GAG
  source 1..20: mol_type = other DNA
ataaggggtatcatgtgagg

SEQ ID NO: 14490 - DNA, 20 bp, synthetic construct
  misc_feature 1..20: note = Description of Artificial Sequence: Synthetic oligonucleotide
  misc_feature 1..20: note = Target: FXN; (-) strand; PAM type: NRG; PAM sequence: GGG
  source 1..20: mol_type = other DNA
agataaggggtatcatgtga

SEQ ID NO: 14491 - DNA, 20 bp, synthetic construct
  misc_feature 1..20: note = Description of Artificial Sequence: Synthetic oligonucleotide
  misc_feature 1..20: note = Target: FXN; (-) strand; PAM type: NRG; PAM sequence: AGG
  source 1..20: mol_type = other DNA
aagataaggggtatcatgtg

SEQ ID NO: 14492 - DNA, 20 bp, synthetic construct
  misc_feature 1..20: note = Description of Artificial Sequence: Synthetic oligonucleotide
  misc_feature 1..20: note = Target: FXN; (-) strand; PAM type: NRG; PAM sequence: GAG
  source 1..20: mol_type = other DNA
aaagataaggggtatcatgt

SEQ ID NO: 14493 - DNA, 20 bp, synthetic construct
  misc_feature 1..20: note = Description of Artificial Sequence: Synthetic oligonucleotide
  misc_feature 1..20: note = Target: FXN; (-) strand; PAM type: NRG; PAM sequence: GGG
  source 1..20: mol_type = other DNA
aagacattataaaagataag

SEQ ID NO: 14494 - DNA, 20 bp, synthetic construct
  misc_feature 1..20: note = Description of Artificial Sequence: Synthetic oligonucleotide
  misc_feature 1..20: note = Target: FXN; (-) strand; PAM type: NRG; PAM sequence: GGG
  source 1..20: mol_type = other DNA
taagacattataaaagataa

SEQ ID NO: 14495 - DNA, 20 bp, synthetic construct
  misc_feature 1..20: note = Description of Artificial Sequence: Synthetic oligonucleotide
  misc_feature 1..20: note = Target: FXN; (-) strand; PAM type: NRG; PAM sequence: AGG
  source 1..20: mol_type = other DNA
ataagacattataaaagata

SEQ ID NO: 14496 - DNA, 20 bp, synthetic construct
  misc_feature 1..20: note = Description of Artificial Sequence: Synthetic oligonucleotide
  misc_feature 1..20: note = Target: FXN; (-) strand; PAM type: NRG; PAM sequence: AAG
  source 1..20: mol_type = other DNA
cataagacattataaaagat

SEQ ID NO: 14497 - DNA, 20 bp, synthetic construct
  misc_feature 1..20: note = Description of Artificial Sequence: Synthetic oligonucleotide
  misc_feature 1..20: note = Target: FXN; (-) strand; PAM type: NRG; PAM sequence: AAG
  source 1..20: mol_type = other DNA
ataggcataagacattataa

SEQ ID NO: 14498 - DNA, 20 bp, synthetic construct
  misc_feature 1..20: note = Description of Artificial Sequence: Synthetic oligonucleotide
  misc_feature 1..20: note = Target: FXN; (-) strand; PAM type: NRG; PAM sequence: AAG
  source 1..20: mol_type = other DNA
ttatattcaggtataggcat

SEQ ID NO: 14499 - DNA, 20 bp, synthetic construct
  misc_feature 1..20: note = Description of Artificial Sequence: Synthetic oligonucleotide
  misc_feature 1..20: note = Target: FXN; (-) strand; PAM type: NRG; PAM sequence: AGG
  source 1..20: mol_type = other DNA
aggttgttatattcaggtat

SEQ ID NO: 14500 - DNA, 20 bp, synthetic construct
  misc_feature 1..20: note = Description of Artificial Sequence: Synthetic oligonucleotide
  misc_feature 1..20: note = Target: FXN; (-) strand; PAM type: NRG; PAM sequence: TAG
  source 1..20: mol_type = other DNA
aaggttgttatattcaggta

SEQ ID NO: 14501 - DNA, 20 bp, synthetic construct
  misc_feature 1..20: note = Description of Artificial Sequence: Synthetic oligonucleotide
  misc_feature 1..20: note = Target: FXN; (-) strand; PAM type: NRG; PAM sequence: AGG
  source 1..20: mol_type = other DNA
ttttaaaggttgttatattc

SEQ ID NO: 14502 - DNA, 20 bp, synthetic construct
  misc_feature 1..20: note = Description of Artificial Sequence: Synthetic oligonucleotide
  misc_feature 1..20: note = Target: FXN; (-) strand; PAM type: NRG; PAM sequence: CAG
  source 1..20: mol_type = other DNA
tttttaaaggttgttatatt

SEQ ID NO: 14503 - DNA, 20 bp, synthetic construct
  misc_feature 1..20: note = Description of Artificial Sequence: Synthetic oligonucleotide
  misc_feature 1..20: note = Target: FXN; (-) strand; PAM type: NRG; PAM sequence: AGG
  source 1..20: mol_type = other DNA
ttattattttgcttttttaa

SEQ ID NO: 14504 - DNA, 20 bp, synthetic construct
  misc_feature 1..20: note = Description of Artificial Sequence: Synthetic oligonucleotide
  misc_feature 1..20: note = Target: FXN; (-) strand; PAM type: NRG; PAM sequence: AAG
  source 1..20: mol_type = other DNA
cttattattttgctttttta

SEQ ID NO: 14505 - DNA, 20 bp, synthetic construct
  misc_feature 1..20: note = Description of Artificial Sequence: Synthetic oligonucleotide
  misc_feature 1..20: note = Target: FXN; (-) strand; PAM type: NRG; PAM sequence: TGG
  source 1..20: mol_type = other DNA
agacaattcattttccctcc

SEQ ID NO: 14506 - DNA, 20 bp, synthetic construct
  misc_feature 1..20: note = Description of Artificial Sequence: Synthetic oligonucleotide
  misc_feature 1..20: note = Target: FXN; (-) strand; PAM type: NRG; PAM sequence: AAG
  source 1..20: mol_type = other DNA
ccttcaaagaatgaagagtg

SEQ ID NO: 14507 - DNA, 20 bp, synthetic construct
  misc_feature 1..20: note = Description of Artificial Sequence: Synthetic oligonucleotide
  misc_feature 1..20: note = Target: FXN; (-) strand; PAM type: NRG; PAM sequence: GAG
  source 1..20: mol_type = other DNA
taaatccttcaaagaatgaa

SEQ ID NO: 14508 - DNA, 20 bp, synthetic construct
  misc_feature 1..20: note = Description of Artificial Sequence: Synthetic oligonucleotide
  misc_feature 1..20: note = Target: FXN; (-) strand; PAM type: NRG; PAM sequence: AAG
  source 1..20: mol_type = other DNA
agtaaatccttcaaagaatg

SEQ ID NO: 14509 - DNA, 20 bp, synthetic construct
  misc_feature 1..20: note = Description of Artificial Sequence: Synthetic oligonucleotide
  misc_feature 1..20: note = Target: FXN; (-) strand; PAM type: NRG; PAM sequence: AAG
  source 1..20: mol_type = other DNA
ttcttgcagtaaatccttca

SEQ ID NO: 14510 - DNA, 20 bp, synthetic construct
  misc_feature 1..20: note = Description of Artificial Sequence: Synthetic oligonucleotide
  misc_feature 1..20: note = Target: FXN; (-) strand; PAM type: NRG; PAM sequence: CAG
  source 1..20: mol_type = other DNA
tgctcttcatgtacttcttg

SEQ ID NO: 14511 - DNA, 20 bp, synthetic construct
  misc_feature 1..20: note = Description of Artificial Sequence: Synthetic oligonucleotide
  misc_feature 1..20: note = Target: FXN; (-) strand; PAM type: NRG; PAM sequence: CAG
  source 1..20: mol_type = other DNA
agaacagtgagcaggttgac

SEQ ID NO: 14512 - DNA, 20 bp, synthetic construct
  misc_feature 1..20: note = Description of Artificial Sequence: Synthetic oligonucleotide
  misc_feature 1..20: note = Target: FXN; (-) strand; PAM type: NRG; PAM sequence: AGG
  source 1..20: mol_type = other DNA
ttggagatagaacagtgagc

SEQ ID NO: 14513 - DNA, 20 bp, synthetic construct
  misc_feature 1..20: note = Description of Artificial Sequence: Synthetic oligonucleotide
  misc_feature 1..20: note = Target: FXN; (-) strand; PAM type: NRG; PAM sequence: CAG
  source 1..20: mol_type = other DNA
tttggagatagaacagtgag

SEQ ID NO: 14514 - DNA, 20 bp, synthetic construct
  misc_feature 1..20: note = Description of Artificial Sequence: Synthetic oligonucleotide
  misc_feature 1..20: note = Target: FXN; (-) strand; PAM type: NRG; PAM sequence: GAG
  source 1..20: mol_type = other DNA
tcatttggagatagaacagt

SEQ ID NO: 14515 - DNA, 20 bp, synthetic construct
  misc_feature 1..20: note = Description of Artificial Sequence: Synthetic oligonucleotide
  misc_feature 1..20: note = Target: FXN; (-) strand; PAM type: NRG; PAM sequence: CAG
  source 1..20: mol_type = other DNA
tgtctcatttggagatagaa

SEQ ID NO: 14516 - DNA, 20 bp, synthetic construct
  misc_feature 1..20: note = Description of Artificial Sequence: Synthetic oligonucleotide
  misc_feature 1..20: note = Target: FXN; (-) strand; PAM type: NRG; PAM sequence: TAG
  source 1..20: mol_type = other DNA
taatgtgtctcatttggaga

SEQ ID NO: 14517 - DNA, 20 bp, synthetic construct
  misc_feature 1..20: note = Description of Artificial Sequence: Synthetic oligonucleotide
  misc_feature 1..20: note = Target: FXN; (-) strand; PAM type: NRG; PAM sequence: GAG
  source 1..20: mol_type = other DNA
cctttaatgtgtctcatttg

SEQ ID NO: 14518 - DNA, 20 bp, synthetic construct
  misc_feature 1..20: note = Description of Artificial Sequence: Synthetic oligonucleotide
  misc_feature 1..20: note = Target: FXN; (-) strand; PAM type: NRG; PAM sequence: TGG
  source 1..20: mol_type = other DNA
accctttaatgtgtctcatt

SEQ ID NO: 14519 - DNA, 20 bp, synthetic construct
  misc_feature 1..20: note = Description of Artificial Sequence: Synthetic oligonucleotide
  misc_feature 1..20: note = Target: FXN; (-) strand; PAM type: NRG; PAM sequence: AGG
  source 1..20: mol_type = other DNA
agaagcctgaaaacatttgt

SEQ ID NO: 14520 - DNA, 20 bp, synthetic construct
  misc_feature 1..20: note = Description of Artificial Sequence: Synthetic oligonucleotide
  misc_feature 1..20: note = Target: FXN; (-) strand; PAM type: NRG; PAM sequence: TAG
  source 1..20: mol_type = other DNA
aagaagcctgaaaacatttg

SEQ ID NO: 14521 - DNA, 20 bp, synthetic construct
  misc_feature 1..20: note = Description of Artificial Sequence: Synthetic oligonucleotide
  misc_feature 1..20: note = Target: FXN; (-) strand; PAM type: NRG; PAM sequence: AAG
  source 1..20: mol_type = other DNA
aagtgcttacactttgaaag

SEQ ID NO: 14522 - DNA, 20 bp, synthetic construct
  misc_feature 1..20: note = Description of Artificial Sequence: Synthetic oligonucleotide
  misc_feature 1..20: note = Target: FXN; (-) strand; PAM type: NRG; PAM sequence: AAG
  source 1..20: mol_type = other DNA
cagaagtgcttacactttga

SEQ ID NO: 14523 - DNA, 20 bp, synthetic construct
  misc_feature 1..20: note = Description of Artificial Sequence: Synthetic oligonucleotide
  misc_feature 1..20: note = Target: FXN; (-) strand; PAM type: NRG; PAM sequence: AAG
  source 1..20: mol_type = other DNA
ttcaatgctaaagagctcag

SEQ ID NO: 14524 - DNA, 20 bp, synthetic construct
  misc_feature 1..20: note = Description of Artificial Sequence: Synthetic oligonucleotide
  misc_feature 1..20: note = Target: FXN; (-) strand; PAM type: NRG; PAM sequence: CAG
  source 1..20: mol_type = other DNA
cacttcaatgctaaagagct

SEQ ID NO: 14525 - DNA, 20 bp, synthetic construct
  misc_feature 1..20: note = Description of Artificial Sequence: Synthetic oligonucleotide
  misc_feature 1..20: note = Target: FXN; (-) strand; PAM type: NRG; PAM sequence: GAG
  source 1..20: mol_type = other DNA
ttcgacacttcaatgctaaa

SEQ ID NO: 14526 - DNA, 20 bp, synthetic construct
  misc_feature 1..20: note = Description of Artificial Sequence: Synthetic oligonucleotide
  misc_feature 1..20: note = Target: FXN; (-) strand; PAM type: NRG; PAM sequence: AAG
  source 1..20: mol_type = other DNA
ctttcgacacttcaatgcta

SEQ ID NO: 14527 - DNA, 20 bp, synthetic construct
  misc_feature 1..20: note = Description of Artificial Sequence: Synthetic oligonucleotide
  misc_feature 1..20: note = Target: FXN; (-) strand; PAM type: NRG; PAM sequence: GAG
  source 1..20: mol_type = other DNA
aagaaatgatcttcccgtgt

SEQ ID NO: 14528 - DNA, 20 bp, synthetic construct
  misc_feature 1..20: note = Description of Artificial Sequence: Synthetic oligonucleotide
  misc_feature 1..20: note = Target: FXN; (-) strand; PAM type: NRG; PAM sequence: AAG
  source 1..20: mol_type = other DNA
ggcagtcacagagcacaaat

SEQ ID NO: 14529 - DNA, 20 bp, synthetic construct
  misc_feature 1..20: note = Description of Artificial Sequence: Synthetic oligonucleotide
  misc_feature 1..20: note = Target: FXN; (-) strand; PAM type: NRG; PAM sequence: GAG
  source 1..20: mol_type = other DNA
gccacaccttggcagtcaca

SEQ ID NO: 14530 - DNA, 20 bp, synthetic construct
  misc_feature 1..20: note = Description of Artificial Sequence: Synthetic oligonucleotide
  misc_feature 1..20: note = Target: FXN; (-) strand; PAM type: NRG; PAM sequence: CAG
  source 1..20: mol_type = other DNA
aggccacaccttggcagtca

SEQ ID NO: 14531 - DNA, 20 bp, synthetic construct
  misc_feature 1..20: note = Description of Artificial Sequence: Synthetic oligonucleotide
  misc_feature 1..20: note = Target: FXN; (-) strand; PAM type: NRG; PAM sequence: CAG
  source 1..20: mol_type = other DNA
cagtgcaggccacaccttgg

SEQ ID NO: 14532 - DNA, 20 bp, synthetic construct
  misc_feature 1..20: note = Description of Artificial Sequence: Synthetic oligonucleotide
  misc_feature 1..20: note = Target: FXN; (-) strand; PAM type: NRG; PAM sequence: TGG
  source 1..20: mol_type = other DNA
acccagtgcaggccacacct

SEQ ID NO: 14533 - DNA, 20 bp, synthetic construct
  misc_feature 1..20: note = Description of Artificial Sequence: Synthetic oligonucleotide
  misc_feature 1..20: note = Target: FXN; (-) strand; PAM type: NRG; PAM sequence: AGG
  source 1..20: mol_type = other DNA
ctccctggacaacccagtgc

SEQ ID NO: 14534 - DNA, 20 bp, synthetic construct
  misc_feature 1..20: note = Description of Artificial Sequence: Synthetic oligonucleotide
  misc_feature 1..20: note = Target: FXN; (-) strand; PAM type: NRG; PAM sequence: CAG
  source 1..20: mol_type = other DNA
tctccctggacaacccagtg

SEQ ID NO: 14535 - DNA, 20 bp, synthetic construct
  misc_feature 1..20: note = Description of Artificial Sequence: Synthetic oligonucleotide
  misc_feature 1..20: note = Target: FXN; (-) strand; PAM type: NRG; PAM sequence: CAG
  source 1..20: mol_type = other DNA
ctaggtctccctggacaacc

SEQ ID NO: 14536 - DNA, 20 bp, synthetic construct
  misc_feature 1..20: note = Description of Artificial Sequence: Synthetic oligonucleotide
  misc_feature 1..20: note = Target: FXN; (-) strand; PAM type: NRG; PAM sequence: TGG
  source 1..20: mol_type = other DNA
gaaacagcactaggtctccc

SEQ ID NO: 14537 - DNA, 20 bp, synthetic construct
  misc_feature 1..20: note = Description of Artificial Sequence: Synthetic oligonucleotide
  misc_feature 1..20: note = Target: FXN; (-) strand; PAM type: NRG; PAM sequence: AGG
  source 1..20: mol_type = other DNA
tatgtgggagaaacagcact

SEQ ID NO: 14538 - DNA, 20 bp, synthetic construct
  misc_feature 1..20: note = Description of Artificial Sequence: Synthetic oligonucleotide
  misc_feature 1..20: note = Target: FXN; (-) strand; PAM type: NRG; PAM sequence: TAG
  source 1..20: mol_type = other DNA
atatgtgggagaaacagcac

SEQ ID NO: 14539 - DNA, 20 bp, synthetic construct
  misc_feature 1..20: note = Description of Artificial Sequence: Synthetic oligonucleotide
  misc_feature 1..20: note = Target: FXN; (-) strand; PAM type: NRG; PAM sequence: CAG
  source 1..20: mol_type = other DNA
atgtgaatatgtgggagaaa

SEQ ID NO: 14540 - DNA, 20 bp, synthetic construct
  misc_feature 1..20: note = Description of Artificial Sequence: Synthetic oligonucleotide
  misc_feature 1..20: note = Target: FXN; (-) strand; PAM type: NRG; PAM sequence: GAG
  source 1..20: mol_type = other DNA
acacgtatgtgaatatgtgg

SEQ ID NO: 14541 - DNA, 20 bp, synthetic construct
  misc_feature 1..20: note = Description of Artificial Sequence: Synthetic oligonucleotide
  misc_feature 1..20: note = Target: FXN; (-) strand; PAM type: NRG; PAM sequence: GGG
  source 1..20: mol_type = other DNA
agacacgtatgtgaatatgt

SEQ ID NO: 14542 - DNA, 20 bp, synthetic construct
  misc_feature 1..20: note = Description of Artificial Sequence: Synthetic oligonucleotide
  misc_feature 1..20: note = Target: FXN; (-) strand; PAM type: NRG; PAM sequence: TGG
  source 1..20: mol_type = other DNA
cagacacgtatgtgaatatg

SEQ ID NO: 14543 - DNA, 20 bp, synthetic construct
  misc_feature 1..20: note = Description of Artificial Sequence: Synthetic oligonucleotide
  misc_feature 1..20: note = Target: FXN; (-) strand; PAM type: NRG; PAM sequence: CAG
  source 1..20: mol_type = other DNA
tgaaaaaatatatatacaca

SEQ ID NO: 14544 - DNA, 20 bp, synthetic construct
  misc_feature 1..20: note = Description of Artificial Sequence: Synthetic oligonucleotide
  misc_feature 1..20: note = Target: FXN; (-) strand; PAM type: NRG; PAM sequence: CAG
  source 1..20: mol_type = other DNA
gattttttgcattcttgtag

SEQ ID NO: 14545 - DNA, 20 bp, synthetic construct
  misc_feature 1..20: note = Description of Artificial Sequence: Synthetic oligonucleotide
  misc_feature 1..20: note = Target: FXN; (-) strand; PAM type: NRG; PAM sequence: TAG
  source 1..20: mol_type = other DNA
gaagattttttgcattcttg

SEQ ID NO: 14546 - DNA, 20 bp, synthetic construct
  misc_feature 1..20: note = Description of Artificial Sequence: Synthetic oligonucleotide
  misc_feature 1..20: note = Target: FXN; (-) strand; PAM type: NRG; PAM sequence: AAG
  source 1..20: mol_type = other DNA
tcctcttttcttgtctttgg

SEQ ID NO: 14547 - DNA, 20 bp, synthetic construct
  misc_feature 1..20: note = Description of Artificial Sequence: Synthetic oligonucleotide
  misc_feature 1..20: note = Target: FXN; (-) strand; PAM type: NRG; PAM sequence: TGG
  source 1..20: mol_type = other DNA
ttttcctcttttcttgtctt

SEQ ID NO: 14548 - DNA, 20 bp, synthetic construct
  misc_feature 1..20: note = Description of Artificial Sequence: Synthetic oligonucleotide
  misc_feature 1..20: note = Target: FXN; (-) strand; PAM type: NRG; PAM sequence: CGG
  source 1..20: mol_type = other DNA
catcactcagctcatgaaaa

SEQ ID NO: 14549 - DNA, 20 bp, synthetic construct
  misc_feature 1..20: note = Description of Artificial Sequence: Synthetic oligonucleotide
  misc_feature 1..20: note = Target: FXN; (-) strand; PAM type: NRG; PAM sequence: CAG
  source 1..20: mol_type = other DNA
gtttgttacgctacatcact

SEQ ID NO: 14550 - DNA, 20 bp, synthetic construct
  misc_feature 1..20: note = Description of Artificial Sequence: Synthetic oligonucleotide
  misc_feature 1..20: note = Target: FXN; (-) strand; PAM type: NRG; PAM sequence: CAG
  source 1..20: mol_type = other DNA
atgtttacaaggcacctcct

SEQ ID NO: 14551 - DNA, 20 bp, synthetic construct
  misc_feature 1..20: note = Description of Artificial Sequence: Synthetic oligonucleotide
  misc_feature 1..20: note = Target: FXN; (-) strand; PAM type: NRG; PAM sequence: AGG
  source 1..20: mol_type = other DNA
tctgccccttcatgtttaca

SEQ ID NO: 14552 - DNA, 20 bp, synthetic construct
  misc_feature 1..20: note = Description of Artificial Sequence: Synthetic oligonucleotide
  misc_feature 1..20: note = Target: FXN; (-) strand; PAM type: NRG; PAM sequence: AAG
  source 1..20: mol_type = other DNA
atctgccccttcatgtttac

SEQ ID NO: 14553 - DNA, 20 bp, synthetic construct
  misc_feature 1..20: note = Description of Artificial Sequence: Synthetic oligonucleotide
  misc_feature 1..20: note = Target: FXN; (-) strand; PAM type: NRG; PAM sequence: GAG
  source 1..20: mol_type = other DNA
agggctctctttatcaacat

SEQ ID NO: 14554 - DNA, 20 bp, synthetic construct
  misc_feature 1..20: note = Description of Artificial Sequence: Synthetic oligonucleotide
  misc_feature 1..20: note = Target: FXN; (-) strand; PAM type: NRG; PAM sequence: GGG
  source 1..20: mol_type = other DNA
ctgaactatgtctaggacca

SEQ ID NO: 14555 - DNA, 20 bp, synthetic construct
  misc_feature 1..20: note = Description of Artificial Sequence: Synthetic oligonucleotide
  misc_feature 1..20: note = Target: FXN; (-) strand; PAM type: NRG; PAM sequence: AGG
  source 1..20: mol_type = other DNA
gctgaactatgtctaggacc

SEQ ID NO: 14556 - DNA, 20 bp, synthetic construct
  misc_feature 1..20: note = Description of Artificial Sequence: Synthetic oligonucleotide
  misc_feature 1..20: note = Target: FXN; (-) strand; PAM type: NRG; PAM sequence: CAG
  source 1..20: mol_type = other DNA
ggctgaactatgtctaggac

SEQ ID NO: 14557 - DNA, 20 bp, synthetic construct
  misc_feature 1..20: note = Description of Artificial Sequence: Synthetic oligonucleotide
  misc_feature 1..20: note = Target: FXN; (-) strand; PAM type: NRG; PAM sequence: AGG
  source 1..20: mol_type = other DNA
tttgtggctgaactatgtct

SEQ ID NO: 14558 - DNA, 20 bp, synthetic construct
  misc_feature 1..20: note = Description of Artificial Sequence: Synthetic oligonucleotide
  misc_feature 1..20: note = Target: FXN; (-) strand; PAM type: NRG; PAM sequence: TAG
  source 1..20: mol_type = other DNA
ctttgtggctgaactatgtc

SEQ ID NO: 14559 - DNA, 20 bp, synthetic construct
  misc_feature 1..20: note = Description of Artificial Sequence: Synthetic oligonucleotide
  misc_feature 1..20: note = Target: FXN; (-) strand; PAM type: NRG; PAM sequence: TGG
  source 1..20: mol_type = other DNA
acaaagggacaactactttg

SEQ ID NO: 14560 - DNA, 20 bp, synthetic construct
  misc_feature 1..20: note = Description of Artificial Sequence: Synthetic oligonucleotide
  misc_feature 1..20: note = Target: FXN; (-) strand; PAM type: NRG; PAM sequence: GGG
  source 1..20: mol_type = other DNA
ttgggaaacttgtccacaaa

SEQ ID NO: 14561 - DNA, 20 bp, synthetic construct
  misc_feature 1..20: note = Description of Artificial Sequence: Synthetic oligonucleotide
  misc_feature 1..20: note = Target: FXN; (-) strand; PAM type: NRG; PAM sequence: AGG
  source 1..20: mol_type = other DNA
tttgggaaacttgtccacaa

SEQ ID NO: 14562 - DNA, 20 bp, synthetic construct
  misc_feature 1..20: note = Description of Artificial Sequence: Synthetic oligonucleotide
  misc_feature 1..20: note = Target: FXN; (-) strand; PAM type: NRG; PAM sequence: AAG
  source 1..20: mol_type = other DNA
atttgggaaacttgtccaca

SEQ ID NO: 14563 - DNA, 20 bp, synthetic construct
  misc_feature 1..20: note = Description of Artificial Sequence: Synthetic oligonucleotide
  misc_feature 1..20: note = Target: FXN; (-) strand; PAM type: NRG; PAM sequence: GGG
  source 1..20: mol_type = other DNA
agcagaggtccagggaattt

SEQ ID NO: 14564 - DNA, 20 bp, synthetic construct
  misc_feature 1..20: note = Description of Artificial Sequence: Synthetic oligonucleotide
  misc_feature 1..20: note = Target: FXN; (-) strand; PAM type: NRG; PAM sequence: TGG
  source 1..20: mol_type = other DNA
aagcagaggtccagggaatt

SEQ ID NO: 14565 - DNA, 20 bp, synthetic construct
  misc_feature 1..20: note = Description of Artificial Sequence: Synthetic oligonucleotide
  misc_feature 1..20: note = Target: FXN; (-) strand; PAM type: NRG; PAM sequence: GGG
  source 1..20: mol_type = other DNA
gatggggaagcagaggtcca

SEQ ID NO: 14566 - DNA, 20 bp, synthetic construct
  misc_feature 1..20: note = Description of Artificial Sequence: Synthetic oligonucleotide
  misc_feature 1..20: note = Target: FXN; (-) strand; PAM type: NRG; PAM sequence: AGG
  source 1..20: mol_type = other DNA
agatggggaagcagaggtcc

SEQ ID NO: 14567 - DNA, 20 bp, synthetic construct
  misc_feature 1..20: note = Description of Artificial Sequence: Synthetic oligonucleotide
  misc_feature 1..20: note = Target: FXN; (-) strand; PAM type: NRG; PAM sequence: CAG
  source 1..20: mol_type = other DNA
cagatggggaagcagaggtc

SEQ ID NO: 14568 - DNA, 20 bp, synthetic construct
  misc_feature 1..20: note = Description of Artificial Sequence: Synthetic oligonucleotide
  misc_feature 1..20: note = Target: FXN; (-) strand; PAM type: NRG; PAM sequence: AGG
  source 1..20: mol_type = other DNA
tttaacagatggggaagcag

SEQ ID NO: 14569 - DNA, 20 bp, synthetic construct
  misc_feature 1..20: note = Description of Artificial Sequence: Synthetic oligonucleotide
  misc_feature 1..20: note = Target: FXN; (-) strand; PAM type: NRG; PAM sequence: GAG
  source 1..20: mol_type = other DNA
atttaacagatggggaagca

SEQ ID NO: 14570 - DNA, 20 bp, synthetic construct
  misc_feature 1..20: note = Description of Artificial Sequence: Synthetic oligonucleotide
  misc_feature 1..20: note = Target: FXN; (-) strand; PAM type: NRG; PAM sequence: CAG
  source 1..20: mol_type = other DNA
tcatttaacagatggggaag

SEQ ID NO: 14571 - DNA, 20 bp, synthetic construct
  misc_feature 1..20: note = Description of Artificial Sequence: Synthetic oligonucleotide
  misc_feature 1..20: note = Target: FXN; (-) strand; PAM type: NRG; PAM sequence: AAG
  source 1..20: mol_type = other DNA
ctctcatttaacagatgggg

SEQ ID NO: 14572 - DNA, 20 bp, synthetic construct
  misc_feature 1..20: note = Description of Artificial Sequence: Synthetic oligonucleotide
  misc_feature 1..20: note = Target: FXN; (-) strand; PAM type: NRG; PAM sequence: GGG
  source 1..20: mol_type = other DNA
attctctcatttaacagatg

SEQ ID NO: 14573 - DNA, 20 bp, synthetic construct
  misc_feature 1..20: note = Description of Artificial Sequence: Synthetic oligonucleotide
  misc_feature 1..20: note = Target: FXN; (-) strand; PAM type: NRG; PAM sequence: GGG
  source 1..20: mol_type = other DNA
tattctctcatttaacagat

SEQ ID NO: 14574 - DNA, 20 bp, synthetic construct
  misc_feature 1..20: note = Description of Artificial Sequence: Synthetic oligonucleotide
  misc_feature 1..20: note = Target: FXN; (-) strand; PAM type: NRG; PAM sequence: TGG
  source 1..20: mol_type = other DNA
ctattctctcatttaacaga

SEQ ID NO: 14575 - DNA, 20 bp, synthetic construct
  misc_feature 1..20: note = Description of Artificial Sequence: Synthetic oligonucleotide
  misc_feature 1..20: note = Target: FXN; (-) strand; PAM type: NRG; PAM sequence: CAG
  source 1..20: mol_type = other DNA
tactctattctctcatttaa

SEQ ID NO: 14576 - DNA, 20 bp, synthetic construct
  misc_feature 1..20: note = Description of Artificial Sequence: Synthetic oligonucleotide
  misc_feature 1..20: note = Target: FXN; (-) strand; PAM type: NRG; PAM sequence: GGG
  source 1..20: mol_type = other DNA
tgacaggaccactgaatgct

SEQ ID NO: 14577 - DNA, 20 bp, synthetic construct
  misc_feature 1..20: note = Description of Artificial Sequence: Synthetic oligonucleotide
  misc_feature 1..20: note = Target: FXN; (-) strand; PAM type: NRG; PAM sequence: TGG
  source 1..20: mol_type = other DNA
ttgacaggaccactgaatgc

SEQ ID NO: 14578 - DNA, 20 bp, synthetic construct
  misc_feature 1..20: note = Description of Artificial Sequence: Synthetic oligonucleotide
  misc_feature 1..20: note = Target: FXN; (-) strand; PAM type: NRG; PAM sequence: AGG
  source 1..20: mol_type = other DNA
agcctgttaggttgcttgac

SEQ ID NO: 14579 - DNA, 20 bp, synthetic construct
  misc_feature 1..20: note = Description of Artificial Sequence: Synthetic oligonucleotide
  misc_feature 1..20: note = Target: FXN; (-) strand; PAM type: NRG; PAM sequence: CAG
  source 1..20: mol_type = other DNA
tagcctgttaggttgcttga

SEQ ID NO: 14580 - DNA, 20 bp, synthetic construct
  misc_feature 1..20: note = Description of Artificial Sequence: Synthetic oligonucleotide
  misc_feature 1..20: note = Target: FXN; (-) strand; PAM type: NRG; PAM sequence: AGG
  source 1..20: mol_type = other DNA
ggaattagaactagcctgtt

SEQ ID NO: 14581 - DNA, 20 bp, synthetic construct
  misc_feature 1..20: note = Description of Artificial Sequence: Synthetic oligonucleotide
  misc_feature 1..20: note = Target: FXN; (-) strand; PAM type: NRG; PAM sequence: TAG
  source 1..20: mol_type = other DNA
gggaattagaactagcctgt

SEQ ID NO: 14582 - DNA, 20 bp, synthetic construct
  misc_feature 1..20: note = Description of Artificial Sequence: Synthetic oligonucleotide
  misc_feature 1..20: note = Target: FXN; (-) strand; PAM type: NRG; PAM sequence: TAG
  source 1..20: mol_type = other DNA
acccaatagggaattagaac

SEQ ID NO: 14583 - DNA, 20 bp, synthetic construct
  misc_feature 1..20: note = Description of Artificial Sequence: Synthetic oligonucleotide
  misc_feature 1..20: note = Target: FXN; (-) strand; PAM type: NRG; PAM sequence: TAG
  source 1..20: mol_type = other DNA
tcatctacccaatagggaat

SEQ ID NO: 14584 - DNA, 20 bp, synthetic construct
  misc_feature 1..20: note = Description of Artificial Sequence: Synthetic oligonucleotide
  misc_feature 1..20: note = Target: FXN; (-) strand; PAM type: NRG; PAM sequence: GGG
  source 1..20: mol_type = other DNA
atcccctcatctacccaata

SEQ ID NO: 14585 - DNA, 20 bp, synthetic construct
  misc_feature 1..20: note = Description of Artificial Sequence: Synthetic oligonucleotide
  misc_feature 1..20: note = Target: FXN; (-) strand; PAM type: NRG; PAM sequence: AGG
  source 1..20: mol_type = other DNA
catcccctcatctacccaat

SEQ ID NO: 14586 - DNA, 20 bp, synthetic construct
  misc_feature 1..20: note = Description of Artificial Sequence: Synthetic oligonucleotide
  misc_feature 1..20: note = Target: FXN; (-) strand; PAM type: NRG; PAM sequence: TAG
  source 1..20: mol_type = other DNA
tcatcccctcatctacccaa

SEQ ID NO: 14587 - DNA, 20 bp, synthetic construct
  misc_feature 1..20: note = Description of Artificial Sequence: Synthetic oligonucleotide
  misc_feature 1..20: note = Target: FXN; (-) strand; PAM type: NRG; PAM sequence: TAG
  source 1..20: mol_type = other DNA
caataacaatgtttcctata

SEQ ID NO: 14588 - DNA, 20 bp, synthetic construct
  misc_feature 1..20: note = Description of Artificial Sequence: Synthetic oligonucleotide
  misc_feature 1..20: note = Target: FXN; (-) strand; PAM type: NRG; PAM sequence: GGG
  source 1..20: mol_type = other DNA
attcaactgaaatcacgata

SEQ ID NO: 14589 - DNA, 20 bp, synthetic construct
  misc_feature 1..20: note = Description of Artificial Sequence: Synthetic oligonucleotide
  misc_feature 1..20: note = Target: FXN; (-) strand; PAM type: NRG; PAM sequence: AGG
  source 1..20: mol_type = other DNA
aattcaactgaaatcacgat

SEQ ID NO: 14590 - DNA, 20 bp, synthetic construct
  misc_feature 1..20: note = Description of Artificial Sequence: Synthetic oligonucleotide
  misc_feature 1..20: note = Target: FXN; (-) strand; PAM type: NRG; PAM sequence: TAG
  source 1..20: mol_type = other DNA
gaattcaactgaaatcacga

SEQ ID NO: 14591 - DNA, 20 bp, synthetic construct
  misc_feature 1..20: note = Description of Artificial Sequence: Synthetic oligonucleotide
  misc_feature 1..20: note = Target: FXN; (-) strand; PAM type: NRG; PAM sequence: TGG
  source 1..20: mol_type = other DNA
ccaccgcgccaggccaagga

SEQ ID NO: 14592 - DNA, 20 bp, synthetic construct
  misc_feature 1..20: note = Description of Artificial Sequence: Synthetic oligonucleotide
  misc_feature 1..20: note = Target: FXN; (-) strand; PAM type: NRG; PAM sequence: AGG
  source 1..20: mol_type = other DNA
tgagccaccgcgccaggcca

SEQ ID NO: 14593 - DNA, 20 bp, synthetic construct
  misc_feature 1..20: note = Description of Artificial Sequence: Synthetic oligonucleotide
  misc_feature 1..20: note = Target: FXN; (-) strand; PAM type: NRG; PAM sequence: AAG
  source 1..20: mol_type = other DNA
gtgagccaccgcgccaggcc

SEQ ID NO: 14594 - DNA, 20 bp, synthetic construct
  misc_feature 1..20: note = Description of Artificial Sequence: Synthetic oligonucleotide
  misc_feature 1..20: note = Target: FXN; (-) strand; PAM type: NRG; PAM sequence: AGG
  source 1..20: mol_type = other DNA
caggtgtgagccaccgcgcc

SEQ ID NO: 14595 - DNA, 20 bp, synthetic construct
  misc_feature 1..20: note = Description of Artificial Sequence: Synthetic oligonucleotide
  misc_feature 1..20: note = Target: FXN; (-) strand; PAM type: NRG; PAM sequence: CAG
  source 1..20: mol_type = other DNA
acaggtgtgagccaccgcgc

SEQ ID NO: 14596 - DNA, 20 bp, synthetic construct
  misc_feature 1..20: note = Description of Artificial Sequence: Synthetic oligonucleotide
  misc_feature 1..20: note = Target: FXN; (-) strand; PAM type: NRG; PAM sequence: GAG
  source 1..20: mol_type = other DNA
agtgctgggattacaggtgt

SEQ ID NO: 14597 - DNA, 20 bp, synthetic construct
  misc_feature 1..20: note = Description of Artificial Sequence: Synthetic oligonucleotide
  misc_feature 1..20: note = Target: FXN; (-) strand; PAM type: NRG; PAM sequence: AGG
  source 1..20: mol_type = other DNA
tccaaaagtgctgggattac

SEQ ID NO: 14598 - DNA, 20 bp, synthetic construct
  misc_feature 1..20: note = Description of Artificial Sequence: Synthetic oligonucleotide
  misc_feature 1..20: note = Target: FXN; (-) strand; PAM type: NRG; PAM sequence: CAG
  source 1..20: mol_type = other DNA
ctccaaaagtgctgggatta

SEQ ID NO: 14599 - DNA, 20 bp, synthetic construct
  misc_feature 1..20: note = Description of Artificial Sequence: Synthetic oligonucleotide
  misc_feature 1..20: note = Target: FXN; (-) strand; PAM type: NRG; PAM sequence: GGG
  source 1..20: mol_type = other DNA
ccttggcctccaaaagtgct

SEQ ID NO: 14600 - DNA, 20 bp, synthetic construct
  misc_feature 1..20: note = Description of Artificial Sequence: Synthetic oligonucleotide
  misc_feature 1..20: note = Target: FXN; (-) strand; PAM type: NRG; PAM sequence: TGG
  source 1..20: mol_type = other DNA
accttggcctccaaaagtgc

SEQ ID NO: 14601 - DNA, 20 bp, synthetic construct
  misc_feature 1..20: note = Description of Artificial Sequence: Synthetic oligonucleotide
  misc_feature 1..20: note = Target: FXN; (-) strand; PAM type: NRG; PAM sequence: AAG
  source 1..20: mol_type = other DNA
ccacccaccttggcctccaa

SEQ ID NO: 14602 - DNA, 20 bp, synthetic construct
  misc_feature 1..20: note = Description of Artificial Sequence: Synthetic oligonucleotide
  misc_feature 1..20: note = Target: FXN; (-) strand; PAM type: NRG; PAM sequence: TGG
  source 1..20: mol_type = other DNA
ctcaggtgatccacccacct

SEQ ID NO: 14603 - DNA, 20 bp, synthetic construct
  misc_feature 1..20: note = Description of Artificial Sequence: Synthetic oligonucleotide
  misc_feature 1..20: note = Target: FXN; (-) strand; PAM type: NRG; PAM sequence: AGG
  source 1..20: mol_type = other DNA
ggtcttgaactcctgacctc

SEQ ID NO: 14604 - DNA, 20 bp, synthetic construct
  misc_feature 1..20: note = Description of Artificial Sequence: Synthetic oligonucleotide
  misc_feature 1..20: note = Target: FXN; (-) strand; PAM type: NRG; PAM sequence: CAG
  source 1..20: mol_type = other DNA
tggtcttgaactcctgacct

SEQ ID NO: 14605 - DNA, 20 bp, synthetic construct
  misc_feature 1..20: note = Description of Artificial Sequence: Synthetic oligonucleotide
  misc_feature 1..20: note = Target: FXN; (-) strand; PAM type: NRG; PAM sequence: TGG
  source 1..20: mol_type = other DNA
tttcatcatgttggccaggc

SEQ ID NO: 14606 - DNA, 20 bp, synthetic construct
  misc_feature 1..20: note = Description of Artificial Sequence: Synthetic oligonucleotide
  misc_feature 1..20: note = Target: FXN; (-) strand; PAM type: NRG; PAM sequence: AGG
  source 1..20: mol_type = other DNA
ggggtttcatcatgttggcc

SEQ ID NO: 14607 - DNA, 20 bp, synthetic construct
  misc_feature 1..20: note = Description of Artificial Sequence: Synthetic oligonucleotide
  misc_feature 1..20: note = Target: FXN; (-) strand; PAM type: NRG; PAM sequence: CAG
  source 1..20: mol_type = other DNA
cggggtttcatcatgttggc

SEQ ID NO: 14608 - DNA, 20 bp, synthetic construct
  misc_feature 1..20: note = Description of Artificial Sequence: Synthetic oligonucleotide
  misc_feature 1..20: note = Target: FXN; (-) strand; PAM type: NRG; PAM sequence: TGG
  source 1..20: mol_type = other DNA
gagacggggtttcatcatgt

SEQ ID NO: 14609 - DNA, 20 bp, synthetic construct
  misc_feature 1..20: note = Description of Artificial Sequence: Synthetic oligonucleotide
  misc_feature 1..20: note = Target: FXN; (-) strand; PAM type: NRG; PAM sequence: GGG
  source 1..20: mol_type = other DNA
ttgtatttttagtagagacg

SEQ ID NO: 14610 - DNA, 20 bp, synthetic construct
  misc_feature 1..20: note = Description of Artificial Sequence: Synthetic oligonucleotide
  misc_feature 1..20: note = Target: FXN; (-) strand; PAM type: NRG; PAM sequence: GGG
  source 1..20: mol_type = other DNA
tttgtatttttagtagagac

SEQ ID NO: 14611 - DNA, 20 bp, synthetic construct
  misc_feature 1..20: note = Description of Artificial Sequence: Synthetic oligonucleotide
  misc_feature 1..20: note = Target: FXN; (-) strand; PAM type: NRG; PAM sequence: CGG
  source 1..20: mol_type = other DNA
ttttgtatttttagtagaga

SEQ ID NO: 14612 - DNA, 20 bp, synthetic construct
  misc_feature 1..20: note = Description of Artificial Sequence: Synthetic oligonucleotide
  misc_feature 1..20: note = Target: FXN; (-) strand; PAM type: NRG; PAM sequence: GAG
  source 1..20: mol_type = other DNA
aattttttgtatttttagta

SEQ ID NO: 14613 - DNA, 20 bp, synthetic construct
  misc_feature 1..20: note = Description of Artificial Sequence: Synthetic oligonucleotide
  misc_feature 1..20: note = Target: FXN; (-) strand; PAM type: NRG; PAM sequence: TAG
  source 1..20: mol_type = other DNA
ctaattttttgtatttttag

SEQ ID NO: 14614 - DNA, 20 bp, synthetic construct
  misc_feature 1..20: note = Description of Artificial Sequence: Synthetic oligonucleotide
  misc_feature 1..20: note = Target: FXN; (-) strand; PAM type: NRG; PAM sequence: TAG
  source 1..20: mol_type = other DNA
cggctaattttttgtatttt

SEQ ID NO: 14615 - DNA, 20 bp, synthetic construct
  misc_feature 1..20: note = Description of Artificial Sequence: Synthetic oligonucleotide
  misc_feature 1..20: note = Target: FXN; (-) strand; PAM type: NRG; PAM sequence: CGG
  source 1..20: mol_type = other DNA
caggcacctgccatcatgcc

SEQ ID NO: 14616 - DNA, 20 bp, synthetic construct
  misc_feature 1..20: note = Description of Artificial Sequence: Synthetic oligonucleotide
  misc_feature 1..20: note = Target: FXN; (-) strand; PAM type: NRG; PAM sequence: AGG
  source 1..20: mol_type = other DNA
tcccaagtagctgggattac

SEQ ID NO: 14617 - DNA, 20 bp, synthetic construct
  misc_feature 1..20: note = Description of Artificial Sequence: Synthetic oligonucleotide
  misc_feature 1..20: note = Target: FXN; (-) strand; PAM type: NRG; PAM sequence: CAG
  source 1..20: mol_type = other DNA
ctcccaagtagctgggatta

SEQ ID NO: 14618 - DNA, 20 bp, synthetic construct
  misc_feature 1..20: note = Description of Artificial Sequence: Synthetic oligonucleotide
  misc_feature 1..20: note = Target: FXN; (-) strand; PAM type: NRG; PAM sequence: GGG
  source 1..20: mol_type = other DNA
cttcagcctcccaagtagct

SEQ ID NO: 14619 - DNA, 20 bp, synthetic construct
  misc_feature 1..20: note = Description of Artificial Sequence: Synthetic oligonucleotide
  misc_feature 1..20: note = Target: FXN; (-) strand; PAM type: NRG; PAM sequence: TGG
  source 1..20: mol_type = other DNA
gcttcagcctcccaagtagc

SEQ ID NO: 14620 - DNA, 20 bp, synthetic construct
  misc_feature 1..20: note = Description of Artificial Sequence: Synthetic oligonucleotide
  misc_feature 1..20: note = Target: FXN; (-) strand; PAM type: NRG; PAM sequence: TAG
  source 1..20: mol_type = other DNA
ttccgcttcagcctcccaag

SEQ ID NO: 14621 - DNA, 20 bp, synthetic construct
  misc_feature 1..20: note = Description of Artificial Sequence: Synthetic oligonucleotide
  misc_feature 1..20: note = Target: FXN; (-) strand; PAM type: NRG; PAM sequence: AAG
  source 1..20: mol_type = other DNA
ttcttccgcttcagcctccc

SEQ ID NO: 14622 - DNA, 20 bp, synthetic construct
  misc_feature 1..20: note = Description of Artificial Sequence: Synthetic oligonucleotide
  misc_feature 1..20: note = Target: FXN; (-) strand; PAM type: NRG; PAM sequence: CAG
  source 1..20: mol_type = other DNA
ttcaagcgattcttccgctt

SEQ ID NO: 14623 - DNA, 20 bp, synthetic construct
  misc_feature 1..20: note = Description of Artificial Sequence: Synthetic oligonucleotide
  misc_feature 1..20: note = Target: FXN; (-) strand; PAM type: NRG; PAM sequence: AAG
  source 1..20: mol_type = other DNA
caacctccacctctgggttc

SEQ ID NO: 14624 - DNA, 20 bp, synthetic construct
  misc_feature 1..20: note = Description of Artificial Sequence: Synthetic oligonucleotide
  misc_feature 1..20: note = Target: FXN; (-) strand; PAM type: NRG; PAM sequence: GGG
  source 1..20: mol_type = other DNA
tcactgcaacctccacctct

SEQ ID NO: 14625 - DNA, 20 bp, synthetic construct
  misc_feature 1..20: note = Description of Artificial Sequence: Synthetic oligonucleotide
  misc_feature 1..20: note = Target: FXN; (-) strand; PAM type: NRG; PAM sequence: TGG
  source 1..20: mol_type = other DNA
ctcactgcaacctccacctc

SEQ ID NO: 14626 - DNA, 20 bp, synthetic construct
  misc_feature 1..20: note = Description of Artificial Sequence: Synthetic oligonucleotide
  misc_feature 1..20: note = Target: FXN; (-) strand; PAM type: NRG; PAM sequence: CGG
  source 1..20: mol_type = other DNA
acagtgcaatggcacgatct

SEQ ID NO: 14627 - DNA, 20 bp, synthetic construct
  misc_feature 1..20: note = Description of Artificial Sequence: Synthetic oligonucleotide
  misc_feature 1..20: note = Target: FXN; (-) strand; PAM type: NRG; PAM sequence: TGG
  source 1..20: mol_type = other DNA
tcacccaggttacagtgcaa

SEQ ID NO: 14628 - DNA, 20 bp, synthetic construct
  misc_feature 1..20: note = Description of Artificial Sequence: Synthetic oligonucleotide
  misc_feature 1..20: note = Target: FXN; (-) strand; PAM type: NRG; PAM sequence: CAG
  source 1..20: mol_type = other DNA
ttgctcagtcacccaggtta

SEQ ID NO: 14629 - DNA, 20 bp, synthetic construct
  misc_feature 1..20: note = Description of Artificial Sequence: Synthetic oligonucleotide
  misc_feature 1..20: note = Target: FXN; (-) strand; PAM type: NRG; PAM sequence: AGG
  source 1..20: mol_type = other DNA
agagttttgctcagtcaccc

SEQ ID NO: 14630 - DNA, 20 bp, synthetic construct
  misc_feature 1..20: note = Description of Artificial Sequence: Synthetic oligonucleotide
  misc_feature 1..20: note = Target: FXN; (-) strand; PAM type: NRG; PAM sequence: CAG
  source 1..20: mol_type = other DNA
cagagttttgctcagtcacc

SEQ ID NO: 14631 - DNA, 20 bp, synthetic construct
  misc_feature 1..20: note = Description of Artificial Sequence: Synthetic oligonucleotide
  misc_feature 1..20: note = Target: FXN; (-) strand; PAM type: NRG; PAM sequence: CAG
  source 1..20: mol_type = other DNA
ttttgagacagagttttgct

SEQ ID NO: 14632 - DNA, 20 bp, synthetic construct
  misc_feature 1..20: note = Description of Artificial Sequence: Synthetic oligonucleotide
  misc_feature 1..20: note = Target: FXN; (-) strand; PAM type: NRG; PAM sequence: GAG
  source 1..20: mol_type = other DNA
gttattattattttgagaca

SEQ ID NO: 14633 - DNA, 20 bp, synthetic construct
  misc_feature 1..20: note = Description of Artificial Sequence: Synthetic oligonucleotide
  misc_feature 1..20: note = Target: FXN; (-) strand; PAM type: NRG; PAM sequence: CAG
  source 1..20: mol_type = other DNA
ttgttattattattttgaga

SEQ ID NO: 14634 - DNA, 20 bp, synthetic construct
  misc_feature 1..20: note = Description of Artificial Sequence: Synthetic oligonucleotide
  misc_feature 1..20: note = Target: FXN; (-) strand; PAM type: NRG; PAM sequence: GAG
  source 1..20: mol_type = other DNA
tatattgttattattatttt

SEQ ID NO: 14635 - DNA, 20 bp, synthetic construct
  misc_feature 1..20: note = Description of Artificial Sequence: Synthetic oligonucleotide
  misc_feature 1..20: note = Target: FXN; (-) strand; PAM type: NRG; PAM sequence: TGG
  source 1..20: mol_type = other DNA
agtaagggtacaataaagga

SEQ ID NO: 14636 - DNA, 20 bp, synthetic construct
  misc_feature 1..20: note = Description of Artificial Sequence: Synthetic oligonucleotide
  misc_feature 1..20: note = Target: FXN; (-) strand; PAM type: NRG; PAM sequence: AGG
  source 1..20: mol_type = other DNA
acccagtaagggtacaataa

SEQ ID NO: 14637 - DNA, 20 bp, synthetic construct
  misc_feature 1..20: note = Description of Artificial Sequence: Synthetic oligonucleotide
  misc_feature 1..20: note = Target: FXN; (-) strand; PAM type: NRG; PAM sequence: AAG
  source 1..20: mol_type = other DNA
aacccagtaagggtacaata

SEQ ID NO: 14638 - DNA, 20 bp, synthetic construct
  misc_feature 1..20: note = Description of Artificial Sequence: Synthetic oligonucleotide
  misc_feature 1..20: note = Target: FXN; (-) strand; PAM type: NRG; PAM sequence: GGG
  source 1..20: mol_type = other DNA
taatacgattaacccagtaa

SEQ ID NO: 14639 - DNA, 20 bp, synthetic construct
  misc_feature 1..20: note = Description of Artificial Sequence: Synthetic oligonucleotide
  misc_feature 1..20: note = Target: FXN; (-) strand; PAM type: NRG; PAM sequence: AGG
  source 1..20: mol_type = other DNA
ataatacgattaacccagta

SEQ ID NO: 14640 - DNA, 20 bp, synthetic construct
  misc_feature 1..20: note = Description of Artificial Sequence: Synthetic oligonucleotide
  misc_feature 1..20: note = Target: FXN; (-) strand; PAM type: NRG; PAM sequence: AAG
  source 1..20: mol_type = other DNA
tataatacgattaacccagt

SEQ ID NO: 14641 - DNA, 20 bp, synthetic construct
  misc_feature 1..20: note = Description of Artificial Sequence: Synthetic oligonucleotide
  misc_feature 1..20: note = Target: FXN; (-) strand; PAM type: NRG; PAM sequence: CAG
  source 1..20: mol_type = other DNA
gtggtataatacgattaacc

SEQ ID NO: 14642 - DNA, 20 bp, synthetic construct
  misc_feature 1..20: note = Description of Artificial Sequence: Synthetic oligonucleotide
  misc_feature 1..20: note = Target: FXN; (-) strand; PAM type: NRG; PAM sequence: TGG
  source 1..20: mol_type = other DNA
aaaattaaaatgaggtaatg

SEQ ID NO: 14643 - DNA, 20 bp, synthetic construct
  misc_feature 1..20: note = Description of Artificial Sequence: Synthetic oligonucleotide
  misc_feature 1..20: note = Target: FXN; (-) strand; PAM type: NRG; PAM sequence: AGG
  source 1..20: mol_type = other DNA
ggtcagtaaaaattaaaatg

SEQ ID NO: 14644 - DNA, 20 bp, synthetic construct
  misc_feature 1..20: note = Description of Artificial Sequence: Synthetic oligonucleotide
  misc_feature 1..20: note = Target: FXN; (-) strand; PAM type: NRG; PAM sequence: GAG
  source 1..20: mol_type = other DNA
aggtcagtaaaaattaaaat

SEQ ID NO: 14645 - DNA, 20 bp, synthetic construct
  misc_feature 1..20: note = Description of Artificial Sequence: Synthetic oligonucleotide
  misc_feature 1..20: note = Target: FXN; (-) strand; PAM type: NRG; PAM sequence: CAG
  source 1..20: mol_type = other DNA
gctttgtataaagtgcaggt

SEQ ID NO: 14646 - DNA, 20 bp, synthetic construct
  misc_feature 1..20: note = Description of Artificial Sequence: Synthetic oligonucleotide
  misc_feature 1..20: note = Target: FXN; (-) strand; PAM type: NRG; PAM sequence: AGG
  source 1..20: mol_type = other DNA
tgttgctttgtataaagtgc

SEQ ID NO: 14647 - DNA, 20 bp, synthetic construct
  misc_feature 1..20: note = Description of Artificial Sequence: Synthetic oligonucleotide
  misc_feature 1..20: note = Target: FXN; (-) strand; PAM type: NRG; PAM sequence: CAG
  source 1..20: mol_type = other DNA
ttgttgctttgtataaagtg

SEQ ID NO: 14648 - DNA, 20 bp, synthetic construct
  misc_feature 1..20: note = Description of Artificial Sequence: Synthetic oligonucleotide
  misc_feature 1..20: note = Target: FXN; (-) strand; PAM type: NRG; PAM sequence: AAG
  source 1..20: mol_type = other DNA
gaggcttgttgctttgtata

SEQ ID NO: 14649 - DNA, 20 bp, synthetic construct
  misc_feature 1..20: note = Description of Artificial Sequence: Synthetic oligonucleotide
  misc_feature 1..20: note = Target: FXN; (-) strand; PAM type: NRG; PAM sequence: AGG
  source 1..20: mol_type = other DNA
catgaattttaatgtcctgg

SEQ ID NO: 14650 - DNA, 20 bp, synthetic construct
  misc_feature 1..20: note = Description of Artificial Sequence: Synthetic oligonucleotide
  misc_feature 1..20: note = Target: FXN; (-) strand; PAM type: NRG; PAM sequence: GAG
  source 1..20: mol_type = other DNA
gcatgaattttaatgtcctg

SEQ ID NO: 14651 - DNA, 20 bp, synthetic construct
  misc_feature 1..20: note = Description of Artificial Sequence: Synthetic oligonucleotide
  misc_feature 1..20: note = Target: FXN; (-) strand; PAM type: NRG; PAM sequence: TGG
  source 1..20: mol_type = other DNA
ttgcatgaattttaatgtcc

SEQ ID NO: 14652 - DNA, 20 bp, synthetic construct
  misc_feature 1..20: note = Description of Artificial Sequence: Synthetic oligonucleotide
  misc_feature 1..20: note = Target: FXN; (-) strand; PAM type: NRG; PAM sequence: GAG
  source 1..20: mol_type = other DNA
gtaagaaaataatataacat

SEQ ID NO: 14653 - DNA, 20 bp, synthetic construct
  misc_feature 1..20: note = Description of Artificial Sequence: Synthetic oligonucleotide
  misc_feature 1..20: note = Target: FXN; (-) strand; PAM type: NRG; PAM sequence: AAG
  source 1..20: mol_type = other DNA
taataaatccttctttaagt

SEQ ID NO: 14654 - DNA, 20 bp, synthetic construct
  misc_feature 1..20: note = Description of Artificial Sequence: Synthetic oligonucleotide
  misc_feature 1..20: note = Target: FXN; (-) strand; PAM type: NRG; PAM sequence: AAG
  source 1..20: mol_type = other DNA
ccactaataaatccttcttt

SEQ ID NO: 14655 - DNA, 20 bp, synthetic construct
  misc_feature 1..20: note = Description of Artificial Sequence: Synthetic oligonucleotide
  misc_feature 1..20: note = Target: FXN; (-) strand; PAM type: NRG; PAM sequence: CAG
  source 1..20: mol_type = other DNA
caggtgcacgccaccatgcc

SEQ ID NO: 14656 - DNA, 20 bp, synthetic construct
  misc_feature 1..20: note = Description of Artificial Sequence: Synthetic oligonucleotide
  misc_feature 1..20: note = Target: FXN; (-) strand; PAM type: NRG; PAM sequence: AGG
  source 1..20: mol_type = other DNA
tcctgagtacctgggattac

SEQ ID NO: 14657 - DNA, 20 bp, synthetic construct
  misc_feature 1..20: note = Description of Artificial Sequence: Synthetic oligonucleotide
  misc_feature 1..20: note = Target: FXN; (-) strand; PAM type: NRG; PAM sequence: CAG
  source 1..20: mol_type = other DNA
ctcctgagtacctgggatta

SEQ ID NO: 14658 - DNA, 20 bp, synthetic construct
  misc_feature 1..20: note = Description of Artificial Sequence: Synthetic oligonucleotide
  misc_feature 1..20: note = Target: FXN; (-) strand; PAM type: NRG; PAM sequence: GGG
  source 1..20: mol_type = other DNA
tctcagcctcctgagtacct

SEQ ID NO: 14659 - DNA, 20 bp, synthetic construct
  misc_feature 1..20: note = Description of Artificial Sequence: Synthetic oligonucleotide
  misc_feature 1..20: note = Target: FXN; (-) strand; PAM type: NRG; PAM sequence: TGG
  source 1..20: mol_type = other DNA
gtctcagcctcctgagtacc

SEQ ID NO: 14660 - DNA, 20 bp, synthetic construct
  misc_feature 1..20: note = Description of Artificial Sequence: Synthetic oligonucleotide
  misc_feature 1..20: note = Target: FXN; (-) strand; PAM type: NRG; PAM sequence: GAG
  source 1..20: mol_type = other DNA
ttctcccgtctcagcctcct

SEQ ID NO: 14661 - DNA, 20 bp, synthetic construct
  misc_feature 1..20: note = Description of Artificial Sequence: Synthetic oligonucleotide
  misc_feature 1..20: note = Target: FXN; (-) strand; PAM type: NRG; PAM sequence: CAG
  source 1..20: mol_type = other DNA
gtcaagcaattctcccgtct

SEQ ID NO: 14662 - DNA, 20 bp, synthetic construct
  misc_feature 1..20: note = Description of Artificial Sequence: Synthetic oligonucleotide
  misc_feature 1..20: note = Target: FXN; (-) strand; PAM type: NRG; PAM sequence: AAG
  source 1..20: mol_type = other DNA
aacctcctccgcctggggtc

SEQ ID NO: 14663 - DNA, 20 bp, synthetic construct
  misc_feature 1..20: note = Description of Artificial Sequence: Synthetic oligonucleotide
  misc_feature 1..20: note = Target: FXN; (-) strand; PAM type: NRG; PAM sequence: GGG
  source 1..20: mol_type = other DNA
actgtaacctcctccgcctg

SEQ ID NO: 14664 - DNA, 20 bp, synthetic construct
  misc_feature 1..20: note = Description of Artificial Sequence: Synthetic oligonucleotide
  misc_feature 1..20: note = Target: FXN; (-) strand; PAM type: NRG; PAM sequence: GGG
  source 1..20: mol_type = other DNA
cactgtaacctcctccgcct

SEQ ID NO: 14665 - DNA, 20 bp, synthetic construct
  misc_feature 1..20: note = Description of Artificial Sequence: Synthetic oligonucleotide
  misc_feature 1..20: note = Target: FXN; (-) strand; PAM type: NRG; PAM sequence: TGG
  source 1..20: mol_type = other DNA
tcactgtaacctcctccgcc

SEQ ID NO: 14666 - DNA, 20 bp, synthetic construct
  misc_feature 1..20: note = Description of Artificial Sequence: Synthetic oligonucleotide
  misc_feature 1..20: note = Target: FXN; (-) strand; PAM type: NRG; PAM sequence: AGG
  source 1..20: mol_type = other DNA
ggagtctcgctctgtcgctc

SEQ ID NO: 14667 - DNA, 20 bp, synthetic construct
  misc_feature 1..20: note = Description of Artificial Sequence: Synthetic oligonucleotide
  misc_feature 1..20: note = Target: FXN; (-) strand; PAM type: NRG; PAM sequence: CAG
  source 1..20: mol_type = other DNA
cggagtctcgctctgtcgct

SEQ ID NO: 14668 - DNA, 20 bp, synthetic construct
  misc_feature 1..20: note = Description of Artificial Sequence: Synthetic oligonucleotide
  misc_feature 1..20: note = Target: FXN; (-) strand; PAM type: NRG; PAM sequence: GAG
  source 1..20: mol_type = other DNA
ttttttttttttttgagacg

SEQ ID NO: 14669 - DNA, 20 bp, synthetic construct
  misc_feature 1..20: note = Description of Artificial Sequence: Synthetic oligonucleotide
  misc_feature 1..20: note = Target: FXN; (-) strand; PAM type: NRG; PAM sequence: CGG
  source 1..20: mol_type = other DNA
ccttttttttttttttgaga

SEQ ID NO: 14670 - DNA, 20 bp, synthetic construct
  misc_feature 1..20: note = Description of Artificial Sequence: Synthetic oligonucleotide
  misc_feature 1..20: note = Target: FXN; (-) strand; PAM type: NRG; PAM sequence: GAG
  source 1..20: mol_type = other DNA
ccctcctttttttttttttt

SEQ ID NO: 14671 - DNA, 20 bp, synthetic construct
  misc_feature 1..20: note = Description of Artificial Sequence: Synthetic oligonucleotide
  misc_feature 1..20: note = Target: FXN; (-) strand; PAM type: NRG; PAM sequence: AAG
  source 1..20: mol_type = other DNA
tttttattcacccattggaa

SEQ ID NO: 14672 - DNA, 20 bp, synthetic construct
  misc_feature 1..20: note = Description of Artificial Sequence: Synthetic oligonucleotide
  misc_feature 1..20: note = Target: FXN; (-) strand; PAM type: NRG; PAM sequence: TGG
  source 1..20: mol_type = other DNA
atgtgtttttattcacccat

SEQ ID NO: 14673 - DNA, 20 bp, synthetic construct
  misc_feature 1..20: note = Description of Artificial Sequence: Synthetic oligonucleotide
  misc_feature 1..20: note = Target: FXN; (-) strand; PAM type: NRG; PAM sequence: TGG
  source 1..20: mol_type = other DNA
ctgctcccagcttgacttaa

SEQ ID NO: 14674 - DNA, 20 bp, synthetic construct
  misc_feature 1..20: note = Description of Artificial Sequence: Synthetic oligonucleotide
  misc_feature 1..20: note = Target: FXN; (-) strand; PAM type: NRG; PAM sequence: CAG
  source 1..20: mol_type = other DNA
taggtatatgccactgctcc

SEQ ID NO: 14675 - DNA, 20 bp, synthetic construct
  misc_feature 1..20: note = Description of Artificial Sequence: Synthetic oligonucleotide
  misc_feature 1..20: note = Target: FXN; (-) strand; PAM type: NRG; PAM sequence: AGG
  source 1..20: mol_type = other DNA
tcctgtgcagctgggactat

SEQ ID NO: 14676 - DNA, 20 bp, synthetic construct
  misc_feature 1..20: note = Description of Artificial Sequence: Synthetic oligonucleotide
  misc_feature 1..20: note = Target: FXN; (-) strand; PAM type: NRG; PAM sequence: TAG
  source 1..20: mol_type = other DNA
ctcctgtgcagctgggacta

SEQ ID NO: 14677 - DNA, 20 bp, synthetic construct
  misc_feature 1..20: note = Description of Artificial Sequence: Synthetic oligonucleotide
  misc_feature 1..20: note = Target: FXN; (-) strand; PAM type: NRG; PAM sequence: GGG
  source 1..20: mol_type = other DNA
tctcagcctcctgtgcagct

SEQ ID NO: 14678 - DNA, 20 bp, synthetic construct
  misc_feature 1..20: note = Description of Artificial Sequence: Synthetic oligonucleotide
  misc_feature 1..20: note = Target: FXN; (-) strand; PAM type: NRG; PAM sequence: TGG
  source 1..20: mol_type = other DNA
gtctcagcctcctgtgcagc

SEQ ID NO: 14679 - DNA, 20 bp, synthetic construct
  misc_feature 1..20: note = Description of Artificial Sequence: Synthetic oligonucleotide
  misc_feature 1..20: note = Target: FXN; (-) strand; PAM type: NRG; PAM sequence: CAG
  source 1..20: mol_type = other DNA
tcctgtctcagcctcctgtg

SEQ ID NO: 14680 - DNA, 20 bp, synthetic construct
  misc_feature 1..20: note = Description of Artificial Sequence: Synthetic oligonucleotide
  misc_feature 1..20: note = Target: FXN; (-) strand; PAM type: NRG; PAM sequence: CAG
  source 1..20: mol_type = other DNA
ttcaagcaatcctcctgtct

SEQ ID NO: 14681 - DNA, 20 bp, synthetic construct
  misc_feature 1..20: note = Description of Artificial Sequence: Synthetic oligonucleotide
  misc_feature 1..20: note = Target: FXN; (-) strand; PAM type: NRG; PAM sequence: AAG
  source 1..20: mol_type = other DNA
gatctccaattcctggcttc

SEQ ID NO: 14682 - DNA, 20 bp, synthetic construct
  misc_feature 1..20: note = Description of Artificial Sequence: Synthetic oligonucleotide
  misc_feature 1..20: note = Target: FXN; (-) strand; PAM type: NRG; PAM sequence: TGG
  source 1..20: mol_type = other DNA
ccaggctgatctccaattcc

SEQ ID NO: 14683 - DNA, 20 bp, synthetic construct
  misc_feature 1..20: note = Description of Artificial Sequence: Synthetic oligonucleotide
  misc_feature 1..20: note = Target: FXN; (-) strand; PAM type: NRG; PAM sequence: AGG
  source 1..20: mol_type = other DNA
aggatcttgctgtgttgccc

SEQ ID NO: 14684 - DNA, 20 bp, synthetic construct
  misc_feature 1..20: note = Description of Artificial Sequence: Synthetic oligonucleotide
  misc_feature 1..20: note = Target: FXN; (-) strand; PAM type: NRG; PAM sequence: CAG
  source 1..20: mol_type = other DNA
taggatcttgctgtgttgcc

SEQ ID NO: 14685 - DNA, 20 bp, synthetic construct
  misc_feature 1..20: note = Description of Artificial Sequence: Synthetic oligonucleotide
  misc_feature 1..20: note = Target: FXN; (-) strand; PAM type: NRG; PAM sequence: AGG
  source 1..20: mol_type = other DNA
tttttctttttttaagagat

SEQ ID NO: 14686 - DNA, 20 bp, synthetic construct
  misc_feature 1..20: note = Description of Artificial Sequence: Synthetic oligonucleotide
  misc_feature 1..20: note = Target: FXN; (-) strand; PAM type: NRG; PAM sequence: TAG
  source 1..20: mol_type = other DNA
ttttttctttttttaagaga

SEQ ID NO: 14687 - DNA, 20 bp, synthetic construct
  misc_feature 1..20: note = Description of Artificial Sequence: Synthetic oligonucleotide
  misc_feature 1..20: note = Target: FXN; (-) strand; PAM type: NRG; PAM sequence: GAG
  source 1..20: mol_type = other DNA
gtttttttttctttttttaa

SEQ ID NO: 14688 - DNA, 20 bp, synthetic construct
  misc_feature 1..20: note = Description of Artificial Sequence: Synthetic oligonucleotide
  misc_feature 1..20: note = Target: FXN; (-) strand; PAM type: NRG; PAM sequence: AAG
  source 1..20: mol_type = other DNA
aggtttttttttcttttttt

SEQ ID NO: 14689 - DNA, 20 bp, synthetic construct
  misc_feature 1..20: note = Description of Artificial Sequence: Synthetic oligonucleotide
  misc_feature 1..20: note = Target: FXN; (-) strand; PAM type: NRG; PAM sequence: AGG
  source 1..20: mol_type = other DNA
tatactgttttattattaat

SEQ ID NO: 14690 - DNA, 20 bp, synthetic construct
  misc_feature 1..20: note = Description of Artificial Sequence: Synthetic oligonucleotide
  misc_feature 1..20: note = Target: FXN; (-) strand; PAM type: NRG; PAM sequence: TAG
  source 1..20: mol_type = other DNA
ttatactgttttattattaa

SEQ ID NO: 14691 - DNA, 20 bp, synthetic construct
  misc_feature 1..20: note = Description of Artificial Sequence: Synthetic oligonucleotide
  misc_feature 1..20: note = Target: FXN; (-) strand; PAM type: NRG; PAM sequence: TAG
  source 1..20: mol_type = other DNA
gaaaaaatattttacctatt

SEQ ID NO: 14692 - DNA, 20 bp, synthetic construct
  misc_feature 1..20: note = Description of Artificial Sequence: Synthetic oligonucleotide
  misc_feature 1..20: note = Target: FXN; (-) strand; PAM type: NRG; PAM sequence: CAG
  source 1..20: mol_type = other DNA
ctcaaaaaataattttattt

SEQ ID NO: 14693 - DNA, 20 bp, synthetic construct
  misc_feature 1..20: note = Description of Artificial Sequence: Synthetic oligonucleotide
  misc_feature 1..20: note = Target: FXN; (-) strand; PAM type: NRG; PAM sequence: CAG
  source 1..20: mol_type = other DNA
ctgcacttaaacatttccat

SEQ ID NO: 14694 - DNA, 20 bp, synthetic construct
  misc_feature 1..20: note = Description of Artificial Sequence: Synthetic oligonucleotide
  misc_feature 1..20: note = Target: FXN; (-) strand; PAM type: NRG; PAM sequence: TGG
  source 1..20: mol_type = other DNA
atttattttctcactggcac

SEQ ID NO: 14695 - DNA, 20 bp, synthetic construct
  misc_feature 1..20: note = Description of Artificial Sequence: Synthetic oligonucleotide
  misc_feature 1..20: note = Target: FXN; (-) strand; PAM type: NRG; PAM sequence: TGG
  source 1..20: mol_type = other DNA
gatgttatttattttctcac

SEQ ID NO: 14696 - DNA, 20 bp, synthetic construct
  misc_feature 1..20: note = Description of Artificial Sequence: Synthetic oligonucleotide
  misc_feature 1..20: note = Target: FXN; (-) strand; PAM type: NRG; PAM sequence: AAG
  source 1..20: mol_type = other DNA
ctgaaactttcagtagaagc

SEQ ID NO: 14697 - DNA, 20 bp, synthetic construct
  misc_feature 1..20: note = Description of Artificial Sequence: Synthetic oligonucleotide
  misc_feature 1..20: note = Target: FXN; (-) strand; PAM type: NRG; PAM sequence: AAG
  source 1..20: mol_type = other DNA
tgcactgaaactttcagtag

SEQ ID NO: 14698 - DNA, 20 bp, synthetic construct
  misc_feature 1..20: note = Description of Artificial Sequence: Synthetic oligonucleotide
  misc_feature 1..20: note = Target: FXN; (-) strand; PAM type: NRG; PAM sequence: TAG
  source 1..20: mol_type = other DNA
gggtgcactgaaactttcag

SEQ ID NO: 14699 - DNA, 20 bp, synthetic construct
  misc_feature 1..20: note = Description of Artificial Sequence: Synthetic oligonucleotide
  misc_feature 1..20: note = Target: FXN; (-) strand; PAM type: NRG; PAM sequence: CAG
  source 1..20: mol_type = other DNA
gtggggtgcactgaaacttt

SEQ ID NO: 14700 - DNA, 20 bp, synthetic construct
  misc_feature 1..20: note = Description of Artificial Sequence: Synthetic oligonucleotide
  misc_feature 1..20: note = Target: FXN; (-) strand; PAM type: NRG; PAM sequence: GGG
  source 1..20: mol_type = other DNA
caccgagttctaagtaagtg

SEQ ID NO: 14701 - DNA, 20 bp, synthetic construct
  misc_feature 1..20: note = Description of Artificial Sequence: Synthetic oligonucleotide
  misc_feature 1..20: note = Target: FXN; (-) strand; PAM type: NRG; PAM sequence: GGG
  source 1..20: mol_type = other DNA
tcaccgagttctaagtaagt

SEQ ID NO: 14702 - DNA, 20 bp, synthetic construct
  misc_feature 1..20: note = Description of Artificial Sequence: Synthetic oligonucleotide
  misc_feature 1..20: note = Target: FXN; (-) strand; PAM type: NRG; PAM sequence: TGG
  source 1..20: mol_type = other DNA
gtcaccgagttctaagtaag

SEQ ID NO: 14703 - DNA, 20 bp, synthetic construct
  misc_feature 1..20: note = Description of Artificial Sequence: Synthetic oligonucleotide
  misc_feature 1..20: note = Target: FXN; (-) strand; PAM type: NRG; PAM sequence: AAG
  source 1..20: mol_type = other DNA
catgtcaccgagttctaagt

SEQ ID NO: 14704 - DNA, 20 bp, synthetic construct
  misc_feature 1..20: note = Description of Artificial Sequence: Synthetic oligonucleotide
  misc_feature 1..20: note = Target: FXN; (-) strand; PAM type: NRG; PAM sequence: AAG
  source 1..20: mol_type = other DNA
acatcatgtcaccgagttct

SEQ ID NO: 14705 - DNA, 20 bp, synthetic construct
  misc_feature 1..20: note = Description of Artificial Sequence: Synthetic oligonucleotide
  misc_feature 1..20: note = Target: FXN; (-) strand; PAM type: NRG; PAM sequence: GAG
  source 1..20: mol_type = other DNA
aaggagtacatcatgtcacc

SEQ ID NO: 14706 - DNA, 20 bp, synthetic construct
  misc_feature 1..20: note = Description of Artificial Sequence: Synthetic oligonucleotide
  misc_feature 1..20: note = Target: FXN; (-) strand; PAM type: NRG; PAM sequence: GAG
  source 1..20: mol_type = other DNA
gtgctgtgtcccagataaag

SEQ ID NO: 14707 - DNA, 20 bp, synthetic construct
  misc_feature 1..20: note = Description of Artificial Sequence: Synthetic oligonucleotide
  misc_feature 1..20: note = Target: FXN; (-) strand; PAM type: NRG; PAM sequence: AGG
  source 1..20: mol_type = other DNA
ttgtgctgtgtcccagataa

SEQ ID NO: 14708 - DNA, 20 bp, synthetic construct
  misc_feature 1..20: note = Description of Artificial Sequence: Synthetic oligonucleotide
  misc_feature 1..20: note = Target: FXN; (-) strand; PAM type: NRG; PAM sequence: AAG
  source 1..20: mol_type = other DNA
tttgtgctgtgtcccagata

SEQ ID NO: 14709 - DNA, 20 bp, synthetic construct
  misc_feature 1..20: note = Description of Artificial Sequence: Synthetic oligonucleotide
  misc_feature 1..20: note = Target: FXN; (-) strand; PAM type: NRG; PAM sequence: CAG
  source 1..20: mol_type = other DNA
acctcttttgtgctgtgtcc

SEQ ID NO: 14710 - DNA, 20 bp, synthetic construct
  misc_feature 1..20: note = Description of Artificial Sequence: Synthetic oligonucleotide
  misc_feature 1..20: note = Target: FXN; (-) strand; PAM type: NRG; PAM sequence: CAG
  source 1..20: mol_type = other DNA
cttccactttcatgtcagag

SEQ ID NO: 14711 - DNA, 20 bp, synthetic construct
  misc_feature 1..20: note = Description of Artificial Sequence: Synthetic oligonucleotide
  misc_feature 1..20: note = Target: FXN; (-) strand; PAM type: NRG; PAM sequence: GAG
  source 1..20: mol_type = other DNA
taacttccactttcatgtca

SEQ ID NO: 14712 - DNA, 20 bp, synthetic construct
  misc_feature 1..20: note = Description of Artificial Sequence: Synthetic oligonucleotide
  misc_feature 1..20: note = Target: FXN; (-) strand; PAM type: NRG; PAM sequence: CAG
  source 1..20: mol_type = other DNA
cttaacttccactttcatgt

SEQ ID NO: 14713 - DNA, 20 bp, synthetic construct
  misc_feature 1..20: note = Description of Artificial Sequence: Synthetic oligonucleotide
  misc_feature 1..20: note = Target: FXN; (-) strand; PAM type: NRG; PAM sequence: CAG
  source 1..20: mol_type = other DNA
acaaggaccccataagagcc

SEQ ID NO: 14714 - DNA, 20 bp, synthetic construct
  misc_feature 1..20: note = Description of Artificial Sequence: Synthetic oligonucleotide
  misc_feature 1..20: note = Target: FXN; (-) strand; PAM type: NRG; PAM sequence: GAG
  source 1..20: mol_type = other DNA
ggcccacaaggaccccataa

SEQ ID NO: 14715 - DNA, 20 bp, synthetic construct
  misc_feature 1..20: note = Description of Artificial Sequence: Synthetic oligonucleotide
  misc_feature 1..20: note = Target: FXN; (-) strand; PAM type: NRG; PAM sequence: AAG
  source 1..20: mol_type = other DNA
ctggcccacaaggaccccat

SEQ ID NO: 14716 - DNA, 20 bp, synthetic construct
  misc_feature 1..20: note = Description of Artificial Sequence: Synthetic oligonucleotide
  misc_feature 1..20: note = Target: FXN; (-) strand; PAM type: NRG; PAM sequence: AGG
  source 1..20: mol_type = other DNA
gcctgaagggctggcccaca

SEQ ID NO: 14717 - DNA, 20 bp, synthetic construct
  misc_feature 1..20: note = Description of Artificial Sequence: Synthetic oligonucleotide
  misc_feature 1..20: note = Target: FXN; (-) strand; PAM type: NRG; PAM sequence: AAG
  source 1..20: mol_type = other DNA
ggcctgaagggctggcccac

SEQ ID NO: 14718 - DNA, 20 bp, synthetic construct
  misc_feature 1..20: note = Description of Artificial Sequence: Synthetic oligonucleotide
  misc_feature 1..20: note = Target: FXN; (-) strand; PAM type: NRG; PAM sequence: TGG
  source 1..20: mol_type = other DNA
gtaaaataggcctgaagggc

SEQ ID NO: 14719 - DNA, 20 bp, synthetic construct
  misc_feature 1..20: note = Description of Artificial Sequence: Synthetic oligonucleotide
  misc_feature 1..20: note = Target: FXN; (-) strand; PAM type: NRG; PAM sequence: GGG
  source 1..20: mol_type = other DNA
gaaagtaaaataggcctgaa

SEQ ID NO: 14720 - DNA, 20 bp, synthetic construct
  misc_feature 1..20: note = Description of Artificial Sequence: Synthetic oligonucleotide
  misc_feature 1..20: note = Target: FXN; (-) strand; PAM type: NRG; PAM sequence: AGG
  source 1..20: mol_type = other DNA
tgaaagtaaaataggcctga

SEQ ID NO: 14721 - DNA, 20 bp, synthetic construct
  misc_feature 1..20: note = Description of Artificial Sequence: Synthetic oligonucleotide
  misc_feature 1..20: note = Target: FXN; (-) strand; PAM type: NRG; PAM sequence: AAG
  source 1..20: mol_type = other DNA
atgaaagtaaaataggcctg

SEQ ID NO: 14722 - DNA, 20 bp, synthetic construct
  misc_feature 1..20: note = Description of Artificial Sequence: Synthetic oligonucleotide
  misc_feature 1..20: note = Target: FXN; (-) strand; PAM type: NRG; PAM sequence: AGG
  source 1..20: mol_type = other DNA
atgtaaaatgaaagtaaaat

SEQ ID NO: 14723 - DNA, 20 bp, synthetic construct
  misc_feature 1..20: note = Description of Artificial Sequence: Synthetic oligonucleotide
  misc_feature 1..20: note = Target: FXN; (-) strand; PAM type: NRG; PAM sequence: TAG
  source 1..20: mol_type = other DNA
tatgtaaaatgaaagtaaaa

SEQ ID NO: 14724 - DNA, 20 bp, synthetic construct
  misc_feature 1..20: note = Description of Artificial Sequence: Synthetic oligonucleotide
  misc_feature 1..20: note = Target: FXN; (-) strand; PAM type: NRG; PAM sequence: AAG
  source 1..20: mol_type = other DNA
tagagctatatgtaaaatga

SEQ ID NO: 14725 - DNA, 20 bp, synthetic construct
  misc_feature 1..20: note = Description of Artificial Sequence: Synthetic oligonucleotide
  misc_feature 1..20: note = Target: FXN; (-) strand; PAM type: NRG; PAM sequence: GAG
  source 1..20: mol_type = other DNA
cgagataatcaaaccaatta

SEQ ID NO: 14726 - DNA, 20 bp, synthetic construct
  misc_feature 1..20: note = Description of Artificial Sequence: Synthetic oligonucleotide
  misc_feature 1..20: note = Target: FXN; (-) strand; PAM type: NRG; PAM sequence: TAG
  source 1..20: mol_type = other DNA
aacgagataatcaaaccaat

SEQ ID NO: 14727 - DNA, 20 bp, synthetic construct
  misc_feature 1..20: note = Description of Artificial Sequence: Synthetic oligonucleotide
  misc_feature 1..20: note = Target: FXN; (-) strand; PAM type: NRG; PAM sequence: GAG
  source 1..20: mol_type = other DNA
tctcccactgccttgggaac

SEQ ID NO: 14728 - DNA, 20 bp, synthetic construct
  misc_feature 1..20: note = Description of Artificial Sequence: Synthetic oligonucleotide
  misc_feature 1..20: note = Target: FXN; (-) strand; PAM type: NRG; PAM sequence: GGG
  source 1..20: mol_type = other DNA
tggggatctcccactgcctt

SEQ ID NO: 14729 - DNA, 20 bp, synthetic construct
  misc_feature 1..20: note = Description of Artificial Sequence: Synthetic oligonucleotide
  misc_feature 1..20: note = Target: FXN; (-) strand; PAM type: NRG; PAM sequence: TGG
  source 1..20: mol_type = other DNA
atggggatctcccactgcct

SEQ ID NO: 14730 - DNA, 20 bp, synthetic construct
  misc_feature 1..20: note = Description of Artificial Sequence: Synthetic oligonucleotide
  misc_feature 1..20: note = Target: FXN; (-) strand; PAM type: NRG; PAM sequence: GGG
  source 1..20: mol_type = other DNA
cccttttctttccttaaatg

SEQ ID NO: 14731 - DNA, 20 bp, synthetic construct
  misc_feature 1..20: note = Description of Artificial Sequence: Synthetic oligonucleotide
  misc_feature 1..20: note = Target: FXN; (-) strand; PAM type: NRG; PAM sequence: GGG
  source 1..20: mol_type = other DNA
ccccttttctttccttaaat

SEQ ID NO: 14732 - DNA, 20 bp, synthetic construct
  misc_feature 1..20: note = Description of Artificial Sequence: Synthetic oligonucleotide
  misc_feature 1..20: note = Target: FXN; (-) strand; PAM type: NRG; PAM sequence: TGG
  source 1..20: mol_type = other DNA
gccccttttctttccttaaa

SEQ ID NO: 14733 - DNA, 20 bp, synthetic construct
  misc_feature 1..20: note = Description of Artificial Sequence: Synthetic oligonucleotide
  misc_feature 1..20: note = Target: FXN; (-) strand; PAM type: NRG; PAM sequence: AGG
  source 1..20: mol_type = other DNA
caggcatgagccactgtgcc

SEQ ID NO: 14734 - DNA, 20 bp, synthetic construct
  misc_feature 1..20: note = Description of Artificial Sequence: Synthetic oligonucleotide
  misc_feature 1..20: note = Target: FXN; (-) strand; PAM type: NRG; PAM sequence: CAG
  source 1..20: mol_type = other DNA
acaggcatgagccactgtgc

SEQ ID NO: 14735 - DNA, 20 bp, synthetic construct
  misc_feature 1..20: note = Description of Artificial Sequence: Synthetic oligonucleotide
  misc_feature 1..20: note = Target: FXN; (-) strand; PAM type: NRG; PAM sequence: GAG
  source 1..20: mol_type = other DNA
agtgctgggattacaggcat

SEQ ID NO: 14736 - DNA, 20 bp, synthetic construct
  misc_feature 1..20: note = Description of Artificial Sequence: Synthetic oligonucleotide
  misc_feature 1..20: note = Target: FXN; (-) strand; PAM type: NRG; PAM sequence: AGG
  source 1..20: mol_type = other DNA
tcccaaagtgctgggattac

SEQ ID NO: 14737 - DNA, 20 bp, synthetic construct
  misc_feature 1..20: note = Description of Artificial Sequence: Synthetic oligonucleotide
  misc_feature 1..20: note = Target: FXN; (-) strand; PAM type: NRG; PAM sequence: CAG
  source 1..20: mol_type = other DNA
ctcccaaagtgctgggatta

SEQ ID NO: 14738 - DNA, 20 bp, synthetic construct
  misc_feature 1..20: note = Description of Artificial Sequence: Synthetic oligonucleotide
  misc_feature 1..20: note = Target: FXN; (-) strand; PAM type: NRG; PAM sequence: GGG
  source 1..20: mol_type = other DNA
cctcagcctcccaaagtgct

SEQ ID NO: 14739 - DNA, 20 bp, synthetic construct
  misc_feature 1..20: note = Description of Artificial Sequence: Synthetic oligonucleotide
  misc_feature 1..20: note = Target: FXN; (-) strand; PAM type: NRG; PAM sequence: TGG
  source 1..20: mol_type = other DNA
gcctcagcctcccaaagtgc

SEQ ID NO: 14740 - DNA, 20 bp, synthetic construct
  misc_feature 1..20: note = Description of Artificial Sequence: Synthetic oligonucleotide
  misc_feature 1..20: note = Target: FXN; (-) strand; PAM type: NRG; PAM sequence: AAG
  source 1..20: mol_type = other DNA
acacttgcctcagcctccca

SEQ ID NO: 14741 - DNA, 20 bp, synthetic construct
  misc_feature 1..20: note = Description of Artificial Sequence: Synthetic oligonucleotide
  misc_feature 1..20: note = Target: FXN; (-) strand; PAM type: NRG; PAM sequence: CAG
  source 1..20: mol_type = other DNA
ctcaggtgatacacttgcct

SEQ ID NO: 14742 - DNA, 20 bp, synthetic construct
  misc_feature 1..20: note = Description of Artificial Sequence: Synthetic oligonucleotide
  misc_feature 1..20: note = Target: FXN; (-) strand; PAM type: NRG; PAM sequence: AGG
  source 1..20: mol_type = other DNA
ggtcttgaactcctgacctc

SEQ ID NO: 14743 - DNA, 20 bp, synthetic construct
  misc_feature 1..20: note = Description of Artificial Sequence: Synthetic oligonucleotide
  misc_feature 1..20: note = Target: FXN; (-) strand; PAM type: NRG; PAM sequence: CAG
  source 1..20: mol_type = other DNA
tggtcttgaactcctgacct

SEQ ID NO: 14744 - DNA, 20 bp, synthetic construct
  misc_feature 1..20: note = Description of Artificial Sequence: Synthetic oligonucleotide
  misc_feature 1..20: note = Target: FXN; (-) strand; PAM type: NRG; PAM sequence: TGG
  source 1..20: mol_type = other DNA
ttttgccatgttggccaggc

SEQ ID NO: 14745 - DNA, 20 bp, synthetic construct
  misc_feature 1..20: note = Description of Artificial Sequence: Synthetic oligonucleotide
  misc_feature 1..20: note = Target: FXN; (-) strand; PAM type: NRG; PAM sequence: AGG
  source 1..20: mol_type = other DNA
gggattttgccatgttggcc

SEQ ID NO: 14746 - DNA, 20 bp, synthetic construct
  misc_feature 1..20: note = Description of Artificial Sequence: Synthetic oligonucleotide
  misc_feature 1..20: note = Target: FXN; (-) strand; PAM type: NRG; PAM sequence: CAG
  source 1..20: mol_type = other DNA
cgggattttgccatgttggc

SEQ ID NO: 14747 - DNA, 20 bp, synthetic construct
  misc_feature 1..20: note = Description of Artificial Sequence: Synthetic oligonucleotide
  misc_feature 1..20: note = Target: FXN; (-) strand; PAM type: NRG; PAM sequence: TGG
  source 1..20: mol_type = other DNA
gagacgggattttgccatgt

SEQ ID NO: 14748 - DNA, 20 bp, synthetic construct
  misc_feature 1..20: note = Description of Artificial Sequence: Synthetic oligonucleotide
  misc_feature 1..20: note = Target: FXN; (-) strand; PAM type: NRG; PAM sequence: GGG
  source 1..20: mol_type = other DNA
ttaatatttttagtagagac

SEQ ID NO: 14749 - DNA, 20 bp, synthetic construct
  misc_feature 1..20: note = Description of Artificial Sequence: Synthetic oligonucleotide
  misc_feature 1..20: note = Target: FXN; (-) strand; PAM type: NRG; PAM sequence: CGG
  source 1..20: mol_type = other DNA
tttaatatttttagtagaga

SEQ ID NO: 14750 - DNA, 20 bp, synthetic construct
  misc_feature 1..20: note = Description of Artificial Sequence: Synthetic oligonucleotide
  misc_feature 1..20: note = Target: FXN; (-) strand; PAM type: NRG; PAM sequence: GAG
  source 1..20: mol_type = other DNA
attttttaatatttttagta

SEQ ID NO: 14751 - DNA, 20 bp, synthetic construct
  misc_feature 1..20: note = Description of Artificial Sequence: Synthetic oligonucleotide
  misc_feature 1..20: note = Target: FXN; (-) strand; PAM type: NRG; PAM sequence: TAG
  source 1..20: mol_type = other DNA
caattttttaatatttttag

SEQ ID NO: 14752 - DNA, 20 bp, synthetic construct
  misc_feature 1..20: note = Description of Artificial Sequence: Synthetic oligonucleotide
  misc_feature 1..20: note = Target: FXN; (-) strand; PAM type: NRG; PAM sequence: TAG
  source 1..20: mol_type = other DNA
agccaattttttaatatttt

SEQ ID NO: 14753 - DNA, 20 bp, synthetic construct
  misc_feature 1..20: note = Description of Artificial Sequence: Synthetic oligonucleotide
  misc_feature 1..20: note = Target: FXN; (-) strand; PAM type: NRG; PAM sequence: CAG
  source 1..20: mol_type = other DNA
taggcacgaaccaccacgcc

SEQ ID NO: 14754 - DNA, 20 bp, synthetic construct
  misc_feature 1..20: note = Description of Artificial Sequence: Synthetic oligonucleotide
  misc_feature 1..20: note = Target: FXN; (-) strand; PAM type: NRG; PAM sequence: AGG
  source 1..20: mol_type = other DNA
tcctgagtagctgaaattat

SEQ ID NO: 14755 - DNA, 20 bp, synthetic construct
  misc_feature 1..20: note = Description of Artificial Sequence: Synthetic oligonucleotide
  misc_feature 1..20: note = Target: FXN; (-) strand; PAM type: NRG; PAM sequence: TAG
  source 1..20: mol_type = other DNA
ctcctgagtagctgaaatta

SEQ ID NO: 14756 - DNA, 20 bp, synthetic construct
  misc_feature 1..20: note = Description of Artificial Sequence: Synthetic oligonucleotide
  misc_feature 1..20: note = Target: FXN; (-) strand; PAM type: NRG; PAM sequence: TAG
  source 1..20: mol_type = other DNA
tcctgcctcagcctcctgag

SEQ ID NO: 14757 - DNA, 20 bp, synthetic construct
  misc_feature 1..20: note = Description of Artificial Sequence: Synthetic oligonucleotide
  misc_feature 1..20: note = Target: FXN; (-) strand; PAM type: NRG; PAM sequence: GAG
  source 1..20: mol_type = other DNA
ttctcctgcctcagcctcct

SEQ ID NO: 14758 - DNA, 20 bp, synthetic construct
  misc_feature 1..20: note = Description of Artificial Sequence: Synthetic oligonucleotide
  misc_feature 1..20: note = Target: FXN; (-) strand; PAM type: NRG; PAM sequence: CAG
  source 1..20: mol_type = other DNA
ttacagcgattctcctgcct

SEQ ID NO: 14759 - DNA, 20 bp, synthetic construct
  misc_feature 1..20: note = Description of Artificial Sequence: Synthetic oligonucleotide
  misc_feature 1..20: note = Target: FXN; (-) strand; PAM type: NRG; PAM sequence: CAG
  source 1..20: mol_type = other DNA
aacctccaccccccaggtta

SEQ ID NO: 14760 - DNA, 20 bp, synthetic construct
  misc_feature 1..20: note = Description of Artificial Sequence: Synthetic oligonucleotide
  misc_feature 1..20: note = Target: FXN; (-) strand; PAM type: NRG; PAM sequence: AGG
  source 1..20: mol_type = other DNA
cactgcaacctccacccccc

SEQ ID NO: 14761 - DNA, 20 bp, synthetic construct
  misc_feature 1..20: note = Description of Artificial Sequence: Synthetic oligonucleotide
  misc_feature 1..20: note = Target: FXN; (-) strand; PAM type: NRG; PAM sequence: CAG
  source 1..20: mol_type = other DNA
tcactgcaacctccaccccc

SEQ ID NO: 14762 - DNA, 20 bp, synthetic construct
  misc_feature 1..20: note = Description of Artificial Sequence: Synthetic oligonucleotide
  misc_feature 1..20: note = Target: FXN; (-) strand; PAM type: NRG; PAM sequence: TGG
  source 1..20: mol_type = other DNA
ttggccaggctggagtgaag

SEQ ID NO: 14763 - DNA, 20 bp, synthetic construct
  misc_feature 1..20: note = Description of Artificial Sequence: Synthetic oligonucleotide
  misc_feature 1..20: note = Target: FXN; (-) strand; PAM type: NRG; PAM sequence: AAG
  source 1..20: mol_type = other DNA
ctgttggccaggctggagtg

SEQ ID NO: 14764 - DNA, 20 bp, synthetic construct
  misc_feature 1..20: note = Description of Artificial Sequence: Synthetic oligonucleotide
  misc_feature 1..20: note = Target: FXN; (-) strand; PAM type: NRG; PAM sequence: GAG
  source 1..20: mol_type = other DNA
tggctctgttggccaggctg

SEQ ID NO: 14765 - DNA, 20 bp, synthetic construct
  misc_feature 1..20: note = Description of Artificial Sequence: Synthetic oligonucleotide
  misc_feature 1..20: note = Target: FXN; (-) strand; PAM type: NRG; PAM sequence: TGG
  source 1..20: mol_type = other DNA
tatggctctgttggccaggc

SEQ ID NO: 14766 - DNA, 20 bp, synthetic construct
  misc_feature 1..20: note = Description of Artificial Sequence: Synthetic oligonucleotide
  misc_feature 1..20: note = Target: FXN; (-) strand; PAM type: NRG; PAM sequence: AGG
  source 1..20: mol_type = other DNA
ggagtatggctctgttggcc

SEQ ID NO: 14767 - DNA, 20 bp, synthetic construct
  misc_feature 1..20: note = Description of Artificial Sequence: Synthetic oligonucleotide
  misc_feature 1..20: note = Target: FXN; (-) strand; PAM type: NRG; PAM sequence: CAG
  source 1..20: mol_type = other DNA
cggagtatggctctgttggc

SEQ ID NO: 14768 - DNA, 20 bp, synthetic construct
  misc_feature 1..20: note = Description of Artificial Sequence: Synthetic oligonucleotide
  misc_feature 1..20: note = Target: FXN; (-) strand; PAM type: NRG; PAM sequence: TGG
  source 1..20: mol_type = other DNA
gagacggagtatggctctgt

SEQ ID NO: 14769 - DNA, 20 bp, synthetic construct
  misc_feature 1..20: note = Description of Artificial Sequence: Synthetic oligonucleotide
  misc_feature 1..20: note = Target: FXN; (-) strand; PAM type: NRG; PAM sequence: TGG
  source 1..20: mol_type = other DNA
tatttatttgagacggagta

SEQ ID NO: 14770 - DNA, 20 bp, synthetic construct
  misc_feature 1..20: note = Description of Artificial Sequence: Synthetic oligonucleotide
  misc_feature 1..20: note = Target: FXN; (-) strand; PAM type: NRG; PAM sequence: GAG
  source 1..20: mol_type = other DNA
ttatttatttatttgagacg

SEQ ID NO: 14771 - DNA, 20 bp, synthetic construct
  misc_feature 1..20: note = Description of Artificial Sequence: Synthetic oligonucleotide
  misc_feature 1..20: note = Target: FXN; (-) strand; PAM type: NRG; PAM sequence: CGG
  source 1..20: mol_type = other DNA
atttatttatttatttgaga

SEQ ID NO: 14772 - DNA, 20 bp, synthetic construct
  misc_feature 1..20: note = Description of Artificial Sequence: Synthetic oligonucleotide
  misc_feature 1..20: note = Target: FXN; (-) strand; PAM type: NRG; PAM sequence: GAG
  source 1..20: mol_type = other DNA
atttatttatttatttattt

SEQ ID NO: 14773 - DNA, 20 bp, synthetic construct
  misc_feature 1..20: note = Description of Artificial Sequence: Synthetic oligonucleotide
  misc_feature 1..20: note = Target: FXN; (-) strand; PAM type: NRG; PAM sequence: AAG
  source 1..20: mol_type = other DNA
ggctgctgttcatgtgtttg

SEQ ID NO: 14774 - DNA, 20 bp, synthetic construct
  misc_feature 1..20: note = Description of Artificial Sequence: Synthetic oligonucleotide
  misc_feature 1..20: note = Target: FXN; (-) strand; PAM type: NRG; PAM sequence: TGG
  source 1..20: mol_type = other DNA
tatgattttgattcttcccc

SEQ ID NO: 14775 - DNA, 20 bp, synthetic construct
  misc_feature 1..20: note = Description of Artificial Sequence: Synthetic oligonucleotide
  misc_feature 1..20: note = Target: FXN; (-) strand; PAM type: NRG; PAM sequence: CAG
  source 1..20: mol_type = other DNA
tacttttccagtttgcttga

SEQ ID NO: 14776 - DNA, 20 bp, synthetic construct
  misc_feature 1..20: note = Description of Artificial Sequence: Synthetic oligonucleotide
  misc_feature 1..20: note = Target: FXN; (-) strand; PAM type: NRG; PAM sequence: CAG
  source 1..20: mol_type = other DNA
tacacacagtggtacttttc

SEQ ID NO: 14777 - DNA, 20 bp, synthetic construct
  misc_feature 1..20: note = Description of Artificial Sequence: Synthetic oligonucleotide
  misc_feature 1..20: note = Target: FXN; (-) strand; PAM type: NRG; PAM sequence: TGG
  source 1..20: mol_type = other DNA
gaggctattggtacacacag

SEQ ID NO: 14778 - DNA, 20 bp, synthetic construct
  misc_feature 1..20: note = Description of Artificial Sequence: Synthetic oligonucleotide
  misc_feature 1..20: note = Target: FXN; (-) strand; PAM type: NRG; PAM sequence: CAG
  source 1..20: mol_type = other DNA
ggggaggctattggtacaca

SEQ ID NO: 14779 - DNA, 20 bp, synthetic construct
  misc_feature 1..20: note = Description of Artificial Sequence: Synthetic oligonucleotide
  misc_feature 1..20: note = Target: FXN; (-) strand; PAM type: NRG; PAM sequence: TGG
  source 1..20: mol_type = other DNA
gtctgtggtggggaggctat

SEQ ID NO: 14780 - DNA, 20 bp, synthetic construct
  misc_feature 1..20: note = Description of Artificial Sequence: Synthetic oligonucleotide
  misc_feature 1..20: note = Target: FXN; (-) strand; PAM type: NRG; PAM sequence: AGG
  source 1..20: mol_type = other DNA
tcccagggtctgtggtgggg

SEQ ID NO: 14781 - DNA, 20 bp, synthetic construct
  misc_feature 1..20: note = Description of Artificial Sequence: Synthetic oligonucleotide
  misc_feature 1..20: note = Target: FXN; (-) strand; PAM type: NRG; PAM sequence: GAG
  source 1..20: mol_type = other DNA
ctcccagggtctgtggtggg

SEQ ID NO: 14782 - DNA, 20 bp, synthetic construct
  misc_feature 1..20: note = Description of Artificial Sequence: Synthetic oligonucleotide
  misc_feature 1..20: note = Target: FXN; (-) strand; PAM type: NRG; PAM sequence: GGG
  source 1..20: mol_type = other DNA
tgctcccagggtctgtggtg

SEQ ID NO: 14783 - DNA, 20 bp, synthetic construct
  misc_feature 1..20: note = Description of Artificial Sequence: Synthetic oligonucleotide
  misc_feature 1..20: note = Target: FXN; (-) strand; PAM type: NRG; PAM sequence: GGG
  source 1..20: mol_type = other DNA
atgctcccagggtctgtggt

SEQ ID NO: 14784 - DNA, 20 bp, synthetic construct
  misc_feature 1..20: note = Description of Artificial Sequence: Synthetic oligonucleotide
  misc_feature 1..20: note = Target: FXN; (-) strand; PAM type: NRG; PAM sequence: TGG
  source 1..20: mol_type = other DNA
gatgctcccagggtctgtgg

SEQ ID NO: 14785 - DNA, 20 bp, synthetic construct
  misc_feature 1..20: note = Description of Artificial Sequence: Synthetic oligonucleotide
  misc_feature 1..20: note = Target: FXN; (-) strand; PAM type: NRG; PAM sequence: TGG
  source 1..20: mol_type = other DNA
ggcgatgctcccagggtctg

SEQ ID NO: 14786 - DNA, 20 bp, synthetic construct
  misc_feature 1..20: note = Description of Artificial Sequence: Synthetic oligonucleotide
  misc_feature 1..20: note = Target: FXN; (-) strand; PAM type: NRG; PAM sequence: GGG
  source 1..20: mol_type = other DNA
taaatgaggcgatgctccca

SEQ ID NO: 14787 - DNA, 20 bp, synthetic construct
  misc_feature 1..20: note = Description of Artificial Sequence: Synthetic oligonucleotide
  misc_feature 1..20: note = Target: FXN; (-) strand; PAM type: NRG; PAM sequence: AGG
  source 1..20: mol_type = other DNA
ataaatgaggcgatgctccc

SEQ ID NO: 14788 - DNA, 20 bp, synthetic construct
  misc_feature 1..20: note = Description of Artificial Sequence: Synthetic oligonucleotide
  misc_feature 1..20: note = Target: FXN; (-) strand; PAM type: NRG; PAM sequence: CAG
  source 1..20: mol_type = other DNA
cataaatgaggcgatgctcc

SEQ ID NO: 14789 - DNA, 20 bp, synthetic construct
  misc_feature 1..20: note = Description of Artificial Sequence: Synthetic oligonucleotide
  misc_feature 1..20: note = Target: FXN; (-) strand; PAM type: NRG; PAM sequence: AGG
  source 1..20: mol_type = other DNA
actggaccacaccataaatg

SEQ ID NO: 14790 - DNA, 20 bp, synthetic construct
  misc_feature 1..20: note = Description of Artificial Sequence: Synthetic oligonucleotide
  misc_feature 1..20: note = Target: FXN; (-) strand; PAM type: NRG; PAM sequence: GAG
  source 1..20: mol_type = other DNA
gactggaccacaccataaat

SEQ ID NO: 14791 - DNA, 20 bp, synthetic construct
  misc_feature 1..20: note = Description of Artificial Sequence: Synthetic oligonucleotide
  misc_feature 1..20: note = Target: FXN; (-) strand; PAM type: NRG; PAM sequence: TGG
  source 1..20: mol_type = other DNA
tcatccttcacatggatgac

SEQ ID NO: 14792 - DNA, 20 bp, synthetic construct
  misc_feature 1..20: note = Description of Artificial Sequence: Synthetic oligonucleotide
  misc_feature 1..20: note = Target: FXN; (-) strand; PAM type: NRG; PAM sequence: TGG
  source 1..20: mol_type = other DNA
ctggaaactcatccttcaca

SEQ ID NO: 14793 - DNA, 20 bp, synthetic construct
  misc_feature 1..20: note = Description of Artificial Sequence: Synthetic oligonucleotide
  misc_feature 1..20: note = Target: FXN; (-) strand; PAM type: NRG; PAM sequence: TGG
  source 1..20: mol_type = other DNA
aatatttaataaccttttcc

SEQ ID NO: 14794 - DNA, 20 bp, synthetic construct
  misc_feature 1..20: note = Description of Artificial Sequence: Synthetic oligonucleotide
  misc_feature 1..20: note = Target: FXN; (-) strand; PAM type: NRG; PAM sequence: CAG
  source 1..20: mol_type = other DNA
tcacctcctccagtatgtta

SEQ ID NO: 14795 - DNA, 20 bp, synthetic construct
  misc_feature 1..20: note = Description of Artificial Sequence: Synthetic oligonucleotide
  misc_feature 1..20: note = Target: FXN; (-) strand; PAM type: NRG; PAM sequence: CAG
  source 1..20: mol_type = other DNA
atgcaattcctcacctcctc

SEQ ID NO: 14796 - DNA, 20 bp, synthetic construct
  misc_feature 1..20: note = Description of Artificial Sequence: Synthetic oligonucleotide
  misc_feature 1..20: note = Target: FXN; (-) strand; PAM type: NRG; PAM sequence: AAG
  source 1..20: mol_type = other DNA
aggggaaaaaaaagttttct

SEQ ID NO: 14797 - DNA, 20 bp, synthetic construct
  misc_feature 1..20: note = Description of Artificial Sequence: Synthetic oligonucleotide
  misc_feature 1..20: note = Target: FXN; (-) strand; PAM type: NRG; PAM sequence: AAG
  source 1..20: mol_type = other DNA
aaaatagaaaggggaaaaaa

SEQ ID NO: 14798 - DNA, 20 bp, synthetic construct
  misc_feature 1..20: note = Description of Artificial Sequence: Synthetic oligonucleotide
  misc_feature 1..20: note = Target: FXN; (-) strand; PAM type: NRG; PAM sequence: GGG
  source 1..20: mol_type = other DNA
ctgtctcaaaaaatagaaag

SEQ ID NO: 14799 - DNA, 20 bp, synthetic construct
  misc_feature 1..20: note = Description of Artificial Sequence: Synthetic oligonucleotide
  misc_feature 1..20: note = Target: FXN; (-) strand; PAM type: NRG; PAM sequence: GGG
  source 1..20: mol_type = other DNA
cctgtctcaaaaaatagaaa

SEQ ID NO: 14800 - DNA, 20 bp, synthetic construct
  misc_feature 1..20: note = Description of Artificial Sequence: Synthetic oligonucleotide
  misc_feature 1..20: note = Target: FXN; (-) strand; PAM type: NRG; PAM sequence: AGG
  source 1..20: mol_type = other DNA
tcctgtctcaaaaaatagaa

SEQ ID NO: 14801 - DNA, 20 bp, synthetic construct
  misc_feature 1..20: note = Description of Artificial Sequence: Synthetic oligonucleotide
  misc_feature 1..20: note = Target: FXN; (-) strand; PAM type: NRG; PAM sequence: AAG
  source 1..20: mol_type = other DNA
atcctgtctcaaaaaataga

SEQ ID NO: 14802 - DNA, 20 bp, synthetic construct
  misc_feature 1..20: note = Description of Artificial Sequence: Synthetic oligonucleotide
  misc_feature 1..20: note = Target: FXN; (-) strand; PAM type: NRG; PAM sequence: TAG
  source 1..20: mol_type = other DNA
tgagatcctgtctcaaaaaa

SEQ ID NO: 14803 - DNA, 20 bp, synthetic construct
  misc_feature 1..20: note = Description of Artificial Sequence: Synthetic oligonucleotide
  misc_feature 1..20: note = Target: FXN; (-) strand; PAM type: NRG; PAM sequence: GAG
  source 1..20: mol_type = other DNA
tccagcctgagtgccaaagt

SEQ ID NO: 14804 - DNA, 20 bp, synthetic construct
  misc_feature 1..20: note = Description of Artificial Sequence: Synthetic oligonucleotide
  misc_feature 1..20: note = Target: FXN; (-) strand; PAM type: NRG; PAM sequence: AAG
  source 1..20: mol_type = other DNA
gtcctccagcctgagtgcca

SEQ ID NO: 14805 - DNA, 20 bp, synthetic construct
  misc_feature 1..20: note = Description of Artificial Sequence: Synthetic oligonucleotide
  misc_feature 1..20: note = Target: FXN; (-) strand; PAM type: NRG; PAM sequence: GAG
  source 1..20: mol_type = other DNA
gtaccactgtcctccagcct

SEQ ID NO: 14806 - DNA, 20 bp, synthetic construct
  misc_feature 1..20: note = Description of Artificial Sequence: Synthetic oligonucleotide
  misc_feature 1..20: note = Target: FXN; (-) strand; PAM type: NRG; PAM sequence: CAG
  source 1..20: mol_type = other DNA
ttgattgtaccactgtcctc

SEQ ID NO: 14807 - DNA, 20 bp, synthetic construct
  misc_feature 1..20: note = Description of Artificial Sequence: Synthetic oligonucleotide
  misc_feature 1..20: note = Target: FXN; (-) strand; PAM type: NRG; PAM sequence: GAG
  source 1..20: mol_type = other DNA
agggaggtcgaggctgccat

SEQ ID NO: 14808 - DNA, 20 bp, synthetic construct
  misc_feature 1..20: note = Description of Artificial Sequence: Synthetic oligonucleotide
  misc_feature 1..20: note = Target: FXN; (-) strand; PAM type: NRG; PAM sequence: AGG
  source 1..20: mol_type = other DNA
gcccaagcccagggaggtcg

SEQ ID NO: 14809 - DNA, 20 bp, synthetic construct
  misc_feature 1..20: note = Description of Artificial Sequence: Synthetic oligonucleotide
  misc_feature 1..20: note = Target: FXN; (-) strand; PAM type: NRG; PAM sequence: GAG
  source 1..20: mol_type = other DNA
tgcccaagcccagggaggtc

SEQ ID NO: 14810 - DNA, 20 bp, synthetic construct
  misc_feature 1..20: note = Description of Artificial Sequence: Synthetic oligonucleotide
  misc_feature 1..20: note = Target: FXN; (-) strand; PAM type: NRG; PAM sequence: AGG
  source 1..20: mol_type = other DNA
aggattgcccaagcccaggg

SEQ ID NO: 14811 - DNA, 20 bp, synthetic construct
  misc_feature 1..20: note = Description of Artificial Sequence: Synthetic oligonucleotide
  misc_feature 1..20: note = Target: FXN; (-) strand; PAM type: NRG; PAM sequence: GAG
  source 1..20: mol_type = other DNA
gaggattgcccaagcccagg

SEQ ID NO: 14812 - DNA, 20 bp, synthetic construct
  misc_feature 1..20: note = Description of Artificial Sequence: Synthetic oligonucleotide
  misc_feature 1..20: note = Target: FXN; (-) strand; PAM type: NRG; PAM sequence: GGG
  source 1..20: mol_type = other DNA
gggaggattgcccaagccca

SEQ ID NO: 14813 - DNA, 20 bp, synthetic construct
  misc_feature 1..20: note = Description of Artificial Sequence: Synthetic oligonucleotide
  misc_feature 1..20: note = Target: FXN; (-) strand; PAM type: NRG; PAM sequence: AGG
  source 1..20: mol_type = other DNA
tgggaggattgcccaagccc

SEQ ID NO: 14814 - DNA, 20 bp, synthetic construct
  misc_feature 1..20: note = Description of Artificial Sequence: Synthetic oligonucleotide
  misc_feature 1..20: note = Target: FXN; (-) strand; PAM type: NRG; PAM sequence: CAG
  source 1..20: mol_type = other DNA
gtgggaggattgcccaagcc

SEQ ID NO: 14815 - DNA, 20 bp, synthetic construct
  misc_feature 1..20: note = Description of Artificial Sequence: Synthetic oligonucleotide
  misc_feature 1..20: note = Target: FXN; (-) strand; PAM type: NRG; PAM sequence: AAG
  source 1..20: mol_type = other DNA
cacctgtgggaggattgccc

SEQ ID NO: 14816 - DNA, 20 bp, synthetic construct
  misc_feature 1..20: note = Description of Artificial Sequence: Synthetic oligonucleotide
  misc_feature 1..20: note = Target: FXN; (-) strand; PAM type: NRG; PAM sequence: AGG
  source 1..20: mol_type = other DNA
tggaggtgcacacctgtggg

SEQ ID NO: 14817 - DNA, 20 bp, synthetic construct
  misc_feature 1..20: note = Description of Artificial Sequence: Synthetic oligonucleotide
  misc_feature 1..20: note = Target: FXN; (-) strand; PAM type: NRG; PAM sequence: GAG
  source 1..20: mol_type = other DNA
atggaggtgcacacctgtgg

SEQ ID NO: 14818 - DNA, 20 bp, synthetic construct
  misc_feature 1..20: note = Description of Artificial Sequence: Synthetic oligonucleotide
  misc_feature 1..20: note = Target: FXN; (-) strand; PAM type: NRG; PAM sequence: GGG
  source 1..20: mol_type = other DNA
ctatggaggtgcacacctgt

SEQ ID NO: 14819 - DNA, 20 bp, synthetic construct
  misc_feature 1..20: note = Description of Artificial Sequence: Synthetic oligonucleotide
  misc_feature 1..20: note = Target: FXN; (-) strand; PAM type: NRG; PAM sequence: TGG
  source 1..20: mol_type = other DNA
gctatggaggtgcacacctg

SEQ ID NO: 14820 - DNA, 20 bp, synthetic construct
  misc_feature 1..20: note = Description of Artificial Sequence: Synthetic oligonucleotide
  misc_feature 1..20: note = Target: FXN; (-) strand; PAM type: NRG; PAM sequence: AGG
  source 1..20: mol_type = other DNA
cacaaattagccagctatgg

SEQ ID NO: 14821 - DNA, 20 bp, synthetic construct
  misc_feature 1..20: note = Description of Artificial Sequence: Synthetic oligonucleotide
  misc_feature 1..20: note = Target: FXN; (-) strand; PAM type: NRG; PAM sequence: GAG
  source 1..20: mol_type = other DNA
acacaaattagccagctatg

SEQ ID NO: 14822 - DNA, 20 bp, synthetic construct
  misc_feature 1..20: note = Description of Artificial Sequence: Synthetic oligonucleotide
  misc_feature 1..20: note = Target: FXN; (-) strand; PAM type: NRG; PAM sequence: TGG
  source 1..20: mol_type = other DNA
atacacaaattagccagcta

SEQ ID NO: 14823 - DNA, 20 bp, synthetic construct
  misc_feature 1..20: note = Description of Artificial Sequence: Synthetic oligonucleotide
  misc_feature 1..20: note = Target: FXN; (-) strand; PAM type: NRG; PAM sequence: CAG
  source 1..20: mol_type = other DNA
caaaaaatacacaaattagc

SEQ ID NO: 14824 - DNA, 20 bp, synthetic construct
  misc_feature 1..20: note = Description of Artificial Sequence: Synthetic oligonucleotide
  misc_feature 1..20: note = Target: FXN; (-) strand; PAM type: NRG; PAM sequence: TAG
  source 1..20: mol_type = other DNA
tctacaaaaaatacacaaat

SEQ ID NO: 14825 - DNA, 20 bp, synthetic construct
  misc_feature 1..20: note = Description of Artificial Sequence: Synthetic oligonucleotide
  misc_feature 1..20: note = Target: FXN; (-) strand; PAM type: NRG; PAM sequence: TGG
  source 1..20: mol_type = other DNA
agagaccagcctgggcaaca

SEQ ID NO: 14826 - DNA, 20 bp, synthetic construct
  misc_feature 1..20: note = Description of Artificial Sequence: Synthetic oligonucleotide
  misc_feature 1..20: note = Target: FXN; (-) strand; PAM type: NRG; PAM sequence: GGG
  source 1..20: mol_type = other DNA
taagtgttagagaccagcct

SEQ ID NO: 14827 - DNA, 20 bp, synthetic construct
  misc_feature 1..20: note = Description of Artificial Sequence: Synthetic oligonucleotide
  misc_feature 1..20: note = Target: FXN; (-) strand; PAM type: NRG; PAM sequence: TGG
  source 1..20: mol_type = other DNA
ctaagtgttagagaccagcc

SEQ ID NO: 14828 - DNA, 20 bp, synthetic construct
  misc_feature 1..20: note = Description of Artificial Sequence: Synthetic oligonucleotide
  misc_feature 1..20: note = Target: FXN; (-) strand; PAM type: NRG; PAM sequence: CAG
  source 1..20: mol_type = other DNA
tgagcctaagtgttagagac

SEQ ID NO: 14829 - DNA, 20 bp, synthetic construct
  misc_feature 1..20: note = Description of Artificial Sequence: Synthetic oligonucleotide
  misc_feature 1..20: note = Target: FXN; (-) strand; PAM type: NRG; PAM sequence: GAG
  source 1..20: mol_type = other DNA
tcacttgagcctaagtgtta

SEQ ID NO: 14830 - DNA, 20 bp, synthetic construct
  misc_feature 1..20: note = Description of Artificial Sequence: Synthetic oligonucleotide
  misc_feature 1..20: note = Target: FXN; (-) strand; PAM type: NRG; PAM sequence: TAG
  source 1..20: mol_type = other DNA
gatcacttgagcctaagtgt

SEQ ID NO: 14831 - DNA, 20 bp, synthetic construct
  misc_feature 1..20: note = Description of Artificial Sequence: Synthetic oligonucleotide
  misc_feature 1..20: note = Target: FXN; (-) strand; PAM type: NRG; PAM sequence: AAG
  source 1..20: mol_type = other DNA
caggtggatcacttgagcct

SEQ ID NO: 14832 - DNA, 20 bp, synthetic construct
  misc_feature 1..20: note = Description of Artificial Sequence: Synthetic oligonucleotide
  misc_feature 1..20: note = Target: FXN; (-) strand; PAM type: NRG; PAM sequence: GAG
  source 1..20: mol_type = other DNA
acgaggcaggtggatcactt

SEQ ID NO: 14833 - DNA, 20 bp, synthetic construct
  misc_feature 1..20: note = Description of Artificial Sequence: Synthetic oligonucleotide
  misc_feature 1..20: note = Target: FXN; (-) strand; PAM type: NRG; PAM sequence: TGG
  source 1..20: mol_type = other DNA
tcttgggaggacgaggcagg

SEQ ID NO: 14834 - DNA, 20 bp, synthetic construct
  misc_feature 1..20: note = Description of Artificial Sequence: Synthetic oligonucleotide
  misc_feature 1..20: note = Target: FXN; (-) strand; PAM type: NRG; PAM sequence: AGG
  source 1..20: mol_type = other DNA
gcatcttgggaggacgaggc

SEQ ID NO: 14835 - DNA, 20 bp, synthetic construct
  misc_feature 1..20: note = Description of Artificial Sequence: Synthetic oligonucleotide
  misc_feature 1..20: note = Target: FXN; (-) strand; PAM type: NRG; PAM sequence: CAG
  source 1..20: mol_type = other DNA
agcatcttgggaggacgagg

SEQ ID NO: 14836 - DNA, 20 bp, synthetic construct
  misc_feature 1..20: note = Description of Artificial Sequence: Synthetic oligonucleotide
  misc_feature 1..20: note = Target: FXN; (-) strand; PAM type: NRG; PAM sequence: AGG
  source 1..20: mol_type = other DNA
cccagcatcttgggaggacg

SEQ ID NO: 14837 - DNA, 20 bp, synthetic construct
  misc_feature 1..20: note = Description of Artificial Sequence: Synthetic oligonucleotide
  misc_feature 1..20: note = Target: FXN; (-) strand; PAM type: NRG; PAM sequence: GAG
  source 1..20: mol_type = other DNA
tcccagcatcttgggaggac

SEQ ID NO: 14838 - DNA, 20 bp, synthetic construct
  misc_feature 1..20: note = Description of Artificial Sequence: Synthetic oligonucleotide
  misc_feature 1..20: note = Target: FXN; (-) strand; PAM type: NRG; PAM sequence: AGG
  source 1..20: mol_type = other DNA
tgtaatcccagcatcttggg

SEQ ID NO: 14839 - DNA, 20 bp, synthetic construct
  misc_feature 1..20: note = Description of Artificial Sequence: Synthetic oligonucleotide
  misc_feature 1..20: note = Target: FXN; (-) strand; PAM type: NRG; PAM sequence: GAG
  source 1..20: mol_type = other DNA
ctgtaatcccagcatcttgg

SEQ ID NO: 14840 - DNA, 20 bp, synthetic construct
  misc_feature 1..20: note = Description of Artificial Sequence: Synthetic oligonucleotide
  misc_feature 1..20: note = Target: FXN; (-) strand; PAM type: NRG; PAM sequence: GGG
  source 1..20: mol_type = other DNA
acctgtaatcccagcatctt

SEQ ID NO: 14841 - DNA, 20 bp, synthetic construct
  misc_feature 1..20: note = Description of Artificial Sequence: Synthetic oligonucleotide
  misc_feature 1..20: note = Target: FXN; (-) strand; PAM type: NRG; PAM sequence: TGG
  source 1..20: mol_type = other DNA
cacctgtaatcccagcatct

SEQ ID NO: 14842 - DNA, 20 bp, synthetic construct
  misc_feature 1..20: note = Description of Artificial Sequence: Synthetic oligonucleotide
  misc_feature 1..20: note = Target: FXN; (-) strand; PAM type: NRG; PAM sequence: CAG
  source 1..20: mol_type = other DNA
gtggcacacacctgtaatcc

SEQ ID NO: 14843 - DNA, 20 bp, synthetic construct
  misc_feature 1..20: note = Description of Artificial Sequence: Synthetic oligonucleotide
  misc_feature 1..20: note = Target: FXN; (-) strand; PAM type: NRG; PAM sequence: TGG
  source 1..20: mol_type = other DNA
agctttctgatgaacacctg

SEQ ID NO: 14844 - DNA, 20 bp, synthetic construct
  misc_feature 1..20: note = Description of Artificial Sequence: Synthetic oligonucleotide
  misc_feature 1..20: note = Target: FXN; (-) strand; PAM type: NRG; PAM sequence: AAG
  source 1..20: mol_type = other DNA
gaaggtaaaaataatagaaa

SEQ ID NO: 14845 - DNA, 20 bp, synthetic construct
  misc_feature 1..20: note = Description of Artificial Sequence: Synthetic oligonucleotide
  misc_feature 1..20: note = Target: FXN; (-) strand; PAM type: NRG; PAM sequence: TAG
  source 1..20: mol_type = other DNA
actcaagaaggtaaaaataa

SEQ ID NO: 14846 - DNA, 20 bp, synthetic construct
  misc_feature 1..20: note = Description of Artificial Sequence: Synthetic oligonucleotide
  misc_feature 1..20: note = Target: FXN; (-) strand; PAM type: NRG; PAM sequence: AGG
  source 1..20: mol_type = other DNA
gaggttctacccactcaaga

SEQ ID NO: 14847 - DNA, 20 bp, synthetic construct
  misc_feature 1..20: note = Description of Artificial Sequence: Synthetic oligonucleotide
  misc_feature 1..20: note = Target: FXN; (-) strand; PAM type: NRG; PAM sequence: AAG
  source 1..20: mol_type = other DNA
tgaggttctacccactcaag

SEQ ID NO: 14848 - DNA, 20 bp, synthetic construct
  misc_feature 1..20: note = Description of Artificial Sequence: Synthetic oligonucleotide
  misc_feature 1..20: note = Target: FXN; (-) strand; PAM type: NRG; PAM sequence: AAG
  source 1..20: mol_type = other DNA
ggctgaggttctacccactc

SEQ ID NO: 14849 - DNA, 20 bp, synthetic construct
  misc_feature 1..20: note = Description of Artificial Sequence: Synthetic oligonucleotide
  misc_feature 1..20: note = Target: FXN; (-) strand; PAM type: NRG; PAM sequence: AGG
  source 1..20: mol_type = other DNA
ttttattttctatgtggctg

SEQ ID NO: 14850 - DNA, 20 bp, synthetic construct
  misc_feature 1..20: note = Description of Artificial Sequence: Synthetic oligonucleotide
  misc_feature 1..20: note = Target: FXN; (-) strand; PAM type: NRG; PAM sequence: GAG
  source 1..20: mol_type = other DNA
attttattttctatgtggct

SEQ ID NO: 14851 - DNA, 20 bp, synthetic construct
  misc_feature 1..20: note = Description of Artificial Sequence: Synthetic oligonucleotide
  misc_feature 1..20: note = Target: FXN; (-) strand; PAM type: NRG; PAM sequence: TGG
  source 1..20: mol_type = other DNA
agaacattttattttctatg

SEQ ID NO: 14852 - DNA, 20 bp, synthetic construct
  misc_feature 1..20: note = Description of Artificial Sequence: Synthetic oligonucleotide
  misc_feature 1..20: note = Target: FXN; (-) strand; PAM type: NRG; PAM sequence: CAG
  source 1..20: mol_type = other DNA
gagagctaaataagtcatgc

SEQ ID NO: 14853 - DNA, 20 bp, synthetic construct
  misc_feature 1..20: note = Description of Artificial Sequence: Synthetic oligonucleotide
  misc_feature 1..20: note = Target: FXN; (-) strand; PAM type: NRG; PAM sequence: AAG
  source 1..20: mol_type = other DNA
gtaattccagagagctaaat

SEQ ID NO: 14854 - DNA, 20 bp, synthetic construct
  misc_feature 1..20: note = Description of Artificial Sequence: Synthetic oligonucleotide
  misc_feature 1..20: note = Target: FXN; (-) strand; PAM type: NRG; PAM sequence: GAG
  source 1..20: mol_type = other DNA
tccttctttgtaattccaga

SEQ ID NO: 14855 - DNA, 20 bp, synthetic construct
  misc_feature 1..20: note = Description of Artificial Sequence: Synthetic oligonucleotide
  misc_feature 1..20: note = Target: FXN; (-) strand; PAM type: NRG; PAM sequence: GAG
  source 1..20: mol_type = other DNA
attccttctttgtaattcca

SEQ ID NO: 14856 - DNA, 20 bp, synthetic construct
  misc_feature 1..20: note = Description of Artificial Sequence: Synthetic oligonucleotide
  misc_feature 1..20: note = Target: FXN; (-) strand; PAM type: NRG; PAM sequence: CAG
  source 1..20: mol_type = other DNA
tcattccttctttgtaattc

SEQ ID NO: 14857 - DNA, 20 bp, synthetic construct
  misc_feature 1..20: note = Description of Artificial Sequence: Synthetic oligonucleotide
  misc_feature 1..20: note = Target: FXN; (-) strand; PAM type: NRG; PAM sequence: AGG
  source 1..20: mol_type = other DNA
aatttgtgattcaaaaaccc

SEQ ID NO: 14858 - DNA, 20 bp, synthetic construct
  misc_feature 1..20: note = Description of Artificial Sequence: Synthetic oligonucleotide
  misc_feature 1..20: note = Target: FXN; (-) strand; PAM type: NRG; PAM sequence: CAG
  source 1..20: mol_type = other DNA
aaatttgtgattcaaaaacc

SEQ ID NO: 14859 - DNA, 20 bp, synthetic construct
  misc_feature 1..20: note = Description of Artificial Sequence: Synthetic oligonucleotide
  misc_feature 1..20: note = Target: FXN; (-) strand; PAM type: NRG; PAM sequence: GAG
  source 1..20: mol_type = other DNA
ctacaaacaagtaagaggca

SEQ ID NO: 14860 - DNA, 20 bp, synthetic construct
  misc_feature 1..20: note = Description of Artificial Sequence: Synthetic oligonucleotide
  misc_feature 1..20: note = Target: FXN; (-) strand; PAM type: NRG; PAM sequence: CAG
  source 1..20: mol_type = other DNA
gtctacaaacaagtaagagg

SEQ ID NO: 14861 - DNA, 20 bp, synthetic construct
  misc_feature 1..20: note = Description of Artificial Sequence: Synthetic oligonucleotide
  misc_feature 1..20: note = Target: FXN; (-) strand; PAM type: NRG; PAM sequence: AGG
  source 1..20: mol_type = other DNA
agtgtctacaaacaagtaag

SEQ ID NO: 14862 - DNA, 20 bp, synthetic construct
  misc_feature 1..20: note = Description of Artificial Sequence: Synthetic oligonucleotide
  misc_feature 1..20: note = Target: FXN; (-) strand; PAM type: NRG; PAM sequence: GAG
  source 1..20: mol_type = other DNA
cagtgtctacaaacaagtaa

SEQ ID NO: 14863 - DNA, 20 bp, synthetic construct
  misc_feature 1..20: note = Description of Artificial Sequence: Synthetic oligonucleotide
  misc_feature 1..20: note = Target: FXN; (-) strand; PAM type: NRG; PAM sequence: AAG
  source 1..20: mol_type = other DNA
gtcagtgtctacaaacaagt

SEQ ID NO: 14864 - DNA, 20 bp, synthetic construct
  misc_feature 1..20: note = Description of Artificial Sequence: Synthetic oligonucleotide
  misc_feature 1..20: note = Target: FXN; (-) strand; PAM type: NRG; PAM sequence: AAG
  source 1..20: mol_type = other DNA
cactgtcagtgtctacaaac

SEQ ID NO: 14865 - DNA, 20 bp, synthetic construct
  misc_feature 1..20: note = Description of Artificial Sequence: Synthetic oligonucleotide
  misc_feature 1..20: note = Target: FXN; (-) strand; PAM type: NRG; PAM sequence: CAG
  source 1..20: mol_type = other DNA
aaaaaacatgaggccactgt

SEQ ID NO: 14866 - DNA, 20 bp, synthetic construct
  misc_feature 1..20: note = Description of Artificial Sequence: Synthetic oligonucleotide
  misc_feature 1..20: note = Target: FXN; (-) strand; PAM type: NRG; PAM sequence: AGG
  source 1..20: mol_type = other DNA
ttaaaaaaaaaaaaaacatg

SEQ ID NO: 14867 - DNA, 20 bp, synthetic construct
  misc_feature 1..20: note = Description of Artificial Sequence: Synthetic oligonucleotide
  misc_feature 1..20: note = Target: FXN; (-) strand; PAM type: NRG; PAM sequence: GAG
  source 1..20: mol_type = other DNA
attaaaaaaaaaaaaaacat

SEQ ID NO: 14868 - DNA, 20 bp, synthetic construct
  misc_feature 1..20: note = Description of Artificial Sequence: Synthetic oligonucleotide
  misc_feature 1..20: note = Target: FXN; (-) strand; PAM type: NRG; PAM sequence: TAG
  source 1..20: mol_type = other DNA
tgttagatatctccatttta

SEQ ID NO: 14869 - DNA, 20 bp, synthetic construct
  misc_feature 1..20: note = Description of Artificial Sequence: Synthetic oligonucleotide
  misc_feature 1..20: note = Target: FXN; (-) strand; PAM type: NRG; PAM sequence: TAG
  source 1..20: mol_type = other DNA
tgggcccaggctcaacatgt

SEQ ID NO: 14870 - DNA, 20 bp, synthetic construct
  misc_feature 1..20: note = Description of Artificial Sequence: Synthetic oligonucleotide
  misc_feature 1..20: note = Target: FXN; (-) strand; PAM type: NRG; PAM sequence: AGG
  source 1..20: mol_type = other DNA
tgtgctttgcctgtgggccc

SEQ ID NO: 14871 - DNA, 20 bp, synthetic construct
  misc_feature 1..20: note = Description of Artificial Sequence: Synthetic oligonucleotide
  misc_feature 1..20: note = Target: FXN; (-) strand; PAM type: NRG; PAM sequence: CAG
  source 1..20: mol_type = other DNA
ttgtgctttgcctgtgggcc

SEQ ID NO: 14872 - DNA, 20 bp, synthetic construct
  misc_feature 1..20: note = Description of Artificial Sequence: Synthetic oligonucleotide
  misc_feature 1..20: note = Target: FXN; (-) strand; PAM type: NRG; PAM sequence: GGG
  source 1..20: mol_type = other DNA
caggattgtgctttgcctgt

SEQ ID NO: 14873 - DNA, 20 bp, synthetic construct
  misc_feature 1..20: note = Description of Artificial Sequence: Synthetic oligonucleotide
  misc_feature 1..20: note = Target: FXN; (-) strand; PAM type: NRG; PAM sequence: TGG
  source 1..20: mol_type = other DNA
tcaggattgtgctttgcctg

SEQ ID NO: 14874 - DNA, 20 bp, synthetic construct
  misc_feature 1..20: note = Description of Artificial Sequence: Synthetic oligonucleotide
  misc_feature 1..20: note = Target: FXN; (-) strand; PAM type: NRG; PAM sequence: AGG
  source 1..20: mol_type = other DNA
aactgagtacttctcacatc

SEQ ID NO: 14875 - DNA, 20 bp, synthetic construct
  misc_feature 1..20: note = Description of Artificial Sequence: Synthetic oligonucleotide
  misc_feature 1..20: note = Target: FXN; (-) strand; PAM type: NRG; PAM sequence: CAG
  source 1..20: mol_type = other DNA
gaactgagtacttctcacat

SEQ ID NO: 14876 - DNA, 20 bp, synthetic construct
  misc_feature 1..20: note = Description of Artificial Sequence: Synthetic oligonucleotide
  misc_feature 1..20: note = Target: FXN; (-) strand; PAM type: NRG; PAM sequence: GAG
  source 1..20: mol_type = other DNA
aacaacagttgtcatgaact

SEQ ID NO: 14877 - DNA, 20 bp, synthetic construct
  misc_feature 1..20: note = Description of Artificial Sequence: Synthetic oligonucleotide
  misc_feature 1..20: note = Target: FXN; (-) strand; PAM type: NRG; PAM sequence: CAG
  source 1..20: mol_type = other DNA
tgctatgcatgtgagaacaa

SEQ ID NO: 14878 - DNA, 20 bp, synthetic construct
  misc_feature 1..20: note = Description of Artificial Sequence: Synthetic oligonucleotide
  misc_feature 1..20: note = Target: FXN; (-) strand; PAM type: NRG; PAM sequence: GAG
  source 1..20: mol_type = other DNA
tgaaattatgctatgcatgt

SEQ ID NO: 14879 - DNA, 20 bp, synthetic construct
  misc_feature 1..20: note = Description of Artificial Sequence: Synthetic oligonucleotide
  misc_feature 1..20: note = Target: FXN; (-) strand; PAM type: NRG; PAM sequence: AAG
  source 1..20: mol_type = other DNA
cgtcatccatattttgggag

SEQ ID NO: 14880 - DNA, 20 bp, synthetic construct
  misc_feature 1..20: note = Description of Artificial Sequence: Synthetic oligonucleotide
  misc_feature 1..20: note = Target: FXN; (-) strand; PAM type: NRG; PAM sequence: GAG
  source 1..20: mol_type = other DNA
gaacgtcatccatattttgg

SEQ ID NO: 14881 - DNA, 20 bp, synthetic construct
  misc_feature 1..20: note = Description of Artificial Sequence: Synthetic oligonucleotide
  misc_feature 1..20: note = Target: FXN; (-) strand; PAM type: NRG; PAM sequence: GGG
  source 1..20: mol_type = other DNA
gggaacgtcatccatatttt

SEQ ID NO: 14882 - DNA, 20 bp, synthetic construct
  misc_feature 1..20: note = Description of Artificial Sequence: Synthetic oligonucleotide
  misc_feature 1..20: note = Target: FXN; (-) strand; PAM type: NRG; PAM sequence: TGG
  source 1..20: mol_type = other DNA
agggaacgtcatccatattt

SEQ ID NO: 14883 - DNA, 20 bp, synthetic construct
  misc_feature 1..20: note = Description of Artificial Sequence: Synthetic oligonucleotide
  misc_feature 1..20: note = Target: FXN; (-) strand; PAM type: NRG; PAM sequence: GGG
  source 1..20: mol_type = other DNA
attaagttcaaggttgagta

SEQ ID NO: 14884 - DNA, 20 bp, synthetic construct
  misc_feature 1..20: note = Description of Artificial Sequence: Synthetic oligonucleotide
  misc_feature 1..20: note = Target: FXN; (-) strand; PAM type: NRG; PAM sequence: AGG
  source 1..20: mol_type = other DNA
gattaagttcaaggttgagt

SEQ ID NO: 14885 - DNA, 20 bp, synthetic construct
  misc_feature 1..20: note = Description of Artificial Sequence: Synthetic oligonucleotide
  misc_feature 1..20: note = Target: FXN; (-) strand; PAM type: NRG; PAM sequence: TAG
  source 1..20: mol_type = other DNA
tgattaagttcaaggttgag

SEQ ID NO: 14886 - DNA, 20 bp, synthetic construct
  misc_feature 1..20: note = Description of Artificial Sequence: Synthetic oligonucleotide
  misc_feature 1..20: note = Target: FXN; (-) strand; PAM type: NRG; PAM sequence: GAG
  source 1..20: mol_type = other DNA
ttttgattaagttcaaggtt

SEQ ID NO: 14887 - DNA, 20 bp, synthetic construct
  misc_feature 1..20: note = Description of Artificial Sequence: Synthetic oligonucleotide
  misc_feature 1..20: note = Target: FXN; (-) strand; PAM type: NRG; PAM sequence: AGG
  source 1..20: mol_type = other DNA
gagtattttgattaagttca

SEQ ID NO: 14888 - DNA, 20 bp, synthetic construct
  misc_feature 1..20: note = Description of Artificial Sequence: Synthetic oligonucleotide
  misc_feature 1..20: note = Target: FXN; (-) strand; PAM type: NRG; PAM sequence: AAG
  source 1..20: mol_type = other DNA
tgagtattttgattaagttc

SEQ ID NO: 14889 - DNA, 20 bp, synthetic construct
  misc_feature 1..20: note = Description of Artificial Sequence: Synthetic oligonucleotide
  misc_feature 1..20: note = Target: FXN; (-) strand; PAM type: NRG; PAM sequence: AAG
  source 1..20: mol_type = other DNA
gtaaactgagtattttgatt

SEQ ID NO: 14890 - DNA, 20 bp, synthetic construct
  misc_feature 1..20: note = Description of Artificial Sequence: Synthetic oligonucleotide
  misc_feature 1..20: note = Target: FXN; (-) strand; PAM type: NRG; PAM sequence: GAG
  source 1..20: mol_type = other DNA
aatacgaagttaagtaaact

SEQ ID NO: 14891 - DNA, 20 bp, synthetic construct
  misc_feature 1..20: note = Description of Artificial Sequence: Synthetic oligonucleotide
  misc_feature 1..20: note = Target: FXN; (-) strand; PAM type: NRG; PAM sequence: AAG
  source 1..20: mol_type = other DNA
tcagaatctaatacgaagtt

SEQ ID NO: 14892 - DNA, 20 bp, synthetic construct
  misc_feature 1..20: note = Description of Artificial Sequence: Synthetic oligonucleotide
  misc_feature 1..20: note = Target: FXN; (-) strand; PAM type: NRG; PAM sequence: AAG
  source 1..20: mol_type = other DNA
gggaatcagaatctaatacg

SEQ ID NO: 14893 - DNA, 20 bp, synthetic construct
  misc_feature 1..20: note = Description of Artificial Sequence: Synthetic oligonucleotide
  misc_feature 1..20: note = Target: FXN; (-) strand; PAM type: NRG; PAM sequence: CAG
  source 1..20: mol_type = other DNA
gataaatggttccagggaat

SEQ ID NO: 14894 - DNA, 20 bp, synthetic construct
  misc_feature 1..20: note = Description of Artificial Sequence: Synthetic oligonucleotide
  misc_feature 1..20: note = Target: FXN; (-) strand; PAM type: NRG; PAM sequence: GGG
  source 1..20: mol_type = other DNA
gcacacgataaatggttcca

SEQ ID NO: 14895 - DNA, 20 bp, synthetic construct
  misc_feature 1..20: note = Description of Artificial Sequence: Synthetic oligonucleotide
  misc_feature 1..20: note = Target: FXN; (-) strand; PAM type: NRG; PAM sequence: AGG
  source 1..20: mol_type = other DNA
ggcacacgataaatggttcc

SEQ ID NO: 14896 - DNA, 20 bp, synthetic construct
  misc_feature 1..20: note = Description of Artificial Sequence: Synthetic oligonucleotide
  misc_feature 1..20: note = Target: FXN; (-) strand; PAM type: NRG; PAM sequence: CAG
  source 1..20: mol_type = other DNA
aggcacacgataaatggttc

SEQ ID NO: 14897 - DNA, 20 bp, synthetic construct
  misc_feature 1..20: note = Description of Artificial Sequence: Synthetic oligonucleotide
  misc_feature 1..20: note = Target: FXN; (-) strand; PAM type: NRG; PAM sequence: TGG
  source 1..20: mol_type = other DNA
atggtaaggcacacgataaa

SEQ ID NO: 14898 - DNA, 20 bp, synthetic construct
  misc_feature 1..20: note = Description of Artificial Sequence: Synthetic oligonucleotide
  misc_feature 1..20: note = Target: FXN; (-) strand; PAM type: NRG; PAM sequence: AGG
  source 1..20: mol_type = other DNA
agtaaaatataagcatggta

SEQ ID NO: 14899 - DNA, 20 bp, synthetic construct
  misc_feature 1..20: note = Description of Artificial Sequence: Synthetic oligonucleotide
  misc_feature 1..20: note = Target: FXN; (-) strand; PAM type: NRG; PAM sequence: AAG
  source 1..20: mol_type = other DNA
aagtaaaatataagcatggt

SEQ ID NO: 14900 - DNA, 20 bp, synthetic construct
  misc_feature 1..20: note = Description of Artificial Sequence: Synthetic oligonucleotide
  misc_feature 1..20: note = Target: FXN; (-) strand; PAM type: NRG; PAM sequence: TGG
  source 1..20: mol_type = other DNA
gatcaagtaaaatataagca

SEQ ID NO: 14901 - DNA, 20 bp, synthetic construct
  misc_feature 1..20: note = Description of Artificial Sequence: Synthetic oligonucleotide
  misc_feature 1..20: note = Target: FXN; (-) strand; PAM type: NRG; PAM sequence: AAG
  source 1..20: mol_type = other DNA
caaaagatcaagtaaaatat

SEQ ID NO: 14902 - DNA, 20 bp, synthetic construct
  misc_feature 1..20: note = Description of Artificial Sequence: Synthetic oligonucleotide
  misc_feature 1..20: note = Target: FXN; (-) strand; PAM type: NRG; PAM sequence: AAG
  source 1..20: mol_type = other DNA
tagaaggtatgcaaaagatc

SEQ ID NO: 14903 - DNA, 20 bp, synthetic construct
  misc_feature 1..20: note = Description of Artificial Sequence: Synthetic oligonucleotide
  misc_feature 1..20: note = Target: FXN; (-) strand; PAM type: NRG; PAM sequence: AAG
  source 1..20: mol_type = other DNA
tagttttagaaggtatgcaa

SEQ ID NO: 14904 - DNA, 20 bp, synthetic construct
  misc_feature 1..20: note = Description of Artificial Sequence: Synthetic oligonucleotide
  misc_feature 1..20: note = Target: FXN; (-) strand; PAM type: NRG; PAM sequence: AGG
  source 1..20: mol_type = other DNA
ttggctaaaatagttttaga

SEQ ID NO: 14905 - DNA, 20 bp, synthetic construct
  misc_feature 1..20: note = Description of Artificial Sequence: Synthetic oligonucleotide
  misc_feature 1..20: note = Target: FXN; (-) strand; PAM type: NRG; PAM sequence: AAG
  source 1..20: mol_type = other DNA
attggctaaaatagttttag

SEQ ID NO: 14906 - DNA, 20 bp, synthetic construct
  misc_feature 1..20: note = Description of Artificial Sequence: Synthetic oligonucleotide
  misc_feature 1..20: note = Target: FXN; (-) strand; PAM type: NRG; PAM sequence: TAG
  source 1..20: mol_type = other DNA
taaattggctaaaatagttt

SEQ ID NO: 14907 - DNA, 20 bp, synthetic construct
  misc_feature 1..20: note = Description of Artificial Sequence: Synthetic oligonucleotide
  misc_feature 1..20: note = Target: FXN; (-) strand; PAM type: NRG; PAM sequence: TAG
  source 1..20: mol_type = other DNA
aaattttaaattggctaaaa

SEQ ID NO: 14908 - DNA, 20 bp, synthetic construct
  misc_feature 1..20: note = Description of Artificial Sequence: Synthetic oligonucleotide
  misc_feature 1..20: note = Target: FXN; (-) strand; PAM type: NRG; PAM sequence: TGG
  source 1..20: mol_type = other DNA
caaactgtcaaattttaaat

SEQ ID NO: 14909 - DNA, 20 bp, synthetic construct
  misc_feature 1..20: note = Description of Artificial Sequence: Synthetic oligonucleotide
  misc_feature 1..20: note = Target: FXN; (-) strand; PAM type: NRG; PAM sequence: AAG
  source 1..20: mol_type = other DNA
ggggcaggtatagctggata

SEQ ID NO: 14910 - DNA, 20 bp, synthetic construct
  misc_feature 1..20: note = Description of Artificial Sequence: Synthetic oligonucleotide
  misc_feature 1..20: note = Target: FXN; (-) strand; PAM type: NRG; PAM sequence: TGG
  source 1..20: mol_type = other DNA
gaatttggggcaggtatagc

SEQ ID NO: 14911 - DNA, 20 bp, synthetic construct
  misc_feature 1..20: note = Description of Artificial Sequence: Synthetic oligonucleotide
  misc_feature 1..20: note = Target: FXN; (-) strand; PAM type: NRG; PAM sequence: TAG
  source 1..20: mol_type = other DNA
gtcagaatttggggcaggta

SEQ ID NO: 14912 - DNA, 20 bp, synthetic construct
  misc_feature 1..20: note = Description of Artificial Sequence: Synthetic oligonucleotide
  misc_feature 1..20: note = Target: FXN; (-) strand; PAM type: NRG; PAM sequence: AGG
  source 1..20: mol_type = other DNA
catctgtcagaatttggggc

SEQ ID NO: 14913 - DNA, 20 bp, synthetic construct
  misc_feature 1..20: note = Description of Artificial Sequence: Synthetic oligonucleotide
  misc_feature 1..20: note = Target: FXN; (-) strand; PAM type: NRG; PAM sequence: CAG
  source 1..20: mol_type = other DNA
gcatctgtcagaatttgggg

SEQ ID NO: 14914 - DNA, 20 bp, synthetic construct
  misc_feature 1..20: note = Description of Artificial Sequence: Synthetic oligonucleotide
  misc_feature 1..20: note = Target: FXN; (-) strand; PAM type: NRG; PAM sequence: GGG
  source 1..20: mol_type = other DNA
aaagcatctgtcagaatttg

SEQ ID NO: 14915 - DNA, 20 bp, synthetic construct
  misc_feature 1..20: note = Description of Artificial Sequence: Synthetic oligonucleotide
  misc_feature 1..20: note = Target: FXN; (-) strand; PAM type: NRG; PAM sequence: GGG
  source 1..20: mol_type = other DNA
aaaagcatctgtcagaattt

SEQ ID NO: 14916 - DNA, 20 bp, synthetic construct
  misc_feature 1..20: note = Description of Artificial Sequence: Synthetic oligonucleotide
  misc_feature 1..20: note = Target: FXN; (-) strand; PAM type: NRG; PAM sequence: TGG
  source 1..20: mol_type = other DNA
caaaagcatctgtcagaatt

SEQ ID NO: 14917 - DNA, 20 bp, synthetic construct
  misc_feature 1..20: note = Description of Artificial Sequence: Synthetic oligonucleotide
  misc_feature 1..20: note = Target: FXN; (-) strand; PAM type: NRG; PAM sequence: CAG
  source 1..20: mol_type = other DNA
gaggtggcaaaagcatctgt

SEQ ID NO: 14918 - DNA, 20 bp, synthetic construct
  misc_feature 1..20: note = Description of Artificial Sequence: Synthetic oligonucleotide
  misc_feature 1..20: note = Target: FXN; (-) strand; PAM type: NRG; PAM sequence: AAG
  source 1..20: mol_type = other DNA
tcttcctttagaggtggcaa

SEQ ID NO: 14919 - DNA, 20 bp, synthetic construct
  misc_feature 1..20: note = Description of Artificial Sequence: Synthetic oligonucleotide
  misc_feature 1..20: note = Target: FXN; (-) strand; PAM type: NRG; PAM sequence: TGG
  source 1..20: mol_type = other DNA
catgggtcttcctttagagg

SEQ ID NO: 14920 - DNA, 20 bp, synthetic construct
  misc_feature 1..20: note = Description of Artificial Sequence: Synthetic oligonucleotide
  misc_feature 1..20: note = Target: FXN; (-) strand; PAM type: NRG; PAM sequence: AGG
  source 1..20: mol_type = other DNA
gaacatgggtcttcctttag

SEQ ID NO: 14921 - DNA, 20 bp, synthetic construct
  misc_feature 1..20: note = Description of Artificial Sequence: Synthetic oligonucleotide
  misc_feature 1..20: note = Target: FXN; (-) strand; PAM type: NRG; PAM sequence: GAG
  source 1..20: mol_type = other DNA
tgaacatgggtcttccttta

SEQ ID NO: 14922 - DNA, 20 bp, synthetic construct
  misc_feature 1..20: note = Description of Artificial Sequence: Synthetic oligonucleotide
  misc_feature 1..20: note = Target: FXN; (-) strand; PAM type: NRG; PAM sequence: TAG
  source 1..20: mol_type = other DNA
tatgaacatgggtcttcctt

SEQ ID NO: 14923 - DNA, 20 bp, synthetic construct
  misc_feature 1..20: note = Description of Artificial Sequence: Synthetic oligonucleotide
  misc_feature 1..20: note = Target: FXN; (-) strand; PAM type: NRG; PAM sequence: GGG
  source 1..20: mol_type = other DNA
aactccatcactatgaacat

SEQ ID NO: 14924 - DNA, 20 bp, synthetic construct
  misc_feature 1..20: note = Description of Artificial Sequence: Synthetic oligonucleotide
  misc_feature 1..20: note = Target: FXN; (-) strand; PAM type: NRG; PAM sequence: TGG
  source 1..20: mol_type = other DNA
aaactccatcactatgaaca

SEQ ID NO: 14925 - DNA, 20 bp, synthetic construct
  misc_feature 1..20: note = Description of Artificial Sequence: Synthetic oligonucleotide
  misc_feature 1..20: note = Target: FXN; (-) strand; PAM type: NRG; PAM sequence: TAG
  source 1..20: mol_type = other DNA
ccttggcaaccttgcatggt

SEQ ID NO: 14926 - DNA, 20 bp, synthetic construct
  misc_feature 1..20: note = Description of Artificial Sequence: Synthetic oligonucleotide
  misc_feature 1..20: note = Target: FXN; (-) strand; PAM type: NRG; PAM sequence: TGG
  source 1..20: mol_type = other DNA
ttttccttggcaaccttgca

SEQ ID NO: 14927 - DNA, 20 bp, synthetic construct
  misc_feature 1..20: note = Description of Artificial Sequence: Synthetic oligonucleotide
  misc_feature 1..20: note = Target: FXN; (-) strand; PAM type: NRG; PAM sequence: TGG
  source 1..20: mol_type = other DNA
agcgtaaagcgatttttcct

SEQ ID NO: 14928 - DNA, 20 bp, synthetic construct
  misc_feature 1..20: note = Description of Artificial Sequence: Synthetic oligonucleotide
  misc_feature 1..20: note = Target: FXN; (-) strand; PAM type: NRG; PAM sequence: AAG
  source 1..20: mol_type = other DNA
gtgtgtaccttggaagcgta

SEQ ID NO: 14929 - DNA, 20 bp, synthetic construct
  misc_feature 1..20: note = Description of Artificial Sequence: Synthetic oligonucleotide
  misc_feature 1..20: note = Target: FXN; (-) strand; PAM type: NRG; PAM sequence: AAG
  source 1..20: mol_type = other DNA
catcttagtgtgtaccttgg

SEQ ID NO: 14930 - DNA, 20 bp, synthetic construct
  misc_feature 1..20: note = Description of Artificial Sequence: Synthetic oligonucleotide
  misc_feature 1..20: note = Target: FXN; (-) strand; PAM type: NRG; PAM sequence: TGG
  source 1..20: mol_type = other DNA
tttcatcttagtgtgtacct

SEQ ID NO: 14931 - DNA, 20 bp, synthetic construct
  misc_feature 1..20: note = Description of Artificial Sequence: Synthetic oligonucleotide
  misc_feature 1..20: note = Target: FXN; (-) strand; PAM type: NRG; PAM sequence: TAG
  source 1..20: mol_type = other DNA
gactaaaattactttcatct

SEQ ID NO: 14932 - DNA, 20 bp, synthetic construct
  misc_feature 1..20: note = Description of Artificial Sequence: Synthetic oligonucleotide
  misc_feature 1..20: note = Target: FXN; (-) strand; PAM type: NRG; PAM sequence: CGG
  source 1..20: mol_type = other DNA
gccaagaatccaactggaca

SEQ ID NO: 14933 - DNA, 20 bp, synthetic construct
  misc_feature 1..20: note = Description of Artificial Sequence: Synthetic oligonucleotide
  misc_feature 1..20: note = Target: FXN; (-) strand; PAM type: NRG; PAM sequence: TGG
  source 1..20: mol_type = other DNA
ctatgtgccaagaatccaac

SEQ ID NO: 14934 - DNA, 20 bp, synthetic construct
  misc_feature 1..20: note = Description of Artificial Sequence: Synthetic oligonucleotide
  misc_feature 1..20: note = Target: FXN; (-) strand; PAM type: NRG; PAM sequence: AAG
  source 1..20: mol_type = other DNA
gcagaagataactatgtgcc

SEQ ID NO: 14935 - DNA, 20 bp, synthetic construct
  misc_feature 1..20: note = Description of Artificial Sequence: Synthetic oligonucleotide
  misc_feature 1..20: note = Target: FXN; (-) strand; PAM type: NRG; PAM sequence: AAG
  source 1..20: mol_type = other DNA
gttttagtttgttctagcag

SEQ ID NO: 14936 - DNA, 20 bp, synthetic construct
  misc_feature 1..20: note = Description of Artificial Sequence: Synthetic oligonucleotide
  misc_feature 1..20: note = Target: FXN; (-) strand; PAM type: NRG; PAM sequence: CAG
  source 1..20: mol_type = other DNA
gctgttttagtttgttctag

SEQ ID NO: 14937 - DNA, 20 bp, synthetic construct
  misc_feature 1..20: note = Description of Artificial Sequence: Synthetic oligonucleotide
  misc_feature 1..20: note = Target: FXN; (-) strand; PAM type: NRG; PAM sequence: TAG
  source 1..20: mol_type = other DNA
gtagctgttttagtttgttc

SEQ ID NO: 14938 - DNA, 20 bp, synthetic construct
  misc_feature 1..20: note = Description of Artificial Sequence: Synthetic oligonucleotide
  misc_feature 1..20: note = Target: FXN; (-) strand; PAM type: NRG; PAM sequence: TAG
  source 1..20: mol_type = other DNA
ttgctggcatgtagctgttt

SEQ ID NO: 14939 - DNA, 20 bp, synthetic construct
  misc_feature 1..20: note = Description of Artificial Sequence: Synthetic oligonucleotide
  misc_feature 1..20: note = Target: FXN; (-) strand; PAM type: NRG; PAM sequence: TAG
  source 1..20: mol_type = other DNA
ctttctcccttgctggcatg

SEQ ID NO: 14940 - DNA, 20 bp, synthetic construct
  misc_feature 1..20: note = Description of Artificial Sequence: Synthetic oligonucleotide
  misc_feature 1..20: note = Target: FXN; (-) strand; PAM type: NRG; PAM sequence: TGG
  source 1..20: mol_type = other DNA
ccttcccctttctcccttgc

SEQ ID NO: 14941 - DNA, 20 bp, synthetic construct
  misc_feature 1..20: note = Description of Artificial Sequence: Synthetic oligonucleotide
  misc_feature 1..20: note = Target: FXN; (-) strand; PAM type: NRG; PAM sequence: CAG
  source 1..20: mol_type = other DNA
catgaactcgtcgttttgaa

SEQ ID NO: 14942 - DNA, 20 bp, synthetic construct
  misc_feature 1..20: note = Description of Artificial Sequence: Synthetic oligonucleotide
  misc_feature 1..20: note = Target: FXN; (-) strand; PAM type: NRG; PAM sequence: AAG
  source 1..20: mol_type = other DNA
catttcttactctatacaca

SEQ ID NO: 14943 - DNA, 20 bp, synthetic construct
  misc_feature 1..20: note = Description of Artificial Sequence: Synthetic oligonucleotide
  misc_feature 1..20: note = Target: FXN; (-) strand; PAM type: NRG; PAM sequence: AGG
  source 1..20: mol_type = other DNA
actctgtctcaaaaaagaaa

SEQ ID NO: 14944 - DNA, 20 bp, synthetic construct
  misc_feature 1..20: note = Description of Artificial Sequence: Synthetic oligonucleotide
  misc_feature 1..20: note = Target: FXN; (-) strand; PAM type: NRG; PAM sequence: AAG
  source 1..20: mol_type = other DNA
gactctgtctcaaaaaagaa

SEQ ID NO: 14945 - DNA, 20 bp, synthetic construct
  misc_feature 1..20: note = Description of Artificial Sequence: Synthetic oligonucleotide
  misc_feature 1..20: note = Target: FXN; (-) strand; PAM type: NRG; PAM sequence: AAG
  source 1..20: mol_type = other DNA
agcaagactctgtctcaaaa

SEQ ID NO: 14946 - DNA, 20 bp, synthetic construct
  misc_feature 1..20: note = Description of Artificial Sequence: Synthetic oligonucleotide
  misc_feature 1..20: note = Target: FXN; (-) strand; PAM type: NRG; PAM sequence: AAG
  source 1..20: mol_type = other DNA
tccagcctgggtgacagagc

SEQ ID NO: 14947 - DNA, 20 bp, synthetic construct
  misc_feature 1..20: note = Description of Artificial Sequence: Synthetic oligonucleotide
  misc_feature 1..20: note = Target: FXN; (-) strand; PAM type: NRG; PAM sequence: GAG
  source 1..20: mol_type = other DNA
gcactccagcctgggtgaca

SEQ ID NO: 14948 - DNA, 20 bp, synthetic construct
  misc_feature 1..20: note = Description of Artificial Sequence: Synthetic oligonucleotide
  misc_feature 1..20: note = Target: FXN; (-) strand; PAM type: NRG; PAM sequence: CAG
  source 1..20: mol_type = other DNA
ctgcactccagcctgggtga

SEQ ID NO: 14949 - DNA, 20 bp, synthetic construct
  misc_feature 1..20: note = Description of Artificial Sequence: Synthetic oligonucleotide
  misc_feature 1..20: note = Target: FXN; (-) strand; PAM type: NRG; PAM sequence: GGG
  source 1..20: mol_type = other DNA
gtgccactgcactccagcct

SEQ ID NO: 14950 - DNA, 20 bp, synthetic construct
  misc_feature 1..20: note = Description of Artificial Sequence: Synthetic oligonucleotide
  misc_feature 1..20: note = Target: FXN; (-) strand; PAM type: NRG; PAM sequence: TGG
  source 1..20: mol_type = other DNA
cgtgccactgcactccagcc

SEQ ID NO: 14951 - DNA, 20 bp, synthetic construct
  misc_feature 1..20: note = Description of Artificial Sequence: Synthetic oligonucleotide
  misc_feature 1..20: note = Target: FXN; (-) strand; PAM type: NRG; PAM sequence: CAG
  source 1..20: mol_type = other DNA
cagatcgtgccactgcactc

SEQ ID NO: 14952 - DNA, 20 bp, synthetic construct
  misc_feature 1..20: note = Description of Artificial Sequence: Synthetic oligonucleotide
  misc_feature 1..20: note = Target: FXN; (-) strand; PAM type: NRG; PAM sequence: CAG
  source 1..20: mol_type = other DNA
ggcggaggttgtagtgagcc

SEQ ID NO: 14953 - DNA, 20 bp, synthetic construct
  misc_feature 1..20: note = Description of Artificial Sequence: Synthetic oligonucleotide
  misc_feature 1..20: note = Target: FXN; (-) strand; PAM type: NRG; PAM sequence: GAG
  source 1..20: mol_type = other DNA
caggaggcggaggttgtagt

SEQ ID NO: 14954 - DNA, 20 bp, synthetic construct
  misc_feature 1..20: note = Description of Artificial Sequence: Synthetic oligonucleotide
  misc_feature 1..20: note = Target: FXN; (-) strand; PAM type: NRG; PAM sequence: TAG
  source 1..20: mol_type = other DNA
aacccaggaggcggaggttg

SEQ ID NO: 14955 - DNA, 20 bp, synthetic construct
  misc_feature 1..20: note = Description of Artificial Sequence: Synthetic oligonucleotide
  misc_feature 1..20: note = Target: FXN; (-) strand; PAM type: NRG; PAM sequence: AGG
  source 1..20: mol_type = other DNA
tgcttgaacccaggaggcgg

SEQ ID NO: 14956 - DNA, 20 bp, synthetic construct
  misc_feature 1..20: note = Description of Artificial Sequence: Synthetic oligonucleotide
  misc_feature 1..20: note = Target: FXN; (-) strand; PAM type: NRG; PAM sequence: GAG
  source 1..20: mol_type = other DNA
ttgcttgaacccaggaggcg

SEQ ID NO: 14957 - DNA, 20 bp, synthetic construct
  misc_feature 1..20: note = Description of Artificial Sequence: Synthetic oligonucleotide
  misc_feature 1..20: note = Target: FXN; (-) strand; PAM type: NRG; PAM sequence: CGG
  source 1..20: mol_type = other DNA
aattgcttgaacccaggagg

SEQ ID NO: 14958 - DNA, 20 bp, synthetic construct
  misc_feature 1..20: note = Description of Artificial Sequence: Synthetic oligonucleotide
  misc_feature 1..20: note = Target: FXN; (-) strand; PAM type: NRG; PAM sequence: AGG
  source 1..20: mol_type = other DNA
gagaattgcttgaacccagg

SEQ ID NO: 14959 - DNA, 20 bp, synthetic construct
  misc_feature 1..20: note = Description of Artificial Sequence: Synthetic oligonucleotide
  misc_feature 1..20: note = Target: FXN; (-) strand; PAM type: NRG; PAM sequence: GAG
  source 1..20: mol_type = other DNA
agagaattgcttgaacccag

SEQ ID NO: 14960 - DNA, 20 bp, synthetic construct
  misc_feature 1..20: note = Description of Artificial Sequence: Synthetic oligonucleotide
  misc_feature 1..20: note = Target: FXN; (-) strand; PAM type: NRG; PAM sequence: AGG
  source 1..20: mol_type = other DNA
gcagagaattgcttgaaccc

SEQ ID NO: 14961 - DNA, 20 bp, synthetic construct
  misc_feature 1..20: note = Description of Artificial Sequence: Synthetic oligonucleotide
  misc_feature 1..20: note = Target: FXN; (-) strand; PAM type: NRG; PAM sequence: CAG
  source 1..20: mol_type = other DNA
ggcagagaattgcttgaacc

SEQ ID NO: 14962 - DNA, 20 bp, synthetic construct
  misc_feature 1..20: note = Description of Artificial Sequence: Synthetic oligonucleotide
  misc_feature 1..20: note = Target: FXN; (-) strand; PAM type: NRG; PAM sequence: GAG
  source 1..20: mol_type = other DNA
ctactcgggaggctgaggca

SEQ ID NO: 14963 - DNA, 20 bp, synthetic construct
  misc_feature 1..20: note = Description of Artificial Sequence: Synthetic oligonucleotide
  misc_feature 1..20: note = Target: FXN; (-) strand; PAM type: NRG; PAM sequence: CAG
  source 1..20: mol_type = other DNA
agctactcgggaggctgagg

SEQ ID NO: 14964 - DNA, 20 bp, synthetic construct
  misc_feature 1..20: note = Description of Artificial Sequence: Synthetic oligonucleotide
  misc_feature 1..20: note = Target: FXN; (-) strand; PAM type: NRG; PAM sequence: AGG
  source 1..20: mol_type = other DNA
cccagctactcgggaggctg

SEQ ID NO: 14965 - DNA, 20 bp, synthetic construct
  misc_feature 1..20: note = Description of Artificial Sequence: Synthetic oligonucleotide
  misc_feature 1..20: note = Target: FXN; (-) strand; PAM type: NRG; PAM sequence: GAG
  source 1..20: mol_type = other DNA
tcccagctactcgggaggct

SEQ ID NO: 14966 - DNA, 20 bp, synthetic construct
  misc_feature 1..20: note = Description of Artificial Sequence: Synthetic oligonucleotide
  misc_feature 1..20: note = Target: FXN; (-) strand; PAM type: NRG; PAM sequence: AGG
  source 1..20: mol_type = other DNA
tgtaatcccagctactcggg

SEQ ID NO: 14967 - DNA, 20 bp, synthetic construct
  misc_feature 1..20: note = Description of Artificial Sequence: Synthetic oligonucleotide
  misc_feature 1..20: note = Target: FXN; (-) strand; PAM type: NRG; PAM sequence: GAG
  source 1..20: mol_type = other DNA
ctgtaatcccagctactcgg

SEQ ID NO: 14968 - DNA, 20 bp, synthetic construct
  misc_feature 1..20: note = Description of Artificial Sequence: Synthetic oligonucleotide
  misc_feature 1..20: note = Target: FXN; (-) strand; PAM type: NRG; PAM sequence: GGG
  source 1..20: mol_type = other DNA
acctgtaatcccagctactc

SEQ ID NO: 14969 - DNA, 20 bp, synthetic construct
  misc_feature 1..20: note = Description of Artificial Sequence: Synthetic oligonucleotide
  misc_feature 1..20: note = Target: FXN; (-) strand; PAM type: NRG; PAM sequence: CGG
  source 1..20: mol_type = other DNA
cacctgtaatcccagctact

SEQ ID NO: 14970 - DNA, 20 bp, synthetic construct
  misc_feature 1..20: note = Description of Artificial Sequence: Synthetic oligonucleotide
  misc_feature 1..20: note = Target: FXN; (-) strand; PAM type: NRG; PAM sequence: CAG
  source 1..20: mol_type = other DNA
gtggcaggcacctgtaatcc

SEQ ID NO: 14971 - DNA, 20 bp, synthetic construct
  misc_feature 1..20: note = Description of Artificial Sequence: Synthetic oligonucleotide
  misc_feature 1..20: note = Target: FXN; (-) strand; PAM type: NRG; PAM sequence: AGG
  source 1..20: mol_type = other DNA
aattagccgggtgtggtggc

SEQ ID NO: 14972 - DNA, 20 bp, synthetic construct
  misc_feature 1..20: note = Description of Artificial Sequence: Synthetic oligonucleotide
  misc_feature 1..20: note = Target: FXN; (-) strand; PAM type: NRG; PAM sequence: CAG
  source 1..20: mol_type = other DNA
aaattagccgggtgtggtgg

SEQ ID NO: 14973 - DNA, 20 bp, synthetic construct
  misc_feature 1..20: note = Description of Artificial Sequence: Synthetic oligonucleotide
  misc_feature 1..20: note = Target: FXN; (-) strand; PAM type: NRG; PAM sequence: TGG
  source 1..20: mol_type = other DNA
caaaaattagccgggtgtgg

SEQ ID NO: 14974 - DNA, 20 bp, synthetic construct
  misc_feature 1..20: note = Description of Artificial Sequence: Synthetic oligonucleotide
  misc_feature 1..20: note = Target: FXN; (-) strand; PAM type: NRG; PAM sequence: TGG
  source 1..20: mol_type = other DNA
atacaaaaattagccgggtg

SEQ ID NO: 14975 - DNA, 20 bp, synthetic construct
  misc_feature 1..20: note = Description of Artificial Sequence: Synthetic oligonucleotide
  misc_feature 1..20: note = Target: FXN; (-) strand; PAM type: NRG; PAM sequence: GGG
  source 1..20: mol_type = other DNA
taaaaatacaaaaattagcc

SEQ ID NO: 14976 - DNA, 20 bp, synthetic construct
  misc_feature 1..20: note = Description of Artificial Sequence: Synthetic oligonucleotide
  misc_feature 1..20: note = Target: FXN; (-) strand; PAM type: NRG; PAM sequence: CGG
  source 1..20: mol_type = other DNA
ctaaaaatacaaaaattagc

SEQ ID NO: 14977 - DNA, 20 bp, synthetic construct
  misc_feature 1..20: note = Description of Artificial Sequence: Synthetic oligonucleotide
  misc_feature 1..20: note = Target: FXN; (-) strand; PAM type: NRG; PAM sequence: TAG
  source 1..20: mol_type = other DNA
tctactaaaaatacaaaaat

SEQ ID NO: 14978 - DNA, 20 bp, synthetic construct
  misc_feature 1..20: note = Description of Artificial Sequence: Synthetic oligonucleotide
  misc_feature 1..20: note = Target: FXN; (-) strand; PAM type: NRG; PAM sequence: TGG
  source 1..20: mol_type = other DNA
caagaccagcctggccatga

SEQ ID NO: 14979 - DNA, 20 bp, synthetic construct
  misc_feature 1..20: note = Description of Artificial Sequence: Synthetic oligonucleotide
  misc_feature 1..20: note = Target: FXN; (-) strand; PAM type: NRG; PAM sequence: TGG
  source 1..20: mol_type = other DNA
tcaggagttcaagaccagcc

SEQ ID NO: 14980 - DNA, 20 bp, synthetic construct
  misc_feature 1..20: note = Description of Artificial Sequence: Synthetic oligonucleotide
  misc_feature 1..20: note = Target: FXN; (-) strand; PAM type: NRG; PAM sequence: CAG
  source 1..20: mol_type = other DNA
ctaggtcaggagttcaagac

SEQ ID NO: 14981 - DNA, 20 bp, synthetic construct
  misc_feature 1..20: note = Description of Artificial Sequence: Synthetic oligonucleotide
  misc_feature 1..20: note = Target: FXN; (-) strand; PAM type: NRG; PAM sequence: AAG
  source 1..20: mol_type = other DNA
gattactaggtcaggagttc

SEQ ID NO: 14982 - DNA, 20 bp, synthetic construct
  misc_feature 1..20: note = Description of Artificial Sequence: Synthetic oligonucleotide
  misc_feature 1..20: note = Target: FXN; (-) strand; PAM type: NRG; PAM sequence: GAG
  source 1..20: mol_type = other DNA
caggtggattactaggtcag

SEQ ID NO: 14983 - DNA, 20 bp, synthetic construct
  misc_feature 1..20: note = Description of Artificial Sequence: Synthetic oligonucleotide
  misc_feature 1..20: note = Target: FXN; (-) strand; PAM type: NRG; PAM sequence: AGG
  source 1..20: mol_type = other DNA
ggcaggtggattactaggtc

SEQ ID NO: 14984 - DNA, 20 bp, synthetic construct
  misc_feature 1..20: note = Description of Artificial Sequence: Synthetic oligonucleotide
  misc_feature 1..20: note = Target: FXN; (-) strand; PAM type: NRG; PAM sequence: CAG
  source 1..20: mol_type = other DNA
aggcaggtggattactaggt

SEQ ID NO: 14985 - DNA, 20 bp, synthetic construct
  misc_feature 1..20: note = Description of Artificial Sequence: Synthetic oligonucleotide
  misc_feature 1..20: note = Target: FXN; (-) strand; PAM type: NRG; PAM sequence: AGG
  source 1..20: mol_type = other DNA
gcggaggcaggtggattact

SEQ ID NO: 14986 - DNA, 20 bp, synthetic construct
  misc_feature 1..20: note = Description of Artificial Sequence: Synthetic oligonucleotide
  misc_feature 1..20: note = Target: FXN; (-) strand; PAM type: NRG; PAM sequence: TAG
  source 1..20: mol_type = other DNA
ggcggaggcaggtggattac

SEQ ID NO: 14987 - DNA, 20 bp, synthetic construct
  misc_feature 1..20: note = Description of Artificial Sequence: Synthetic oligonucleotide
  misc_feature 1..20: note = Target: FXN; (-) strand; PAM type: NRG; PAM sequence: TGG
  source 1..20: mol_type = other DNA
ctttgggaggcggaggcagg

SEQ ID NO: 14988 - DNA, 20 bp, synthetic construct
  misc_feature 1..20: note = Description of Artificial Sequence: Synthetic oligonucleotide
  misc_feature 1..20: note = Target: FXN; (-) strand; PAM type: NRG; PAM sequence: AGG
  source 1..20: mol_type = other DNA
gcactttgggaggcggaggc

SEQ ID NO: 14989 - DNA, 20 bp, synthetic construct
  misc_feature 1..20: note = Description of Artificial Sequence: Synthetic oligonucleotide
  misc_feature 1..20: note = Target: FXN; (-) strand; PAM type: NRG; PAM sequence: CAG
  source 1..20: mol_type = other DNA
agcactttgggaggcggagg

SEQ ID NO: 14990 - DNA, 20 bp, synthetic construct
  misc_feature 1..20: note = Description of Artificial Sequence: Synthetic oligonucleotide
  misc_feature 1..20: note = Target: FXN; (-) strand; PAM type: NRG; PAM sequence: AGG
  source 1..20: mol_type = other DNA
cccagcactttgggaggcgg

SEQ ID NO: 14991 - DNA, 20 bp, synthetic construct
  misc_feature 1..20: note = Description of Artificial Sequence: Synthetic oligonucleotide
  misc_feature 1..20: note = Target: FXN; (-) strand; PAM type: NRG; PAM sequence: GAG
  source 1..20: mol_type = other DNA
tcccagcactttgggaggcg

SEQ ID NO: 14992 - DNA, 20 bp, synthetic construct
  misc_feature 1..20: note = Description of Artificial Sequence: Synthetic oligonucleotide
  misc_feature 1..20: note = Target: FXN; (-) strand; PAM type: NRG; PAM sequence: CGG
  source 1..20: mol_type = other DNA
aatcccagcactttgggagg

SEQ ID NO: 14993 - DNA, 20 bp, synthetic construct
  misc_feature 1..20: note = Description of Artificial Sequence: Synthetic oligonucleotide
  misc_feature 1..20: note = Target: FXN; (-) strand; PAM type: NRG; PAM sequence: AGG
  source 1..20: mol_type = other DNA
tgtaatcccagcactttggg

SEQ ID NO: 14994 - DNA, 20 bp, synthetic construct
  misc_feature 1..20: note = Description of Artificial Sequence: Synthetic oligonucleotide
  misc_feature 1..20: note = Target: FXN; (-) strand; PAM type: NRG; PAM sequence: GAG
  source 1..20: mol_type = other DNA
ctgtaatcccagcactttgg

SEQ ID NO: 14995 - DNA, 20 bp, synthetic construct
  misc_feature 1..20: note = Description of Artificial Sequence: Synthetic oligonucleotide
  misc_feature 1..20: note = Target: FXN; (-) strand; PAM type: NRG; PAM sequence: GGG
  source 1..20: mol_type = other DNA
gcctgtaatcccagcacttt

SEQ ID NO: 14996 - DNA, 20 bp, synthetic construct
  misc_feature 1..20: note = Description of Artificial Sequence: Synthetic oligonucleotide
  misc_feature 1..20: note = Target: FXN; (-) strand; PAM type: NRG; PAM sequence: TGG
  source 1..20: mol_type = other DNA
cgcctgtaatcccagcactt

SEQ ID NO: 14997 - DNA, 20 bp, synthetic construct
  misc_feature 1..20: note = Description of Artificial Sequence: Synthetic oligonucleotide
  misc_feature 1..20: note = Target: FXN; (-) strand; PAM type: NRG; PAM sequence: CAG
  source 1..20: mol_type = other DNA
gtggctcacgcctgtaatcc

SEQ ID NO: 14998 - DNA, 20 bp, synthetic construct
  misc_feature 1..20: note = Description of Artificial Sequence: Synthetic oligonucleotide
  misc_feature 1..20: note = Target: FXN; (-) strand; PAM type: NRG; PAM sequence: TGG
  source 1..20: mol_type = other DNA
gcatttctggctgggtgcag

SEQ ID NO: 14999 - DNA, 20 bp, synthetic construct
  misc_feature 1..20: note = Description of Artificial Sequence: Synthetic oligonucleotide
  misc_feature 1..20: note = Target: FXN; (-) strand; PAM type: NRG; PAM sequence: CAG
  source 1..20: mol_type = other DNA
aaggcatttctggctgggtg

SEQ ID NO: 15000 - DNA, 20 bp, synthetic construct
  misc_feature 1..20: note = Description of Artificial Sequence: Synthetic oligonucleotide
  misc_feature 1..20: note = Target: FXN; (-) strand; PAM type: NRG; PAM sequence: GGG
  source 1..20: mol_type = other DNA
attagaaggcatttctggct

SEQ ID NO: 15001 - DNA, 20 bp, synthetic construct
  misc_feature 1..20: note = Description of Artificial Sequence: Synthetic oligonucleotide
  misc_feature 1..20: note = Target: FXN; (-) strand; PAM type: NRG; PAM sequence: TGG
  source 1..20: mol_type = other DNA
gattagaaggcatttctggc

SEQ ID NO: 15002 - DNA, 20 bp, synthetic construct
  misc_feature 1..20: note = Description of Artificial Sequence: Synthetic oligonucleotide
  misc_feature 1..20: note = Target: FXN; (-) strand; PAM type: NRG; PAM sequence: TGG
  source 1..20: mol_type = other DNA
caaagattagaaggcatttc

SEQ ID NO: 15003 - DNA, 20 bp, synthetic construct
  misc_feature 1..20: note = Description of Artificial Sequence: Synthetic oligonucleotide
  misc_feature 1..20: note = Target: FXN; (-) strand; PAM type: NRG; PAM sequence: AGG
  source 1..20: mol_type = other DNA
aagataaaccaaagattaga

SEQ ID NO: 15004 - DNA, 20 bp, synthetic construct
  misc_feature 1..20: note = Description of Artificial Sequence: Synthetic oligonucleotide
  misc_feature 1..20: note = Target: FXN; (-) strand; PAM type: NRG; PAM sequence: AAG
  source 1..20: mol_type = other DNA
taagataaaccaaagattag

SEQ ID NO: 15005 - DNA, 20 bp, synthetic construct
  misc_feature 1..20: note = Description of Artificial Sequence: Synthetic oligonucleotide
  misc_feature 1..20: note = Target: FXN; (-) strand; PAM type: NRG; PAM sequence: TAG
  source 1..20: mol_type = other DNA
aattaagataaaccaaagat

SEQ ID NO: 15006 - DNA, 20 bp, synthetic construct
  misc_feature 1..20: note = Description of Artificial Sequence: Synthetic oligonucleotide
  misc_feature 1..20: note = Target: FXN; (-) strand; PAM type: NRG; PAM sequence: AAG
  source 1..20: mol_type = other DNA
tggctaattaagataaacca

SEQ ID NO: 15007 - DNA, 20 bp, synthetic construct
  misc_feature 1..20: note = Description of Artificial Sequence: Synthetic oligonucleotide
  misc_feature 1..20: note = Target: FXN; (-) strand; PAM type: NRG; PAM sequence: AAG
  source 1..20: mol_type = other DNA
tccaagtgtcctggctaatt

SEQ ID NO: 15008 - DNA, 20 bp, synthetic construct
  misc_feature 1..20: note = Description of Artificial Sequence: Synthetic oligonucleotide
  misc_feature 1..20: note = Target: FXN; (-) strand; PAM type: NRG; PAM sequence: TGG
  source 1..20: mol_type = other DNA
gggatgcactccaagtgtcc

SEQ ID NO: 15009 - DNA, 20 bp, synthetic construct
  misc_feature 1..20: note = Description of Artificial Sequence: Synthetic oligonucleotide
  misc_feature 1..20: note = Target: FXN; (-) strand; PAM type: NRG; PAM sequence: AAG
  source 1..20: mol_type = other DNA
ggtacttcgggatgcactcc

SEQ ID NO: 15010 - DNA, 20 bp, synthetic construct
  misc_feature 1..20: note = Description of Artificial Sequence: Synthetic oligonucleotide
  misc_feature 1..20: note = Target: FXN; (-) strand; PAM type: NRG; PAM sequence: GGG
  source 1..20: mol_type = other DNA
ggccactgatcaggtacttc

SEQ ID NO: 15011 - DNA, 20 bp, synthetic construct
  misc_feature 1..20: note = Description of Artificial Sequence: Synthetic oligonucleotide
  misc_feature 1..20: note = Target: FXN; (-) strand; PAM type: NRG; PAM sequence: CGG
  source 1..20: mol_type = other DNA
gggccactgatcaggtactt

SEQ ID NO: 15012 - DNA, 20 bp, synthetic construct
  misc_feature 1..20: note = Description of Artificial Sequence: Synthetic oligonucleotide
  misc_feature 1..20: note = Target: FXN; (-) strand; PAM type: NRG; PAM sequence: AGG
  source 1..20: mol_type = other DNA
ttccaaaggggccactgatc

SEQ ID NO: 15013 - DNA, 20 bp, synthetic construct
  misc_feature 1..20: note = Description of Artificial Sequence: Synthetic oligonucleotide
  misc_feature 1..20: note = Target: FXN; (-) strand; PAM type: NRG; PAM sequence: CAG
  source 1..20: mol_type = other DNA
attccaaaggggccactgat

SEQ ID NO: 15014 - DNA, 20 bp, synthetic construct
  misc_feature 1..20: note = Description of Artificial Sequence: Synthetic oligonucleotide
  misc_feature 1..20: note = Target: FXN; (-) strand; PAM type: NRG; PAM sequence: GGG
  source 1..20: mol_type = other DNA
gagttttacacattccaaag

SEQ ID NO: 15015 - DNA, 20 bp, synthetic construct
  misc_feature 1..20: note = Description of Artificial Sequence: Synthetic oligonucleotide
  misc_feature 1..20: note = Target: FXN; (-) strand; PAM type: NRG; PAM sequence: GGG
  source 1..20: mol_type = other DNA
tgagttttacacattccaaa

SEQ ID NO: 15016 - DNA, 20 bp, synthetic construct
  misc_feature 1..20: note = Description of Artificial Sequence: Synthetic oligonucleotide
  misc_feature 1..20: note = Target: FXN; (-) strand; PAM type: NRG; PAM sequence: AGG
  source 1..20: mol_type = other DNA
ctgagttttacacattccaa

SEQ ID NO: 15017 - DNA, 20 bp, synthetic construct
  misc_feature 1..20: note = Description of Artificial Sequence: Synthetic oligonucleotide
  misc_feature 1..20: note = Target: FXN; (-) strand; PAM type: NRG; PAM sequence: AAG
  source 1..20: mol_type = other DNA
gctgagttttacacattcca

SEQ ID NO: 15018 - DNA, 20 bp, synthetic construct
  misc_feature 1..20: note = Description of Artificial Sequence: Synthetic oligonucleotide
  misc_feature 1..20: note = Target: FXN; (-) strand; PAM type: NRG; PAM sequence: GAG
  source 1..20: mol_type = other DNA
tgcagggatataagtgagct

SEQ ID NO: 15019 - DNA, 20 bp, synthetic construct
  misc_feature 1..20: note = Description of Artificial Sequence: Synthetic oligonucleotide
  misc_feature 1..20: note = Target: FXN; (-) strand; PAM type: NRG; PAM sequence: GAG
  source 1..20: mol_type = other DNA
gcggatgcagggatataagt

SEQ ID NO: 15020 - DNA, 20 bp, synthetic construct
  misc_feature 1..20: note = Description of Artificial Sequence: Synthetic oligonucleotide
  misc_feature 1..20: note = Target: FXN; (-) strand; PAM type: NRG; PAM sequence: AAG
  source 1..20: mol_type = other DNA
tgtagcggatgcagggatat

SEQ ID NO: 15021 - DNA, 20 bp, synthetic construct
  misc_feature 1..20: note = Description of Artificial Sequence: Synthetic oligonucleotide
  misc_feature 1..20: note = Target: FXN; (-) strand; PAM type: NRG; PAM sequence: GGG
  source 1..20: mol_type = other DNA
ctgtctctgtagcggatgca

SEQ ID NO: 15022 - DNA, 20 bp, synthetic construct
  misc_feature 1..20: note = Description of Artificial Sequence: Synthetic oligonucleotide
  misc_feature 1..20: note = Target: FXN; (-) strand; PAM type: NRG; PAM sequence: AGG
  source 1..20: mol_type = other DNA
tctgtctctgtagcggatgc

SEQ ID NO: 15023 - DNA, 20 bp, synthetic construct
  misc_feature 1..20: note = Description of Artificial Sequence: Synthetic oligonucleotide
  misc_feature 1..20: note = Target: FXN; (-) strand; PAM type: NRG; PAM sequence: CAG
  source 1..20: mol_type = other DNA
ttctgtctctgtagcggatg

SEQ ID NO: 15024 - DNA, 20 bp, synthetic construct
  misc_feature 1..20: note = Description of Artificial Sequence: Synthetic oligonucleotide
  misc_feature 1..20: note = Target: FXN; (-) strand; PAM type: NRG; PAM sequence: CGG
  source 1..20: mol_type = other DNA
cttggattctgtctctgtag

SEQ ID NO: 15025 - DNA, 20 bp, synthetic construct
  misc_feature 1..20: note = Description of Artificial Sequence: Synthetic oligonucleotide
  misc_feature 1..20: note = Target: FXN; (-) strand; PAM type: NRG; PAM sequence: TAG
  source 1..20: mol_type = other DNA
gagcttggattctgtctctg

SEQ ID NO: 15026 - DNA, 20 bp, synthetic construct
  misc_feature 1..20: note = Description of Artificial Sequence: Synthetic oligonucleotide
  misc_feature 1..20: note = Target: FXN; (-) strand; PAM type: NRG; PAM sequence: TGG
  source 1..20: mol_type = other DNA
gaagatggaacatatgagct

SEQ ID NO: 15027 - DNA, 20 bp, synthetic construct
  misc_feature 1..20: note = Description of Artificial Sequence: Synthetic oligonucleotide
  misc_feature 1..20: note = Target: FXN; (-) strand; PAM type: NRG; PAM sequence: GAG
  source 1..20: mol_type = other DNA
ccagagaagatggaacatat

SEQ ID NO: 15028 - DNA, 20 bp, synthetic construct
  misc_feature 1..20: note = Description of Artificial Sequence: Synthetic oligonucleotide
  misc_feature 1..20: note = Target: FXN; (-) strand; PAM type: NRG; PAM sequence: TGG
  source 1..20: mol_type = other DNA
aactatacagccagagaaga

SEQ ID NO: 15029 - DNA, 20 bp, synthetic construct
  misc_feature 1..20: note = Description of Artificial Sequence: Synthetic oligonucleotide
  misc_feature 1..20: note = Target: FXN; (-) strand; PAM type: NRG; PAM sequence: AAG
  source 1..20: mol_type = other DNA
cttaaactatacagccagag

SEQ ID NO: 15030 - DNA, 20 bp, synthetic construct
  misc_feature 1..20: note = Description of Artificial Sequence: Synthetic oligonucleotide
  misc_feature 1..20: note = Target: FXN; (-) strand; PAM type: NRG; PAM sequence: GAG
  source 1..20: mol_type = other DNA
ttccttaaactatacagcca

SEQ ID NO: 15031 - DNA, 20 bp, synthetic construct
  misc_feature 1..20: note = Description of Artificial Sequence: Synthetic oligonucleotide
  misc_feature 1..20: note = Target: FXN; (-) strand; PAM type: NRG; PAM sequence: CAG
  source 1..20: mol_type = other DNA
cattccttaaactatacagc

SEQ ID NO: 15032 - DNA, 20 bp, synthetic construct
  misc_feature 1..20: note = Description of Artificial Sequence: Synthetic oligonucleotide
  misc_feature 1..20: note = Target: FXN; (-) strand; PAM type: NRG; PAM sequence: CAG
  source 1..20: mol_type = other DNA
cttccattccttaaactata

SEQ ID NO: 15033 - DNA, 20 bp, synthetic construct
  misc_feature 1..20: note = Description of Artificial Sequence: Synthetic oligonucleotide
  misc_feature 1..20: note = Target: FXN; (-) strand; PAM type: NRG; PAM sequence: TGG
  source 1..20: mol_type = other DNA
acatttcaataaatctgttc

SEQ ID NO: 15034 - DNA, 20 bp, synthetic construct
  misc_feature 1..20: note = Description of Artificial Sequence: Synthetic oligonucleotide
  misc_feature 1..20: note = Target: FXN; (-) strand; PAM type: NRG; PAM sequence: CAG
  source 1..20: mol_type = other DNA
caactgtctaaataaatctt

SEQ ID NO: 15035 - DNA, 20 bp, synthetic construct
  misc_feature 1..20: note = Description of Artificial Sequence: Synthetic oligonucleotide
  misc_feature 1..20: note = Target: FXN; (-) strand; PAM type: NRG; PAM sequence: GGG
  source 1..20: mol_type = other DNA
tgagagccaattttactgct

SEQ ID NO: 15036 - DNA, 20 bp, synthetic construct
  misc_feature 1..20: note = Description of Artificial Sequence: Synthetic oligonucleotide
  misc_feature 1..20: note = Target: FXN; (-) strand; PAM type: NRG; PAM sequence: TGG
  source 1..20: mol_type = other DNA
ttgagagccaattttactgc

SEQ ID NO: 15037 - DNA, 20 bp, synthetic construct
  misc_feature 1..20: note = Description of Artificial Sequence: Synthetic oligonucleotide
  misc_feature 1..20: note = Target: FXN; (-) strand; PAM type: NRG; PAM sequence: GAG
  source 1..20: mol_type = other DNA
caggagaagaaaatctttga

SEQ ID NO: 15038 - DNA, 20 bp, synthetic construct
  misc_feature 1..20: note = Description of Artificial Sequence: Synthetic oligonucleotide
  misc_feature 1..20: note = Target: FXN; (-) strand; PAM type: NRG; PAM sequence: GAG
  source 1..20: mol_type = other DNA
cacaggagaagaaaatcttt

SEQ ID NO: 15039 - DNA, 20 bp, synthetic construct
  misc_feature 1..20: note = Description of Artificial Sequence: Synthetic oligonucleotide
  misc_feature 1..20: note = Target: FXN; (-) strand; PAM type: NRG; PAM sequence: AAG
  source 1..20: mol_type = other DNA
ggtctgactttccacaggag

SEQ ID NO: 15040 - DNA, 20 bp, synthetic construct
  misc_feature 1..20: note = Description of Artificial Sequence: Synthetic oligonucleotide
  misc_feature 1..20: note = Target: FXN; (-) strand; PAM type: NRG; PAM sequence: GAG
  source 1..20: mol_type = other DNA
agaggtctgactttccacag

SEQ ID NO: 15041 - DNA, 20 bp, synthetic construct
  misc_feature 1..20: note = Description of Artificial Sequence: Synthetic oligonucleotide
  misc_feature 1..20: note = Target: FXN; (-) strand; PAM type: NRG; PAM sequence: AGG
  source 1..20: mol_type = other DNA
tcagaggtctgactttccac

SEQ ID NO: 15042 - DNA, 20 bp, synthetic construct
  misc_feature 1..20: note = Description of Artificial Sequence: Synthetic oligonucleotide
  misc_feature 1..20: note = Target: FXN; (-) strand; PAM type: NRG; PAM sequence: CAG
  source 1..20: mol_type = other DNA
ctcagaggtctgactttcca

SEQ ID NO: 15043 - DNA, 20 bp, synthetic construct
  misc_feature 1..20: note = Description of Artificial Sequence: Synthetic oligonucleotide
  misc_feature 1..20: note = Target: FXN; (-) strand; PAM type: NRG; PAM sequence: AGG
  source 1..20: mol_type = other DNA
ctacctggatggggcctcag

SEQ ID NO: 15044 - DNA, 20 bp, synthetic construct
  misc_feature 1..20: note = Description of Artificial Sequence: Synthetic oligonucleotide
  misc_feature 1..20: note = Target: FXN; (-) strand; PAM type: NRG; PAM sequence: GAG
  source 1..20: mol_type = other DNA
tctacctggatggggcctca

SEQ ID NO: 15045 - DNA, 20 bp, synthetic construct
  misc_feature 1..20: note = Description of Artificial Sequence: Synthetic oligonucleotide
  misc_feature 1..20: note = Target: FXN; (-) strand; PAM type: NRG; PAM sequence: CAG
  source 1..20: mol_type = other DNA
cttctacctggatggggcct

SEQ ID NO: 15046 - DNA, 20 bp, synthetic construct
  misc_feature 1..20: note = Description of Artificial Sequence: Synthetic oligonucleotide
  misc_feature 1..20: note = Target: FXN; (-) strand; PAM type: NRG; PAM sequence: GGG
  source 1..20: mol_type = other DNA
ctagtacttctacctggatg

SEQ ID NO: 15047 - DNA, 20 bp, synthetic construct
  misc_feature 1..20: note = Description of Artificial Sequence: Synthetic oligonucleotide
  misc_feature 1..20: note = Target: FXN; (-) strand; PAM type: NRG; PAM sequence: GGG
  source 1..20: mol_type = other DNA
actagtacttctacctggat

SEQ ID NO: 15048 - DNA, 20 bp, synthetic construct
  misc_feature 1..20: note = Description of Artificial Sequence: Synthetic oligonucleotide
  misc_feature 1..20: note = Target: FXN; (-) strand; PAM type: NRG; PAM sequence: TGG
  source 1..20: mol_type = other DNA
cactagtacttctacctgga

SEQ ID NO: 15049 - DNA, 20 bp, synthetic construct
  misc_feature 1..20: note = Description of Artificial Sequence: Synthetic oligonucleotide
  misc_feature 1..20: note = Target: FXN; (-) strand; PAM type: NRG; PAM sequence: TGG
  source 1..20: mol_type = other DNA
cttgcactagtacttctacc

SEQ ID NO: 15050 - DNA, 20 bp, synthetic construct
  misc_feature 1..20: note = Description of Artificial Sequence: Synthetic oligonucleotide
  misc_feature 1..20: note = Target: FXN; (-) strand; PAM type: NRG; PAM sequence: TAG
  source 1..20: mol_type = other DNA
agcagaggcccttcttgcac

SEQ ID NO: 15051 - DNA, 20 bp, synthetic construct
  misc_feature 1..20: note = Description of Artificial Sequence: Synthetic oligonucleotide
  misc_feature 1..20: note = Target: FXN; (-) strand; PAM type: NRG; PAM sequence: AGG
  source 1..20: mol_type = other DNA
gaaacacaagtggacagcag

SEQ ID NO: 15052 - DNA, 20 bp, synthetic construct
  misc_feature 1..20: note = Description of Artificial Sequence: Synthetic oligonucleotide
  misc_feature 1..20: note = Target: FXN; (-) strand; PAM type: NRG; PAM sequence: GAG
  source 1..20: mol_type = other DNA
agaaacacaagtggacagca

SEQ ID NO: 15053 - DNA, 20 bp, synthetic construct
  misc_feature 1..20: note = Description of Artificial Sequence: Synthetic oligonucleotide
  misc_feature 1..20: note = Target: FXN; (-) strand; PAM type: NRG; PAM sequence: CAG
  source 1..20: mol_type = other DNA
acagaaacacaagtggacag

SEQ ID NO: 15054 - DNA, 20 bp, synthetic construct
  misc_feature 1..20: note = Description of Artificial Sequence: Synthetic oligonucleotide
  misc_feature 1..20: note = Target: FXN; (-) strand; PAM type: NRG; PAM sequence: CAG
  source 1..20: mol_type = other DNA
atcacagaaacacaagtgga

SEQ ID NO: 15055 - DNA, 20 bp, synthetic construct
  misc_feature 1..20: note = Description of Artificial Sequence: Synthetic oligonucleotide
  misc_feature 1..20: note = Target: FXN; (-) strand; PAM type: NRG; PAM sequence: TGG
  source 1..20: mol_type = other DNA
acagatcacagaaacacaag

SEQ ID NO: 15056 - DNA, 20 bp, synthetic construct
  misc_feature 1..20: note = Description of Artificial Sequence: Synthetic oligonucleotide
  misc_feature 1..20: note = Target: FXN; (-) strand; PAM type: NRG; PAM sequence: AAG
  source 1..20: mol_type = other DNA
cccacagatcacagaaacac

SEQ ID NO: 15057 - DNA, 20 bp, synthetic construct
  misc_feature 1..20: note = Description of Artificial Sequence: Synthetic oligonucleotide
  misc_feature 1..20: note = Target: FXN; (-) strand; PAM type: NRG; PAM sequence: CAG
  source 1..20: mol_type = other DNA
aacaatgttcccacagatca

SEQ ID NO: 15058 - DNA, 20 bp, synthetic construct
  misc_feature 1..20: note = Description of Artificial Sequence: Synthetic oligonucleotide
  misc_feature 1..20: note = Target: FXN; (-) strand; PAM type: NRG; PAM sequence: CAG
  source 1..20: mol_type = other DNA
tggcgttaacaatgttccca

SEQ ID NO: 15059 - DNA, 20 bp, synthetic construct
  misc_feature 1..20: note = Description of Artificial Sequence: Synthetic oligonucleotide
  misc_feature 1..20: note = Target: FXN; (-) strand; PAM type: NRG; PAM sequence: TGG
  source 1..20: mol_type = other DNA
aacaatttgaggtcaagatg

SEQ ID NO: 15060 - DNA, 20 bp, synthetic construct
  misc_feature 1..20: note = Description of Artificial Sequence: Synthetic oligonucleotide
  misc_feature 1..20: note = Target: FXN; (-) strand; PAM type: NRG; PAM sequence: AAG
  source 1..20: mol_type = other DNA
gagctaaacaatttgaggtc

SEQ ID NO: 15061 - DNA, 20 bp, synthetic construct
  misc_feature 1..20: note = Description of Artificial Sequence: Synthetic oligonucleotide
  misc_feature 1..20: note = Target: FXN; (-) strand; PAM type: NRG; PAM sequence: AGG
  source 1..20: mol_type = other DNA
gccaggagctaaacaatttg

SEQ ID NO: 15062 - DNA, 20 bp, synthetic construct
  misc_feature 1..20: note = Description of Artificial Sequence: Synthetic oligonucleotide
  misc_feature 1..20: note = Target: FXN; (-) strand; PAM type: NRG; PAM sequence: GAG
  source 1..20: mol_type = other DNA
ggccaggagctaaacaattt

SEQ ID NO: 15063 - DNA, 20 bp, synthetic construct
  misc_feature 1..20: note = Description of Artificial Sequence: Synthetic oligonucleotide
  misc_feature 1..20: note = Target: FXN; (-) strand; PAM type: NRG; PAM sequence: GAG
  source 1..20: mol_type = other DNA
gagccaccgtgtctggccag

SEQ ID NO: 15064 - DNA, 20 bp, synthetic construct
  misc_feature 1..20: note = Description of Artificial Sequence: Synthetic oligonucleotide
  misc_feature 1..20: note = Target: FXN; (-) strand; PAM type: NRG; PAM sequence: AGG
  source 1..20: mol_type = other DNA
gtgagccaccgtgtctggcc

SEQ ID NO: 15065 - DNA, 20 bp, synthetic construct
  misc_feature 1..20: note = Description of Artificial Sequence: Synthetic oligonucleotide
  misc_feature 1..20: note = Target: FXN; (-) strand; PAM type: NRG; PAM sequence: CAG
  source 1..20: mol_type = other DNA
tgtgagccaccgtgtctggc

SEQ ID NO: 15066 - DNA, 20 bp, synthetic construct
  misc_feature 1..20: note = Description of Artificial Sequence: Synthetic oligonucleotide
  misc_feature 1..20: note = Target: FXN; (-) strand; PAM type: NRG; PAM sequence: TGG
  source 1..20: mol_type = other DNA
caggtgtgagccaccgtgtc

SEQ ID NO: 15067 - DNA, 20 bp, synthetic construct
  misc_feature 1..20: note = Description of Artificial Sequence: Synthetic oligonucleotide
  misc_feature 1..20: note = Target: FXN; (-) strand; PAM type: NRG; PAM sequence: GAG
  source 1..20: mol_type = other DNA
agtgctgggattacaggtgt

SEQ ID NO: 15068 - DNA, 20 bp, synthetic construct
  misc_feature 1..20: note = Description of Artificial Sequence: Synthetic oligonucleotide
  misc_feature 1..20: note = Target: FXN; (-) strand; PAM type: NRG; PAM sequence: AGG
  source 1..20: mol_type = other DNA
tctcaaagtgctgggattac

SEQ ID NO: 15069 - DNA, 20 bp, synthetic construct
  misc_feature 1..20: note = Description of Artificial Sequence: Synthetic oligonucleotide
  misc_feature 1..20: note = Target: FXN; (-) strand; PAM type: NRG; PAM sequence: CAG
  source 1..20: mol_type = other DNA
ctctcaaagtgctgggatta

SEQ ID NO: 15070 - DNA, 20 bp, synthetic construct
  misc_feature 1..20: note = Description of Artificial Sequence: Synthetic oligonucleotide
  misc_feature 1..20: note = Target: FXN; (-) strand; PAM type: NRG; PAM sequence: GGG
  source 1..20: mol_type = other DNA
cctcagcctctcaaagtgct

SEQ ID NO: 15071 - DNA, 20 bp, synthetic construct
  misc_feature 1..20: note = Description of Artificial Sequence: Synthetic oligonucleotide
  misc_feature 1..20: note = Target: FXN; (-) strand; PAM type: NRG; PAM sequence: TGG
  source 1..20: mol_type = other DNA
gcctcagcctctcaaagtgc

SEQ ID NO: 15072 - DNA, 20 bp, synthetic construct
  misc_feature 1..20: note = Description of Artificial Sequence: Synthetic oligonucleotide
  misc_feature 1..20: note = Target: FXN; (-) strand; PAM type: NRG; PAM sequence: AAG
  source 1..20: mol_type = other DNA
ccacctgcctcagcctctca

SEQ ID NO: 15073 - DNA, 20 bp, synthetic construct
  misc_feature 1..20: note = Description of Artificial Sequence: Synthetic oligonucleotide
  misc_feature 1..20: note = Target: FXN; (-) strand; PAM type: NRG; PAM sequence: CAG
  source 1..20: mol_type = other DNA
ctcaggtgatccacctgcct

SEQ ID NO: 15074 - DNA, 20 bp, synthetic construct
  misc_feature 1..20: note = Description of Artificial Sequence: Synthetic oligonucleotide
  misc_feature 1..20: note = Target: FXN; (-) strand; PAM type: NRG; PAM sequence: AGG
  source 1..20: mol_type = other DNA
ggcctcgaactcctaacctc

SEQ ID NO: 15075 - DNA, 20 bp, synthetic construct
  misc_feature 1..20: note = Description of Artificial Sequence: Synthetic oligonucleotide
  misc_feature 1..20: note = Target: FXN; (-) strand; PAM type: NRG; PAM sequence: CAG
  source 1..20: mol_type = other DNA
tggcctcgaactcctaacct

SEQ ID NO: 15076 - DNA, 20 bp, synthetic construct
  misc_feature 1..20: note = Description of Artificial Sequence: Synthetic oligonucleotide
  misc_feature 1..20: note = Target: FXN; (-) strand; PAM type: NRG; PAM sequence: TGG
  source 1..20: mol_type = other DNA
ttttaccatgttgaccaggc

SEQ ID NO: 15077 - DNA, 20 bp, synthetic construct
  misc_feature 1..20: note = Description of Artificial Sequence: Synthetic oligonucleotide
  misc_feature 1..20: note = Target: FXN; (-) strand; PAM type: NRG; PAM sequence: AGG
  source 1..20: mol_type = other DNA
ggggttttaccatgttgacc

SEQ ID NO: 15078 - DNA, 20 bp, synthetic construct
  misc_feature 1..20: note = Description of Artificial Sequence: Synthetic oligonucleotide
  misc_feature 1..20: note = Target: FXN; (-) strand; PAM type: NRG; PAM sequence: CAG
  source 1..20: mol_type = other DNA
cggggttttaccatgttgac

SEQ ID NO: 15079 - DNA, 20 bp, synthetic construct
  misc_feature 1..20: note = Description of Artificial Sequence: Synthetic oligonucleotide
  misc_feature 1..20: note = Target: FXN; (-) strand; PAM type: NRG; PAM sequence: GGG
  source 1..20: mol_type = other DNA
ttgtatttttagtagaggcg

SEQ ID NO: 15080 - DNA, 20 bp, synthetic construct
  misc_feature 1..20: note = Description of Artificial Sequence: Synthetic oligonucleotide
  misc_feature 1..20: note = Target: FXN; (-) strand; PAM type: NRG; PAM sequence: GGG
  source 1..20: mol_type = other DNA
tttgtatttttagtagaggc

SEQ ID NO: 15081 - DNA, 20 bp, synthetic construct
  misc_feature 1..20: note = Description of Artificial Sequence: Synthetic oligonucleotide
  misc_feature 1..20: note = Target: FXN; (-) strand; PAM type: NRG; PAM sequence: CGG
  source 1..20: mol_type = other DNA
ttttgtatttttagtagagg

SEQ ID NO: 15082 - DNA, 20 bp, synthetic construct
  misc_feature 1..20: note = Description of Artificial Sequence: Synthetic oligonucleotide
  misc_feature 1..20: note = Target: FXN; (-) strand; PAM type: NRG; PAM sequence: AGG
  source 1..20: mol_type = other DNA
aatttttgtatttttagtag

SEQ ID NO: 15083 - DNA, 20 bp, synthetic construct
  misc_feature 1..20: note = Description of Artificial Sequence: Synthetic oligonucleotide
  misc_feature 1..20: note = Target: FXN; (-) strand; PAM type: NRG; PAM sequence: GAG
  source 1..20: mol_type = other DNA
taatttttgtatttttagta

SEQ ID NO: 15084 - DNA, 20 bp, synthetic construct
  misc_feature 1..20: note = Description of Artificial Sequence: Synthetic oligonucleotide
  misc_feature 1..20: note = Target: FXN; (-) strand; PAM type: NRG; PAM sequence: TAG
  source 1..20: mol_type = other DNA
gctaatttttgtatttttag

SEQ ID NO: 15085 - DNA, 20 bp, synthetic construct
  misc_feature 1..20: note = Description of Artificial Sequence: Synthetic oligonucleotide
  misc_feature 1..20: note = Target: FXN; (-) strand; PAM type: NRG; PAM sequence: TAG
  source 1..20: mol_type = other DNA
ccagctaatttttgtatttt

SEQ ID NO: 15086 - DNA, 20 bp, synthetic construct
  misc_feature 1..20: note = Description of Artificial Sequence: Synthetic oligonucleotide
  misc_feature 1..20: note = Target: FXN; (-) strand; PAM type: NRG; PAM sequence: CAG
  source 1..20: mol_type = other DNA
caggcgtgcgccactacggc

SEQ ID NO: 15087 - DNA, 20 bp, synthetic construct
  misc_feature 1..20: note = Description of Artificial Sequence: Synthetic oligonucleotide
  misc_feature 1..20: note = Target: FXN; (-) strand; PAM type: NRG; PAM sequence: CGG
  source 1..20: mol_type = other DNA
ataacaggcgtgcgccacta

SEQ ID NO: 15088 - DNA, 20 bp, synthetic construct
  misc_feature 1..20: note = Description of Artificial Sequence: Synthetic oligonucleotide
  misc_feature 1..20: note = Target: FXN; (-) strand; PAM type: NRG; PAM sequence: AGG
  source 1..20: mol_type = other DNA
tcccgagtagctgggataac

SEQ ID NO: 15089 - DNA, 20 bp, synthetic construct
  misc_feature 1..20: note = Description of Artificial Sequence: Synthetic oligonucleotide
  misc_feature 1..20: note = Target: FXN; (-) strand; PAM type: NRG; PAM sequence: CAG
  source 1..20: mol_type = other DNA
ctcccgagtagctgggataa

SEQ ID NO: 15090 - DNA, 20 bp, synthetic construct
  misc_feature 1..20: note = Description of Artificial Sequence: Synthetic oligonucleotide
  misc_feature 1..20: note = Target: FXN; (-) strand; PAM type: NRG; PAM sequence: GGG
  source 1..20: mol_type = other DNA
cctcagcctcccgagtagct

SEQ ID NO: 15091 - DNA, 20 bp, synthetic construct
  misc_feature 1..20: note = Description of Artificial Sequence: Synthetic oligonucleotide
  misc_feature 1..20: note = Target: FXN; (-) strand; PAM type: NRG; PAM sequence: TGG
  source 1..20: mol_type = other DNA
gcctcagcctcccgagtagc

SEQ ID NO: 15092 - DNA, 20 bp, synthetic construct
  misc_feature 1..20: note = Description of Artificial Sequence: Synthetic oligonucleotide
  misc_feature 1..20: note = Target: FXN; (-) strand; PAM type: NRG; PAM sequence: TAG
  source 1..20: mol_type = other DNA
tcctgcctcagcctcccgag

SEQ ID NO: 15093 - DNA, 20 bp, synthetic construct
  misc_feature 1..20: note = Description of Artificial Sequence: Synthetic oligonucleotide
  misc_feature 1..20: note = Target: FXN; (-) strand; PAM type: NRG; PAM sequence: GAG
  source 1..20: mol_type = other DNA
ttctcctgcctcagcctccc

SEQ ID NO: 15094 - DNA, 20 bp, synthetic construct
  misc_feature 1..20: note = Description of Artificial Sequence: Synthetic oligonucleotide
  misc_feature 1..20: note = Target: FXN; (-) strand; PAM type: NRG; PAM sequence: CAG
  source 1..20: mol_type = other DNA
ttcaagcaattctcctgcct

SEQ ID NO: 15095 - DNA, 20 bp, synthetic construct
  misc_feature 1..20: note = Description of Artificial Sequence: Synthetic oligonucleotide
  misc_feature 1..20: note = Target: FXN; (-) strand; PAM type: NRG; PAM sequence: AAG
  source 1..20: mol_type = other DNA
aacctccaccacccaggttc

SEQ ID NO: 15096 - DNA, 20 bp, synthetic construct
  misc_feature 1..20: note = Description of Artificial Sequence: Synthetic oligonucleotide
  misc_feature 1..20: note = Target: FXN; (-) strand; PAM type: NRG; PAM sequence: AGG
  source 1..20: mol_type = other DNA
cactgcaacctccaccaccc

SEQ ID NO: 15097 - DNA, 20 bp, synthetic construct
  misc_feature 1..20: note = Description of Artificial Sequence: Synthetic oligonucleotide
  misc_feature 1..20: note = Target: FXN; (-) strand; PAM type: NRG; PAM sequence: CAG
  source 1..20: mol_type = other DNA
tcactgcaacctccaccacc

SEQ ID NO: 15098 - DNA, 20 bp, synthetic construct
  misc_feature 1..20: note = Description of Artificial Sequence: Synthetic oligonucleotide
  misc_feature 1..20: note = Target: FXN; (-) strand; PAM type: NRG; PAM sequence: CGG
  source 1..20: mol_type = other DNA
ggagtgcagtggtgtaatct

SEQ ID NO: 15099 - DNA, 20 bp, synthetic construct
  misc_feature 1..20: note = Description of Artificial Sequence: Synthetic oligonucleotide
  misc_feature 1..20: note = Target: FXN; (-) strand; PAM type: NRG; PAM sequence: TGG
  source 1..20: mol_type = other DNA
tcacccaggctggagtgcag

SEQ ID NO: 15100 - DNA, 20 bp, synthetic construct
  misc_feature 1..20: note = Description of Artificial Sequence: Synthetic oligonucleotide
  misc_feature 1..20: note = Target: FXN; (-) strand; PAM type: NRG; PAM sequence: CAG
  source 1..20: mol_type = other DNA
ttgtcacccaggctggagtg

SEQ ID NO: 15101 - DNA, 20 bp, synthetic construct
  misc_feature 1..20: note = Description of Artificial Sequence: Synthetic oligonucleotide
  misc_feature 1..20: note = Target: FXN; (-) strand; PAM type: NRG; PAM sequence: GAG
  source 1..20: mol_type = other DNA
ccctcttgtcacccaggctg

SEQ ID NO: 15102 - DNA, 20 bp, synthetic construct
  misc_feature 1..20: note = Description of Artificial Sequence: Synthetic oligonucleotide
  misc_feature 1..20: note = Target: FXN; (-) strand; PAM type: NRG; PAM sequence: TGG
  source 1..20: mol_type = other DNA
ttccctcttgtcacccaggc

SEQ ID NO: 15103 - DNA, 20 bp, synthetic construct
  misc_feature 1..20: note = Description of Artificial Sequence: Synthetic oligonucleotide
  misc_feature 1..20: note = Target: FXN; (-) strand; PAM type: NRG; PAM sequence: AGG
  source 1..20: mol_type = other DNA
gagtttccctcttgtcaccc

SEQ ID NO: 15104 - DNA, 20 bp, synthetic construct
  misc_feature 1..20: note = Description of Artificial Sequence: Synthetic oligonucleotide
  misc_feature 1..20: note = Target: FXN; (-) strand; PAM type: NRG; PAM sequence: CAG
  source 1..20: mol_type = other DNA
ggagtttccctcttgtcacc

SEQ ID NO: 15105 - DNA, 20 bp, synthetic construct
  misc_feature 1..20: note = Description of Artificial Sequence: Synthetic oligonucleotide
  misc_feature 1..20: note = Target: FXN; (-) strand; PAM type: NRG; PAM sequence: GAG
  source 1..20: mol_type = other DNA
ggaattacatttttttaatg

SEQ ID NO: 15106 - DNA, 20 bp, synthetic construct
  misc_feature 1..20: note = Description of Artificial Sequence: Synthetic oligonucleotide
  misc_feature 1..20: note = Target: FXN; (-) strand; PAM type: NRG; PAM sequence: TGG
  source 1..20: mol_type = other DNA
cgggaattacatttttttaa

SEQ ID NO: 15107 - DNA, 20 bp, synthetic construct
  misc_feature 1..20: note = Description of Artificial Sequence: Synthetic oligonucleotide
  misc_feature 1..20: note = Target: FXN; (-) strand; PAM type: NRG; PAM sequence: GGG
  source 1..20: mol_type = other DNA
acacttaagatggcagacac

SEQ ID NO: 15108 - DNA, 20 bp, synthetic construct
  misc_feature 1..20: note = Description of Artificial Sequence: Synthetic oligonucleotide
  misc_feature 1..20: note = Target: FXN; (-) strand; PAM type: NRG; PAM sequence: CGG
  source 1..20: mol_type = other DNA
tacacttaagatggcagaca

SEQ ID NO: 15109 - DNA, 20 bp, synthetic construct
  misc_feature 1..20: note = Description of Artificial Sequence: Synthetic oligonucleotide
  misc_feature 1..20: note = Target: FXN; (-) strand; PAM type: NRG; PAM sequence: CAG
  source 1..20: mol_type = other DNA
cacctttacacttaagatgg

SEQ ID NO: 15110 - DNA, 20 bp, synthetic construct
  misc_feature 1..20: note = Description of Artificial Sequence: Synthetic oligonucleotide
  misc_feature 1..20: note = Target: FXN; (-) strand; PAM type: NRG; PAM sequence: TGG
  source 1..20: mol_type = other DNA
agccacctttacacttaaga

SEQ ID NO: 15111 - DNA, 20 bp, synthetic construct
  misc_feature 1..20: note = Description of Artificial Sequence: Synthetic oligonucleotide
  misc_feature 1..20: note = Target: FXN; (-) strand; PAM type: NRG; PAM sequence: AAG
  source 1..20: mol_type = other DNA
atttagccacctttacactt

SEQ ID NO: 15112 - DNA, 20 bp, synthetic construct
  misc_feature 1..20: note = Description of Artificial Sequence: Synthetic oligonucleotide
  misc_feature 1..20: note = Target: FXN; (-) strand; PAM type: NRG; PAM sequence: TAG
  source 1..20: mol_type = other DNA
tcttatttttctatataatt

SEQ ID NO: 15113 - DNA, 20 bp, synthetic construct
  misc_feature 1..20: note = Description of Artificial Sequence: Synthetic oligonucleotide
  misc_feature 1..20: note = Target: FXN; (-) strand; PAM type: NRG; PAM sequence: GGG
  source 1..20: mol_type = other DNA
ggtaggaaaggaatgtaatt

SEQ ID NO: 15114 - DNA, 20 bp, synthetic construct
  misc_feature 1..20: note = Description of Artificial Sequence: Synthetic oligonucleotide
  misc_feature 1..20: note = Target: FXN; (-) strand; PAM type: NRG; PAM sequence: TGG
  source 1..20: mol_type = other DNA
cggtaggaaaggaatgtaat

SEQ ID NO: 15115 - DNA, 20 bp, synthetic construct
  misc_feature 1..20: note = Description of Artificial Sequence: Synthetic oligonucleotide
  misc_feature 1..20: note = Target: FXN; (-) strand; PAM type: NRG; PAM sequence: AGG
  source 1..20: mol_type = other DNA
atcatagagtgcggtaggaa

SEQ ID NO: 15116 - DNA, 20 bp, synthetic construct
  misc_feature 1..20: note = Description of Artificial Sequence: Synthetic oligonucleotide
  misc_feature 1..20: note = Target: FXN; (-) strand; PAM type: NRG; PAM sequence: AAG
  source 1..20: mol_type = other DNA
catcatagagtgcggtagga

SEQ ID NO: 15117 - DNA, 20 bp, synthetic construct
  misc_feature 1..20: note = Description of Artificial Sequence: Synthetic oligonucleotide
  misc_feature 1..20: note = Target: FXN; (-) strand; PAM type: NRG; PAM sequence: AGG
  source 1..20: mol_type = other DNA
ctagcatcatagagtgcggt

SEQ ID NO: 15118 - DNA, 20 bp, synthetic construct
  misc_feature 1..20: note = Description of Artificial Sequence: Synthetic oligonucleotide
  misc_feature 1..20: note = Target: FXN; (-) strand; PAM type: NRG; PAM sequence: TAG
  source 1..20: mol_type = other DNA
gctagcatcatagagtgcgg

SEQ ID NO: 15119 - DNA, 20 bp, synthetic construct
  misc_feature 1..20: note = Description of Artificial Sequence: Synthetic oligonucleotide
  misc_feature 1..20: note = Target: FXN; (-) strand; PAM type: NRG; PAM sequence: CGG
  source 1..20: mol_type = other DNA
tcagctagcatcatagagtg

SEQ ID NO: 15120 - DNA, 20 bp, synthetic construct
  misc_feature 1..20: note = Description of Artificial Sequence: Synthetic oligonucleotide
  misc_feature 1..20: note = Target: FXN; (-) strand; PAM type: NRG; PAM sequence: GAG
  source 1..20: mol_type = other DNA
aaatctcagctagcatcata

SEQ ID NO: 15121 - DNA, 20 bp, synthetic construct
  misc_feature 1..20: note = Description of Artificial Sequence: Synthetic oligonucleotide
  misc_feature 1..20: note = Target: FXN; (-) strand; PAM type: NRG; PAM sequence: TAG
  source 1..20: mol_type = other DNA
aaaaatctcagctagcatca

SEQ ID NO: 15122 - DNA, 20 bp, synthetic construct
  misc_feature 1..20: note = Description of Artificial Sequence: Synthetic oligonucleotide
  misc_feature 1..20: note = Target: FXN; (-) strand; PAM type: NRG; PAM sequence: TAG
  source 1..20: mol_type = other DNA
tcttttggaaaaatctcagc

SEQ ID NO: 15123 - DNA, 20 bp, synthetic construct
  misc_feature 1..20: note = Description of Artificial Sequence: Synthetic oligonucleotide
  misc_feature 1..20: note = Target: FXN; (-) strand; PAM type: NRG; PAM sequence: CAG
  source 1..20: mol_type = other DNA
attttcttttggaaaaatct

SEQ ID NO: 15124 - DNA, 20 bp, synthetic construct
  misc_feature 1..20: note = Description of Artificial Sequence: Synthetic oligonucleotide
  misc_feature 1..20: note = Target: FXN; (-) strand; PAM type: NRG; PAM sequence: TGG
  source 1..20: mol_type = other DNA
ttatttaagccattttcttt

SEQ ID NO: 15125 - DNA, 20 bp, synthetic construct
  misc_feature 1..20: note = Description of Artificial Sequence: Synthetic oligonucleotide
  misc_feature 1..20: note = Target: FXN; (-) strand; PAM type: NRG; PAM sequence: AAG
  source 1..20: mol_type = other DNA
tttctcttagggttttattt

SEQ ID NO: 15126 - DNA, 20 bp, synthetic construct
  misc_feature 1..20: note = Description of Artificial Sequence: Synthetic oligonucleotide
  misc_feature 1..20: note = Target: FXN; (-) strand; PAM type: NRG; PAM sequence: GGG
  source 1..20: mol_type = other DNA
taaagtttttctttctctta

SEQ ID NO: 15127 - DNA, 20 bp, synthetic construct
  misc_feature 1..20: note = Description of Artificial Sequence: Synthetic oligonucleotide
  misc_feature 1..20: note = Target: FXN; (-) strand; PAM type: NRG; PAM sequence: AGG
  source 1..20: mol_type = other DNA
ttaaagtttttctttctctt

SEQ ID NO: 15128 - DNA, 20 bp, synthetic construct
  misc_feature 1..20: note = Description of Artificial Sequence: Synthetic oligonucleotide
  misc_feature 1..20: note = Target: FXN; (-) strand; PAM type: NRG; PAM sequence: TAG
  source 1..20: mol_type = other DNA
tttaaagtttttctttctct

SEQ ID NO: 15129 - DNA, 20 bp, synthetic construct
  misc_feature 1..20: note = Description of Artificial Sequence: Synthetic oligonucleotide
  misc_feature 1..20: note = Target: FXN; (-) strand; PAM type: NRG; PAM sequence: AAG
  source 1..20: mol_type = other DNA
ttgagctttggagggattta

SEQ ID NO: 15130 - DNA, 20 bp, synthetic construct
  misc_feature 1..20: note = Description of Artificial Sequence: Synthetic oligonucleotide
  misc_feature 1..20: note = Target: FXN; (-) strand; PAM type: NRG; PAM sequence: GGG
  source 1..20: mol_type = other DNA
tattacttttgagctttgga

SEQ ID NO: 15131 - DNA, 20 bp, synthetic construct
  misc_feature 1..20: note = Description of Artificial Sequence: Synthetic oligonucleotide
  misc_feature 1..20: note = Target: FXN; (-) strand; PAM type: NRG; PAM sequence: AGG
  source 1..20: mol_type = other DNA
ctattacttttgagctttgg

SEQ ID NO: 15132 - DNA, 20 bp, synthetic construct
  misc_feature 1..20: note = Description of Artificial Sequence: Synthetic oligonucleotide
  misc_feature 1..20: note = Target: FXN; (-) strand; PAM type: NRG; PAM sequence: GAG
  source 1..20: mol_type = other DNA
tctattacttttgagctttg

SEQ ID NO: 15133 - DNA, 20 bp, synthetic construct
  misc_feature 1..20: note = Description of Artificial Sequence: Synthetic oligonucleotide
  misc_feature 1..20: note = Target: FXN; (-) strand; PAM type: NRG; PAM sequence: TGG
  source 1..20: mol_type = other DNA
tttctattacttttgagctt

SEQ ID NO: 15134 - DNA, 20 bp, synthetic construct
  misc_feature 1..20: note = Description of Artificial Sequence: Synthetic oligonucleotide
  misc_feature 1..20: note = Target: FXN; (-) strand; PAM type: NRG; PAM sequence: GAG
  source 1..20: mol_type = other DNA
catctgtttctattactttt

SEQ ID NO: 15135 - DNA, 20 bp, synthetic construct
  misc_feature 1..20: note = Description of Artificial Sequence: Synthetic oligonucleotide
  misc_feature 1..20: note = Target: FXN; (-) strand; PAM type: NRG; PAM sequence: GAG
  source 1..20: mol_type = other DNA
acagcctaggcaatcttaca

SEQ ID NO: 15136 - DNA, 20 bp, synthetic construct
  misc_feature 1..20: note = Description of Artificial Sequence: Synthetic oligonucleotide
  misc_feature 1..20: note = Target: FXN; (-) strand; PAM type: NRG; PAM sequence: CAG
  source 1..20: mol_type = other DNA
acacagcctaggcaatctta

SEQ ID NO: 15137 - DNA, 20 bp, synthetic construct
  misc_feature 1..20: note = Description of Artificial Sequence: Synthetic oligonucleotide
  misc_feature 1..20: note = Target: FXN; (-) strand; PAM type: NRG; PAM sequence: AGG
  source 1..20: mol_type = other DNA
agatgtgcagtacacagcct

SEQ ID NO: 15138 - DNA, 20 bp, synthetic construct
  misc_feature 1..20: note = Description of Artificial Sequence: Synthetic oligonucleotide
  misc_feature 1..20: note = Target: FXN; (-) strand; PAM type: NRG; PAM sequence: TAG
  source 1..20: mol_type = other DNA
gagatgtgcagtacacagcc

SEQ ID NO: 15139 - DNA, 20 bp, synthetic construct
  misc_feature 1..20: note = Description of Artificial Sequence: Synthetic oligonucleotide
  misc_feature 1..20: note = Target: FXN; (-) strand; PAM type: NRG; PAM sequence: CAG
  source 1..20: mol_type = other DNA
acctggagatgtgcagtaca

SEQ ID NO: 15140 - DNA, 20 bp, synthetic construct
  misc_feature 1..20: note = Description of Artificial Sequence: Synthetic oligonucleotide
  misc_feature 1..20: note = Target: FXN; (-) strand; PAM type: NRG; PAM sequence: CAG
  source 1..20: mol_type = other DNA
cagtggcacctggagatgtg

SEQ ID NO: 15141 - DNA, 20 bp, synthetic construct
  misc_feature 1..20: note = Description of Artificial Sequence: Synthetic oligonucleotide
  misc_feature 1..20: note = Target: FXN; (-) strand; PAM type: NRG; PAM sequence: GAG
  source 1..20: mol_type = other DNA
tctgtcaacagtggcacctg

SEQ ID NO: 15142 - DNA, 20 bp, synthetic construct
  misc_feature 1..20: note = Description of Artificial Sequence: Synthetic oligonucleotide
  misc_feature 1..20: note = Target: FXN; (-) strand; PAM type: NRG; PAM sequence: TGG
  source 1..20: mol_type = other DNA
tctctgtcaacagtggcacc

SEQ ID NO: 15143 - DNA, 20 bp, synthetic construct
  misc_feature 1..20: note = Description of Artificial Sequence: Synthetic oligonucleotide
  misc_feature 1..20: note = Target: FXN; (-) strand; PAM type: NRG; PAM sequence: TGG
  source 1..20: mol_type = other DNA
gttataatctctgtcaacag

SEQ ID NO: 15144 - DNA, 20 bp, synthetic construct
  misc_feature 1..20: note = Description of Artificial Sequence: Synthetic oligonucleotide
  misc_feature 1..20: note = Target: FXN; (-) strand; PAM type: NRG; PAM sequence: CAG
  source 1..20: mol_type = other DNA
gtagttataatctctgtcaa

SEQ ID NO: 15145 - DNA, 20 bp, synthetic construct
  misc_feature 1..20: note = Description of Artificial Sequence: Synthetic oligonucleotide
  misc_feature 1..20: note = Target: FXN; (-) strand; PAM type: NRG; PAM sequence: TAG
  source 1..20: mol_type = other DNA
gcaccattcacttcacattg

SEQ ID NO: 15146 - DNA, 20 bp, synthetic construct
  misc_feature 1..20: note = Description of Artificial Sequence: Synthetic oligonucleotide
  misc_feature 1..20: note = Target: FXN; (-) strand; PAM type: NRG; PAM sequence: TGG
  source 1..20: mol_type = other DNA
acggtttgcataactgtcag

SEQ ID NO: 15147 - DNA, 20 bp, synthetic construct
  misc_feature 1..20: note = Description of Artificial Sequence: Synthetic oligonucleotide
  misc_feature 1..20: note = Target: FXN; (-) strand; PAM type: NRG; PAM sequence: CAG
  source 1..20: mol_type = other DNA
tggacggtttgcataactgt

SEQ ID NO: 15148 - DNA, 20 bp, synthetic construct
  misc_feature 1..20: note = Description of Artificial Sequence: Synthetic oligonucleotide
  misc_feature 1..20: note = Target: FXN; (-) strand; PAM type: NRG; PAM sequence: CGG
  source 1..20: mol_type = other DNA
tcaggtggctatgctctgga

SEQ ID NO: 15149 - DNA, 20 bp, synthetic construct
  misc_feature 1..20: note = Description of Artificial Sequence: Synthetic oligonucleotide
  misc_feature 1..20: note = Target: FXN; (-) strand; PAM type: NRG; PAM sequence: TGG
  source 1..20: mol_type = other DNA
aggatcaggtggctatgctc

SEQ ID NO: 15150 - DNA, 20 bp, synthetic construct
  misc_feature 1..20: note = Description of Artificial Sequence: Synthetic oligonucleotide
  misc_feature 1..20: note = Target: FXN; (-) strand; PAM type: NRG; PAM sequence: TGG
  source 1..20: mol_type = other DNA
ggaatcccagcaggatcagg

SEQ ID NO: 15151 - DNA, 20 bp, synthetic construct
  misc_feature 1..20: note = Description of Artificial Sequence: Synthetic oligonucleotide
  misc_feature 1..20: note = Target: FXN; (-) strand; PAM type: NRG; PAM sequence: AGG
  source 1..20: mol_type = other DNA
agaggaatcccagcaggatc

SEQ ID NO: 15152 - DNA, 20 bp, synthetic construct
  misc_feature 1..20: note = Description of Artificial Sequence: Synthetic oligonucleotide
  misc_feature 1..20: note = Target: FXN; (-) strand; PAM type: NRG; PAM sequence: CAG
  source 1..20: mol_type = other DNA
aagaggaatcccagcaggat

SEQ ID NO: 15153 - DNA, 20 bp, synthetic construct
  misc_feature 1..20: note = Description of Artificial Sequence: Synthetic oligonucleotide
  misc_feature 1..20: note = Target: FXN; (-) strand; PAM type: NRG; PAM sequence: AGG
  source 1..20: mol_type = other DNA
ctggcaagaggaatcccagc

SEQ ID NO: 15154 - DNA, 20 bp, synthetic construct
  misc_feature 1..20: note = Description of Artificial Sequence: Synthetic oligonucleotide
  misc_feature 1..20: note = Target: FXN; (-) strand; PAM type: NRG; PAM sequence: CAG
  source 1..20: mol_type = other DNA
actggcaagaggaatcccag

SEQ ID NO: 15155 - DNA, 20 bp, synthetic construct
  misc_feature 1..20: note = Description of Artificial Sequence: Synthetic oligonucleotide
  misc_feature 1..20: note = Target: FXN; (-) strand; PAM type: NRG; PAM sequence: CAG
  source 1..20: mol_type = other DNA
tggactggcaagaggaatcc

SEQ ID NO: 15156 - DNA, 20 bp, synthetic construct
  misc_feature 1..20: note = Description of Artificial Sequence: Synthetic oligonucleotide
  misc_feature 1..20: note = Target: FXN; (-) strand; PAM type: NRG; PAM sequence: AGG
  source 1..20: mol_type = other DNA
actgctgatggactggcaag

SEQ ID NO: 15157 - DNA, 20 bp, synthetic construct
  misc_feature 1..20: note = Description of Artificial Sequence: Synthetic oligonucleotide
  misc_feature 1..20: note = Target: FXN; (-) strand; PAM type: NRG; PAM sequence: GAG
  source 1..20: mol_type = other DNA
aactgctgatggactggcaa

SEQ ID NO: 15158 - DNA, 20 bp, synthetic construct
  misc_feature 1..20: note = Description of Artificial Sequence: Synthetic oligonucleotide
  misc_feature 1..20: note = Target: FXN; (-) strand; PAM type: NRG; PAM sequence: AAG
  source 1..20: mol_type = other DNA
ggaactgctgatggactggc

SEQ ID NO: 15159 - DNA, 20 bp, synthetic construct
  misc_feature 1..20: note = Description of Artificial Sequence: Synthetic oligonucleotide
  misc_feature 1..20: note = Target: FXN; (-) strand; PAM type: NRG; PAM sequence: TGG
  source 1..20: mol_type = other DNA
aaggggaactgctgatggac

SEQ ID NO: 15160 - DNA, 20 bp, synthetic construct
  misc_feature 1..20: note = Description of Artificial Sequence: Synthetic oligonucleotide
  misc_feature 1..20: note = Target: FXN; (-) strand; PAM type: NRG; PAM sequence: TGG
  source 1..20: mol_type = other DNA
ctttcaaggggaactgctga

SEQ ID NO: 15161 - DNA, 20 bp, synthetic construct
  misc_feature 1..20: note = Description of Artificial Sequence: Synthetic oligonucleotide
  misc_feature 1..20: note = Target: FXN; (-) strand; PAM type: NRG; PAM sequence: GGG
  source 1..20: mol_type = other DNA
tgtttggtgaaactttcaag

SEQ ID NO: 15162 - DNA, 20 bp, synthetic construct
  misc_feature 1..20: note = Description of Artificial Sequence: Synthetic oligonucleotide
  misc_feature 1..20: note = Target: FXN; (-) strand; PAM type: NRG; PAM sequence: GGG
  source 1..20: mol_type = other DNA
atgtttggtgaaactttcaa

SEQ ID NO: 15163 - DNA, 20 bp, synthetic construct
  misc_feature 1..20: note = Description of Artificial Sequence: Synthetic oligonucleotide
  misc_feature 1..20: note = Target: FXN; (-) strand; PAM type: NRG; PAM sequence: AGG
  source 1..20: mol_type = other DNA
gatgtttggtgaaactttca

SEQ ID NO: 15164 - DNA, 20 bp, synthetic construct
  misc_feature 1..20: note = Description of Artificial Sequence: Synthetic oligonucleotide
  misc_feature 1..20: note = Target: FXN; (-) strand; PAM type: NRG; PAM sequence: AAG
  source 1..20: mol_type = other DNA
ggatgtttggtgaaactttc

SEQ ID NO: 15165 - DNA, 20 bp, synthetic construct
  misc_feature 1..20: note = Description of Artificial Sequence: Synthetic oligonucleotide
  misc_feature 1..20: note = Target: FXN; (-) strand; PAM type: NRG; PAM sequence: TGG
  source 1..20: mol_type = other DNA
gggcagatttaagggatgtt

SEQ ID NO: 15166 - DNA, 20 bp, synthetic construct
  misc_feature 1..20: note = Description of Artificial Sequence: Synthetic oligonucleotide
  misc_feature 1..20: note = Target: FXN; (-) strand; PAM type: NRG; PAM sequence: GGG
  source 1..20: mol_type = other DNA
gcaggagagggcagatttaa

SEQ ID NO: 15167 - DNA, 20 bp, synthetic construct
  misc_feature 1..20: note = Description of Artificial Sequence: Synthetic oligonucleotide
  misc_feature 1..20: note = Target: FXN; (-) strand; PAM type: NRG; PAM sequence: AGG
  source 1..20: mol_type = other DNA
ggcaggagagggcagattta

SEQ ID NO: 15168 - DNA, 20 bp, synthetic construct
  misc_feature 1..20: note = Description of Artificial Sequence: Synthetic oligonucleotide
  misc_feature 1..20: note = Target: FXN; (-) strand; PAM type: NRG; PAM sequence: AAG
  source 1..20: mol_type = other DNA
gggcaggagagggcagattt

SEQ ID NO: 15169 - DNA, 20 bp, synthetic construct
  misc_feature 1..20: note = Description of Artificial Sequence: Synthetic oligonucleotide
  misc_feature 1..20: note = Target: FXN; (-) strand; PAM type: NRG; PAM sequence: CAG
  source 1..20: mol_type = other DNA
tggggacgggcaggagaggg

SEQ ID NO: 15170 - DNA, 20 bp, synthetic construct
  misc_feature 1..20: note = Description of Artificial Sequence: Synthetic oligonucleotide
  misc_feature 1..20: note = Target: FXN; (-) strand; PAM type: NRG; PAM sequence: GGG
  source 1..20: mol_type = other DNA
cactggggacgggcaggaga

SEQ ID NO: 15171 - DNA, 20 bp, synthetic construct
  misc_feature 1..20: note = Description of Artificial Sequence: Synthetic oligonucleotide
  misc_feature 1..20: note = Target: FXN; (-) strand; PAM type: NRG; PAM sequence: AGG
  source 1..20: mol_type = other DNA
ccactggggacgggcaggag

SEQ ID NO: 15172 - DNA, 20 bp, synthetic construct
  misc_feature 1..20: note = Description of Artificial Sequence: Synthetic oligonucleotide
  misc_feature 1..20: note = Target: FXN; (-) strand; PAM type: NRG; PAM sequence: GAG
  source 1..20: mol_type = other DNA
tccactggggacgggcagga

SEQ ID NO: 15173 - DNA, 20 bp, synthetic construct
  misc_feature 1..20: note = Description of Artificial Sequence: Synthetic oligonucleotide
  misc_feature 1..20: note = Target: FXN; (-) strand; PAM type: NRG; PAM sequence: GAG
  source 1..20: mol_type = other DNA
cctccactggggacgggcag

SEQ ID NO: 15174 - DNA, 20 bp, synthetic construct
  misc_feature 1..20: note = Description of Artificial Sequence: Synthetic oligonucleotide
  misc_feature 1..20: note = Target: FXN; (-) strand; PAM type: NRG; PAM sequence: AGG
  source 1..20: mol_type = other DNA
gacctccactggggacgggc

SEQ ID NO: 15175 - DNA, 20 bp, synthetic construct
  misc_feature 1..20: note = Description of Artificial Sequence: Synthetic oligonucleotide
  misc_feature 1..20: note = Target: FXN; (-) strand; PAM type: NRG; PAM sequence: CAG
  source 1..20: mol_type = other DNA
ggacctccactggggacggg

SEQ ID NO: 15176 - DNA, 20 bp, synthetic construct
  misc_feature 1..20: note = Description of Artificial Sequence: Synthetic oligonucleotide
  misc_feature 1..20: note = Target: FXN; (-) strand; PAM type: NRG; PAM sequence: GGG
  source 1..20: mol_type = other DNA
tgaggacctccactggggac

SEQ ID NO: 15177 - DNA, 20 bp, synthetic construct
  misc_feature 1..20: note = Description of Artificial Sequence: Synthetic oligonucleotide
  misc_feature 1..20: note = Target: FXN; (-) strand; PAM type: NRG; PAM sequence: CGG
  source 1..20: mol_type = other DNA
atgaggacctccactgggga

SEQ ID NO: 15178 - DNA, 20 bp, synthetic construct
  misc_feature 1..20: note = Description of Artificial Sequence: Synthetic oligonucleotide
  misc_feature 1..20: note = Target: FXN; (-) strand; PAM type: NRG; PAM sequence: GGG
  source 1..20: mol_type = other DNA
aatgatgaggacctccactg

SEQ ID NO: 15179 - DNA, 20 bp, synthetic construct
  misc_feature 1..20: note = Description of Artificial Sequence: Synthetic oligonucleotide
  misc_feature 1..20: note = Target: FXN; (-) strand; PAM type: NRG; PAM sequence: GGG
  source 1..20: mol_type = other DNA
aaatgatgaggacctccact

SEQ ID NO: 15180 - DNA, 20 bp, synthetic construct
  misc_feature 1..20: note = Description of Artificial Sequence: Synthetic oligonucleotide
  misc_feature 1..20: note = Target: FXN; (-) strand; PAM type: NRG; PAM sequence: TGG
  source 1..20: mol_type = other DNA
aaaatgatgaggacctccac

SEQ ID NO: 15181 - DNA, 20 bp, synthetic construct
  misc_feature 1..20: note = Description of Artificial Sequence: Synthetic oligonucleotide
  misc_feature 1..20: note = Target: FXN; (-) strand; PAM type: NRG; PAM sequence: AGG
  source 1..20: mol_type = other DNA
aatgcaggtgaaaaatgatg

SEQ ID NO: 15182 - DNA, 20 bp, synthetic construct
  misc_feature 1..20: note = Description of Artificial Sequence: Synthetic oligonucleotide
  misc_feature 1..20: note = Target: FXN; (-) strand; PAM type: NRG; PAM sequence: GAG
  source 1..20: mol_type = other DNA
aaatgcaggtgaaaaatgat

SEQ ID NO: 15183 - DNA, 20 bp, synthetic construct
  misc_feature 1..20: note = Description of Artificial Sequence: Synthetic oligonucleotide
  misc_feature 1..20: note = Target: FXN; (-) strand; PAM type: NRG; PAM sequence: AGG
  source 1..20: mol_type = other DNA
gaaagctcctgcaaaaatgc

SEQ ID NO: 15184 - DNA, 20 bp, synthetic construct
  misc_feature 1..20: note = Description of Artificial Sequence: Synthetic oligonucleotide
  misc_feature 1..20: note = Target: FXN; (-) strand; PAM type: NRG; PAM sequence: CAG
  source 1..20: mol_type = other DNA
agaaagctcctgcaaaaatg

SEQ ID NO: 15185 - DNA, 20 bp, synthetic construct
  misc_feature 1..20: note = Description of Artificial Sequence: Synthetic oligonucleotide
  misc_feature 1..20: note = Target: FXN; (-) strand; PAM type: NRG; PAM sequence: AAG
  source 1..20: mol_type = other DNA
ggaggaaggtggatataaga

SEQ ID NO: 15186 - DNA, 20 bp, synthetic construct
  misc_feature 1..20: note = Description of Artificial Sequence: Synthetic oligonucleotide
  misc_feature 1..20: note = Target: FXN; (-) strand; PAM type: NRG; PAM sequence: AAG
  source 1..20: mol_type = other DNA
aaaaggaggaaggtggatat

SEQ ID NO: 15187 - DNA, 20 bp, synthetic construct
  misc_feature 1..20: note = Description of Artificial Sequence: Synthetic oligonucleotide
  misc_feature 1..20: note = Target: FXN; (-) strand; PAM type: NRG; PAM sequence: TGG
  source 1..20: mol_type = other DNA
ctgagagaaaaggaggaagg

SEQ ID NO: 15188 - DNA, 20 bp, synthetic construct
  misc_feature 1..20: note = Description of Artificial Sequence: Synthetic oligonucleotide
  misc_feature 1..20: note = Target: FXN; (-) strand; PAM type: NRG; PAM sequence: AGG
  source 1..20: mol_type = other DNA
gggctgagagaaaaggagga

SEQ ID NO: 15189 - DNA, 20 bp, synthetic construct
  misc_feature 1..20: note = Description of Artificial Sequence: Synthetic oligonucleotide
  misc_feature 1..20: note = Target: FXN; (-) strand; PAM type: NRG; PAM sequence: AAG
  source 1..20: mol_type = other DNA
tgggctgagagaaaaggagg

SEQ ID NO: 15190 - DNA, 20 bp, synthetic construct
  misc_feature 1..20: note = Description of Artificial Sequence: Synthetic oligonucleotide
  misc_feature 1..20: note = Target: FXN; (-) strand; PAM type: NRG; PAM sequence: AGG
  source 1..20: mol_type = other DNA
tgatgggctgagagaaaagg

SEQ ID NO: 15191 - DNA, 20 bp, synthetic construct
  misc_feature 1..20: note = Description of Artificial Sequence: Synthetic oligonucleotide
  misc_feature 1..20: note = Target: FXN; (-) strand; PAM type: NRG; PAM sequence: GAG
  source 1..20: mol_type = other DNA
atgatgggctgagagaaaag

SEQ ID NO: 15192 - DNA, 20 bp, synthetic construct
  misc_feature 1..20: note = Description of Artificial Sequence: Synthetic oligonucleotide
  misc_feature 1..20: note = Target: FXN; (-) strand; PAM type: NRG; PAM sequence: AGG
  source 1..20: mol_type = other DNA
agatgatgggctgagagaaa

SEQ ID NO: 15193 - DNA, 20 bp, synthetic construct
  misc_feature 1..20: note = Description of Artificial Sequence: Synthetic oligonucleotide
  misc_feature 1..20: note = Target: FXN; (-) strand; PAM type: NRG; PAM sequence: AAG
  source 1..20: mol_type = other DNA
tagatgatgggctgagagaa

SEQ ID NO: 15194 - DNA, 20 bp, synthetic construct
  misc_feature 1..20: note = Description of Artificial Sequence: Synthetic oligonucleotide
  misc_feature 1..20: note = Target: FXN; (-) strand; PAM type: NRG; PAM sequence: GAG
  source 1..20: mol_type = other DNA
gtagctagatgatgggctga

SEQ ID NO: 15195 - DNA, 20 bp, synthetic construct
  misc_feature 1..20: note = Description of Artificial Sequence: Synthetic oligonucleotide
  misc_feature 1..20: note = Target: FXN; (-) strand; PAM type: NRG; PAM sequence: GAG
  source 1..20: mol_type = other DNA
gtgtagctagatgatgggct

SEQ ID NO: 15196 - DNA, 20 bp, synthetic construct
  misc_feature 1..20: note = Description of Artificial Sequence: Synthetic oligonucleotide
  misc_feature 1..20: note = Target: FXN; (-) strand; PAM type: NRG; PAM sequence: GGG
  source 1..20: mol_type = other DNA
agactgtgtagctagatgat

SEQ ID NO: 15197 - DNA, 20 bp, synthetic construct
  misc_feature 1..20: note = Description of Artificial Sequence: Synthetic oligonucleotide
  misc_feature 1..20: note = Target: FXN; (-) strand; PAM type: NRG; PAM sequence: TGG
  source 1..20: mol_type = other DNA
gagactgtgtagctagatga

SEQ ID NO: 15198 - DNA, 20 bp, synthetic construct
  misc_feature 1..20: note = Description of Artificial Sequence: Synthetic oligonucleotide
  misc_feature 1..20: note = Target: FXN; (-) strand; PAM type: NRG; PAM sequence: TAG
  source 1..20: mol_type = other DNA
taccctggagactgtgtagc

SEQ ID NO: 15199 - DNA, 20 bp, synthetic construct
  misc_feature 1..20: note = Description of Artificial Sequence: Synthetic oligonucleotide
  misc_feature 1..20: note = Target: FXN; (-) strand; PAM type: NRG; PAM sequence: TAG
  source 1..20: mol_type = other DNA
agcttaccctggagactgtg

SEQ ID NO: 15200 - DNA, 20 bp, synthetic construct
  misc_feature 1..20: note = Description of Artificial Sequence: Synthetic oligonucleotide
  misc_feature 1..20: note = Target: FXN; (-) strand; PAM type: NRG; PAM sequence: GAG
  source 1..20: mol_type = other DNA
ctttctgaaagcttaccctg

SEQ ID NO: 15201 - DNA, 20 bp, synthetic construct
  misc_feature 1..20: note = Description of Artificial Sequence: Synthetic oligonucleotide
  misc_feature 1..20: note = Target: FXN; (-) strand; PAM type: NRG; PAM sequence: TGG
  source 1..20: mol_type = other DNA
gcctttctgaaagcttaccc

SEQ ID NO: 15202 - DNA, 20 bp, synthetic construct
  misc_feature 1..20: note = Description of Artificial Sequence: Synthetic oligonucleotide
  misc_feature 1..20: note = Target: FXN; (-) strand; PAM type: NRG; PAM sequence: AAG
  source 1..20: mol_type = other DNA
acaagagattgcctttctga

SEQ ID NO: 15203 - DNA, 20 bp, synthetic construct
  misc_feature 1..20: note = Description of Artificial Sequence: Synthetic oligonucleotide
  misc_feature 1..20: note = Target: FXN; (-) strand; PAM type: NRG; PAM sequence: GAG
  source 1..20: mol_type = other DNA
tgcttaggttttacagacaa

SEQ ID NO: 15204 - DNA, 20 bp, synthetic construct
  misc_feature 1..20: note = Description of Artificial Sequence: Synthetic oligonucleotide
  misc_feature 1..20: note = Target: FXN; (-) strand; PAM type: NRG; PAM sequence: AAG
  source 1..20: mol_type = other DNA
cctgcttaggttttacagac

SEQ ID NO: 15205 - DNA, 20 bp, synthetic construct
  misc_feature 1..20: note = Description of Artificial Sequence: Synthetic oligonucleotide
  misc_feature 1..20: note = Target: FXN; (-) strand; PAM type: NRG; PAM sequence: CAG
  source 1..20: mol_type = other DNA
ttggtcctgcttaggtttta

SEQ ID NO: 15206 - DNA, 20 bp, synthetic construct
  misc_feature 1..20: note = Description of Artificial Sequence: Synthetic oligonucleotide
  misc_feature 1..20: note = Target: FXN; (-) strand; PAM type: NRG; PAM sequence: AGG
  source 1..20: mol_type = other DNA
acttggccttggtcctgctt

SEQ ID NO: 15207 - DNA, 20 bp, synthetic construct
  misc_feature 1..20: note = Description of Artificial Sequence: Synthetic oligonucleotide
  misc_feature 1..20: note = Target: FXN; (-) strand; PAM type: NRG; PAM sequence: TAG
  source 1..20: mol_type = other DNA
aacttggccttggtcctgct

SEQ ID NO: 15208 - DNA, 20 bp, synthetic construct
  misc_feature 1..20: note = Description of Artificial Sequence: Synthetic oligonucleotide
  misc_feature 1..20: note = Target: FXN; (-) strand; PAM type: NRG; PAM sequence: TGG
  source 1..20: mol_type = other DNA
caggctaagaaacttggcct

SEQ ID NO: 15209 - DNA, 20 bp, synthetic construct
  misc_feature 1..20: note = Description of Artificial Sequence: Synthetic oligonucleotide
  misc_feature 1..20: note = Target: FXN; (-) strand; PAM type: NRG; PAM sequence: TGG
  source 1..20: mol_type = other DNA
atttttcaggctaagaaact

SEQ ID NO: 15210 - DNA, 20 bp, synthetic construct
  misc_feature 1..20: note = Description of Artificial Sequence: Synthetic oligonucleotide
  misc_feature 1..20: note = Target: FXN; (-) strand; PAM type: NRG; PAM sequence: AAG
  source 1..20: mol_type = other DNA
aaaagcacatttttcaggct

SEQ ID NO: 15211 - DNA, 20 bp, synthetic construct
  misc_feature 1..20: note = Description of Artificial Sequence: Synthetic oligonucleotide
  misc_feature 1..20: note = Target: FXN; (-) strand; PAM type: NRG; PAM sequence: AGG
  source 1..20: mol_type = other DNA
gtcagaaaagcacatttttc

SEQ ID NO: 15212 - DNA, 20 bp, synthetic construct
  misc_feature 1..20: note = Description of Artificial Sequence: Synthetic oligonucleotide
  misc_feature 1..20: note = Target: FXN; (-) strand; PAM type: NRG; PAM sequence: CAG
  source 1..20: mol_type = other DNA
agtcagaaaagcacattttt

SEQ ID NO: 15213 - DNA, 20 bp, synthetic construct
  misc_feature 1..20: note = Description of Artificial Sequence: Synthetic oligonucleotide
  misc_feature 1..20: note = Target: FXN; (-) strand; PAM type: NRG; PAM sequence: AAG
  source 1..20: mol_type = other DNA
cctgaacagttcagtcagaa

SEQ ID NO: 15214 - DNA, 20 bp, synthetic construct
  misc_feature 1..20: note = Description of Artificial Sequence: Synthetic oligonucleotide
  misc_feature 1..20: note = Target: FXN; (-) strand; PAM type: NRG; PAM sequence: CAG
  source 1..20: mol_type = other DNA
cagtgcctgaacagttcagt

SEQ ID NO: 15215 - DNA, 20 bp, synthetic construct
  misc_feature 1..20: note = Description of Artificial Sequence: Synthetic oligonucleotide
  misc_feature 1..20: note = Target: FXN; (-) strand; PAM type: NRG; PAM sequence: CAG
  source 1..20: mol_type = other DNA
gagtcagtgcctgaacagtt

SEQ ID NO: 15216 - DNA, 20 bp, synthetic construct
  misc_feature 1..20: note = Description of Artificial Sequence: Synthetic oligonucleotide
  misc_feature 1..20: note = Target: FXN; (-) strand; PAM type: NRG; PAM sequence: CAG
  source 1..20: mol_type = other DNA
atgtagagtcagtgcctgaa

SEQ ID NO: 15217 - DNA, 20 bp, synthetic construct
  misc_feature 1..20: note = Description of Artificial Sequence: Synthetic oligonucleotide
  misc_feature 1..20: note = Target: FXN; (-) strand; PAM type: NRG; PAM sequence: CAG
  source 1..20: mol_type = other DNA
agcataattatatgtagagt

SEQ ID NO: 15218 - DNA, 20 bp, synthetic construct
  misc_feature 1..20: note = Description of Artificial Sequence: Synthetic oligonucleotide
  misc_feature 1..20: note = Target: FXN; (-) strand; PAM type: NRG; PAM sequence: GAG
  source 1..20: mol_type = other DNA
gaaaagcataattatatgta

SEQ ID NO: 15219 - DNA, 20 bp, synthetic construct
  misc_feature 1..20: note = Description of Artificial Sequence: Synthetic oligonucleotide
  misc_feature 1..20: note = Target: FXN; (-) strand; PAM type: NRG; PAM sequence: TAG
  source 1..20: mol_type = other DNA
tagaaaagcataattatatg

SEQ ID NO: 15220 - DNA, 20 bp, synthetic construct
  misc_feature 1..20: note = Description of Artificial Sequence: Synthetic oligonucleotide
  misc_feature 1..20: note = Target: FXN; (-) strand; PAM type: NRG; PAM sequence: AAG
  source 1..20: mol_type = other DNA
ttgagtgtgagggggtagaa

SEQ ID NO: 15221 - DNA, 20 bp, synthetic construct
  misc_feature 1..20: note = Description of Artificial Sequence: Synthetic oligonucleotide
  misc_feature 1..20: note = Target: FXN; (-) strand; PAM type: NRG; PAM sequence: TAG
  source 1..20: mol_type = other DNA
aagtgttgagtgtgaggggg

SEQ ID NO: 15222 - DNA, 20 bp, synthetic construct
  misc_feature 1..20: note = Description of Artificial Sequence: Synthetic oligonucleotide
  misc_feature 1..20: note = Target: FXN; (-) strand; PAM type: NRG; PAM sequence: GGG
  source 1..20: mol_type = other DNA
tcaaagtgttgagtgtgagg

SEQ ID NO: 15223 - DNA, 20 bp, synthetic construct
  misc_feature 1..20: note = Description of Artificial Sequence: Synthetic oligonucleotide
  misc_feature 1..20: note = Target: FXN; (-) strand; PAM type: NRG; PAM sequence: GGG
  source 1..20: mol_type = other DNA
gtcaaagtgttgagtgtgag

SEQ ID NO: 15224 - DNA, 20 bp, synthetic construct
  misc_feature 1..20: note = Description of Artificial Sequence: Synthetic oligonucleotide
  misc_feature 1..20: note = Target: FXN; (-) strand; PAM type: NRG; PAM sequence: GGG
  source 1..20: mol_type = other DNA
agtcaaagtgttgagtgtga

SEQ ID NO: 15225 - DNA, 20 bp, synthetic construct
  misc_feature 1..20: note = Description of Artificial Sequence: Synthetic oligonucleotide
  misc_feature 1..20: note = Target: FXN; (-) strand; PAM type: NRG; PAM sequence: AGG
  source 1..20: mol_type = other DNA
gagtcaaagtgttgagtgtg

SEQ ID NO: 15226 - DNA, 20 bp, synthetic construct
  misc_feature 1..20: note = Description of Artificial Sequence: Synthetic oligonucleotide
  misc_feature 1..20: note = Target: FXN; (-) strand; PAM type: NRG; PAM sequence: GAG
  source 1..20: mol_type = other DNA
ggagtcaaagtgttgagtgt

SEQ ID NO: 15227 - DNA, 20 bp, synthetic construct
  misc_feature 1..20: note = Description of Artificial Sequence: Synthetic oligonucleotide
  misc_feature 1..20: note = Target: FXN; (-) strand; PAM type: NRG; PAM sequence: GAG
  source 1..20: mol_type = other DNA
attgctggagtcaaagtgtt

SEQ ID NO: 15228 - DNA, 20 bp, synthetic construct
  misc_feature 1..20: note = Description of Artificial Sequence: Synthetic oligonucleotide
  misc_feature 1..20: note = Target: FXN; (-) strand; PAM type: NRG; PAM sequence: AAG
  source 1..20: mol_type = other DNA
atttgggattgctggagtca

SEQ ID NO: 15229 - DNA, 20 bp, synthetic construct
  misc_feature 1..20: note = Description of Artificial Sequence: Synthetic oligonucleotide
  misc_feature 1..20: note = Target: FXN; (-) strand; PAM type: NRG; PAM sequence: GAG
  source 1..20: mol_type = other DNA
ctggggatttgggattgctg

SEQ ID NO: 15230 - DNA, 20 bp, synthetic construct
  misc_feature 1..20: note = Description of Artificial Sequence: Synthetic oligonucleotide
  misc_feature 1..20: note = Target: FXN; (-) strand; PAM type: NRG; PAM sequence: TGG
  source 1..20: mol_type = other DNA
atctggggatttgggattgc

SEQ ID NO: 15231 - DNA, 20 bp, synthetic construct
  misc_feature 1..20: note = Description of Artificial Sequence: Synthetic oligonucleotide
  misc_feature 1..20: note = Target: FXN; (-) strand; PAM type: NRG; PAM sequence: GGG
  source 1..20: mol_type = other DNA
acttagggatctggggattt

SEQ ID NO: 15232 - DNA, 20 bp, synthetic construct
  misc_feature 1..20: note = Description of Artificial Sequence: Synthetic oligonucleotide
  misc_feature 1..20: note = Target: FXN; (-) strand; PAM type: NRG; PAM sequence: TGG
  source 1..20: mol_type = other DNA
cacttagggatctggggatt

SEQ ID NO: 15233 - DNA, 20 bp, synthetic construct
  misc_feature 1..20: note = Description of Artificial Sequence: Synthetic oligonucleotide
  misc_feature 1..20: note = Target: FXN; (-) strand; PAM type: NRG; PAM sequence: GGG
  source 1..20: mol_type = other DNA
acagcacacttagggatctg

SEQ ID NO: 15234 - DNA, 20 bp, synthetic construct
  misc_feature 1..20: note = Description of Artificial Sequence: Synthetic oligonucleotide
  misc_feature 1..20: note = Target: FXN; (-) strand; PAM type: NRG; PAM sequence: GGG
  source 1..20: mol_type = other DNA
cacagcacacttagggatct

SEQ ID NO: 15235 - DNA, 20 bp, synthetic construct
  misc_feature 1..20: note = Description of Artificial Sequence: Synthetic oligonucleotide
  misc_feature 1..20: note = Target: FXN; (-) strand; PAM type: NRG; PAM sequence: TGG
  source 1..20: mol_type = other DNA
gcacagcacacttagggatc

SEQ ID NO: 15236 - DNA, 20 bp, synthetic construct
  misc_feature 1..20: note = Description of Artificial Sequence: Synthetic oligonucleotide
  misc_feature 1..20: note = Target: FXN; (-) strand; PAM type: NRG; PAM sequence: GGG
  source 1..20: mol_type = other DNA
aaaatagcacagcacactta

SEQ ID NO: 15237 - DNA, 20 bp, synthetic construct
  misc_feature 1..20: note = Description of Artificial Sequence: Synthetic oligonucleotide
  misc_feature 1..20: note = Target: FXN; (-) strand; PAM type: NRG; PAM sequence: AGG
  source 1..20: mol_type = other DNA
gaaaatagcacagcacactt

SEQ ID NO: 15238 - DNA, 20 bp, synthetic construct
  misc_feature 1..20: note = Description of Artificial Sequence: Synthetic oligonucleotide
  misc_feature 1..20: note = Target: FXN; (-) strand; PAM type: NRG; PAM sequence: TAG
  source 1..20: mol_type = other DNA
tgaaaatagcacagcacact

SEQ ID NO: 15239 - DNA, 20 bp, synthetic construct
  misc_feature 1..20: note = Description of Artificial Sequence: Synthetic oligonucleotide
  misc_feature 1..20: note = Target: FXN; (-) strand; PAM type: NRG; PAM sequence: CAG
  source 1..20: mol_type = other DNA
agagccacgtgaaaatagca

SEQ ID NO: 15240 - DNA, 20 bp, synthetic construct
  misc_feature 1..20: note = Description of Artificial Sequence: Synthetic oligonucleotide
  misc_feature 1..20: note = Target: FXN; (-) strand; PAM type: NRG; PAM sequence: TAG
  source 1..20: mol_type = other DNA
gtctgagagccacgtgaaaa

SEQ ID NO: 15241 - DNA, 20 bp, synthetic construct
  misc_feature 1..20: note = Description of Artificial Sequence: Synthetic oligonucleotide
  misc_feature 1..20: note = Target: FXN; (-) strand; PAM type: NRG; PAM sequence: GAG
  source 1..20: mol_type = other DNA
acagcactggccaagtctga

SEQ ID NO: 15242 - DNA, 20 bp, synthetic construct
  misc_feature 1..20: note = Description of Artificial Sequence: Synthetic oligonucleotide
  misc_feature 1..20: note = Target: FXN; (-) strand; PAM type: NRG; PAM sequence: GAG
  source 1..20: mol_type = other DNA
aaacagcactggccaagtct

SEQ ID NO: 15243 - DNA, 20 bp, synthetic construct
  misc_feature 1..20: note = Description of Artificial Sequence: Synthetic oligonucleotide
  misc_feature 1..20: note = Target: FXN; (-) strand; PAM type: NRG; PAM sequence: AAG
  source 1..20: mol_type = other DNA
aaatggaaacagcactggcc

SEQ ID NO: 15244 - DNA, 20 bp, synthetic construct
  misc_feature 1..20: note = Description of Artificial Sequence: Synthetic oligonucleotide
  misc_feature 1..20: note = Target: FXN; (-) strand; PAM type: NRG; PAM sequence: TGG
  source 1..20: mol_type = other DNA
gaccaaaatggaaacagcac

SEQ ID NO: 15245 - DNA, 20 bp, synthetic construct
  misc_feature 1..20: note = Description of Artificial Sequence: Synthetic oligonucleotide
  misc_feature 1..20: note = Target: FXN; (-) strand; PAM type: NRG; PAM sequence: CAG
  source 1..20: mol_type = other DNA
aataaagaccaaaatggaaa

SEQ ID NO: 15246 - DNA, 20 bp, synthetic construct
  misc_feature 1..20: note = Description of Artificial Sequence: Synthetic oligonucleotide
  misc_feature 1..20: note = Target: FXN; (-) strand; PAM type: NRG; PAM sequence: TGG
  source 1..20: mol_type = other DNA
gtggggaataaagaccaaaa

SEQ ID NO: 15247 - DNA, 20 bp, synthetic construct
  misc_feature 1..20: note = Description of Artificial Sequence: Synthetic oligonucleotide
  misc_feature 1..20: note = Target: FXN; (-) strand; PAM type: NRG; PAM sequence: AAG
  source 1..20: mol_type = other DNA
aggcagagatgtggggaata

SEQ ID NO: 15248 - DNA, 20 bp, synthetic construct
  misc_feature 1..20: note = Description of Artificial Sequence: Synthetic oligonucleotide
  misc_feature 1..20: note = Target: FXN; (-) strand; PAM type: NRG; PAM sequence: GGG
  source 1..20: mol_type = other DNA
accccccaggcagagatgtg

SEQ ID NO: 15249 - DNA, 20 bp, synthetic construct
  misc_feature 1..20: note = Description of Artificial Sequence: Synthetic oligonucleotide
  misc_feature 1..20: note = Target: FXN; (-) strand; PAM type: NRG; PAM sequence: GGG
  source 1..20: mol_type = other DNA
taccccccaggcagagatgt

SEQ ID NO: 15250 - DNA, 20 bp, synthetic construct
  misc_feature 1..20: note = Description of Artificial Sequence: Synthetic oligonucleotide
  misc_feature 1..20: note = Target: FXN; (-) strand; PAM type: NRG; PAM sequence: TGG
  source 1..20: mol_type = other DNA
ctaccccccaggcagagatg

SEQ ID NO: 15251 - DNA, 20 bp, synthetic construct
  misc_feature 1..20: note = Description of Artificial Sequence: Synthetic oligonucleotide
  misc_feature 1..20: note = Target: FXN; (-) strand; PAM type: NRG; PAM sequence: GAG
  source 1..20: mol_type = other DNA
tagaatctaccccccaggca

SEQ ID NO: 15252 - DNA, 20 bp, synthetic construct
  misc_feature 1..20: note = Description of Artificial Sequence: Synthetic oligonucleotide
  misc_feature 1..20: note = Target: FXN; (-) strand; PAM type: NRG; PAM sequence: CAG
  source 1..20: mol_type = other DNA
ggtagaatctaccccccagg

SEQ ID NO: 15253 - DNA, 20 bp, synthetic construct
  misc_feature 1..20: note = Description of Artificial Sequence: Synthetic oligonucleotide
  misc_feature 1..20: note = Target: FXN; (-) strand; PAM type: NRG; PAM sequence: AGG
  source 1..20: mol_type = other DNA
cagggtagaatctacccccc

SEQ ID NO: 15254 - DNA, 20 bp, synthetic construct
  misc_feature 1..20: note = Description of Artificial Sequence: Synthetic oligonucleotide
  misc_feature 1..20: note = Target: FXN; (-) strand; PAM type: NRG; PAM sequence: CAG
  source 1..20: mol_type = other DNA
tcagggtagaatctaccccc

SEQ ID NO: 15255 - DNA, 20 bp, synthetic construct
  misc_feature 1..20: note = Description of Artificial Sequence: Synthetic oligonucleotide
  misc_feature 1..20: note = Target: FXN; (-) strand; PAM type: NRG; PAM sequence: TAG
  source 1..20: mol_type = other DNA
gccaagaacatttttcaggg

SEQ ID NO: 15256 - DNA, 20 bp, synthetic construct
  misc_feature 1..20: note = Description of Artificial Sequence: Synthetic oligonucleotide
  misc_feature 1..20: note = Target: FXN; (-) strand; PAM type: NRG; PAM sequence: GGG
  source 1..20: mol_type = other DNA
tgtgccaagaacatttttca

SEQ ID NO: 15257 - DNA, 20 bp, synthetic construct
  misc_feature 1..20: note = Description of Artificial Sequence: Synthetic oligonucleotide
  misc_feature 1..20: note = Target: FXN; (-) strand; PAM type: NRG; PAM sequence: AGG
  source 1..20: mol_type = other DNA
ctgtgccaagaacatttttc

SEQ ID NO: 15258 - DNA, 20 bp, synthetic construct
  misc_feature 1..20: note = Description of Artificial Sequence: Synthetic oligonucleotide
  misc_feature 1..20: note = Target: FXN; (-) strand; PAM type: NRG; PAM sequence: CAG
  source 1..20: mol_type = other DNA
gctgtgccaagaacattttt

SEQ ID NO: 15259 - DNA, 20 bp, synthetic construct
  misc_feature 1..20: note = Description of Artificial Sequence: Synthetic oligonucleotide
  misc_feature 1..20: note = Target: FXN; (-) strand; PAM type: NRG; PAM sequence: AAG
  source 1..20: mol_type = other DNA
ggagtttgcaaggctgtgcc

SEQ ID NO: 15260 - DNA, 20 bp, synthetic construct
  misc_feature 1..20: note = Description of Artificial Sequence: Synthetic oligonucleotide
  misc_feature 1..20: note = Target: FXN; (-) strand; PAM type: NRG; PAM sequence: AGG
  source 1..20: mol_type = other DNA
gagtggaggaggagtttgca

SEQ ID NO: 15261 - DNA, 20 bp, synthetic construct
  misc_feature 1..20: note = Description of Artificial Sequence: Synthetic oligonucleotide
  misc_feature 1..20: note = Target: FXN; (-) strand; PAM type: NRG; PAM sequence: AAG
  source 1..20: mol_type = other DNA
tgagtggaggaggagtttgc

SEQ ID NO: 15262 - DNA, 20 bp, synthetic construct
  misc_feature 1..20: note = Description of Artificial Sequence: Synthetic oligonucleotide
  misc_feature 1..20: note = Target: FXN; (-) strand; PAM type: NRG; PAM sequence: GAG
  source 1..20: mol_type = other DNA
gcagaggctgagtggaggag

SEQ ID NO: 15263 - DNA, 20 bp, synthetic construct
  misc_feature 1..20: note = Description of Artificial Sequence: Synthetic oligonucleotide
  misc_feature 1..20: note = Target: FXN; (-) strand; PAM type: NRG; PAM sequence: AGG
  source 1..20: mol_type = other DNA
aggcagaggctgagtggagg

SEQ ID NO: 15264 - DNA, 20 bp, synthetic construct
  misc_feature 1..20: note = Description of Artificial Sequence: Synthetic oligonucleotide
  misc_feature 1..20: note = Target: FXN; (-) strand; PAM type: NRG; PAM sequence: GAG
  source 1..20: mol_type = other DNA
caggcagaggctgagtggag

SEQ ID NO: 15265 - DNA, 20 bp, synthetic construct
  misc_feature 1..20: note = Description of Artificial Sequence: Synthetic oligonucleotide
  misc_feature 1..20: note = Target: FXN; (-) strand; PAM type: NRG; PAM sequence: AGG
  source 1..20: mol_type = other DNA
tccaggcagaggctgagtgg

SEQ ID NO: 15266 - DNA, 20 bp, synthetic construct
  misc_feature 1..20: note = Description of Artificial Sequence: Synthetic oligonucleotide
  misc_feature 1..20: note = Target: FXN; (-) strand; PAM type: NRG; PAM sequence: GAG
  source 1..20: mol_type = other DNA
atccaggcagaggctgagtg

SEQ ID NO: 15267 - DNA, 20 bp, synthetic construct
  misc_feature 1..20: note = Description of Artificial Sequence: Synthetic oligonucleotide
  misc_feature 1..20: note = Target: FXN; (-) strand; PAM type: NRG; PAM sequence: TGG
  source 1..20: mol_type = other DNA
gcatccaggcagaggctgag

SEQ ID NO: 15268 - DNA, 20 bp, synthetic construct
  misc_feature 1..20: note = Description of Artificial Sequence: Synthetic oligonucleotide
  misc_feature 1..20: note = Target: FXN; (-) strand; PAM type: NRG; PAM sequence: GAG
  source 1..20: mol_type = other DNA
agggcatccaggcagaggct

SEQ ID NO: 15269 - DNA, 20 bp, synthetic construct
  misc_feature 1..20: note = Description of Artificial Sequence: Synthetic oligonucleotide
  misc_feature 1..20: note = Target: FXN; (-) strand; PAM type: NRG; PAM sequence: AGG
  source 1..20: mol_type = other DNA
aatcaagggcatccaggcag

SEQ ID NO: 15270 - DNA, 20 bp, synthetic construct
  misc_feature 1..20: note = Description of Artificial Sequence: Synthetic oligonucleotide
  misc_feature 1..20: note = Target: FXN; (-) strand; PAM type: NRG; PAM sequence: GAG
  source 1..20: mol_type = other DNA
caatcaagggcatccaggca

SEQ ID NO: 15271 - DNA, 20 bp, synthetic construct
  misc_feature 1..20: note = Description of Artificial Sequence: Synthetic oligonucleotide
  misc_feature 1..20: note = Target: FXN; (-) strand; PAM type: NRG; PAM sequence: CAG
  source 1..20: mol_type = other DNA
aacaatcaagggcatccagg

SEQ ID NO: 15272 - DNA, 20 bp, synthetic construct
  misc_feature 1..20: note = Description of Artificial Sequence: Synthetic oligonucleotide
  misc_feature 1..20: note = Target: FXN; (-) strand; PAM type: NRG; PAM sequence: AGG
  source 1..20: mol_type = other DNA
tggaacaatcaagggcatcc

SEQ ID NO: 15273 - DNA, 20 bp, synthetic construct
  misc_feature 1..20: note = Description of Artificial Sequence: Synthetic oligonucleotide
  misc_feature 1..20: note = Target: FXN; (-) strand; PAM type: NRG; PAM sequence: CAG
  source 1..20: mol_type = other DNA
atggaacaatcaagggcatc

SEQ ID NO: 15274 - DNA, 20 bp, synthetic construct
  misc_feature 1..20: note = Description of Artificial Sequence: Synthetic oligonucleotide
  misc_feature 1..20: note = Target: FXN; (-) strand; PAM type: NRG; PAM sequence: GGG
  source 1..20: mol_type = other DNA
tgaggacatggaacaatcaa

SEQ ID NO: 15275 - DNA, 20 bp, synthetic construct
  misc_feature 1..20: note = Description of Artificial Sequence: Synthetic oligonucleotide
  misc_feature 1..20: note = Target: FXN; (-) strand; PAM type: NRG; PAM sequence: AGG
  source 1..20: mol_type = other DNA
ctgaggacatggaacaatca

SEQ ID NO: 15276 - DNA, 20 bp, synthetic construct
  misc_feature 1..20: note = Description of Artificial Sequence: Synthetic oligonucleotide
  misc_feature 1..20: note = Target: FXN; (-) strand; PAM type: NRG; PAM sequence: AAG
  source 1..20: mol_type = other DNA
gctgaggacatggaacaatc

SEQ ID NO: 15277 - DNA, 20 bp, synthetic construct
  misc_feature 1..20: note = Description of Artificial Sequence: Synthetic oligonucleotide
  misc_feature 1..20: note = Target: FXN; (-) strand; PAM type: NRG; PAM sequence: TGG
  source 1..20: mol_type = other DNA
aacatggtatgctgaggaca

SEQ ID NO: 15278 - DNA, 20 bp, synthetic construct
  misc_feature 1..20: note = Description of Artificial Sequence: Synthetic oligonucleotide
  misc_feature 1..20: note = Target: FXN; (-) strand; PAM type: NRG; PAM sequence: AGG
  source 1..20: mol_type = other DNA
aagacaaacatggtatgctg

SEQ ID NO: 15279 - DNA, 20 bp, synthetic construct
  misc_feature 1..20: note = Description of Artificial Sequence: Synthetic oligonucleotide
  misc_feature 1..20: note = Target: FXN; (-) strand; PAM type: NRG; PAM sequence: GAG
  source 1..20: mol_type = other DNA
aaagacaaacatggtatgct

SEQ ID NO: 15280 - DNA, 20 bp, synthetic construct
  misc_feature 1..20: note = Description of Artificial Sequence: Synthetic oligonucleotide
  misc_feature 1..20: note = Target: FXN; (-) strand; PAM type: NRG; PAM sequence: TGG
  source 1..20: mol_type = other DNA
agtgctgggaaagacaaaca

SEQ ID NO: 15281 - DNA, 20 bp, synthetic construct
  misc_feature 1..20: note = Description of Artificial Sequence: Synthetic oligonucleotide
  misc_feature 1..20: note = Target: FXN; (-) strand; PAM type: NRG; PAM sequence: AAG
  source 1..20: mol_type = other DNA
atggtaggtcagtgctggga

SEQ ID NO: 15282 - DNA, 20 bp, synthetic construct
  misc_feature 1..20: note = Description of Artificial Sequence: Synthetic oligonucleotide
  misc_feature 1..20: note = Target: FXN; (-) strand; PAM type: NRG; PAM sequence: GGG
  source 1..20: mol_type = other DNA
acacatggtaggtcagtgct

SEQ ID NO: 15283 - DNA, 20 bp, synthetic construct
  misc_feature 1..20: note = Description of Artificial Sequence: Synthetic oligonucleotide
  misc_feature 1..20: note = Target: FXN; (-) strand; PAM type: NRG; PAM sequence: TGG
  source 1..20: mol_type = other DNA
gacacatggtaggtcagtgc

SEQ ID NO: 15284 - DNA, 20 bp, synthetic construct
  misc_feature 1..20: note = Description of Artificial Sequence: Synthetic oligonucleotide
  misc_feature 1..20: note = Target: FXN; (-) strand; PAM type: NRG; PAM sequence: CAG
  source 1..20: mol_type = other DNA
aggggtgacacatggtaggt

SEQ ID NO: 15285 - DNA, 20 bp, synthetic construct
  misc_feature 1..20: note = Description of Artificial Sequence: Synthetic oligonucleotide
  misc_feature 1..20: note = Target: FXN; (-) strand; PAM type: NRG; PAM sequence: AGG
  source 1..20: mol_type = other DNA
aagcaggggtgacacatggt

SEQ ID NO: 15286 - DNA, 20 bp, synthetic construct
  misc_feature 1..20: note = Description of Artificial Sequence: Synthetic oligonucleotide
  misc_feature 1..20: note = Target: FXN; (-) strand; PAM type: NRG; PAM sequence: TAG
  source 1..20: mol_type = other DNA
caagcaggggtgacacatgg

SEQ ID NO: 15287 - DNA, 20 bp, synthetic construct
  misc_feature 1..20: note = Description of Artificial Sequence: Synthetic oligonucleotide
  misc_feature 1..20: note = Target: FXN; (-) strand; PAM type: NRG; PAM sequence: TGG
  source 1..20: mol_type = other DNA
agccaagcaggggtgacaca

SEQ ID NO: 15288 - DNA, 20 bp, synthetic construct
  misc_feature 1..20: note = Description of Artificial Sequence: Synthetic oligonucleotide
  misc_feature 1..20: note = Target: FXN; (-) strand; PAM type: NRG; PAM sequence: GGG
  source 1..20: mol_type = other DNA
tggaaggtacagccaagcag

SEQ ID NO: 15289 - DNA, 20 bp, synthetic construct
  misc_feature 1..20: note = Description of Artificial Sequence: Synthetic oligonucleotide
  misc_feature 1..20: note = Target: FXN; (-) strand; PAM type: NRG; PAM sequence: GGG
  source 1..20: mol_type = other DNA
atggaaggtacagccaagca

SEQ ID NO: 15290 - DNA, 20 bp, synthetic construct
  misc_feature 1..20: note = Description of Artificial Sequence: Synthetic oligonucleotide
  misc_feature 1..20: note = Target: FXN; (-) strand; PAM type: NRG; PAM sequence: AGG
  source 1..20: mol_type = other DNA
catggaaggtacagccaagc

SEQ ID NO: 15291 - DNA, 20 bp, synthetic construct
  misc_feature 1..20: note = Description of Artificial Sequence: Synthetic oligonucleotide
  misc_feature 1..20: note = Target: FXN; (-) strand; PAM type: NRG; PAM sequence: CAG
  source 1..20: mol_type = other DNA
tcatggaaggtacagccaag

SEQ ID NO: 15292 - DNA, 20 bp, synthetic construct
  misc_feature 1..20: note = Description of Artificial Sequence: Synthetic oligonucleotide
  misc_feature 1..20: note = Target: FXN; (-) strand; PAM type: NRG; PAM sequence: AAG
  source 1..20: mol_type = other DNA
gcctcatggaaggtacagcc

SEQ ID NO: 15293 - DNA, 20 bp, synthetic construct
  misc_feature 1..20: note = Description of Artificial Sequence: Synthetic oligonucleotide
  misc_feature 1..20: note = Target: FXN; (-) strand; PAM type: NRG; PAM sequence: CAG
  source 1..20: mol_type = other DNA
tcctagcctcatggaaggta

SEQ ID NO: 15294 - DNA, 20 bp, synthetic construct
  misc_feature 1..20: note = Description of Artificial Sequence: Synthetic oligonucleotide
  misc_feature 1..20: note = Target: FXN; (-) strand; PAM type: NRG; PAM sequence: AGG
  source 1..20: mol_type = other DNA
catagtcctagcctcatgga

SEQ ID NO: 15295 - DNA, 20 bp, synthetic construct
  misc_feature 1..20: note = Description of Artificial Sequence: Synthetic oligonucleotide
  misc_feature 1..20: note = Target: FXN; (-) strand; PAM type: NRG; PAM sequence: AAG
  source 1..20: mol_type = other DNA
acatagtcctagcctcatgg

SEQ ID NO: 15296 - DNA, 20 bp, synthetic construct
  misc_feature 1..20: note = Description of Artificial Sequence: Synthetic oligonucleotide
  misc_feature 1..20: note = Target: FXN; (-) strand; PAM type: NRG; PAM sequence: TGG
  source 1..20: mol_type = other DNA
gacacatagtcctagcctca

SEQ ID NO: 15297 - DNA, 20 bp, synthetic construct
  misc_feature 1..20: note = Description of Artificial Sequence: Synthetic oligonucleotide
  misc_feature 1..20: note = Target: FXN; (-) strand; PAM type: NRG; PAM sequence: TAG
  source 1..20: mol_type = other DNA
acaaaggagacacatagtcc

SEQ ID NO: 15298 - DNA, 20 bp, synthetic construct
  misc_feature 1..20: note = Description of Artificial Sequence: Synthetic oligonucleotide
  misc_feature 1..20: note = Target: FXN; (-) strand; PAM type: NRG; PAM sequence: TAG
  source 1..20: mol_type = other DNA
cagtcaacaaaggagacaca

SEQ ID NO: 15299 - DNA, 20 bp, synthetic construct
  misc_feature 1..20: note = Description of Artificial Sequence: Synthetic oligonucleotide
  misc_feature 1..20: note = Target: FXN; (-) strand; PAM type: NRG; PAM sequence: GAG
  source 1..20: mol_type = other DNA
ggcaacagcagtcaacaaag

SEQ ID NO: 15300 - DNA, 20 bp, synthetic construct
  misc_feature 1..20: note = Description of Artificial Sequence: Synthetic oligonucleotide
  misc_feature 1..20: note = Target: FXN; (-) strand; PAM type: NRG; PAM sequence: AGG
  source 1..20: mol_type = other DNA
agggcaacagcagtcaacaa

SEQ ID NO: 15301 - DNA, 20 bp, synthetic construct
  misc_feature 1..20: note = Description of Artificial Sequence: Synthetic oligonucleotide
  misc_feature 1..20: note = Target: FXN; (-) strand; PAM type: NRG; PAM sequence: AAG
  source 1..20: mol_type = other DNA
tagggcaacagcagtcaaca

SEQ ID NO: 15302 - DNA, 20 bp, synthetic construct
  misc_feature 1..20: note = Description of Artificial Sequence: Synthetic oligonucleotide
  misc_feature 1..20: note = Target: FXN; (-) strand; PAM type: NRG; PAM sequence: CAG
  source 1..20: mol_type = other DNA
gcaagatgctagggcaacag

SEQ ID NO: 15303 - DNA, 20 bp, synthetic construct
  misc_feature 1..20: note = Description of Artificial Sequence: Synthetic oligonucleotide
  misc_feature 1..20: note = Target: FXN; (-) strand; PAM type: NRG; PAM sequence: CAG
  source 1..20: mol_type = other DNA
tgtgcaagatgctagggcaa

SEQ ID NO: 15304 - DNA, 20 bp, synthetic construct
  misc_feature 1..20: note = Description of Artificial Sequence: Synthetic oligonucleotide
  misc_feature 1..20: note = Target: FXN; (-) strand; PAM type: NRG; PAM sequence: GGG
  source 1..20: mol_type = other DNA
aggaactgtgcaagatgcta

SEQ ID NO: 15305 - DNA, 20 bp, synthetic construct
  misc_feature 1..20: note = Description of Artificial Sequence: Synthetic oligonucleotide
  misc_feature 1..20: note = Target: FXN; (-) strand; PAM type: NRG; PAM sequence: AGG
  source 1..20: mol_type = other DNA
aaggaactgtgcaagatgct

SEQ ID NO: 15306 - DNA, 20 bp, synthetic construct
  misc_feature 1..20: note = Description of Artificial Sequence: Synthetic oligonucleotide
  misc_feature 1..20: note = Target: FXN; (-) strand; PAM type: NRG; PAM sequence: TAG
  source 1..20: mol_type = other DNA
caaggaactgtgcaagatgc

SEQ ID NO: 15307 - DNA, 20 bp, synthetic construct
  misc_feature 1..20: note = Description of Artificial Sequence: Synthetic oligonucleotide
  misc_feature 1..20: note = Target: FXN; (-) strand; PAM type: NRG; PAM sequence: AAG
  source 1..20: mol_type = other DNA
ttgtgtgcaaggaactgtgc

SEQ ID NO: 15308 - DNA, 20 bp, synthetic construct
  misc_feature 1..20: note = Description of Artificial Sequence: Synthetic oligonucleotide
  misc_feature 1..20: note = Target: FXN; (-) strand; PAM type: NRG; PAM sequence: AGG
  source 1..20: mol_type = other DNA
tagagctctaattgtgtgca

SEQ ID NO: 15309 - DNA, 20 bp, synthetic construct
  misc_feature 1..20: note = Description of Artificial Sequence: Synthetic oligonucleotide
  misc_feature 1..20: note = Target: FXN; (-) strand; PAM type: NRG; PAM sequence: AAG
  source 1..20: mol_type = other DNA
atagagctctaattgtgtgc

SEQ ID NO: 15310 - DNA, 20 bp, synthetic construct
  misc_feature 1..20: note = Description of Artificial Sequence: Synthetic oligonucleotide
  misc_feature 1..20: note = Target: FXN; (-) strand; PAM type: NRG; PAM sequence: GAG
  source 1..20: mol_type = other DNA
acatttatttgacatttata

SEQ ID NO: 15311 - DNA, 20 bp, synthetic construct
  misc_feature 1..20: note = Description of Artificial Sequence: Synthetic oligonucleotide
  misc_feature 1..20: note = Target: FXN; (-) strand; PAM type: NRG; PAM sequence: TAG
  source 1..20: mol_type = other DNA
acacatttatttgacattta

SEQ ID NO: 15312 - DNA, 20 bp, synthetic construct
  misc_feature 1..20: note = Description of Artificial Sequence: Synthetic oligonucleotide
  misc_feature 1..20: note = Target: FXN; (-) strand; PAM type: NRG; PAM sequence: GAG
  source 1..20: mol_type = other DNA
cttggagttggggttattta

SEQ ID NO: 15313 - DNA, 20 bp, synthetic construct
  misc_feature 1..20: note = Description of Artificial Sequence: Synthetic oligonucleotide
  misc_feature 1..20: note = Target: FXN; (-) strand; PAM type: NRG; PAM sequence: TAG
  source 1..20: mol_type = other DNA
ctcttggagttggggttatt

SEQ ID NO: 15314 - DNA, 20 bp, synthetic construct
  misc_feature 1..20: note = Description of Artificial Sequence: Synthetic oligonucleotide
  misc_feature 1..20: note = Target: FXN; (-) strand; PAM type: NRG; PAM sequence: GGG
  source 1..20: mol_type = other DNA
tgctaacactcttggagttg

SEQ ID NO: 15315 - DNA, 20 bp, synthetic construct
  misc_feature 1..20: note = Description of Artificial Sequence: Synthetic oligonucleotide
  misc_feature 1..20: note = Target: FXN; (-) strand; PAM type: NRG; PAM sequence: GGG
  source 1..20: mol_type = other DNA
ttgctaacactcttggagtt

SEQ ID NO: 15316 - DNA, 20 bp, synthetic construct
  misc_feature 1..20: note = Description of Artificial Sequence: Synthetic oligonucleotide
  misc_feature 1..20: note = Target: FXN; (-) strand; PAM type: NRG; PAM sequence: TGG
  source 1..20: mol_type = other DNA
cttgctaacactcttggagt

SEQ ID NO: 15317 - DNA, 20 bp, synthetic construct
  misc_feature 1..20: note = Description of Artificial Sequence: Synthetic oligonucleotide
  misc_feature 1..20: note = Target: FXN; (-) strand; PAM type: NRG; PAM sequence: GAG
  source 1..20: mol_type = other DNA
atttcttgctaacactcttg

SEQ ID NO: 15318 - DNA, 20 bp, synthetic construct
  misc_feature 1..20: note = Description of Artificial Sequence: Synthetic oligonucleotide
  misc_feature 1..20: note = Target: FXN; (-) strand; PAM type: NRG; PAM sequence: TGG
  source 1..20: mol_type = other DNA
atatttcttgctaacactct

SEQ ID NO: 15319 - DNA, 20 bp, synthetic construct
  misc_feature 1..20: note = Description of Artificial Sequence: Synthetic oligonucleotide
  misc_feature 1..20: note = Target: FXN; (-) strand; PAM type: NRG; PAM sequence: TGG
  source 1..20: mol_type = other DNA
gtgtgaggtaactcactccg

SEQ ID NO: 15320 - DNA, 20 bp, synthetic construct
  misc_feature 1..20: note = Description of Artificial Sequence: Synthetic oligonucleotide
  misc_feature 1..20: note = Target: FXN; (-) strand; PAM type: NRG; PAM sequence: AGG
  source 1..20: mol_type = other DNA
agtttttccgtgcctgtgtg

SEQ ID NO: 15321 - DNA, 20 bp, synthetic construct
  misc_feature 1..20: note = Description of Artificial Sequence: Synthetic oligonucleotide
  misc_feature 1..20: note = Target: FXN; (-) strand; PAM type: NRG; PAM sequence: GAG
  source 1..20: mol_type = other DNA
aagtttttccgtgcctgtgt

SEQ ID NO: 15322 - DNA, 20 bp, synthetic construct
  misc_feature 1..20: note = Description of Artificial Sequence: Synthetic oligonucleotide
  misc_feature 1..20: note = Target: FXN; (-) strand; PAM type: NRG; PAM sequence: AAG
  source 1..20: mol_type = other DNA
aaaatgtccttaggaggttc

SEQ ID NO: 15323 - DNA, 20 bp, synthetic construct
  misc_feature 1..20: note = Description of Artificial Sequence: Synthetic oligonucleotide
  misc_feature 1..20: note = Target: FXN; (-) strand; PAM type: NRG; PAM sequence: AGG
  source 1..20: mol_type = other DNA
agcttaaaaatgtccttagg

SEQ ID NO: 15324 - DNA, 20 bp, synthetic construct
  misc_feature 1..20: note = Description of Artificial Sequence: Synthetic oligonucleotide
  misc_feature 1..20: note = Target: FXN; (-) strand; PAM type: NRG; PAM sequence: GAG
  source 1..20: mol_type = other DNA
gagcttaaaaatgtccttag

SEQ ID NO: 15325 - DNA, 20 bp, synthetic construct
  misc_feature 1..20: note = Description of Artificial Sequence: Synthetic oligonucleotide
  misc_feature 1..20: note = Target: FXN; (-) strand; PAM type: NRG; PAM sequence: AGG
  source 1..20: mol_type = other DNA
gagagcttaaaaatgtcctt

SEQ ID NO: 15326 - DNA, 20 bp, synthetic construct
  misc_feature 1..20: note = Description of Artificial Sequence: Synthetic oligonucleotide
  misc_feature 1..20: note = Target: FXN; (-) strand; PAM type: NRG; PAM sequence: TAG
  source 1..20: mol_type = other DNA
agagagcttaaaaatgtcct

SEQ ID NO: 15327 - DNA, 20 bp, synthetic construct
  misc_feature 1..20: note = Description of Artificial Sequence: Synthetic oligonucleotide
  misc_feature 1..20: note = Target: FXN; (+) strand; PAM type: NRG; PAM sequence: CAG
  source 1..20: mol_type = other DNA
tatacactaaattcctccca

SEQ ID NO: 15328 - DNA, 20 bp, synthetic construct
  misc_feature 1..20: note = Description of Artificial Sequence: Synthetic oligonucleotide
  misc_feature 1..20: note = Target: FXN; (+) strand; PAM type: NRG; PAM sequence: TAG
  source 1..20: mol_type = other DNA
cactaaattcctcccacagt

SEQ ID NO: 15329 - DNA, 20 bp, synthetic construct
  misc_feature 1..20: note = Description of Artificial Sequence: Synthetic oligonucleotide
  misc_feature 1..20: note = Target: FXN; (+) strand; PAM type: NRG; PAM sequence: TGG
  source 1..20: mol_type = other DNA
aattcctcccacagttagct

SEQ ID NO: 15330 - DNA, 20 bp, synthetic construct
  misc_feature 1..20: note = Description of Artificial Sequence: Synthetic oligonucleotide
  misc_feature 1..20: note = Target: FXN; (+) strand; PAM type: NRG; PAM sequence: TGG
  source 1..20: mol_type = other DNA
ctcccacagttagcttggcg

SEQ ID NO: 15331 - DNA, 20 bp, synthetic construct
  misc_feature 1..20: note = Description of Artificial Sequence: Synthetic oligonucleotide
  misc_feature 1..20: note = Target: FXN; (+) strand; PAM type: NRG; PAM sequence: CAG
  source 1..20: mol_type = other DNA
cgtggcctttgttatatgcc

SEQ ID NO: 15332 - DNA, 20 bp, synthetic construct
  misc_feature 1..20: note = Description of Artificial Sequence: Synthetic oligonucleotide
  misc_feature 1..20: note = Target: FXN; (+) strand; PAM type: NRG; PAM sequence: AGG
  source 1..20: mol_type = other DNA
gtggcctttgttatatgccc

SEQ ID NO: 15333 - DNA, 20 bp, synthetic construct
  misc_feature 1..20: note = Description of Artificial Sequence: Synthetic oligonucleotide
  misc_feature 1..20: note = Target: FXN; (+) strand; PAM type: NRG; PAM sequence: AAG
  source 1..20: mol_type = other DNA
tttgttatatgcccaggaat

SEQ ID NO: 15334 - DNA, 20 bp, synthetic construct
  misc_feature 1..20: note = Description of Artificial Sequence: Synthetic oligonucleotide
  misc_feature 1..20: note = Target: FXN; (+) strand; PAM type: NRG; PAM sequence: GAG
  source 1..20: mol_type = other DNA
ttatatgcccaggaataagt

SEQ ID NO: 15335 - DNA, 20 bp, synthetic construct
  misc_feature 1..20: note = Description of Artificial Sequence: Synthetic oligonucleotide
  misc_feature 1..20: note = Target: FXN; (+) strand; PAM type: NRG; PAM sequence: AGG
  source 1..20: mol_type = other DNA
tatatgcccaggaataagtg

SEQ ID NO: 15336 - DNA, 20 bp, synthetic construct
  misc_feature 1..20: note = Description of Artificial Sequence: Synthetic oligonucleotide
  misc_feature 1..20: note = Target: FXN; (+) strand; PAM type: NRG; PAM sequence: CAG
  source 1..20: mol_type = other DNA
tgcccaggaataagtgagga

SEQ ID NO: 15337 - DNA, 20 bp, synthetic construct
  misc_feature 1..20: note = Description of Artificial Sequence: Synthetic oligonucleotide
  misc_feature 1..20: note = Target: FXN; (+) strand; PAM type: NRG; PAM sequence: CAG
  source 1..20: mol_type = other DNA
caggaataagtgaggacagc

SEQ ID NO: 15338 - DNA, 20 bp, synthetic construct
  misc_feature 1..20: note = Description of Artificial Sequence: Synthetic oligonucleotide
  misc_feature 1..20: note = Target: FXN; (+) strand; PAM type: NRG; PAM sequence: GAG
  source 1..20: mol_type = other DNA
agtgaggacagccagcctat

SEQ ID NO: 15339 - DNA, 20 bp, synthetic construct
  misc_feature 1..20: note = Description of Artificial Sequence: Synthetic oligonucleotide
  misc_feature 1..20: note = Target: FXN; (+) strand; PAM type: NRG; PAM sequence: TAG
  source 1..20: mol_type = other DNA
ggacagccagcctatgagac

SEQ ID NO: 15340 - DNA, 20 bp, synthetic construct
  misc_feature 1..20: note = Description of Artificial Sequence: Synthetic oligonucleotide
  misc_feature 1..20: note = Target: FXN; (+) strand; PAM type: NRG; PAM sequence: AAG
  source 1..20: mol_type = other DNA
cagccagcctatgagactag

SEQ ID NO: 15341 - DNA, 20 bp, synthetic construct
  misc_feature 1..20: note = Description of Artificial Sequence: Synthetic oligonucleotide
  misc_feature 1..20: note = Target: FXN; (+) strand; PAM type: NRG; PAM sequence: AAG
  source 1..20: mol_type = other DNA
cagcctatgagactagaagc

SEQ ID NO: 15342 - DNA, 20 bp, synthetic construct
  misc_feature 1..20: note = Description of Artificial Sequence: Synthetic oligonucleotide
  misc_feature 1..20: note = Target: FXN; (+) strand; PAM type: NRG; PAM sequence: TGG
  source 1..20: mol_type = other DNA
ctatgagactagaagcaaga

SEQ ID NO: 15343 - DNA, 20 bp, synthetic construct
  misc_feature 1..20: note = Description of Artificial Sequence: Synthetic oligonucleotide
  misc_feature 1..20: note = Target: FXN; (+) strand; PAM type: NRG; PAM sequence: GAG
  source 1..20: mol_type = other DNA
atgagactagaagcaagatg

SEQ ID NO: 15344 - DNA, 20 bp, synthetic construct
  misc_feature 1..20: note = Description of Artificial Sequence: Synthetic oligonucleotide
  misc_feature 1..20: note = Target: FXN; (+) strand; PAM type: NRG; PAM sequence: CAG
  source 1..20: mol_type = other DNA
gactagaagcaagatggagt

SEQ ID NO: 15345 - DNA, 20 bp, synthetic construct
  misc_feature 1..20: note = Description of Artificial Sequence: Synthetic oligonucleotide
  misc_feature 1..20: note = Target: FXN; (+) strand; PAM type: NRG; PAM sequence: AAG
  source 1..20: mol_type = other DNA
gaagcaagatggagtcagcc

SEQ ID NO: 15346 - DNA, 20 bp, synthetic construct
  misc_feature 1..20: note = Description of Artificial Sequence: Synthetic oligonucleotide
  misc_feature 1..20: note = Target: FXN; (+) strand; PAM type: NRG; PAM sequence: AAG
  source 1..20: mol_type = other DNA
tcactgtcataacctttaca

SEQ ID NO: 15347 - DNA, 20 bp, synthetic construct
  misc_feature 1..20: note = Description of Artificial Sequence: Synthetic oligonucleotide
  misc_feature 1..20: note = Target: FXN; (+) strand; PAM type: NRG; PAM sequence: AGG
  source 1..20: mol_type = other DNA
cactgtcataacctttacaa

SEQ ID NO: 15348 - DNA, 20 bp, synthetic construct
  misc_feature 1..20: note = Description of Artificial Sequence: Synthetic oligonucleotide
  misc_feature 1..20: note = Target: FXN; (+) strand; PAM type: NRG; PAM sequence: TGG
  source 1..20: mol_type = other DNA
tgtcataacctttacaaagg

SEQ ID NO: 15349 - DNA, 20 bp, synthetic construct
  misc_feature 1..20: note = Description of Artificial Sequence: Synthetic oligonucleotide
  misc_feature 1..20: note = Target: FXN; (+) strand; PAM type: NRG; PAM sequence: TAG
  source 1..20: mol_type = other DNA
ctttacaaaggtggtttcat

SEQ ID NO: 15350 - DNA, 20 bp, synthetic construct
  misc_feature 1..20: note = Description of Artificial Sequence: Synthetic oligonucleotide
  misc_feature 1..20: note = Target: FXN; (+) strand; PAM type: NRG; PAM sequence: AGG
  source 1..20: mol_type = other DNA
tttacaaaggtggtttcatt

SEQ ID NO: 15351 - DNA, 20 bp, synthetic construct
  misc_feature 1..20: note = Description of Artificial Sequence: Synthetic oligonucleotide
  misc_feature 1..20: note = Target: FXN; (+) strand; PAM type: NRG; PAM sequence: TAG
  source 1..20: mol_type = other DNA
gcatattaatgcaaattcct

SEQ ID NO: 15352 - DNA, 20 bp, synthetic construct
  misc_feature 1..20: note = Description of Artificial Sequence: Synthetic oligonucleotide
  misc_feature 1..20: note = Target: FXN; (+) strand; PAM type: NRG; PAM sequence: AAG
  source 1..20: mol_type = other DNA
gcaaattccttagttaaaac

SEQ ID NO: 15353 - DNA, 20 bp, synthetic construct
  misc_feature 1..20: note = Description of Artificial Sequence: Synthetic oligonucleotide
  misc_feature 1..20: note = Target: FXN; (+) strand; PAM type: NRG; PAM sequence: AAG
  source 1..20: mol_type = other DNA
aaaacaagaatgactctcta

SEQ ID NO: 15354 - DNA, 20 bp, synthetic construct
  misc_feature 1..20: note = Description of Artificial Sequence: Synthetic oligonucleotide
  misc_feature 1..20: note = Target: FXN; (+) strand; PAM type: NRG; PAM sequence: AGG
  source 1..20: mol_type = other DNA
aaacaagaatgactctctaa

SEQ ID NO: 15355 - DNA, 20 bp, synthetic construct
  misc_feature 1..20: note = Description of Artificial Sequence: Synthetic oligonucleotide
  misc_feature 1..20: note = Target: FXN; (+) strand; PAM type: NRG; PAM sequence: CAG
  source 1..20: mol_type = other DNA
actctctaaaggctatattt

SEQ ID NO: 15356 - DNA, 20 bp, synthetic construct
  misc_feature 1..20: note = Description of Artificial Sequence: Synthetic oligonucleotide
  misc_feature 1..20: note = Target: FXN; (+) strand; PAM type: NRG; PAM sequence: CAG
  source 1..20: mol_type = other DNA
ctttcctcttgtcccctcaa

SEQ ID NO: 15357 - DNA, 20 bp, synthetic construct
  misc_feature 1..20: note = Description of Artificial Sequence: Synthetic oligonucleotide
  misc_feature 1..20: note = Target: FXN; (+) strand; PAM type: NRG; PAM sequence: AAG
  source 1..20: mol_type = other DNA
cctcttgtcccctcaacagt

SEQ ID NO: 15358 - DNA, 20 bp, synthetic construct
  misc_feature 1..20: note = Description of Artificial Sequence: Synthetic oligonucleotide
  misc_feature 1..20: note = Target: FXN; (+) strand; PAM type: NRG; PAM sequence: AAG
  source 1..20: mol_type = other DNA
ttgtcccctcaacagtaagc

SEQ ID NO: 15359 - DNA, 20 bp, synthetic construct
  misc_feature 1..20: note = Description of Artificial Sequence: Synthetic oligonucleotide
  misc_feature 1..20: note = Target: FXN; (+) strand; PAM type: NRG; PAM sequence: AAG
  source 1..20: mol_type = other DNA
tcccctcaacagtaagcaag

SEQ ID NO: 15360 - DNA, 20 bp, synthetic construct
  misc_feature 1..20: note = Description of Artificial Sequence: Synthetic oligonucleotide
  misc_feature 1..20: note = Target: FXN; (+) strand; PAM type: NRG; PAM sequence: GAG
  source 1..20: mol_type = other DNA
ccctcaacagtaagcaagaa

SEQ ID NO: 15361 - DNA, 20 bp, synthetic construct
  misc_feature 1..20: note = Description of Artificial Sequence: Synthetic oligonucleotide
  misc_feature 1..20: note = Target: FXN; (+) strand; PAM type: NRG; PAM sequence: AAG
  source 1..20: mol_type = other DNA
caagaagagtatttttgtac

SEQ ID NO: 15362 - DNA, 20 bp, synthetic construct
  misc_feature 1..20: note = Description of Artificial Sequence: Synthetic oligonucleotide
  misc_feature 1..20: note = Target: FXN; (+) strand; PAM type: NRG; PAM sequence: GAG
  source 1..20: mol_type = other DNA
agaagagtatttttgtacaa

SEQ ID NO: 15363 - DNA, 20 bp, synthetic construct
  misc_feature 1..20: note = Description of Artificial Sequence: Synthetic oligonucleotide
  misc_feature 1..20: note = Target: FXN; (+) strand; PAM type: NRG; PAM sequence: GAG
  source 1..20: mol_type = other DNA
aagagtatttttgtacaaga

SEQ ID NO: 15364 - DNA, 20 bp, synthetic construct
  misc_feature 1..20: note = Description of Artificial Sequence: Synthetic oligonucleotide
  misc_feature 1..20: note = Target: FXN; (+) strand; PAM type: NRG; PAM sequence: GAG
  source 1..20: mol_type = other DNA
gagtatttttgtacaagaga

SEQ ID NO: 15365 - DNA, 20 bp, synthetic construct
  misc_feature 1..20: note = Description of Artificial Sequence: Synthetic oligonucleotide
  misc_feature 1..20: note = Target: FXN; (+) strand; PAM type: NRG; PAM sequence: AGG
  source 1..20: mol_type = other DNA
agtatttttgtacaagagag

SEQ ID NO: 15366 - DNA, 20 bp, synthetic construct
  misc_feature 1..20: note = Description of Artificial Sequence: Synthetic oligonucleotide
  misc_feature 1..20: note = Target: FXN; (+) strand; PAM type: NRG; PAM sequence: AAG
  source 1..20: mol_type = other DNA
aagagagaggcctctgcctg

SEQ ID NO: 15367 - DNA, 20 bp, synthetic construct
  misc_feature 1..20: note = Description of Artificial Sequence: Synthetic oligonucleotide
  misc_feature 1..20: note = Target: FXN; (+) strand; PAM type: NRG; PAM sequence: CAG
  source 1..20: mol_type = other DNA
ctgaagctcccttaatctgt

SEQ ID NO: 15368 - DNA, 20 bp, synthetic construct
  misc_feature 1..20: note = Description of Artificial Sequence: Synthetic oligonucleotide
  misc_feature 1..20: note = Target: FXN; (+) strand; PAM type: NRG; PAM sequence: CAG
  source 1..20: mol_type = other DNA
tcccttaatctgtcagatca

SEQ ID NO: 15369 - DNA, 20 bp, synthetic construct
  misc_feature 1..20: note = Description of Artificial Sequence: Synthetic oligonucleotide
  misc_feature 1..20: note = Target: FXN; (+) strand; PAM type: NRG; PAM sequence: AAG
  source 1..20: mol_type = other DNA
tctgtcagatcacagatcaa

SEQ ID NO: 15370 - DNA, 20 bp, synthetic construct
  misc_feature 1..20: note = Description of Artificial Sequence: Synthetic oligonucleotide
  misc_feature 1..20: note = Target: FXN; (+) strand; PAM type: NRG; PAM sequence: AAG
  source 1..20: mol_type = other DNA
aaagctatcacacactgccc

SEQ ID NO: 15371 - DNA, 20 bp, synthetic construct
  misc_feature 1..20: note = Description of Artificial Sequence: Synthetic oligonucleotide
  misc_feature 1..20: note = Target: FXN; (+) strand; PAM type: NRG; PAM sequence: AGG
  source 1..20: mol_type = other DNA
aagctatcacacactgccca

SEQ ID NO: 15372 - DNA, 20 bp, synthetic construct
  misc_feature 1..20: note = Description of Artificial Sequence: Synthetic oligonucleotide
  misc_feature 1..20: note = Target: FXN; (+) strand; PAM type: NRG; PAM sequence: GGG
  source 1..20: mol_type = other DNA
agctatcacacactgcccaa

SEQ ID NO: 15373 - DNA, 20 bp, synthetic construct
  misc_feature 1..20: note = Description of Artificial Sequence: Synthetic oligonucleotide
  misc_feature 1..20: note = Target: FXN; (+) strand; PAM type: NRG; PAM sequence: AAG
  source 1..20: mol_type = other DNA
acactgcccaagggacccta

SEQ ID NO: 15374 - DNA, 20 bp, synthetic construct
  misc_feature 1..20: note = Description of Artificial Sequence: Synthetic oligonucleotide
  misc_feature 1..20: note = Target: FXN; (+) strand; PAM type: NRG; PAM sequence: AGG
  source 1..20: mol_type = other DNA
cactgcccaagggaccctaa

SEQ ID NO: 15375 - DNA, 20 bp, synthetic construct
  misc_feature 1..20: note = Description of Artificial Sequence: Synthetic oligonucleotide
  misc_feature 1..20: note = Target: FXN; (+) strand; PAM type: NRG; PAM sequence: GGG
  source 1..20: mol_type = other DNA
actgcccaagggaccctaaa

SEQ ID NO: 15376 - DNA, 20 bp, synthetic construct
  misc_feature 1..20: note = Description of Artificial Sequence: Synthetic oligonucleotide
  misc_feature 1..20: note = Target: FXN; (+) strand; PAM type: NRG; PAM sequence: GAG
  source 1..20: mol_type = other DNA
tgcccaagggaccctaaagg

SEQ ID NO: 15377 - DNA, 20 bp, synthetic construct
  misc_feature 1..20: note = Description of Artificial Sequence: Synthetic oligonucleotide
  misc_feature 1..20: note = Target: FXN; (+) strand; PAM type: NRG; PAM sequence: CAG
  source 1..20: mol_type = other DNA
accctaaagggagccactct

SEQ ID NO: 15378 - DNA, 20 bp, synthetic construct
  misc_feature 1..20: note = Description of Artificial Sequence: Synthetic oligonucleotide
  misc_feature 1..20: note = Target: FXN; (+) strand; PAM type: NRG; PAM sequence: TGG
  source 1..20: mol_type = other DNA
aatccaaacctccttttttc

SEQ ID NO: 15379 - DNA, 20 bp, synthetic construct
  misc_feature 1..20: note = Description of Artificial Sequence: Synthetic oligonucleotide
  misc_feature 1..20: note = Target: FXN; (+) strand; PAM type: NRG; PAM sequence: TAG
  source 1..20: mol_type = other DNA
ccactgaaacgttcaataat

SEQ ID NO: 15380 - DNA, 20 bp, synthetic construct
  misc_feature 1..20: note = Description of Artificial Sequence: Synthetic oligonucleotide
  misc_feature 1..20: note = Target: FXN; (+) strand; PAM type: NRG; PAM sequence: TGG
  source 1..20: mol_type = other DNA
tgtttaatatttattgactt

SEQ ID NO: 15381 - DNA, 20 bp, synthetic construct
  misc_feature 1..20: note = Description of Artificial Sequence: Synthetic oligonucleotide
  misc_feature 1..20: note = Target: FXN; (+) strand; PAM type: NRG; PAM sequence: GAG
  source 1..20: mol_type = other DNA
gaattattgattactttgct

SEQ ID NO: 15382 - DNA, 20 bp, synthetic construct
  misc_feature 1..20: note = Description of Artificial Sequence: Synthetic oligonucleotide
  misc_feature 1..20: note = Target: FXN; (+) strand; PAM type: NRG; PAM sequence: AAG
  source 1..20: mol_type = other DNA
atttaatctatattaatatt

SEQ ID NO: 15383 - DNA, 20 bp, synthetic construct
  misc_feature 1..20: note = Description of Artificial Sequence: Synthetic oligonucleotide
  misc_feature 1..20: note = Target: FXN; (+) strand; PAM type: NRG; PAM sequence: AGG
  source 1..20: mol_type = other DNA
tttaatctatattaatatta

SEQ ID NO: 15384 - DNA, 20 bp, synthetic construct
  misc_feature 1..20: note = Description of Artificial Sequence: Synthetic oligonucleotide
  misc_feature 1..20: note = Target: FXN; (+) strand; PAM type: NRG; PAM sequence: CAG
  source 1..20: mol_type = other DNA
tgatgtatcaaattgcattc

SEQ ID NO: 15385 - DNA, 20 bp, synthetic construct
  misc_feature 1..20: note = Description of Artificial Sequence: Synthetic oligonucleotide
  misc_feature 1..20: note = Target: FXN; (+) strand; PAM type: NRG; PAM sequence: GAG
  source 1..20: mol_type = other DNA
atgtatcaaattgcattcca

SEQ ID NO: 15386 - DNA, 20 bp, synthetic construct
  misc_feature 1..20: note = Description of Artificial Sequence: Synthetic oligonucleotide
  misc_feature 1..20: note = Target: FXN; (+) strand; PAM type: NRG; PAM sequence: TGG
  source 1..20: mol_type = other DNA
tcaaattgcattccagagtg

SEQ ID NO: 15387 - DNA, 20 bp, synthetic construct
  misc_feature 1..20: note = Description of Artificial Sequence: Synthetic oligonucleotide
  misc_feature 1..20: note = Target: FXN; (+) strand; PAM type: NRG; PAM sequence: TAG
  source 1..20: mol_type = other DNA
ccagagtgtggatttgactc

SEQ ID NO: 15388 - DNA, 20 bp, synthetic construct
  misc_feature 1..20: note = Description of Artificial Sequence: Synthetic oligonucleotide
  misc_feature 1..20: note = Target: FXN; (+) strand; PAM type: NRG; PAM sequence: CAG
  source 1..20: mol_type = other DNA
tttgactctagtgccataat

SEQ ID NO: 15389 - DNA, 20 bp, synthetic construct
  misc_feature 1..20: note = Description of Artificial Sequence: Synthetic oligonucleotide
  misc_feature 1..20: note = Target: FXN; (+) strand; PAM type: NRG; PAM sequence: TGG
  source 1..20: mol_type = other DNA
tagtgccataatcagtctcc

SEQ ID NO: 15390 - DNA, 20 bp, synthetic construct
  misc_feature 1..20: note = Description of Artificial Sequence: Synthetic oligonucleotide
  misc_feature 1..20: note = Target: FXN; (+) strand; PAM type: NRG; PAM sequence: GGG
  source 1..20: mol_type = other DNA
agtgccataatcagtctcct

SEQ ID NO: 15391 - DNA, 20 bp, synthetic construct
  misc_feature 1..20: note = Description of Artificial Sequence: Synthetic oligonucleotide
  misc_feature 1..20: note = Target: FXN; (+) strand; PAM type: NRG; PAM sequence: CAG
  source 1..20: mol_type = other DNA
aatcagtctcctgggacaaa

SEQ ID NO: 15392 - DNA, 20 bp, synthetic construct
  misc_feature 1..20: note = Description of Artificial Sequence: Synthetic oligonucleotide
  misc_feature 1..20: note = Target: FXN; (+) strand; PAM type: NRG; PAM sequence: TAG
  source 1..20: mol_type = other DNA
ctgtttctcttccctcatta

SEQ ID NO: 15393 - DNA, 20 bp, synthetic construct
  misc_feature 1..20: note = Description of Artificial Sequence: Synthetic oligonucleotide
  misc_feature 1..20: note = Target: FXN; (+) strand; PAM type: NRG; PAM sequence: TGG
  source 1..20: mol_type = other DNA
ttatagaaaaaaattgccct

SEQ ID NO: 15394 - DNA, 20 bp, synthetic construct
  misc_feature 1..20: note = Description of Artificial Sequence: Synthetic oligonucleotide
  misc_feature 1..20: note = Target: FXN; (+) strand; PAM type: NRG; PAM sequence: AAG
  source 1..20: mol_type = other DNA
attgcccttggcaaatgtca

SEQ ID NO: 15395 - DNA, 20 bp, synthetic construct
  misc_feature 1..20: note = Description of Artificial Sequence: Synthetic oligonucleotide
  misc_feature 1..20: note = Target: FXN; (+) strand; PAM type: NRG; PAM sequence: AAG
  source 1..20: mol_type = other DNA
tctctcttaccaatcaatcc

SEQ ID NO: 15396 - DNA, 20 bp, synthetic construct
  misc_feature 1..20: note = Description of Artificial Sequence: Synthetic oligonucleotide
  misc_feature 1..20: note = Target: FXN; (+) strand; PAM type: NRG; PAM sequence: CAG
  source 1..20: mol_type = other DNA
ccaatcaatccaagcaaatg

SEQ ID NO: 15397 - DNA, 20 bp, synthetic construct
  misc_feature 1..20: note = Description of Artificial Sequence: Synthetic oligonucleotide
  misc_feature 1..20: note = Target: FXN; (+) strand; PAM type: NRG; PAM sequence: TGG
  source 1..20: mol_type = other DNA
atcaatccaagcaaatgcag

SEQ ID NO: 15398 - DNA, 20 bp, synthetic construct
  misc_feature 1..20: note = Description of Artificial Sequence: Synthetic oligonucleotide
  misc_feature 1..20: note = Target: FXN; (+) strand; PAM type: NRG; PAM sequence: GGG
  source 1..20: mol_type = other DNA
tcaatccaagcaaatgcagt

SEQ ID NO: 15399 - DNA, 20 bp, synthetic construct
  misc_feature 1..20: note = Description of Artificial Sequence: Synthetic oligonucleotide
  misc_feature 1..20: note = Target: FXN; (+) strand; PAM type: NRG; PAM sequence: CAG
  source 1..20: mol_type = other DNA
gcagtgggatttcttttccc

SEQ ID NO: 15400 - DNA, 20 bp, synthetic construct
  misc_feature 1..20: note = Description of Artificial Sequence: Synthetic oligonucleotide
  misc_feature 1..20: note = Target: FXN; (+) strand; PAM type: NRG; PAM sequence: GAG
  source 1..20: mol_type = other DNA
agtgggatttcttttcccca

SEQ ID NO: 15401 - DNA, 20 bp, synthetic construct
  misc_feature 1..20: note = Description of Artificial Sequence: Synthetic oligonucleotide
  misc_feature 1..20: note = Target: FXN; (+) strand; PAM type: NRG; PAM sequence: AAG
  source 1..20: mol_type = other DNA
atttcttttccccagagttg

SEQ ID NO: 15402 - DNA, 20 bp, synthetic construct
  misc_feature 1..20: note = Description of Artificial Sequence: Synthetic oligonucleotide
  misc_feature 1..20: note = Target: FXN; (+) strand; PAM type: NRG; PAM sequence: CAG
  source 1..20: mol_type = other DNA
gagttgaagtcacctcctga

SEQ ID NO: 15403 - DNA, 20 bp, synthetic construct
  misc_feature 1..20: note = Description of Artificial Sequence: Synthetic oligonucleotide
  misc_feature 1..20: note = Target: FXN; (+) strand; PAM type: NRG; PAM sequence: AGG
  source 1..20: mol_type = other DNA
agttgaagtcacctcctgac

SEQ ID NO: 15404 - DNA, 20 bp, synthetic construct
  misc_feature 1..20: note = Description of Artificial Sequence: Synthetic oligonucleotide
  misc_feature 1..20: note = Target: FXN; (+) strand; PAM type: NRG; PAM sequence: AAG
  source 1..20: mol_type = other DNA
tgaagtcacctcctgacagg

SEQ ID NO: 15405 - DNA, 20 bp, synthetic construct
  misc_feature 1..20: note = Description of Artificial Sequence: Synthetic oligonucleotide
  misc_feature 1..20: note = Target: FXN; (+) strand; PAM type: NRG; PAM sequence: AAG
  source 1..20: mol_type = other DNA
tcacctcctgacaggaagtt

SEQ ID NO: 15406 - DNA, 20 bp, synthetic construct
  misc_feature 1..20: note = Description of Artificial Sequence: Synthetic oligonucleotide
  misc_feature 1..20: note = Target: FXN; (+) strand; PAM type: NRG; PAM sequence: TAG
  source 1..20: mol_type = other DNA
ctgacaggaagttaagtctt

SEQ ID NO: 15407 - DNA, 20 bp, synthetic construct
  misc_feature 1..20: note = Description of Artificial Sequence: Synthetic oligonucleotide
  misc_feature 1..20: note = Target: FXN; (+) strand; PAM type: NRG; PAM sequence: AGG
  source 1..20: mol_type = other DNA
tgacaggaagttaagtcttt

SEQ ID NO: 15408 - DNA, 20 bp, synthetic construct
  misc_feature 1..20: note = Description of Artificial Sequence: Synthetic oligonucleotide
  misc_feature 1..20: note = Target: FXN; (+) strand; PAM type: NRG; PAM sequence: TAG
  source 1..20: mol_type = other DNA
agtctttaggcactgaatca

SEQ ID NO: 15409 - DNA, 20 bp, synthetic construct
  misc_feature 1..20: note = Description of Artificial Sequence: Synthetic oligonucleotide
  misc_feature 1..20: note = Target: FXN; (+) strand; PAM type: NRG; PAM sequence: GAG
  source 1..20: mol_type = other DNA
aggcactgaatcatagcact

SEQ ID NO: 15410 - DNA, 20 bp, synthetic construct
  misc_feature 1..20: note = Description of Artificial Sequence: Synthetic oligonucleotide
  misc_feature 1..20: note = Target: FXN; (+) strand; PAM type: NRG; PAM sequence: AAG
  source 1..20: mol_type = other DNA
tgaatcatagcactgagctg

SEQ ID NO: 15411 - DNA, 20 bp, synthetic construct
  misc_feature 1..20: note = Description of Artificial Sequence: Synthetic oligonucleotide
  misc_feature 1..20: note = Target: FXN; (+) strand; PAM type: NRG; PAM sequence: CAG
  source 1..20: mol_type = other DNA
catagcactgagctgaagcc

SEQ ID NO: 15412 - DNA, 20 bp, synthetic construct
  misc_feature 1..20: note = Description of Artificial Sequence: Synthetic oligonucleotide
  misc_feature 1..20: note = Target: FXN; (+) strand; PAM type: NRG; PAM sequence: AGG
  source 1..20: mol_type = other DNA
atagcactgagctgaagccc

SEQ ID NO: 15413 - DNA, 20 bp, synthetic construct
  misc_feature 1..20: note = Description of Artificial Sequence: Synthetic oligonucleotide
  misc_feature 1..20: note = Target: FXN; (+) strand; PAM type: NRG; PAM sequence: AAG
  source 1..20: mol_type = other DNA
ctgagctgaagcccaggact

SEQ ID NO: 15414 - DNA, 20 bp, synthetic construct
  misc_feature 1..20: note = Description of Artificial Sequence: Synthetic oligonucleotide
  misc_feature 1..20: note = Target: FXN; (+) strand; PAM type: NRG; PAM sequence: AAG
  source 1..20: mol_type = other DNA
gctgaagcccaggactaagc

SEQ ID NO: 15415 - DNA, 20 bp, synthetic construct
  misc_feature 1..20: note = Description of Artificial Sequence: Synthetic oligonucleotide
  misc_feature 1..20: note = Target: FXN; (+) strand; PAM type: NRG; PAM sequence: GAG
  source 1..20: mol_type = other DNA
gcccaggactaagcaagaat

SEQ ID NO: 15416 - DNA, 20 bp, synthetic construct
  misc_feature 1..20: note = Description of Artificial Sequence: Synthetic oligonucleotide
  misc_feature 1..20: note = Target: FXN; (+) strand; PAM type: NRG; PAM sequence: GAG
  source 1..20: mol_type = other DNA
aggactaagcaagaatgagt

SEQ ID NO: 15417 - DNA, 20 bp, synthetic construct
  misc_feature 1..20: note = Description of Artificial Sequence: Synthetic oligonucleotide
  misc_feature 1..20: note = Target: FXN; (+) strand; PAM type: NRG; PAM sequence: TGG
  source 1..20: mol_type = other DNA
agcaagaatgagtgagaatt

SEQ ID NO: 15418 - DNA, 20 bp, synthetic construct
  misc_feature 1..20: note = Description of Artificial Sequence: Synthetic oligonucleotide
  misc_feature 1..20: note = Target: FXN; (+) strand; PAM type: NRG; PAM sequence: GAG
  source 1..20: mol_type = other DNA
caagaatgagtgagaatttg

SEQ ID NO: 15419 - DNA, 20 bp, synthetic construct
  misc_feature 1..20: note = Description of Artificial Sequence: Synthetic oligonucleotide
  misc_feature 1..20: note = Target: FXN; (+) strand; PAM type: NRG; PAM sequence: AAG
  source 1..20: mol_type = other DNA
gagtgagaatttggagactt

SEQ ID NO: 15420 - DNA, 20 bp, synthetic construct
  misc_feature 1..20: note = Description of Artificial Sequence: Synthetic oligonucleotide
  misc_feature 1..20: note = Target: FXN; (+) strand; PAM type: NRG; PAM sequence: AGG
  source 1..20: mol_type = other DNA
agtgagaatttggagactta

SEQ ID NO: 15421 - DNA, 20 bp, synthetic construct
  misc_feature 1..20: note = Description of Artificial Sequence: Synthetic oligonucleotide
  misc_feature 1..20: note = Target: FXN; (+) strand; PAM type: NRG; PAM sequence: TGG
  source 1..20: mol_type = other DNA
gaatttggagacttaaggtt

SEQ ID NO: 15422 - DNA, 20 bp, synthetic construct
  misc_feature 1..20: note = Description of Artificial Sequence: Synthetic oligonucleotide
  misc_feature 1..20: note = Target: FXN; (+) strand; PAM type: NRG; PAM sequence: TAG
  source 1..20: mol_type = other DNA
acttaaggtttggtcatctg

SEQ ID NO: 15423 - DNA, 20 bp, synthetic construct
  misc_feature 1..20: note = Description of Artificial Sequence: Synthetic oligonucleotide
  misc_feature 1..20: note = Target: FXN; (+) strand; PAM type: NRG; PAM sequence: GAG
  source 1..20: mol_type = other DNA
ttaaggtttggtcatctgta

SEQ ID NO: 15424 - DNA, 20 bp, synthetic construct
  misc_feature 1..20: note = Description of Artificial Sequence: Synthetic oligonucleotide
  misc_feature 1..20: note = Target: FXN; (+) strand; PAM type: NRG; PAM sequence: AGG
  source 1..20: mol_type = other DNA
taaggtttggtcatctgtag

SEQ ID NO: 15425 - DNA, 20 bp, synthetic construct
  misc_feature 1..20: note = Description of Artificial Sequence: Synthetic oligonucleotide
  misc_feature 1..20: note = Target: FXN; (+) strand; PAM type: NRG; PAM sequence: TGG
  source 1..20: mol_type = other DNA
tttggtcatctgtagaggat

SEQ ID NO: 15426 - DNA, 20 bp, synthetic construct
  misc_feature 1..20: note = Description of Artificial Sequence: Synthetic oligonucleotide
  misc_feature 1..20: note = Target: FXN; (+) strand; PAM type: NRG; PAM sequence: GGG
  source 1..20: mol_type = other DNA
ttggtcatctgtagaggatt

SEQ ID NO: 15427 - DNA, 20 bp, synthetic construct
  misc_feature 1..20: note = Description of Artificial Sequence: Synthetic oligonucleotide
  misc_feature 1..20: note = Target: FXN; (+) strand; PAM type: NRG; PAM sequence: TGG
  source 1..20: mol_type = other DNA
gtcttgttttgtttttgttt

SEQ ID NO: 15428 - DNA, 20 bp, synthetic construct
  misc_feature 1..20: note = Description of Artificial Sequence: Synthetic oligonucleotide
  misc_feature 1..20: note = Target: FXN; (+) strand; PAM type: NRG; PAM sequence: AAG
  source 1..20: mol_type = other DNA
tttttgttttggtgtcctgc

SEQ ID NO: 15429 - DNA, 20 bp, synthetic construct
  misc_feature 1..20: note = Description of Artificial Sequence: Synthetic oligonucleotide
  misc_feature 1..20: note = Target: FXN; (+) strand; PAM type: NRG; PAM sequence: AGG
  source 1..20: mol_type = other DNA
ttttgttttggtgtcctgca

SEQ ID NO: 15430 - DNA, 20 bp, synthetic construct
  misc_feature 1..20: note = Description of Artificial Sequence: Synthetic oligonucleotide
  misc_feature 1..20: note = Target: FXN; (+) strand; PAM type: NRG; PAM sequence: CAG
  source 1..20: mol_type = other DNA
ggtttctcactgcccttcat

SEQ ID NO: 15431 - DNA, 20 bp, synthetic construct
  misc_feature 1..20: note = Description of Artificial Sequence: Synthetic oligonucleotide
  misc_feature 1..20: note = Target: FXN; (+) strand; PAM type: NRG; PAM sequence: AGG
  source 1..20: mol_type = other DNA
gtttctcactgcccttcatc

SEQ ID NO: 15432 - DNA, 20 bp, synthetic construct
  misc_feature 1..20: note = Description of Artificial Sequence: Synthetic oligonucleotide
  misc_feature 1..20: note = Target: FXN; (+) strand; PAM type: NRG; PAM sequence: TGG
  source 1..20: mol_type = other DNA
aatatgccctgtccctgaac

SEQ ID NO: 15433 - DNA, 20 bp, synthetic construct
  misc_feature 1..20: note = Description of Artificial Sequence: Synthetic oligonucleotide
  misc_feature 1..20: note = Target: FXN; (+) strand; PAM type: NRG; PAM sequence: TAG
  source 1..20: mol_type = other DNA
attgtgttaccccattccct

SEQ ID NO: 15434 - DNA, 20 bp, synthetic construct
  misc_feature 1..20: note = Description of Artificial Sequence: Synthetic oligonucleotide
  misc_feature 1..20: note = Target: FXN; (+) strand; PAM type: NRG; PAM sequence: CAG
  source 1..20: mol_type = other DNA
ttaccccattcccttagcaa

SEQ ID NO: 15435 - DNA, 20 bp, synthetic construct
  misc_feature 1..20: note = Description of Artificial Sequence: Synthetic oligonucleotide
  misc_feature 1..20: note = Target: FXN; (+) strand; PAM type: NRG; PAM sequence: AAG
  source 1..20: mol_type = other DNA
agcaacagtgattgctactg

SEQ ID NO: 15436 - DNA, 20 bp, synthetic construct
  misc_feature 1..20: note = Description of Artificial Sequence: Synthetic oligonucleotide
  misc_feature 1..20: note = Target: FXN; (+) strand; PAM type: NRG; PAM sequence: CAG
  source 1..20: mol_type = other DNA
agtgattgctactgaagaaa

SEQ ID NO: 15437 - DNA, 20 bp, synthetic construct
  misc_feature 1..20: note = Description of Artificial Sequence: Synthetic oligonucleotide
  misc_feature 1..20: note = Target: FXN; (+) strand; PAM type: NRG; PAM sequence: AGG
  source 1..20: mol_type = other DNA
gtgattgctactgaagaaac

SEQ ID NO: 15438 - DNA, 20 bp, synthetic construct
  misc_feature 1..20: note = Description of Artificial Sequence: Synthetic oligonucleotide
  misc_feature 1..20: note = Target: FXN; (+) strand; PAM type: NRG; PAM sequence: GAG
  source 1..20: mol_type = other DNA
gattgctactgaagaaacag

SEQ ID NO: 15439 - DNA, 20 bp, synthetic construct
  misc_feature 1..20: note = Description of Artificial Sequence: Synthetic oligonucleotide
  misc_feature 1..20: note = Target: FXN; (+) strand; PAM type: NRG; PAM sequence: AGG
  source 1..20: mol_type = other DNA
attgctactgaagaaacagg

SEQ ID NO: 15440 - DNA, 20 bp, synthetic construct
  misc_feature 1..20: note = Description of Artificial Sequence: Synthetic oligonucleotide
  misc_feature 1..20: note = Target: FXN; (+) strand; PAM type: NRG; PAM sequence: AAG
  source 1..20: mol_type = other DNA
gaagaaacaggaggccaaca

SEQ ID NO: 15441 - DNA, 20 bp, synthetic construct
  misc_feature 1..20: note = Description of Artificial Sequence: Synthetic oligonucleotide
  misc_feature 1..20: note = Target: FXN; (+) strand; PAM type: NRG; PAM sequence: CAG
  source 1..20: mol_type = other DNA
aaagaatatcactcattcac

SEQ ID NO: 15442 - DNA, 20 bp, synthetic construct
  misc_feature 1..20: note = Description of Artificial Sequence: Synthetic oligonucleotide
  misc_feature 1..20: note = Target: FXN; (+) strand; PAM type: NRG; PAM sequence: TAG
  source 1..20: mol_type = other DNA
gaatatcactcattcaccag

SEQ ID NO: 15443 - DNA, 20 bp, synthetic construct
  misc_feature 1..20: note = Description of Artificial Sequence: Synthetic oligonucleotide
  misc_feature 1..20: note = Target: FXN; (+) strand; PAM type: NRG; PAM sequence: GAG
  source 1..20: mol_type = other DNA
atatcactcattcaccagta

SEQ ID NO: 15444 - DNA, 20 bp, synthetic construct
  misc_feature 1..20: note = Description of Artificial Sequence: Synthetic oligonucleotide
  misc_feature 1..20: note = Target: FXN; (+) strand; PAM type: NRG; PAM sequence: CAG
  source 1..20: mol_type = other DNA
caccagtagagtgtctatgt

SEQ ID NO: 15445 - DNA, 20 bp, synthetic construct
  misc_feature 1..20: note = Description of Artificial Sequence: Synthetic oligonucleotide
  misc_feature 1..20: note = Target: FXN; (+) strand; PAM type: NRG; PAM sequence: GAG
  source 1..20: mol_type = other DNA
ccagtagagtgtctatgtca

SEQ ID NO: 15446 - DNA, 20 bp, synthetic construct
  misc_feature 1..20: note = Description of Artificial Sequence: Synthetic oligonucleotide
  misc_feature 1..20: note = Target: FXN; (+) strand; PAM type: NRG; PAM sequence: TAG
  source 1..20: mol_type = other DNA
agtgtctatgtcagagatat

SEQ ID NO: 15447 - DNA, 20 bp, synthetic construct
  misc_feature 1..20: note = Description of Artificial Sequence: Synthetic oligonucleotide
  misc_feature 1..20: note = Target: FXN; (+) strand; PAM type: NRG; PAM sequence: CAG
  source 1..20: mol_type = other DNA
tgtcagagatattagataaa

SEQ ID NO: 15448 - DNA, 20 bp, synthetic construct
  misc_feature 1..20: note = Description of Artificial Sequence: Synthetic oligonucleotide
  misc_feature 1..20: note = Target: FXN; (+) strand; PAM type: NRG; PAM sequence: AGG
  source 1..20: mol_type = other DNA
gtcagagatattagataaac

SEQ ID NO: 15449 - DNA, 20 bp, synthetic construct
  misc_feature 1..20: note = Description of Artificial Sequence: Synthetic oligonucleotide
  misc_feature 1..20: note = Target: FXN; (+) strand; PAM type: NRG; PAM sequence: CAG
  source 1..20: mol_type = other DNA
gaaaactaacaattacattg

SEQ ID NO: 15450 - DNA, 20 bp, synthetic construct
  misc_feature 1..20: note = Description of Artificial Sequence: Synthetic oligonucleotide
  misc_feature 1..20: note = Target: FXN; (+) strand; PAM type: NRG; PAM sequence: AGG
  source 1..20: mol_type = other DNA
aaaactaacaattacattgc

SEQ ID NO: 15451 - DNA, 20 bp, synthetic construct
  misc_feature 1..20: note = Description of Artificial Sequence: Synthetic oligonucleotide
  misc_feature 1..20: note = Target: FXN; (+) strand; PAM type: NRG; PAM sequence: TGG
  source 1..20: mol_type = other DNA
aacaattacattgcaggctg

SEQ ID NO: 15452 - DNA, 20 bp, synthetic construct
  misc_feature 1..20: note = Description of Artificial Sequence: Synthetic oligonucleotide
  misc_feature 1..20: note = Target: FXN; (+) strand; PAM type: NRG; PAM sequence: CAG
  source 1..20: mol_type = other DNA
tacattgcaggctgtggaaa

SEQ ID NO: 15453 - DNA, 20 bp, synthetic construct
  misc_feature 1..20: note = Description of Artificial Sequence: Synthetic oligonucleotide
  misc_feature 1..20: note = Target: FXN; (+) strand; PAM type: NRG; PAM sequence: GAG
  source 1..20: mol_type = other DNA
cattgcaggctgtggaaaca

SEQ ID NO: 15454 - DNA, 20 bp, synthetic construct
  misc_feature 1..20: note = Description of Artificial Sequence: Synthetic oligonucleotide
  misc_feature 1..20: note = Target: FXN; (+) strand; PAM type: NRG; PAM sequence: GAG
  source 1..20: mol_type = other DNA
ttgcaggctgtggaaacaga

SEQ ID NO: 15455 - DNA, 20 bp, synthetic construct
  misc_feature 1..20: note = Description of Artificial Sequence: Synthetic oligonucleotide
  misc_feature 1..20: note = Target: FXN; (+) strand; PAM type: NRG; PAM sequence: GAG
  source 1..20: mol_type = other DNA
gcaggctgtggaaacagaga

SEQ ID NO: 15456 - DNA, 20 bp, synthetic construct
  misc_feature 1..20: note = Description of Artificial Sequence: Synthetic oligonucleotide
  misc_feature 1..20: note = Target: FXN; (+) strand; PAM type: NRG; PAM sequence: AGG
  source 1..20: mol_type = other DNA
caggctgtggaaacagagag

SEQ ID NO: 15457 - DNA, 20 bp, synthetic construct
  misc_feature 1..20: note = Description of Artificial Sequence: Synthetic oligonucleotide
  misc_feature 1..20: note = Target: FXN; (+) strand; PAM type: NRG; PAM sequence: AAG
  source 1..20: mol_type = other DNA
ggaaacagagagaggtacct

SEQ ID NO: 15458 - DNA, 20 bp, synthetic construct
  misc_feature 1..20: note = Description of Artificial Sequence: Synthetic oligonucleotide
  misc_feature 1..20: note = Target: FXN; (+) strand; PAM type: NRG; PAM sequence: AGG
  source 1..20: mol_type = other DNA
gaaacagagagaggtaccta

SEQ ID NO: 15459 - DNA, 20 bp, synthetic construct
  misc_feature 1..20: note = Description of Artificial Sequence: Synthetic oligonucleotide
  misc_feature 1..20: note = Target: FXN; (+) strand; PAM type: NRG; PAM sequence: TGG
  source 1..20: mol_type = other DNA
aggtacctaaggcacacctg

SEQ ID NO: 15460 - DNA, 20 bp, synthetic construct
  misc_feature 1..20: note = Description of Artificial Sequence: Synthetic oligonucleotide
  misc_feature 1..20: note = Target: FXN; (+) strand; PAM type: NRG; PAM sequence: GGG
  source 1..20: mol_type = other DNA
ggtacctaaggcacacctgt

SEQ ID NO: 15461 - DNA, 20 bp, synthetic construct
  misc_feature 1..20: note = Description of Artificial Sequence: Synthetic oligonucleotide
  misc_feature 1..20: note = Target: FXN; (+) strand; PAM type: NRG; PAM sequence: AAG
  source 1..20: mol_type = other DNA
gcacacctgtgggaatatga

SEQ ID NO: 15462 - DNA, 20 bp, synthetic construct
  misc_feature 1..20: note = Description of Artificial Sequence: Synthetic oligonucleotide
  misc_feature 1..20: note = Target: FXN; (+) strand; PAM type: NRG; PAM sequence: TGG
  source 1..20: mol_type = other DNA
cctgtgggaatatgaaagtt

SEQ ID NO: 15463 - DNA, 20 bp, synthetic construct
  misc_feature 1..20: note = Description of Artificial Sequence: Synthetic oligonucleotide
  misc_feature 1..20: note = Target: FXN; (+) strand; PAM type: NRG; PAM sequence: AAG
  source 1..20: mol_type = other DNA
atgaaagtttggtttcataa

SEQ ID NO: 15464 - DNA, 20 bp, synthetic construct
  misc_feature 1..20: note = Description of Artificial Sequence: Synthetic oligonucleotide
  misc_feature 1..20: note = Target: FXN; (+) strand; PAM type: NRG; PAM sequence: AGG
  source 1..20: mol_type = other DNA
tgaaagtttggtttcataaa

SEQ ID NO: 15465 - DNA, 20 bp, synthetic construct
  misc_feature 1..20: note = Description of Artificial Sequence: Synthetic oligonucleotide
  misc_feature 1..20: note = Target: FXN; (+) strand; PAM type: NRG; PAM sequence: TGG
  source 1..20: mol_type = other DNA
ttggtttcataaaaggattc

SEQ ID NO: 15466 - DNA, 20 bp, synthetic construct
  misc_feature 1..20: note = Description of Artificial Sequence: Synthetic oligonucleotide
  misc_feature 1..20: note = Target: FXN; (+) strand; PAM type: NRG; PAM sequence: GAG
  source 1..20: mol_type = other DNA
ggtttcataaaaggattctg

SEQ ID NO: 15467 - DNA, 20 bp, synthetic construct
  misc_feature 1..20: note = Description of Artificial Sequence: Synthetic oligonucleotide
  misc_feature 1..20: note = Target: FXN; (+) strand; PAM type: NRG; PAM sequence: AGG
  source 1..20: mol_type = other DNA
gtttcataaaaggattctgg

SEQ ID NO: 15468 - DNA, 20 bp, synthetic construct
  misc_feature 1..20: note = Description of Artificial Sequence: Synthetic oligonucleotide
  misc_feature 1..20: note = Target: FXN; (+) strand; PAM type: NRG; PAM sequence: AAG
  source 1..20: mol_type = other DNA
tcataaaaggattctggagg

SEQ ID NO: 15469 - DNA, 20 bp, synthetic construct
  misc_feature 1..20: note = Description of Artificial Sequence: Synthetic oligonucleotide
  misc_feature 1..20: note = Target: FXN; (+) strand; PAM type: NRG; PAM sequence: GAG
  source 1..20: mol_type = other DNA
ggaagtcacctctgacattt

SEQ ID NO: 15470 - DNA, 20 bp, synthetic construct
  misc_feature 1..20: note = Description of Artificial Sequence: Synthetic oligonucleotide
  misc_feature 1..20: note = Target: FXN; (+) strand; PAM type: NRG; PAM sequence: GAG
  source 1..20: mol_type = other DNA
tcacctctgacatttgagtt

SEQ ID NO: 15471 - DNA, 20 bp, synthetic construct
  misc_feature 1..20: note = Description of Artificial Sequence: Synthetic oligonucleotide
  misc_feature 1..20: note = Target: FXN; (+) strand; PAM type: NRG; PAM sequence: CAG
  source 1..20: mol_type = other DNA
gacatttgagttgagtccta

SEQ ID NO: 15472 - DNA, 20 bp, synthetic construct
  misc_feature 1..20: note = Description of Artificial Sequence: Synthetic oligonucleotide
  misc_feature 1..20: note = Target: FXN; (+) strand; PAM type: NRG; PAM sequence: AGG
  source 1..20: mol_type = other DNA
acatttgagttgagtcctac

SEQ ID NO: 15473 - DNA, 20 bp, synthetic construct
  misc_feature 1..20: note = Description of Artificial Sequence: Synthetic oligonucleotide
  misc_feature 1..20: note = Target: FXN; (+) strand; PAM type: NRG; PAM sequence: AAG
  source 1..20: mol_type = other DNA
gttgagtcctacaggatatg

SEQ ID NO: 15474 - DNA, 20 bp, synthetic construct
  misc_feature 1..20: note = Description of Artificial Sequence: Synthetic oligonucleotide
  misc_feature 1..20: note = Target: FXN; (+) strand; PAM type: NRG; PAM sequence: AAG
  source 1..20: mol_type = other DNA
agtcctacaggatatgaaga

SEQ ID NO: 15475 - DNA, 20 bp, synthetic construct
  misc_feature 1..20: note = Description of Artificial Sequence: Synthetic oligonucleotide
  misc_feature 1..20: note = Target: FXN; (+) strand; PAM type: NRG; PAM sequence: TAG
  source 1..20: mol_type = other DNA
cctacaggatatgaagaaag

SEQ ID NO: 15476 - DNA, 20 bp, synthetic construct
  misc_feature 1..20: note = Description of Artificial Sequence: Synthetic oligonucleotide
  misc_feature 1..20: note = Target: FXN; (+) strand; PAM type: NRG; PAM sequence: CGG
  source 1..20: mol_type = other DNA
aagaaagtagccccatgttc

SEQ ID NO: 15477 - DNA, 20 bp, synthetic construct
  misc_feature 1..20: note = Description of Artificial Sequence: Synthetic oligonucleotide
  misc_feature 1..20: note = Target: FXN; (+) strand; PAM type: NRG; PAM sequence: TGG
  source 1..20: mol_type = other DNA
gccccatgttccggttacta

SEQ ID NO: 15478 - DNA, 20 bp, synthetic construct
  misc_feature 1..20: note = Description of Artificial Sequence: Synthetic oligonucleotide
  misc_feature 1..20: note = Target: FXN; (+) strand; PAM type: NRG; PAM sequence: TGG
  source 1..20: mol_type = other DNA
ataaattacctaaaacatac

SEQ ID NO: 15479 - DNA, 20 bp, synthetic construct
  misc_feature 1..20: note = Description of Artificial Sequence: Synthetic oligonucleotide
  misc_feature 1..20: note = Target: FXN; (+) strand; PAM type: NRG; PAM sequence: AAG
  source 1..20: mol_type = other DNA
acctaaaacatactggatta

SEQ ID NO: 15480 - DNA, 20 bp, synthetic construct
  misc_feature 1..20: note = Description of Artificial Sequence: Synthetic oligonucleotide
  misc_feature 1..20: note = Target: FXN; (+) strand; PAM type: NRG; PAM sequence: CAG
  source 1..20: mol_type = other DNA
atgaaaacatcttttctgcc

SEQ ID NO: 15481 - DNA, 20 bp, synthetic construct
  misc_feature 1..20: note = Description of Artificial Sequence: Synthetic oligonucleotide
  misc_feature 1..20: note = Target: FXN; (+) strand; PAM type: NRG; PAM sequence: GAG
  source 1..20: mol_type = other DNA
gaaaacatcttttctgccca

SEQ ID NO: 15482 - DNA, 20 bp, synthetic construct
  misc_feature 1..20: note = Description of Artificial Sequence: Synthetic oligonucleotide
  misc_feature 1..20: note = Target: FXN; (+) strand; PAM type: NRG; PAM sequence: TGG
  source 1..20: mol_type = other DNA
ttttctgcccagagattctg

SEQ ID NO: 15483 - DNA, 20 bp, synthetic construct
  misc_feature 1..20: note = Description of Artificial Sequence: Synthetic oligonucleotide
  misc_feature 1..20: note = Target: FXN; (+) strand; PAM type: NRG; PAM sequence: GGG
  source 1..20: mol_type = other DNA
tttctgcccagagattctgt

SEQ ID NO: 15484 - DNA, 20 bp, synthetic construct
  misc_feature 1..20: note = Description of Artificial Sequence: Synthetic oligonucleotide
  misc_feature 1..20: note = Target: FXN; (+) strand; PAM type: NRG; PAM sequence: TGG
  source 1..20: mol_type = other DNA
ctgtgggcctgaaattcaca

SEQ ID NO: 15485 - DNA, 20 bp, synthetic construct
  misc_feature 1..20: note = Description of Artificial Sequence: Synthetic oligonucleotide
  misc_feature 1..20: note = Target: FXN; (+) strand; PAM type: NRG; PAM sequence: AAG
  source 1..20: mol_type = other DNA
gaaattcacatggaacacat

SEQ ID NO: 15486 - DNA, 20 bp, synthetic construct
  misc_feature 1..20: note = Description of Artificial Sequence: Synthetic oligonucleotide
  misc_feature 1..20: note = Target: FXN; (+) strand; PAM type: NRG; PAM sequence: AGG
  source 1..20: mol_type = other DNA
aaattcacatggaacacata

SEQ ID NO: 15487 - DNA, 20 bp, synthetic construct
  misc_feature 1..20: note = Description of Artificial Sequence: Synthetic oligonucleotide
  misc_feature 1..20: note = Target: FXN; (+) strand; PAM type: NRG; PAM sequence: AAG
  source 1..20: mol_type = other DNA
gtttctgctccatgatgtct

SEQ ID NO: 15488 - DNA, 20 bp, synthetic construct
  misc_feature 1..20: note = Description of Artificial Sequence: Synthetic oligonucleotide
  misc_feature 1..20: note = Target: FXN; (+) strand; PAM type: NRG; PAM sequence: AGG
  source 1..20: mol_type = other DNA
tttctgctccatgatgtcta

SEQ ID NO: 15489 - DNA, 20 bp, synthetic construct
  misc_feature 1..20: note = Description of Artificial Sequence: Synthetic oligonucleotide
  misc_feature 1..20: note = Target: FXN; (+) strand; PAM type: NRG; PAM sequence: CAG
  source 1..20: mol_type = other DNA
ctccatgatgtctaaggatt

SEQ ID NO: 15490 - DNA, 20 bp, synthetic construct
  misc_feature 1..20: note = Description of Artificial Sequence: Synthetic oligonucleotide
  misc_feature 1..20: note = Target: FXN; (+) strand; PAM type: NRG; PAM sequence: TGG
  source 1..20: mol_type = other DNA
atgatgtctaaggattcagc

SEQ ID NO: 15491 - DNA, 20 bp, synthetic construct
  misc_feature 1..20: note = Description of Artificial Sequence: Synthetic oligonucleotide
  misc_feature 1..20: note = Target: FXN; (+) strand; PAM type: NRG; PAM sequence: AAG
  source 1..20: mol_type = other DNA
atgtctaaggattcagctgg

SEQ ID NO: 15492 - DNA, 20 bp, synthetic construct
  misc_feature 1..20: note = Description of Artificial Sequence: Synthetic oligonucleotide
  misc_feature 1..20: note = Target: FXN; (+) strand; PAM type: NRG; PAM sequence: TGG
  source 1..20: mol_type = other DNA
taaggattcagctggaagac

SEQ ID NO: 15493 - DNA, 20 bp, synthetic construct
  misc_feature 1..20: note = Description of Artificial Sequence: Synthetic oligonucleotide
  misc_feature 1..20: note = Target: FXN; (+) strand; PAM type: NRG; PAM sequence: GGG
  source 1..20: mol_type = other DNA
aaggattcagctggaagact

SEQ ID NO: 15494 - DNA, 20 bp, synthetic construct
  misc_feature 1..20: note = Description of Artificial Sequence: Synthetic oligonucleotide
  misc_feature 1..20: note = Target: FXN; (+) strand; PAM type: NRG; PAM sequence: GAG
  source 1..20: mol_type = other DNA
ggattcagctggaagactgg

SEQ ID NO: 15495 - DNA, 20 bp, synthetic construct
  misc_feature 1..20: note = Description of Artificial Sequence: Synthetic oligonucleotide
  misc_feature 1..20: note = Target: FXN; (+) strand; PAM type: NRG; PAM sequence: AGG
  source 1..20: mol_type = other DNA
gattcagctggaagactggg

SEQ ID NO: 15496 - DNA, 20 bp, synthetic construct
  misc_feature 1..20: note = Description of Artificial Sequence: Synthetic oligonucleotide
  misc_feature 1..20: note = Target: FXN; (+) strand; PAM type: NRG; PAM sequence: TGG
  source 1..20: mol_type = other DNA
cagctggaagactgggaggc

SEQ ID NO: 15497 - DNA, 20 bp, synthetic construct
  misc_feature 1..20: note = Description of Artificial Sequence: Synthetic oligonucleotide
  misc_feature 1..20: note = Target: FXN; (+) strand; PAM type: NRG; PAM sequence: GGG
  source 1..20: mol_type = other DNA
agctggaagactgggaggct

SEQ ID NO: 15498 - DNA, 20 bp, synthetic construct
  misc_feature 1..20: note = Description of Artificial Sequence: Synthetic oligonucleotide
  misc_feature 1..20: note = Target: FXN; (+) strand; PAM type: NRG; PAM sequence: GGG
  source 1..20: mol_type = other DNA
gctggaagactgggaggctg

SEQ ID NO: 15499 - DNA, 20 bp, synthetic construct
  misc_feature 1..20: note = Description of Artificial Sequence: Synthetic oligonucleotide
  misc_feature 1..20: note = Target: FXN; (+) strand; PAM type: NRG; PAM sequence: GGG
  source 1..20: mol_type = other DNA
ctggaagactgggaggctgg

SEQ ID NO: 15500 - DNA, 20 bp, synthetic construct
  misc_feature 1..20: note = Description of Artificial Sequence: Synthetic oligonucleotide
  misc_feature 1..20: note = Target: FXN; (+) strand; PAM type: NRG; PAM sequence: TGG
  source 1..20: mol_type = other DNA
aagactgggaggctgggggc

SEQ ID NO: 15501 - DNA, 20 bp, synthetic construct
  misc_feature 1..20: note = Description of Artificial Sequence: Synthetic oligonucleotide
  misc_feature 1..20: note = Target: FXN; (+) strand; PAM type: NRG; PAM sequence: AAG
  source 1..20: mol_type = other DNA
tgggggctggaatttatctg

SEQ ID NO: 15502 - DNA, 20 bp, synthetic construct
  misc_feature 1..20: note = Description of Artificial Sequence: Synthetic oligonucleotide
  misc_feature 1..20: note = Target: FXN; (+) strand; PAM type: NRG; PAM sequence: TGG
  source 1..20: mol_type = other DNA
tgactcatttacatgtctac

SEQ ID NO: 15503 - DNA, 20 bp, synthetic construct
  misc_feature 1..20: note = Description of Artificial Sequence: Synthetic oligonucleotide
  misc_feature 1..20: note = Target: FXN; (+) strand; PAM type: NRG; PAM sequence: TGG
  source 1..20: mol_type = other DNA
acatgtctactggttgaccc

SEQ ID NO: 15504 - DNA, 20 bp, synthetic construct
  misc_feature 1..20: note = Description of Artificial Sequence: Synthetic oligonucleotide
  misc_feature 1..20: note = Target: FXN; (+) strand; PAM type: NRG; PAM sequence: TGG
  source 1..20: mol_type = other DNA
tactggttgaccctggctgt

SEQ ID NO: 15505 - DNA, 20 bp, synthetic construct
  misc_feature 1..20: note = Description of Artificial Sequence: Synthetic oligonucleotide
  misc_feature 1..20: note = Target: FXN; (+) strand; PAM type: NRG; PAM sequence: GAG
  source 1..20: mol_type = other DNA
gttgaccctggctgttggct

SEQ ID NO: 15506 - DNA, 20 bp, synthetic construct
  misc_feature 1..20: note = Description of Artificial Sequence: Synthetic oligonucleotide
  misc_feature 1..20: note = Target: FXN; (+) strand; PAM type: NRG; PAM sequence: AGG
  source 1..20: mol_type = other DNA
ttgaccctggctgttggctg

SEQ ID NO: 15507 - DNA, 20 bp, synthetic construct
  misc_feature 1..20: note = Description of Artificial Sequence: Synthetic oligonucleotide
  misc_feature 1..20: note = Target: FXN; (+) strand; PAM type: NRG; PAM sequence: GGG
  source 1..20: mol_type = other DNA
tgaccctggctgttggctga

SEQ ID NO: 15508 - DNA, 20 bp, synthetic construct
  misc_feature 1..20: note = Description of Artificial Sequence: Synthetic oligonucleotide
  misc_feature 1..20: note = Target: FXN; (+) strand; PAM type: NRG; PAM sequence: GGG
  source 1..20: mol_type = other DNA
gaccctggctgttggctgag

SEQ ID NO: 15509 - DNA, 20 bp, synthetic construct
  misc_feature 1..20: note = Description of Artificial Sequence: Synthetic oligonucleotide
  misc_feature 1..20: note = Target: FXN; (+) strand; PAM type: NRG; PAM sequence: GGG
  source 1..20: mol_type = other DNA
accctggctgttggctgagg

SEQ ID NO: 15510 - DNA, 20 bp, synthetic construct
  misc_feature 1..20: note = Description of Artificial Sequence: Synthetic oligonucleotide
  misc_feature 1..20: note = Target: FXN; (+) strand; PAM type: NRG; PAM sequence: CAG
  source 1..20: mol_type = other DNA
gctgttggctgagggggcct

SEQ ID NO: 15511 - DNA, 20 bp, synthetic construct
  misc_feature 1..20: note = Description of Artificial Sequence: Synthetic oligonucleotide
  misc_feature 1..20: note = Target: FXN; (+) strand; PAM type: NRG; PAM sequence: TGG
  source 1..20: mol_type = other DNA
tctacattgtttctctactt

SEQ ID NO: 15512 - DNA, 20 bp, synthetic construct
  misc_feature 1..20: note = Description of Artificial Sequence: Synthetic oligonucleotide
  misc_feature 1..20: note = Target: FXN; (+) strand; PAM type: NRG; PAM sequence: TAG
  source 1..20: mol_type = other DNA
cattgtttctctactttggc

SEQ ID NO: 15513 - DNA, 20 bp, synthetic construct
  misc_feature 1..20: note = Description of Artificial Sequence: Synthetic oligonucleotide
  misc_feature 1..20: note = Target: FXN; (+) strand; PAM type: NRG; PAM sequence: TGG
  source 1..20: mol_type = other DNA
tttctctactttggctagtt

SEQ ID NO: 15514 - DNA, 20 bp, synthetic construct
  misc_feature 1..20: note = Description of Artificial Sequence: Synthetic oligonucleotide
  misc_feature 1..20: note = Target: FXN; (+) strand; PAM type: NRG; PAM sequence: TGG
  source 1..20: mol_type = other DNA
tggatttcctcaaaacatga

SEQ ID NO: 15515 - DNA, 20 bp, synthetic construct
  misc_feature 1..20: note = Description of Artificial Sequence: Synthetic oligonucleotide
  misc_feature 1..20: note = Target: FXN; (+) strand; PAM type: NRG; PAM sequence: TGG
  source 1..20: mol_type = other DNA
tttcctcaaaacatgatggc

SEQ ID NO: 15516 - DNA, 20 bp, synthetic construct
  misc_feature 1..20: note = Description of Artificial Sequence: Synthetic oligonucleotide
  misc_feature 1..20: note = Target: FXN; (+) strand; PAM type: NRG; PAM sequence: CAG
  source 1..20: mol_type = other DNA
aaaacatgatggctggtcct

SEQ ID NO: 15517 - DNA, 20 bp, synthetic construct
  misc_feature 1..20: note = Description of Artificial Sequence: Synthetic oligonucleotide
  misc_feature 1..20: note = Target: FXN; (+) strand; PAM type: NRG; PAM sequence: CAG
  source 1..20: mol_type = other DNA
tgatggctggtcctcagtgt

SEQ ID NO: 15518 - DNA, 20 bp, synthetic construct
  misc_feature 1..20: note = Description of Artificial Sequence: Synthetic oligonucleotide
  misc_feature 1..20: note = Target: FXN; (+) strand; PAM type: NRG; PAM sequence: AAG
  source 1..20: mol_type = other DNA
ctcagtgtcagcatcccaaa

SEQ ID NO: 15519 - DNA, 20 bp, synthetic construct
  misc_feature 1..20: note = Description of Artificial Sequence: Synthetic oligonucleotide
  misc_feature 1..20: note = Target: FXN; (+) strand; PAM type: NRG; PAM sequence: GAG
  source 1..20: mol_type = other DNA
cagtgtcagcatcccaaaaa

SEQ ID NO: 15520 - DNA, 20 bp, synthetic construct
  misc_feature 1..20: note = Description of Artificial Sequence: Synthetic oligonucleotide
  misc_feature 1..20: note = Target: FXN; (+) strand; PAM type: NRG; PAM sequence: CGG
  source 1..20: mol_type = other DNA
gcatcccaaaaagagaatgc

SEQ ID NO: 15521 - DNA, 20 bp, synthetic construct
  misc_feature 1..20: note = Description of Artificial Sequence: Synthetic oligonucleotide
  misc_feature 1..20: note = Target: FXN; (+) strand; PAM type: NRG; PAM sequence: CAG
  source 1..20: mol_type = other DNA
caaaaagagaatgccggaca

SEQ ID NO: 15522 - DNA, 20 bp, synthetic construct
  misc_feature 1..20: note = Description of Artificial Sequence: Synthetic oligonucleotide
  misc_feature 1..20: note = Target: FXN; (+) strand; PAM type: NRG; PAM sequence: TGG
  source 1..20: mol_type = other DNA
aaagagaatgccggacacag

SEQ ID NO: 15523 - DNA, 20 bp, synthetic construct
  misc_feature 1..20: note = Description of Artificial Sequence: Synthetic oligonucleotide
  misc_feature 1..20: note = Target: FXN; (+) strand; PAM type: NRG; PAM sequence: CAG
  source 1..20: mol_type = other DNA
gtggctcacacctgtaacct

SEQ ID NO: 15524 - DNA, 20 bp, synthetic construct
  misc_feature 1..20: note = Description of Artificial Sequence: Synthetic oligonucleotide
  misc_feature 1..20: note = Target: FXN; (+) strand; PAM type: NRG; PAM sequence: TGG
  source 1..20: mol_type = other DNA
cacctgtaacctcagcaatt

SEQ ID NO: 15525 - DNA, 20 bp, synthetic construct
  misc_feature 1..20: note = Description of Artificial Sequence: Synthetic oligonucleotide
  misc_feature 1..20: note = Target: FXN; (+) strand; PAM type: NRG; PAM sequence: GGG
  source 1..20: mol_type = other DNA
acctgtaacctcagcaattt

SEQ ID NO: 15526 - DNA, 20 bp, synthetic construct
  misc_feature 1..20: note = Description of Artificial Sequence: Synthetic oligonucleotide
  misc_feature 1..20: note = Target: FXN; (+) strand; PAM type: NRG; PAM sequence: GAG
  source 1..20: mol_type = other DNA
ctgtaacctcagcaatttgg

SEQ ID NO: 15527 - DNA, 20 bp, synthetic construct
  misc_feature 1..20: note = Description of Artificial Sequence: Synthetic oligonucleotide
  misc_feature 1..20: note = Target: FXN; (+) strand; PAM type: NRG; PAM sequence: AGG
  source 1..20: mol_type = other DNA
tgtaacctcagcaatttggg

SEQ ID NO: 15528 - DNA, 20 bp, synthetic construct
  misc_feature 1..20: note = Description of Artificial Sequence: Synthetic oligonucleotide
  misc_feature 1..20: note = Target: FXN; (+) strand; PAM type: NRG; PAM sequence: GAG
  source 1..20: mol_type = other DNA
cctcagcaatttgggaggct

SEQ ID NO: 15529 - DNA, 20 bp, synthetic construct
  misc_feature 1..20: note = Description of Artificial Sequence: Synthetic oligonucleotide
  misc_feature 1..20: note = Target: FXN; (+) strand; PAM type: NRG; PAM sequence: AGG
  source 1..20: mol_type = other DNA
ctcagcaatttgggaggctg

SEQ ID NO: 15530 - DNA, 20 bp, synthetic construct
  misc_feature 1..20: note = Description of Artificial Sequence: Synthetic oligonucleotide
  misc_feature 1..20: note = Target: FXN; (+) strand; PAM type: NRG; PAM sequence: TGG
  source 1..20: mol_type = other DNA
agcaatttgggaggctgagg

SEQ ID NO: 15531 - DNA, 20 bp, synthetic construct
  misc_feature 1..20: note = Description of Artificial Sequence: Synthetic oligonucleotide
  misc_feature 1..20: note = Target: FXN; (+) strand; PAM type: NRG; PAM sequence: GGG
  source 1..20: mol_type = other DNA
gcaatttgggaggctgaggt

SEQ ID NO: 15532 - DNA, 20 bp, synthetic construct
  misc_feature 1..20: note = Description of Artificial Sequence: Synthetic oligonucleotide
  misc_feature 1..20: note = Target: FXN; (+) strand; PAM type: NRG; PAM sequence: GAG
  source 1..20: mol_type = other DNA
aatttgggaggctgaggtgg

SEQ ID NO: 15533 - DNA, 20 bp, synthetic construct
  misc_feature 1..20: note = Description of Artificial Sequence: Synthetic oligonucleotide
  misc_feature 1..20: note = Target: FXN; (+) strand; PAM type: NRG; PAM sequence: AGG
  source 1..20: mol_type = other DNA
atttgggaggctgaggtggg

SEQ ID NO: 15534 - DNA, 20 bp, synthetic construct
  misc_feature 1..20: note = Description of Artificial Sequence: Synthetic oligonucleotide
  misc_feature 1..20: note = Target: FXN; (+) strand; PAM type: NRG; PAM sequence: GAG
  source 1..20: mol_type = other DNA
gctgaggtgggaggttgctt

SEQ ID NO: 15535 - DNA, 20 bp, synthetic construct
  misc_feature 1..20: note = Description of Artificial Sequence: Synthetic oligonucleotide
  misc_feature 1..20: note = Target: FXN; (+) strand; PAM type: NRG; PAM sequence: CAG
  source 1..20: mol_type = other DNA
ggtgggaggttgcttgagtt

SEQ ID NO: 15536 - DNA, 20 bp, synthetic construct
  misc_feature 1..20: note = Description of Artificial Sequence: Synthetic oligonucleotide
  misc_feature 1..20: note = Target: FXN; (+) strand; PAM type: NRG; PAM sequence: AGG
  source 1..20: mol_type = other DNA
gtgggaggttgcttgagttc

SEQ ID NO: 15537 - DNA, 20 bp, synthetic construct
  misc_feature 1..20: note = Description of Artificial Sequence: Synthetic oligonucleotide
  misc_feature 1..20: note = Target: FXN; (+) strand; PAM type: NRG; PAM sequence: GAG
  source 1..20: mol_type = other DNA
gggaggttgcttgagttcag

SEQ ID NO: 15538 - DNA, 20 bp, synthetic construct
  misc_feature 1..20: note = Description of Artificial Sequence: Synthetic oligonucleotide
  misc_feature 1..20: note = Target: FXN; (+) strand; PAM type: NRG; PAM sequence: AAG
  source 1..20: mol_type = other DNA
ttgcttgagttcaggagttc

SEQ ID NO: 15539 - DNA, 20 bp, synthetic construct
  misc_feature 1..20: note = Description of Artificial Sequence: Synthetic oligonucleotide
  misc_feature 1..20: note = Target: FXN; (+) strand; PAM type: NRG; PAM sequence: CAG
  source 1..20: mol_type = other DNA
tgagttcaggagttcaagac

SEQ ID NO: 15540 - DNA, 20 bp, synthetic construct
  misc_feature 1..20: note = Description of Artificial Sequence: Synthetic oligonucleotide
  misc_feature 1..20: note = Target: FXN; (+) strand; PAM type: NRG; PAM sequence: TGG
  source 1..20: mol_type = other DNA
tcaggagttcaagaccagcc

SEQ ID NO: 15541 - DNA, 20 bp, synthetic construct
  misc_feature 1..20: note = Description of Artificial Sequence: Synthetic oligonucleotide
  misc_feature 1..20: note = Target: FXN; (+) strand; PAM type: NRG; PAM sequence: GGG
  source 1..20: mol_type = other DNA
caggagttcaagaccagcct

SEQ ID NO: 15542 - DNA, 20 bp, synthetic construct
  misc_feature 1..20: note = Description of Artificial Sequence: Synthetic oligonucleotide
  misc_feature 1..20: note = Target: FXN; (+) strand; PAM type: NRG; PAM sequence: TAG
  source 1..20: mol_type = other DNA
caagaccagcctgggcaaca

SEQ ID NO: 15543 - DNA, 20 bp, synthetic construct
  misc_feature 1..20: note = Description of Artificial Sequence: Synthetic oligonucleotide
  misc_feature 1..20: note = Target: FXN; (+) strand; PAM type: NRG; PAM sequence: GAG
  source 1..20: mol_type = other DNA
accagcctgggcaacatagt

SEQ ID NO: 15544 - DNA, 20 bp, synthetic construct
  misc_feature 1..20: note = Description of Artificial Sequence: Synthetic oligonucleotide
  misc_feature 1..20: note = Target: FXN; (+) strand; PAM type: NRG; PAM sequence: CAG
  source 1..20: mol_type = other DNA
atttttaaaattttaaaaat

SEQ ID NO: 15545 - DNA, 20 bp, synthetic construct
  misc_feature 1..20: note = Description of Artificial Sequence: Synthetic oligonucleotide
  misc_feature 1..20: note = Target: FXN; (+) strand; PAM type: NRG; PAM sequence: CAG
  source 1..20: mol_type = other DNA
ttaaaattttaaaaatcagc

SEQ ID NO: 15546 - DNA, 20 bp, synthetic construct
  misc_feature 1..20: note = Description of Artificial Sequence: Synthetic oligonucleotide
  misc_feature 1..20: note = Target: FXN; (+) strand; PAM type: NRG; PAM sequence: AGG
  source 1..20: mol_type = other DNA
taaaattttaaaaatcagcc

SEQ ID NO: 15547 - DNA, 20 bp, synthetic construct
  misc_feature 1..20: note = Description of Artificial Sequence: Synthetic oligonucleotide
  misc_feature 1..20: note = Target: FXN; (+) strand; PAM type: NRG; PAM sequence: TGG
  source 1..20: mol_type = other DNA
ttttaaaaatcagccaggtg

SEQ ID NO: 15548 - DNA, 20 bp, synthetic construct
  misc_feature 1..20: note = Description of Artificial Sequence: Synthetic oligonucleotide
  misc_feature 1..20: note = Target: FXN; (+) strand; PAM type: NRG; PAM sequence: TAG
  source 1..20: mol_type = other DNA
ggtgtggttatgcacaccta

SEQ ID NO: 15549 - DNA, 20 bp, synthetic construct
  misc_feature 1..20: note = Description of Artificial Sequence: Synthetic oligonucleotide
  misc_feature 1..20: note = Target: FXN; (+) strand; PAM type: NRG; PAM sequence: CAG
  source 1..20: mol_type = other DNA
gttatgcacacctatagtcc

SEQ ID NO: 15550 - DNA, 20 bp, synthetic construct
  misc_feature 1..20: note = Description of Artificial Sequence: Synthetic oligonucleotide
  misc_feature 1..20: note = Target: FXN; (+) strand; PAM type: NRG; PAM sequence: TAG
  source 1..20: mol_type = other DNA
cacctatagtcccagttact

SEQ ID NO: 15551 - DNA, 20 bp, synthetic construct
  misc_feature 1..20: note = Description of Artificial Sequence: Synthetic oligonucleotide
  misc_feature 1..20: note = Target: FXN; (+) strand; PAM type: NRG; PAM sequence: AGG
  source 1..20: mol_type = other DNA
acctatagtcccagttactt

SEQ ID NO: 15552 - DNA, 20 bp, synthetic construct
  misc_feature 1..20: note = Description of Artificial Sequence: Synthetic oligonucleotide
  misc_feature 1..20: note = Target: FXN; (+) strand; PAM type: NRG; PAM sequence: GAG
  source 1..20: mol_type = other DNA
ctatagtcccagttacttag

SEQ ID NO: 15553 - DNA, 20 bp, synthetic construct
  misc_feature 1..20: note = Description of Artificial Sequence: Synthetic oligonucleotide
  misc_feature 1..20: note = Target: FXN; (+) strand; PAM type: NRG; PAM sequence: AGG
  source 1..20: mol_type = other DNA
tatagtcccagttacttagg

SEQ ID NO: 15554 - DNA, 20 bp, synthetic construct
  misc_feature 1..20: note = Description of Artificial Sequence: Synthetic oligonucleotide
  misc_feature 1..20: note = Target: FXN; (+) strand; PAM type: NRG; PAM sequence: GAG
  source 1..20: mol_type = other DNA
tcccagttacttaggaggct

SEQ ID NO: 15555 - DNA, 20 bp, synthetic construct
  misc_feature 1..20: note = Description of Artificial Sequence: Synthetic oligonucleotide
  misc_feature 1..20: note = Target: FXN; (+) strand; PAM type: NRG; PAM sequence: AGG
  source 1..20: mol_type = other DNA
cccagttacttaggaggctg

SEQ ID NO: 15556 - DNA, 20 bp, synthetic construct
  misc_feature 1..20: note = Description of Artificial Sequence: Synthetic oligonucleotide
  misc_feature 1..20: note = Target: FXN; (+) strand; PAM type: NRG; PAM sequence: CAG
  source 1..20: mol_type = other DNA
agttacttaggaggctgagg

SEQ ID NO: 15557 - DNA, 20 bp, synthetic construct
  misc_feature 1..20: note = Description of Artificial Sequence: Synthetic oligonucleotide
  misc_feature 1..20: note = Target: FXN; (+) strand; PAM type: NRG; PAM sequence: AGG
  source 1..20: mol_type = other DNA
gttacttaggaggctgaggc

SEQ ID NO: 15558 - DNA, 20 bp, synthetic construct
  misc_feature 1..20: note = Description of Artificial Sequence: Synthetic oligonucleotide
  misc_feature 1..20: note = Target: FXN; (+) strand; PAM type: NRG; PAM sequence: GAG
  source 1..20: mol_type = other DNA
tacttaggaggctgaggcag

SEQ ID NO: 15559 - DNA, 20 bp, synthetic construct
  misc_feature 1..20: note = Description of Artificial Sequence: Synthetic oligonucleotide
  misc_feature 1..20: note = Target: FXN; (+) strand; PAM type: NRG; PAM sequence: AGG
  source 1..20: mol_type = other DNA
acttaggaggctgaggcagg

SEQ ID NO: 15560 - DNA, 20 bp, synthetic construct
  misc_feature 1..20: note = Description of Artificial Sequence: Synthetic oligonucleotide
  misc_feature 1..20: note = Target: FXN; (+) strand; PAM type: NRG; PAM sequence: CAG
  source 1..20: mol_type = other DNA
gcaggaggatcacttgattc

SEQ ID NO: 15561 - DNA, 20 bp, synthetic construct
  misc_feature 1..20: note = Description of Artificial Sequence: Synthetic oligonucleotide
  misc_feature 1..20: note = Target: FXN; (+) strand; PAM type: NRG; PAM sequence: AGG
  source 1..20: mol_type = other DNA
caggaggatcacttgattcc

SEQ ID NO: 15562 - DNA, 20 bp, synthetic construct
  misc_feature 1..20: note = Description of Artificial Sequence: Synthetic oligonucleotide
  misc_feature 1..20: note = Target: FXN; (+) strand; PAM type: NRG; PAM sequence: GAG
  source 1..20: mol_type = other DNA
ggaggatcacttgattccag

SEQ ID NO: 15563 - DNA, 20 bp, synthetic construct
  misc_feature 1..20: note = Description of Artificial Sequence: Synthetic oligonucleotide
  misc_feature 1..20: note = Target: FXN; (+) strand; PAM type: NRG; PAM sequence: AGG
  source 1..20: mol_type = other DNA
gaggatcacttgattccagg

SEQ ID NO: 15564 - DNA, 20 bp, synthetic construct
  misc_feature 1..20: note = Description of Artificial Sequence: Synthetic oligonucleotide
  misc_feature 1..20: note = Target: FXN; (+) strand; PAM type: NRG; PAM sequence: AAG
  source 1..20: mol_type = other DNA
tcacttgattccaggaggtc

SEQ ID NO: 15565 - DNA, 20 bp, synthetic construct
  misc_feature 1..20: note = Description of Artificial Sequence: Synthetic oligonucleotide
  misc_feature 1..20: note = Target: FXN; (+) strand; PAM type: NRG; PAM sequence: AGG
  source 1..20: mol_type = other DNA
cacttgattccaggaggtca

SEQ ID NO: 15566 - DNA, 20 bp, synthetic construct
  misc_feature 1..20: note = Description of Artificial Sequence: Synthetic oligonucleotide
  misc_feature 1..20: note = Target: FXN; (+) strand; PAM type: NRG; PAM sequence: GAG
  source 1..20: mol_type = other DNA
caggaggtcaaggctgctgt

SEQ ID NO: 15567 - DNA, 20 bp, synthetic construct
  misc_feature 1..20: note = Description of Artificial Sequence: Synthetic oligonucleotide
  misc_feature 1..20: note = Target: FXN; (+) strand; PAM type: NRG; PAM sequence: CAG
  source 1..20: mol_type = other DNA
atgaccacaccactgcattt

SEQ ID NO: 15568 - DNA, 20 bp, synthetic construct
  misc_feature 1..20: note = Description of Artificial Sequence: Synthetic oligonucleotide
  misc_feature 1..20: note = Target: FXN; (+) strand; PAM type: NRG; PAM sequence: TGG
  source 1..20: mol_type = other DNA
cacaccactgcatttcagcc

SEQ ID NO: 15569 - DNA, 20 bp, synthetic construct
  misc_feature 1..20: note = Description of Artificial Sequence: Synthetic oligonucleotide
  misc_feature 1..20: note = Target: FXN; (+) strand; PAM type: NRG; PAM sequence: GGG
  source 1..20: mol_type = other DNA
acaccactgcatttcagcct

SEQ ID NO: 15570 - DNA, 20 bp, synthetic construct
  misc_feature 1..20: note = Description of Artificial Sequence: Synthetic oligonucleotide
  misc_feature 1..20: note = Target: FXN; (+) strand; PAM type: NRG; PAM sequence: CAG
  source 1..20: mol_type = other DNA
ctgcatttcagcctgggtaa

SEQ ID NO: 15571 - DNA, 20 bp, synthetic construct
  misc_feature 1..20: note = Description of Artificial Sequence: Synthetic oligonucleotide
  misc_feature 1..20: note = Target: FXN; (+) strand; PAM type: NRG; PAM sequence: GAG
  source 1..20: mol_type = other DNA
ttcagcctgggtaacagaat

SEQ ID NO: 15572 - DNA, 20 bp, synthetic construct
  misc_feature 1..20: note = Description of Artificial Sequence: Synthetic oligonucleotide
  misc_feature 1..20: note = Target: FXN; (+) strand; PAM type: NRG; PAM sequence: AAG
  source 1..20: mol_type = other DNA
aaaaacccaaaaaaaaaaaa

SEQ ID NO: 15573 - DNA, 20 bp, synthetic construct
  misc_feature 1..20: note = Description of Artificial Sequence: Synthetic oligonucleotide
  misc_feature 1..20: note = Target: FXN; (+) strand; PAM type: NRG; PAM sequence: GAG
  source 1..20: mol_type = other DNA
aaacccaaaaaaaaaaaaaa

SEQ ID NO: 15574 - DNA, 20 bp, synthetic construct
  misc_feature 1..20: note = Description of Artificial Sequence: Synthetic oligonucleotide
  misc_feature 1..20: note = Target: FXN; (+) strand; PAM type: NRG; PAM sequence: GAG
  source 1..20: mol_type = other DNA
acccaaaaaaaaaaaaaaga

SEQ ID NO: 15575 - DNA, 20 bp, synthetic construct
  misc_feature 1..20: note = Description of Artificial Sequence: Synthetic oligonucleotide
  misc_feature 1..20: note = Target: FXN; (+) strand; PAM type: NRG; PAM sequence: GAG
  source 1..20: mol_type = other DNA
ccaaaaaaaaaaaaaagaga

SEQ ID NO: 15576 - DNA, 20 bp, synthetic construct
  misc_feature 1..20: note = Description of Artificial Sequence: Synthetic oligonucleotide
  misc_feature 1..20: note = Target: FXN; (+) strand; PAM type: NRG; PAM sequence: GAG
  source 1..20: mol_type = other DNA
aaaaaaaaaaaaaagagaga

SEQ ID NO: 15577 - DNA, 20 bp, synthetic construct
  misc_feature 1..20: note = Description of Artificial Sequence: Synthetic oligonucleotide
  misc_feature 1..20: note = Target: FXN; (+) strand; PAM type: NRG; PAM sequence: GAG
  source 1..20: mol_type = other DNA
aaaaaaaaaaaagagagaga

SEQ ID NO: 15578 - DNA, 20 bp, synthetic construct
  misc_feature 1..20: note = Description of Artificial Sequence: Synthetic oligonucleotide
  misc_feature 1..20: note = Target: FXN; (+) strand; PAM type: NRG; PAM sequence: AGG
  source 1..20: mol_type = other DNA
aaaaaaaaaaagagagagag

SEQ ID NO: 15579 - DNA, 20 bp, synthetic construct
  misc_feature 1..20: note = Description of Artificial Sequence: Synthetic oligonucleotide
  misc_feature 1..20: note = Target: FXN; (+) strand; PAM type: NRG; PAM sequence: GGG
  source 1..20: mol_type = other DNA
aaaaaaaaaagagagagaga

SEQ ID NO: 15580 - DNA, 20 bp, synthetic construct
  misc_feature 1..20: note = Description of Artificial Sequence: Synthetic oligonucleotide
  misc_feature 1..20: note = Target: FXN; (+) strand; PAM type: NRG; PAM sequence: GAG
  source 1..20: mol_type = other DNA
aaaaaaaagagagagagagg

SEQ ID NO: 15581 - DNA, 20 bp, synthetic construct
  misc_feature 1..20: note = Description of Artificial Sequence: Synthetic oligonucleotide
  misc_feature 1..20: note = Target: FXN; (+) strand; PAM type: NRG; PAM sequence: TAG
  source 1..20: mol_type = other DNA
aaaagagagagagagggagt

SEQ ID NO: 15582 - DNA, 20 bp, synthetic construct
  misc_feature 1..20: note = Description of Artificial Sequence: Synthetic oligonucleotide
  misc_feature 1..20: note = Target: FXN; (+) strand; PAM type: NRG; PAM sequence: AAG
  source 1..20: mol_type = other DNA
agagagagagagggagttag

SEQ ID NO: 15583 - DNA, 20 bp, synthetic construct
  misc_feature 1..20: note = Description of Artificial Sequence: Synthetic oligonucleotide
  misc_feature 1..20: note = Target: FXN; (+) strand; PAM type: NRG; PAM sequence: AGG
  source 1..20: mol_type = other DNA
gagagagagagggagttaga

SEQ ID NO: 15584 - DNA, 20 bp, synthetic construct
  misc_feature 1..20: note = Description of Artificial Sequence: Synthetic oligonucleotide
  misc_feature 1..20: note = Target: FXN; (+) strand; PAM type: NRG; PAM sequence: AAG
  source 1..20: mol_type = other DNA
agagagagggagttagaagg

SEQ ID NO: 15585 - DNA, 20 bp, synthetic construct
  misc_feature 1..20: note = Description of Artificial Sequence: Synthetic oligonucleotide
  misc_feature 1..20: note = Target: FXN; (+) strand; PAM type: NRG; PAM sequence: TGG
  source 1..20: mol_type = other DNA
gatgcatcatttttatgacc

SEQ ID NO: 15586 - DNA, 20 bp, synthetic construct
  misc_feature 1..20: note = Description of Artificial Sequence: Synthetic oligonucleotide
  misc_feature 1..20: note = Target: FXN; (+) strand; PAM type: NRG; PAM sequence: TGG
  source 1..20: mol_type = other DNA
tcatttttatgacctggact

SEQ ID NO: 15587 - DNA, 20 bp, synthetic construct
  misc_feature 1..20: note = Description of Artificial Sequence: Synthetic oligonucleotide
  misc_feature 1..20: note = Target: FXN; (+) strand; PAM type: NRG; PAM sequence: AAG
  source 1..20: mol_type = other DNA
tttttatgacctggacttgg

SEQ ID NO: 15588 - DNA, 20 bp, synthetic construct
  misc_feature 1..20: note = Description of Artificial Sequence: Synthetic oligonucleotide
  misc_feature 1..20: note = Target: FXN; (+) strand; PAM type: NRG; PAM sequence: AAG
  source 1..20: mol_type = other DNA
acctggacttggaagtcacc

SEQ ID NO: 15589 - DNA, 20 bp, synthetic construct
  misc_feature 1..20: note = Description of Artificial Sequence: Synthetic oligonucleotide
  misc_feature 1..20: note = Target: FXN; (+) strand; PAM type: NRG; PAM sequence: CAG
  source 1..20: mol_type = other DNA
tggacttggaagtcaccaag

SEQ ID NO: 15590 - DNA, 20 bp, synthetic construct
  misc_feature 1..20: note = Description of Artificial Sequence: Synthetic oligonucleotide
  misc_feature 1..20: note = Target: FXN; (+) strand; PAM type: NRG; PAM sequence: CAG
  source 1..20: mol_type = other DNA
gtcaccaagcagcacttctg

SEQ ID NO: 15591 - DNA, 20 bp, synthetic construct
  misc_feature 1..20: note = Description of Artificial Sequence: Synthetic oligonucleotide
  misc_feature 1..20: note = Target: FXN; (+) strand; PAM type: NRG; PAM sequence: TGG
  source 1..20: mol_type = other DNA
gcacttctgcagtaccctgt

SEQ ID NO: 15592 - DNA, 20 bp, synthetic construct
  misc_feature 1..20: note = Description of Artificial Sequence: Synthetic oligonucleotide
  misc_feature 1..20: note = Target: FXN; (+) strand; PAM type: NRG; PAM sequence: TGG
  source 1..20: mol_type = other DNA
ttctgcagtaccctgttggt

SEQ ID NO: 15593 - DNA, 20 bp, synthetic construct
  misc_feature 1..20: note = Description of Artificial Sequence: Synthetic oligonucleotide
  misc_feature 1..20: note = Target: FXN; (+) strand; PAM type: NRG; PAM sequence: TAG
  source 1..20: mol_type = other DNA
cagtaccctgttggttggaa

SEQ ID NO: 15594 - DNA, 20 bp, synthetic construct
  misc_feature 1..20: note = Description of Artificial Sequence: Synthetic oligonucleotide
  misc_feature 1..20: note = Target: FXN; (+) strand; PAM type: NRG; PAM sequence: TAG
  source 1..20: mol_type = other DNA
cctgttggttggaatagttg

SEQ ID NO: 15595 - DNA, 20 bp, synthetic construct
  misc_feature 1..20: note = Description of Artificial Sequence: Synthetic oligonucleotide
  misc_feature 1..20: note = Target: FXN; (+) strand; PAM type: NRG; PAM sequence: AAG
  source 1..20: mol_type = other DNA
gtagcccaaacccgaattcg

SEQ ID NO: 15596 - DNA, 20 bp, synthetic construct
  misc_feature 1..20: note = Description of Artificial Sequence: Synthetic oligonucleotide
  misc_feature 1..20: note = Target: FXN; (+) strand; PAM type: NRG; PAM sequence: AGG
  source 1..20: mol_type = other DNA
tagcccaaacccgaattcga

SEQ ID NO: 15597 - DNA, 20 bp, synthetic construct
  misc_feature 1..20: note = Description of Artificial Sequence: Synthetic oligonucleotide
  misc_feature 1..20: note = Target: FXN; (+) strand; PAM type: NRG; PAM sequence: GGG
  source 1..20: mol_type = other DNA
agcccaaacccgaattcgaa

SEQ ID NO: 15598 - DNA, 20 bp, synthetic construct
  misc_feature 1..20: note = Description of Artificial Sequence: Synthetic oligonucleotide
  misc_feature 1..20: note = Target: FXN; (+) strand; PAM type: NRG; PAM sequence: GAG
  source 1..20: mol_type = other DNA
cccaaacccgaattcgaagg

SEQ ID NO: 15599 - DNA, 20 bp, synthetic construct
  misc_feature 1..20: note = Description of Artificial Sequence: Synthetic oligonucleotide
  misc_feature 1..20: note = Target: FXN; (+) strand; PAM type: NRG; PAM sequence: AGG
  source 1..20: mol_type = other DNA
ccaaacccgaattcgaaggg

SEQ ID NO: 15600 - DNA, 20 bp, synthetic construct
  misc_feature 1..20: note = Description of Artificial Sequence: Synthetic oligonucleotide
  misc_feature 1..20: note = Target: FXN; (+) strand; PAM type: NRG; PAM sequence: GAG
  source 1..20: mol_type = other DNA
aaacccgaattcgaagggag

SEQ ID NO: 15601 - DNA, 20 bp, synthetic construct
  misc_feature 1..20: note = Description of Artificial Sequence: Synthetic oligonucleotide
  misc_feature 1..20: note = Target: FXN; (+) strand; PAM type: NRG; PAM sequence: TAG
  source 1..20: mol_type = other DNA
cgaattcgaagggaggagaa

SEQ ID NO: 15602 - DNA, 20 bp, synthetic construct
  misc_feature 1..20: note = Description of Artificial Sequence: Synthetic oligonucleotide
  misc_feature 1..20: note = Target: FXN; (+) strand; PAM type: NRG; PAM sequence: TGG
  source 1..20: mol_type = other DNA
aggagaatagataacatccc

SEQ ID NO: 15603 - DNA, 20 bp, synthetic construct
  misc_feature 1..20: note = Description of Artificial Sequence: Synthetic oligonucleotide
  misc_feature 1..20: note = Target: FXN; (+) strand; PAM type: NRG; PAM sequence: GGG
  source 1..20: mol_type = other DNA
ggagaatagataacatccct

SEQ ID NO: 15604 - DNA, 20 bp, synthetic construct
  misc_feature 1..20: note = Description of Artificial Sequence: Synthetic oligonucleotide
  misc_feature 1..20: note = Target: FXN; (+) strand; PAM type: NRG; PAM sequence: CAG
  source 1..20: mol_type = other DNA
tagataacatccctgggtga

SEQ ID NO: 15605 - DNA, 20 bp, synthetic construct
  misc_feature 1..20: note = Description of Artificial Sequence: Synthetic oligonucleotide
  misc_feature 1..20: note = Target: FXN; (+) strand; PAM type: NRG; PAM sequence: AGG
  source 1..20: mol_type = other DNA
agataacatccctgggtgac

SEQ ID NO: 15606 - DNA, 20 bp, synthetic construct
  misc_feature 1..20: note = Description of Artificial Sequence: Synthetic oligonucleotide
  misc_feature 1..20: note = Target: FXN; (+) strand; PAM type: NRG; PAM sequence: AAG
  source 1..20: mol_type = other DNA
cctgggtgacaggaatgtca

SEQ ID NO: 15607 - DNA, 20 bp, synthetic construct
  misc_feature 1..20: note = Description of Artificial Sequence: Synthetic oligonucleotide
  misc_feature 1..20: note = Target: FXN; (+) strand; PAM type: NRG; PAM sequence: CAG
  source 1..20: mol_type = other DNA
aggaatgtcaaagtcccaaa

SEQ ID NO: 15608 - DNA, 20 bp, synthetic construct
  misc_feature 1..20: note = Description of Artificial Sequence: Synthetic oligonucleotide
  misc_feature 1..20: note = Target: FXN; (+) strand; PAM type: NRG; PAM sequence: TGG
  source 1..20: mol_type = other DNA
atatgacatgtgacaaatat

SEQ ID NO: 15609 - DNA, 20 bp, synthetic construct
  misc_feature 1..20: note = Description of Artificial Sequence: Synthetic oligonucleotide
  misc_feature 1..20: note = Target: FXN; (+) strand; PAM type: NRG; PAM sequence: TGG
  source 1..20: mol_type = other DNA
acatgtgacaaatattggtg

SEQ ID NO: 15610 - DNA, 20 bp, synthetic construct
  misc_feature 1..20: note = Description of Artificial Sequence: Synthetic oligonucleotide
  misc_feature 1..20: note = Target: FXN; (+) strand; PAM type: NRG; PAM sequence: TGG
  source 1..20: mol_type = other DNA
aatattggtgtggccttctt

SEQ ID NO: 15611 - DNA, 20 bp, synthetic construct
  misc_feature 1..20: note = Description of Artificial Sequence: Synthetic oligonucleotide
  misc_feature 1..20: note = Target: FXN; (+) strand; PAM type: NRG; PAM sequence: AAG
  source 1..20: mol_type = other DNA
attggtgtggccttctttgg

SEQ ID NO: 15612 - DNA, 20 bp, synthetic construct
  misc_feature 1..20: note = Description of Artificial Sequence: Synthetic oligonucleotide
  misc_feature 1..20: note = Target: FXN; (+) strand; PAM type: NRG; PAM sequence: CAG
  source 1..20: mol_type = other DNA
gaagatccaatcttccatac

SEQ ID NO: 15613 - DNA, 20 bp, synthetic construct
  misc_feature 1..20: note = Description of Artificial Sequence: Synthetic oligonucleotide
  misc_feature 1..20: note = Target: FXN; (+) strand; PAM type: NRG; PAM sequence: AGG
  source 1..20: mol_type = other DNA
aagatccaatcttccatacc

SEQ ID NO: 15614 - DNA, 20 bp, synthetic construct
  misc_feature 1..20: note = Description of Artificial Sequence: Synthetic oligonucleotide
  misc_feature 1..20: note = Target: FXN; (+) strand; PAM type: NRG; PAM sequence: AAG
  source 1..20: mol_type = other DNA
ccaatcttccataccaggca

SEQ ID NO: 15615 - DNA, 20 bp, synthetic construct
  misc_feature 1..20: note = Description of Artificial Sequence: Synthetic oligonucleotide
  misc_feature 1..20: note = Target: FXN; (+) strand; PAM type: NRG; PAM sequence: AGG
  source 1..20: mol_type = other DNA
caatcttccataccaggcaa

SEQ ID NO: 15616 - DNA, 20 bp, synthetic construct
  misc_feature 1..20: note = Description of Artificial Sequence: Synthetic oligonucleotide
  misc_feature 1..20: note = Target: FXN; (+) strand; PAM type: NRG; PAM sequence: GGG
  source 1..20: mol_type = other DNA
aatcttccataccaggcaaa

SEQ ID NO: 15617 - DNA, 20 bp, synthetic construct
  misc_feature 1..20: note = Description of Artificial Sequence: Synthetic oligonucleotide
  misc_feature 1..20: note = Target: FXN; (+) strand; PAM type: NRG; PAM sequence: TGG
  source 1..20: mol_type = other DNA
ttccataccaggcaaaggga

SEQ ID NO: 15618 - DNA, 20 bp, synthetic construct
  misc_feature 1..20: note = Description of Artificial Sequence: Synthetic oligonucleotide
  misc_feature 1..20: note = Target: FXN; (+) strand; PAM type: NRG; PAM sequence: AAG
  source 1..20: mol_type = other DNA
cataccaggcaaagggatgg

SEQ ID NO: 15619 - DNA, 20 bp, synthetic construct
  misc_feature 1..20: note = Description of Artificial Sequence: Synthetic oligonucleotide
  misc_feature 1..20: note = Target: FXN; (+) strand; PAM type: NRG; PAM sequence: AAG
  source 1..20: mol_type = other DNA
aggcaaagggatggaagact

SEQ ID NO: 15620 - DNA, 20 bp, synthetic construct
  misc_feature 1..20: note = Description of Artificial Sequence: Synthetic oligonucleotide
  misc_feature 1..20: note = Target: FXN; (+) strand; PAM type: NRG; PAM sequence: AGG
  source 1..20: mol_type = other DNA
ggcaaagggatggaagacta

SEQ ID NO: 15621 - DNA, 20 bp, synthetic construct
  misc_feature 1..20: note = Description of Artificial Sequence: Synthetic oligonucleotide
  misc_feature 1..20: note = Target: FXN; (+) strand; PAM type: NRG; PAM sequence: GAG
  source 1..20: mol_type = other DNA
ggaagactaaggaacaacat

SEQ ID NO: 15622 - DNA, 20 bp, synthetic construct
  misc_feature 1..20: note = Description of Artificial Sequence: Synthetic oligonucleotide
  misc_feature 1..20: note = Target: FXN; (+) strand; PAM type: NRG; PAM sequence: AGG
  source 1..20: mol_type = other DNA
gaagactaaggaacaacatg

SEQ ID NO: 15623 - DNA, 20 bp, synthetic construct
  misc_feature 1..20: note = Description of Artificial Sequence: Synthetic oligonucleotide
  misc_feature 1..20: note = Target: FXN; (+) strand; PAM type: NRG; PAM sequence: GGG
  source 1..20: mol_type = other DNA
aagactaaggaacaacatga

SEQ ID NO: 15624 - DNA, 20 bp, synthetic construct
  misc_feature 1..20: note = Description of Artificial Sequence: Synthetic oligonucleotide
  misc_feature 1..20: note = Target: FXN; (+) strand; PAM type: NRG; PAM sequence: TAG
  source 1..20: mol_type = other DNA
ctaaggaacaacatgaggga

SEQ ID NO: 15625 - DNA, 20 bp, synthetic construct
  misc_feature 1..20: note = Description of Artificial Sequence: Synthetic oligonucleotide
  misc_feature 1..20: note = Target: FXN; (+) strand; PAM type: NRG; PAM sequence: CAG
  source 1..20: mol_type = other DNA
ggaacaacatgagggatagc

SEQ ID NO: 15626 - DNA, 20 bp, synthetic construct
  misc_feature 1..20: note = Description of Artificial Sequence: Synthetic oligonucleotide
  misc_feature 1..20: note = Target: FXN; (+) strand; PAM type: NRG; PAM sequence: GAG
  source 1..20: mol_type = other DNA
aacaacatgagggatagcca

SEQ ID NO: 15627 - DNA, 20 bp, synthetic construct
  misc_feature 1..20: note = Description of Artificial Sequence: Synthetic oligonucleotide
  misc_feature 1..20: note = Target: FXN; (+) strand; PAM type: NRG; PAM sequence: GAG
  source 1..20: mol_type = other DNA
caacatgagggatagccaga

SEQ ID NO: 15628 - DNA, 20 bp, synthetic construct
  misc_feature 1..20: note = Description of Artificial Sequence: Synthetic oligonucleotide
  misc_feature 1..20: note = Target: FXN; (+) strand; PAM type: NRG; PAM sequence: AGG
  source 1..20: mol_type = other DNA
aacatgagggatagccagag

SEQ ID NO: 15629 - DNA, 20 bp, synthetic construct
  misc_feature 1..20: note = Description of Artificial Sequence: Synthetic oligonucleotide
  misc_feature 1..20: note = Target: FXN; (+) strand; PAM type: NRG; PAM sequence: GGG
  source 1..20: mol_type = other DNA
acatgagggatagccagaga

SEQ ID NO: 15630 - DNA, 20 bp, synthetic construct
  misc_feature 1..20: note = Description of Artificial Sequence: Synthetic oligonucleotide
  misc_feature 1..20: note = Target: FXN; (+) strand; PAM type: NRG; PAM sequence: AAG
  source 1..20: mol_type = other DNA
gggatagccagagagggaaa

SEQ ID NO: 15631 - DNA, 20 bp, synthetic construct
  misc_feature 1..20: note = Description of Artificial Sequence: Synthetic oligonucleotide
  misc_feature 1..20: note = Target: FXN; (+) strand; PAM type: NRG; PAM sequence: TAG
  source 1..20: mol_type = other DNA
ggaaaaagcatcacttgttc

SEQ ID NO: 15632 - DNA, 20 bp, synthetic construct
  misc_feature 1..20: note = Description of Artificial Sequence: Synthetic oligonucleotide
  misc_feature 1..20: note = Target: FXN; (+) strand; PAM type: NRG; PAM sequence: AGG
  source 1..20: mol_type = other DNA
gaaaaagcatcacttgttct

SEQ ID NO: 15633 - DNA, 20 bp, synthetic construct
  misc_feature 1..20: note = Description of Artificial Sequence: Synthetic oligonucleotide
  misc_feature 1..20: note = Target: FXN; (+) strand; PAM type: NRG; PAM sequence: TAG
  source 1..20: mol_type = other DNA
cttgttctaggaactacaaa

SEQ ID NO: 15634 - DNA, 20 bp, synthetic construct
  misc_feature 1..20: note = Description of Artificial Sequence: Synthetic oligonucleotide
  misc_feature 1..20: note = Target: FXN; (+) strand; PAM type: NRG; PAM sequence: AAG
  source 1..20: mol_type = other DNA
taggaactacaaatagcttg

SEQ ID NO: 15635 - DNA, 20 bp, synthetic construct
  misc_feature 1..20: note = Description of Artificial Sequence: Synthetic oligonucleotide
  misc_feature 1..20: note = Target: FXN; (+) strand; PAM type: NRG; PAM sequence: AAG
  source 1..20: mol_type = other DNA
gaactacaaatagcttgaag

SEQ ID NO: 15636 - DNA, 20 bp, synthetic construct
  misc_feature 1..20: note = Description of Artificial Sequence: Synthetic oligonucleotide
  misc_feature 1..20: note = Target: FXN; (+) strand; PAM type: NRG; PAM sequence: AAG
  source 1..20: mol_type = other DNA
acaaatagcttgaagaagca

SEQ ID NO: 15637 - DNA, 20 bp, synthetic construct
  misc_feature 1..20: note = Description of Artificial Sequence: Synthetic oligonucleotide
  misc_feature 1..20: note = Target: FXN; (+) strand; PAM type: NRG; PAM sequence: TAG
  source 1..20: mol_type = other DNA
cttgaagaagcaaagatgtc

SEQ ID NO: 15638 - DNA, 20 bp, synthetic construct
  misc_feature 1..20: note = Description of Artificial Sequence: Synthetic oligonucleotide
  misc_feature 1..20: note = Target: FXN; (+) strand; PAM type: NRG; PAM sequence: CAG
  source 1..20: mol_type = other DNA
tctagatgcctcccaatatg

SEQ ID NO: 15639 - DNA, 20 bp, synthetic construct
  misc_feature 1..20: note = Description of Artificial Sequence: Synthetic oligonucleotide
  misc_feature 1..20: note = Target: FXN; (+) strand; PAM type: NRG; PAM sequence: GAG
  source 1..20: mol_type = other DNA
tagatgcctcccaatatgca

SEQ ID NO: 15640 - DNA, 20 bp, synthetic construct
  misc_feature 1..20: note = Description of Artificial Sequence: Synthetic oligonucleotide
  misc_feature 1..20: note = Target: FXN; (+) strand; PAM type: NRG; PAM sequence: TGG
  source 1..20: mol_type = other DNA
atgcctcccaatatgcagag

SEQ ID NO: 15641 - DNA, 20 bp, synthetic construct
  misc_feature 1..20: note = Description of Artificial Sequence: Synthetic oligonucleotide
  misc_feature 1..20: note = Target: FXN; (+) strand; PAM type: NRG; PAM sequence: GGG
  source 1..20: mol_type = other DNA
tgcctcccaatatgcagagt

SEQ ID NO: 15642 - DNA, 20 bp, synthetic construct
  misc_feature 1..20: note = Description of Artificial Sequence: Synthetic oligonucleotide
  misc_feature 1..20: note = Target: FXN; (+) strand; PAM type: NRG; PAM sequence: GGG
  source 1..20: mol_type = other DNA
gcctcccaatatgcagagtg

SEQ ID NO: 15643 - DNA, 20 bp, synthetic construct
  misc_feature 1..20: note = Description of Artificial Sequence: Synthetic oligonucleotide
  misc_feature 1..20: note = Target: FXN; (+) strand; PAM type: NRG; PAM sequence: CAG
  source 1..20: mol_type = other DNA
aatatgcagagtggggtgta

SEQ ID NO: 15644 - DNA, 20 bp, synthetic construct
  misc_feature 1..20: note = Description of Artificial Sequence: Synthetic oligonucleotide
  misc_feature 1..20: note = Target: FXN; (+) strand; PAM type: NRG; PAM sequence: AAG
  source 1..20: mol_type = other DNA
atgcagagtggggtgtacag

SEQ ID NO: 15645 - DNA, 20 bp, synthetic construct
  misc_feature 1..20: note = Description of Artificial Sequence: Synthetic oligonucleotide
  misc_feature 1..20: note = Target: FXN; (+) strand; PAM type: NRG; PAM sequence: GAG
  source 1..20: mol_type = other DNA
gcagagtggggtgtacagaa

SEQ ID NO: 15646 - DNA, 20 bp, synthetic construct
  misc_feature 1..20: note = Description of Artificial Sequence: Synthetic oligonucleotide
  misc_feature 1..20: note = Target: FXN; (+) strand; PAM type: NRG; PAM sequence: GAG
  source 1..20: mol_type = other DNA
agagtggggtgtacagaaga

SEQ ID NO: 15647 - DNA, 20 bp, synthetic construct
  misc_feature 1..20: note = Description of Artificial Sequence: Synthetic oligonucleotide
  misc_feature 1..20: note = Target: FXN; (+) strand; PAM type: NRG; PAM sequence: TGG
  source 1..20: mol_type = other DNA
gtggggtgtacagaagagag

SEQ ID NO: 15648 - DNA, 20 bp, synthetic construct
  misc_feature 1..20: note = Description of Artificial Sequence: Synthetic oligonucleotide
  misc_feature 1..20: note = Target: FXN; (+) strand; PAM type: NRG; PAM sequence: AAG
  source 1..20: mol_type = other DNA
ggtgtacagaagagagtggt

SEQ ID NO: 15649 - DNA, 20 bp, synthetic construct
  misc_feature 1..20: note = Description of Artificial Sequence: Synthetic oligonucleotide
  misc_feature 1..20: note = Target: FXN; (+) strand; PAM type: NRG; PAM sequence: AGG
  source 1..20: mol_type = other DNA
gtgtacagaagagagtggta

SEQ ID NO: 15650 - DNA, 20 bp, synthetic construct
  misc_feature 1..20: note = Description of Artificial Sequence: Synthetic oligonucleotide
  misc_feature 1..20: note = Target: FXN; (+) strand; PAM type: NRG; PAM sequence: GGG
  source 1..20: mol_type = other DNA
tgtacagaagagagtggtaa

SEQ ID NO: 15651 - DNA, 20 bp, synthetic construct
  misc_feature 1..20: note = Description of Artificial Sequence: Synthetic oligonucleotide
  misc_feature 1..20: note = Target: FXN; (+) strand; PAM type: NRG; PAM sequence: TGG
  source 1..20: mol_type = other DNA
gaagagagtggtaagggcgc

SEQ ID NO: 15652 - DNA, 20 bp, synthetic construct
  misc_feature 1..20: note = Description of Artificial Sequence: Synthetic oligonucleotide
  misc_feature 1..20: note = Target: FXN; (+) strand; PAM type: NRG; PAM sequence: GGG
  source 1..20: mol_type = other DNA
aagagagtggtaagggcgct

SEQ ID NO: 15653 - DNA, 20 bp, synthetic construct
  misc_feature 1..20: note = Description of Artificial Sequence: Synthetic oligonucleotide
  misc_feature 1..20: note = Target: FXN; (+) strand; PAM type: NRG; PAM sequence: GAG
  source 1..20: mol_type = other DNA
gagagtggtaagggcgctgg

SEQ ID NO: 15654 - DNA, 20 bp, synthetic construct
  misc_feature 1..20: note = Description of Artificial Sequence: Synthetic oligonucleotide
  misc_feature 1..20: note = Target: FXN; (+) strand; PAM type: NRG; PAM sequence: GAG
  source 1..20: mol_type = other DNA
gagtggtaagggcgctggga

SEQ ID NO: 15655 - DNA, 20 bp, synthetic construct
  misc_feature 1..20: note = Description of Artificial Sequence: Synthetic oligonucleotide
  misc_feature 1..20: note = Target: FXN; (+) strand; PAM type: NRG; PAM sequence: AAG
  source 1..20: mol_type = other DNA
gtaagggcgctgggagagct

SEQ ID NO: 15656 - DNA, 20 bp, synthetic construct
  misc_feature 1..20: note = Description of Artificial Sequence: Synthetic oligonucleotide
  misc_feature 1..20: note = Target: FXN; (+) strand; PAM type: NRG; PAM sequence: AGG
  source 1..20: mol_type = other DNA
taagggcgctgggagagcta

SEQ ID NO: 15657 - DNA, 20 bp, synthetic construct
  misc_feature 1..20: note = Description of Artificial Sequence: Synthetic oligonucleotide
  misc_feature 1..20: note = Target: FXN; (+) strand; PAM type: NRG; PAM sequence: TGG
  source 1..20: mol_type = other DNA
gggcgctgggagagctaagg

SEQ ID NO: 15658 - DNA, 20 bp, synthetic construct
  misc_feature 1..20: note = Description of Artificial Sequence: Synthetic oligonucleotide
  misc_feature 1..20: note = Target: FXN; (+) strand; PAM type: NRG; PAM sequence: GGG
  source 1..20: mol_type = other DNA
ggcgctgggagagctaaggt

SEQ ID NO: 15659 - DNA, 20 bp, synthetic construct
  misc_feature 1..20: note = Description of Artificial Sequence: Synthetic oligonucleotide
  misc_feature 1..20: note = Target: FXN; (+) strand; PAM type: NRG; PAM sequence: AAG
  source 1..20: mol_type = other DNA
ctgggagagctaaggtgggc

SEQ ID NO: 15660 - DNA, 20 bp, synthetic construct
  misc_feature 1..20: note = Description of Artificial Sequence: Synthetic oligonucleotide
  misc_feature 1..20: note = Target: FXN; (+) strand; PAM type: NRG; PAM sequence: GAG
  source 1..20: mol_type = other DNA
gggagagctaaggtgggcaa

SEQ ID NO: 15661 - DNA, 20 bp, synthetic construct
  misc_feature 1..20: note = Description of Artificial Sequence: Synthetic oligonucleotide
  misc_feature 1..20: note = Target: FXN; (+) strand; PAM type: NRG; PAM sequence: GAG
  source 1..20: mol_type = other DNA
gagagctaaggtgggcaaga

SEQ ID NO: 15662 - DNA, 20 bp, synthetic construct
  misc_feature 1..20: note = Description of Artificial Sequence: Synthetic oligonucleotide
  misc_feature 1..20: note = Target: FXN; (+) strand; PAM type: NRG; PAM sequence: AAG
  source 1..20: mol_type = other DNA
agagcttcctctgtcatgct

SEQ ID NO: 15663 - DNA, 20 bp, synthetic construct
  misc_feature 1..20: note = Description of Artificial Sequence: Synthetic oligonucleotide
  misc_feature 1..20: note = Target: FXN; (+) strand; PAM type: NRG; PAM sequence: AAG
  source 1..20: mol_type = other DNA
cttcctctgtcatgctaaga

SEQ ID NO: 15664 - DNA, 20 bp, synthetic construct
  misc_feature 1..20: note = Description of Artificial Sequence: Synthetic oligonucleotide
  misc_feature 1..20: note = Target: FXN; (+) strand; PAM type: NRG; PAM sequence: TGG
  source 1..20: mol_type = other DNA
ctctgtcatgctaagaaagt

SEQ ID NO: 15665 - DNA, 20 bp, synthetic construct
  misc_feature 1..20: note = Description of Artificial Sequence: Synthetic oligonucleotide
  misc_feature 1..20: note = Target: FXN; (+) strand; PAM type: NRG; PAM sequence: TGG
  source 1..20: mol_type = other DNA
aaagttggaatttatcttga

SEQ ID NO: 15666 - DNA, 20 bp, synthetic construct
  misc_feature 1..20: note = Description of Artificial Sequence: Synthetic oligonucleotide
  misc_feature 1..20: note = Target: FXN; (+) strand; PAM type: NRG; PAM sequence: TGG
  source 1..20: mol_type = other DNA
gttggaatttatcttgatgg

SEQ ID NO: 15667 - DNA, 20 bp, synthetic construct
  misc_feature 1..20: note = Description of Artificial Sequence: Synthetic oligonucleotide
  misc_feature 1..20: note = Target: FXN; (+) strand; PAM type: NRG; PAM sequence: AAG
  source 1..20: mol_type = other DNA
atttatcttgatggtggtga

SEQ ID NO: 15668 - DNA, 20 bp, synthetic construct
  misc_feature 1..20: note = Description of Artificial Sequence: Synthetic oligonucleotide
  misc_feature 1..20: note = Target: FXN; (+) strand; PAM type: NRG; PAM sequence: CAG
  source 1..20: mol_type = other DNA
tatcttgatggtggtgaaag

SEQ ID NO: 15669 - DNA, 20 bp, synthetic construct
  misc_feature 1..20: note = Description of Artificial Sequence: Synthetic oligonucleotide
  misc_feature 1..20: note = Target: FXN; (+) strand; PAM type: NRG; PAM sequence: GAG
  source 1..20: mol_type = other DNA
tcttgatggtggtgaaagca

SEQ ID NO: 15670 - DNA, 20 bp, synthetic construct
  misc_feature 1..20: note = Description of Artificial Sequence: Synthetic oligonucleotide
  misc_feature 1..20: note = Target: FXN; (+) strand; PAM type: NRG; PAM sequence: AGG
  source 1..20: mol_type = other DNA
cttgatggtggtgaaagcag

SEQ ID NO: 15671 - DNA, 20 bp, synthetic construct
  misc_feature 1..20: note = Description of Artificial Sequence: Synthetic oligonucleotide
  misc_feature 1..20: note = Target: FXN; (+) strand; PAM type: NRG; PAM sequence: GGG
  source 1..20: mol_type = other DNA
ttgatggtggtgaaagcaga

SEQ ID NO: 15672 - DNA, 20 bp, synthetic construct
  misc_feature 1..20: note = Description of Artificial Sequence: Synthetic oligonucleotide
  misc_feature 1..20: note = Target: FXN; (+) strand; PAM type: NRG; PAM sequence: TGG
  source 1..20: mol_type = other DNA
gtggtgaaagcagagggcta

SEQ ID NO: 15673 - DNA, 20 bp, synthetic construct
  misc_feature 1..20: note = Description of Artificial Sequence: Synthetic oligonucleotide
  misc_feature 1..20: note = Target: FXN; (+) strand; PAM type: NRG; PAM sequence: TAG
  source 1..20: mol_type = other DNA
tgaaagcagagggctatggt

SEQ ID NO: 15674 - DNA, 20 bp, synthetic construct
  misc_feature 1..20: note = Description of Artificial Sequence: Synthetic oligonucleotide
  misc_feature 1..20: note = Target: FXN; (+) strand; PAM type: NRG; PAM sequence: GAG
  source 1..20: mol_type = other DNA
ctatggttagattcacattt

SEQ ID NO: 15675 - DNA, 20 bp, synthetic construct
  misc_feature 1..20: note = Description of Artificial Sequence: Synthetic oligonucleotide
  misc_feature 1..20: note = Target: FXN; (+) strand; PAM type: NRG; PAM sequence: TAG
  source 1..20: mol_type = other DNA
ttagattcacatttgagatt

SEQ ID NO: 15676 - DNA, 20 bp, synthetic construct
  misc_feature 1..20: note = Description of Artificial Sequence: Synthetic oligonucleotide
  misc_feature 1..20: note = Target: FXN; (+) strand; PAM type: NRG; PAM sequence: TAG
  source 1..20: mol_type = other DNA
acatttgagatttagatttt

SEQ ID NO: 15677 - DNA, 20 bp, synthetic construct
  misc_feature 1..20: note = Description of Artificial Sequence: Synthetic oligonucleotide
  misc_feature 1..20: note = Target: FXN; (+) strand; PAM type: NRG; PAM sequence: TGG
  source 1..20: mol_type = other DNA
tagatttaaaatgatcaccc

SEQ ID NO: 15678 - DNA, 20 bp, synthetic construct
  misc_feature 1..20: note = Description of Artificial Sequence: Synthetic oligonucleotide
  misc_feature 1..20: note = Target: FXN; (+) strand; PAM type: NRG; PAM sequence: TGG
  source 1..20: mol_type = other DNA
aatgatcaccctggtgacac

SEQ ID NO: 15679 - DNA, 20 bp, synthetic construct
  misc_feature 1..20: note = Description of Artificial Sequence: Synthetic oligonucleotide
  misc_feature 1..20: note = Target: FXN; (+) strand; PAM type: NRG; PAM sequence: AAG
  source 1..20: mol_type = other DNA
cttaactcacaattttgccc

SEQ ID NO: 15680 - DNA, 20 bp, synthetic construct
  misc_feature 1..20: note = Description of Artificial Sequence: Synthetic oligonucleotide
  misc_feature 1..20: note = Target: FXN; (+) strand; PAM type: NRG; PAM sequence: AGG
  source 1..20: mol_type = other DNA
ttaactcacaattttgccca

SEQ ID NO: 15681 - DNA, 20 bp, synthetic construct
  misc_feature 1..20: note = Description of Artificial Sequence: Synthetic oligonucleotide
  misc_feature 1..20: note = Target: FXN; (+) strand; PAM type: NRG; PAM sequence: CAG
  source 1..20: mol_type = other DNA
gcccaaggcctatgctacca

SEQ ID NO: 15682 - DNA, 20 bp, synthetic construct
  misc_feature 1..20: note = Description of Artificial Sequence: Synthetic oligonucleotide
  misc_feature 1..20: note = Target: FXN; (+) strand; PAM type: NRG; PAM sequence: AAG
  source 1..20: mol_type = other DNA
acagtgcttctgaaacttta

SEQ ID NO: 15683 - DNA, 20 bp, synthetic construct
  misc_feature 1..20: note = Description of Artificial Sequence: Synthetic oligonucleotide
  misc_feature 1..20: note = Target: FXN; (+) strand; PAM type: NRG; PAM sequence: TAG
  source 1..20: mol_type = other DNA
tctgaaactttaaagcacat

SEQ ID NO: 15684 - DNA, 20 bp, synthetic construct
  misc_feature 1..20: note = Description of Artificial Sequence: Synthetic oligonucleotide
  misc_feature 1..20: note = Target: FXN; (+) strand; PAM type: NRG; PAM sequence: TGG
  source 1..20: mol_type = other DNA
taaagcacattagaatcacc

SEQ ID NO: 15685 - DNA, 20 bp, synthetic construct
  misc_feature 1..20: note = Description of Artificial Sequence: Synthetic oligonucleotide
  misc_feature 1..20: note = Target: FXN; (+) strand; PAM type: NRG; PAM sequence: GAG
  source 1..20: mol_type = other DNA
aagcacattagaatcacctg

SEQ ID NO: 15686 - DNA, 20 bp, synthetic construct
  misc_feature 1..20: note = Description of Artificial Sequence: Synthetic oligonucleotide
  misc_feature 1..20: note = Target: FXN; (+) strand; PAM type: NRG; PAM sequence: AGG
  source 1..20: mol_type = other DNA
agcacattagaatcacctgg

SEQ ID NO: 15687 - DNA, 20 bp, synthetic construct
  misc_feature 1..20: note = Description of Artificial Sequence: Synthetic oligonucleotide
  misc_feature 1..20: note = Target: FXN; (+) strand; PAM type: NRG; PAM sequence: TGG
  source 1..20: mol_type = other DNA
ctggaggtcttgttaaacca

SEQ ID NO: 15688 - DNA, 20 bp, synthetic construct
  misc_feature 1..20: note = Description of Artificial Sequence: Synthetic oligonucleotide
  misc_feature 1..20: note = Target: FXN; (+) strand; PAM type: NRG; PAM sequence: TGG
  source 1..20: mol_type = other DNA
cttgttaaaccatggattgc

SEQ ID NO: 15689 - DNA, 20 bp, synthetic construct
  misc_feature 1..20: note = Description of Artificial Sequence: Synthetic oligonucleotide
  misc_feature 1..20: note = Target: FXN; (+) strand; PAM type: NRG; PAM sequence: GGG
  source 1..20: mol_type = other DNA
ttgttaaaccatggattgct

SEQ ID NO: 15690 - DNA, 20 bp, synthetic construct
  misc_feature 1..20: note = Description of Artificial Sequence: Synthetic oligonucleotide
  misc_feature 1..20: note = Target: FXN; (+) strand; PAM type: NRG; PAM sequence: CAG
  source 1..20: mol_type = other DNA
attgctgggccttgaaaccc

SEQ ID NO: 15691 - DNA, 20 bp, synthetic construct
  misc_feature 1..20: note = Description of Artificial Sequence: Synthetic oligonucleotide
  misc_feature 1..20: note = Target: FXN; (+) strand; PAM type: NRG; PAM sequence: GAG
  source 1..20: mol_type = other DNA
tgctgggccttgaaacccca

SEQ ID NO: 15692 - DNA, 20 bp, synthetic construct
  misc_feature 1..20: note = Description of Artificial Sequence: Synthetic oligonucleotide
  misc_feature 1..20: note = Target: FXN; (+) strand; PAM type: NRG; PAM sequence: CAG
  source 1..20: mol_type = other DNA
aaaccccagagattctgatt

SEQ ID NO: 15693 - DNA, 20 bp, synthetic construct
  misc_feature 1..20: note = Description of Artificial Sequence: Synthetic oligonucleotide
  misc_feature 1..20: note = Target: FXN; (+) strand; PAM type: NRG; PAM sequence: TAG
  source 1..20: mol_type = other DNA
ccccagagattctgattcag

SEQ ID NO: 15694 - DNA, 20 bp, synthetic construct
  misc_feature 1..20: note = Description of Artificial Sequence: Synthetic oligonucleotide
  misc_feature 1..20: note = Target: FXN; (+) strand; PAM type: NRG; PAM sequence: GAG
  source 1..20: mol_type = other DNA
agattctgattcagtagatc

SEQ ID NO: 15695 - DNA, 20 bp, synthetic construct
  misc_feature 1..20: note = Description of Artificial Sequence: Synthetic oligonucleotide
  misc_feature 1..20: note = Target: FXN; (+) strand; PAM type: NRG; PAM sequence: TAG
  source 1..20: mol_type = other DNA
ctgattcagtagatcgagaa

SEQ ID NO: 15696 - DNA, 20 bp, synthetic construct
  misc_feature 1..20: note = Description of Artificial Sequence: Synthetic oligonucleotide
  misc_feature 1..20: note = Target: FXN; (+) strand; PAM type: NRG; PAM sequence: AGG
  source 1..20: mol_type = other DNA
tgattcagtagatcgagaat

SEQ ID NO: 15697 - DNA, 20 bp, synthetic construct
  misc_feature 1..20: note = Description of Artificial Sequence: Synthetic oligonucleotide
  misc_feature 1..20: note = Target: FXN; (+) strand; PAM type: NRG; PAM sequence: GGG
  source 1..20: mol_type = other DNA
gattcagtagatcgagaata

SEQ ID NO: 15698 - DNA, 20 bp, synthetic construct
  misc_feature 1..20: note = Description of Artificial Sequence: Synthetic oligonucleotide
  misc_feature 1..20: note = Target: FXN; (+) strand; PAM type: NRG; PAM sequence: GAG
  source 1..20: mol_type = other DNA
gtagatcgagaatagggcct

SEQ ID NO: 15699 - DNA, 20 bp, synthetic construct
  misc_feature 1..20: note = Description of Artificial Sequence: Synthetic oligonucleotide
  misc_feature 1..20: note = Target: FXN; (+) strand; PAM type: NRG; PAM sequence: AAG
  source 1..20: mol_type = other DNA
tgagaatttgtatttctaac

SEQ ID NO: 15700 - DNA, 20 bp, synthetic construct
  misc_feature 1..20: note = Description of Artificial Sequence: Synthetic oligonucleotide
  misc_feature 1..20: note = Target: FXN; (+) strand; PAM type: NRG; PAM sequence: CAG
  source 1..20: mol_type = other DNA
ttgtatttctaacaagtttc

SEQ ID NO: 15701 - DNA, 20 bp, synthetic construct
  misc_feature 1..20: note = Description of Artificial Sequence: Synthetic oligonucleotide
  misc_feature 1..20: note = Target: FXN; (+) strand; PAM type: NRG; PAM sequence: AGG
  source 1..20: mol_type = other DNA
tgtatttctaacaagtttcc

SEQ ID NO: 15702 - DNA, 20 bp, synthetic construct
  misc_feature 1..20: note = Description of Artificial Sequence: Synthetic oligonucleotide
  misc_feature 1..20: note = Target: FXN; (+) strand; PAM type: NRG; PAM sequence: GAG
  source 1..20: mol_type = other DNA
acaagtttccaggtgatgct

SEQ ID NO: 15703 - DNA, 20 bp, synthetic construct
  misc_feature 1..20: note = Description of Artificial Sequence: Synthetic oligonucleotide
  misc_feature 1..20: note = Target: FXN; (+) strand; PAM type: NRG; PAM sequence: AGG
  source 1..20: mol_type = other DNA
caagtttccaggtgatgctg

SEQ ID NO: 15704 - DNA, 20 bp, synthetic construct
  misc_feature 1..20: note = Description of Artificial Sequence: Synthetic oligonucleotide
  misc_feature 1..20: note = Target: FXN; (+) strand; PAM type: NRG; PAM sequence: TGG
  source 1..20: mol_type = other DNA
ccaggtgatgctgaggctgc

SEQ ID NO: 15705 - DNA, 20 bp, synthetic construct
  misc_feature 1..20: note = Description of Artificial Sequence: Synthetic oligonucleotide
  misc_feature 1..20: note = Target: FXN; (+) strand; PAM type: NRG; PAM sequence: CAG
  source 1..20: mol_type = other DNA
tgatgctgaggctgctggcc

SEQ ID NO: 15706 - DNA, 20 bp, synthetic construct
  misc_feature 1..20: note = Description of Artificial Sequence: Synthetic oligonucleotide
  misc_feature 1..20: note = Target: FXN; (+) strand; PAM type: NRG; PAM sequence: TAG
  source 1..20: mol_type = other DNA
gcgaccacatttgataatca

SEQ ID NO: 15707 - DNA, 20 bp, synthetic construct
  misc_feature 1..20: note = Description of Artificial Sequence: Synthetic oligonucleotide
  misc_feature 1..20: note = Target: FXN; (+) strand; PAM type: NRG; PAM sequence: TGG
  source 1..20: mol_type = other DNA
atcctatcaaaatatcctaa

SEQ ID NO: 15708 - DNA, 20 bp, synthetic construct
  misc_feature 1..20: note = Description of Artificial Sequence: Synthetic oligonucleotide
  misc_feature 1..20: note = Target: FXN; (+) strand; PAM type: NRG; PAM sequence: CAG
  source 1..20: mol_type = other DNA
ctatcaaaatatcctaatgg

SEQ ID NO: 15709 - DNA, 20 bp, synthetic construct
  misc_feature 1..20: note = Description of Artificial Sequence: Synthetic oligonucleotide
  misc_feature 1..20: note = Target: FXN; (+) strand; PAM type: NRG; PAM sequence: GAG
  source 1..20: mol_type = other DNA
atcaaaatatcctaatggca

SEQ ID NO: 15710 - DNA, 20 bp, synthetic construct
  misc_feature 1..20: note = Description of Artificial Sequence: Synthetic oligonucleotide
  misc_feature 1..20: note = Target: FXN; (+) strand; PAM type: NRG; PAM sequence: AAG
  source 1..20: mol_type = other DNA
aaatatcctaatggcagagc

SEQ ID NO: 15711 - DNA, 20 bp, synthetic construct
  misc_feature 1..20: note = Description of Artificial Sequence: Synthetic oligonucleotide
  misc_feature 1..20: note = Target: FXN; (+) strand; PAM type: NRG; PAM sequence: AGG
  source 1..20: mol_type = other DNA
aatatcctaatggcagagca

SEQ ID NO: 15712 - DNA, 20 bp, synthetic construct
  misc_feature 1..20: note = Description of Artificial Sequence: Synthetic oligonucleotide
  misc_feature 1..20: note = Target: FXN; (+) strand; PAM type: NRG; PAM sequence: GGG
  source 1..20: mol_type = other DNA
atatcctaatggcagagcaa

SEQ ID NO: 15713 - DNA, 20 bp, synthetic construct
  misc_feature 1..20: note = Description of Artificial Sequence: Synthetic oligonucleotide
  misc_feature 1..20: note = Target: FXN; (+) strand; PAM type: NRG; PAM sequence: TGG
  source 1..20: mol_type = other DNA
atggcagagcaagggaattc

SEQ ID NO: 15714 - DNA, 20 bp, synthetic construct
  misc_feature 1..20: note = Description of Artificial Sequence: Synthetic oligonucleotide
  misc_feature 1..20: note = Target: FXN; (+) strand; PAM type: NRG; PAM sequence: CAG
  source 1..20: mol_type = other DNA
ctcccctacccataacctga

SEQ ID NO: 15715 - DNA, 20 bp, synthetic construct
  misc_feature 1..20: note = Description of Artificial Sequence: Synthetic oligonucleotide
  misc_feature 1..20: note = Target: FXN; (+) strand; PAM type: NRG; PAM sequence: TAG
  source 1..20: mol_type = other DNA
acccataacctgacagctat

SEQ ID NO: 15716 - DNA, 20 bp, synthetic construct
  misc_feature 1..20: note = Description of Artificial Sequence: Synthetic oligonucleotide
  misc_feature 1..20: note = Target: FXN; (+) strand; PAM type: NRG; PAM sequence: AGG
  source 1..20: mol_type = other DNA
cccataacctgacagctatt

SEQ ID NO: 15717 - DNA, 20 bp, synthetic construct
  misc_feature 1..20: note = Description of Artificial Sequence: Synthetic oligonucleotide
  misc_feature 1..20: note = Target: FXN; (+) strand; PAM type: NRG; PAM sequence: GAG
  source 1..20: mol_type = other DNA
ctattaggatctgcctactt

SEQ ID NO: 15718 - DNA, 20 bp, synthetic construct
  misc_feature 1..20: note = Description of Artificial Sequence: Synthetic oligonucleotide
  misc_feature 1..20: note = Target: FXN; (+) strand; PAM type: NRG; PAM sequence: AGG
  source 1..20: mol_type = other DNA
tattaggatctgcctacttg

SEQ ID NO: 15719 - DNA, 20 bp, synthetic construct
  misc_feature 1..20: note = Description of Artificial Sequence: Synthetic oligonucleotide
  misc_feature 1..20: note = Target: FXN; (+) strand; PAM type: NRG; PAM sequence: AAG
  source 1..20: mol_type = other DNA
atctgcctacttgaggctaa

SEQ ID NO: 15720 - DNA, 20 bp, synthetic construct
  misc_feature 1..20: note = Description of Artificial Sequence: Synthetic oligonucleotide
  misc_feature 1..20: note = Target: FXN; (+) strand; PAM type: NRG; PAM sequence: AAG
  source 1..20: mol_type = other DNA
acttgaggctaaaagcaacc

SEQ ID NO: 15721 - DNA, 20 bp, synthetic construct
  misc_feature 1..20: note = Description of Artificial Sequence: Synthetic oligonucleotide
  misc_feature 1..20: note = Target: FXN; (+) strand; PAM type: NRG; PAM sequence: GAG
  source 1..20: mol_type = other DNA
ttgaggctaaaagcaaccaa

SEQ ID NO: 15722 - DNA, 20 bp, synthetic construct
  misc_feature 1..20: note = Description of Artificial Sequence: Synthetic oligonucleotide
  misc_feature 1..20: note = Target: FXN; (+) strand; PAM type: NRG; PAM sequence: GAG
  source 1..20: mol_type = other DNA
gaggctaaaagcaaccaaga

SEQ ID NO: 15723 - DNA, 20 bp, synthetic construct
  misc_feature 1..20: note = Description of Artificial Sequence: Synthetic oligonucleotide
  misc_feature 1..20: note = Target: FXN; (+) strand; PAM type: NRG; PAM sequence: AGG
  source 1..20: mol_type = other DNA
aggctaaaagcaaccaagag

SEQ ID NO: 15724 - DNA, 20 bp, synthetic construct
  misc_feature 1..20: note = Description of Artificial Sequence: Synthetic oligonucleotide
  misc_feature 1..20: note = Target: FXN; (+) strand; PAM type: NRG; PAM sequence: CAG
  source 1..20: mol_type = other DNA
aaaagcaaccaagagaggaa

SEQ ID NO: 15725 - DNA, 20 bp, synthetic construct
  misc_feature 1..20: note = Description of Artificial Sequence: Synthetic oligonucleotide
  misc_feature 1..20: note = Target: FXN; (+) strand; PAM type: NRG; PAM sequence: CAG
  source 1..20: mol_type = other DNA
aaccaagagaggaacagcta

SEQ ID NO: 15726 - DNA, 20 bp, synthetic construct
  misc_feature 1..20: note = Description of Artificial Sequence: Synthetic oligonucleotide
  misc_feature 1..20: note = Target: FXN; (+) strand; PAM type: NRG; PAM sequence: CAG
  source 1..20: mol_type = other DNA
ggaacagctacagtgtacca

SEQ ID NO: 15727 - DNA, 20 bp, synthetic construct
  misc_feature 1..20: note = Description of Artificial Sequence: Synthetic oligonucleotide
  misc_feature 1..20: note = Target: FXN; (+) strand; PAM type: NRG; PAM sequence: GAG
  source 1..20: mol_type = other DNA
aacagctacagtgtaccaca

SEQ ID NO: 15728 - DNA, 20 bp, synthetic construct
  misc_feature 1..20: note = Description of Artificial Sequence: Synthetic oligonucleotide
  misc_feature 1..20: note = Target: FXN; (+) strand; PAM type: NRG; PAM sequence: CGG
  source 1..20: mol_type = other DNA
caacatctttgcccacgcca

SEQ ID NO: 15729 - DNA, 20 bp, synthetic construct
  misc_feature 1..20: note = Description of Artificial Sequence: Synthetic oligonucleotide
  misc_feature 1..20: note = Target: FXN; (+) strand; PAM type: NRG; PAM sequence: CAG
  source 1..20: mol_type = other DNA
ttgcccacgccacggtgccc

SEQ ID NO: 15730 - DNA, 20 bp, synthetic construct
  misc_feature 1..20: note = Description of Artificial Sequence: Synthetic oligonucleotide
  misc_feature 1..20: note = Target: FXN; (+) strand; PAM type: NRG; PAM sequence: AAG
  source 1..20: mol_type = other DNA
cggtgccccagcttcttacc

SEQ ID NO: 15731 - DNA, 20 bp, synthetic construct
  misc_feature 1..20: note = Description of Artificial Sequence: Synthetic oligonucleotide
  misc_feature 1..20: note = Target: FXN; (+) strand; PAM type: NRG; PAM sequence: AAG
  source 1..20: mol_type = other DNA
gattcctcttgactacctcc

SEQ ID NO: 15732 - DNA, 20 bp, synthetic construct
  misc_feature 1..20: note = Description of Artificial Sequence: Synthetic oligonucleotide
  misc_feature 1..20: note = Target: FXN; (+) strand; PAM type: NRG; PAM sequence: AGG
  source 1..20: mol_type = other DNA
attcctcttgactacctcca

SEQ ID NO: 15733 - DNA, 20 bp, synthetic construct
  misc_feature 1..20: note = Description of Artificial Sequence: Synthetic oligonucleotide
  misc_feature 1..20: note = Target: FXN; (+) strand; PAM type: NRG; PAM sequence: AAG
  source 1..20: mol_type = other DNA
cctcttgactacctccaagg

SEQ ID NO: 15734 - DNA, 20 bp, synthetic construct
  misc_feature 1..20: note = Description of Artificial Sequence: Synthetic oligonucleotide
  misc_feature 1..20: note = Target: FXN; (+) strand; PAM type: NRG; PAM sequence: TGG
  source 1..20: mol_type = other DNA
cttgactacctccaaggaag

SEQ ID NO: 15735 - DNA, 20 bp, synthetic construct
  misc_feature 1..20: note = Description of Artificial Sequence: Synthetic oligonucleotide
  misc_feature 1..20: note = Target: FXN; (+) strand; PAM type: NRG; PAM sequence: GAG
  source 1..20: mol_type = other DNA
tgactacctccaaggaagtg

SEQ ID NO: 15736 - DNA, 20 bp, synthetic construct
  misc_feature 1..20: note = Description of Artificial Sequence: Synthetic oligonucleotide
  misc_feature 1..20: note = Target: FXN; (+) strand; PAM type: NRG; PAM sequence: AAG
  source 1..20: mol_type = other DNA
tacctccaaggaagtggaga

SEQ ID NO: 15737 - DNA, 20 bp, synthetic construct
  misc_feature 1..20: note = Description of Artificial Sequence: Synthetic oligonucleotide
  misc_feature 1..20: note = Target: FXN; (+) strand; PAM type: NRG; PAM sequence: AAG
  source 1..20: mol_type = other DNA
ccaaggaagtggagaaagac

SEQ ID NO: 15738 - DNA, 20 bp, synthetic construct
  misc_feature 1..20: note = Description of Artificial Sequence: Synthetic oligonucleotide
  misc_feature 1..20: note = Target: FXN; (+) strand; PAM type: NRG; PAM sequence: AAG
  source 1..20: mol_type = other DNA
gagaaagacaagttcttgcg

SEQ ID NO: 15739 - DNA, 20 bp, synthetic construct
  misc_feature 1..20: note = Description of Artificial Sequence: Synthetic oligonucleotide
  misc_feature 1..20: note = Target: FXN; (+) strand; PAM type: NRG; PAM sequence: TGG
  source 1..20: mol_type = other DNA
ctattctatgtctatttctt

SEQ ID NO: 15740 - DNA, 20 bp, synthetic construct
  misc_feature 1..20: note = Description of Artificial Sequence: Synthetic oligonucleotide
  misc_feature 1..20: note = Target: FXN; (+) strand; PAM type: NRG; PAM sequence: AAG
  source 1..20: mol_type = other DNA
tgtctatttctttggccaaa

SEQ ID NO: 15741 - DNA, 20 bp, synthetic construct
  misc_feature 1..20: note = Description of Artificial Sequence: Synthetic oligonucleotide
  misc_feature 1..20: note = Target: FXN; (+) strand; PAM type: NRG; PAM sequence: TGG
  source 1..20: mol_type = other DNA
tatttctttggccaaaaaga

SEQ ID NO: 15742 - DNA, 20 bp, synthetic construct
  misc_feature 1..20: note = Description of Artificial Sequence: Synthetic oligonucleotide
  misc_feature 1..20: note = Target: FXN; (+) strand; PAM type: NRG; PAM sequence: GGG
  source 1..20: mol_type = other DNA
atttctttggccaaaaagat

SEQ ID NO: 15743 - DNA, 20 bp, synthetic construct
  misc_feature 1..20: note = Description of Artificial Sequence: Synthetic oligonucleotide
  misc_feature 1..20: note = Target: FXN; (+) strand; PAM type: NRG; PAM sequence: GGG
  source 1..20: mol_type = other DNA
tttctttggccaaaaagatg

SEQ ID NO: 15744 - DNA, 20 bp, synthetic construct
  misc_feature 1..20: note = Description of Artificial Sequence: Synthetic oligonucleotide
  misc_feature 1..20: note = Target: FXN; (+) strand; PAM type: NRG; PAM sequence: CAG
  source 1..20: mol_type = other DNA
gggcaatgatatcaactttg

SEQ ID NO: 15745 - DNA, 20 bp, synthetic construct
  misc_feature 1..20: note = Description of Artificial Sequence: Synthetic oligonucleotide
  misc_feature 1..20: note = Target: FXN; (+) strand; PAM type: NRG; PAM sequence: AGG
  source 1..20: mol_type = other DNA
ggcaatgatatcaactttgc

SEQ ID NO: 15746 - DNA, 20 bp, synthetic construct
  misc_feature 1..20: note = Description of Artificial Sequence: Synthetic oligonucleotide
  misc_feature 1..20: note = Target: FXN; (+) strand; PAM type: NRG; PAM sequence: GGG
  source 1..20: mol_type = other DNA
gcaatgatatcaactttgca

SEQ ID NO: 15747 - DNA, 20 bp, synthetic construct
  misc_feature 1..20: note = Description of Artificial Sequence: Synthetic oligonucleotide
  misc_feature 1..20: note = Target: FXN; (+) strand; PAM type: NRG; PAM sequence: GAG
  source 1..20: mol_type = other DNA
aatgatatcaactttgcagg

SEQ ID NO: 15748 - DNA, 20 bp, synthetic construct
  misc_feature 1..20: note = Description of Artificial Sequence: Synthetic oligonucleotide
  misc_feature 1..20: note = Target: FXN; (+) strand; PAM type: NRG; PAM sequence: TGG
  source 1..20: mol_type = other DNA
atatcaactttgcagggagc

SEQ ID NO: 15749 - DNA, 20 bp, synthetic construct
  misc_feature 1..20: note = Description of Artificial Sequence: Synthetic oligonucleotide
  misc_feature 1..20: note = Target: FXN; (+) strand; PAM type: NRG; PAM sequence: GAG
  source 1..20: mol_type = other DNA
atcaactttgcagggagctg

SEQ ID NO: 15750 - DNA, 20 bp, synthetic construct
  misc_feature 1..20: note = Description of Artificial Sequence: Synthetic oligonucleotide
  misc_feature 1..20: note = Target: FXN; (+) strand; PAM type: NRG; PAM sequence: TAG
  source 1..20: mol_type = other DNA
cagggagctggagcatttgc

SEQ ID NO: 15751 - DNA, 20 bp, synthetic construct
  misc_feature 1..20: note = Description of Artificial Sequence: Synthetic oligonucleotide
  misc_feature 1..20: note = Target: FXN; (+) strand; PAM type: NRG; PAM sequence: CAG
  source 1..20: mol_type = other DNA
tgctagtgacctttctatgc

SEQ ID NO: 15752 - DNA, 20 bp, synthetic construct
  misc_feature 1..20: note = Description of Artificial Sequence: Synthetic oligonucleotide
  misc_feature 1..20: note = Target: FXN; (+) strand; PAM type: NRG; PAM sequence: AAG
  source 1..20: mol_type = other DNA
tttctatgccagaacttgct

SEQ ID NO: 15753 - DNA, 20 bp, synthetic construct
  misc_feature 1..20: note = Description of Artificial Sequence: Synthetic oligonucleotide
  misc_feature 1..20: note = Target: FXN; (+) strand; PAM type: NRG; PAM sequence: TAG
  source 1..20: mol_type = other DNA
ccagaacttgctaagcatgc

SEQ ID NO: 15754 - DNA, 20 bp, synthetic construct
  misc_feature 1..20: note = Description of Artificial Sequence: Synthetic oligonucleotide
  misc_feature 1..20: note = Target: FXN; (+) strand; PAM type: NRG; PAM sequence: TAG
  source 1..20: mol_type = other DNA
catgctagctaataatgatg

SEQ ID NO: 15755 - DNA, 20 bp, synthetic construct
  misc_feature 1..20: note = Description of Artificial Sequence: Synthetic oligonucleotide
  misc_feature 1..20: note = Target: FXN; (+) strand; PAM type: NRG; PAM sequence: CAG
  source 1..20: mol_type = other DNA
tagctaataatgatgtagca

SEQ ID NO: 15756 - DNA, 20 bp, synthetic construct
  misc_feature 1..20: note = Description of Artificial Sequence: Synthetic oligonucleotide
  misc_feature 1..20: note = Target: FXN; (+) strand; PAM type: NRG; PAM sequence: AGG
  source 1..20: mol_type = other DNA
agctaataatgatgtagcac

SEQ ID NO: 15757 - DNA, 20 bp, synthetic construct
  misc_feature 1..20: note = Description of Artificial Sequence: Synthetic oligonucleotide
  misc_feature 1..20: note = Target: FXN; (+) strand; PAM type: NRG; PAM sequence: GGG
  source 1..20: mol_type = other DNA
gctaataatgatgtagcaca

SEQ ID NO: 15758 - DNA, 20 bp, synthetic construct
  misc_feature 1..20: note = Description of Artificial Sequence: Synthetic oligonucleotide
  misc_feature 1..20: note = Target: FXN; (+) strand; PAM type: NRG; PAM sequence: CGG
  source 1..20: mol_type = other DNA
taatgatgtagcacagggtg

SEQ ID NO: 15759 - DNA, 20 bp, synthetic construct
  misc_feature 1..20: note = Description of Artificial Sequence: Synthetic oligonucleotide
  misc_feature 1..20: note = Target: FXN; (+) strand; PAM type: NRG; PAM sequence: TGG
  source 1..20: mol_type = other DNA
tgatgtagcacagggtgcgg

SEQ ID NO: 15760 - DNA, 20 bp, synthetic construct
  misc_feature 1..20: note = Description of Artificial Sequence: Synthetic oligonucleotide
  misc_feature 1..20: note = Target: FXN; (+) strand; PAM type: NRG; PAM sequence: CAG
  source 1..20: mol_type = other DNA
gtggctcacgcctgtaatct

SEQ ID NO: 15761 - DNA, 20 bp, synthetic construct
  misc_feature 1..20: note = Description of Artificial Sequence: Synthetic oligonucleotide
  misc_feature 1..20: note = Target: FXN; (+) strand; PAM type: NRG; PAM sequence: TGG
  source 1..20: mol_type = other DNA
cgcctgtaatctcagcactt

SEQ ID NO: 15762 - DNA, 20 bp, synthetic construct
  misc_feature 1..20: note = Description of Artificial Sequence: Synthetic oligonucleotide
  misc_feature 1..20: note = Target: FXN; (+) strand; PAM type: NRG; PAM sequence: GGG
  source 1..20: mol_type = other DNA
gcctgtaatctcagcacttt

SEQ ID NO: 15763 - DNA, 20 bp, synthetic construct
  misc_feature 1..20: note = Description of Artificial Sequence: Synthetic oligonucleotide
  misc_feature 1..20: note = Target: FXN; (+) strand; PAM type: NRG; PAM sequence: CGG
  source 1..20: mol_type = other DNA
tgtaatctcagcactttggg

SEQ ID NO: 15764 - DNA, 20 bp, synthetic construct
  misc_feature 1..20: note = Description of Artificial Sequence: Synthetic oligonucleotide
  misc_feature 1..20: note = Target: FXN; (+) strand; PAM type: NRG; PAM sequence: GAG
  source 1..20: mol_type = other DNA
tctcagcactttgggcggcc

SEQ ID NO: 15765 - DNA, 20 bp, synthetic construct
  misc_feature 1..20: note = Description of Artificial Sequence: Synthetic oligonucleotide
  misc_feature 1..20: note = Target: FXN; (+) strand; PAM type: NRG; PAM sequence: AGG
  source 1..20: mol_type = other DNA
ctcagcactttgggcggccg

SEQ ID NO: 15766 - DNA, 20 bp, synthetic construct
  misc_feature 1..20: note = Description of Artificial Sequence: Synthetic oligonucleotide
  misc_feature 1..20: note = Target: FXN; (+) strand; PAM type: NRG; PAM sequence: CGG
  source 1..20: mol_type = other DNA
agcactttgggcggccgagg

SEQ ID NO: 15767 - DNA, 20 bp, synthetic construct
  misc_feature 1..20: note = Description of Artificial Sequence: Synthetic oligonucleotide
  misc_feature 1..20: note = Target: FXN; (+) strand; PAM type: NRG; PAM sequence: GGG
  source 1..20: mol_type = other DNA
gcactttgggcggccgaggc

SEQ ID NO: 15768 - DNA, 20 bp, synthetic construct
  misc_feature 1..20: note = Description of Artificial Sequence: Synthetic oligonucleotide
  misc_feature 1..20: note = Target: FXN; (+) strand; PAM type: NRG; PAM sequence: CGG
  source 1..20: mol_type = other DNA
ctttgggcggccgaggcggg

SEQ ID NO: 15769 - DNA, 20 bp, synthetic construct
  misc_feature 1..20: note = Description of Artificial Sequence: Synthetic oligonucleotide
  misc_feature 1..20: note = Target: FXN; (+) strand; PAM type: NRG; PAM sequence: GAG
  source 1..20: mol_type = other DNA
ccgaggcgggcggatcacct

SEQ ID NO: 15770 - DNA, 20 bp, synthetic construct
  misc_feature 1..20: note = Description of Artificial Sequence: Synthetic oligonucleotide
  misc_feature 1..20: note = Target: FXN; (+) strand; PAM type: NRG; PAM sequence: AGG
  source 1..20: mol_type = other DNA
cgaggcgggcggatcacctg

SEQ ID NO: 15771 - DNA, 20 bp, synthetic construct
  misc_feature 1..20: note = Description of Artificial Sequence: Synthetic oligonucleotide
  misc_feature 1..20: note = Target: FXN; (+) strand; PAM type: NRG; PAM sequence: CAG
  source 1..20: mol_type = other DNA
gcgggcggatcacctgaggt

SEQ ID NO: 15772 - DNA, 20 bp, synthetic construct
  misc_feature 1..20: note = Description of Artificial Sequence: Synthetic oligonucleotide
  misc_feature 1..20: note = Target: FXN; (+) strand; PAM type: NRG; PAM sequence: AGG
  source 1..20: mol_type = other DNA
cgggcggatcacctgaggtc

SEQ ID NO: 15773 - DNA, 20 bp, synthetic construct
  misc_feature 1..20: note = Description of Artificial Sequence: Synthetic oligonucleotide
  misc_feature 1..20: note = Target: FXN; (+) strand; PAM type: NRG; PAM sequence: GAG
  source 1..20: mol_type = other DNA
ggcggatcacctgaggtcag

SEQ ID NO: 15774 - DNA, 20 bp, synthetic construct
  misc_feature 1..20: note = Description of Artificial Sequence: Synthetic oligonucleotide
  misc_feature 1..20: note = Target: FXN; (+) strand; PAM type: NRG; PAM sequence: GAG
  source 1..20: mol_type = other DNA
tcacctgaggtcaggagttc

SEQ ID NO: 15775 - DNA, 20 bp, synthetic construct
  misc_feature 1..20: note = Description of Artificial Sequence: Synthetic oligonucleotide
  misc_feature 1..20: note = Target: FXN; (+) strand; PAM type: NRG; PAM sequence: CAG
  source 1..20: mol_type = other DNA
tgaggtcaggagttcgagac

SEQ ID NO: 15776 - DNA, 20 bp, synthetic construct
  misc_feature 1..20: note = Description of Artificial Sequence: Synthetic oligonucleotide
  misc_feature 1..20: note = Target: FXN; (+) strand; PAM type: NRG; PAM sequence: TGG
  source 1..20: mol_type = other DNA
tcaggagttcgagaccagcc

SEQ ID NO: 15777 - DNA, 20 bp, synthetic construct
  misc_feature 1..20: note = Description of Artificial Sequence: Synthetic oligonucleotide
  misc_feature 1..20: note = Target: FXN; (+) strand; PAM type: NRG; PAM sequence: TAG
  source 1..20: mol_type = other DNA
tctactaaaaatacaaaaat

SEQ ID NO: 15778 - DNA, 20 bp, synthetic construct
  misc_feature 1..20: note = Description of Artificial Sequence: Synthetic oligonucleotide
  misc_feature 1..20: note = Target: FXN; (+) strand; PAM type: NRG; PAM sequence: CAG
  source 1..20: mol_type = other DNA
ctaaaaatacaaaaattagc

SEQ ID NO: 15779 - DNA, 20 bp, synthetic construct
  misc_feature 1..20: note = Description of Artificial Sequence: Synthetic oligonucleotide
  misc_feature 1..20: note = Target: FXN; (+) strand; PAM type: NRG; PAM sequence: AGG
  source 1..20: mol_type = other DNA
taaaaatacaaaaattagcc

SEQ ID NO: 15780 - DNA, 20 bp, synthetic construct
  misc_feature 1..20: note = Description of Artificial Sequence: Synthetic oligonucleotide
  misc_feature 1..20: note = Target: FXN; (+) strand; PAM type: NRG; PAM sequence: TGG
  source 1..20: mol_type = other DNA
atacaaaaattagccaggcg

SEQ ID NO: 15781 - DNA, 20 bp, synthetic construct
  misc_feature 1..20: note = Description of Artificial Sequence: Synthetic oligonucleotide
  misc_feature 1..20: note = Target: FXN; (+) strand; PAM type: NRG; PAM sequence: TGG
  source 1..20: mol_type = other DNA
caaaaattagccaggcgtgg

SEQ ID NO: 15782 - DNA, 20 bp, synthetic construct
  misc_feature 1..20: note = Description of Artificial Sequence: Synthetic oligonucleotide
  misc_feature 1..20: note = Target: FXN; (+) strand; PAM type: NRG; PAM sequence: TGG
  source 1..20: mol_type = other DNA
aaattagccaggcgtggtgg

SEQ ID NO: 15783 - DNA, 20 bp, synthetic construct
  misc_feature 1..20: note = Description of Artificial Sequence: Synthetic oligonucleotide
  misc_feature 1..20: note = Target: FXN; (+) strand; PAM type: NRG; PAM sequence: GGG
  source 1..20: mol_type = other DNA
aattagccaggcgtggtggt

SEQ ID NO: 15784 - DNA, 20 bp, synthetic construct
  misc_feature 1..20: note = Description of Artificial Sequence: Synthetic oligonucleotide
  misc_feature 1..20: note = Target: FXN; (+) strand; PAM type: NRG; PAM sequence: CAG
  source 1..20: mol_type = other DNA
gtggtgggcacctgcaatcc

SEQ ID NO: 15785 - DNA, 20 bp, synthetic construct
  misc_feature 1..20: note = Description of Artificial Sequence: Synthetic oligonucleotide
  misc_feature 1..20: note = Target: FXN; (+) strand; PAM type: NRG; PAM sequence: TGG
  source 1..20: mol_type = other DNA
acctgcaatcccagctactc

SEQ ID NO: 15786 - DNA, 20 bp, synthetic construct
  misc_feature 1..20: note = Description of Artificial Sequence: Synthetic oligonucleotide
  misc_feature 1..20: note = Target: FXN; (+) strand; PAM type: NRG; PAM sequence: GAG
  source 1..20: mol_type = other DNA
ctgcaatcccagctactctg

SEQ ID NO: 15787 - DNA, 20 bp, synthetic construct
  misc_feature 1..20: note = Description of Artificial Sequence: Synthetic oligonucleotide
  misc_feature 1..20: note = Target: FXN; (+) strand; PAM type: NRG; PAM sequence: AGG
  source 1..20: mol_type = other DNA
tgcaatcccagctactctgg

SEQ ID NO: 15788 - DNA, 20 bp, synthetic construct
  misc_feature 1..20: note = Description of Artificial Sequence: Synthetic oligonucleotide
  misc_feature 1..20: note = Target: FXN; (+) strand; PAM type: NRG; PAM sequence: GAG
  source 1..20: mol_type = other DNA
tcccagctactctggaggct

SEQ ID NO: 15789 - DNA, 20 bp, synthetic construct
  misc_feature 1..20: note = Description of Artificial Sequence: Synthetic oligonucleotide
  misc_feature 1..20: note = Target: FXN; (+) strand; PAM type: NRG; PAM sequence: CAG
  source 1..20: mol_type = other DNA
agctactctggaggctgaga

SEQ ID NO: 15790 - DNA, 20 bp, synthetic construct
  misc_feature 1..20: note = Description of Artificial Sequence: Synthetic oligonucleotide
  misc_feature 1..20: note = Target: FXN; (+) strand; PAM type: NRG; PAM sequence: CAG
  source 1..20: mol_type = other DNA
gagacagaatctcttgaacc

SEQ ID NO: 15791 - DNA, 20 bp, synthetic construct
  misc_feature 1..20: note = Description of Artificial Sequence: Synthetic oligonucleotide
  misc_feature 1..20: note = Target: FXN; (+) strand; PAM type: NRG; PAM sequence: AGG
  source 1..20: mol_type = other DNA
agacagaatctcttgaaccc

SEQ ID NO: 15792 - DNA, 20 bp, synthetic construct
  misc_feature 1..20: note = Description of Artificial Sequence: Synthetic oligonucleotide
  misc_feature 1..20: note = Target: FXN; (+) strand; PAM type: NRG; PAM sequence: GAG
  source 1..20: mol_type = other DNA
acagaatctcttgaacccag

SEQ ID NO: 15793 - DNA, 20 bp, synthetic construct
  misc_feature 1..20: note = Description of Artificial Sequence: Synthetic oligonucleotide
  misc_feature 1..20: note = Target: FXN; (+) strand; PAM type: NRG; PAM sequence: AGG
  source 1..20: mol_type = other DNA
cagaatctcttgaacccagg

SEQ ID NO: 15794 - DNA, 20 bp, synthetic construct
  misc_feature 1..20: note = Description of Artificial Sequence: Synthetic oligonucleotide
  misc_feature 1..20: note = Target: FXN; (+) strand; PAM type: NRG; PAM sequence: TGG
  source 1..20: mol_type = other DNA
aatctcttgaacccaggagg

SEQ ID NO: 15795 - DNA, 20 bp, synthetic construct
  misc_feature 1..20: note = Description of Artificial Sequence: Synthetic oligonucleotide
  misc_feature 1..20: note = Target: FXN; (+) strand; PAM type: NRG; PAM sequence: GAG
  source 1..20: mol_type = other DNA
tctcttgaacccaggaggtg

SEQ ID NO: 15796 - DNA, 20 bp, synthetic construct
  misc_feature 1..20: note = Description of Artificial Sequence: Synthetic oligonucleotide
  misc_feature 1..20: note = Target: FXN; (+) strand; PAM type: NRG; PAM sequence: CAG
  source 1..20: mol_type = other DNA
aacccaggaggtggagattg

SEQ ID NO: 15797 - DNA, 20 bp, synthetic construct
  misc_feature 1..20: note = Description of Artificial Sequence: Synthetic oligonucleotide
  misc_feature 1..20: note = Target: FXN; (+) strand; PAM type: NRG; PAM sequence: GAG
  source 1..20: mol_type = other DNA
caggaggtggagattgcagt

SEQ ID NO: 15798 - DNA, 20 bp, synthetic construct
  misc_feature 1..20: note = Description of Artificial Sequence: Synthetic oligonucleotide
  misc_feature 1..20: note = Target: FXN; (+) strand; PAM type: NRG; PAM sequence: CAG
  source 1..20: mol_type = other DNA
gaggtggagattgcagtgag

SEQ ID NO: 15799 - DNA, 20 bp, synthetic construct
  misc_feature 1..20: note = Description of Artificial Sequence: Synthetic oligonucleotide
  misc_feature 1..20: note = Target: FXN; (+) strand; PAM type: NRG; PAM sequence: GAG
  source 1..20: mol_type = other DNA
ggtggagattgcagtgagca

SEQ ID NO: 15800 - DNA, 20 bp, synthetic construct
  misc_feature 1..20: note = Description of Artificial Sequence: Synthetic oligonucleotide
  misc_feature 1..20: note = Target: FXN; (+) strand; PAM type: NRG; PAM sequence: TGG
  source 1..20: mol_type = other DNA
gagattgcagtgagcagaga

SEQ ID NO: 15801 - DNA, 20 bp, synthetic construct
  misc_feature 1..20: note = Description of Artificial Sequence: Synthetic oligonucleotide
  misc_feature 1..20: note = Target: FXN; (+) strand; PAM type: NRG; PAM sequence: CAG
  source 1..20: mol_type = other DNA
gagatggcaccactgcattc

SEQ ID NO: 15802 - DNA, 20 bp, synthetic construct
  misc_feature 1..20: note = Description of Artificial Sequence: Synthetic oligonucleotide
  misc_feature 1..20: note = Target: FXN; (+) strand; PAM type: NRG; PAM sequence: TGG
  source 1..20: mol_type = other DNA
ggcaccactgcattccagcc

SEQ ID NO: 15803 - DNA, 20 bp, synthetic construct
  misc_feature 1..20: note = Description of Artificial Sequence: Synthetic oligonucleotide
  misc_feature 1..20: note = Target: FXN; (+) strand; PAM type: NRG; PAM sequence: GGG
  source 1..20: mol_type = other DNA
gcaccactgcattccagcct

SEQ ID NO: 15804 - DNA, 20 bp, synthetic construct
  misc_feature 1..20: note = Description of Artificial Sequence: Synthetic oligonucleotide
  misc_feature 1..20: note = Target: FXN; (+) strand; PAM type: NRG; PAM sequence: AAG
  source 1..20: mol_type = other DNA
gcattccagcctgggcaaca

SEQ ID NO: 15805 - DNA, 20 bp, synthetic construct
  misc_feature 1..20: note = Description of Artificial Sequence: Synthetic oligonucleotide
  misc_feature 1..20: note = Target: FXN; (+) strand; PAM type: NRG; PAM sequence: AAG
  source 1..20: mol_type = other DNA
tccagcctgggcaacaaagc

SEQ ID NO: 15806 - DNA, 20 bp, synthetic construct
  misc_feature 1..20: note = Description of Artificial Sequence: Synthetic oligonucleotide
  misc_feature 1..20: note = Target: FXN; (+) strand; PAM type: NRG; PAM sequence: CAG
  source 1..20: mol_type = other DNA
aataataataactaatgatg

SEQ ID NO: 15807 - DNA, 20 bp, synthetic construct
  misc_feature 1..20: note = Description of Artificial Sequence: Synthetic oligonucleotide
  misc_feature 1..20: note = Target: FXN; (+) strand; PAM type: NRG; PAM sequence: GAG
  source 1..20: mol_type = other DNA
tgatgcagctttctctctct

SEQ ID NO: 15808 - DNA, 20 bp, synthetic construct
  misc_feature 1..20: note = Description of Artificial Sequence: Synthetic oligonucleotide
  misc_feature 1..20: note = Target: FXN; (+) strand; PAM type: NRG; PAM sequence: CAG
  source 1..20: mol_type = other DNA
ctctctctgagtatataatg

SEQ ID NO: 15809 - DNA, 20 bp, synthetic construct
  misc_feature 1..20: note = Description of Artificial Sequence: Synthetic oligonucleotide
  misc_feature 1..20: note = Target: FXN; (+) strand; PAM type: NRG; PAM sequence: GAG
  source 1..20: mol_type = other DNA
taatgcagttctgatgatgt

SEQ ID NO: 15810 - DNA, 20 bp, synthetic construct
  misc_feature 1..20: note = Description of Artificial Sequence: Synthetic oligonucleotide
  misc_feature 1..20: note = Target: FXN; (+) strand; PAM type: NRG; PAM sequence: AGG
  source 1..20: mol_type = other DNA
aatgcagttctgatgatgtg

SEQ ID NO: 15811 - DNA, 20 bp, synthetic construct
  misc_feature 1..20: note = Description of Artificial Sequence: Synthetic oligonucleotide
  misc_feature 1..20: note = Target: FXN; (+) strand; PAM type: NRG; PAM sequence: AAG
  source 1..20: mol_type = other DNA
gcagttctgatgatgtgagg

SEQ ID NO: 15812 - DNA, 20 bp, synthetic construct
  misc_feature 1..20: note = Description of Artificial Sequence: Synthetic oligonucleotide
  misc_feature 1..20: note = Target: FXN; (+) strand; PAM type: NRG; PAM sequence: AGG
  source 1..20: mol_type = other DNA
cagttctgatgatgtgagga

SEQ ID NO: 15813 - DNA, 20 bp, synthetic construct
  misc_feature 1..20: note = Description of Artificial Sequence: Synthetic oligonucleotide
  misc_feature 1..20: note = Target: FXN; (+) strand; PAM type: NRG; PAM sequence: GGG
  source 1..20: mol_type = other DNA
agttctgatgatgtgaggaa

SEQ ID NO: 15814 - DNA, 20 bp, synthetic construct
  misc_feature 1..20: note = Description of Artificial Sequence: Synthetic oligonucleotide
  misc_feature 1..20: note = Target: FXN; (+) strand; PAM type: NRG; PAM sequence: TGG
  source 1..20: mol_type = other DNA
gtgaggaagggcctcactgt

SEQ ID NO: 15815 - DNA, 20 bp, synthetic construct
  misc_feature 1..20: note = Description of Artificial Sequence: Synthetic oligonucleotide
  misc_feature 1..20: note = Target: FXN; (+) strand; PAM type: NRG; PAM sequence: TGG
  source 1..20: mol_type = other DNA
gaagggcctcactgttggtg

SEQ ID NO: 15816 - DNA, 20 bp, synthetic construct
  misc_feature 1..20: note = Description of Artificial Sequence: Synthetic oligonucleotide
  misc_feature 1..20: note = Target: FXN; (+) strand; PAM type: NRG; PAM sequence: CAG
  source 1..20: mol_type = other DNA
gggcctcactgttggtgtgg

SEQ ID NO: 15817 - DNA, 20 bp, synthetic construct
  misc_feature 1..20: note = Description of Artificial Sequence: Synthetic oligonucleotide
  misc_feature 1..20: note = Target: FXN; (+) strand; PAM type: NRG; PAM sequence: GAG
  source 1..20: mol_type = other DNA
gcctcactgttggtgtggca

SEQ ID NO: 15818 - DNA, 20 bp, synthetic construct
  misc_feature 1..20: note = Description of Artificial Sequence: Synthetic oligonucleotide
  misc_feature 1..20: note = Target: FXN; (+) strand; PAM type: NRG; PAM sequence: GAG
  source 1..20: mol_type = other DNA
ctgttggtgtggcagagtct

SEQ ID NO: 15819 - DNA, 20 bp, synthetic construct
  misc_feature 1..20: note = Description of Artificial Sequence: Synthetic oligonucleotide
  misc_feature 1..20: note = Target: FXN; (+) strand; PAM type: NRG; PAM sequence: TGG
  source 1..20: mol_type = other DNA
tgtggcagagtctgagacca

SEQ ID NO: 15820 - DNA, 20 bp, synthetic construct
  misc_feature 1..20: note = Description of Artificial Sequence: Synthetic oligonucleotide
  misc_feature 1..20: note = Target: FXN; (+) strand; PAM type: NRG; PAM sequence: TGG
  source 1..20: mol_type = other DNA
gcagagtctgagaccatggc

SEQ ID NO: 15821 - DNA, 20 bp, synthetic construct
  misc_feature 1..20: note = Description of Artificial Sequence: Synthetic oligonucleotide
  misc_feature 1..20: note = Target: FXN; (+) strand; PAM type: NRG; PAM sequence: TGG
  source 1..20: mol_type = other DNA
acactaccctttgatgccta

SEQ ID NO: 15822 - DNA, 20 bp, synthetic construct
  misc_feature 1..20: note = Description of Artificial Sequence: Synthetic oligonucleotide
  misc_feature 1..20: note = Target: FXN; (+) strand; PAM type: NRG; PAM sequence: GGG
  source 1..20: mol_type = other DNA
cactaccctttgatgcctat

SEQ ID NO: 15823 - DNA, 20 bp, synthetic construct
  misc_feature 1..20: note = Description of Artificial Sequence: Synthetic oligonucleotide
  misc_feature 1..20: note = Target: FXN; (+) strand; PAM type: NRG; PAM sequence: TGG
  source 1..20: mol_type = other DNA
gcctatgggctctcccttta

SEQ ID NO: 15824 - DNA, 20 bp, synthetic construct
  misc_feature 1..20: note = Description of Artificial Sequence: Synthetic oligonucleotide
  misc_feature 1..20: note = Target: FXN; (+) strand; PAM type: NRG; PAM sequence: AAG
  source 1..20: mol_type = other DNA
ggctctccctttatggtttc

SEQ ID NO: 15825 - DNA, 20 bp, synthetic construct
  misc_feature 1..20: note = Description of Artificial Sequence: Synthetic oligonucleotide
  misc_feature 1..20: note = Target: FXN; (+) strand; PAM type: NRG; PAM sequence: AGG
  source 1..20: mol_type = other DNA
gctctccctttatggtttca

SEQ ID NO: 15826 - DNA, 20 bp, synthetic construct
  misc_feature 1..20: note = Description of Artificial Sequence: Synthetic oligonucleotide
  misc_feature 1..20: note = Target: FXN; (+) strand; PAM type: NRG; PAM sequence: GAG
  source 1..20: mol_type = other DNA
tctccctttatggtttcaag

SEQ ID NO: 15827 - DNA, 20 bp, synthetic construct
  misc_feature 1..20: note = Description of Artificial Sequence: Synthetic oligonucleotide
  misc_feature 1..20: note = Target: FXN; (+) strand; PAM type: NRG; PAM sequence: AGG
  source 1..20: mol_type = other DNA
ctccctttatggtttcaagg

SEQ ID NO: 15828 - DNA, 20 bp, synthetic construct
  misc_feature 1..20: note = Description of Artificial Sequence: Synthetic oligonucleotide
  misc_feature 1..20: note = Target: FXN; (+) strand; PAM type: NRG; PAM sequence: GGG
  source 1..20: mol_type = other DNA
tccctttatggtttcaagga

SEQ ID NO: 15829 - DNA, 20 bp, synthetic construct
  misc_feature 1..20: note = Description of Artificial Sequence: Synthetic oligonucleotide
  misc_feature 1..20: note = Target: FXN; (+) strand; PAM type: NRG; PAM sequence: TGG
  source 1..20: mol_type = other DNA
caaggagggcttctcaatct

SEQ ID NO: 15830 - DNA, 20 bp, synthetic construct
  misc_feature 1..20: note = Description of Artificial Sequence: Synthetic oligonucleotide
  misc_feature 1..20: note = Target: FXN; (+) strand; PAM type: NRG; PAM sequence: CAG
  source 1..20: mol_type = other DNA
ggagggcttctcaatcttgg

SEQ ID NO: 15831 - DNA, 20 bp, synthetic construct
  misc_feature 1..20: note = Description of Artificial Sequence: Synthetic oligonucleotide
  misc_feature 1..20: note = Target: FXN; (+) strand; PAM type: NRG; PAM sequence: TGG
  source 1..20: mol_type = other DNA
tctcaatcttggcagaattt

SEQ ID NO: 15832 - DNA, 20 bp, synthetic construct
  misc_feature 1..20: note = Description of Artificial Sequence: Synthetic oligonucleotide
  misc_feature 1..20: note = Target: FXN; (+) strand; PAM type: NRG; PAM sequence: TGG
  source 1..20: mol_type = other DNA
atcttggcagaattttggac

SEQ ID NO: 15833 - DNA, 20 bp, synthetic construct
  misc_feature 1..20: note = Description of Artificial Sequence: Synthetic oligonucleotide
  misc_feature 1..20: note = Target: FXN; (+) strand; PAM type: NRG; PAM sequence: TAG
  source 1..20: mol_type = other DNA
tggcagaattttggactgga

SEQ ID NO: 15834 - DNA, 20 bp, synthetic construct
  misc_feature 1..20: note = Description of Artificial Sequence: Synthetic oligonucleotide
  misc_feature 1..20: note = Target: FXN; (+) strand; PAM type: NRG; PAM sequence: CAG
  source 1..20: mol_type = other DNA
ctggatagttctttgttgca

SEQ ID NO: 15835 - DNA, 20 bp, synthetic construct
  misc_feature 1..20: note = Description of Artificial Sequence: Synthetic oligonucleotide
  misc_feature 1..20: note = Target: FXN; (+) strand; PAM type: NRG; PAM sequence: AGG
  source 1..20: mol_type = other DNA
tggatagttctttgttgcac

SEQ ID NO: 15836 - DNA, 20 bp, synthetic construct
  misc_feature 1..20: note = Description of Artificial Sequence: Synthetic oligonucleotide
  misc_feature 1..20: note = Target: FXN; (+) strand; PAM type: NRG; PAM sequence: TGG
  source 1..20: mol_type = other DNA
atagttctttgttgcacagg

SEQ ID NO: 15837 - DNA, 20 bp, synthetic construct
  misc_feature 1..20: note = Description of Artificial Sequence: Synthetic oligonucleotide
  misc_feature 1..20: note = Target: FXN; (+) strand; PAM type: NRG; PAM sequence: GGG
  source 1..20: mol_type = other DNA
tagttctttgttgcacaggt

SEQ ID NO: 15838 - DNA, 20 bp, synthetic construct
  misc_feature 1..20: note = Description of Artificial Sequence: Synthetic oligonucleotide
  misc_feature 1..20: note = Target: FXN; (+) strand; PAM type: NRG; PAM sequence: GGG
  source 1..20: mol_type = other DNA
agttctttgttgcacaggtg

SEQ ID NO: 15839 - DNA, 20 bp, synthetic construct
  misc_feature 1..20: note = Description of Artificial Sequence: Synthetic oligonucleotide
  misc_feature 1..20: note = Target: FXN; (+) strand; PAM type: NRG; PAM sequence: GGG
  source 1..20: mol_type = other DNA
gttctttgttgcacaggtgg

SEQ ID NO: 15840 - DNA, 20 bp, synthetic construct
  misc_feature 1..20: note = Description of Artificial Sequence: Synthetic oligonucleotide
  misc_feature 1..20: note = Target: FXN; (+) strand; PAM type: NRG; PAM sequence: GGG
  source 1..20: mol_type = other DNA
ttctttgttgcacaggtggg

SEQ ID NO: 15841 - DNA, 20 bp, synthetic construct
  misc_feature 1..20: note = Description of Artificial Sequence: Synthetic oligonucleotide
  misc_feature 1..20: note = Target: FXN; (+) strand; PAM type: NRG; PAM sequence: CAG
  source 1..20: mol_type = other DNA
gggggctgtcctgcacatca

SEQ ID NO: 15842 - DNA, 20 bp, synthetic construct
  misc_feature 1..20: note = Description of Artificial Sequence: Synthetic oligonucleotide
  misc_feature 1..20: note = Target: FXN; (+) strand; PAM type: NRG; PAM sequence: AGG
  source 1..20: mol_type = other DNA
ggggctgtcctgcacatcac

SEQ ID NO: 15843 - DNA, 20 bp, synthetic construct
  misc_feature 1..20: note = Description of Artificial Sequence: Synthetic oligonucleotide
  misc_feature 1..20: note = Target: FXN; (+) strand; PAM type: NRG; PAM sequence: TGG
  source 1..20: mol_type = other DNA
atcacaggatgtttcatccc

SEQ ID NO: 15844 - DNA, 20 bp, synthetic construct
  misc_feature 1..20: note = Description of Artificial Sequence: Synthetic oligonucleotide
  misc_feature 1..20: note = Target: FXN; (+) strand; PAM type: NRG; PAM sequence: TAG
  source 1..20: mol_type = other DNA
catccctggcctctacctac

SEQ ID NO: 15845 - DNA, 20 bp, synthetic construct
  misc_feature 1..20: note = Description of Artificial Sequence: Synthetic oligonucleotide
  misc_feature 1..20: note = Target: FXN; (+) strand; PAM type: NRG; PAM sequence: CAG
  source 1..20: mol_type = other DNA
ggcctctacctactagatgc

SEQ ID NO: 15846 - DNA, 20 bp, synthetic construct
  misc_feature 1..20: note = Description of Artificial Sequence: Synthetic oligonucleotide
  misc_feature 1..20: note = Target: FXN; (+) strand; PAM type: NRG; PAM sequence: TAG
  source 1..20: mol_type = other DNA
ctctacctactagatgccag

SEQ ID NO: 15847 - DNA, 20 bp, synthetic construct
  misc_feature 1..20: note = Description of Artificial Sequence: Synthetic oligonucleotide
  misc_feature 1..20: note = Target: FXN; (+) strand; PAM type: NRG; PAM sequence: CAG
  source 1..20: mol_type = other DNA
agtagaacatacccacccca

SEQ ID NO: 15848 - DNA, 20 bp, synthetic construct
  misc_feature 1..20: note = Description of Artificial Sequence: Synthetic oligonucleotide
  misc_feature 1..20: note = Target: FXN; (+) strand; PAM type: NRG; PAM sequence: AAG
  source 1..20: mol_type = other DNA
ctgcctgttgtgacaatcaa

SEQ ID NO: 15849 - DNA, 20 bp, synthetic construct
  misc_feature 1..20: note = Description of Artificial Sequence: Synthetic oligonucleotide
  misc_feature 1..20: note = Target: FXN; (+) strand; PAM type: NRG; PAM sequence: CAG
  source 1..20: mol_type = other DNA
gtgacaatcaaaagcatctc

SEQ ID NO: 15850 - DNA, 20 bp, synthetic construct
  misc_feature 1..20: note = Description of Artificial Sequence: Synthetic oligonucleotide
  misc_feature 1..20: note = Target: FXN; (+) strand; PAM type: NRG; PAM sequence: CAG
  source 1..20: mol_type = other DNA
aagcatctccagatactttg

SEQ ID NO: 15851 - DNA, 20 bp, synthetic construct
  misc_feature 1..20: note = Description of Artificial Sequence: Synthetic oligonucleotide
  misc_feature 1..20: note = Target: FXN; (+) strand; PAM type: NRG; PAM sequence: AGG
  source 1..20: mol_type = other DNA
agcatctccagatactttgc

SEQ ID NO: 15852 - DNA, 20 bp, synthetic construct
  misc_feature 1..20: note = Description of Artificial Sequence: Synthetic oligonucleotide
  misc_feature 1..20: note = Target: FXN; (+) strand; PAM type: NRG; PAM sequence: GGG
  source 1..20: mol_type = other DNA
gcatctccagatactttgca

SEQ ID NO: 15853 - DNA, 20 bp, synthetic construct
  misc_feature 1..20: note = Description of Artificial Sequence: Synthetic oligonucleotide
  misc_feature 1..20: note = Target: FXN; (+) strand; PAM type: NRG; PAM sequence: GGG
  source 1..20: mol_type = other DNA
catctccagatactttgcag

SEQ ID NO: 15854 - DNA, 20 bp, synthetic construct
  misc_feature 1..20: note = Description of Artificial Sequence: Synthetic oligonucleotide
  misc_feature 1..20: note = Target: FXN; (+) strand; PAM type: NRG; PAM sequence: GGG
  source 1..20: mol_type = other DNA
atctccagatactttgcagg

SEQ ID NO: 15855 - DNA, 20 bp, synthetic construct
  misc_feature 1..20: note = Description of Artificial Sequence: Synthetic oligonucleotide
  misc_feature 1..20: note = Target: FXN; (+) strand; PAM type: NRG; PAM sequence: CAG
  source 1..20: mol_type = other DNA
cagggggaaaatgatttctc

SEQ ID NO: 15856 - DNA, 20 bp, synthetic construct
  misc_feature 1..20: note = Description of Artificial Sequence: Synthetic oligonucleotide
  misc_feature 1..20: note = Target: FXN; (+) strand; PAM type: NRG; PAM sequence: AGG
  source 1..20: mol_type = other DNA
agggggaaaatgatttctcc

SEQ ID NO: 15857 - DNA, 20 bp, synthetic construct
  misc_feature 1..20: note = Description of Artificial Sequence: Synthetic oligonucleotide
  misc_feature 1..20: note = Target: FXN; (+) strand; PAM type: NRG; PAM sequence: TGG
  source 1..20: mol_type = other DNA
gaaaatgatttctccaggcc

SEQ ID NO: 15858 - DNA, 20 bp, synthetic construct
  misc_feature 1..20: note = Description of Artificial Sequence: Synthetic oligonucleotide
  misc_feature 1..20: note = Target: FXN; (+) strand; PAM type: NRG; PAM sequence: CAG
  source 1..20: mol_type = other DNA
caggcctggcatatacataa

SEQ ID NO: 15859 - DNA, 20 bp, synthetic construct
  misc_feature 1..20: note = Description of Artificial Sequence: Synthetic oligonucleotide
  misc_feature 1..20: note = Target: FXN; (+) strand; PAM type: NRG; PAM sequence: AAG
  source 1..20: mol_type = other DNA
gcatatacataacagtattt

SEQ ID NO: 15860 - DNA, 20 bp, synthetic construct
  misc_feature 1..20: note = Description of Artificial Sequence: Synthetic oligonucleotide
  misc_feature 1..20: note = Target: FXN; (+) strand; PAM type: NRG; PAM sequence: CAG
  source 1..20: mol_type = other DNA
tatacataacagtatttaag

SEQ ID NO: 15861 - DNA, 20 bp, synthetic construct
  misc_feature 1..20: note = Description of Artificial Sequence: Synthetic oligonucleotide
  misc_feature 1..20: note = Target: FXN; (+) strand; PAM type: NRG; PAM sequence: TAG
  source 1..20: mol_type = other DNA
acagtatttaagcagctgcc

SEQ ID NO: 15862 - DNA, 20 bp, synthetic construct
  misc_feature 1..20: note = Description of Artificial Sequence: Synthetic oligonucleotide
  misc_feature 1..20: note = Target: FXN; (+) strand; PAM type: NRG; PAM sequence: CAG
  source 1..20: mol_type = other DNA
tgcctagaattaattaaaca

SEQ ID NO: 15863 - DNA, 20 bp, synthetic construct
  misc_feature 1..20: note = Description of Artificial Sequence: Synthetic oligonucleotide
  misc_feature 1..20: note = Target: FXN; (+) strand; PAM type: NRG; PAM sequence: AAG
  source 1..20: mol_type = other DNA
ctagaattaattaaacacag

SEQ ID NO: 15864 - DNA, 20 bp, synthetic construct
  misc_feature 1..20: note = Description of Artificial Sequence: Synthetic oligonucleotide
  misc_feature 1..20: note = Target: FXN; (+) strand; PAM type: NRG; PAM sequence: AGG
  source 1..20: mol_type = other DNA
tagaattaattaaacacaga

SEQ ID NO: 15865 - DNA, 20 bp, synthetic construct
  misc_feature 1..20: note = Description of Artificial Sequence: Synthetic oligonucleotide
  misc_feature 1..20: note = Target: FXN; (+) strand; PAM type: NRG; PAM sequence: CAG
  source 1..20: mol_type = other DNA
acagaaggatgtctctcatc

SEQ ID NO: 15866 - DNA, 20 bp, synthetic construct
  misc_feature 1..20: note = Description of Artificial Sequence: Synthetic oligonucleotide
  misc_feature 1..20: note = Target: FXN; (+) strand; PAM type: NRG; PAM sequence: TGG
  source 1..20: mol_type = other DNA
gtctctcatccagaatgccc

SEQ ID NO: 15867 - DNA, 20 bp, synthetic construct
  misc_feature 1..20: note = Description of Artificial Sequence: Synthetic oligonucleotide
  misc_feature 1..20: note = Target: FXN; (+) strand; PAM type: NRG; PAM sequence: TAG
  source 1..20: mol_type = other DNA
gccctggaccacctctttga

SEQ ID NO: 15868 - DNA, 20 bp, synthetic construct
  misc_feature 1..20: note = Description of Artificial Sequence: Synthetic oligonucleotide
  misc_feature 1..20: note = Target: FXN; (+) strand; PAM type: NRG; PAM sequence: AGG
  source 1..20: mol_type = other DNA
ccctggaccacctctttgat

SEQ ID NO: 15869 - DNA, 20 bp, synthetic construct
  misc_feature 1..20: note = Description of Artificial Sequence: Synthetic oligonucleotide
  misc_feature 1..20: note = Target: FXN; (+) strand; PAM type: NRG; PAM sequence: CAG
  source 1..20: mol_type = other DNA
ccacctctttgataggcaat

SEQ ID NO: 15870 - DNA, 20 bp, synthetic construct
  misc_feature 1..20: note = Description of Artificial Sequence: Synthetic oligonucleotide
  misc_feature 1..20: note = Target: FXN; (+) strand; PAM type: NRG; PAM sequence: AAG
  source 1..20: mol_type = other DNA
cctcctccaccctatttttg

SEQ ID NO: 15871 - DNA, 20 bp, synthetic construct
  misc_feature 1..20: note = Description of Artificial Sequence: Synthetic oligonucleotide
  misc_feature 1..20: note = Target: FXN; (+) strand; PAM type: NRG; PAM sequence: AGG
  source 1..20: mol_type = other DNA
ctcctccaccctatttttga

SEQ ID NO: 15872 - DNA, 20 bp, synthetic construct
  misc_feature 1..20: note = Description of Artificial Sequence: Synthetic oligonucleotide
  misc_feature 1..20: note = Target: FXN; (+) strand; PAM type: NRG; PAM sequence: TAG
  source 1..20: mol_type = other DNA
ttccttgattcccccatccc

SEQ ID NO: 15873 - DNA, 20 bp, synthetic construct
  misc_feature 1..20: note = Description of Artificial Sequence: Synthetic oligonucleotide
  misc_feature 1..20: note = Target: FXN; (+) strand; PAM type: NRG; PAM sequence: TAG
  source 1..20: mol_type = other DNA
cactcaacactcacacctgt

SEQ ID NO: 15874 - DNA, 20 bp, synthetic construct
  misc_feature 1..20: note = Description of Artificial Sequence: Synthetic oligonucleotide
  misc_feature 1..20: note = Target: FXN; (+) strand; PAM type: NRG; PAM sequence: TAG
  source 1..20: mol_type = other DNA
tcctcttgacacttgtcatt

SEQ ID NO: 15875 - DNA, 20 bp, synthetic construct
  misc_feature 1..20: note = Description of Artificial Sequence: Synthetic oligonucleotide
  misc_feature 1..20: note = Target: FXN; (+) strand; PAM type: NRG; PAM sequence: AAG
  source 1..20: mol_type = other DNA
cacttgtcatttagcatcct

SEQ ID NO: 15876 - DNA, 20 bp, synthetic construct
  misc_feature 1..20: note = Description of Artificial Sequence: Synthetic oligonucleotide
  misc_feature 1..20: note = Target: FXN; (+) strand; PAM type: NRG; PAM sequence: AAG
  source 1..20: mol_type = other DNA
gtctctcttcacgattcaca

SEQ ID NO: 15877 - DNA, 20 bp, synthetic construct
  misc_feature 1..20: note = Description of Artificial Sequence: Synthetic oligonucleotide
  misc_feature 1..20: note = Target: FXN; (+) strand; PAM type: NRG; PAM sequence: TGG
  source 1..20: mol_type = other DNA
tctcttcacgattcacaaag

SEQ ID NO: 15878 - DNA, 20 bp, synthetic construct
  misc_feature 1..20: note = Description of Artificial Sequence: Synthetic oligonucleotide
  misc_feature 1..20: note = Target: FXN; (+) strand; PAM type: NRG; PAM sequence: TGG
  source 1..20: mol_type = other DNA
cacgattcacaaagtggctt

SEQ ID NO: 15879 - DNA, 20 bp, synthetic construct
  misc_feature 1..20: note = Description of Artificial Sequence: Synthetic oligonucleotide
  misc_feature 1..20: note = Target: FXN; (+) strand; PAM type: NRG; PAM sequence: AAG
  source 1..20: mol_type = other DNA
gattcacaaagtggctttgg

SEQ ID NO: 15880 - DNA, 20 bp, synthetic construct
  misc_feature 1..20: note = Description of Artificial Sequence: Synthetic oligonucleotide
  misc_feature 1..20: note = Target: FXN; (+) strand; PAM type: NRG; PAM sequence: TAG
  source 1..20: mol_type = other DNA
aagtggctttggaagaactt

SEQ ID NO: 15881 - DNA, 20 bp, synthetic construct
  misc_feature 1..20: note = Description of Artificial Sequence: Synthetic oligonucleotide
  misc_feature 1..20: note = Target: FXN; (+) strand; PAM type: NRG; PAM sequence: TGG
  source 1..20: mol_type = other DNA
ccttcccatcttctctgcca

SEQ ID NO: 15882 - DNA, 20 bp, synthetic construct
  misc_feature 1..20: note = Description of Artificial Sequence: Synthetic oligonucleotide
  misc_feature 1..20: note = Target: FXN; (+) strand; PAM type: NRG; PAM sequence: AAG
  source 1..20: mol_type = other DNA
cccatcttctctgccatgga

SEQ ID NO: 15883 - DNA, 20 bp, synthetic construct
  misc_feature 1..20: note = Description of Artificial Sequence: Synthetic oligonucleotide
  misc_feature 1..20: note = Target: FXN; (+) strand; PAM type: NRG; PAM sequence: AAG
  source 1..20: mol_type = other DNA
ctgacattttcttttttttt

SEQ ID NO: 15884 - DNA, 20 bp, synthetic construct
  misc_feature 1..20: note = Description of Artificial Sequence: Synthetic oligonucleotide
  misc_feature 1..20: note = Target: FXN; (+) strand; PAM type: NRG; PAM sequence: CAG
  source 1..20: mol_type = other DNA
cattttctttttttttaaga

SEQ ID NO: 15885 - DNA, 20 bp, synthetic construct
  misc_feature 1..20: note = Description of Artificial Sequence: Synthetic oligonucleotide
  misc_feature 1..20: note = Target: FXN; (+) strand; PAM type: NRG; PAM sequence: TGG
  source 1..20: mol_type = other DNA
aagacagtatcttgctatga

SEQ ID NO: 15886 - DNA, 20 bp, synthetic construct
  misc_feature 1..20: note = Description of Artificial Sequence: Synthetic oligonucleotide
  misc_feature 1..20: note = Target: FXN; (+) strand; PAM type: NRG; PAM sequence: CGG
  source 1..20: mol_type = other DNA
cagtatcttgctatgatggc

SEQ ID NO: 15887 - DNA, 20 bp, synthetic construct
  misc_feature 1..20: note = Description of Artificial Sequence: Synthetic oligonucleotide
  misc_feature 1..20: note = Target: FXN; (+) strand; PAM type: NRG; PAM sequence: GGG
  source 1..20: mol_type = other DNA
agtatcttgctatgatggcc

SEQ ID NO: 15888 - DNA, 20 bp, synthetic construct
  misc_feature 1..20: note = Description of Artificial Sequence: Synthetic oligonucleotide
  misc_feature 1..20: note = Target: FXN; (+) strand; PAM type: NRG; PAM sequence: TGG
  source 1..20: mol_type = other DNA
tcttgctatgatggccgggc

SEQ ID NO: 15889 - DNA, 20 bp, synthetic construct
  misc_feature 1..20: note = Description of Artificial Sequence: Synthetic oligonucleotide
  misc_feature 1..20: note = Target: FXN; (+) strand; PAM type: NRG; PAM sequence: TGG
  source 1..20: mol_type = other DNA
atggccgggctggaatgctg

SEQ ID NO: 15890 - DNA, 20 bp, synthetic construct
  misc_feature 1..20: note = Description of Artificial Sequence: Synthetic oligonucleotide
  misc_feature 1..20: note = Target: FXN; (+) strand; PAM type: NRG; PAM sequence: CAG
  source 1..20: mol_type = other DNA
tggaatgctgtggctattca

SEQ ID NO: 15891 - DNA, 20 bp, synthetic construct
  misc_feature 1..20: note = Description of Artificial Sequence: Synthetic oligonucleotide
  misc_feature 1..20: note = Target: FXN; (+) strand; PAM type: NRG; PAM sequence: AGG
  source 1..20: mol_type = other DNA
ggaatgctgtggctattcac

SEQ ID NO: 15892 - DNA, 20 bp, synthetic construct
  misc_feature 1..20: note = Description of Artificial Sequence: Synthetic oligonucleotide
  misc_feature 1..20: note = Target: FXN; (+) strand; PAM type: NRG; PAM sequence: TAG
  source 1..20: mol_type = other DNA
gctattcacaggcacaatca

SEQ ID NO: 15893 - DNA, 20 bp, synthetic construct
  misc_feature 1..20: note = Description of Artificial Sequence: Synthetic oligonucleotide
  misc_feature 1..20: note = Target: FXN; (+) strand; PAM type: NRG; PAM sequence: CAG
  source 1..20: mol_type = other DNA
ggcacaatcatagctcactg

SEQ ID NO: 15894 - DNA, 20 bp, synthetic construct
  misc_feature 1..20: note = Description of Artificial Sequence: Synthetic oligonucleotide
  misc_feature 1..20: note = Target: FXN; (+) strand; PAM type: NRG; PAM sequence: GAG
  source 1..20: mol_type = other DNA
tcatagctcactgcagcctt

SEQ ID NO: 15895 - DNA, 20 bp, synthetic construct
  misc_feature 1..20: note = Description of Artificial Sequence: Synthetic oligonucleotide
  misc_feature 1..20: note = Target: FXN; (+) strand; PAM type: NRG; PAM sequence: CAG
  source 1..20: mol_type = other DNA
tcactgcagccttgagctcc

SEQ ID NO: 15896 - DNA, 20 bp, synthetic construct
  misc_feature 1..20: note = Description of Artificial Sequence: Synthetic oligonucleotide
  misc_feature 1..20: note = Target: FXN; (+) strand; PAM type: NRG; PAM sequence: AGG
  source 1..20: mol_type = other DNA
cactgcagccttgagctccc

SEQ ID NO: 15897 - DNA, 20 bp, synthetic construct
  misc_feature 1..20: note = Description of Artificial Sequence: Synthetic oligonucleotide
  misc_feature 1..20: note = Target: FXN; (+) strand; PAM type: NRG; PAM sequence: AAG
  source 1..20: mol_type = other DNA
agccttgagctcccaggctc

SEQ ID NO: 15898 - DNA, 20 bp, synthetic construct
  misc_feature 1..20: note = Description of Artificial Sequence: Synthetic oligonucleotide
  misc_feature 1..20: note = Target: FXN; (+) strand; PAM type: NRG; PAM sequence: CAG
  source 1..20: mol_type = other DNA
ctcaagtgatcctcccgcct

SEQ ID NO: 15899 - DNA, 20 bp, synthetic construct
  misc_feature 1..20: note = Description of Artificial Sequence: Synthetic oligonucleotide
  misc_feature 1..20: note = Target: FXN; (+) strand; PAM type: NRG; PAM sequence: GAG
  source 1..20: mol_type = other DNA
tcctcccgcctcagcctcct

SEQ ID NO: 15900 - DNA, 20 bp, synthetic construct
  misc_feature 1..20: note = Description of Artificial Sequence: Synthetic oligonucleotide
  misc_feature 1..20: note = Target: FXN; (+) strand; PAM type: NRG; PAM sequence: TAG
  source 1..20: mol_type = other DNA
tcccgcctcagcctcctgag

SEQ ID NO: 15901 - DNA, 20 bp, synthetic construct
  misc_feature 1..20: note = Description of Artificial Sequence: Synthetic oligonucleotide
  misc_feature 1..20: note = Target: FXN; (+) strand; PAM type: NRG; PAM sequence: GAG
  source 1..20: mol_type = other DNA
cctcagcctcctgagtagct

SEQ ID NO: 15902 - DNA, 20 bp, synthetic construct
  misc_feature 1..20: note = Description of Artificial Sequence: Synthetic oligonucleotide
  misc_feature 1..20: note = Target: FXN; (+) strand; PAM type: NRG; PAM sequence: CAG
  source 1..20: mol_type = other DNA
ctcctgagtagctgagatca

SEQ ID NO: 15903 - DNA, 20 bp, synthetic construct
  misc_feature 1..20: note = Description of Artificial Sequence: Synthetic oligonucleotide
  misc_feature 1..20: note = Target: FXN; (+) strand; PAM type: NRG; PAM sequence: AGG
  source 1..20: mol_type = other DNA
tcctgagtagctgagatcac

SEQ ID NO: 15904 - DNA, 20 bp, synthetic construct
  misc_feature 1..20: note = Description of Artificial Sequence: Synthetic oligonucleotide
  misc_feature 1..20: note = Target: FXN; (+) strand; PAM type: NRG; PAM sequence: CGG
  source 1..20: mol_type = other DNA
caggcatgcactaccacact

SEQ ID NO: 15905 - DNA, 20 bp, synthetic construct
  misc_feature 1..20: note = Description of Artificial Sequence: Synthetic oligonucleotide
  misc_feature 1..20: note = Target: FXN; (+) strand; PAM type: NRG; PAM sequence: AAG
  source 1..20: mol_type = other DNA
ctcacatttgacatcctcta

SEQ ID NO: 15906 - DNA, 20 bp, synthetic construct
  misc_feature 1..20: note = Description of Artificial Sequence: Synthetic oligonucleotide
  misc_feature 1..20: note = Target: FXN; (+) strand; PAM type: NRG; PAM sequence: AAG
  source 1..20: mol_type = other DNA
taaagcatatataaaatgtg

SEQ ID NO: 15907 - DNA, 20 bp, synthetic construct
  misc_feature 1..20: note = Description of Artificial Sequence: Synthetic oligonucleotide
  misc_feature 1..20: note = Target: FXN; (+) strand; PAM type: NRG; PAM sequence: CAG
  source 1..20: mol_type = other DNA
catccctttgtaatatgtaa

SEQ ID NO: 15908 - DNA, 20 bp, synthetic construct
  misc_feature 1..20: note = Description of Artificial Sequence: Synthetic oligonucleotide
  misc_feature 1..20: note = Target: FXN; (+) strand; PAM type: NRG; PAM sequence: TAG
  source 1..20: mol_type = other DNA
cttttaaaatctatcaacaa

SEQ ID NO: 15909 - DNA, 20 bp, synthetic construct
  misc_feature 1..20: note = Description of Artificial Sequence: Synthetic oligonucleotide
  misc_feature 1..20: note = Target: FXN; (+) strand; PAM type: NRG; PAM sequence: AGG
  source 1..20: mol_type = other DNA
ttttaaaatctatcaacaat

SEQ ID NO: 15910 - DNA, 20 bp, synthetic construct
  misc_feature 1..20: note = Description of Artificial Sequence: Synthetic oligonucleotide
  misc_feature 1..20: note = Target: FXN; (+) strand; PAM type: NRG; PAM sequence: AAG
  source 1..20: mol_type = other DNA
aaaatctatcaacaataggc

SEQ ID NO: 15911 - DNA, 20 bp, synthetic construct
  misc_feature 1..20: note = Description of Artificial Sequence: Synthetic oligonucleotide
  misc_feature 1..20: note = Target: FXN; (+) strand; PAM type: NRG; PAM sequence: AGG
  source 1..20: mol_type = other DNA
aaatctatcaacaataggca

SEQ ID NO: 15912 - DNA, 20 bp, synthetic construct
  misc_feature 1..20: note = Description of Artificial Sequence: Synthetic oligonucleotide
  misc_feature 1..20: note = Target: FXN; (+) strand; PAM type: NRG; PAM sequence: CGG
  source 1..20: mol_type = other DNA
tatcaacaataggcaaggca

SEQ ID NO: 15913 - DNA, 20 bp, synthetic construct
  misc_feature 1..20: note = Description of Artificial Sequence: Synthetic oligonucleotide
  misc_feature 1..20: note = Target: FXN; (+) strand; PAM type: NRG; PAM sequence: TGG
  source 1..20: mol_type = other DNA
caacaataggcaaggcacgg

SEQ ID NO: 15914 - DNA, 20 bp, synthetic construct
  misc_feature 1..20: note = Description of Artificial Sequence: Synthetic oligonucleotide
  misc_feature 1..20: note = Target: FXN; (+) strand; PAM type: NRG; PAM sequence: CAG
  source 1..20: mol_type = other DNA
gtggctcacgcctgtcgtct

SEQ ID NO: 15915 - DNA, 20 bp, synthetic construct
  misc_feature 1..20: note = Description of Artificial Sequence: Synthetic oligonucleotide
  misc_feature 1..20: note = Target: FXN; (+) strand; PAM type: NRG; PAM sequence: GAG
  source 1..20: mol_type = other DNA
ctgtcgtctcagcactttgt

SEQ ID NO: 15916 - DNA, 20 bp, synthetic construct
  misc_feature 1..20: note = Description of Artificial Sequence: Synthetic oligonucleotide
  misc_feature 1..20: note = Target: FXN; (+) strand; PAM type: NRG; PAM sequence: AGG
  source 1..20: mol_type = other DNA
tgtcgtctcagcactttgtg

SEQ ID NO: 15917 - DNA, 20 bp, synthetic construct
  misc_feature 1..20: note = Description of Artificial Sequence: Synthetic oligonucleotide
  misc_feature 1..20: note = Target: FXN; (+) strand; PAM type: NRG; PAM sequence: CAG
  source 1..20: mol_type = other DNA
tctcagcactttgtgaggcc

SEQ ID NO: 15918 - DNA, 20 bp, synthetic construct
  misc_feature 1..20: note = Description of Artificial Sequence: Synthetic oligonucleotide
  misc_feature 1..20: note = Target: FXN; (+) strand; PAM type: NRG; PAM sequence: AGG
  source 1..20: mol_type = other DNA
ctcagcactttgtgaggccc

SEQ ID NO: 15919 - DNA, 20 bp, synthetic construct
  misc_feature 1..20: note = Description of Artificial Sequence: Synthetic oligonucleotide
  misc_feature 1..20: note = Target: FXN; (+) strand; PAM type: NRG; PAM sequence: CGG
  source 1..20: mol_type = other DNA
agcactttgtgaggcccagg

SEQ ID NO: 15920 - DNA, 20 bp, synthetic construct
  misc_feature 1..20: note = Description of Artificial Sequence: Synthetic oligonucleotide
  misc_feature 1..20: note = Target: FXN; (+) strand; PAM type: NRG; PAM sequence: GGG
  source 1..20: mol_type = other DNA
gcactttgtgaggcccaggc

SEQ ID NO: 15921 - DNA, 20 bp, synthetic construct
  misc_feature 1..20: note = Description of Artificial Sequence: Synthetic oligonucleotide
  misc_feature 1..20: note = Target: FXN; (+) strand; PAM type: NRG; PAM sequence: CAG
  source 1..20: mol_type = other DNA
ctttgtgaggcccaggcggg

SEQ ID NO: 15922 - DNA, 20 bp, synthetic construct
  misc_feature 1..20: note = Description of Artificial Sequence: Synthetic oligonucleotide
  misc_feature 1..20: note = Target: FXN; (+) strand; PAM type: NRG; PAM sequence: GAG
  source 1..20: mol_type = other DNA
cccaggcgggcagatcgttt

SEQ ID NO: 15923 - DNA, 20 bp, synthetic construct
  misc_feature 1..20: note = Description of Artificial Sequence: Synthetic oligonucleotide
  misc_feature 1..20: note = Target: FXN; (+) strand; PAM type: NRG; PAM sequence: TAG
  source 1..20: mol_type = other DNA
gcgggcagatcgtttgagcc

SEQ ID NO: 15924 - DNA, 20 bp, synthetic construct
  misc_feature 1..20: note = Description of Artificial Sequence: Synthetic oligonucleotide
  misc_feature 1..20: note = Target: FXN; (+) strand; PAM type: NRG; PAM sequence: AAG
  source 1..20: mol_type = other DNA
ggcagatcgtttgagcctag

SEQ ID NO: 15925 - DNA, 20 bp, synthetic construct
  misc_feature 1..20: note = Description of Artificial Sequence: Synthetic oligonucleotide
  misc_feature 1..20: note = Target: FXN; (+) strand; PAM type: NRG; PAM sequence: AAG
  source 1..20: mol_type = other DNA
tcgtttgagcctagaagttc

SEQ ID NO: 15926 - DNA, 20 bp, synthetic construct
  misc_feature 1..20: note = Description of Artificial Sequence: Synthetic oligonucleotide
  misc_feature 1..20: note = Target: FXN; (+) strand; PAM type: NRG; PAM sequence: TGG
  source 1..20: mol_type = other DNA
ctagaagttcaagaccaccc

SEQ ID NO: 15927 - DNA, 20 bp, synthetic construct
  misc_feature 1..20: note = Description of Artificial Sequence: Synthetic oligonucleotide
  misc_feature 1..20: note = Target: FXN; (+) strand; PAM type: NRG; PAM sequence: GGG
  source 1..20: mol_type = other DNA
tagaagttcaagaccaccct

SEQ ID NO: 15928 - DNA, 20 bp, synthetic construct
  misc_feature 1..20: note = Description of Artificial Sequence: Synthetic oligonucleotide
  misc_feature 1..20: note = Target: FXN; (+) strand; PAM type: NRG; PAM sequence: TAG
  source 1..20: mol_type = other DNA
caagaccaccctgggcaaca

SEQ ID NO: 15929 - DNA, 20 bp, synthetic construct
  misc_feature 1..20: note = Description of Artificial Sequence: Synthetic oligonucleotide
  misc_feature 1..20: note = Target: FXN; (+) strand; PAM type: NRG; PAM sequence: TAG
  source 1..20: mol_type = other DNA
tctacaaaaaatacaaaaac

SEQ ID NO: 15930 - DNA, 20 bp, synthetic construct
  misc_feature 1..20: note = Description of Artificial Sequence: Synthetic oligonucleotide
  misc_feature 1..20: note = Target: FXN; (+) strand; PAM type: NRG; PAM sequence: TGG
  source 1..20: mol_type = other DNA
caaaaaatacaaaaactagc

SEQ ID NO: 15931 - DNA, 20 bp, synthetic construct
  misc_feature 1..20: note = Description of Artificial Sequence: Synthetic oligonucleotide
  misc_feature 1..20: note = Target: FXN; (+) strand; PAM type: NRG; PAM sequence: GGG
  source 1..20: mol_type = other DNA
aaaaaatacaaaaactagct

SEQ ID NO: 15932 - DNA, 20 bp, synthetic construct
  misc_feature 1..20: note = Description of Artificial Sequence: Synthetic oligonucleotide
  misc_feature 1..20: note = Target: FXN; (+) strand; PAM type: NRG; PAM sequence: TGG
  source 1..20: mol_type = other DNA
atacaaaaactagctgggtg

SEQ ID NO: 15933 - DNA, 20 bp, synthetic construct
  misc_feature 1..20: note = Description of Artificial Sequence: Synthetic oligonucleotide
  misc_feature 1..20: note = Target: FXN; (+) strand; PAM type: NRG; PAM sequence: TGG
  source 1..20: mol_type = other DNA
caaaaactagctgggtgtgg

SEQ ID NO: 15934 - DNA, 20 bp, synthetic construct
  misc_feature 1..20: note = Description of Artificial Sequence: Synthetic oligonucleotide
  misc_feature 1..20: note = Target: FXN; (+) strand; PAM type: NRG; PAM sequence: TAG
  source 1..20: mol_type = other DNA
ggtgtggtggtgcacacctg

SEQ ID NO: 15935 - DNA, 20 bp, synthetic construct
  misc_feature 1..20: note = Description of Artificial Sequence: Synthetic oligonucleotide
  misc_feature 1..20: note = Target: FXN; (+) strand; PAM type: NRG; PAM sequence: CAG
  source 1..20: mol_type = other DNA
gtggtgcacacctgtagtcc

SEQ ID NO: 15936 - DNA, 20 bp, synthetic construct
  misc_feature 1..20: note = Description of Artificial Sequence: Synthetic oligonucleotide
  misc_feature 1..20: note = Target: FXN; (+) strand; PAM type: NRG; PAM sequence: TGG
  source 1..20: mol_type = other DNA
cacctgtagtcccagctact

SEQ ID NO: 15937 - DNA, 20 bp, synthetic construct
  misc_feature 1..20: note = Description of Artificial Sequence: Synthetic oligonucleotide
  misc_feature 1..20: note = Target: FXN; (+) strand; PAM type: NRG; PAM sequence: AAG
  source 1..20: mol_type = other DNA
ctgtagtcccagctacttgg

SEQ ID NO: 15938 - DNA, 20 bp, synthetic construct
  misc_feature 1..20: note = Description of Artificial Sequence: Synthetic oligonucleotide
  misc_feature 1..20: note = Target: FXN; (+) strand; PAM type: NRG; PAM sequence: AGG
  source 1..20: mol_type = other DNA
tgtagtcccagctacttgga

SEQ ID NO: 15939 - DNA, 20 bp, synthetic construct
  misc_feature 1..20: note = Description of Artificial Sequence: Synthetic oligonucleotide
  misc_feature 1..20: note = Target: FXN; (+) strand; PAM type: NRG; PAM sequence: TGG
  source 1..20: mol_type = other DNA
agctacttggaaggctgaaa

SEQ ID NO: 15940 - DNA, 20 bp, synthetic construct
  misc_feature 1..20: note = Description of Artificial Sequence: Synthetic oligonucleotide
  misc_feature 1..20: note = Target: FXN; (+) strand; PAM type: NRG; PAM sequence: GGG
  source 1..20: mol_type = other DNA
gctacttggaaggctgaaat

SEQ ID NO: 15941 - DNA, 20 bp, synthetic construct
  misc_feature 1..20: note = Description of Artificial Sequence: Synthetic oligonucleotide
  misc_feature 1..20: note = Target: FXN; (+) strand; PAM type: NRG; PAM sequence: AAG
  source 1..20: mol_type = other DNA
acttggaaggctgaaatggg

SEQ ID NO: 15942 - DNA, 20 bp, synthetic construct
  misc_feature 1..20: note = Description of Artificial Sequence: Synthetic oligonucleotide
  misc_feature 1..20: note = Target: FXN; (+) strand; PAM type: NRG; PAM sequence: GAG
  source 1..20: mol_type = other DNA
ctgaaatgggaagactgctt

SEQ ID NO: 15943 - DNA, 20 bp, synthetic construct
  misc_feature 1..20: note = Description of Artificial Sequence: Synthetic oligonucleotide
  misc_feature 1..20: note = Target: FXN; (+) strand; PAM type: NRG; PAM sequence: CGG
  source 1..20: mol_type = other DNA
atgggaagactgcttgagcc

SEQ ID NO: 15944 - DNA, 20 bp, synthetic construct
  misc_feature 1..20: note = Description of Artificial Sequence: Synthetic oligonucleotide
  misc_feature 1..20: note = Target: FXN; (+) strand; PAM type: NRG; PAM sequence: GGG
  source 1..20: mol_type = other DNA
tgggaagactgcttgagccc

SEQ ID NO: 15945 - DNA, 20 bp, synthetic construct
  misc_feature 1..20: note = Description of Artificial Sequence: Synthetic oligonucleotide
  misc_feature 1..20: note = Target: FXN; (+) strand; PAM type: NRG; PAM sequence: GAG
  source 1..20: mol_type = other DNA
ggaagactgcttgagcccgg

SEQ ID NO: 15946 - DNA, 20 bp, synthetic construct
  misc_feature 1..20: note = Description of Artificial Sequence: Synthetic oligonucleotide
  misc_feature 1..20: note = Target: FXN; (+) strand; PAM type: NRG; PAM sequence: AGG
  source 1..20: mol_type = other DNA
gaagactgcttgagcccggg

SEQ ID NO: 15947 - DNA, 20 bp, synthetic construct
  misc_feature 1..20: note = Description of Artificial Sequence: Synthetic oligonucleotide
  misc_feature 1..20: note = Target: FXN; (+) strand; PAM type: NRG; PAM sequence: GGG
  source 1..20: mol_type = other DNA
aagactgcttgagcccggga

SEQ ID NO: 15948 - DNA, 20 bp, synthetic construct
  misc_feature 1..20: note = Description of Artificial Sequence: Synthetic oligonucleotide
  misc_feature 1..20: note = Target: FXN; (+) strand; PAM type: NRG; PAM sequence: GAG
  source 1..20: mol_type = other DNA
gactgcttgagcccgggagg

SEQ ID NO: 15949 - DNA, 20 bp, synthetic construct
  misc_feature 1..20: note = Description of Artificial Sequence: Synthetic oligonucleotide
  misc_feature 1..20: note = Target: FXN; (+) strand; PAM type: NRG; PAM sequence: AAG
  source 1..20: mol_type = other DNA
tgcttgagcccgggagggag

SEQ ID NO: 15950 - DNA, 20 bp, synthetic construct
  misc_feature 1..20: note = Description of Artificial Sequence: Synthetic oligonucleotide
  misc_feature 1..20: note = Target: FXN; (+) strand; PAM type: NRG; PAM sequence: CAG
  source 1..20: mol_type = other DNA
agcccgggagggagaagttg

SEQ ID NO: 15951 - DNA, 20 bp, synthetic construct
  misc_feature 1..20: note = Description of Artificial Sequence: Synthetic oligonucleotide
  misc_feature 1..20: note = Target: FXN; (+) strand; PAM type: NRG; PAM sequence: AAG
  source 1..20: mol_type = other DNA
cgggagggagaagttgcagt

SEQ ID NO: 15952 - DNA, 20 bp, synthetic construct
  misc_feature 1..20: note = Description of Artificial Sequence: Synthetic oligonucleotide
  misc_feature 1..20: note = Target: FXN; (+) strand; PAM type: NRG; PAM sequence: CAG
  source 1..20: mol_type = other DNA
agggagaagttgcagtaagc

SEQ ID NO: 15953 - DNA, 20 bp, synthetic construct
  misc_feature 1..20: note = Description of Artificial Sequence: Synthetic oligonucleotide
  misc_feature 1..20: note = Target: FXN; (+) strand; PAM type: NRG; PAM sequence: AGG
  source 1..20: mol_type = other DNA
gggagaagttgcagtaagcc

SEQ ID NO: 15954 - DNA, 20 bp, synthetic construct
  misc_feature 1..20: note = Description of Artificial Sequence: Synthetic oligonucleotide
  misc_feature 1..20: note = Target: FXN; (+) strand; PAM type: NRG; PAM sequence: CAG
  source 1..20: mol_type = other DNA
aggaccacaccactgcactc

SEQ ID NO: 15955 - DNA, 20 bp, synthetic construct
  misc_feature 1..20: note = Description of Artificial Sequence: Synthetic oligonucleotide
  misc_feature 1..20: note = Target: FXN; (+) strand; PAM type: NRG; PAM sequence: TGG
  source 1..20: mol_type = other DNA
cacaccactgcactccagcc

SEQ ID NO: 15956 - DNA, 20 bp, synthetic construct
  misc_feature 1..20: note = Description of Artificial Sequence: Synthetic oligonucleotide
  misc_feature 1..20: note = Target: FXN; (+) strand; PAM type: NRG; PAM sequence: GGG
  source 1..20: mol_type = other DNA
acaccactgcactccagcct

SEQ ID NO: 15957 - DNA, 20 bp, synthetic construct
  misc_feature 1..20: note = Description of Artificial Sequence: Synthetic oligonucleotide
  misc_feature 1..20: note = Target: FXN; (+) strand; PAM type: NRG; PAM sequence: CAG
  source 1..20: mol_type = other DNA
ctgcactccagcctgggcaa

SEQ ID NO: 15958 - DNA, 20 bp, synthetic construct
  misc_feature 1..20: note = Description of Artificial Sequence: Synthetic oligonucleotide
  misc_feature 1..20: note = Target: FXN; (+) strand; PAM type: NRG; PAM sequence: GAG
  source 1..20: mol_type = other DNA
gcactccagcctgggcaaca

SEQ ID NO: 15959 - DNA, 20 bp, synthetic construct
  misc_feature 1..20: note = Description of Artificial Sequence: Synthetic oligonucleotide
  misc_feature 1..20: note = Target: FXN; (+) strand; PAM type: NRG; PAM sequence: GAG
  source 1..20: mol_type = other DNA
tccagcctgggcaacagagt

SEQ ID NO: 15960 - DNA, 20 bp, synthetic construct
  misc_feature 1..20: note = Description of Artificial Sequence: Synthetic oligonucleotide
  misc_feature 1..20: note = Target: FXN; (+) strand; PAM type: NRG; PAM sequence: GAG
  source 1..20: mol_type = other DNA
tctcaaacaaacaaataaat

SEQ ID NO: 15961 - DNA, 20 bp, synthetic construct
  misc_feature 1..20: note = Description of Artificial Sequence: Synthetic oligonucleotide
  misc_feature 1..20: note = Target: FXN; (+) strand; PAM type: NRG; PAM sequence: AGG
  source 1..20: mol_type = other DNA
ctcaaacaaacaaataaatg

SEQ ID NO: 15962 - DNA, 20 bp, synthetic construct
  misc_feature 1..20: note = Description of Artificial Sequence: Synthetic oligonucleotide
  misc_feature 1..20: note = Target: FXN; (+) strand; PAM type: NRG; PAM sequence: CGG
  source 1..20: mol_type = other DNA
aaacaaacaaataaatgagg

SEQ ID NO: 15963 - DNA, 20 bp, synthetic construct
  misc_feature 1..20: note = Description of Artificial Sequence: Synthetic oligonucleotide
  misc_feature 1..20: note = Target: FXN; (+) strand; PAM type: NRG; PAM sequence: GGG
  source 1..20: mol_type = other DNA
aacaaacaaataaatgaggc

SEQ ID NO: 15964 - DNA, 20 bp, synthetic construct
  misc_feature 1..20: note = Description of Artificial Sequence: Synthetic oligonucleotide
  misc_feature 1..20: note = Target: FXN; (+) strand; PAM type: NRG; PAM sequence: TGG
  source 1..20: mol_type = other DNA
aaacaaataaatgaggcggg

SEQ ID NO: 15965 - DNA, 20 bp, synthetic construct
  misc_feature 1..20: note = Description of Artificial Sequence: Synthetic oligonucleotide
  misc_feature 1..20: note = Target: FXN; (+) strand; PAM type: NRG; PAM sequence: GAG
  source 1..20: mol_type = other DNA
aaatgaggcgggtggatcac

SEQ ID NO: 15966 - DNA, 20 bp, synthetic construct
  misc_feature 1..20: note = Description of Artificial Sequence: Synthetic oligonucleotide
  misc_feature 1..20: note = Target: FXN; (+) strand; PAM type: NRG; PAM sequence: AGG
  source 1..20: mol_type = other DNA
aatgaggcgggtggatcacg

SEQ ID NO: 15967 - DNA, 20 bp, synthetic construct
  misc_feature 1..20: note = Description of Artificial Sequence: Synthetic oligonucleotide
  misc_feature 1..20: note = Target: FXN; (+) strand; PAM type: NRG; PAM sequence: CAG
  source 1..20: mol_type = other DNA
aggcgggtggatcacgaggt

SEQ ID NO: 15968 - DNA, 20 bp, synthetic construct
  misc_feature 1..20: note = Description of Artificial Sequence: Synthetic oligonucleotide
  misc_feature 1..20: note = Target: FXN; (+) strand; PAM type: NRG; PAM sequence: TAG
  source 1..20: mol_type = other DNA
cgggtggatcacgaggtcag

SEQ ID NO: 15969 - DNA, 20 bp, synthetic construct
  misc_feature 1..20: note = Description of Artificial Sequence: Synthetic oligonucleotide
  misc_feature 1..20: note = Target: FXN; (+) strand; PAM type: NRG; PAM sequence: GAG
  source 1..20: mol_type = other DNA
gatcacgaggtcagtagatc

SEQ ID NO: 15970 - DNA, 20 bp, synthetic construct
  misc_feature 1..20: note = Description of Artificial Sequence: Synthetic oligonucleotide
  misc_feature 1..20: note = Target: FXN; (+) strand; PAM type: NRG; PAM sequence: TGG
  source 1..20: mol_type = other DNA
tcagtagatcgagaccatcc

SEQ ID NO: 15971 - DNA, 20 bp, synthetic construct
  misc_feature 1..20: note = Description of Artificial Sequence: Synthetic oligonucleotide
  misc_feature 1..20: note = Target: FXN; (+) strand; PAM type: NRG; PAM sequence: CGG
  source 1..20: mol_type = other DNA
cgagaccatcctggctaaca

SEQ ID NO: 15972 - DNA, 20 bp, synthetic construct
  misc_feature 1..20: note = Description of Artificial Sequence: Synthetic oligonucleotide
  misc_feature 1..20: note = Target: FXN; (+) strand; PAM type: NRG; PAM sequence: TAG
  source 1..20: mol_type = other DNA
aaaaaaaaaatacaaaaaat

SEQ ID NO: 15973 - DNA, 20 bp, synthetic construct
  misc_feature 1..20: note = Description of Artificial Sequence: Synthetic oligonucleotide
  misc_feature 1..20: note = Target: FXN; (+) strand; PAM type: NRG; PAM sequence: CAG
  source 1..20: mol_type = other DNA
aaaaaatacaaaaaattagc

SEQ ID NO: 15974 - DNA, 20 bp, synthetic construct
  misc_feature 1..20: note = Description of Artificial Sequence: Synthetic oligonucleotide
  misc_feature 1..20: note = Target: FXN; (+) strand; PAM type: NRG; PAM sequence: AGG
  source 1..20: mol_type = other DNA
aaaaatacaaaaaattagcc

SEQ ID NO: 15975 - DNA, 20 bp, synthetic construct
  misc_feature 1..20: note = Description of Artificial Sequence: Synthetic oligonucleotide
  misc_feature 1..20: note = Target: FXN; (+) strand; PAM type: NRG; PAM sequence: TGG
  source 1..20: mol_type = other DNA
tacaaaaaattagccaggca

SEQ ID NO: 15976 - DNA, 20 bp, synthetic construct
  misc_feature 1..20: note = Description of Artificial Sequence: Synthetic oligonucleotide
  misc_feature 1..20: note = Target: FXN; (+) strand; PAM type: NRG; PAM sequence: TGG
  source 1..20: mol_type = other DNA
aaaaaattagccaggcatgg

SEQ ID NO: 15977 - DNA, 20 bp, synthetic construct
  misc_feature 1..20: note = Description of Artificial Sequence: Synthetic oligonucleotide
  misc_feature 1..20: note = Target: FXN; (+) strand; PAM type: NRG; PAM sequence: CGG
  source 1..20: mol_type = other DNA
aaattagccaggcatggtgg

SEQ ID NO: 15978 - DNA, 20 bp, synthetic construct
  misc_feature 1..20: note = Description of Artificial Sequence: Synthetic oligonucleotide
  misc_feature 1..20: note = Target: FXN; (+) strand; PAM type: NRG; PAM sequence: GGG
  source 1..20: mol_type = other DNA
aattagccaggcatggtggc

SEQ ID NO: 15979 - DNA, 20 bp, synthetic construct
  misc_feature 1..20: note = Description of Artificial Sequence: Synthetic oligonucleotide
  misc_feature 1..20: note = Target: FXN; (+) strand; PAM type: NRG; PAM sequence: TAG
  source 1..20: mol_type = other DNA
ggcatggtggcgggcgcctg

SEQ ID NO: 15980 - DNA, 20 bp, synthetic construct
  misc_feature 1..20: note = Description of Artificial Sequence: Synthetic oligonucleotide
  misc_feature 1..20: note = Target: FXN; (+) strand; PAM type: NRG; PAM sequence: CAG
  source 1..20: mol_type = other DNA
gtggcgggcgcctgtagtcc

SEQ ID NO: 15981 - DNA, 20 bp, synthetic construct
  misc_feature 1..20: note = Description of Artificial Sequence: Synthetic oligonucleotide
  misc_feature 1..20: note = Target: FXN; (+) strand; PAM type: NRG; PAM sequence: CGG
  source 1..20: mol_type = other DNA
cgcctgtagtcccagttact

SEQ ID NO: 15982 - DNA, 20 bp, synthetic construct
  misc_feature 1..20: note = Description of Artificial Sequence: Synthetic oligonucleotide
  misc_feature 1..20: note = Target: FXN; (+) strand; PAM type: NRG; PAM sequence: GGG
  source 1..20: mol_type = other DNA
gcctgtagtcccagttactc

SEQ ID NO: 15983 - DNA, 20 bp, synthetic construct
  misc_feature 1..20: note = Description of Artificial Sequence: Synthetic oligonucleotide
  misc_feature 1..20: note = Target: FXN; (+) strand; PAM type: NRG; PAM sequence: GAG
  source 1..20: mol_type = other DNA
ctgtagtcccagttactcgg

SEQ ID NO: 15984 - DNA, 20 bp, synthetic construct
  misc_feature 1..20: note = Description of Artificial Sequence: Synthetic oligonucleotide
  misc_feature 1..20: note = Target: FXN; (+) strand; PAM type: NRG; PAM sequence: AGG
  source 1..20: mol_type = other DNA
tgtagtcccagttactcggg

SEQ ID NO: 15985 - DNA, 20 bp, synthetic construct
  misc_feature 1..20: note = Description of Artificial Sequence: Synthetic oligonucleotide
  misc_feature 1..20: note = Target: FXN; (+) strand; PAM type: NRG; PAM sequence: GAG
  source 1..20: mol_type = other DNA
tcccagttactcgggaggct

SEQ ID NO: 15986 - DNA, 20 bp, synthetic construct
  misc_feature 1..20: note = Description of Artificial Sequence: Synthetic oligonucleotide
  misc_feature 1..20: note = Target: FXN; (+) strand; PAM type: NRG; PAM sequence: AGG
  source 1..20: mol_type = other DNA
cccagttactcgggaggctg

SEQ ID NO: 15987 - DNA, 20 bp, synthetic construct
  misc_feature 1..20: note = Description of Artificial Sequence: Synthetic oligonucleotide
  misc_feature 1..20: note = Target: FXN; (+) strand; PAM type: NRG; PAM sequence: CAG
  source 1..20: mol_type = other DNA
agttactcgggaggctgagg

SEQ ID NO: 15988 - DNA, 20 bp, synthetic construct
  misc_feature 1..20: note = Description of Artificial Sequence: Synthetic oligonucleotide
  misc_feature 1..20: note = Target: FXN; (+) strand; PAM type: NRG; PAM sequence: AGG
  source 1..20: mol_type = other DNA
gttactcgggaggctgaggc

SEQ ID NO: 15989 - DNA, 20 bp, synthetic construct
  misc_feature 1..20: note = Description of Artificial Sequence: Synthetic oligonucleotide
  misc_feature 1..20: note = Target: FXN; (+) strand; PAM type: NRG; PAM sequence: GAG
  source 1..20: mol_type = other DNA
tactcgggaggctgaggcag

SEQ ID NO: 15990 - DNA, 20 bp, synthetic construct
  misc_feature 1..20: note = Description of Artificial Sequence: Synthetic oligonucleotide
  misc_feature 1..20: note = Target: FXN; (+) strand; PAM type: NRG; PAM sequence: TGG
  source 1..20: mol_type = other DNA
gggaggctgaggcaggagaa

SEQ ID NO: 15991 - DNA, 20 bp, synthetic construct
  misc_feature 1..20: note = Description of Artificial Sequence: Synthetic oligonucleotide
  misc_feature 1..20: note = Target: FXN; (+) strand; PAM type: NRG; PAM sequence: CGG
  source 1..20: mol_type = other DNA
gcaggagaatggcgtgaaac

SEQ ID NO: 15992 - DNA, 20 bp, synthetic construct
  misc_feature 1..20: note = Description of Artificial Sequence: Synthetic oligonucleotide
  misc_feature 1..20: note = Target: FXN; (+) strand; PAM type: NRG; PAM sequence: GGG
  source 1..20: mol_type = other DNA
caggagaatggcgtgaaacc

SEQ ID NO: 15993 - DNA, 20 bp, synthetic construct
  misc_feature 1..20: note = Description of Artificial Sequence: Synthetic oligonucleotide
  misc_feature 1..20: note = Target: FXN; (+) strand; PAM type: NRG; PAM sequence: GAG
  source 1..20: mol_type = other DNA
ggagaatggcgtgaaaccgg

SEQ ID NO: 15994 - DNA, 20 bp, synthetic construct
  misc_feature 1..20: note = Description of Artificial Sequence: Synthetic oligonucleotide
  misc_feature 1..20: note = Target: FXN; (+) strand; PAM type: NRG; PAM sequence: AGG
  source 1..20: mol_type = other DNA
gagaatggcgtgaaaccggg

SEQ ID NO: 15995 - DNA, 20 bp, synthetic construct
  misc_feature 1..20: note = Description of Artificial Sequence: Synthetic oligonucleotide
  misc_feature 1..20: note = Target: FXN; (+) strand; PAM type: NRG; PAM sequence: CAG
  source 1..20: mol_type = other DNA
aatggcgtgaaaccgggagg

SEQ ID NO: 15996 - DNA, 20 bp, synthetic construct
  misc_feature 1..20: note = Description of Artificial Sequence: Synthetic oligonucleotide
  misc_feature 1..20: note = Target: FXN; (+) strand; PAM type: NRG; PAM sequence: GAG
  source 1..20: mol_type = other DNA
tggcgtgaaaccgggaggca

SEQ ID NO: 15997 - DNA, 20 bp, synthetic construct
  misc_feature 1..20: note = Description of Artificial Sequence: Synthetic oligonucleotide
  misc_feature 1..20: note = Target: FXN; (+) strand; PAM type: NRG; PAM sequence: CAG
  source 1..20: mol_type = other DNA
aaaccgggaggcagagcttg

SEQ ID NO: 15998 - DNA, 20 bp, synthetic construct
  misc_feature 1..20: note = Description of Artificial Sequence: Synthetic oligonucleotide
  misc_feature 1..20: note = Target: FXN; (+) strand; PAM type: NRG; PAM sequence: GAG
  source 1..20: mol_type = other DNA
cgggaggcagagcttgcagt

SEQ ID NO: 15999 - DNA, 20 bp, synthetic construct
  misc_feature 1..20: note = Description of Artificial Sequence: Synthetic oligonucleotide
  misc_feature 1..20: note = Target: FXN; (+) strand; PAM type: NRG; PAM sequence: GAG
  source 1..20: mol_type = other DNA
ggcagagcttgcagtgagcc

SEQ ID NO: 16000 - DNA, 20 bp, synthetic construct
  misc_feature 1..20: note = Description of Artificial Sequence: Synthetic oligonucleotide
  misc_feature 1..20: note = Target: FXN; (+) strand; PAM type: NRG; PAM sequence: CAG
  source 1..20: mol_type = other DNA
gagatcgcaccactgccctc

SEQ ID NO: 16001 - DNA, 20 bp, synthetic construct
  misc_feature 1..20: note = Description of Artificial Sequence: Synthetic oligonucleotide
  misc_feature 1..20: note = Target: FXN; (+) strand; PAM type: NRG; PAM sequence: TGG
  source 1..20: mol_type = other DNA
cgcaccactgccctccagcc

SEQ ID NO: 16002 - DNA, 20 bp, synthetic construct
  misc_feature 1..20: note = Description of Artificial Sequence: Synthetic oligonucleotide
  misc_feature 1..20: note = Target: FXN; (+) strand; PAM type: NRG; PAM sequence: GGG
  source 1..20: mol_type = other DNA
gcaccactgccctccagcct

SEQ ID NO: 16003 - DNA, 20 bp, synthetic construct
  misc_feature 1..20: note = Description of Artificial Sequence: Synthetic oligonucleotide
  misc_feature 1..20: note = Target: FXN; (+) strand; PAM type: NRG; PAM sequence: CAG
  source 1..20: mol_type = other DNA
ctgccctccagcctgggcga

SEQ ID NO: 16004 - DNA, 20 bp, synthetic construct
  misc_feature 1..20: note = Description of Artificial Sequence: Synthetic oligonucleotide
  misc_feature 1..20: note = Target: FXN; (+) strand; PAM type: NRG; PAM sequence: GAG
  source 1..20: mol_type = other DNA
gccctccagcctgggcgaca

SEQ ID NO: 16005 - DNA, 20 bp, synthetic construct
  misc_feature 1..20: note = Description of Artificial Sequence: Synthetic oligonucleotide
  misc_feature 1..20: note = Target: FXN; (+) strand; PAM type: NRG; PAM sequence: GAG
  source 1..20: mol_type = other DNA
tccagcctgggcgacagagc

SEQ ID NO: 16006 - DNA, 20 bp, synthetic construct
  misc_feature 1..20: note = Description of Artificial Sequence: Synthetic oligonucleotide
  misc_feature 1..20: note = Target: FXN; (+) strand; PAM type: NRG; PAM sequence: CAG
  source 1..20: mol_type = other DNA
aatatttattgtgcacttaa

SEQ ID NO: 16007 - DNA, 20 bp, synthetic construct
  misc_feature 1..20: note = Description of Artificial Sequence: Synthetic oligonucleotide
  misc_feature 1..20: note = Target: FXN; (+) strand; PAM type: NRG; PAM sequence: AGG
  source 1..20: mol_type = other DNA
atatttattgtgcacttaac

SEQ ID NO: 16008 - DNA, 20 bp, synthetic construct
  misc_feature 1..20: note = Description of Artificial Sequence: Synthetic oligonucleotide
  misc_feature 1..20: note = Target: FXN; (+) strand; PAM type: NRG; PAM sequence: CAG
  source 1..20: mol_type = other DNA
cctgtccaaaaaaaacttta

SEQ ID NO: 16009 - DNA, 20 bp, synthetic construct
  misc_feature 1..20: note = Description of Artificial Sequence: Synthetic oligonucleotide
  misc_feature 1..20: note = Target: FXN; (+) strand; PAM type: NRG; PAM sequence: AGG
  source 1..20: mol_type = other DNA
ctgtccaaaaaaaactttac

SEQ ID NO: 16010 - DNA, 20 bp, synthetic construct
  misc_feature 1..20: note = Description of Artificial Sequence: Synthetic oligonucleotide
  misc_feature 1..20: note = Target: FXN; (+) strand; PAM type: NRG; PAM sequence: GGG
  source 1..20: mol_type = other DNA
tgtccaaaaaaaactttaca

SEQ ID NO: 16011 - DNA, 20 bp, synthetic construct
  misc_feature 1..20: note = Description of Artificial Sequence: Synthetic oligonucleotide
  misc_feature 1..20: note = Target: FXN; (+) strand; PAM type: NRG; PAM sequence: AAG
  source 1..20: mol_type = other DNA
atccttaccacaatcctatg

SEQ ID NO: 16012 - DNA, 20 bp, synthetic construct
  misc_feature 1..20: note = Description of Artificial Sequence: Synthetic oligonucleotide
  misc_feature 1..20: note = Target: FXN; (+) strand; PAM type: NRG; PAM sequence: TAG
  source 1..20: mol_type = other DNA
cttaccacaatcctatgaag

SEQ ID NO: 16013 - DNA, 20 bp, synthetic construct
  misc_feature 1..20: note = Description of Artificial Sequence: Synthetic oligonucleotide
  misc_feature 1..20: note = Target: FXN; (+) strand; PAM type: NRG; PAM sequence: AGG
  source 1..20: mol_type = other DNA
ttaccacaatcctatgaagt

SEQ ID NO: 16014 - DNA, 20 bp, synthetic construct
  misc_feature 1..20: note = Description of Artificial Sequence: Synthetic oligonucleotide
  misc_feature 1..20: note = Target: FXN; (+) strand; PAM type: NRG; PAM sequence: AAG
  source 1..20: mol_type = other DNA
ataaaacgcattttataaac

SEQ ID NO: 16015 - DNA, 20 bp, synthetic construct
  misc_feature 1..20: note = Description of Artificial Sequence: Synthetic oligonucleotide
  misc_feature 1..20: note = Target: FXN; (+) strand; PAM type: NRG; PAM sequence: AGG
  source 1..20: mol_type = other DNA
taaaacgcattttataaaca

SEQ ID NO: 16016 - DNA, 20 bp, synthetic construct
  misc_feature 1..20: note = Description of Artificial Sequence: Synthetic oligonucleotide
  misc_feature 1..20: note = Target: FXN; (+) strand; PAM type: NRG; PAM sequence: CAG
  source 1..20: mol_type = other DNA
cgcattttataaacaaggca

SEQ ID NO: 16017 - DNA, 20 bp, synthetic construct
  misc_feature 1..20: note = Description of Artificial Sequence: Synthetic oligonucleotide
  misc_feature 1..20: note = Target: FXN; (+) strand; PAM type: NRG; PAM sequence: GAG
  source 1..20: mol_type = other DNA
cattttataaacaaggcaca

SEQ ID NO: 16018 - DNA, 20 bp, synthetic construct
  misc_feature 1..20: note = Description of Artificial Sequence: Synthetic oligonucleotide
  misc_feature 1..20: note = Target: FXN; (+) strand; PAM type: NRG; PAM sequence: GAG
  source 1..20: mol_type = other DNA
ttttataaacaaggcacaga

SEQ ID NO: 16019 - DNA, 20 bp, synthetic construct
  misc_feature 1..20: note = Description of Artificial Sequence: Synthetic oligonucleotide
  misc_feature 1..20: note = Target: FXN; (+) strand; PAM type: NRG; PAM sequence: AGG
  source 1..20: mol_type = other DNA
tttataaacaaggcacagag

SEQ ID NO: 16020 - DNA, 20 bp, synthetic construct
  misc_feature 1..20: note = Description of Artificial Sequence: Synthetic oligonucleotide
  misc_feature 1..20: note = Target: FXN; (+) strand; PAM type: NRG; PAM sequence: TGG
  source 1..20: mol_type = other DNA
aggttaattaacttgccctc

SEQ ID NO: 16021 - DNA, 20 bp, synthetic construct
  misc_feature 1..20: note = Description of Artificial Sequence: Synthetic oligonucleotide
  misc_feature 1..20: note = Target: FXN; (+) strand; PAM type: NRG; PAM sequence: CAG
  source 1..20: mol_type = other DNA
taacttgccctctggtcaca

SEQ ID NO: 16022 - DNA, 20 bp, synthetic construct
  misc_feature 1..20: note = Description of Artificial Sequence: Synthetic oligonucleotide
  misc_feature 1..20: note = Target: FXN; (+) strand; PAM type: NRG; PAM sequence: TAG
  source 1..20: mol_type = other DNA
ttgccctctggtcacacagc

SEQ ID NO: 16023 - DNA, 20 bp, synthetic construct
  misc_feature 1..20: note = Description of Artificial Sequence: Synthetic oligonucleotide
  misc_feature 1..20: note = Target: FXN; (+) strand; PAM type: NRG; PAM sequence: AGG
  source 1..20: mol_type = other DNA
tgccctctggtcacacagct

SEQ ID NO: 16024 - DNA, 20 bp, synthetic construct
  misc_feature 1..20: note = Description of Artificial Sequence: Synthetic oligonucleotide
  misc_feature 1..20: note = Target: FXN; (+) strand; PAM type: NRG; PAM sequence: AAG
  source 1..20: mol_type = other DNA
cctctggtcacacagctagg

SEQ ID NO: 16025 - DNA, 20 bp, synthetic construct
  misc_feature 1..20: note = Description of Artificial Sequence: Synthetic oligonucleotide
  misc_feature 1..20: note = Target: FXN; (+) strand; PAM type: NRG; PAM sequence: TGG
  source 1..20: mol_type = other DNA
ctggtcacacagctaggaag

SEQ ID NO: 16026 - DNA, 20 bp, synthetic construct
  misc_feature 1..20: note = Description of Artificial Sequence: Synthetic oligonucleotide
  misc_feature 1..20: note = Target: FXN; (+) strand; PAM type: NRG; PAM sequence: GGG
  source 1..20: mol_type = other DNA
tggtcacacagctaggaagt

SEQ ID NO: 16027 - DNA, 20 bp, synthetic construct
  misc_feature 1..20: note = Description of Artificial Sequence: Synthetic oligonucleotide
  misc_feature 1..20: note = Target: FXN; (+) strand; PAM type: NRG; PAM sequence: CAG
  source 1..20: mol_type = other DNA
tcacacagctaggaagtggg

SEQ ID NO: 16028 - DNA, 20 bp, synthetic construct
  misc_feature 1..20: note = Description of Artificial Sequence: Synthetic oligonucleotide
  misc_feature 1..20: note = Target: FXN; (+) strand; PAM type: NRG; PAM sequence: GAG
  source 1..20: mol_type = other DNA
acacagctaggaagtgggca

SEQ ID NO: 16029 - DNA, 20 bp, synthetic construct
  misc_feature 1..20: note = Description of Artificial Sequence: Synthetic oligonucleotide
  misc_feature 1..20: note = Target: FXN; (+) strand; PAM type: NRG; PAM sequence: CAG
  source 1..20: mol_type = other DNA
gctaggaagtgggcagagta

SEQ ID NO: 16030 - DNA, 20 bp, synthetic construct
  misc_feature 1..20: note = Description of Artificial Sequence: Synthetic oligonucleotide
  misc_feature 1..20: note = Target: FXN; (+) strand; PAM type: NRG; PAM sequence: AAG
  source 1..20: mol_type = other DNA
ggcagagtacagatttacac

SEQ ID NO: 16031 - DNA, 20 bp, synthetic construct
  misc_feature 1..20: note = Description of Artificial Sequence: Synthetic oligonucleotide
  misc_feature 1..20: note = Target: FXN; (+) strand; PAM type: NRG; PAM sequence: AGG
  source 1..20: mol_type = other DNA
gcagagtacagatttacaca

SEQ ID NO: 16032 - DNA, 20 bp, synthetic construct
  misc_feature 1..20: note = Description of Artificial Sequence: Synthetic oligonucleotide
  misc_feature 1..20: note = Target: FXN; (+) strand; PAM type: NRG; PAM sequence: TGG
  source 1..20: mol_type = other DNA
tacacaaggcatccgtctcc

SEQ ID NO: 16033 - DNA, 20 bp, synthetic construct
  misc_feature 1..20: note = Description of Artificial Sequence: Synthetic oligonucleotide
  misc_feature 1..20: note = Target: FXN; (+) strand; PAM type: NRG; PAM sequence: CGG
  source 1..20: mol_type = other DNA
caactgctgtaaacccatac

SEQ ID NO: 16034 - DNA, 20 bp, synthetic construct
  misc_feature 1..20: note = Description of Artificial Sequence: Synthetic oligonucleotide
  misc_feature 1..20: note = Target: FXN; (+) strand; PAM type: NRG; PAM sequence: CGG
  source 1..20: mol_type = other DNA
ctgctgtaaacccataccgg

SEQ ID NO: 16035 - DNA, 20 bp, synthetic construct
  misc_feature 1..20: note = Description of Artificial Sequence: Synthetic oligonucleotide
  misc_feature 1..20: note = Target: FXN; (+) strand; PAM type: NRG; PAM sequence: AAG
  source 1..20: mol_type = other DNA
gtaaacccataccggcggcc

SEQ ID NO: 16036 - DNA, 20 bp, synthetic construct
  misc_feature 1..20: note = Description of Artificial Sequence: Synthetic oligonucleotide
  misc_feature 1..20: note = Target: FXN; (+) strand; PAM type: NRG; PAM sequence: CAG
  source 1..20: mol_type = other DNA
aacccataccggcggccaag

SEQ ID NO: 16037 - DNA, 20 bp, synthetic construct
  misc_feature 1..20: note = Description of Artificial Sequence: Synthetic oligonucleotide
  misc_feature 1..20: note = Target: FXN; (+) strand; PAM type: NRG; PAM sequence: CAG
  source 1..20: mol_type = other DNA
ttgtgcatgcacccacttcc

SEQ ID NO: 16038 - DNA, 20 bp, synthetic construct
  misc_feature 1..20: note = Description of Artificial Sequence: Synthetic oligonucleotide
  misc_feature 1..20: note = Target: FXN; (+) strand; PAM type: NRG; PAM sequence: AAG
  source 1..20: mol_type = other DNA
gcatgcacccacttcccagc

SEQ ID NO: 16039 - DNA, 20 bp, synthetic construct
  misc_feature 1..20: note = Description of Artificial Sequence: Synthetic oligonucleotide
  misc_feature 1..20: note = Target: FXN; (+) strand; PAM type: NRG; PAM sequence: CAG
  source 1..20: mol_type = other DNA
gcacccacttcccagcaaga

SEQ ID NO: 16040 - DNA, 20 bp, synthetic construct
  misc_feature 1..20: note = Description of Artificial Sequence: Synthetic oligonucleotide
  misc_feature 1..20: note = Target: FXN; (+) strand; PAM type: NRG; PAM sequence: CAG
  source 1..20: mol_type = other DNA
cccacttcccagcaagacag

SEQ ID NO: 16041 - DNA, 20 bp, synthetic construct
  misc_feature 1..20: note = Description of Artificial Sequence: Synthetic oligonucleotide
  misc_feature 1..20: note = Target: FXN; (+) strand; PAM type: NRG; PAM sequence: AAG
  source 1..20: mol_type = other DNA
ccagcaagacagcagctccc

SEQ ID NO: 16042 - DNA, 20 bp, synthetic construct
  misc_feature 1..20: note = Description of Artificial Sequence: Synthetic oligonucleotide
  misc_feature 1..20: note = Target: FXN; (+) strand; PAM type: NRG; PAM sequence: TAG
  source 1..20: mol_type = other DNA
gctcccaagttcctcctgtt

SEQ ID NO: 16043 - DNA, 20 bp, synthetic construct
  misc_feature 1..20: note = Description of Artificial Sequence: Synthetic oligonucleotide
  misc_feature 1..20: note = Target: FXN; (+) strand; PAM type: NRG; PAM sequence: TAG
  source 1..20: mol_type = other DNA
gttcctcctgtttagaattt

SEQ ID NO: 16044 - DNA, 20 bp, synthetic construct
  misc_feature 1..20: note = Description of Artificial Sequence: Synthetic oligonucleotide
  misc_feature 1..20: note = Target: FXN; (+) strand; PAM type: NRG; PAM sequence: AAG
  source 1..20: mol_type = other DNA
cctcctgtttagaattttag

SEQ ID NO: 16045 - DNA, 20 bp, synthetic construct
  misc_feature 1..20: note = Description of Artificial Sequence: Synthetic oligonucleotide
  misc_feature 1..20: note = Target: FXN; (+) strand; PAM type: NRG; PAM sequence: CGG
  source 1..20: mol_type = other DNA
cctgtttagaattttagaag

SEQ ID NO: 16046 - DNA, 20 bp, synthetic construct
  misc_feature 1..20: note = Description of Artificial Sequence: Synthetic oligonucleotide
  misc_feature 1..20: note = Target: FXN; (+) strand; PAM type: NRG; PAM sequence: CGG
  source 1..20: mol_type = other DNA
gtttagaattttagaagcgg

SEQ ID NO: 16047 - DNA, 20 bp, synthetic construct
  misc_feature 1..20: note = Description of Artificial Sequence: Synthetic oligonucleotide
  misc_feature 1..20: note = Target: FXN; (+) strand; PAM type: NRG; PAM sequence: GGG
  source 1..20: mol_type = other DNA
tttagaattttagaagcggc

SEQ ID NO: 16048 - DNA, 20 bp, synthetic construct
  misc_feature 1..20: note = Description of Artificial Sequence: Synthetic oligonucleotide
  misc_feature 1..20: note = Target: FXN; (+) strand; PAM type: NRG; PAM sequence: CAG
  source 1..20: mol_type = other DNA
ttttagaagcggcgggccac

SEQ ID NO: 16049 - DNA, 20 bp, synthetic construct
  misc_feature 1..20: note = Description of Artificial Sequence: Synthetic oligonucleotide
  misc_feature 1..20: note = Target: FXN; (+) strand; PAM type: NRG; PAM sequence: AGG
  source 1..20: mol_type = other DNA
tttagaagcggcgggccacc

SEQ ID NO: 16050 - DNA, 20 bp, synthetic construct
  misc_feature 1..20: note = Description of Artificial Sequence: Synthetic oligonucleotide
  misc_feature 1..20: note = Target: FXN; (+) strand; PAM type: NRG; PAM sequence: CAG
  source 1..20: mol_type = other DNA
agcggcgggccaccaggctg

SEQ ID NO: 16051 - DNA, 20 bp, synthetic construct
  misc_feature 1..20: note = Description of Artificial Sequence: Synthetic oligonucleotide
  misc_feature 1..20: note = Target: FXN; (+) strand; PAM type: NRG; PAM sequence: TGG
  source 1..20: mol_type = other DNA
caccaggctgcagtctccct

SEQ ID NO: 16052 - DNA, 20 bp, synthetic construct
  misc_feature 1..20: note = Description of Artificial Sequence: Synthetic oligonucleotide
  misc_feature 1..20: note = Target: FXN; (+) strand; PAM type: NRG; PAM sequence: GGG
  source 1..20: mol_type = other DNA
accaggctgcagtctccctt

SEQ ID NO: 16053 - DNA, 20 bp, synthetic construct
  misc_feature 1..20: note = Description of Artificial Sequence: Synthetic oligonucleotide
  misc_feature 1..20: note = Target: FXN; (+) strand; PAM type: NRG; PAM sequence: CAG
  source 1..20: mol_type = other DNA
ggctgcagtctcccttgggt

SEQ ID NO: 16054 - DNA, 20 bp, synthetic construct
  misc_feature 1..20: note = Description of Artificial Sequence: Synthetic oligonucleotide
  misc_feature 1..20: note = Target: FXN; (+) strand; PAM type: NRG; PAM sequence: AGG
  source 1..20: mol_type = other DNA
gctgcagtctcccttgggtc

SEQ ID NO: 16055 - DNA, 20 bp, synthetic construct
  misc_feature 1..20: note = Description of Artificial Sequence: Synthetic oligonucleotide
  misc_feature 1..20: note = Target: FXN; (+) strand; PAM type: NRG; PAM sequence: GGG
  source 1..20: mol_type = other DNA
ctgcagtctcccttgggtca

SEQ ID NO: 16056 - DNA, 20 bp, synthetic construct
  misc_feature 1..20: note = Description of Artificial Sequence: Synthetic oligonucleotide
  misc_feature 1..20: note = Target: FXN; (+) strand; PAM type: NRG; PAM sequence: GGG
  source 1..20: mol_type = other DNA
tgcagtctcccttgggtcag

SEQ ID NO: 16057 - DNA, 20 bp, synthetic construct
  misc_feature 1..20: note = Description of Artificial Sequence: Synthetic oligonucleotide
  misc_feature 1..20: note = Target: FXN; (+) strand; PAM type: NRG; PAM sequence: TGG
  source 1..20: mol_type = other DNA
ctcccttgggtcaggggtcc

SEQ ID NO: 16058 - DNA, 20 bp, synthetic construct
  misc_feature 1..20: note = Description of Artificial Sequence: Synthetic oligonucleotide
  misc_feature 1..20: note = Target: FXN; (+) strand; PAM type: NRG; PAM sequence: AAG
  source 1..20: mol_type = other DNA
tgcactccgtgctttgcaca

SEQ ID NO: 16059 - DNA, 20 bp, synthetic construct
  misc_feature 1..20: note = Description of Artificial Sequence: Synthetic oligonucleotide
  misc_feature 1..20: note = Target: FXN; (+) strand; PAM type: NRG; PAM sequence: CAG
  source 1..20: mol_type = other DNA
actccgtgctttgcacaaag

SEQ ID NO: 16060 - DNA, 20 bp, synthetic construct
  misc_feature 1..20: note = Description of Artificial Sequence: Synthetic oligonucleotide
  misc_feature 1..20: note = Target: FXN; (+) strand; PAM type: NRG; PAM sequence: AGG
  source 1..20: mol_type = other DNA
ctccgtgctttgcacaaagc

SEQ ID NO: 16061 - DNA, 20 bp, synthetic construct
  misc_feature 1..20: note = Description of Artificial Sequence: Synthetic oligonucleotide
  misc_feature 1..20: note = Target: FXN; (+) strand; PAM type: NRG; PAM sequence: TAG
  source 1..20: mol_type = other DNA
atttttgttaaatgcacgaa

SEQ ID NO: 16062 - DNA, 20 bp, synthetic construct
  misc_feature 1..20: note = Description of Artificial Sequence: Synthetic oligonucleotide
  misc_feature 1..20: note = Target: FXN; (+) strand; PAM type: NRG; PAM sequence: AAG
  source 1..20: mol_type = other DNA
ttaaatgcacgaatagtgct

SEQ ID NO: 16063 - DNA, 20 bp, synthetic construct
  misc_feature 1..20: note = Description of Artificial Sequence: Synthetic oligonucleotide
  misc_feature 1..20: note = Target: FXN; (+) strand; PAM type: NRG; PAM sequence: TGG
  source 1..20: mol_type = other DNA
atgcacgaatagtgctaagc

SEQ ID NO: 16064 - DNA, 20 bp, synthetic construct
  misc_feature 1..20: note = Description of Artificial Sequence: Synthetic oligonucleotide
  misc_feature 1..20: note = Target: FXN; (+) strand; PAM type: NRG; PAM sequence: GGG
  source 1..20: mol_type = other DNA
tgcacgaatagtgctaagct

SEQ ID NO: 16065 - DNA, 20 bp, synthetic construct
  misc_feature 1..20: note = Description of Artificial Sequence: Synthetic oligonucleotide
  misc_feature 1..20: note = Target: FXN; (+) strand; PAM type: NRG; PAM sequence: AAG
  source 1..20: mol_type = other DNA
acgaatagtgctaagctggg

SEQ ID NO: 16066 - DNA, 20 bp, synthetic construct
  misc_feature 1..20: note = Description of Artificial Sequence: Synthetic oligonucleotide
  misc_feature 1..20: note = Target: FXN; (+) strand; PAM type: NRG; PAM sequence: GAG
  source 1..20: mol_type = other DNA
taagctgggaagttcttcct

SEQ ID NO: 16067 - DNA, 20 bp, synthetic construct
  misc_feature 1..20: note = Description of Artificial Sequence: Synthetic oligonucleotide
  misc_feature 1..20: note = Target: FXN; (+) strand; PAM type: NRG; PAM sequence: AGG
  source 1..20: mol_type = other DNA
aagctgggaagttcttcctg

SEQ ID NO: 16068 - DNA, 20 bp, synthetic construct
  misc_feature 1..20: note = Description of Artificial Sequence: Synthetic oligonucleotide
  misc_feature 1..20: note = Target: FXN; (+) strand; PAM type: NRG; PAM sequence: TAG
  source 1..20: mol_type = other DNA
tcttcctgaggtctaacctc

SEQ ID NO: 16069 - DNA, 20 bp, synthetic construct
  misc_feature 1..20: note = Description of Artificial Sequence: Synthetic oligonucleotide
  misc_feature 1..20: note = Target: FXN; (+) strand; PAM type: NRG; PAM sequence: CAG
  source 1..20: mol_type = other DNA
aacctctagctgctccccca

SEQ ID NO: 16070 - DNA, 20 bp, synthetic construct
  misc_feature 1..20: note = Description of Artificial Sequence: Synthetic oligonucleotide
  misc_feature 1..20: note = Target: FXN; (+) strand; PAM type: NRG; PAM sequence: AAG
  source 1..20: mol_type = other DNA
ctctagctgctcccccacag

SEQ ID NO: 16071 - DNA, 20 bp, synthetic construct
  misc_feature 1..20: note = Description of Artificial Sequence: Synthetic oligonucleotide
  misc_feature 1..20: note = Target: FXN; (+) strand; PAM type: NRG; PAM sequence: GAG
  source 1..20: mol_type = other DNA
ctagctgctcccccacagaa

SEQ ID NO: 16072 - DNA, 20 bp, synthetic construct
  misc_feature 1..20: note = Description of Artificial Sequence: Synthetic oligonucleotide
  misc_feature 1..20: note = Target: FXN; (+) strand; PAM type: NRG; PAM sequence: CGG
  source 1..20: mol_type = other DNA
cccccacagaagagtgcctg

SEQ ID NO: 16073 - DNA, 20 bp, synthetic construct
  misc_feature 1..20: note = Description of Artificial Sequence: Synthetic oligonucleotide
  misc_feature 1..20: note = Target: FXN; (+) strand; PAM type: NRG; PAM sequence: CAG
  source 1..20: mol_type = other DNA
cacagaagagtgcctgcggc

SEQ ID NO: 16074 - DNA, 20 bp, synthetic construct
  misc_feature 1..20: note = Description of Artificial Sequence: Synthetic oligonucleotide
  misc_feature 1..20: note = Target: FXN; (+) strand; PAM type: NRG; PAM sequence: TGG
  source 1..20: mol_type = other DNA
agaagagtgcctgcggccag

SEQ ID NO: 16075 - DNA, 20 bp, synthetic construct
  misc_feature 1..20: note = Description of Artificial Sequence: Synthetic oligonucleotide
  misc_feature 1..20: note = Target: FXN; (+) strand; PAM type: NRG; PAM sequence: CAG
  source 1..20: mol_type = other DNA
tgcctgcggccagtggccac

SEQ ID NO: 16076 - DNA, 20 bp, synthetic construct
  misc_feature 1..20: note = Description of Artificial Sequence: Synthetic oligonucleotide
  misc_feature 1..20: note = Target: FXN; (+) strand; PAM type: NRG; PAM sequence: AGG
  source 1..20: mol_type = other DNA
gcctgcggccagtggccacc

SEQ ID NO: 16077 - DNA, 20 bp, synthetic construct
  misc_feature 1..20: note = Description of Artificial Sequence: Synthetic oligonucleotide
  misc_feature 1..20: note = Target: FXN; (+) strand; PAM type: NRG; PAM sequence: GGG
  source 1..20: mol_type = other DNA
cctgcggccagtggccacca

SEQ ID NO: 16078 - DNA, 20 bp, synthetic construct
  misc_feature 1..20: note = Description of Artificial Sequence: Synthetic oligonucleotide
  misc_feature 1..20: note = Target: FXN; (+) strand; PAM type: NRG; PAM sequence: GGG
  source 1..20: mol_type = other DNA
ctgcggccagtggccaccag

SEQ ID NO: 16079 - DNA, 20 bp, synthetic construct
  misc_feature 1..20: note = Description of Artificial Sequence: Synthetic oligonucleotide
  misc_feature 1..20: note = Target: FXN; (+) strand; PAM type: NRG; PAM sequence: CAG
  source 1..20: mol_type = other DNA
gtggccaccaggggtcgccg

SEQ ID NO: 16080 - DNA, 20 bp, synthetic construct
  misc_feature 1..20: note = Description of Artificial Sequence: Synthetic oligonucleotide
  misc_feature 1..20: note = Target: FXN; (+) strand; PAM type: NRG; PAM sequence: CAG
  source 1..20: mol_type = other DNA
ccaggggtcgccgcagcacc

SEQ ID NO: 16081 - DNA, 20 bp, synthetic construct
  misc_feature 1..20: note = Description of Artificial Sequence: Synthetic oligonucleotide
  misc_feature 1..20: note = Target: FXN; (+) strand; PAM type: NRG; PAM sequence: TGG
  source 1..20: mol_type = other DNA
gtcgccgcagcacccagcgc

SEQ ID NO: 16082 - DNA, 20 bp, synthetic construct
  misc_feature 1..20: note = Description of Artificial Sequence: Synthetic oligonucleotide
  misc_feature 1..20: note = Target: FXN; (+) strand; PAM type: NRG; PAM sequence: GAG
  source 1..20: mol_type = other DNA
cgccgcagcacccagcgctg

SEQ ID NO: 16083 - DNA, 20 bp, synthetic construct
  misc_feature 1..20: note = Description of Artificial Sequence: Synthetic oligonucleotide
  misc_feature 1..20: note = Target: FXN; (+) strand; PAM type: NRG; PAM sequence: AGG
  source 1..20: mol_type = other DNA
gccgcagcacccagcgctgg

SEQ ID NO: 16084 - DNA, 20 bp, synthetic construct
  misc_feature 1..20: note = Description of Artificial Sequence: Synthetic oligonucleotide
  misc_feature 1..20: note = Target: FXN; (+) strand; PAM type: NRG; PAM sequence: GGG
  source 1..20: mol_type = other DNA
ccgcagcacccagcgctgga

SEQ ID NO: 16085 - DNA, 20 bp, synthetic construct
  misc_feature 1..20: note = Description of Artificial Sequence: Synthetic oligonucleotide
  misc_feature 1..20: note = Target: FXN; (+) strand; PAM type: NRG; PAM sequence: CGG
  source 1..20: mol_type = other DNA
cagcacccagcgctggaggg

SEQ ID NO: 16086 - DNA, 20 bp, synthetic construct
  misc_feature 1..20: note = Description of Artificial Sequence: Synthetic oligonucleotide
  misc_feature 1..20: note = Target: FXN; (+) strand; PAM type: NRG; PAM sequence: GAG
  source 1..20: mol_type = other DNA
gcacccagcgctggagggcg

SEQ ID NO: 16087 - DNA, 20 bp, synthetic construct
  misc_feature 1..20: note = Description of Artificial Sequence: Synthetic oligonucleotide
  misc_feature 1..20: note = Target: FXN; (+) strand; PAM type: NRG; PAM sequence: CGG
  source 1..20: mol_type = other DNA
cccagcgctggagggcggag

SEQ ID NO: 16088 - DNA, 20 bp, synthetic construct
  misc_feature 1..20: note = Description of Artificial Sequence: Synthetic oligonucleotide
  misc_feature 1..20: note = Target: FXN; (+) strand; PAM type: NRG; PAM sequence: GGG
  source 1..20: mol_type = other DNA
ccagcgctggagggcggagc

SEQ ID NO: 16089 - DNA, 20 bp, synthetic construct
  misc_feature 1..20: note = Description of Artificial Sequence: Synthetic oligonucleotide
  misc_feature 1..20: note = Target: FXN; (+) strand; PAM type: NRG; PAM sequence: CGG
  source 1..20: mol_type = other DNA
gcgctggagggcggagcggg

SEQ ID NO: 16090 - DNA, 20 bp, synthetic construct
  misc_feature 1..20: note = Description of Artificial Sequence: Synthetic oligonucleotide
  misc_feature 1..20: note = Target: FXN; (+) strand; PAM type: NRG; PAM sequence: CAG
  source 1..20: mol_type = other DNA
ctggagggcggagcgggcgg

SEQ ID NO: 16091 - DNA, 20 bp, synthetic construct
  misc_feature 1..20: note = Description of Artificial Sequence: Synthetic oligonucleotide
  misc_feature 1..20: note = Target: FXN; (+) strand; PAM type: NRG; PAM sequence: CGG
  source 1..20: mol_type = other DNA
ggcggagcgggcggcagacc

SEQ ID NO: 16092 - DNA, 20 bp, synthetic construct
  misc_feature 1..20: note = Description of Artificial Sequence: Synthetic oligonucleotide
  misc_feature 1..20: note = Target: FXN; (+) strand; PAM type: NRG; PAM sequence: GAG
  source 1..20: mol_type = other DNA
cggagcgggcggcagacccg

SEQ ID NO: 16093 - DNA, 20 bp, synthetic construct
  misc_feature 1..20: note = Description of Artificial Sequence: Synthetic oligonucleotide
  misc_feature 1..20: note = Target: FXN; (+) strand; PAM type: NRG; PAM sequence: CAG
  source 1..20: mol_type = other DNA
agcgggcggcagacccggag

SEQ ID NO: 16094 - DNA, 20 bp, synthetic construct
  misc_feature 1..20: note = Description of Artificial Sequence: Synthetic oligonucleotide
  misc_feature 1..20: note = Target: FXN; (+) strand; PAM type: NRG; PAM sequence: TGG
  source 1..20: mol_type = other DNA
ggcagacccggagcagcatg

SEQ ID NO: 16095 - DNA, 20 bp, synthetic construct
  misc_feature 1..20: note = Description of Artificial Sequence: Synthetic oligonucleotide
  misc_feature 1..20: note = Target: FXN; (+) strand; PAM type: NRG; PAM sequence: CGG
  source 1..20: mol_type = other DNA
cggagcagcatgtggactct

SEQ ID NO: 16096 - DNA, 20 bp, synthetic construct
  misc_feature 1..20: note = Description of Artificial Sequence: Synthetic oligonucleotide
  misc_feature 1..20: note = Target: FXN; (+) strand; PAM type: NRG; PAM sequence: GGG
  source 1..20: mol_type = other DNA
ggagcagcatgtggactctc

SEQ ID NO: 16097 - DNA, 20 bp, synthetic construct
  misc_feature 1..20: note = Description of Artificial Sequence: Synthetic oligonucleotide
  misc_feature 1..20: note = Target: FXN; (+) strand; PAM type: NRG; PAM sequence: CAG
  source 1..20: mol_type = other DNA
gtggactctcgggcgccgcg

SEQ ID NO: 16098 - DNA, 20 bp, synthetic construct
  misc_feature 1..20: note = Description of Artificial Sequence: Synthetic oligonucleotide
  misc_feature 1..20: note = Target: FXN; (+) strand; PAM type: NRG; PAM sequence: TAG
  source 1..20: mol_type = other DNA
gactctcgggcgccgcgcag

SEQ ID NO: 16099 - DNA, 20 bp, synthetic construct
  misc_feature 1..20: note = Description of Artificial Sequence: Synthetic oligonucleotide
  misc_feature 1..20: note = Target: FXN; (+) strand; PAM type: NRG; PAM sequence: CGG
  source 1..20: mol_type = other DNA
ctcgggcgccgcgcagtagc

SEQ ID NO: 16100 - DNA, 20 bp, synthetic construct
  misc_feature 1..20: note = Description of Artificial Sequence: Synthetic oligonucleotide
  misc_feature 1..20: note = Target: FXN; (+) strand; PAM type: NRG; PAM sequence: TGG
  source 1..20: mol_type = other DNA
ccgcgcagtagccggcctcc

SEQ ID NO: 16101 - DNA, 20 bp, synthetic construct
  misc_feature 1..20: note = Description of Artificial Sequence: Synthetic oligonucleotide
  misc_feature 1..20: note = Target: FXN; (+) strand; PAM type: NRG; PAM sequence: CAG
  source 1..20: mol_type = other DNA
gccggcctcctggcgtcacc

SEQ ID NO: 16102 - DNA, 20 bp, synthetic construct
  misc_feature 1..20: note = Description of Artificial Sequence: Synthetic oligonucleotide
  misc_feature 1..20: note = Target: FXN; (+) strand; PAM type: NRG; PAM sequence: CAG
  source 1..20: mol_type = other DNA
cctcctggcgtcacccagcc

SEQ ID NO: 16103 - DNA, 20 bp, synthetic construct
  misc_feature 1..20: note = Description of Artificial Sequence: Synthetic oligonucleotide
  misc_feature 1..20: note = Target: FXN; (+) strand; PAM type: NRG; PAM sequence: CAG
  source 1..20: mol_type = other DNA
tggcgtcacccagcccagcc

SEQ ID NO: 16104 - DNA, 20 bp, synthetic construct
  misc_feature 1..20: note = Description of Artificial Sequence: Synthetic oligonucleotide
  misc_feature 1..20: note = Target: FXN; (+) strand; PAM type: NRG; PAM sequence: AGG
  source 1..20: mol_type = other DNA
ggcgtcacccagcccagccc

SEQ ID NO: 16105 - DNA, 20 bp, synthetic construct
  misc_feature 1..20: note = Description of Artificial Sequence: Synthetic oligonucleotide
  misc_feature 1..20: note = Target: FXN; (+) strand; PAM type: NRG; PAM sequence: CAG
  source 1..20: mol_type = other DNA
cacccagcccagcccaggcc

SEQ ID NO: 16106 - DNA, 20 bp, synthetic construct
  misc_feature 1..20: note = Description of Artificial Sequence: Synthetic oligonucleotide
  misc_feature 1..20: note = Target: FXN; (+) strand; PAM type: NRG; PAM sequence: CGG
  source 1..20: mol_type = other DNA
cccaggcccagaccctcacc

SEQ ID NO: 16107 - DNA, 20 bp, synthetic construct
  misc_feature 1..20: note = Description of Artificial Sequence: Synthetic oligonucleotide
  misc_feature 1..20: note = Target: FXN; (+) strand; PAM type: NRG; PAM sequence: GGG
  source 1..20: mol_type = other DNA
ccaggcccagaccctcaccc

SEQ ID NO: 16108 - DNA, 20 bp, synthetic construct
  misc_feature 1..20: note = Description of Artificial Sequence: Synthetic oligonucleotide
  misc_feature 1..20: note = Target: FXN; (+) strand; PAM type: NRG; PAM sequence: CGG
  source 1..20: mol_type = other DNA
agaccctcacccgggtcccg

SEQ ID NO: 16109 - DNA, 20 bp, synthetic construct
  misc_feature 1..20: note = Description of Artificial Sequence: Synthetic oligonucleotide
  misc_feature 1..20: note = Target: FXN; (+) strand; PAM type: NRG; PAM sequence: CGG
  source 1..20: mol_type = other DNA
cctcacccgggtcccgcggc

SEQ ID NO: 16110 - DNA, 20 bp, synthetic construct
  misc_feature 1..20: note = Description of Artificial Sequence: Synthetic oligonucleotide
  misc_feature 1..20: note = Target: FXN; (+) strand; PAM type: NRG; PAM sequence: CAG
  source 1..20: mol_type = other DNA
cacccgggtcccgcggccgg

SEQ ID NO: 16111 - DNA, 20 bp, synthetic construct
  misc_feature 1..20: note = Description of Artificial Sequence: Synthetic oligonucleotide
  misc_feature 1..20: note = Target: FXN; (+) strand; PAM type: NRG; PAM sequence: GAG
  source 1..20: mol_type = other DNA
cccgggtcccgcggccggca

SEQ ID NO: 16112 - DNA, 20 bp, synthetic construct
  misc_feature 1..20: note = Description of Artificial Sequence: Synthetic oligonucleotide
  misc_feature 1..20: note = Target: FXN; (+) strand; PAM type: NRG; PAM sequence: TGG
  source 1..20: mol_type = other DNA
ggtcccgcggccggcagagt

SEQ ID NO: 16113 - DNA, 20 bp, synthetic construct
  misc_feature 1..20: note = Description of Artificial Sequence: Synthetic oligonucleotide
  misc_feature 1..20: note = Target: FXN; (+) strand; PAM type: NRG; PAM sequence: CGG
  source 1..20: mol_type = other DNA
gcagagttggccccactctg

SEQ ID NO: 16114 - DNA, 20 bp, synthetic construct
  misc_feature 1..20: note = Description of Artificial Sequence: Synthetic oligonucleotide
  misc_feature 1..20: note = Target: FXN; (+) strand; PAM type: NRG; PAM sequence: TGG
  source 1..20: mol_type = other DNA
gccccactctgcggccgccg

SEQ ID NO: 16115 - DNA, 20 bp, synthetic construct
  misc_feature 1..20: note = Description of Artificial Sequence: Synthetic oligonucleotide
  misc_feature 1..20: note = Target: FXN; (+) strand; PAM type: NRG; PAM sequence: CAG
  source 1..20: mol_type = other DNA
gacctgcacgccccgccgcg

SEQ ID NO: 16116 - DNA, 20 bp, synthetic construct
  misc_feature 1..20: note = Description of Artificial Sequence: Synthetic oligonucleotide
  misc_feature 1..20: note = Target: FXN; (+) strand; PAM type: NRG; PAM sequence: AAG
  source 1..20: mol_type = other DNA
tgcacgccccgccgcgcagt

SEQ ID NO: 16117 - DNA, 20 bp, synthetic construct
  misc_feature 1..20: note = Description of Artificial Sequence: Synthetic oligonucleotide
  misc_feature 1..20: note = Target: FXN; (+) strand; PAM type: NRG; PAM sequence: CGG
  source 1..20: mol_type = other DNA
cgcgcagtaagtatccgcgc

SEQ ID NO: 16118 - DNA, 20 bp, synthetic construct
  misc_feature 1..20: note = Description of Artificial Sequence: Synthetic oligonucleotide
  misc_feature 1..20: note = Target: FXN; (+) strand; PAM type: NRG; PAM sequence: GGG
  source 1..20: mol_type = other DNA
gcgcagtaagtatccgcgcc

SEQ ID NO: 16119 - DNA, 20 bp, synthetic construct
  misc_feature 1..20: note = Description of Artificial Sequence: Synthetic oligonucleotide
  misc_feature 1..20: note = Target: FXN; (+) strand; PAM type: NRG; PAM sequence: CAG
  source 1..20: mol_type = other DNA
gtaagtatccgcgccgggaa

SEQ ID NO: 16120 - DNA, 20 bp, synthetic construct
  misc_feature 1..20: note = Description of Artificial Sequence: Synthetic oligonucleotide
  misc_feature 1..20: note = Target: FXN; (+) strand; PAM type: NRG; PAM sequence: CGG
  source 1..20: mol_type = other DNA
atccgcgccgggaacagccg

SEQ ID NO: 16121 - DNA, 20 bp, synthetic construct
  misc_feature 1..20: note = Description of Artificial Sequence: Synthetic oligonucleotide
  misc_feature 1..20: note = Target: FXN; (+) strand; PAM type: NRG; PAM sequence: GGG
  source 1..20: mol_type = other DNA
tccgcgccgggaacagccgc

SEQ ID NO: 16122 - DNA, 20 bp, synthetic construct
  misc_feature 1..20: note = Description of Artificial Sequence: Synthetic oligonucleotide
  misc_feature 1..20: note = Target: FXN; (+) strand; PAM type: NRG; PAM sequence: CGG
  source 1..20: mol_type = other DNA
cagccgcgggccgcacgccg

SEQ ID NO: 16123 - DNA, 20 bp, synthetic construct
  misc_feature 1..20: note = Description of Artificial Sequence: Synthetic oligonucleotide
  misc_feature 1..20: note = Target: FXN; (+) strand; PAM type: NRG; PAM sequence: GGG
  source 1..20: mol_type = other DNA
agccgcgggccgcacgccgc

SEQ ID NO: 16124 - DNA, 20 bp, synthetic construct
  misc_feature 1..20: note = Description of Artificial Sequence: Synthetic oligonucleotide
  misc_feature 1..20: note = Target: FXN; (+) strand; PAM type: NRG; PAM sequence: CAG
  source 1..20: mol_type = other DNA
ccgcacgccgcacgcctgcg

SEQ ID NO: 16125 - DNA, 20 bp, synthetic construct
  misc_feature 1..20: note = Description of Artificial Sequence: Synthetic oligonucleotide
  misc_feature 1..20: note = Target: FXN; (+) strand; PAM type: NRG; PAM sequence: AGG
  source 1..20: mol_type = other DNA
cgcacgccgcacgcctgcgc

SEQ ID NO: 16126 - DNA, 20 bp, synthetic construct
  misc_feature 1..20: note = Description of Artificial Sequence: Synthetic oligonucleotide
  misc_feature 1..20: note = Target: FXN; (+) strand; PAM type: NRG; PAM sequence: GGG
  source 1..20: mol_type = other DNA
gcacgccgcacgcctgcgca

SEQ ID NO: 16127 - DNA, 20 bp, synthetic construct
  misc_feature 1..20: note = Description of Artificial Sequence: Synthetic oligonucleotide
  misc_feature 1..20: note = Target: FXN; (+) strand; PAM type: NRG; PAM sequence: GAG
  source 1..20: mol_type = other DNA
acgccgcacgcctgcgcagg

SEQ ID NO: 16128 - DNA, 20 bp, synthetic construct
  misc_feature 1..20: note = Description of Artificial Sequence: Synthetic oligonucleotide
  misc_feature 1..20: note = Target: FXN; (+) strand; PAM type: NRG; PAM sequence: AGG
  source 1..20: mol_type = other DNA
cgccgcacgcctgcgcaggg

SEQ ID NO: 16129 - DNA, 20 bp, synthetic construct
  misc_feature 1..20: note = Description of Artificial Sequence: Synthetic oligonucleotide
  misc_feature 1..20: note = Target: FXN; (+) strand; PAM type: NRG; PAM sequence: CGG
  source 1..20: mol_type = other DNA
cagggaggcgccgcgcacgc

SEQ ID NO: 16130 - DNA, 20 bp, synthetic construct
  misc_feature 1..20: note = Description of Artificial Sequence: Synthetic oligonucleotide
  misc_feature 1..20: note = Target: FXN; (+) strand; PAM type: NRG; PAM sequence: GGG
  source 1..20: mol_type = other DNA
agggaggcgccgcgcacgcc

SEQ ID NO: 16131 - DNA, 20 bp, synthetic construct
  misc_feature 1..20: note = Description of Artificial Sequence: Synthetic oligonucleotide
  misc_feature 1..20: note = Target: FXN; (+) strand; PAM type: NRG; PAM sequence: GGG
  source 1..20: mol_type = other DNA
gggaggcgccgcgcacgccg

SEQ ID NO: 16132 - DNA, 20 bp, synthetic construct
  misc_feature 1..20: note = Description of Artificial Sequence: Synthetic oligonucleotide
  misc_feature 1..20: note = Target: FXN; (+) strand; PAM type: NRG; PAM sequence: CGG
  source 1..20: mol_type = other DNA
cgcgcacgccggggtcgctc

SEQ ID NO: 16133 - DNA, 20 bp, synthetic construct
  misc_feature 1..20: note = Description of Artificial Sequence: Synthetic oligonucleotide
  misc_feature 1..20: note = Target: FXN; (+) strand; PAM type: NRG; PAM sequence: GGG
  source 1..20: mol_type = other DNA
gcgcacgccggggtcgctcc

SEQ ID NO: 16134 - DNA, 20 bp, synthetic construct
  misc_feature 1..20: note = Description of Artificial Sequence: Synthetic oligonucleotide
  misc_feature 1..20: note = Target: FXN; (+) strand; PAM type: NRG; PAM sequence: TGG
  source 1..20: mol_type = other DNA
gtcgctccgggtacgcgcgc

SEQ ID NO: 16135 - DNA, 20 bp, synthetic construct
  misc_feature 1..20: note = Description of Artificial Sequence: Synthetic oligonucleotide
  misc_feature 1..20: note = Target: FXN; (+) strand; PAM type: NRG; PAM sequence: TAG
  source 1..20: mol_type = other DNA
tccgggtacgcgcgctggac

SEQ ID NO: 16136 - DNA, 20 bp, synthetic construct
  misc_feature 1..20: note = Description of Artificial Sequence: Synthetic oligonucleotide
  misc_feature 1..20: note = Target: FXN; (+) strand; PAM type: NRG; PAM sequence: CAG
  source 1..20: mol_type = other DNA
tagctcaccccgctccttct

SEQ ID NO: 16137 - DNA, 20 bp, synthetic construct
  misc_feature 1..20: note = Description of Artificial Sequence: Synthetic oligonucleotide
  misc_feature 1..20: note = Target: FXN; (+) strand; PAM type: NRG; PAM sequence: AGG
  source 1..20: mol_type = other DNA
agctcaccccgctccttctc

SEQ ID NO: 16138 - DNA, 20 bp, synthetic construct
  misc_feature 1..20: note = Description of Artificial Sequence: Synthetic oligonucleotide
  misc_feature 1..20: note = Target: FXN; (+) strand; PAM type: NRG; PAM sequence: GGG
  source 1..20: mol_type = other DNA
gctcaccccgctccttctca

SEQ ID NO: 16139 - DNA, 20 bp, synthetic construct
  misc_feature 1..20: note = Description of Artificial Sequence: Synthetic oligonucleotide
  misc_feature 1..20: note = Target: FXN; (+) strand; PAM type: NRG; PAM sequence: CGG
  source 1..20: mol_type = other DNA
caccccgctccttctcaggg

SEQ ID NO: 16140 - DNA, 20 bp, synthetic construct
  misc_feature 1..20: note = Description of Artificial Sequence: Synthetic oligonucleotide
  misc_feature 1..20: note = Target: FXN; (+) strand; PAM type: NRG; PAM sequence: CGG
  source 1..20: mol_type = other DNA
cgctccttctcagggcggcc

SEQ ID NO: 16141 - DNA, 20 bp, synthetic construct
  misc_feature 1..20: note = Description of Artificial Sequence: Synthetic oligonucleotide
  misc_feature 1..20: note = Target: FXN; (+) strand; PAM type: NRG; PAM sequence: CGG
  source 1..20: mol_type = other DNA
tccttctcagggcggcccgg

SEQ ID NO: 16142 - DNA, 20 bp, synthetic construct
  misc_feature 1..20: note = Description of Artificial Sequence: Synthetic oligonucleotide
  misc_feature 1..20: note = Target: FXN; (+) strand; PAM type: NRG; PAM sequence: AAG
  source 1..20: mol_type = other DNA
ttctcagggcggcccggcgg

SEQ ID NO: 16143 - DNA, 20 bp, synthetic construct
  misc_feature 1..20: note = Description of Artificial Sequence: Synthetic oligonucleotide
  misc_feature 1..20: note = Target: FXN; (+) strand; PAM type: NRG; PAM sequence: CGG
  source 1..20: mol_type = other DNA
tcagggcggcccggcggaag

SEQ ID NO: 16144 - DNA, 20 bp, synthetic construct
  misc_feature 1..20: note = Description of Artificial Sequence: Synthetic oligonucleotide
  misc_feature 1..20: note = Target: FXN; (+) strand; PAM type: NRG; PAM sequence: TGG
  source 1..20: mol_type = other DNA
ggccttgcaactcccttctc

SEQ ID NO: 16145 - DNA, 20 bp, synthetic construct
  misc_feature 1..20: note = Description of Artificial Sequence: Synthetic oligonucleotide
  misc_feature 1..20: note = Target: FXN; (+) strand; PAM type: NRG; PAM sequence: CGG
  source 1..20: mol_type = other DNA
actcccttctctggttctcc

SEQ ID NO: 16146 - DNA, 20 bp, synthetic construct
  misc_feature 1..20: note = Description of Artificial Sequence: Synthetic oligonucleotide
  misc_feature 1..20: note = Target: FXN; (+) strand; PAM type: NRG; PAM sequence: TGG
  source 1..20: mol_type = other DNA
tctcccggttgcatttacac

SEQ ID NO: 16147 - DNA, 20 bp, synthetic construct
  misc_feature 1..20: note = Description of Artificial Sequence: Synthetic oligonucleotide
  misc_feature 1..20: note = Target: FXN; (+) strand; PAM type: NRG; PAM sequence: AAG
  source 1..20: mol_type = other DNA
acactggcttctgctttccg

SEQ ID NO: 16148 - DNA, 20 bp, synthetic construct
  misc_feature 1..20: note = Description of Artificial Sequence: Synthetic oligonucleotide
  misc_feature 1..20: note = Target: FXN; (+) strand; PAM type: NRG; PAM sequence: AGG
  source 1..20: mol_type = other DNA
cactggcttctgctttccga

SEQ ID NO: 16149 - DNA, 20 bp, synthetic construct
  misc_feature 1..20: note = Description of Artificial Sequence: Synthetic oligonucleotide
  misc_feature 1..20: note = Target: FXN; (+) strand; PAM type: NRG; PAM sequence: AAG
  source 1..20: mol_type = other DNA
gcttctgctttccgaaggaa

SEQ ID NO: 16150 - DNA, 20 bp, synthetic construct
  misc_feature 1..20: note = Description of Artificial Sequence: Synthetic oligonucleotide
  misc_feature 1..20: note = Target: FXN; (+) strand; PAM type: NRG; PAM sequence: AGG
  source 1..20: mol_type = other DNA
cttctgctttccgaaggaaa

SEQ ID NO: 16151 - DNA, 20 bp, synthetic construct
  misc_feature 1..20: note = Description of Artificial Sequence: Synthetic oligonucleotide
  misc_feature 1..20: note = Target: FXN; (+) strand; PAM type: NRG; PAM sequence: GGG
  source 1..20: mol_type = other DNA
ttctgctttccgaaggaaaa

SEQ ID NO: 16152 - DNA, 20 bp, synthetic construct
  misc_feature 1..20: note = Description of Artificial Sequence: Synthetic oligonucleotide
  misc_feature 1..20: note = Target: FXN; (+) strand; PAM type: NRG; PAM sequence: GGG
  source 1..20: mol_type = other DNA
tctgctttccgaaggaaaag

SEQ ID NO: 16153 - DNA, 20 bp, synthetic construct
  misc_feature 1..20: note = Description of Artificial Sequence: Synthetic oligonucleotide
  misc_feature 1..20: note = Target: FXN; (+) strand; PAM type: NRG; PAM sequence: CGG
  source 1..20: mol_type = other DNA
aaaggggacattttgtcctg

SEQ ID NO: 16154 - DNA, 20 bp, synthetic construct
  misc_feature 1..20: note = Description of Artificial Sequence: Synthetic oligonucleotide
  misc_feature 1..20: note = Target: FXN; (+) strand; PAM type: NRG; PAM sequence: CGG
  source 1..20: mol_type = other DNA
tttgtcctgcggtgcgactg

SEQ ID NO: 16155 - DNA, 20 bp, synthetic construct
  misc_feature 1..20: note = Description of Artificial Sequence: Synthetic oligonucleotide
  misc_feature 1..20: note = Target: FXN; (+) strand; PAM type: NRG; PAM sequence: GGG
  source 1..20: mol_type = other DNA
ttgtcctgcggtgcgactgc

SEQ ID NO: 16156 - DNA, 20 bp, synthetic construct
  misc_feature 1..20: note = Description of Artificial Sequence: Synthetic oligonucleotide
  misc_feature 1..20: note = Target: FXN; (+) strand; PAM type: NRG; PAM sequence: AAG
  source 1..20: mol_type = other DNA
ctgcggtgcgactgcgggtc

SEQ ID NO: 16157 - DNA, 20 bp, synthetic construct
  misc_feature 1..20: note = Description of Artificial Sequence: Synthetic oligonucleotide
  misc_feature 1..20: note = Target: FXN; (+) strand; PAM type: NRG; PAM sequence: AGG
  source 1..20: mol_type = other DNA
tgcggtgcgactgcgggtca

SEQ ID NO: 16158 - DNA, 20 bp, synthetic construct
  misc_feature 1..20: note = Description of Artificial Sequence: Synthetic oligonucleotide
  misc_feature 1..20: note = Target: FXN; (+) strand; PAM type: NRG; PAM sequence: CGG
  source 1..20: mol_type = other DNA
tgcgactgcgggtcaaggca

SEQ ID NO: 16159 - DNA, 20 bp, synthetic construct
  misc_feature 1..20: note = Description of Artificial Sequence: Synthetic oligonucleotide
  misc_feature 1..20: note = Target: FXN; (+) strand; PAM type: NRG; PAM sequence: GGG
  source 1..20: mol_type = other DNA
gcgactgcgggtcaaggcac

SEQ ID NO: 16160 - DNA, 20 bp, synthetic construct
  misc_feature 1..20: note = Description of Artificial Sequence: Synthetic oligonucleotide
  misc_feature 1..20: note = Target: FXN; (+) strand; PAM type: NRG; PAM sequence: AAG
  source 1..20: mol_type = other DNA
tgcgggtcaaggcacgggcg

SEQ ID NO: 16161 - DNA, 20 bp, synthetic construct
  misc_feature 1..20: note = Description of Artificial Sequence: Synthetic oligonucleotide
  misc_feature 1..20: note = Target: FXN; (+) strand; PAM type: NRG; PAM sequence: AGG
  source 1..20: mol_type = other DNA
gcgggtcaaggcacgggcga

SEQ ID NO: 16162 - DNA, 20 bp, synthetic construct
  misc_feature 1..20: note = Description of Artificial Sequence: Synthetic oligonucleotide
  misc_feature 1..20: note = Target: FXN; (+) strand; PAM type: NRG; PAM sequence: CAG
  source 1..20: mol_type = other DNA
ggtcaaggcacgggcgaagg

SEQ ID NO: 16163 - DNA, 20 bp, synthetic construct
  misc_feature 1..20: note = Description of Artificial Sequence: Synthetic oligonucleotide
  misc_feature 1..20: note = Target: FXN; (+) strand; PAM type: NRG; PAM sequence: AGG
  source 1..20: mol_type = other DNA
gtcaaggcacgggcgaaggc

SEQ ID NO: 16164 - DNA, 20 bp, synthetic construct
  misc_feature 1..20: note = Description of Artificial Sequence: Synthetic oligonucleotide
  misc_feature 1..20: note = Target: FXN; (+) strand; PAM type: NRG; PAM sequence: GGG
  source 1..20: mol_type = other DNA
tcaaggcacgggcgaaggca

SEQ ID NO: 16165 - DNA, 20 bp, synthetic construct
  misc_feature 1..20: note = Description of Artificial Sequence: Synthetic oligonucleotide
  misc_feature 1..20: note = Target: FXN; (+) strand; PAM type: NRG; PAM sequence: CAG
  source 1..20: mol_type = other DNA
aggcacgggcgaaggcaggg

SEQ ID NO: 16166 - DNA, 20 bp, synthetic construct
  misc_feature 1..20: note = Description of Artificial Sequence: Synthetic oligonucleotide
  misc_feature 1..20: note = Target: FXN; (+) strand; PAM type: NRG; PAM sequence: AGG
  source 1..20: mol_type = other DNA
ggcacgggcgaaggcagggc

SEQ ID NO: 16167 - DNA, 20 bp, synthetic construct
  misc_feature 1..20: note = Description of Artificial Sequence: Synthetic oligonucleotide
  misc_feature 1..20: note = Target: FXN; (+) strand; PAM type: NRG; PAM sequence: TGG
  source 1..20: mol_type = other DNA
cgggcgaaggcagggcaggc

SEQ ID NO: 16168 - DNA, 20 bp, synthetic construct
  misc_feature 1..20: note = Description of Artificial Sequence: Synthetic oligonucleotide
  misc_feature 1..20: note = Target: FXN; (+) strand; PAM type: NRG; PAM sequence: TGG
  source 1..20: mol_type = other DNA
gcgaaggcagggcaggctgg

SEQ ID NO: 16169 - DNA, 20 bp, synthetic construct
  misc_feature 1..20: note = Description of Artificial Sequence: Synthetic oligonucleotide
  misc_feature 1..20: note = Target: FXN; (+) strand; PAM type: NRG; PAM sequence: GAG
  source 1..20: mol_type = other DNA
gaaggcagggcaggctggtg

SEQ ID NO: 16170 - DNA, 20 bp, synthetic construct
  misc_feature 1..20: note = Description of Artificial Sequence: Synthetic oligonucleotide
  misc_feature 1..20: note = Target: FXN; (+) strand; PAM type: NRG; PAM sequence: AGG
  source 1..20: mol_type = other DNA
aaggcagggcaggctggtgg

SEQ ID NO: 16171 - DNA, 20 bp, synthetic construct
  misc_feature 1..20: note = Description of Artificial Sequence: Synthetic oligonucleotide
  misc_feature 1..20: note = Target: FXN; (+) strand; PAM type: NRG; PAM sequence: GGG
  source 1..20: mol_type = other DNA
aggcagggcaggctggtgga

SEQ ID NO: 16172 - DNA, 20 bp, synthetic construct
  misc_feature 1..20: note = Description of Artificial Sequence: Synthetic oligonucleotide
  misc_feature 1..20: note = Target: FXN; (+) strand; PAM type: NRG; PAM sequence: GGG
  source 1..20: mol_type = other DNA
ggcagggcaggctggtggag

SEQ ID NO: 16173 - DNA, 20 bp, synthetic construct
  misc_feature 1..20: note = Description of Artificial Sequence: Synthetic oligonucleotide
  misc_feature 1..20: note = Target: FXN; (+) strand; PAM type: NRG; PAM sequence: CGG
  source 1..20: mol_type = other DNA
ggcaggctggtggaggggac

SEQ ID NO: 16174 - DNA, 20 bp, synthetic construct
  misc_feature 1..20: note = Description of Artificial Sequence: Synthetic oligonucleotide
  misc_feature 1..20: note = Target: FXN; (+) strand; PAM type: NRG; PAM sequence: GAG
  source 1..20: mol_type = other DNA
tggtggaggggaccggttcc

SEQ ID NO: 16175 - DNA, 20 bp, synthetic construct
  misc_feature 1..20: note = Description of Artificial Sequence: Synthetic oligonucleotide
  misc_feature 1..20: note = Target: FXN; (+) strand; PAM type: NRG; PAM sequence: AGG
  source 1..20: mol_type = other DNA
ggtggaggggaccggttccg

SEQ ID NO: 16176 - DNA, 20 bp, synthetic construct
  misc_feature 1..20: note = Description of Artificial Sequence: Synthetic oligonucleotide
  misc_feature 1..20: note = Target: FXN; (+) strand; PAM type: NRG; PAM sequence: GGG
  source 1..20: mol_type = other DNA
gtggaggggaccggttccga

SEQ ID NO: 16177 - DNA, 20 bp, synthetic construct
  misc_feature 1..20: note = Description of Artificial Sequence: Synthetic oligonucleotide
  misc_feature 1..20: note = Target: FXN; (+) strand; PAM type: NRG; PAM sequence: GGG
  source 1..20: mol_type = other DNA
tggaggggaccggttccgag

SEQ ID NO: 16178 - DNA, 20 bp, synthetic construct
  misc_feature 1..20: note = Description of Artificial Sequence: Synthetic oligonucleotide
  misc_feature 1..20: note = Target: FXN; (+) strand; PAM type: NRG; PAM sequence: CGG
  source 1..20: mol_type = other DNA
gaccggttccgaggggtgtg

SEQ ID NO: 16179 - DNA, 20 bp, synthetic construct
  misc_feature 1..20: note = Description of Artificial Sequence: Synthetic oligonucleotide
  misc_feature 1..20: note = Target: FXN; (+) strand; PAM type: NRG; PAM sequence: CAG
  source 1..20: mol_type = other DNA
ttctctgcgataacttgttt

SEQ ID NO: 16180 - DNA, 20 bp, synthetic construct
  misc_feature 1..20: note = Description of Artificial Sequence: Synthetic oligonucleotide
  misc_feature 1..20: note = Target: FXN; (+) strand; PAM type: NRG; PAM sequence: TAG
  source 1..20: mol_type = other DNA
acttgtttcagtaatattaa

SEQ ID NO: 16181 - DNA, 20 bp, synthetic construct
  misc_feature 1..20: note = Description of Artificial Sequence: Synthetic oligonucleotide
  misc_feature 1..20: note = Target: FXN; (+) strand; PAM type: NRG; PAM sequence: TGG
  source 1..20: mol_type = other DNA
gtttcagtaatattaataga

SEQ ID NO: 16182 - DNA, 20 bp, synthetic construct
  misc_feature 1..20: note = Description of Artificial Sequence: Synthetic oligonucleotide
  misc_feature 1..20: note = Target: FXN; (+) strand; PAM type: NRG; PAM sequence: TAG
  source 1..20: mol_type = other DNA
tattaatagatggtatctgc

SEQ ID NO: 16183 - DNA, 20 bp, synthetic construct
  misc_feature 1..20: note = Description of Artificial Sequence: Synthetic oligonucleotide
  misc_feature 1..20: note = Target: FXN; (+) strand; PAM type: NRG; PAM sequence: TAG
  source 1..20: mol_type = other DNA
tgtctgtgtgtatctgtata

SEQ ID NO: 16184 - DNA, 20 bp, synthetic construct
  misc_feature 1..20: note = Description of Artificial Sequence: Synthetic oligonucleotide
  misc_feature 1..20: note = Target: FXN; (+) strand; PAM type: NRG; PAM sequence: CGG
  source 1..20: mol_type = other DNA
tgtgtgtgtgtttgcgcgca

SEQ ID NO: 16185 - DNA, 20 bp, synthetic construct
  misc_feature 1..20: note = Description of Artificial Sequence: Synthetic oligonucleotide
  misc_feature 1..20: note = Target: FXN; (+) strand; PAM type: NRG; PAM sequence: GGG
  source 1..20: mol_type = other DNA
gtgtgtgtgtttgcgcgcac

SEQ ID NO: 16186 - DNA, 20 bp, synthetic construct
  misc_feature 1..20: note = Description of Artificial Sequence: Synthetic oligonucleotide
  misc_feature 1..20: note = Target: FXN; (+) strand; PAM type: NRG; PAM sequence: AAG
  source 1..20: mol_type = other DNA
cgcgcacacctaatattttc

SEQ ID NO: 16187 - DNA, 20 bp, synthetic construct
  misc_feature 1..20: note = Description of Artificial Sequence: Synthetic oligonucleotide
  misc_feature 1..20: note = Target: FXN; (+) strand; PAM type: NRG; PAM sequence: AGG
  source 1..20: mol_type = other DNA
gcgcacacctaatattttca

SEQ ID NO: 16188 - DNA, 20 bp, synthetic construct
  misc_feature 1..20: note = Description of Artificial Sequence: Synthetic oligonucleotide
  misc_feature 1..20: note = Target: FXN; (+) strand; PAM type: NRG; PAM sequence: TGG
  source 1..20: mol_type = other DNA
acacctaatattttcaaggc

SEQ ID NO: 16189 - DNA, 20 bp, synthetic construct
  misc_feature 1..20: note = Description of Artificial Sequence: Synthetic oligonucleotide
  misc_feature 1..20: note = Target: FXN; (+) strand; PAM type: NRG; PAM sequence: TGG
  source 1..20: mol_type = other DNA
ttttgaacgaaatgctttcc

SEQ ID NO: 16190 - DNA, 20 bp, synthetic construct
  misc_feature 1..20: note = Description of Artificial Sequence: Synthetic oligonucleotide
  misc_feature 1..20: note = Target: FXN; (+) strand; PAM type: NRG; PAM sequence: GAG
  source 1..20: mol_type = other DNA
acgaaatgctttcctggaac

SEQ ID NO: 16191 - DNA, 20 bp, synthetic construct
  misc_feature 1..20: note = Description of Artificial Sequence: Synthetic oligonucleotide
  misc_feature 1..20: note = Target: FXN; (+) strand; PAM type: NRG; PAM sequence: AGG
  source 1..20: mol_type = other DNA
cgaaatgctttcctggaacg

SEQ ID NO: 16192 - DNA, 20 bp, synthetic construct
  misc_feature 1..20: note = Description of Artificial Sequence: Synthetic oligonucleotide
  misc_feature 1..20: note = Target: FXN; (+) strand; PAM type: NRG; PAM sequence: CAG
  source 1..20: mol_type = other DNA
ctggaacgaggtgaaacttt

SEQ ID NO: 16193 - DNA, 20 bp, synthetic construct
  misc_feature 1..20: note = Description of Artificial Sequence: Synthetic oligonucleotide
  misc_feature 1..20: note = Target: FXN; (+) strand; PAM type: NRG; PAM sequence: GAG
  source 1..20: mol_type = other DNA
ggaacgaggtgaaactttca

SEQ ID NO: 16194 - DNA, 20 bp, synthetic construct
  misc_feature 1..20: note = Description of Artificial Sequence: Synthetic oligonucleotide
  misc_feature 1..20: note = Target: FXN; (+) strand; PAM type: NRG; PAM sequence: CAG
  source 1..20: mol_type = other DNA
aggtgaaactttcagagctg

SEQ ID NO: 16195 - DNA, 20 bp, synthetic construct
  misc_feature 1..20: note = Description of Artificial Sequence: Synthetic oligonucleotide
  misc_feature 1..20: note = Target: FXN; (+) strand; PAM type: NRG; PAM sequence: TAG
  source 1..20: mol_type = other DNA
aaactttcagagctgcagaa

SEQ ID NO: 16196 - DNA, 20 bp, synthetic construct
  misc_feature 1..20: note = Description of Artificial Sequence: Synthetic oligonucleotide
  misc_feature 1..20: note = Target: FXN; (+) strand; PAM type: NRG; PAM sequence: TAG
  source 1..20: mol_type = other DNA
tttcagagctgcagaatagc

SEQ ID NO: 16197 - DNA, 20 bp, synthetic construct
  misc_feature 1..20: note = Description of Artificial Sequence: Synthetic oligonucleotide
  misc_feature 1..20: note = Target: FXN; (+) strand; PAM type: NRG; PAM sequence: GAG
  source 1..20: mol_type = other DNA
tcagagctgcagaatagcta

SEQ ID NO: 16198 - DNA, 20 bp, synthetic construct
  misc_feature 1..20: note = Description of Artificial Sequence: Synthetic oligonucleotide
  misc_feature 1..20: note = Target: FXN; (+) strand; PAM type: NRG; PAM sequence: CAG
  source 1..20: mol_type = other DNA
gagctgcagaatagctagag

SEQ ID NO: 16199 - DNA, 20 bp, synthetic construct
  misc_feature 1..20: note = Description of Artificial Sequence: Synthetic oligonucleotide
  misc_feature 1..20: note = Target: FXN; (+) strand; PAM type: NRG; PAM sequence: CAG
  source 1..20: mol_type = other DNA
ctgcagaatagctagagcag

SEQ ID NO: 16200 - DNA, 20 bp, synthetic construct
  misc_feature 1..20: note = Description of Artificial Sequence: Synthetic oligonucleotide
  misc_feature 1..20: note = Target: FXN; (+) strand; PAM type: NRG; PAM sequence: AGG
  source 1..20: mol_type = other DNA
tgcagaatagctagagcagc

SEQ ID NO: 16201 - DNA, 20 bp, synthetic construct
  misc_feature 1..20: note = Description of Artificial Sequence: Synthetic oligonucleotide
  misc_feature 1..20: note = Target: FXN; (+) strand; PAM type: NRG; PAM sequence: GGG
  source 1..20: mol_type = other DNA
gcagaatagctagagcagca

SEQ ID NO: 16202 - DNA, 20 bp, synthetic construct
  misc_feature 1..20: note = Description of Artificial Sequence: Synthetic oligonucleotide
  misc_feature 1..20: note = Target: FXN; (+) strand; PAM type: NRG; PAM sequence: GGG
  source 1..20: mol_type = other DNA
cagaatagctagagcagcag

SEQ ID NO: 16203 - DNA, 20 bp, synthetic construct
  misc_feature 1..20: note = Description of Artificial Sequence: Synthetic oligonucleotide
  misc_feature 1..20: note = Target: FXN; (+) strand; PAM type: NRG; PAM sequence: TGG
  source 1..20: mol_type = other DNA
agctagagcagcaggggccc

SEQ ID NO: 16204 - DNA, 20 bp, synthetic construct
  misc_feature 1..20: note = Description of Artificial Sequence: Synthetic oligonucleotide
  misc_feature 1..20: note = Target: FXN; (+) strand; PAM type: NRG; PAM sequence: TGG
  source 1..20: mol_type = other DNA
gcagcaggggccctggcttt

SEQ ID NO: 16205 - DNA, 20 bp, synthetic construct
  misc_feature 1..20: note = Description of Artificial Sequence: Synthetic oligonucleotide
  misc_feature 1..20: note = Target: FXN; (+) strand; PAM type: NRG; PAM sequence: CAG
  source 1..20: mol_type = other DNA
aactgacccgacctttattc

SEQ ID NO: 16206 - DNA, 20 bp, synthetic construct
  misc_feature 1..20: note = Description of Artificial Sequence: Synthetic oligonucleotide
  misc_feature 1..20: note = Target: FXN; (+) strand; PAM type: NRG; PAM sequence: CAG
  source 1..20: mol_type = other DNA
ccagattctgccccactccg

SEQ ID NO: 16207 - DNA, 20 bp, synthetic construct
  misc_feature 1..20: note = Description of Artificial Sequence: Synthetic oligonucleotide
  misc_feature 1..20: note = Target: FXN; (+) strand; PAM type: NRG; PAM sequence: GAG
  source 1..20: mol_type = other DNA
agattctgccccactccgca

SEQ ID NO: 16208 - DNA, 20 bp, synthetic construct
  misc_feature 1..20: note = Description of Artificial Sequence: Synthetic oligonucleotide
  misc_feature 1..20: note = Target: FXN; (+) strand; PAM type: NRG; PAM sequence: TGG
  source 1..20: mol_type = other DNA
tccgcagagctgtgtgacct

SEQ ID NO: 16209 - DNA, 20 bp, synthetic construct
  misc_feature 1..20: note = Description of Artificial Sequence: Synthetic oligonucleotide
  misc_feature 1..20: note = Target: FXN; (+) strand; PAM type: NRG; PAM sequence: GGG
  source 1..20: mol_type = other DNA
ccgcagagctgtgtgacctt

SEQ ID NO: 16210 - DNA, 20 bp, synthetic construct
  misc_feature 1..20: note = Description of Artificial Sequence: Synthetic oligonucleotide
  misc_feature 1..20: note = Target: FXN; (+) strand; PAM type: NRG; PAM sequence: GGG
  source 1..20: mol_type = other DNA
cgcagagctgtgtgaccttg

SEQ ID NO: 16211 - DNA, 20 bp, synthetic construct
  misc_feature 1..20: note = Description of Artificial Sequence: Synthetic oligonucleotide
  misc_feature 1..20: note = Target: FXN; (+) strand; PAM type: NRG; PAM sequence: GGG
  source 1..20: mol_type = other DNA
gcagagctgtgtgaccttgg

SEQ ID NO: 16212 - DNA, 20 bp, synthetic construct
  misc_feature 1..20: note = Description of Artificial Sequence: Synthetic oligonucleotide
  misc_feature 1..20: note = Target: FXN; (+) strand; PAM type: NRG; PAM sequence: GAG
  source 1..20: mol_type = other DNA
gggattcccctaacctctct

SEQ ID NO: 16213 - DNA, 20 bp, synthetic construct
  misc_feature 1..20: note = Description of Artificial Sequence: Synthetic oligonucleotide
  misc_feature 1..20: note = Target: FXN; (+) strand; PAM type: NRG; PAM sequence: TGG
  source 1..20: mol_type = other DNA
cccctaacctctctgagacg

SEQ ID NO: 16214 - DNA, 20 bp, synthetic construct
  misc_feature 1..20: note = Description of Artificial Sequence: Synthetic oligonucleotide
  misc_feature 1..20: note = Target: FXN; (+) strand; PAM type: NRG; PAM sequence: TAG
  source 1..20: mol_type = other DNA
agacgtggctttgttttctg

SEQ ID NO: 16215 - DNA, 20 bp, synthetic construct
  misc_feature 1..20: note = Description of Artificial Sequence: Synthetic oligonucleotide
  misc_feature 1..20: note = Target: FXN; (+) strand; PAM type: NRG; PAM sequence: AGG
  source 1..20: mol_type = other DNA
gacgtggctttgttttctgt

SEQ ID NO: 16216 - DNA, 20 bp, synthetic construct
  misc_feature 1..20: note = Description of Artificial Sequence: Synthetic oligonucleotide
  misc_feature 1..20: note = Target: FXN; (+) strand; PAM type: NRG; PAM sequence: GGG
  source 1..20: mol_type = other DNA
acgtggctttgttttctgta

SEQ ID NO: 16217 - DNA, 20 bp, synthetic construct
  misc_feature 1..20: note = Description of Artificial Sequence: Synthetic oligonucleotide
  misc_feature 1..20: note = Target: FXN; (+) strand; PAM type: NRG; PAM sequence: GAG
  source 1..20: mol_type = other DNA
gtggctttgttttctgtagg

SEQ ID NO: 16218 - DNA, 20 bp, synthetic construct
  misc_feature 1..20: note = Description of Artificial Sequence: Synthetic oligonucleotide
  misc_feature 1..20: note = Target: FXN; (+) strand; PAM type: NRG; PAM sequence: AAG
  source 1..20: mol_type = other DNA
gctttgttttctgtagggag

SEQ ID NO: 16219 - DNA, 20 bp, synthetic construct
  misc_feature 1..20: note = Description of Artificial Sequence: Synthetic oligonucleotide
  misc_feature 1..20: note = Target: FXN; (+) strand; PAM type: NRG; PAM sequence: AAG
  source 1..20: mol_type = other DNA
ttttctgtagggagaagata

SEQ ID NO: 16220 - DNA, 20 bp, synthetic construct
  misc_feature 1..20: note = Description of Artificial Sequence: Synthetic oligonucleotide
  misc_feature 1..20: note = Target: FXN; (+) strand; PAM type: NRG; PAM sequence: AGG
  source 1..20: mol_type = other DNA
tttctgtagggagaagataa

SEQ ID NO: 16221 - DNA, 20 bp, synthetic construct
  misc_feature 1..20: note = Description of Artificial Sequence: Synthetic oligonucleotide
  misc_feature 1..20: note = Target: FXN; (+) strand; PAM type: NRG; PAM sequence: CGG
  source 1..20: mol_type = other DNA
taaaggtgacgcccattttg

SEQ ID NO: 16222 - DNA, 20 bp, synthetic construct
  misc_feature 1..20: note = Description of Artificial Sequence: Synthetic oligonucleotide
  misc_feature 1..20: note = Target: FXN; (+) strand; PAM type: NRG; PAM sequence: TGG
  source 1..20: mol_type = other DNA
tgacgcccattttgcggacc

SEQ ID NO: 16223 - DNA, 20 bp, synthetic construct
  misc_feature 1..20: note = Description of Artificial Sequence: Synthetic oligonucleotide
  misc_feature 1..20: note = Target: FXN; (+) strand; PAM type: NRG; PAM sequence: GAG
  source 1..20: mol_type = other DNA
ccattttgcggacctggtgt

SEQ ID NO: 16224 - DNA, 20 bp, synthetic construct
  misc_feature 1..20: note = Description of Artificial Sequence: Synthetic oligonucleotide
  misc_feature 1..20: note = Target: FXN; (+) strand; PAM type: NRG; PAM sequence: AGG
  source 1..20: mol_type = other DNA
cattttgcggacctggtgtg

SEQ ID NO: 16225 - DNA, 20 bp, synthetic construct
  misc_feature 1..20: note = Description of Artificial Sequence: Synthetic oligonucleotide
  misc_feature 1..20: note = Target: FXN; (+) strand; PAM type: NRG; PAM sequence: TGG
  source 1..20: mol_type = other DNA
gacctggtgtgaggattaaa

SEQ ID NO: 16226 - DNA, 20 bp, synthetic construct
  misc_feature 1..20: note = Description of Artificial Sequence: Synthetic oligonucleotide
  misc_feature 1..20: note = Target: FXN; (+) strand; PAM type: NRG; PAM sequence: GGG
  source 1..20: mol_type = other DNA
acctggtgtgaggattaaat

SEQ ID NO: 16227 - DNA, 20 bp, synthetic construct
  misc_feature 1..20: note = Description of Artificial Sequence: Synthetic oligonucleotide
  misc_feature 1..20: note = Target: FXN; (+) strand; PAM type: NRG; PAM sequence: TAG
  source 1..20: mol_type = other DNA
aggattaaatgggaataaca

SEQ ID NO: 16228 - DNA, 20 bp, synthetic construct
  misc_feature 1..20: note = Description of Artificial Sequence: Synthetic oligonucleotide
  misc_feature 1..20: note = Target: FXN; (+) strand; PAM type: NRG; PAM sequence: AAG
  source 1..20: mol_type = other DNA
aaatgggaataacatagata

SEQ ID NO: 16229 - DNA, 20 bp, synthetic construct
  misc_feature 1..20: note = Description of Artificial Sequence: Synthetic oligonucleotide
  misc_feature 1..20: note = Target: FXN; (+) strand; PAM type: NRG; PAM sequence: CAG
  source 1..20: mol_type = other DNA
aataacatagataaagtctt

SEQ ID NO: 16230 - DNA, 20 bp, synthetic construct
  misc_feature 1..20: note = Description of Artificial Sequence: Synthetic oligonucleotide
  misc_feature 1..20: note = Target: FXN; (+) strand; PAM type: NRG; PAM sequence: TAG
  source 1..20: mol_type = other DNA
aagtcttcagaacttcaaat

SEQ ID NO: 16231 - DNA, 20 bp, synthetic construct
  misc_feature 1..20: note = Description of Artificial Sequence: Synthetic oligonucleotide
  misc_feature 1..20: note = Target: FXN; (+) strand; PAM type: NRG; PAM sequence: TGG
  source 1..20: mol_type = other DNA
ttagttcccctttcttcctt

SEQ ID NO: 16232 - DNA, 20 bp, synthetic construct
  misc_feature 1..20: note = Description of Artificial Sequence: Synthetic oligonucleotide
  misc_feature 1..20: note = Target: FXN; (+) strand; PAM type: NRG; PAM sequence: GGG
  source 1..20: mol_type = other DNA
tagttcccctttcttccttt

SEQ ID NO: 16233 - DNA, 20 bp, synthetic construct
  misc_feature 1..20: note = Description of Artificial Sequence: Synthetic oligonucleotide
  misc_feature 1..20: note = Target: FXN; (+) strand; PAM type: NRG; PAM sequence: GGG
  source 1..20: mol_type = other DNA
agttcccctttcttcctttg

SEQ ID NO: 16234 - DNA, 20 bp, synthetic construct
  misc_feature 1..20: note = Description of Artificial Sequence: Synthetic oligonucleotide
  misc_feature 1..20: note = Target: FXN; (+) strand; PAM type: NRG; PAM sequence: GGG
  source 1..20: mol_type = other DNA
gttcccctttcttcctttgg

SEQ ID NO: 16235 - DNA, 20 bp, synthetic construct
  misc_feature 1..20: note = Description of Artificial Sequence: Synthetic oligonucleotide
  misc_feature 1..20: note = Target: FXN; (+) strand; PAM type: NRG; PAM sequence: GGG
  source 1..20: mol_type = other DNA
ttcccctttcttcctttggg

SEQ ID NO: 16236 - DNA, 20 bp, synthetic construct
  misc_feature 1..20: note = Description of Artificial Sequence: Synthetic oligonucleotide
  misc_feature 1..20: note = Target: FXN; (+) strand; PAM type: NRG; PAM sequence: AAG
  source 1..20: mol_type = other DNA
ttcttcctttggggggtaca

SEQ ID NO: 16237 - DNA, 20 bp, synthetic construct
  misc_feature 1..20: note = Description of Artificial Sequence: Synthetic oligonucleotide
  misc_feature 1..20: note = Target: FXN; (+) strand; PAM type: NRG; PAM sequence: CAG
  source 1..20: mol_type = other DNA
gtacaaagaaatatctgacc

SEQ ID NO: 16238 - DNA, 20 bp, synthetic construct
  misc_feature 1..20: note = Description of Artificial Sequence: Synthetic oligonucleotide
  misc_feature 1..20: note = Target: FXN; (+) strand; PAM type: NRG; PAM sequence: CGG
  source 1..20: mol_type = other DNA
tatctgacccagttacgcca

SEQ ID NO: 16239 - DNA, 20 bp, synthetic construct
  misc_feature 1..20: note = Description of Artificial Sequence: Synthetic oligonucleotide
  misc_feature 1..20: note = Target: FXN; (+) strand; PAM type: NRG; PAM sequence: AAG
  source 1..20: mol_type = other DNA
ccagttacgccacggcttga

SEQ ID NO: 16240 - DNA, 20 bp, synthetic construct
  misc_feature 1..20: note = Description of Artificial Sequence: Synthetic oligonucleotide
  misc_feature 1..20: note = Target: FXN; (+) strand; PAM type: NRG; PAM sequence: AGG
  source 1..20: mol_type = other DNA
cagttacgccacggcttgaa

SEQ ID NO: 16241 - DNA, 20 bp, synthetic construct
  misc_feature 1..20: note = Description of Artificial Sequence: Synthetic oligonucleotide
  misc_feature 1..20: note = Target: FXN; (+) strand; PAM type: NRG; PAM sequence: GAG
  source 1..20: mol_type = other DNA
gttacgccacggcttgaaag

SEQ ID NO: 16242 - DNA, 20 bp, synthetic construct
  misc_feature 1..20: note = Description of Artificial Sequence: Synthetic oligonucleotide
  misc_feature 1..20: note = Target: FXN; (+) strand; PAM type: NRG; PAM sequence: AGG
  source 1..20: mol_type = other DNA
ttacgccacggcttgaaagg

SEQ ID NO: 16243 - DNA, 20 bp, synthetic construct
  misc_feature 1..20: note = Description of Artificial Sequence: Synthetic oligonucleotide
  misc_feature 1..20: note = Target: FXN; (+) strand; PAM type: NRG; PAM sequence: AAG
  source 1..20: mol_type = other DNA
gcttgaaaggaggaaaccca

SEQ ID NO: 16244 - DNA, 20 bp, synthetic construct
  misc_feature 1..20: note = Description of Artificial Sequence: Synthetic oligonucleotide
  misc_feature 1..20: note = Target: FXN; (+) strand; PAM type: NRG; PAM sequence: TGG
  source 1..20: mol_type = other DNA
aaaggaggaaacccaaagaa

SEQ ID NO: 16245 - DNA, 20 bp, synthetic construct
  misc_feature 1..20: note = Description of Artificial Sequence: Synthetic oligonucleotide
  misc_feature 1..20: note = Target: FXN; (+) strand; PAM type: NRG; PAM sequence: TGG
  source 1..20: mol_type = other DNA
ggaaacccaaagaatggctg

SEQ ID NO: 16246 - DNA, 20 bp, synthetic construct
  misc_feature 1..20: note = Description of Artificial Sequence: Synthetic oligonucleotide
  misc_feature 1..20: note = Target: FXN; (+) strand; PAM type: NRG; PAM sequence: GGG
  source 1..20: mol_type = other DNA
gaaacccaaagaatggctgt

SEQ ID NO: 16247 - DNA, 20 bp, synthetic construct
  misc_feature 1..20: note = Description of Artificial Sequence: Synthetic oligonucleotide
  misc_feature 1..20: note = Target: FXN; (+) strand; PAM type: NRG; PAM sequence: GGG
  source 1..20: mol_type = other DNA
aaacccaaagaatggctgtg

SEQ ID NO: 16248 - DNA, 20 bp, synthetic construct
  misc_feature 1..20: note = Description of Artificial Sequence: Synthetic oligonucleotide
  misc_feature 1..20: note = Target: FXN; (+) strand; PAM type: NRG; PAM sequence: GAG
  source 1..20: mol_type = other DNA
caaagaatggctgtggggat

SEQ ID NO: 16249 - DNA, 20 bp, synthetic construct
  misc_feature 1..20: note = Description of Artificial Sequence: Synthetic oligonucleotide
  misc_feature 1..20: note = Target: FXN; (+) strand; PAM type: NRG; PAM sequence: AGG
  source 1..20: mol_type = other DNA
aaagaatggctgtggggatg

SEQ ID NO: 16250 - DNA, 20 bp, synthetic construct
  misc_feature 1..20: note = Description of Artificial Sequence: Synthetic oligonucleotide
  misc_feature 1..20: note = Target: FXN; (+) strand; PAM type: NRG; PAM sequence: AAG
  source 1..20: mol_type = other DNA
gaatggctgtggggatgagg

SEQ ID NO: 16251 - DNA, 20 bp, synthetic construct
  misc_feature 1..20: note = Description of Artificial Sequence: Synthetic oligonucleotide
  misc_feature 1..20: note = Target: FXN; (+) strand; PAM type: NRG; PAM sequence: AAG
  source 1..20: mol_type = other DNA
ggggatgaggaagattcctc

SEQ ID NO: 16252 - DNA, 20 bp, synthetic construct
  misc_feature 1..20: note = Description of Artificial Sequence: Synthetic oligonucleotide
  misc_feature 1..20: note = Target: FXN; (+) strand; PAM type: NRG; PAM sequence: AGG
  source 1..20: mol_type = other DNA
gggatgaggaagattcctca

SEQ ID NO: 16253 - DNA, 20 bp, synthetic construct
  misc_feature 1..20: note = Description of Artificial Sequence: Synthetic oligonucleotide
  misc_feature 1..20: note = Target: FXN; (+) strand; PAM type: NRG; PAM sequence: GGG
  source 1..20: mol_type = other DNA
ggatgaggaagattcctcaa

SEQ ID NO: 16254 - DNA, 20 bp, synthetic construct
  misc_feature 1..20: note = Description of Artificial Sequence: Synthetic oligonucleotide
  misc_feature 1..20: note = Target: FXN; (+) strand; PAM type: NRG; PAM sequence: GGG
  source 1..20: mol_type = other DNA
gatgaggaagattcctcaag

SEQ ID NO: 16255 - DNA, 20 bp, synthetic construct
  misc_feature 1..20: note = Description of Artificial Sequence: Synthetic oligonucleotide
  misc_feature 1..20: note = Target: FXN; (+) strand; PAM type: NRG; PAM sequence: GAG
  source 1..20: mol_type = other DNA
tgaggaagattcctcaaggg

SEQ ID NO: 16256 - DNA, 20 bp, synthetic construct
  misc_feature 1..20: note = Description of Artificial Sequence: Synthetic oligonucleotide
  misc_feature 1..20: note = Target: FXN; (+) strand; PAM type: NRG; PAM sequence: AGG
  source 1..20: mol_type = other DNA
gaggaagattcctcaagggg

SEQ ID NO: 16257 - DNA, 20 bp, synthetic construct
  misc_feature 1..20: note = Description of Artificial Sequence: Synthetic oligonucleotide
  misc_feature 1..20: note = Target: FXN; (+) strand; PAM type: NRG; PAM sequence: TGG
  source 1..20: mol_type = other DNA
gattcctcaaggggaggaca

SEQ ID NO: 16258 - DNA, 20 bp, synthetic construct
  misc_feature 1..20: note = Description of Artificial Sequence: Synthetic oligonucleotide
  misc_feature 1..20: note = Target: FXN; (+) strand; PAM type: NRG; PAM sequence: GAG
  source 1..20: mol_type = other DNA
gggaggacatggtatttaat

SEQ ID NO: 16259 - DNA, 20 bp, synthetic construct
  misc_feature 1..20: note = Description of Artificial Sequence: Synthetic oligonucleotide
  misc_feature 1..20: note = Target: FXN; (+) strand; PAM type: NRG; PAM sequence: AGG
  source 1..20: mol_type = other DNA
ggaggacatggtatttaatg

SEQ ID NO: 16260 - DNA, 20 bp, synthetic construct
  misc_feature 1..20: note = Description of Artificial Sequence: Synthetic oligonucleotide
  misc_feature 1..20: note = Target: FXN; (+) strand; PAM type: NRG; PAM sequence: GGG
  source 1..20: mol_type = other DNA
gaggacatggtatttaatga

SEQ ID NO: 16261 - DNA, 20 bp, synthetic construct
  misc_feature 1..20: note = Description of Artificial Sequence: Synthetic oligonucleotide
  misc_feature 1..20: note = Target: FXN; (+) strand; PAM type: NRG; PAM sequence: AAG
  source 1..20: mol_type = other DNA
ggtatttaatgagggtcttg

SEQ ID NO: 16262 - DNA, 20 bp, synthetic construct
  misc_feature 1..20: note = Description of Artificial Sequence: Synthetic oligonucleotide
  misc_feature 1..20: note = Target: FXN; (+) strand; PAM type: NRG; PAM sequence: AAG
  source 1..20: mol_type = other DNA
atgagggtcttgaagatgcc

SEQ ID NO: 16263 - DNA, 20 bp, synthetic construct
  misc_feature 1..20: note = Description of Artificial Sequence: Synthetic oligonucleotide
  misc_feature 1..20: note = Target: FXN; (+) strand; PAM type: NRG; PAM sequence: AGG
  source 1..20: mol_type = other DNA
tgagggtcttgaagatgcca

SEQ ID NO: 16264 - DNA, 20 bp, synthetic construct
  misc_feature 1..20: note = Description of Artificial Sequence: Synthetic oligonucleotide
  misc_feature 1..20: note = Target: FXN; (+) strand; PAM type: NRG; PAM sequence: AAG
  source 1..20: mol_type = other DNA
gggtcttgaagatgccaagg

SEQ ID NO: 16265 - DNA, 20 bp, synthetic construct
  misc_feature 1..20: note = Description of Artificial Sequence: Synthetic oligonucleotide
  misc_feature 1..20: note = Target: FXN; (+) strand; PAM type: NRG; PAM sequence: TGG
  source 1..20: mol_type = other DNA
tcttgaagatgccaaggaag

SEQ ID NO: 16266 - DNA, 20 bp, synthetic construct
  misc_feature 1..20: note = Description of Artificial Sequence: Synthetic oligonucleotide
  misc_feature 1..20: note = Target: FXN; (+) strand; PAM type: NRG; PAM sequence: TAG
  source 1..20: mol_type = other DNA
tgaagatgccaaggaagtgg

SEQ ID NO: 16267 - DNA, 20 bp, synthetic construct
  misc_feature 1..20: note = Description of Artificial Sequence: Synthetic oligonucleotide
  misc_feature 1..20: note = Target: FXN; (+) strand; PAM type: NRG; PAM sequence: GAG
  source 1..20: mol_type = other DNA
aagatgccaaggaagtggta

SEQ ID NO: 16268 - DNA, 20 bp, synthetic construct
  misc_feature 1..20: note = Description of Artificial Sequence: Synthetic oligonucleotide
  misc_feature 1..20: note = Target: FXN; (+) strand; PAM type: NRG; PAM sequence: AGG
  source 1..20: mol_type = other DNA
agatgccaaggaagtggtag

SEQ ID NO: 16269 - DNA, 20 bp, synthetic construct
  misc_feature 1..20: note = Description of Artificial Sequence: Synthetic oligonucleotide
  misc_feature 1..20: note = Target: FXN; (+) strand; PAM type: NRG; PAM sequence: GGG
  source 1..20: mol_type = other DNA
gatgccaaggaagtggtaga

SEQ ID NO: 16270 - DNA, 20 bp, synthetic construct
  misc_feature 1..20: note = Description of Artificial Sequence: Synthetic oligonucleotide
  misc_feature 1..20: note = Target: FXN; (+) strand; PAM type: NRG; PAM sequence: GAG
  source 1..20: mol_type = other DNA
agtggtagagggtgtttcac

SEQ ID NO: 16271 - DNA, 20 bp, synthetic construct
  misc_feature 1..20: note = Description of Artificial Sequence: Synthetic oligonucleotide
  misc_feature 1..20: note = Target: FXN; (+) strand; PAM type: NRG; PAM sequence: AGG
  source 1..20: mol_type = other DNA
gtggtagagggtgtttcacg

SEQ ID NO: 16272 - DNA, 20 bp, synthetic construct
  misc_feature 1..20: note = Description of Artificial Sequence: Synthetic oligonucleotide
  misc_feature 1..20: note = Target: FXN; (+) strand; PAM type: NRG; PAM sequence: GAG
  source 1..20: mol_type = other DNA
ggtagagggtgtttcacgag

SEQ ID NO: 16273 - DNA, 20 bp, synthetic construct
  misc_feature 1..20: note = Description of Artificial Sequence: Synthetic oligonucleotide
  misc_feature 1..20: note = Target: FXN; (+) strand; PAM type: NRG; PAM sequence: AGG
  source 1..20: mol_type = other DNA
gtagagggtgtttcacgagg

SEQ ID NO: 16274 - DNA, 20 bp, synthetic construct
  misc_feature 1..20: note = Description of Artificial Sequence: Synthetic oligonucleotide
  misc_feature 1..20: note = Target: FXN; (+) strand; PAM type: NRG; PAM sequence: GGG
  source 1..20: mol_type = other DNA
tagagggtgtttcacgagga

SEQ ID NO: 16275 - DNA, 20 bp, synthetic construct
  misc_feature 1..20: note = Description of Artificial Sequence: Synthetic oligonucleotide
  misc_feature 1..20: note = Target: FXN; (+) strand; PAM type: NRG; PAM sequence: TGG
  source 1..20: mol_type = other DNA
ttcacgaggagggaaccgtc

SEQ ID NO: 16276 - DNA, 20 bp, synthetic construct
  misc_feature 1..20: note = Description of Artificial Sequence: Synthetic oligonucleotide
  misc_feature 1..20: note = Target: FXN; (+) strand; PAM type: NRG; PAM sequence: GGG
  source 1..20: mol_type = other DNA
tcacgaggagggaaccgtct

SEQ ID NO: 16277 - DNA, 20 bp, synthetic construct
  misc_feature 1..20: note = Description of Artificial Sequence: Synthetic oligonucleotide
  misc_feature 1..20: note = Target: FXN; (+) strand; PAM type: NRG; PAM sequence: AAG
  source 1..20: mol_type = other DNA
aggagggaaccgtctgggca

SEQ ID NO: 16278 - DNA, 20 bp, synthetic construct
  misc_feature 1..20: note = Description of Artificial Sequence: Synthetic oligonucleotide
  misc_feature 1..20: note = Target: FXN; (+) strand; PAM type: NRG; PAM sequence: AGG
  source 1..20: mol_type = other DNA
ggagggaaccgtctgggcaa

SEQ ID NO: 16279 - DNA, 20 bp, synthetic construct
  misc_feature 1..20: note = Description of Artificial Sequence: Synthetic oligonucleotide
  misc_feature 1..20: note = Target: FXN; (+) strand; PAM type: NRG; PAM sequence: CAG
  source 1..20: mol_type = other DNA
ggaaccgtctgggcaaaggc

SEQ ID NO: 16280 - DNA, 20 bp, synthetic construct
  misc_feature 1..20: note = Description of Artificial Sequence: Synthetic oligonucleotide
  misc_feature 1..20: note = Target: FXN; (+) strand; PAM type: NRG; PAM sequence: AGG
  source 1..20: mol_type = other DNA
gaaccgtctgggcaaaggcc

SEQ ID NO: 16281 - DNA, 20 bp, synthetic construct
  misc_feature 1..20: note = Description of Artificial Sequence: Synthetic oligonucleotide
  misc_feature 1..20: note = Target: FXN; (+) strand; PAM type: NRG; PAM sequence: AAG
  source 1..20: mol_type = other DNA
ccgtctgggcaaaggccagg

SEQ ID NO: 16282 - DNA, 20 bp, synthetic construct
  misc_feature 1..20: note = Description of Artificial Sequence: Synthetic oligonucleotide
  misc_feature 1..20: note = Target: FXN; (+) strand; PAM type: NRG; PAM sequence: AGG
  source 1..20: mol_type = other DNA
cgtctgggcaaaggccagga

SEQ ID NO: 16283 - DNA, 20 bp, synthetic construct
  misc_feature 1..20: note = Description of Artificial Sequence: Synthetic oligonucleotide
  misc_feature 1..20: note = Target: FXN; (+) strand; PAM type: NRG; PAM sequence: CGG
  source 1..20: mol_type = other DNA
ctgggcaaaggccaggaagg

SEQ ID NO: 16284 - DNA, 20 bp, synthetic construct
  misc_feature 1..20: note = Description of Artificial Sequence: Synthetic oligonucleotide
  misc_feature 1..20: note = Target: FXN; (+) strand; PAM type: NRG; PAM sequence: AAG
  source 1..20: mol_type = other DNA
ggcaaaggccaggaaggcgg

SEQ ID NO: 16285 - DNA, 20 bp, synthetic construct
  misc_feature 1..20: note = Description of Artificial Sequence: Synthetic oligonucleotide
  misc_feature 1..20: note = Target: FXN; (+) strand; PAM type: NRG; PAM sequence: AGG
  source 1..20: mol_type = other DNA
gcaaaggccaggaaggcgga

SEQ ID NO: 16286 - DNA, 20 bp, synthetic construct
  misc_feature 1..20: note = Description of Artificial Sequence: Synthetic oligonucleotide
  misc_feature 1..20: note = Target: FXN; (+) strand; PAM type: NRG; PAM sequence: GGG
  source 1..20: mol_type = other DNA
caaaggccaggaaggcggaa

SEQ ID NO: 16287 - DNA, 20 bp, synthetic construct
  misc_feature 1..20: note = Description of Artificial Sequence: Synthetic oligonucleotide
  misc_feature 1..20: note = Target: FXN; (+) strand; PAM type: NRG; PAM sequence: GGG
  source 1..20: mol_type = other DNA
aaaggccaggaaggcggaag

SEQ ID NO: 16288 - DNA, 20 bp, synthetic construct
  misc_feature 1..20: note = Description of Artificial Sequence: Synthetic oligonucleotide
  misc_feature 1..20: note = Target: FXN; (+) strand; PAM type: NRG; PAM sequence: CAG
  source 1..20: mol_type = other DNA
aaggcggaaggggatccctt

SEQ ID NO: 16289 - DNA, 20 bp, synthetic construct
  misc_feature 1..20: note = Description of Artificial Sequence: Synthetic oligonucleotide
  misc_feature 1..20: note = Target: FXN; (+) strand; PAM type: NRG; PAM sequence: GAG
  source 1..20: mol_type = other DNA
ggcggaaggggatcccttca

SEQ ID NO: 16290 - DNA, 20 bp, synthetic construct
  misc_feature 1..20: note = Description of Artificial Sequence: Synthetic oligonucleotide
  misc_feature 1..20: note = Target: FXN; (+) strand; PAM type: NRG; PAM sequence: TGG
  source 1..20: mol_type = other DNA
ggaaggggatcccttcagag

SEQ ID NO: 16291 - DNA, 20 bp, synthetic construct
  misc_feature 1..20: note = Description of Artificial Sequence: Synthetic oligonucleotide
  misc_feature 1..20: note = Target: FXN; (+) strand; PAM type: NRG; PAM sequence: TGG
  source 1..20: mol_type = other DNA
ggggatcccttcagagtggc

SEQ ID NO: 16292 - DNA, 20 bp, synthetic construct
  misc_feature 1..20: note = Description of Artificial Sequence: Synthetic oligonucleotide
  misc_feature 1..20: note = Target: FXN; (+) strand; PAM type: NRG; PAM sequence: TAG
  source 1..20: mol_type = other DNA
ggctggtacgccgcatgtat

SEQ ID NO: 16293 - DNA, 20 bp, synthetic construct
  misc_feature 1..20: note = Description of Artificial Sequence: Synthetic oligonucleotide
  misc_feature 1..20: note = Target: FXN; (+) strand; PAM type: NRG; PAM sequence: AGG
  source 1..20: mol_type = other DNA
gctggtacgccgcatgtatt

SEQ ID NO: 16294 - DNA, 20 bp, synthetic construct
  misc_feature 1..20: note = Description of Artificial Sequence: Synthetic oligonucleotide
  misc_feature 1..20: note = Target: FXN; (+) strand; PAM type: NRG; PAM sequence: GGG
  source 1..20: mol_type = other DNA
ctggtacgccgcatgtatta

SEQ ID NO: 16295 - DNA, 20 bp, synthetic construct
  misc_feature 1..20: note = Description of Artificial Sequence: Synthetic oligonucleotide
  misc_feature 1..20: note = Target: FXN; (+) strand; PAM type: NRG; PAM sequence: GGG
  source 1..20: mol_type = other DNA
tggtacgccgcatgtattag

SEQ ID NO: 16296 - DNA, 20 bp, synthetic construct
  misc_feature 1..20: note = Description of Artificial Sequence: Synthetic oligonucleotide
  misc_feature 1..20: note = Target: FXN; (+) strand; PAM type: NRG; PAM sequence: GAG
  source 1..20: mol_type = other DNA
gtacgccgcatgtattaggg

SEQ ID NO: 16297 - DNA, 20 bp, synthetic construct
  misc_feature 1..20: note = Description of Artificial Sequence: Synthetic oligonucleotide
  misc_feature 1..20: note = Target: FXN; (+) strand; PAM type: NRG; PAM sequence: AAG
  source 1..20: mol_type = other DNA
gcatgtattaggggagatga

SEQ ID NO: 16298 - DNA, 20 bp, synthetic construct
  misc_feature 1..20: note = Description of Artificial Sequence: Synthetic oligonucleotide
  misc_feature 1..20: note = Target: FXN; (+) strand; PAM type: NRG; PAM sequence: GAG
  source 1..20: mol_type = other DNA
atgtattaggggagatgaaa

SEQ ID NO: 16299 - DNA, 20 bp, synthetic construct
  misc_feature 1..20: note = Description of Artificial Sequence: Synthetic oligonucleotide
  misc_feature 1..20: note = Target: FXN; (+) strand; PAM type: NRG; PAM sequence: AGG
  source 1..20: mol_type = other DNA
tgtattaggggagatgaaag

SEQ ID NO: 16300 - DNA, 20 bp, synthetic construct
  misc_feature 1..20: note = Description of Artificial Sequence: Synthetic oligonucleotide
  misc_feature 1..20: note = Target: FXN; (+) strand; PAM type: NRG; PAM sequence: CAG
  source 1..20: mol_type = other DNA
attaggggagatgaaagagg

SEQ ID NO: 16301 - DNA, 20 bp, synthetic construct
  misc_feature 1..20: note = Description of Artificial Sequence: Synthetic oligonucleotide
  misc_feature 1..20: note = Target: FXN; (+) strand; PAM type: NRG; PAM sequence: AGG
  source 1..20: mol_type = other DNA
ttaggggagatgaaagaggc

SEQ ID NO: 16302 - DNA, 20 bp, synthetic construct
  misc_feature 1..20: note = Description of Artificial Sequence: Synthetic oligonucleotide
  misc_feature 1..20: note = Target: FXN; (+) strand; PAM type: NRG; PAM sequence: AAG
  source 1..20: mol_type = other DNA
gaaagaggcaggccacgtcc

SEQ ID NO: 16303 - DNA, 20 bp, synthetic construct
  misc_feature 1..20: note = Description of Artificial Sequence: Synthetic oligonucleotide
  misc_feature 1..20: note = Target: FXN; (+) strand; PAM type: NRG; PAM sequence: CGG
  source 1..20: mol_type = other DNA
gccatatttgtgttgctctc

SEQ ID NO: 16304 - DNA, 20 bp, synthetic construct
  misc_feature 1..20: note = Description of Artificial Sequence: Synthetic oligonucleotide
  misc_feature 1..20: note = Target: FXN; (+) strand; PAM type: NRG; PAM sequence: GAG
  source 1..20: mol_type = other DNA
catatttgtgttgctctccg

SEQ ID NO: 16305 - DNA, 20 bp, synthetic construct
  misc_feature 1..20: note = Description of Artificial Sequence: Synthetic oligonucleotide
  misc_feature 1..20: note = Target: FXN; (+) strand; PAM type: NRG; PAM sequence: TAG
  source 1..20: mol_type = other DNA
gctctccggagtttgtactt

SEQ ID NO: 16306 - DNA, 20 bp, synthetic construct
  misc_feature 1..20: note = Description of Artificial Sequence: Synthetic oligonucleotide
  misc_feature 1..20: note = Target: FXN; (+) strand; PAM type: NRG; PAM sequence: AGG
  source 1..20: mol_type = other DNA
ctctccggagtttgtacttt

SEQ ID NO: 16307 - DNA, 20 bp, synthetic construct
  misc_feature 1..20: note = Description of Artificial Sequence: Synthetic oligonucleotide
  misc_feature 1..20: note = Target: FXN; (+) strand; PAM type: NRG; PAM sequence: TGG
  source 1..20: mol_type = other DNA
aacttcccacacgtgttatt

SEQ ID NO: 16308 - DNA, 20 bp, synthetic construct
  misc_feature 1..20: note = Description of Artificial Sequence: Synthetic oligonucleotide
  misc_feature 1..20: note = Target: FXN; (+) strand; PAM type: NRG; PAM sequence: AAG
  source 1..20: mol_type = other DNA
tttggcccacattgtgtttg

SEQ ID NO: 16309 - DNA, 20 bp, synthetic construct
  misc_feature 1..20: note = Description of Artificial Sequence: Synthetic oligonucleotide
  misc_feature 1..20: note = Target: FXN; (+) strand; PAM type: NRG; PAM sequence: TGG
  source 1..20: mol_type = other DNA
cattgtgtttgaagaaactt

SEQ ID NO: 16310 - DNA, 20 bp, synthetic construct
  misc_feature 1..20: note = Description of Artificial Sequence: Synthetic oligonucleotide
  misc_feature 1..20: note = Target: FXN; (+) strand; PAM type: NRG; PAM sequence: GGG
  source 1..20: mol_type = other DNA
attgtgtttgaagaaacttt

SEQ ID NO: 16311 - DNA, 20 bp, synthetic construct
  misc_feature 1..20: note = Description of Artificial Sequence: Synthetic oligonucleotide
  misc_feature 1..20: note = Target: FXN; (+) strand; PAM type: NRG; PAM sequence: TGG
  source 1..20: mol_type = other DNA
gtttgaagaaactttgggat

SEQ ID NO: 16312 - DNA, 20 bp, synthetic construct
  misc_feature 1..20: note = Description of Artificial Sequence: Synthetic oligonucleotide
  misc_feature 1..20: note = Target: FXN; (+) strand; PAM type: NRG; PAM sequence: CAG
  source 1..20: mol_type = other DNA
gaaactttgggattggttgc

SEQ ID NO: 16313 - DNA, 20 bp, synthetic construct
  misc_feature 1..20: note = Description of Artificial Sequence: Synthetic oligonucleotide
  misc_feature 1..20: note = Target: FXN; (+) strand; PAM type: NRG; PAM sequence: AAG
  source 1..20: mol_type = other DNA
gattggttgccagtgcttaa

SEQ ID NO: 16314 - DNA, 20 bp, synthetic construct
  misc_feature 1..20: note = Description of Artificial Sequence: Synthetic oligonucleotide
  misc_feature 1..20: note = Target: FXN; (+) strand; PAM type: NRG; PAM sequence: TAG
  source 1..20: mol_type = other DNA
ggttgccagtgcttaaaagt

SEQ ID NO: 16315 - DNA, 20 bp, synthetic construct
  misc_feature 1..20: note = Description of Artificial Sequence: Synthetic oligonucleotide
  misc_feature 1..20: note = Target: FXN; (+) strand; PAM type: NRG; PAM sequence: AGG
  source 1..20: mol_type = other DNA
gttgccagtgcttaaaagtt

SEQ ID NO: 16316 - DNA, 20 bp, synthetic construct
  misc_feature 1..20: note = Description of Artificial Sequence: Synthetic oligonucleotide
  misc_feature 1..20: note = Target: FXN; (+) strand; PAM type: NRG; PAM sequence: TAG
  source 1..20: mol_type = other DNA
agtgcttaaaagttaggact

SEQ ID NO: 16317 - DNA, 20 bp, synthetic construct
  misc_feature 1..20: note = Description of Artificial Sequence: Synthetic oligonucleotide
  misc_feature 1..20: note = Target: FXN; (+) strand; PAM type: NRG; PAM sequence: TGG
  source 1..20: mol_type = other DNA
aaaagttaggacttagaaaa

SEQ ID NO: 16318 - DNA, 20 bp, synthetic construct
  misc_feature 1..20: note = Description of Artificial Sequence: Synthetic oligonucleotide
  misc_feature 1..20: note = Target: FXN; (+) strand; PAM type: NRG; PAM sequence: TGG
  source 1..20: mol_type = other DNA
gacttagaaaatggatttcc

SEQ ID NO: 16319 - DNA, 20 bp, synthetic construct
  misc_feature 1..20: note = Description of Artificial Sequence: Synthetic oligonucleotide
  misc_feature 1..20: note = Target: FXN; (+) strand; PAM type: NRG; PAM sequence: CAG
  source 1..20: mol_type = other DNA
ttagaaaatggatttcctgg

SEQ ID NO: 16320 - DNA, 20 bp, synthetic construct
  misc_feature 1..20: note = Description of Artificial Sequence: Synthetic oligonucleotide
  misc_feature 1..20: note = Target: FXN; (+) strand; PAM type: NRG; PAM sequence: AGG
  source 1..20: mol_type = other DNA
tagaaaatggatttcctggc

SEQ ID NO: 16321 - DNA, 20 bp, synthetic construct
  misc_feature 1..20: note = Description of Artificial Sequence: Synthetic oligonucleotide
  misc_feature 1..20: note = Target: FXN; (+) strand; PAM type: NRG; PAM sequence: CGG
  source 1..20: mol_type = other DNA
atggatttcctggcaggacg

SEQ ID NO: 16322 - DNA, 20 bp, synthetic construct
  misc_feature 1..20: note = Description of Artificial Sequence: Synthetic oligonucleotide
  misc_feature 1..20: note = Target: FXN; (+) strand; PAM type: NRG; PAM sequence: TGG
  source 1..20: mol_type = other DNA
gatttcctggcaggacgcgg

SEQ ID NO: 16323 - DNA, 20 bp, synthetic construct
  misc_feature 1..20: note = Description of Artificial Sequence: Synthetic oligonucleotide
  misc_feature 1..20: note = Target: FXN; (+) strand; PAM type: NRG; PAM sequence: CAG
  source 1..20: mol_type = other DNA
gtggctcatgcccataatct

SEQ ID NO: 16324 - DNA, 20 bp, synthetic construct
  misc_feature 1..20: note = Description of Artificial Sequence: Synthetic oligonucleotide
  misc_feature 1..20: note = Target: FXN; (+) strand; PAM type: NRG; PAM sequence: TGG
  source 1..20: mol_type = other DNA
tgcccataatctcagcactt

SEQ ID NO: 16325 - DNA, 20 bp, synthetic construct
  misc_feature 1..20: note = Description of Artificial Sequence: Synthetic oligonucleotide
  misc_feature 1..20: note = Target: FXN; (+) strand; PAM type: NRG; PAM sequence: GGG
  source 1..20: mol_type = other DNA
gcccataatctcagcacttt

SEQ ID NO: 16326 - DNA, 20 bp, synthetic construct
  misc_feature 1..20: note = Description of Artificial Sequence: Synthetic oligonucleotide
  misc_feature 1..20: note = Target: FXN; (+) strand; PAM type: NRG; PAM sequence: GAG
  source 1..20: mol_type = other DNA
ccataatctcagcactttgg

SEQ ID NO: 16327 - DNA, 20 bp, synthetic construct
  misc_feature 1..20: note = Description of Artificial Sequence: Synthetic oligonucleotide
  misc_feature 1..20: note = Target: FXN; (+) strand; PAM type: NRG; PAM sequence: AGG
  source 1..20: mol_type = other DNA
cataatctcagcactttggg

SEQ ID NO: 16328 - DNA, 20 bp, synthetic construct
  misc_feature 1..20: note = Description of Artificial Sequence: Synthetic oligonucleotide
  misc_feature 1..20: note = Target: FXN; (+) strand; PAM type: NRG; PAM sequence: TAG
  source 1..20: mol_type = other DNA
tctcagcactttgggaggcc

SEQ ID NO: 16329 - DNA, 20 bp, synthetic construct
  misc_feature 1..20: note = Description of Artificial Sequence: Synthetic oligonucleotide
  misc_feature 1..20: note = Target: FXN; (+) strand; PAM type: NRG; PAM sequence: AGG
  source 1..20: mol_type = other DNA
ctcagcactttgggaggcct

SEQ ID NO: 16330 - DNA, 20 bp, synthetic construct
  misc_feature 1..20: note = Description of Artificial Sequence: Synthetic oligonucleotide
  misc_feature 1..20: note = Target: FXN; (+) strand; PAM type: NRG; PAM sequence: AAG
  source 1..20: mol_type = other DNA
agcactttgggaggcctagg

SEQ ID NO: 16331 - DNA, 20 bp, synthetic construct
  misc_feature 1..20: note = Description of Artificial Sequence: Synthetic oligonucleotide
  misc_feature 1..20: note = Target: FXN; (+) strand; PAM type: NRG; PAM sequence: AGG
  source 1..20: mol_type = other DNA
gcactttgggaggcctagga

SEQ ID NO: 16332 - DNA, 20 bp, synthetic construct
  misc_feature 1..20: note = Description of Artificial Sequence: Synthetic oligonucleotide
  misc_feature 1..20: note = Target: FXN; (+) strand; PAM type: NRG; PAM sequence: TGG
  source 1..20: mol_type = other DNA
ctttgggaggcctaggaagg

SEQ ID NO: 16333 - DNA, 20 bp, synthetic construct
  misc_feature 1..20: note = Description of Artificial Sequence: Synthetic oligonucleotide
  misc_feature 1..20: note = Target: FXN; (+) strand; PAM type: NRG; PAM sequence: GAG
  source 1..20: mol_type = other DNA
cctaggaaggtggatcacct

SEQ ID NO: 16334 - DNA, 20 bp, synthetic construct
  misc_feature 1..20: note = Description of Artificial Sequence: Synthetic oligonucleotide
  misc_feature 1..20: note = Target: FXN; (+) strand; PAM type: NRG; PAM sequence: AGG
  source 1..20: mol_type = other DNA
ctaggaaggtggatcacctg

SEQ ID NO: 16335 - DNA, 20 bp, synthetic construct
  misc_feature 1..20: note = Description of Artificial Sequence: Synthetic oligonucleotide
  misc_feature 1..20: note = Target: FXN; (+) strand; PAM type: NRG; PAM sequence: CGG
  source 1..20: mol_type = other DNA
aaggtggatcacctgaggtc

SEQ ID NO: 16336 - DNA, 20 bp, synthetic construct
  misc_feature 1..20: note = Description of Artificial Sequence: Synthetic oligonucleotide
  misc_feature 1..20: note = Target: FXN; (+) strand; PAM type: NRG; PAM sequence: GAG
  source 1..20: mol_type = other DNA
ggtggatcacctgaggtccg

SEQ ID NO: 16337 - DNA, 20 bp, synthetic construct
  misc_feature 1..20: note = Description of Artificial Sequence: Synthetic oligonucleotide
  misc_feature 1..20: note = Target: FXN; (+) strand; PAM type: NRG; PAM sequence: AAG
  source 1..20: mol_type = other DNA
tcacctgaggtccggagttc

SEQ ID NO: 16338 - DNA, 20 bp, synthetic construct
  misc_feature 1..20: note = Description of Artificial Sequence: Synthetic oligonucleotide
  misc_feature 1..20: note = Target: FXN; (+) strand; PAM type: NRG; PAM sequence: TGG
  source 1..20: mol_type = other DNA
tccggagttcaagactaacc

SEQ ID NO: 16339 - DNA, 20 bp, synthetic construct
  misc_feature 1..20: note = Description of Artificial Sequence: Synthetic oligonucleotide
  misc_feature 1..20: note = Target: FXN; (+) strand; PAM type: NRG; PAM sequence: TGG
  source 1..20: mol_type = other DNA
caagactaacctggccaaca

SEQ ID NO: 16340 - DNA, 20 bp, synthetic construct
  misc_feature 1..20: note = Description of Artificial Sequence: Synthetic oligonucleotide
  misc_feature 1..20: note = Target: FXN; (+) strand; PAM type: NRG; PAM sequence: CAG
  source 1..20: mol_type = other DNA
ctggccaacatggtgaaacc

SEQ ID NO: 16341 - DNA, 20 bp, synthetic construct
  misc_feature 1..20: note = Description of Artificial Sequence: Synthetic oligonucleotide
  misc_feature 1..20: note = Target: FXN; (+) strand; PAM type: NRG; PAM sequence: AAG
  source 1..20: mol_type = other DNA
aaatacaaaaaaaaaaaaaa

SEQ ID NO: 16342 - DNA, 20 bp, synthetic construct
  misc_feature 1..20: note = Description of Artificial Sequence: Synthetic oligonucleotide
  misc_feature 1..20: note = Target: FXN; (+) strand; PAM type: NRG; PAM sequence: AAG
  source 1..20: mol_type = other DNA
tacaaaaaaaaaaaaaaaag

SEQ ID NO: 16343 - DNA, 20 bp, synthetic construct
  misc_feature 1..20: note = Description of Artificial Sequence: Synthetic oligonucleotide
  misc_feature 1..20: note = Target: FXN; (+) strand; PAM type: NRG; PAM sequence: AAG
  source 1..20: mol_type = other DNA
aaaaaaaaaaaaaaaagaag

SEQ ID NO: 16344 - DNA, 20 bp, synthetic construct
  misc_feature 1..20: note = Description of Artificial Sequence: Synthetic oligonucleotide
  misc_feature 1..20: note = Target: FXN; (+) strand; PAM type: NRG; PAM sequence: AAG
  source 1..20: mol_type = other DNA
aaaaaaaaaaaaagaagaag

SEQ ID NO: 16345 - DNA, 20 bp, synthetic construct
  misc_feature 1..20: note = Description of Artificial Sequence: Synthetic oligonucleotide
  misc_feature 1..20: note = Target: FXN; (+) strand; PAM type: NRG; PAM sequence: AAG
  source 1..20: mol_type = other DNA
aaaaaaaaaagaagaagaag

SEQ ID NO: 16346 - DNA, 20 bp, synthetic construct
  misc_feature 1..20: note = Description of Artificial Sequence: Synthetic oligonucleotide
  misc_feature 1..20: note = Target: FXN; (+) strand; PAM type: NRG; PAM sequence: AAG
  source 1..20: mol_type = other DNA
aaaaaaagaagaagaagaag

SEQ ID NO: 16347 - DNA, 20 bp, synthetic construct
  misc_feature 1..20: note = Description of Artificial Sequence: Synthetic oligonucleotide
  misc_feature 1..20: note = Target: FXN; (+) strand; PAM type: NRG; PAM sequence: AAG
  source 1..20: mol_type = other DNA
agaagaagaagaagaaaata

SEQ ID NO: 16348 - DNA, 20 bp, synthetic construct
  misc_feature 1..20: note = Description of Artificial Sequence: Synthetic oligonucleotide
  misc_feature 1..20: note = Target: FXN; (+) strand; PAM type: NRG; PAM sequence: AAG
  source 1..20: mol_type = other DNA
aagaagaagaaaataaagaa

SEQ ID NO: 16349 - DNA, 20 bp, synthetic construct
  misc_feature 1..20: note = Description of Artificial Sequence: Synthetic oligonucleotide
  misc_feature 1..20: note = Target: FXN; (+) strand; PAM type: NRG; PAM sequence: TAG
  source 1..20: mol_type = other DNA
agaagaaaataaagaaaagt

SEQ ID NO: 16350 - DNA, 20 bp, synthetic construct
  misc_feature 1..20: note = Description of Artificial Sequence: Synthetic oligonucleotide
  misc_feature 1..20: note = Target: FXN; (+) strand; PAM type: NRG; PAM sequence: CGG
  source 1..20: mol_type = other DNA
gaaaataaagaaaagttagc

SEQ ID NO: 16351 - DNA, 20 bp, synthetic construct
  misc_feature 1..20: note = Description of Artificial Sequence: Synthetic oligonucleotide
  misc_feature 1..20: note = Target: FXN; (+) strand; PAM type: NRG; PAM sequence: GGG
  source 1..20: mol_type = other DNA
aaaataaagaaaagttagcc

SEQ ID NO: 16352 - DNA, 20 bp, synthetic construct
  misc_feature 1..20: note = Description of Artificial Sequence: Synthetic oligonucleotide
  misc_feature 1..20: note = Target: FXN; (+) strand; PAM type: NRG; PAM sequence: TGG
  source 1..20: mol_type = other DNA
aaagaaaagttagccgggcg

SEQ ID NO: 16353 - DNA, 20 bp, synthetic construct
  misc_feature 1..20: note = Description of Artificial Sequence: Synthetic oligonucleotide
  misc_feature 1..20: note = Target: FXN; (+) strand; PAM type: NRG; PAM sequence: CAG
  source 1..20: mol_type = other DNA
gtgtcgcgcgcctgtaatcc

SEQ ID NO: 16354 - DNA, 20 bp, synthetic construct
  misc_feature 1..20: note = Description of Artificial Sequence: Synthetic oligonucleotide
  misc_feature 1..20: note = Target: FXN; (+) strand; PAM type: NRG; PAM sequence: CAG
  source 1..20: mol_type = other DNA
gcctgtaatcccagctactc

SEQ ID NO: 16355 - DNA, 20 bp, synthetic construct
  misc_feature 1..20: note = Description of Artificial Sequence: Synthetic oligonucleotide
  misc_feature 1..20: note = Target: FXN; (+) strand; PAM type: NRG; PAM sequence: GAG
  source 1..20: mol_type = other DNA
ctgtaatcccagctactcca

SEQ ID NO: 16356 - DNA, 20 bp, synthetic construct
  misc_feature 1..20: note = Description of Artificial Sequence: Synthetic oligonucleotide
  misc_feature 1..20: note = Target: FXN; (+) strand; PAM type: NRG; PAM sequence: AGG
  source 1..20: mol_type = other DNA
tgtaatcccagctactccag

SEQ ID NO: 16357 - DNA, 20 bp, synthetic construct
  misc_feature 1..20: note = Description of Artificial Sequence: Synthetic oligonucleotide
  misc_feature 1..20: note = Target: FXN; (+) strand; PAM type: NRG; PAM sequence: CGG
  source 1..20: mol_type = other DNA
cccagctactccagaggctg

SEQ ID NO: 16358 - DNA, 20 bp, synthetic construct
  misc_feature 1..20: note = Description of Artificial Sequence: Synthetic oligonucleotide
  misc_feature 1..20: note = Target: FXN; (+) strand; PAM type: NRG; PAM sequence: CAG
  source 1..20: mol_type = other DNA
agctactccagaggctgcgg

SEQ ID NO: 16359 - DNA, 20 bp, synthetic construct
  misc_feature 1..20: note = Description of Artificial Sequence: Synthetic oligonucleotide
  misc_feature 1..20: note = Target: FXN; (+) strand; PAM type: NRG; PAM sequence: AGG
  source 1..20: mol_type = other DNA
gctactccagaggctgcggc

SEQ ID NO: 16360 - DNA, 20 bp, synthetic construct
  misc_feature 1..20: note = Description of Artificial Sequence: Synthetic oligonucleotide
  misc_feature 1..20: note = Target: FXN; (+) strand; PAM type: NRG; PAM sequence: GAG
  source 1..20: mol_type = other DNA
tactccagaggctgcggcag

SEQ ID NO: 16361 - DNA, 20 bp, synthetic construct
  misc_feature 1..20: note = Description of Artificial Sequence: Synthetic oligonucleotide
  misc_feature 1..20: note = Target: FXN; (+) strand; PAM type: NRG; PAM sequence: GAG
  source 1..20: mol_type = other DNA
ctgcggcaggagaatcgctt

SEQ ID NO: 16362 - DNA, 20 bp, synthetic construct
  misc_feature 1..20: note = Description of Artificial Sequence: Synthetic oligonucleotide
  misc_feature 1..20: note = Target: FXN; (+) strand; PAM type: NRG; PAM sequence: CGG
  source 1..20: mol_type = other DNA
gcaggagaatcgcttgagcc

SEQ ID NO: 16363 - DNA, 20 bp, synthetic construct
  misc_feature 1..20: note = Description of Artificial Sequence: Synthetic oligonucleotide
  misc_feature 1..20: note = Target: FXN; (+) strand; PAM type: NRG; PAM sequence: GGG
  source 1..20: mol_type = other DNA
caggagaatcgcttgagccc

SEQ ID NO: 16364 - DNA, 20 bp, synthetic construct
  misc_feature 1..20: note = Description of Artificial Sequence: Synthetic oligonucleotide
  misc_feature 1..20: note = Target: FXN; (+) strand; PAM type: NRG; PAM sequence: GAG
  source 1..20: mol_type = other DNA
ggagaatcgcttgagcccgg

SEQ ID NO: 16365 - DNA, 20 bp, synthetic construct
  misc_feature 1..20: note = Description of Artificial Sequence: Synthetic oligonucleotide
  misc_feature 1..20: note = Target: FXN; (+) strand; PAM type: NRG; PAM sequence: AGG
  source 1..20: mol_type = other DNA
gagaatcgcttgagcccggg

SEQ ID NO: 16366 - DNA, 20 bp, synthetic construct
  misc_feature 1..20: note = Description of Artificial Sequence: Synthetic oligonucleotide
  misc_feature 1..20: note = Target: FXN; (+) strand; PAM type: NRG; PAM sequence: CAG
  source 1..20: mol_type = other DNA
aatcgcttgagcccgggagg

SEQ ID NO: 16367 - DNA, 20 bp, synthetic construct
  misc_feature 1..20: note = Description of Artificial Sequence: Synthetic oligonucleotide
  misc_feature 1..20: note = Target: FXN; (+) strand; PAM type: NRG; PAM sequence: GAG
  source 1..20: mol_type = other DNA
tcgcttgagcccgggaggca

SEQ ID NO: 16368 - DNA, 20 bp, synthetic construct
  misc_feature 1..20: note = Description of Artificial Sequence: Synthetic oligonucleotide
  misc_feature 1..20: note = Target: FXN; (+) strand; PAM type: NRG; PAM sequence: AGG
  source 1..20: mol_type = other DNA
cgcttgagcccgggaggcag

SEQ ID NO: 16369 - DNA, 20 bp, synthetic construct
  misc_feature 1..20: note = Description of Artificial Sequence: Synthetic oligonucleotide
  misc_feature 1..20: note = Target: FXN; (+) strand; PAM type: NRG; PAM sequence: AAG
  source 1..20: mol_type = other DNA
cgggaggcagaggttgcatt

SEQ ID NO: 16370 - DNA, 20 bp, synthetic construct
  misc_feature 1..20: note = Description of Artificial Sequence: Synthetic oligonucleotide
  misc_feature 1..20: note = Target: FXN; (+) strand; PAM type: NRG; PAM sequence: AAG
  source 1..20: mol_type = other DNA
ggcagaggttgcattaagcc

SEQ ID NO: 16371 - DNA, 20 bp, synthetic construct
  misc_feature 1..20: note = Description of Artificial Sequence: Synthetic oligonucleotide
  misc_feature 1..20: note = Target: FXN; (+) strand; PAM type: NRG; PAM sequence: CGG
  source 1..20: mol_type = other DNA
caagatcgcccaatgcactc

SEQ ID NO: 16372 - DNA, 20 bp, synthetic construct
  misc_feature 1..20: note = Description of Artificial Sequence: Synthetic oligonucleotide
  misc_feature 1..20: note = Target: FXN; (+) strand; PAM type: NRG; PAM sequence: TGG
  source 1..20: mol_type = other DNA
tcgcccaatgcactccggcc

SEQ ID NO: 16373 - DNA, 20 bp, synthetic construct
  misc_feature 1..20: note = Description of Artificial Sequence: Synthetic oligonucleotide
  misc_feature 1..20: note = Target: FXN; (+) strand; PAM type: NRG; PAM sequence: GGG
  source 1..20: mol_type = other DNA
cgcccaatgcactccggcct

SEQ ID NO: 16374 - DNA, 20 bp, synthetic construct
  misc_feature 1..20: note = Description of Artificial Sequence: Synthetic oligonucleotide
  misc_feature 1..20: note = Target: FXN; (+) strand; PAM type: NRG; PAM sequence: CAG
  source 1..20: mol_type = other DNA
atgcactccggcctgggcga

SEQ ID NO: 16375 - DNA, 20 bp, synthetic construct
  misc_feature 1..20: note = Description of Artificial Sequence: Synthetic oligonucleotide
  misc_feature 1..20: note = Target: FXN; (+) strand; PAM type: NRG; PAM sequence: GAG
  source 1..20: mol_type = other DNA
gcactccggcctgggcgaca

SEQ ID NO: 16376 - DNA, 20 bp, synthetic construct
  misc_feature 1..20: note = Description of Artificial Sequence: Synthetic oligonucleotide
  misc_feature 1..20: note = Target: FXN; (+) strand; PAM type: NRG; PAM sequence: AAG
  source 1..20: mol_type = other DNA
tccggcctgggcgacagagc

SEQ ID NO: 16377 - DNA, 20 bp, synthetic construct
  misc_feature 1..20: note = Description of Artificial Sequence: Synthetic oligonucleotide
  misc_feature 1..20: note = Target: FXN; (+) strand; PAM type: NRG; PAM sequence: TGG
  source 1..20: mol_type = other DNA
aataaaaataaaaaataaaa

SEQ ID NO: 16378 - DNA, 20 bp, synthetic construct
  misc_feature 1..20: note = Description of Artificial Sequence: Synthetic oligonucleotide
  misc_feature 1..20: note = Target: FXN; (+) strand; PAM type: NRG; PAM sequence: CAG
  source 1..20: mol_type = other DNA
aaaaaataaaatggatttcc

SEQ ID NO: 16379 - DNA, 20 bp, synthetic construct
  misc_feature 1..20: note = Description of Artificial Sequence: Synthetic oligonucleotide
  misc_feature 1..20: note = Target: FXN; (+) strand; PAM type: NRG; PAM sequence: TGG
  source 1..20: mol_type = other DNA
aatggatttcccagcatctc

SEQ ID NO: 16380 - DNA, 20 bp, synthetic construct
  misc_feature 1..20: note = Description of Artificial Sequence: Synthetic oligonucleotide
  misc_feature 1..20: note = Target: FXN; (+) strand; PAM type: NRG; PAM sequence: TAG
  source 1..20: mol_type = other DNA
tcccagcatctctggaaaaa

SEQ ID NO: 16381 - DNA, 20 bp, synthetic construct
  misc_feature 1..20: note = Description of Artificial Sequence: Synthetic oligonucleotide
  misc_feature 1..20: note = Target: FXN; (+) strand; PAM type: NRG; PAM sequence: AGG
  source 1..20: mol_type = other DNA
cccagcatctctggaaaaat

SEQ ID NO: 16382 - DNA, 20 bp, synthetic construct
  misc_feature 1..20: note = Description of Artificial Sequence: Synthetic oligonucleotide
  misc_feature 1..20: note = Target: FXN; (+) strand; PAM type: NRG; PAM sequence: AAG
  source 1..20: mol_type = other DNA
gcatctctggaaaaataggc

SEQ ID NO: 16383 - DNA, 20 bp, synthetic construct
  misc_feature 1..20: note = Description of Artificial Sequence: Synthetic oligonucleotide
  misc_feature 1..20: note = Target: FXN; (+) strand; PAM type: NRG; PAM sequence: TGG
  source 1..20: mol_type = other DNA
tctggaaaaataggcaagtg

SEQ ID NO: 16384 - DNA, 20 bp, synthetic construct
  misc_feature 1..20: note = Description of Artificial Sequence: Synthetic oligonucleotide
  misc_feature 1..20: note = Target: FXN; (+) strand; PAM type: NRG; PAM sequence: TGG
  source 1..20: mol_type = other DNA
ataggcaagtgtggccatga

SEQ ID NO: 16385 - DNA, 20 bp, synthetic construct
  misc_feature 1..20: note = Description of Artificial Sequence: Synthetic oligonucleotide
  misc_feature 1..20: note = Target: FXN; (+) strand; PAM type: NRG; PAM sequence: TAG
  source 1..20: mol_type = other DNA
agtgtggccatgatggtcct

SEQ ID NO: 16386 - DNA, 20 bp, synthetic construct
  misc_feature 1..20: note = Description of Artificial Sequence: Synthetic oligonucleotide
  misc_feature 1..20: note = Target: FXN; (+) strand; PAM type: NRG; PAM sequence: TAG
  source 1..20: mol_type = other DNA
gatggtccttagatctcctc

SEQ ID NO: 16387 - DNA, 20 bp, synthetic construct
  misc_feature 1..20: note = Description of Artificial Sequence: Synthetic oligonucleotide
  misc_feature 1..20: note = Target: FXN; (+) strand; PAM type: NRG; PAM sequence: AGG
  source 1..20: mol_type = other DNA
atggtccttagatctcctct

SEQ ID NO: 16388 - DNA, 20 bp, synthetic construct
  misc_feature 1..20: note = Description of Artificial Sequence: Synthetic oligonucleotide
  misc_feature 1..20: note = Target: FXN; (+) strand; PAM type: NRG; PAM sequence: AAG
  source 1..20: mol_type = other DNA
tccttagatctcctctagga

SEQ ID NO: 16389 - DNA, 20 bp, synthetic construct
  misc_feature 1..20: note = Description of Artificial Sequence: Synthetic oligonucleotide
  misc_feature 1..20: note = Target: FXN; (+) strand; PAM type: NRG; PAM sequence: CAG
  source 1..20: mol_type = other DNA
ttagatctcctctaggaaag

SEQ ID NO: 16390 - DNA, 20 bp, synthetic construct
  misc_feature 1..20: note = Description of Artificial Sequence: Synthetic oligonucleotide
  misc_feature 1..20: note = Target: FXN; (+) strand; PAM type: NRG; PAM sequence: TGG
  source 1..20: mol_type = other DNA
gaaagcagacatttattact

SEQ ID NO: 16391 - DNA, 20 bp, synthetic construct
  misc_feature 1..20: note = Description of Artificial Sequence: Synthetic oligonucleotide
  misc_feature 1..20: note = Target: FXN; (+) strand; PAM type: NRG; PAM sequence: GAG
  source 1..20: mol_type = other DNA
ttggcttctgtgcactatct

SEQ ID NO: 16392 - DNA, 20 bp, synthetic construct
  misc_feature 1..20: note = Description of Artificial Sequence: Synthetic oligonucleotide
  misc_feature 1..20: note = Target: FXN; (+) strand; PAM type: NRG; PAM sequence: TGG
  source 1..20: mol_type = other DNA
ctatctgagctgccacgtat

SEQ ID NO: 16393 - DNA, 20 bp, synthetic construct
  misc_feature 1..20: note = Description of Artificial Sequence: Synthetic oligonucleotide
  misc_feature 1..20: note = Target: FXN; (+) strand; PAM type: NRG; PAM sequence: GGG
  source 1..20: mol_type = other DNA
tatctgagctgccacgtatt

SEQ ID NO: 16394 - DNA, 20 bp, synthetic construct
  misc_feature 1..20: note = Description of Artificial Sequence: Synthetic oligonucleotide
  misc_feature 1..20: note = Target: FXN; (+) strand; PAM type: NRG; PAM sequence: TGG
  source 1..20: mol_type = other DNA
ggcttccacccctgcctgtg

SEQ ID NO: 16395 - DNA, 20 bp, synthetic construct
  misc_feature 1..20: note = Description of Artificial Sequence: Synthetic oligonucleotide
  misc_feature 1..20: note = Target: FXN; (+) strand; PAM type: NRG; PAM sequence: CAG
  source 1..20: mol_type = other DNA
tccacccctgcctgtgtgga

SEQ ID NO: 16396 - DNA, 20 bp, synthetic construct
  misc_feature 1..20: note = Description of Artificial Sequence: Synthetic oligonucleotide
  misc_feature 1..20: note = Target: FXN; (+) strand; PAM type: NRG; PAM sequence: TGG
  source 1..20: mol_type = other DNA
ccctgcctgtgtggacagca

SEQ ID NO: 16397 - DNA, 20 bp, synthetic construct
  misc_feature 1..20: note = Description of Artificial Sequence: Synthetic oligonucleotide
  misc_feature 1..20: note = Target: FXN; (+) strand; PAM type: NRG; PAM sequence: GGG
  source 1..20: mol_type = other DNA
cctgcctgtgtggacagcat

SEQ ID NO: 16398 - DNA, 20 bp, synthetic construct
  misc_feature 1..20: note = Description of Artificial Sequence: Synthetic oligonucleotide
  misc_feature 1..20: note = Target: FXN; (+) strand; PAM type: NRG; PAM sequence: CAG
  source 1..20: mol_type = other DNA
gtgtggacagcatgggttgt

SEQ ID NO: 16399 - DNA, 20 bp, synthetic construct
  misc_feature 1..20: note = Description of Artificial Sequence: Synthetic oligonucleotide
  misc_feature 1..20: note = Target: FXN; (+) strand; PAM type: NRG; PAM sequence: CAG
  source 1..20: mol_type = other DNA
tggacagcatgggttgtcag

SEQ ID NO: 16400 - DNA, 20 bp, synthetic construct
  misc_feature 1..20: note = Description of Artificial Sequence: Synthetic oligonucleotide
  misc_feature 1..20: note = Target: FXN; (+) strand; PAM type: NRG; PAM sequence: GAG
  source 1..20: mol_type = other DNA
gacagcatgggttgtcagca

SEQ ID NO: 16401 - DNA, 20 bp, synthetic construct
  misc_feature 1..20: note = Description of Artificial Sequence: Synthetic oligonucleotide
  misc_feature 1..20: note = Target: FXN; (+) strand; PAM type: NRG; PAM sequence: GAG
  source 1..20: mol_type = other DNA
gtgttttgttttgttttttt

SEQ ID NO: 16402 - DNA, 20 bp, synthetic construct
  misc_feature 1..20: note = Description of Artificial Sequence: Synthetic oligonucleotide
  misc_feature 1..20: note = Target: FXN; (+) strand; PAM type: NRG; PAM sequence: CAG
  source 1..20: mol_type = other DNA
tttgttttgtttttttgaga

SEQ ID NO: 16403 - DNA, 20 bp, synthetic construct
  misc_feature 1..20: note = Description of Artificial Sequence: Synthetic oligonucleotide
  misc_feature 1..20: note = Target: FXN; (+) strand; PAM type: NRG; PAM sequence: GAG
  source 1..20: mol_type = other DNA
tgttttgtttttttgagaca

SEQ ID NO: 16404 - DNA, 20 bp, synthetic construct
  misc_feature 1..20: note = Description of Artificial Sequence: Synthetic oligonucleotide
  misc_feature 1..20: note = Target: FXN; (+) strand; PAM type: NRG; PAM sequence: CAG
  source 1..20: mol_type = other DNA
agagtttccctcttgttgcc

SEQ ID NO: 16405 - DNA, 20 bp, synthetic construct
  misc_feature 1..20: note = Description of Artificial Sequence: Synthetic oligonucleotide
  misc_feature 1..20: note = Target: FXN; (+) strand; PAM type: NRG; PAM sequence: AGG
  source 1..20: mol_type = other DNA
gagtttccctcttgttgccc

SEQ ID NO: 16406 - DNA, 20 bp, synthetic construct
  misc_feature 1..20: note = Description of Artificial Sequence: Synthetic oligonucleotide
  misc_feature 1..20: note = Target: FXN; (+) strand; PAM type: NRG; PAM sequence: TGG
  source 1..20: mol_type = other DNA
ttccctcttgttgcccaggc

SEQ ID NO: 16407 - DNA, 20 bp, synthetic construct
  misc_feature 1..20: note = Description of Artificial Sequence: Synthetic oligonucleotide
  misc_feature 1..20: note = Target: FXN; (+) strand; PAM type: NRG; PAM sequence: GAG
  source 1..20: mol_type = other DNA
ccctcttgttgcccaggctg

SEQ ID NO: 16408 - DNA, 20 bp, synthetic construct
  misc_feature 1..20: note = Description of Artificial Sequence: Synthetic oligonucleotide
  misc_feature 1..20: note = Target: FXN; (+) strand; PAM type: NRG; PAM sequence: CAG
  source 1..20: mol_type = other DNA
ttgttgcccaggctggagtg

SEQ ID NO: 16409 - DNA, 20 bp, synthetic construct
  misc_feature 1..20: note = Description of Artificial Sequence: Synthetic oligonucleotide
  misc_feature 1..20: note = Target: FXN; (+) strand; PAM type: NRG; PAM sequence: TGG
  source 1..20: mol_type = other DNA
ttgcccaggctggagtgcag

SEQ ID NO: 16410 - DNA, 20 bp, synthetic construct
  misc_feature 1..20: note = Description of Artificial Sequence: Synthetic oligonucleotide
  misc_feature 1..20: note = Target: FXN; (+) strand; PAM type: NRG; PAM sequence: CAG
  source 1..20: mol_type = other DNA
caggctggagtgcagtggct

SEQ ID NO: 16411 - DNA, 20 bp, synthetic construct
  misc_feature 1..20: note = Description of Artificial Sequence: Synthetic oligonucleotide
  misc_feature 1..20: note = Target: FXN; (+) strand; PAM type: NRG; PAM sequence: CAG
  source 1..20: mol_type = other DNA
ggagtgcagtggctcagtct

SEQ ID NO: 16412 - DNA, 20 bp, synthetic construct
  misc_feature 1..20: note = Description of Artificial Sequence: Synthetic oligonucleotide
  misc_feature 1..20: note = Target: FXN; (+) strand; PAM type: NRG; PAM sequence: TGG
  source 1..20: mol_type = other DNA
tcactgcaacctctgcctcc

SEQ ID NO: 16413 - DNA, 20 bp, synthetic construct
  misc_feature 1..20: note = Description of Artificial Sequence: Synthetic oligonucleotide
  misc_feature 1..20: note = Target: FXN; (+) strand; PAM type: NRG; PAM sequence: GGG
  source 1..20: mol_type = other DNA
cactgcaacctctgcctcct

SEQ ID NO: 16414 - DNA, 20 bp, synthetic construct
  misc_feature 1..20: note = Description of Artificial Sequence: Synthetic oligonucleotide
  misc_feature 1..20: note = Target: FXN; (+) strand; PAM type: NRG; PAM sequence: AAG
  source 1..20: mol_type = other DNA
aacctctgcctcctgggttc

SEQ ID NO: 16415 - DNA, 20 bp, synthetic construct
  misc_feature 1..20: note = Description of Artificial Sequence: Synthetic oligonucleotide
  misc_feature 1..20: note = Target: FXN; (+) strand; PAM type: NRG; PAM sequence: CAG
  source 1..20: mol_type = other DNA
ttcaagtgattctcctgcct

SEQ ID NO: 16416 - DNA, 20 bp, synthetic construct
  misc_feature 1..20: note = Description of Artificial Sequence: Synthetic oligonucleotide
  misc_feature 1..20: note = Target: FXN; (+) strand; PAM type: NRG; PAM sequence: GAG
  source 1..20: mol_type = other DNA
ttctcctgcctcagcctccc

SEQ ID NO: 16417 - DNA, 20 bp, synthetic construct
  misc_feature 1..20: note = Description of Artificial Sequence: Synthetic oligonucleotide
  misc_feature 1..20: note = Target: FXN; (+) strand; PAM type: NRG; PAM sequence: TAG
  source 1..20: mol_type = other DNA
tcctgcctcagcctcccgag

SEQ ID NO: 16418 - DNA, 20 bp, synthetic construct
  misc_feature 1..20: note = Description of Artificial Sequence: Synthetic oligonucleotide
  misc_feature 1..20: note = Target: FXN; (+) strand; PAM type: NRG; PAM sequence: TGG
  source 1..20: mol_type = other DNA
gcctcagcctcccgagtagc

SEQ ID NO: 16419 - DNA, 20 bp, synthetic construct
  misc_feature 1..20: note = Description of Artificial Sequence: Synthetic oligonucleotide
  misc_feature 1..20: note = Target: FXN; (+) strand; PAM type: NRG; PAM sequence: GGG
  source 1..20: mol_type = other DNA
cctcagcctcccgagtagct

SEQ ID NO: 16420 - DNA, 20 bp, synthetic construct
  misc_feature 1..20: note = Description of Artificial Sequence: Synthetic oligonucleotide
  misc_feature 1..20: note = Target: FXN; (+) strand; PAM type: NRG; PAM sequence: CGG
  source 1..20: mol_type = other DNA
tcccgagtagctgggattat

SEQ ID NO: 16421 - DNA, 20 bp, synthetic construct
  misc_feature 1..20: note = Description of Artificial Sequence: Synthetic oligonucleotide
  misc_feature 1..20: note = Target: FXN; (+) strand; PAM type: NRG; PAM sequence: TAG
  source 1..20: mol_type = other DNA
atcggctaattttgtatttt

SEQ ID NO: 16422 - DNA, 20 bp, synthetic construct
  misc_feature 1..20: note = Description of Artificial Sequence: Synthetic oligonucleotide
  misc_feature 1..20: note = Target: FXN; (+) strand; PAM type: NRG; PAM sequence: TAG
  source 1..20: mol_type = other DNA
ggctaattttgtatttttag

SEQ ID NO: 16423 - DNA, 20 bp, synthetic construct
  misc_feature 1..20: note = Description of Artificial Sequence: Synthetic oligonucleotide
  misc_feature 1..20: note = Target: FXN; (+) strand; PAM type: NRG; PAM sequence: GAG
  source 1..20: mol_type = other DNA
ctaattttgtatttttagta

SEQ ID NO: 16424 - DNA, 20 bp, synthetic construct
  misc_feature 1..20: note = Description of Artificial Sequence: Synthetic oligonucleotide
  misc_feature 1..20: note = Target: FXN; (+) strand; PAM type: NRG; PAM sequence: CAG
  source 1..20: mol_type = other DNA
ttttgtatttttagtagaga

SEQ ID NO: 16425 - DNA, 20 bp, synthetic construct
  misc_feature 1..20: note = Description of Artificial Sequence: Synthetic oligonucleotide
  misc_feature 1..20: note = Target: FXN; (+) strand; PAM type: NRG; PAM sequence: TGG
  source 1..20: mol_type = other DNA
agagacagatttctccatgt

SEQ ID NO: 16426 - DNA, 20 bp, synthetic construct
  misc_feature 1..20: note = Description of Artificial Sequence: Synthetic oligonucleotide
  misc_feature 1..20: note = Target: FXN; (+) strand; PAM type: NRG; PAM sequence: CAG
  source 1..20: mol_type = other DNA
acagatttctccatgttggt

SEQ ID NO: 16427 - DNA, 20 bp, synthetic construct
  misc_feature 1..20: note = Description of Artificial Sequence: Synthetic oligonucleotide
  misc_feature 1..20: note = Target: FXN; (+) strand; PAM type: NRG; PAM sequence: AGG
  source 1..20: mol_type = other DNA
cagatttctccatgttggtc

SEQ ID NO: 16428 - DNA, 20 bp, synthetic construct
  misc_feature 1..20: note = Description of Artificial Sequence: Synthetic oligonucleotide
  misc_feature 1..20: note = Target: FXN; (+) strand; PAM type: NRG; PAM sequence: TGG
  source 1..20: mol_type = other DNA
tttctccatgttggtcaggc

SEQ ID NO: 16429 - DNA, 20 bp, synthetic construct
  misc_feature 1..20: note = Description of Artificial Sequence: Synthetic oligonucleotide
  misc_feature 1..20: note = Target: FXN; (+) strand; PAM type: NRG; PAM sequence: CAG
  source 1..20: mol_type = other DNA
tggtctcgaactcccaacct

SEQ ID NO: 16430 - DNA, 20 bp, synthetic construct
  misc_feature 1..20: note = Description of Artificial Sequence: Synthetic oligonucleotide
  misc_feature 1..20: note = Target: FXN; (+) strand; PAM type: NRG; PAM sequence: AGG
  source 1..20: mol_type = other DNA
ggtctcgaactcccaacctc

SEQ ID NO: 16431 - DNA, 20 bp, synthetic construct
  misc_feature 1..20: note = Description of Artificial Sequence: Synthetic oligonucleotide
  misc_feature 1..20: note = Target: FXN; (+) strand; PAM type: NRG; PAM sequence: AAG
  source 1..20: mol_type = other DNA
ccgcccacctcgccctccca

SEQ ID NO: 16432 - DNA, 20 bp, synthetic construct
  misc_feature 1..20: note = Description of Artificial Sequence: Synthetic oligonucleotide
  misc_feature 1..20: note = Target: FXN; (+) strand; PAM type: NRG; PAM sequence: TGG
  source 1..20: mol_type = other DNA
acctcgccctcccaaagtgc

SEQ ID NO: 16433 - DNA, 20 bp, synthetic construct
  misc_feature 1..20: note = Description of Artificial Sequence: Synthetic oligonucleotide
  misc_feature 1..20: note = Target: FXN; (+) strand; PAM type: NRG; PAM sequence: CAG
  source 1..20: mol_type = other DNA
ctcccaaagtgctggaatta

SEQ ID NO: 16434 - DNA, 20 bp, synthetic construct
  misc_feature 1..20: note = Description of Artificial Sequence: Synthetic oligonucleotide
  misc_feature 1..20: note = Target: FXN; (+) strand; PAM type: NRG; PAM sequence: AGG
  source 1..20: mol_type = other DNA
tcccaaagtgctggaattac

SEQ ID NO: 16435 - DNA, 20 bp, synthetic construct
  misc_feature 1..20: note = Description of Artificial Sequence: Synthetic oligonucleotide
  misc_feature 1..20: note = Target: FXN; (+) strand; PAM type: NRG; PAM sequence: GAG
  source 1..20: mol_type = other DNA
agtgctggaattacaggcgt

SEQ ID NO: 16436 - DNA, 20 bp, synthetic construct
  misc_feature 1..20: note = Description of Artificial Sequence: Synthetic oligonucleotide
  misc_feature 1..20: note = Target: FXN; (+) strand; PAM type: NRG; PAM sequence: TGG
  source 1..20: mol_type = other DNA
caggcgtgagccaccgcgtc

SEQ ID NO: 16437 - DNA, 20 bp, synthetic construct
  misc_feature 1..20: note = Description of Artificial Sequence: Synthetic oligonucleotide
  misc_feature 1..20: note = Target: FXN; (+) strand; PAM type: NRG; PAM sequence: CAG
  source 1..20: mol_type = other DNA
gagccaccgcgtctggccat

SEQ ID NO: 16438 - DNA, 20 bp, synthetic construct
  misc_feature 1..20: note = Description of Artificial Sequence: Synthetic oligonucleotide
  misc_feature 1..20: note = Target: FXN; (+) strand; PAM type: NRG; PAM sequence: CAG
  source 1..20: mol_type = other DNA
ccaccgcgtctggccatcag

SEQ ID NO: 16439 - DNA, 20 bp, synthetic construct
  misc_feature 1..20: note = Description of Artificial Sequence: Synthetic oligonucleotide
  misc_feature 1..20: note = Target: FXN; (+) strand; PAM type: NRG; PAM sequence: GAG
  source 1..20: mol_type = other DNA
accgcgtctggccatcagca

SEQ ID NO: 16440 - DNA, 20 bp, synthetic construct
  misc_feature 1..20: note = Description of Artificial Sequence: Synthetic oligonucleotide
  misc_feature 1..20: note = Target: FXN; (+) strand; PAM type: NRG; PAM sequence: TAG
  source 1..20: mol_type = other DNA
catcagcagagtttttaatt

SEQ ID NO: 16441 - DNA, 20 bp, synthetic construct
  misc_feature 1..20: note = Description of Artificial Sequence: Synthetic oligonucleotide
  misc_feature 1..20: note = Target: FXN; (+) strand; PAM type: NRG; PAM sequence: AGG
  source 1..20: mol_type = other DNA
atcagcagagtttttaattt

SEQ ID NO: 16442 - DNA, 20 bp, synthetic construct
  misc_feature 1..20: note = Description of Artificial Sequence: Synthetic oligonucleotide
  misc_feature 1..20: note = Target: FXN; (+) strand; PAM type: NRG; PAM sequence: GAG
  source 1..20: mol_type = other DNA
cagcagagtttttaatttag

SEQ ID NO: 16443 - DNA, 20 bp, synthetic construct
  misc_feature 1..20: note = Description of Artificial Sequence: Synthetic oligonucleotide
  misc_feature 1..20: note = Target: FXN; (+) strand; PAM type: NRG; PAM sequence: AAG
  source 1..20: mol_type = other DNA
ttttaatttaggagaatgac

SEQ ID NO: 16444 - DNA, 20 bp, synthetic construct
  misc_feature 1..20: note = Description of Artificial Sequence: Synthetic oligonucleotide
  misc_feature 1..20: note = Target: FXN; (+) strand; PAM type: NRG; PAM sequence: GAG
  source 1..20: mol_type = other DNA
ttaatttaggagaatgacaa

SEQ ID NO: 16445 - DNA, 20 bp, synthetic construct
  misc_feature 1..20: note = Description of Artificial Sequence: Synthetic oligonucleotide
  misc_feature 1..20: note = Target: FXN; (+) strand; PAM type: NRG; PAM sequence: AGG
  source 1..20: mol_type = other DNA
taatttaggagaatgacaag

SEQ ID NO: 16446 - DNA, 20 bp, synthetic construct
  misc_feature 1..20: note = Description of Artificial Sequence: Synthetic oligonucleotide
  misc_feature 1..20: note = Target: FXN; (+) strand; PAM type: NRG; PAM sequence: TGG
  source 1..20: mol_type = other DNA
tttaggagaatgacaagagg

SEQ ID NO: 16447 - DNA, 20 bp, synthetic construct
  misc_feature 1..20: note = Description of Artificial Sequence: Synthetic oligonucleotide
  misc_feature 1..20: note = Target: FXN; (+) strand; PAM type: NRG; PAM sequence: CAG
  source 1..20: mol_type = other DNA
gagaatgacaagaggtggta

SEQ ID NO: 16448 - DNA, 20 bp, synthetic construct
  misc_feature 1..20: note = Description of Artificial Sequence: Synthetic oligonucleotide
  misc_feature 1..20: note = Target: FXN; (+) strand; PAM type: NRG; PAM sequence: TAG
  source 1..20: mol_type = other DNA
caagaggtggtacagttttt

SEQ ID NO: 16449 - DNA, 20 bp, synthetic construct
  misc_feature 1..20: note = Description of Artificial Sequence: Synthetic oligonucleotide
  misc_feature 1..20: note = Target: FXN; (+) strand; PAM type: NRG; PAM sequence: TGG
  source 1..20: mol_type = other DNA
aggtggtacagttttttaga

SEQ ID NO: 16450 - DNA, 20 bp, synthetic construct
  misc_feature 1..20: note = Description of Artificial Sequence: Synthetic oligonucleotide
  misc_feature 1..20: note = Target: FXN; (+) strand; PAM type: NRG; PAM sequence: TGG
  source 1..20: mol_type = other DNA
acagttttttagatggtacc

SEQ ID NO: 16451 - DNA, 20 bp, synthetic construct
  misc_feature 1..20: note = Description of Artificial Sequence: Synthetic oligonucleotide
  misc_feature 1..20: note = Target: FXN; (+) strand; PAM type: NRG; PAM sequence: TGG
  source 1..20: mol_type = other DNA
gttttttagatggtacctgg

SEQ ID NO: 16452 - DNA, 20 bp, synthetic construct
  misc_feature 1..20: note = Description of Artificial Sequence: Synthetic oligonucleotide
  misc_feature 1..20: note = Target: FXN; (+) strand; PAM type: NRG; PAM sequence: AAG
  source 1..20: mol_type = other DNA
gatggtacctggtggctgtt

SEQ ID NO: 16453 - DNA, 20 bp, synthetic construct
  misc_feature 1..20: note = Description of Artificial Sequence: Synthetic oligonucleotide
  misc_feature 1..20: note = Target: FXN; (+) strand; PAM type: NRG; PAM sequence: AGG
  source 1..20: mol_type = other DNA
atggtacctggtggctgtta

SEQ ID NO: 16454 - DNA, 20 bp, synthetic construct
  misc_feature 1..20: note = Description of Artificial Sequence: Synthetic oligonucleotide
  misc_feature 1..20: note = Target: FXN; (+) strand; PAM type: NRG; PAM sequence: GGG
  source 1..20: mol_type = other DNA
tggtacctggtggctgttaa

SEQ ID NO: 16455 - DNA, 20 bp, synthetic construct
  misc_feature 1..20: note = Description of Artificial Sequence: Synthetic oligonucleotide
  misc_feature 1..20: note = Target: FXN; (+) strand; PAM type: NRG; PAM sequence: TGG
  source 1..20: mol_type = other DNA
actgacaaacacacccaact

SEQ ID NO: 16456 - DNA, 20 bp, synthetic construct
  misc_feature 1..20: note = Description of Artificial Sequence: Synthetic oligonucleotide
  misc_feature 1..20: note = Target: FXN; (+) strand; PAM type: NRG; PAM sequence: CAG
  source 1..20: mol_type = other DNA
cccaacttggcgctgccgcc

SEQ ID NO: 16457 - DNA, 20 bp, synthetic construct
  misc_feature 1..20: note = Description of Artificial Sequence: Synthetic oligonucleotide
  misc_feature 1..20: note = Target: FXN; (+) strand; PAM type: NRG; PAM sequence: AGG
  source 1..20: mol_type = other DNA
ccaacttggcgctgccgccc

SEQ ID NO: 16458 - DNA, 20 bp, synthetic construct
  misc_feature 1..20: note = Description of Artificial Sequence: Synthetic oligonucleotide
  misc_feature 1..20: note = Target: FXN; (+) strand; PAM type: NRG; PAM sequence: GAG
  source 1..20: mol_type = other DNA
aacttggcgctgccgcccag

SEQ ID NO: 16459 - DNA, 20 bp, synthetic construct
  misc_feature 1..20: note = Description of Artificial Sequence: Synthetic oligonucleotide
  misc_feature 1..20: note = Target: FXN; (+) strand; PAM type: NRG; PAM sequence: AGG
  source 1..20: mol_type = other DNA
acttggcgctgccgcccagg

SEQ ID NO: 16460 - DNA, 20 bp, synthetic construct
  misc_feature 1..20: note = Description of Artificial Sequence: Synthetic oligonucleotide
  misc_feature 1..20: note = Target: FXN; (+) strand; PAM type: NRG; PAM sequence: TGG
  source 1..20: mol_type = other DNA
tggcgctgccgcccaggagg

SEQ ID NO: 16461 - DNA, 20 bp, synthetic construct
  misc_feature 1..20: note = Description of Artificial Sequence: Synthetic oligonucleotide
  misc_feature 1..20: note = Target: FXN; (+) strand; PAM type: NRG; PAM sequence: TGG
  source 1..20: mol_type = other DNA
gccgcccaggaggtggacac

SEQ ID NO: 16462 - DNA, 20 bp, synthetic construct
  misc_feature 1..20: note = Description of Artificial Sequence: Synthetic oligonucleotide
  misc_feature 1..20: note = Target: FXN; (+) strand; PAM type: NRG; PAM sequence: GGG
  source 1..20: mol_type = other DNA
ccgcccaggaggtggacact

SEQ ID NO: 16463 - DNA, 20 bp, synthetic construct
  misc_feature 1..20: note = Description of Artificial Sequence: Synthetic oligonucleotide
  misc_feature 1..20: note = Target: FXN; (+) strand; PAM type: NRG; PAM sequence: TGG
  source 1..20: mol_type = other DNA
ggaggtggacactgggtttc

SEQ ID NO: 16464 - DNA, 20 bp, synthetic construct
  misc_feature 1..20: note = Description of Artificial Sequence: Synthetic oligonucleotide
  misc_feature 1..20: note = Target: FXN; (+) strand; PAM type: NRG; PAM sequence: TAG
  source 1..20: mol_type = other DNA
gtggacactgggtttctgga

SEQ ID NO: 16465 - DNA, 20 bp, synthetic construct
  misc_feature 1..20: note = Description of Artificial Sequence: Synthetic oligonucleotide
  misc_feature 1..20: note = Target: FXN; (+) strand; PAM type: NRG; PAM sequence: TGG
  source 1..20: mol_type = other DNA
acactgggtttctggataga

SEQ ID NO: 16466 - DNA, 20 bp, synthetic construct
  misc_feature 1..20: note = Description of Artificial Sequence: Synthetic oligonucleotide
  misc_feature 1..20: note = Target: FXN; (+) strand; PAM type: NRG; PAM sequence: TAG
  source 1..20: mol_type = other DNA
tgggtttctggatagatggt

SEQ ID NO: 16467 - DNA, 20 bp, synthetic construct
  misc_feature 1..20: note = Description of Artificial Sequence: Synthetic oligonucleotide
  misc_feature 1..20: note = Target: FXN; (+) strand; PAM type: NRG; PAM sequence: CAG
  source 1..20: mol_type = other DNA
tggttagcaacctctgtcac

SEQ ID NO: 16468 - DNA, 20 bp, synthetic construct
  misc_feature 1..20: note = Description of Artificial Sequence: Synthetic oligonucleotide
  misc_feature 1..20: note = Target: FXN; (+) strand; PAM type: NRG; PAM sequence: TGG
  source 1..20: mol_type = other DNA
tagcaacctctgtcaccagc

SEQ ID NO: 16469 - DNA, 20 bp, synthetic construct
  misc_feature 1..20: note = Description of Artificial Sequence: Synthetic oligonucleotide
  misc_feature 1..20: note = Target: FXN; (+) strand; PAM type: NRG; PAM sequence: GGG
  source 1..20: mol_type = other DNA
agcaacctctgtcaccagct

SEQ ID NO: 16470 - DNA, 20 bp, synthetic construct
  misc_feature 1..20: note = Description of Artificial Sequence: Synthetic oligonucleotide
  misc_feature 1..20: note = Target: FXN; (+) strand; PAM type: NRG; PAM sequence: TAG
  source 1..20: mol_type = other DNA
tgtttaacctgtctgttcca

SEQ ID NO: 16471 - DNA, 20 bp, synthetic construct
  misc_feature 1..20: note = Description of Artificial Sequence: Synthetic oligonucleotide
  misc_feature 1..20: note = Target: FXN; (+) strand; PAM type: NRG; PAM sequence: TGG
  source 1..20: mol_type = other DNA
catagttcccttgcacatct

SEQ ID NO: 16472 - DNA, 20 bp, synthetic construct
  misc_feature 1..20: note = Description of Artificial Sequence: Synthetic oligonucleotide
  misc_feature 1..20: note = Target: FXN; (+) strand; PAM type: NRG; PAM sequence: GGG
  source 1..20: mol_type = other DNA
atagttcccttgcacatctt

SEQ ID NO: 16473 - DNA, 20 bp, synthetic construct
  misc_feature 1..20: note = Description of Artificial Sequence: Synthetic oligonucleotide
  misc_feature 1..20: note = Target: FXN; (+) strand; PAM type: NRG; PAM sequence: GAG
  source 1..20: mol_type = other DNA
cttgcacatcttgggtattt

SEQ ID NO: 16474 - DNA, 20 bp, synthetic construct
  misc_feature 1..20: note = Description of Artificial Sequence: Synthetic oligonucleotide
  misc_feature 1..20: note = Target: FXN; (+) strand; PAM type: NRG; PAM sequence: AGG
  source 1..20: mol_type = other DNA
ttgcacatcttgggtatttg

SEQ ID NO: 16475 - DNA, 20 bp, synthetic construct
  misc_feature 1..20: note = Description of Artificial Sequence: Synthetic oligonucleotide
  misc_feature 1..20: note = Target: FXN; (+) strand; PAM type: NRG; PAM sequence: GAG
  source 1..20: mol_type = other DNA
gcacatcttgggtatttgag

SEQ ID NO: 16476 - DNA, 20 bp, synthetic construct
  misc_feature 1..20: note = Description of Artificial Sequence: Synthetic oligonucleotide
  misc_feature 1..20: note = Target: FXN; (+) strand; PAM type: NRG; PAM sequence: TGG
  source 1..20: mol_type = other DNA
atcttgggtatttgaggagt

SEQ ID NO: 16477 - DNA, 20 bp, synthetic construct
  misc_feature 1..20: note = Description of Artificial Sequence: Synthetic oligonucleotide
  misc_feature 1..20: note = Target: FXN; (+) strand; PAM type: NRG; PAM sequence: GGG
  source 1..20: mol_type = other DNA
tcttgggtatttgaggagtt

SEQ ID NO: 16478 - DNA, 20 bp, synthetic construct
  misc_feature 1..20: note = Description of Artificial Sequence: Synthetic oligonucleotide
  misc_feature 1..20: note = Target: FXN; (+) strand; PAM type: NRG; PAM sequence: TGG
  source 1..20: mol_type = other DNA
tgggtatttgaggagttggg

SEQ ID NO: 16479 - DNA, 20 bp, synthetic construct
  misc_feature 1..20: note = Description of Artificial Sequence: Synthetic oligonucleotide
  misc_feature 1..20: note = Target: FXN; (+) strand; PAM type: NRG; PAM sequence: GGG
  source 1..20: mol_type = other DNA
gggtatttgaggagttgggt

SEQ ID NO: 16480 - DNA, 20 bp, synthetic construct
  misc_feature 1..20: note = Description of Artificial Sequence: Synthetic oligonucleotide
  misc_feature 1..20: note = Target: FXN; (+) strand; PAM type: NRG; PAM sequence: TGG
  source 1..20: mol_type = other DNA
tatttgaggagttgggtggg

SEQ ID NO: 16481 - DNA, 20 bp, synthetic construct
  misc_feature 1..20: note = Description of Artificial Sequence: Synthetic oligonucleotide
  misc_feature 1..20: note = Target: FXN; (+) strand; PAM type: NRG; PAM sequence: CAG
  source 1..20: mol_type = other DNA
ttgaggagttgggtgggtgg

SEQ ID NO: 16482 - DNA, 20 bp, synthetic construct
  misc_feature 1..20: note = Description of Artificial Sequence: Synthetic oligonucleotide
  misc_feature 1..20: note = Target: FXN; (+) strand; PAM type: NRG; PAM sequence: TGG
  source 1..20: mol_type = other DNA
aggagttgggtgggtggcag

SEQ ID NO: 16483 - DNA, 20 bp, synthetic construct
  misc_feature 1..20: note = Description of Artificial Sequence: Synthetic oligonucleotide
  misc_feature 1..20: note = Target: FXN; (+) strand; PAM type: NRG; PAM sequence: TGG
  source 1..20: mol_type = other DNA
gggtgggtggcagtggcaac

SEQ ID NO: 16484 - DNA, 20 bp, synthetic construct
  misc_feature 1..20: note = Description of Artificial Sequence: Synthetic oligonucleotide
  misc_feature 1..20: note = Target: FXN; (+) strand; PAM type: NRG; PAM sequence: GGG
  source 1..20: mol_type = other DNA
ggtgggtggcagtggcaact

SEQ ID NO: 16485 - DNA, 20 bp, synthetic construct
  misc_feature 1..20: note = Description of Artificial Sequence: Synthetic oligonucleotide
  misc_feature 1..20: note = Target: FXN; (+) strand; PAM type: NRG; PAM sequence: GGG
  source 1..20: mol_type = other DNA
gtgggtggcagtggcaactg

SEQ ID NO: 16486 - DNA, 20 bp, synthetic construct
  misc_feature 1..20: note = Description of Artificial Sequence: Synthetic oligonucleotide
  misc_feature 1..20: note = Target: FXN; (+) strand; PAM type: NRG; PAM sequence: AAG
  source 1..20: mol_type = other DNA
catcctgtttaattatttta

SEQ ID NO: 16487 - DNA, 20 bp, synthetic construct
  misc_feature 1..20: note = Description of Artificial Sequence: Synthetic oligonucleotide
  misc_feature 1..20: note = Target: FXN; (+) strand; PAM type: NRG; PAM sequence: TGG
  source 1..20: mol_type = other DNA
ttttaaagccctgactgtcc

SEQ ID NO: 16488 - DNA, 20 bp, synthetic construct
  misc_feature 1..20: note = Description of Artificial Sequence: Synthetic oligonucleotide
  misc_feature 1..20: note = Target: FXN; (+) strand; PAM type: NRG; PAM sequence: AAG
  source 1..20: mol_type = other DNA
gactgtcctggattgaccct

SEQ ID NO: 16489 - DNA, 20 bp, synthetic construct
  misc_feature 1..20: note = Description of Artificial Sequence: Synthetic oligonucleotide
  misc_feature 1..20: note = Target: FXN; (+) strand; PAM type: NRG; PAM sequence: TGG
  source 1..20: mol_type = other DNA
gattgaccctaagctccccc

SEQ ID NO: 16490 - DNA, 20 bp, synthetic construct
  misc_feature 1..20: note = Description of Artificial Sequence: Synthetic oligonucleotide
  misc_feature 1..20: note = Target: FXN; (+) strand; PAM type: NRG; PAM sequence: CAG
  source 1..20: mol_type = other DNA
ccctggtctccaaaattcat

SEQ ID NO: 16491 - DNA, 20 bp, synthetic construct
  misc_feature 1..20: note = Description of Artificial Sequence: Synthetic oligonucleotide
  misc_feature 1..20: note = Target: FXN; (+) strand; PAM type: NRG; PAM sequence: GAG
  source 1..20: mol_type = other DNA
tccaaaattcatcagaaact

SEQ ID NO: 16492 - DNA, 20 bp, synthetic construct
  misc_feature 1..20: note = Description of Artificial Sequence: Synthetic oligonucleotide
  misc_feature 1..20: note = Target: FXN; (+) strand; PAM type: NRG; PAM sequence: AAG
  source 1..20: mol_type = other DNA
tcagaaactgagttcacttg

SEQ ID NO: 16493 - DNA, 20 bp, synthetic construct
  misc_feature 1..20: note = Description of Artificial Sequence: Synthetic oligonucleotide
  misc_feature 1..20: note = Target: FXN; (+) strand; PAM type: NRG; PAM sequence: AGG
  source 1..20: mol_type = other DNA
cagaaactgagttcacttga

SEQ ID NO: 16494 - DNA, 20 bp, synthetic construct
  misc_feature 1..20: note = Description of Artificial Sequence: Synthetic oligonucleotide
  misc_feature 1..20: note = Target: FXN; (+) strand; PAM type: NRG; PAM sequence: AAG
  source 1..20: mol_type = other DNA
accccttgcatctacttcta

SEQ ID NO: 16495 - DNA, 20 bp, synthetic construct
  misc_feature 1..20: note = Description of Artificial Sequence: Synthetic oligonucleotide
  misc_feature 1..20: note = Target: FXN; (+) strand; PAM type: NRG; PAM sequence: CAG
  source 1..20: mol_type = other DNA
ccttgcatctacttctaaag

SEQ ID NO: 16496 - DNA, 20 bp, synthetic construct
  misc_feature 1..20: note = Description of Artificial Sequence: Synthetic oligonucleotide
  misc_feature 1..20: note = Target: FXN; (+) strand; PAM type: NRG; PAM sequence: CAG
  source 1..20: mol_type = other DNA
cttctaaagcagctgttcaa

SEQ ID NO: 16497 - DNA, 20 bp, synthetic construct
  misc_feature 1..20: note = Description of Artificial Sequence: Synthetic oligonucleotide
  misc_feature 1..20: note = Target: FXN; (+) strand; PAM type: NRG; PAM sequence: CAG
  source 1..20: mol_type = other DNA
aagcagctgttcaacagaaa

SEQ ID NO: 16498 - DNA, 20 bp, synthetic construct
  misc_feature 1..20: note = Description of Artificial Sequence: Synthetic oligonucleotide
  misc_feature 1..20: note = Target: FXN; (+) strand; PAM type: NRG; PAM sequence: TGG
  source 1..20: mol_type = other DNA
gctgttcaacagaaacagaa

SEQ ID NO: 16499 - DNA, 20 bp, synthetic construct
  misc_feature 1..20: note = Description of Artificial Sequence: Synthetic oligonucleotide
  misc_feature 1..20: note = Target: FXN; (+) strand; PAM type: NRG; PAM sequence: GGG
  source 1..20: mol_type = other DNA
ctgttcaacagaaacagaat

SEQ ID NO: 16500 - DNA, 20 bp, synthetic construct
  misc_feature 1..20: note = Description of Artificial Sequence: Synthetic oligonucleotide
  misc_feature 1..20: note = Target: FXN; (+) strand; PAM type: NRG; PAM sequence: GAG
  source 1..20: mol_type = other DNA
gttcaacagaaacagaatgg

SEQ ID NO: 16501 - DNA, 20 bp, synthetic construct
  misc_feature 1..20: note = Description of Artificial Sequence: Synthetic oligonucleotide
  misc_feature 1..20: note = Target: FXN; (+) strand; PAM type: NRG; PAM sequence: TAG
  source 1..20: mol_type = other DNA
acacataattctacattttc

SEQ ID NO: 16502 - DNA, 20 bp, synthetic construct
  misc_feature 1..20: note = Description of Artificial Sequence: Synthetic oligonucleotide
  misc_feature 1..20: note = Target: FXN; (+) strand; PAM type: NRG; PAM sequence: AAG
  source 1..20: mol_type = other DNA
ttctacattttctagttaaa

SEQ ID NO: 16503 - DNA, 20 bp, synthetic construct
  misc_feature 1..20: note = Description of Artificial Sequence: Synthetic oligonucleotide
  misc_feature 1..20: note = Target: FXN; (+) strand; PAM type: NRG; PAM sequence: TAG
  source 1..20: mol_type = other DNA
aacaatatatttattcaacc

SEQ ID NO: 16504 - DNA, 20 bp, synthetic construct
  misc_feature 1..20: note = Description of Artificial Sequence: Synthetic oligonucleotide
  misc_feature 1..20: note = Target: FXN; (+) strand; PAM type: NRG; PAM sequence: CAG
  source 1..20: mol_type = other DNA
ttatcattccaacatgtaat

SEQ ID NO: 16505 - DNA, 20 bp, synthetic construct
  misc_feature 1..20: note = Description of Artificial Sequence: Synthetic oligonucleotide
  misc_feature 1..20: note = Target: FXN; (+) strand; PAM type: NRG; PAM sequence: CAG
  source 1..20: mol_type = other DNA
gtaatcagtattttaaaaat

SEQ ID NO: 16506 - DNA, 20 bp, synthetic construct
  misc_feature 1..20: note = Description of Artificial Sequence: Synthetic oligonucleotide
  misc_feature 1..20: note = Target: FXN; (+) strand; PAM type: NRG; PAM sequence: GAG
  source 1..20: mol_type = other DNA
gtattttaaaaatcagtaat

SEQ ID NO: 16507 - DNA, 20 bp, synthetic construct
  misc_feature 1..20: note = Description of Artificial Sequence: Synthetic oligonucleotide
  misc_feature 1..20: note = Target: FXN; (+) strand; PAM type: NRG; PAM sequence: CAG
  source 1..20: mol_type = other DNA
ttaaaaatcagtaatgagac

SEQ ID NO: 16508 - DNA, 20 bp, synthetic construct
  misc_feature 1..20: note = Description of Artificial Sequence: Synthetic oligonucleotide
  misc_feature 1..20: note = Target: FXN; (+) strand; PAM type: NRG; PAM sequence: AGG
  source 1..20: mol_type = other DNA
taaaaatcagtaatgagacc

SEQ ID NO: 16509 - DNA, 20 bp, synthetic construct
  misc_feature 1..20: note = Description of Artificial Sequence: Synthetic oligonucleotide
  misc_feature 1..20: note = Target: FXN; (+) strand; PAM type: NRG; PAM sequence: CGG
  source 1..20: mol_type = other DNA
atcagtaatgagaccaggca

SEQ ID NO: 16510 - DNA, 20 bp, synthetic construct
  misc_feature 1..20: note = Description of Artificial Sequence: Synthetic oligonucleotide
  misc_feature 1..20: note = Target: FXN; (+) strand; PAM type: NRG; PAM sequence: TGG
  source 1..20: mol_type = other DNA
agtaatgagaccaggcacgg

SEQ ID NO: 16511 - DNA, 20 bp, synthetic construct
  misc_feature 1..20: note = Description of Artificial Sequence: Synthetic oligonucleotide
  misc_feature 1..20: note = Target: FXN; (+) strand; PAM type: NRG; PAM sequence: CAG
  source 1..20: mol_type = other DNA
gtggctcacgactgtaatcc

SEQ ID NO: 16512 - DNA, 20 bp, synthetic construct
  misc_feature 1..20: note = Description of Artificial Sequence: Synthetic oligonucleotide
  misc_feature 1..20: note = Target: FXN; (+) strand; PAM type: NRG; PAM sequence: AGG
  source 1..20: mol_type = other DNA
tggctcacgactgtaatccc

SEQ ID NO: 16513 - DNA, 20 bp, synthetic construct
  misc_feature 1..20: note = Description of Artificial Sequence: Synthetic oligonucleotide
  misc_feature 1..20: note = Target: FXN; (+) strand; PAM type: NRG; PAM sequence: TGG
  source 1..20: mol_type = other DNA
cgactgtaatcccaggactt

SEQ ID NO: 16514 - DNA, 20 bp, synthetic construct
  misc_feature 1..20: note = Description of Artificial Sequence: Synthetic oligonucleotide
  misc_feature 1..20: note = Target: FXN; (+) strand; PAM type: NRG; PAM sequence: GGG
  source 1..20: mol_type = other DNA
gactgtaatcccaggacttt

SEQ ID NO: 16515 - DNA, 20 bp, synthetic construct
  misc_feature 1..20: note = Description of Artificial Sequence: Synthetic oligonucleotide
  misc_feature 1..20: note = Target: FXN; (+) strand; PAM type: NRG; PAM sequence: GAG
  source 1..20: mol_type = other DNA
ctgtaatcccaggactttgg

SEQ ID NO: 16516 - DNA, 20 bp, synthetic construct
  misc_feature 1..20: note = Description of Artificial Sequence: Synthetic oligonucleotide
  misc_feature 1..20: note = Target: FXN; (+) strand; PAM type: NRG; PAM sequence: AGG
  source 1..20: mol_type = other DNA
tgtaatcccaggactttggg

SEQ ID NO: 16517 - DNA, 20 bp, synthetic construct
  misc_feature 1..20: note = Description of Artificial Sequence: Synthetic oligonucleotide
  misc_feature 1..20: note = Target: FXN; (+) strand; PAM type: NRG; PAM sequence: GAG
  source 1..20: mol_type = other DNA
tcccaggactttgggaggcc

SEQ ID NO: 16518 - DNA, 20 bp, synthetic construct
  misc_feature 1..20: note = Description of Artificial Sequence: Synthetic oligonucleotide
  misc_feature 1..20: note = Target: FXN; (+) strand; PAM type: NRG; PAM sequence: AGG
  source 1..20: mol_type = other DNA
cccaggactttgggaggccg

SEQ ID NO: 16519 - DNA, 20 bp, synthetic construct
  misc_feature 1..20: note = Description of Artificial Sequence: Synthetic oligonucleotide
  misc_feature 1..20: note = Target: FXN; (+) strand; PAM type: NRG; PAM sequence: GAG
  source 1..20: mol_type = other DNA
ggactttgggaggccgaggc

SEQ ID NO: 16520 - DNA, 20 bp, synthetic construct
  misc_feature 1..20: note = Description of Artificial Sequence: Synthetic oligonucleotide
  misc_feature 1..20: note = Target: FXN; (+) strand; PAM type: NRG; PAM sequence: TGG
  source 1..20: mol_type = other DNA
ctttgggaggccgaggcgag

SEQ ID NO: 16521 - DNA, 20 bp, synthetic construct
  misc_feature 1..20: note = Description of Artificial Sequence: Synthetic oligonucleotide
  misc_feature 1..20: note = Target: FXN; (+) strand; PAM type: NRG; PAM sequence: GAG
  source 1..20: mol_type = other DNA
ccgaggcgagtggatcatct

SEQ ID NO: 16522 - DNA, 20 bp, synthetic construct
  misc_feature 1..20: note = Description of Artificial Sequence: Synthetic oligonucleotide
  misc_feature 1..20: note = Target: FXN; (+) strand; PAM type: NRG; PAM sequence: CAG
  source 1..20: mol_type = other DNA
gcgagtggatcatctgagat

SEQ ID NO: 16523 - DNA, 20 bp, synthetic construct
  misc_feature 1..20: note = Description of Artificial Sequence: Synthetic oligonucleotide
  misc_feature 1..20: note = Target: FXN; (+) strand; PAM type: NRG; PAM sequence: AGG
  source 1..20: mol_type = other DNA
cgagtggatcatctgagatc

SEQ ID NO: 16524 - DNA, 20 bp, synthetic construct
  misc_feature 1..20: note = Description of Artificial Sequence: Synthetic oligonucleotide
  misc_feature 1..20: note = Target: FXN; (+) strand; PAM type: NRG; PAM sequence: GAG
  source 1..20: mol_type = other DNA
agtggatcatctgagatcag

SEQ ID NO: 16525 - DNA, 20 bp, synthetic construct
  misc_feature 1..20: note = Description of Artificial Sequence: Synthetic oligonucleotide
  misc_feature 1..20: note = Target: FXN; (+) strand; PAM type: NRG; PAM sequence: AAG
  source 1..20: mol_type = other DNA
tcatctgagatcaggagttc

SEQ ID NO: 16526 - DNA, 20 bp, synthetic construct
  misc_feature 1..20: note = Description of Artificial Sequence: Synthetic oligonucleotide
  misc_feature 1..20: note = Target: FXN; (+) strand; PAM type: NRG; PAM sequence: CAG
  source 1..20: mol_type = other DNA
tgagatcaggagttcaagac

SEQ ID NO: 16527 - DNA, 20 bp, synthetic construct
  misc_feature 1..20: note = Description of Artificial Sequence: Synthetic oligonucleotide
  misc_feature 1..20: note = Target: FXN; (+) strand; PAM type: NRG; PAM sequence: TGG
  source 1..20: mol_type = other DNA
tcaggagttcaagaccagcc

SEQ ID NO: 16528 - DNA, 20 bp, synthetic construct
  misc_feature 1..20: note = Description of Artificial Sequence: Synthetic oligonucleotide
  misc_feature 1..20: note = Target: FXN; (+) strand; PAM type: NRG; PAM sequence: TGG
  source 1..20: mol_type = other DNA
caagaccagcctggccaaca

SEQ ID NO: 16529 - DNA, 20 bp, synthetic construct
  misc_feature 1..20: note = Description of Artificial Sequence: Synthetic oligonucleotide
  misc_feature 1..20: note = Target: FXN; (+) strand; PAM type: NRG; PAM sequence: TAG
  source 1..20: mol_type = other DNA
accccatctctactaaaaac

SEQ ID NO: 16530 - DNA, 20 bp, synthetic construct
  misc_feature 1..20: note = Description of Artificial Sequence: Synthetic oligonucleotide
  misc_feature 1..20: note = Target: FXN; (+) strand; PAM type: NRG; PAM sequence: CAG
  source 1..20: mol_type = other DNA
atctctactaaaaactagct

SEQ ID NO: 16531 - DNA, 20 bp, synthetic construct
  misc_feature 1..20: note = Description of Artificial Sequence: Synthetic oligonucleotide
  misc_feature 1..20: note = Target: FXN; (+) strand; PAM type: NRG; PAM sequence: TGG
  source 1..20: mol_type = other DNA
tactaaaaactagctcagca

SEQ ID NO: 16532 - DNA, 20 bp, synthetic construct
  misc_feature 1..20: note = Description of Artificial Sequence: Synthetic oligonucleotide
  misc_feature 1..20: note = Target: FXN; (+) strand; PAM type: NRG; PAM sequence: TGG
  source 1..20: mol_type = other DNA
taaaaactagctcagcatgg

SEQ ID NO: 16533 - DNA, 20 bp, synthetic construct
  misc_feature 1..20: note = Description of Artificial Sequence: Synthetic oligonucleotide
  misc_feature 1..20: note = Target: FXN; (+) strand; PAM type: NRG; PAM sequence: TGG
  source 1..20: mol_type = other DNA
aaactagctcagcatggtgg

SEQ ID NO: 16534 - DNA, 20 bp, synthetic construct
  misc_feature 1..20: note = Description of Artificial Sequence: Synthetic oligonucleotide
  misc_feature 1..20: note = Target: FXN; (+) strand; PAM type: NRG; PAM sequence: GGG
  source 1..20: mol_type = other DNA
aactagctcagcatggtggt

SEQ ID NO: 16535 - DNA, 20 bp, synthetic construct
  misc_feature 1..20: note = Description of Artificial Sequence: Synthetic oligonucleotide
  misc_feature 1..20: note = Target: FXN; (+) strand; PAM type: NRG; PAM sequence: TAG
  source 1..20: mol_type = other DNA
agcatggtggtgggtgcctg

SEQ ID NO: 16536 - DNA, 20 bp, synthetic construct
  misc_feature 1..20: note = Description of Artificial Sequence: Synthetic oligonucleotide
  misc_feature 1..20: note = Target: FXN; (+) strand; PAM type: NRG; PAM sequence: CAG
  source 1..20: mol_type = other DNA
gtggtgggtgcctgtagtcc

SEQ ID NO: 16537 - DNA, 20 bp, synthetic construct
  misc_feature 1..20: note = Description of Artificial Sequence: Synthetic oligonucleotide
  misc_feature 1..20: note = Target: FXN; (+) strand; PAM type: NRG; PAM sequence: CGG
  source 1..20: mol_type = other DNA
tgcctgtagtcccagctact

SEQ ID NO: 16538 - DNA, 20 bp, synthetic construct
  misc_feature 1..20: note = Description of Artificial Sequence: Synthetic oligonucleotide
  misc_feature 1..20: note = Target: FXN; (+) strand; PAM type: NRG; PAM sequence: GGG
  source 1..20: mol_type = other DNA
gcctgtagtcccagctactc

SEQ ID NO: 16539 - DNA, 20 bp, synthetic construct
  misc_feature 1..20: note = Description of Artificial Sequence: Synthetic oligonucleotide
  misc_feature 1..20: note = Target: FXN; (+) strand; PAM type: NRG; PAM sequence: GAG
  source 1..20: mol_type = other DNA
ctgtagtcccagctactcgg

SEQ ID NO: 16540 - DNA, 20 bp, synthetic construct
  misc_feature 1..20: note = Description of Artificial Sequence: Synthetic oligonucleotide
  misc_feature 1..20: note = Target: FXN; (+) strand; PAM type: NRG; PAM sequence: AGG
  source 1..20: mol_type = other DNA
tgtagtcccagctactcggg

SEQ ID NO: 16541 - DNA, 20 bp, synthetic construct
  misc_feature 1..20: note = Description of Artificial Sequence: Synthetic oligonucleotide
  misc_feature 1..20: note = Target: FXN; (+) strand; PAM type: NRG; PAM sequence: GAG
  source 1..20: mol_type = other DNA
tcccagctactcgggaggct

SEQ ID NO: 16542 - DNA, 20 bp, synthetic construct
  misc_feature 1..20: note = Description of Artificial Sequence: Synthetic oligonucleotide
  misc_feature 1..20: note = Target: FXN; (+) strand; PAM type: NRG; PAM sequence: AGG
  source 1..20: mol_type = other DNA
cccagctactcgggaggctg

SEQ ID NO: 16543 - DNA, 20 bp, synthetic construct
  misc_feature 1..20: note = Description of Artificial Sequence: Synthetic oligonucleotide
  misc_feature 1..20: note = Target: FXN; (+) strand; PAM type: NRG; PAM sequence: GAG
  source 1..20: mol_type = other DNA
tactcgggaggctgaggcat

SEQ ID NO: 16544 - DNA, 20 bp, synthetic construct
  misc_feature 1..20: note = Description of Artificial Sequence: Synthetic oligonucleotide
  misc_feature 1..20: note = Target: FXN; (+) strand; PAM type: NRG; PAM sequence: GAG
  source 1..20: mol_type = other DNA
ctgaggcatgagaatcactt

SEQ ID NO: 16545 - DNA, 20 bp, synthetic construct
  misc_feature 1..20: note = Description of Artificial Sequence: Synthetic oligonucleotide
  misc_feature 1..20: note = Target: FXN; (+) strand; PAM type: NRG; PAM sequence: CAG
  source 1..20: mol_type = other DNA
gcatgagaatcacttgagcc

SEQ ID NO: 16546 - DNA, 20 bp, synthetic construct
  misc_feature 1..20: note = Description of Artificial Sequence: Synthetic oligonucleotide
  misc_feature 1..20: note = Target: FXN; (+) strand; PAM type: NRG; PAM sequence: AGG
  source 1..20: mol_type = other DNA
catgagaatcacttgagccc

SEQ ID NO: 16547 - DNA, 20 bp, synthetic construct
  misc_feature 1..20: note = Description of Artificial Sequence: Synthetic oligonucleotide
  misc_feature 1..20: note = Target: FXN; (+) strand; PAM type: NRG; PAM sequence: GAG
  source 1..20: mol_type = other DNA
tgagaatcacttgagcccag

SEQ ID NO: 16548 - DNA, 20 bp, synthetic construct
  misc_feature 1..20: note = Description of Artificial Sequence: Synthetic oligonucleotide
  misc_feature 1..20: note = Target: FXN; (+) strand; PAM type: NRG; PAM sequence: AGG
  source 1..20: mol_type = other DNA
gagaatcacttgagcccagg

SEQ ID NO: 16549 - DNA, 20 bp, synthetic construct
  misc_feature 1..20: note = Description of Artificial Sequence: Synthetic oligonucleotide
  misc_feature 1..20: note = Target: FXN; (+) strand; PAM type: NRG; PAM sequence: CAG
  source 1..20: mol_type = other DNA
aatcacttgagcccaggagg

SEQ ID NO: 16550 - DNA, 20 bp, synthetic construct
  misc_feature 1..20: note = Description of Artificial Sequence: Synthetic oligonucleotide
  misc_feature 1..20: note = Target: FXN; (+) strand; PAM type: NRG; PAM sequence: GAG
  source 1..20: mol_type = other DNA
tcacttgagcccaggaggca

SEQ ID NO: 16551 - DNA, 20 bp, synthetic construct
  misc_feature 1..20: note = Description of Artificial Sequence: Synthetic oligonucleotide
  misc_feature 1..20: note = Target: FXN; (+) strand; PAM type: NRG; PAM sequence: AGG
  source 1..20: mol_type = other DNA
cacttgagcccaggaggcag

SEQ ID NO: 16552 - DNA, 20 bp, synthetic construct
  misc_feature 1..20: note = Description of Artificial Sequence: Synthetic oligonucleotide
  misc_feature 1..20: note = Target: FXN; (+) strand; PAM type: NRG; PAM sequence: CAG
  source 1..20: mol_type = other DNA
agcccaggaggcagaggttg

SEQ ID NO: 16553 - DNA, 20 bp, synthetic construct
  misc_feature 1..20: note = Description of Artificial Sequence: Synthetic oligonucleotide
  misc_feature 1..20: note = Target: FXN; (+) strand; PAM type: NRG; PAM sequence: GAG
  source 1..20: mol_type = other DNA
caggaggcagaggttgcagt

SEQ ID NO: 16554 - DNA, 20 bp, synthetic construct
  misc_feature 1..20: note = Description of Artificial Sequence: Synthetic oligonucleotide
  misc_feature 1..20: note = Target: FXN; (+) strand; PAM type: NRG; PAM sequence: AAG
  source 1..20: mol_type = other DNA
ggcagaggttgcagtgagcc

SEQ ID NO: 16555 - DNA, 20 bp, synthetic construct
  misc_feature 1..20: note = Description of Artificial Sequence: Synthetic oligonucleotide
  misc_feature 1..20: note = Target: FXN; (+) strand; PAM type: NRG; PAM sequence: TGG
  source 1..20: mol_type = other DNA
gttgcagtgagccaagattt

SEQ ID NO: 16556 - DNA, 20 bp, synthetic construct
  misc_feature 1..20: note = Description of Artificial Sequence: Synthetic oligonucleotide
  misc_feature 1..20: note = Target: FXN; (+) strand; PAM type: NRG; PAM sequence: GGG
  source 1..20: mol_type = other DNA
ttgcagtgagccaagatttt

SEQ ID NO: 16557 - DNA, 20 bp, synthetic construct
  misc_feature 1..20: note = Description of Artificial Sequence: Synthetic oligonucleotide
  misc_feature 1..20: note = Target: FXN; (+) strand; PAM type: NRG; PAM sequence: GGG
  source 1..20: mol_type = other DNA
tgcagtgagccaagattttg

SEQ ID NO: 16558 - DNA, 20 bp, synthetic construct
  misc_feature 1..20: note = Description of Artificial Sequence: Synthetic oligonucleotide
  misc_feature 1..20: note = Target: FXN; (+) strand; PAM type: NRG; PAM sequence: GGG
  source 1..20: mol_type = other DNA
gcagtgagccaagattttgg

SEQ ID NO: 16559 - DNA, 20 bp, synthetic construct
  misc_feature 1..20: note = Description of Artificial Sequence: Synthetic oligonucleotide
  misc_feature 1..20: note = Target: FXN; (+) strand; PAM type: NRG; PAM sequence: CAG
  source 1..20: mol_type = other DNA
ctgtgacatacaaaaaaaat

SEQ ID NO: 16560 - DNA, 20 bp, synthetic construct
  misc_feature 1..20: note = Description of Artificial Sequence: Synthetic oligonucleotide
  misc_feature 1..20: note = Target: FXN; (+) strand; PAM type: NRG; PAM sequence: AAG
  source 1..20: mol_type = other DNA
atacaaaaaaaatcagtaat

SEQ ID NO: 16561 - DNA, 20 bp, synthetic construct
  misc_feature 1..20: note = Description of Artificial Sequence: Synthetic oligonucleotide
  misc_feature 1..20: note = Target: FXN; (+) strand; PAM type: NRG; PAM sequence: CAG
  source 1..20: mol_type = other DNA
ttttcgtactcatatacttc

SEQ ID NO: 16562 - DNA, 20 bp, synthetic construct
  misc_feature 1..20: note = Description of Artificial Sequence: Synthetic oligonucleotide
  misc_feature 1..20: note = Target: FXN; (+) strand; PAM type: NRG; PAM sequence: AAG
  source 1..20: mol_type = other DNA
tatctcaattcacaatttct

SEQ ID NO: 16563 - DNA, 20 bp, synthetic construct
  misc_feature 1..20: note = Description of Artificial Sequence: Synthetic oligonucleotide
  misc_feature 1..20: note = Target: FXN; (+) strand; PAM type: NRG; PAM sequence: AAG
  source 1..20: mol_type = other DNA
aaaattcacaattaaaaatg

SEQ ID NO: 16564 - DNA, 20 bp, synthetic construct
  misc_feature 1..20: note = Description of Artificial Sequence: Synthetic oligonucleotide
  misc_feature 1..20: note = Target: FXN; (+) strand; PAM type: NRG; PAM sequence: AGG
  source 1..20: mol_type = other DNA
aaattcacaattaaaaatga

SEQ ID NO: 16565 - DNA, 20 bp, synthetic construct
  misc_feature 1..20: note = Description of Artificial Sequence: Synthetic oligonucleotide
  misc_feature 1..20: note = Target: FXN; (+) strand; PAM type: NRG; PAM sequence: TAG
  source 1..20: mol_type = other DNA
attaaaaatgaaggttcaca

SEQ ID NO: 16566 - DNA, 20 bp, synthetic construct
  misc_feature 1..20: note = Description of Artificial Sequence: Synthetic oligonucleotide
  misc_feature 1..20: note = Target: FXN; (+) strand; PAM type: NRG; PAM sequence: AAG
  source 1..20: mol_type = other DNA
aaatgaaggttcacatagtc

SEQ ID NO: 16567 - DNA, 20 bp, synthetic construct
  misc_feature 1..20: note = Description of Artificial Sequence: Synthetic oligonucleotide
  misc_feature 1..20: note = Target: FXN; (+) strand; PAM type: NRG; PAM sequence: TAG
  source 1..20: mol_type = other DNA
aaacacacttaaatgtctcc

SEQ ID NO: 16568 - DNA, 20 bp, synthetic construct
  misc_feature 1..20: note = Description of Artificial Sequence: Synthetic oligonucleotide
  misc_feature 1..20: note = Target: FXN; (+) strand; PAM type: NRG; PAM sequence: AGG
  source 1..20: mol_type = other DNA
aacacacttaaatgtctcct

SEQ ID NO: 16569 - DNA, 20 bp, synthetic construct
  misc_feature 1..20: note = Description of Artificial Sequence: Synthetic oligonucleotide
  misc_feature 1..20: note = Target: FXN; (+) strand; PAM type: NRG; PAM sequence: TGG
  source 1..20: mol_type = other DNA
cacttaaatgtctcctaggc

SEQ ID NO: 16570 - DNA, 20 bp, synthetic construct
  misc_feature 1..20: note = Description of Artificial Sequence: Synthetic oligonucleotide
  misc_feature 1..20: note = Target: FXN; (+) strand; PAM type: NRG; PAM sequence: GGG
  source 1..20: mol_type = other DNA
acttaaatgtctcctaggct

SEQ ID NO: 16571 - DNA, 20 bp, synthetic construct
  misc_feature 1..20: note = Description of Artificial Sequence: Synthetic oligonucleotide
  misc_feature 1..20: note = Target: FXN; (+) strand; PAM type: NRG; PAM sequence: TGG
  source 1..20: mol_type = other DNA
aatgtctcctaggctgggtg

SEQ ID NO: 16572 - DNA, 20 bp, synthetic construct
  misc_feature 1..20: note = Description of Artificial Sequence: Synthetic oligonucleotide
  misc_feature 1..20: note = Target: FXN; (+) strand; PAM type: NRG; PAM sequence: CAG
  source 1..20: mol_type = other DNA
gttgctcacacctgtaatcc

SEQ ID NO: 16573 - DNA, 20 bp, synthetic construct
  misc_feature 1..20: note = Description of Artificial Sequence: Synthetic oligonucleotide
  misc_feature 1..20: note = Target: FXN; (+) strand; PAM type: NRG; PAM sequence: TGG
  source 1..20: mol_type = other DNA
cacctgtaatcccagcactt

SEQ ID NO: 16574 - DNA, 20 bp, synthetic construct
  misc_feature 1..20: note = Description of Artificial Sequence: Synthetic oligonucleotide
  misc_feature 1..20: note = Target: FXN; (+) strand; PAM type: NRG; PAM sequence: GGG
  source 1..20: mol_type = other DNA
acctgtaatcccagcacttt

SEQ ID NO: 16575 - DNA, 20 bp, synthetic construct
  misc_feature 1..20: note = Description of Artificial Sequence: Synthetic oligonucleotide
  misc_feature 1..20: note = Target: FXN; (+) strand; PAM type: NRG; PAM sequence: GAG
  source 1..20: mol_type = other DNA
ctgtaatcccagcactttgg

SEQ ID NO: 16576 - DNA, 20 bp, synthetic construct
  misc_feature 1..20: note = Description of Artificial Sequence: Synthetic oligonucleotide
  misc_feature 1..20: note = Target: FXN; (+) strand; PAM type: NRG; PAM sequence: AGG
  source 1..20: mol_type = other DNA
tgtaatcccagcactttggg

SEQ ID NO: 16577 - DNA, 20 bp, synthetic construct
  misc_feature 1..20: note = Description of Artificial Sequence: Synthetic oligonucleotide
  misc_feature 1..20: note = Target: FXN; (+) strand; PAM type: NRG; PAM sequence: GAG
  source 1..20: mol_type = other DNA
tcccagcactttgggaggct

SEQ ID NO: 16578 - DNA, 20 bp, synthetic construct
  misc_feature 1..20: note = Description of Artificial Sequence: Synthetic oligonucleotide
  misc_feature 1..20: note = Target: FXN; (+) strand; PAM type: NRG; PAM sequence: TGG
  source 1..20: mol_type = other DNA
agcactttgggaggctgaga

SEQ ID NO: 16579 - DNA, 20 bp, synthetic construct
  misc_feature 1..20: note = Description of Artificial Sequence: Synthetic oligonucleotide
  misc_feature 1..20: note = Target: FXN; (+) strand; PAM type: NRG; PAM sequence: GGG
  source 1..20: mol_type = other DNA
gcactttgggaggctgagat

SEQ ID NO: 16580 - DNA, 20 bp, synthetic construct
  misc_feature 1..20: note = Description of Artificial Sequence: Synthetic oligonucleotide
  misc_feature 1..20: note = Target: FXN; (+) strand; PAM type: NRG; PAM sequence: CGG
  source 1..20: mol_type = other DNA
ctttgggaggctgagatggg

SEQ ID NO: 16581 - DNA, 20 bp, synthetic construct
  misc_feature 1..20: note = Description of Artificial Sequence: Synthetic oligonucleotide
  misc_feature 1..20: note = Target: FXN; (+) strand; PAM type: NRG; PAM sequence: GAG
  source 1..20: mol_type = other DNA
ctgagatgggcggatcacct

SEQ ID NO: 16582 - DNA, 20 bp, synthetic construct
  misc_feature 1..20: note = Description of Artificial Sequence: Synthetic oligonucleotide
  misc_feature 1..20: note = Target: FXN; (+) strand; PAM type: NRG; PAM sequence: AGG
  source 1..20: mol_type = other DNA
tgagatgggcggatcacctg

SEQ ID NO: 16583 - DNA, 20 bp, synthetic construct
  misc_feature 1..20: note = Description of Artificial Sequence: Synthetic oligonucleotide
  misc_feature 1..20: note = Target: FXN; (+) strand; PAM type: NRG; PAM sequence: CAG
  source 1..20: mol_type = other DNA
atgggcggatcacctgaggt

SEQ ID NO: 16584 - DNA, 20 bp, synthetic construct
  misc_feature 1..20: note = Description of Artificial Sequence: Synthetic oligonucleotide
  misc_feature 1..20: note = Target: FXN; (+) strand; PAM type: NRG; PAM sequence: AGG
  source 1..20: mol_type = other DNA
tgggcggatcacctgaggtc

SEQ ID NO: 16585 - DNA, 20 bp, synthetic construct
  misc_feature 1..20: note = Description of Artificial Sequence: Synthetic oligonucleotide
  misc_feature 1..20: note = Target: FXN; (+) strand; PAM type: NRG; PAM sequence: GAG
  source 1..20: mol_type = other DNA
ggcggatcacctgaggtcag

SEQ ID NO: 16586 - DNA, 20 bp, synthetic construct
  misc_feature 1..20: note = Description of Artificial Sequence: Synthetic oligonucleotide
  misc_feature 1..20: note = Target: FXN; (+) strand; PAM type: NRG; PAM sequence: GAG
  source 1..20: mol_type = other DNA
tcacctgaggtcaggagttt

SEQ ID NO: 16587 - DNA, 20 bp, synthetic construct
  misc_feature 1..20: note = Description of Artificial Sequence: Synthetic oligonucleotide
  misc_feature 1..20: note = Target: FXN; (+) strand; PAM type: NRG; PAM sequence: CAG
  source 1..20: mol_type = other DNA
tgaggtcaggagtttgagac

SEQ ID NO: 16588 - DNA, 20 bp, synthetic construct
  misc_feature 1..20: note = Description of Artificial Sequence: Synthetic oligonucleotide
  misc_feature 1..20: note = Target: FXN; (+) strand; PAM type: NRG; PAM sequence: TGG
  source 1..20: mol_type = other DNA
tcaggagtttgagaccagcc

SEQ ID NO: 16589 - DNA, 20 bp, synthetic construct
  misc_feature 1..20: note = Description of Artificial Sequence: Synthetic oligonucleotide
  misc_feature 1..20: note = Target: FXN; (+) strand; PAM type: NRG; PAM sequence: TGG
  source 1..20: mol_type = other DNA
tgagaccagcctggccaaca

SEQ ID NO: 16590 - DNA, 20 bp, synthetic construct
  misc_feature 1..20: note = Description of Artificial Sequence: Synthetic oligonucleotide
  misc_feature 1..20: note = Target: FXN; (+) strand; PAM type: NRG; PAM sequence: TAG
  source 1..20: mol_type = other DNA
tctactaaaaatacaaaaat

SEQ ID NO: 16591 - DNA, 20 bp, synthetic construct
  misc_feature 1..20: note = Description of Artificial Sequence: Synthetic oligonucleotide
  misc_feature 1..20: note = Target: FXN; (+) strand; PAM type: NRG; PAM sequence: TGG
  source 1..20: mol_type = other DNA
ctaaaaatacaaaaattagc

SEQ ID NO: 16592 - DNA, 20 bp, synthetic construct
  misc_feature 1..20: note = Description of Artificial Sequence: Synthetic oligonucleotide
  misc_feature 1..20: note = Target: FXN; (+) strand; PAM type: NRG; PAM sequence: TGG
  source 1..20: mol_type = other DNA
atacaaaaattagctggatg

SEQ ID NO: 16593 - DNA, 20 bp, synthetic construct
  misc_feature 1..20: note = Description of Artificial Sequence: Synthetic oligonucleotide
  misc_feature 1..20: note = Target: FXN; (+) strand; PAM type: NRG; PAM sequence: TGG
  source 1..20: mol_type = other DNA
caaaaattagctggatgtgg

SEQ ID NO: 16594 - DNA, 20 bp, synthetic construct
  misc_feature 1..20: note = Description of Artificial Sequence: Synthetic oligonucleotide
  misc_feature 1..20: note = Target: FXN; (+) strand; PAM type: NRG; PAM sequence: CAG
  source 1..20: mol_type = other DNA
gtggcactcacctgtaatcc

SEQ ID NO: 16595 - DNA, 20 bp, synthetic construct
  misc_feature 1..20: note = Description of Artificial Sequence: Synthetic oligonucleotide
  misc_feature 1..20: note = Target: FXN; (+) strand; PAM type: NRG; PAM sequence: CAG
  source 1..20: mol_type = other DNA
cacctgtaatcccagctact

SEQ ID NO: 16596 - DNA, 20 bp, synthetic construct
  misc_feature 1..20: note = Description of Artificial Sequence: Synthetic oligonucleotide
  misc_feature 1..20: note = Target: FXN; (+) strand; PAM type: NRG; PAM sequence: AGG
  source 1..20: mol_type = other DNA
acctgtaatcccagctactc

SEQ ID NO: 16597 - DNA, 20 bp, synthetic construct
  misc_feature 1..20: note = Description of Artificial Sequence: Synthetic oligonucleotide
  misc_feature 1..20: note = Target: FXN; (+) strand; PAM type: NRG; PAM sequence: GAG
  source 1..20: mol_type = other DNA
ctgtaatcccagctactcag

SEQ ID NO: 16598 - DNA, 20 bp, synthetic construct
  misc_feature 1..20: note = Description of Artificial Sequence: Synthetic oligonucleotide
  misc_feature 1..20: note = Target: FXN; (+) strand; PAM type: NRG; PAM sequence: AGG
  source 1..20: mol_type = other DNA
tgtaatcccagctactcagg

SEQ ID NO: 16599 - DNA, 20 bp, synthetic construct
  misc_feature 1..20: note = Description of Artificial Sequence: Synthetic oligonucleotide
  misc_feature 1..20: note = Target: FXN; (+) strand; PAM type: NRG; PAM sequence: GAG
  source 1..20: mol_type = other DNA
tcccagctactcaggaggct

SEQ ID NO: 16600 - DNA, 20 bp, synthetic construct
  misc_feature 1..20: note = Description of Artificial Sequence: Synthetic oligonucleotide
  misc_feature 1..20: note = Target: FXN; (+) strand; PAM type: NRG; PAM sequence: AGG
  source 1..20: mol_type = other DNA
cccagctactcaggaggctg

SEQ ID NO: 16601 - DNA, 20 bp, synthetic construct
  misc_feature 1..20: note = Description of Artificial Sequence: Synthetic oligonucleotide
  misc_feature 1..20: note = Target: FXN; (+) strand; PAM type: NRG; PAM sequence: CAG
  source 1..20: mol_type = other DNA
agctactcaggaggctgagg

SEQ ID NO: 16602 - DNA, 20 bp, synthetic construct
  misc_feature 1..20: note = Description of Artificial Sequence: Synthetic oligonucleotide
  misc_feature 1..20: note = Target: FXN; (+) strand; PAM type: NRG; PAM sequence: AGG
  source 1..20: mol_type = other DNA
gctactcaggaggctgaggc

SEQ ID NO: 16603 - DNA, 20 bp, synthetic construct
  misc_feature 1..20: note = Description of Artificial Sequence: Synthetic oligonucleotide
  misc_feature 1..20: note = Target: FXN; (+) strand; PAM type: NRG; PAM sequence: CGG
  source 1..20: mol_type = other DNA
gcaggataattgcttgaacc

SEQ ID NO: 16604 - DNA, 20 bp, synthetic construct
  misc_feature 1..20: note = Description of Artificial Sequence: Synthetic oligonucleotide
  misc_feature 1..20: note = Target: FXN; (+) strand; PAM type: NRG; PAM sequence: GGG
  source 1..20: mol_type = other DNA
caggataattgcttgaaccc

SEQ ID NO: 16605 - DNA, 20 bp, synthetic construct
  misc_feature 1..20: note = Description of Artificial Sequence: Synthetic oligonucleotide
  misc_feature 1..20: note = Target: FXN; (+) strand; PAM type: NRG; PAM sequence: GAG
  source 1..20: mol_type = other DNA
ggataattgcttgaacccgg

SEQ ID NO: 16606 - DNA, 20 bp, synthetic construct
  misc_feature 1..20: note = Description of Artificial Sequence: Synthetic oligonucleotide
  misc_feature 1..20: note = Target: FXN; (+) strand; PAM type: NRG; PAM sequence: AGG
  source 1..20: mol_type = other DNA
gataattgcttgaacccggg

SEQ ID NO: 16607 - DNA, 20 bp, synthetic construct
  misc_feature 1..20: note = Description of Artificial Sequence: Synthetic oligonucleotide
  misc_feature 1..20: note = Target: FXN; (+) strand; PAM type: NRG; PAM sequence: TGG
  source 1..20: mol_type = other DNA
aattgcttgaacccgggagg

SEQ ID NO: 16608 - DNA, 20 bp, synthetic construct
  misc_feature 1..20: note = Description of Artificial Sequence: Synthetic oligonucleotide
  misc_feature 1..20: note = Target: FXN; (+) strand; PAM type: NRG; PAM sequence: TGG
  source 1..20: mol_type = other DNA
tgcttgaacccgggaggtgg

SEQ ID NO: 16609 - DNA, 20 bp, synthetic construct
  misc_feature 1..20: note = Description of Artificial Sequence: Synthetic oligonucleotide
  misc_feature 1..20: note = Target: FXN; (+) strand; PAM type: NRG; PAM sequence: GAG
  source 1..20: mol_type = other DNA
cttgaacccgggaggtggtg

SEQ ID NO: 16610 - DNA, 20 bp, synthetic construct
  misc_feature 1..20: note = Description of Artificial Sequence: Synthetic oligonucleotide
  misc_feature 1..20: note = Target: FXN; (+) strand; PAM type: NRG; PAM sequence: AGG
  source 1..20: mol_type = other DNA
ttgaacccgggaggtggtgg

SEQ ID NO: 16611 - DNA, 20 bp, synthetic construct
  misc_feature 1..20: note = Description of Artificial Sequence: Synthetic oligonucleotide
  misc_feature 1..20: note = Target: FXN; (+) strand; PAM type: NRG; PAM sequence: CAG
  source 1..20: mol_type = other DNA
ccgggaggtggtggaggttg

SEQ ID NO: 16612 - DNA, 20 bp, synthetic construct
  misc_feature 1..20: note = Description of Artificial Sequence: Synthetic oligonucleotide
  misc_feature 1..20: note = Target: FXN; (+) strand; PAM type: NRG; PAM sequence: GAG
  source 1..20: mol_type = other DNA
gaggtggtggaggttgcagt

SEQ ID NO: 16613 - DNA, 20 bp, synthetic construct
  misc_feature 1..20: note = Description of Artificial Sequence: Synthetic oligonucleotide
  misc_feature 1..20: note = Target: FXN; (+) strand; PAM type: NRG; PAM sequence: GAG
  source 1..20: mol_type = other DNA
ggtggaggttgcagtgagcc

SEQ ID NO: 16614 - DNA, 20 bp, synthetic construct
  misc_feature 1..20: note = Description of Artificial Sequence: Synthetic oligonucleotide
  misc_feature 1..20: note = Target: FXN; (+) strand; PAM type: NRG; PAM sequence: TGG
  source 1..20: mol_type = other DNA
cgcaccactgccttccaacc

SEQ ID NO: 16615 - DNA, 20 bp, synthetic construct
  misc_feature 1..20: note = Description of Artificial Sequence: Synthetic oligonucleotide
  misc_feature 1..20: note = Target: FXN; (+) strand; PAM type: NRG; PAM sequence: GGG
  source 1..20: mol_type = other DNA
gcaccactgccttccaacct

SEQ ID NO: 16616 - DNA, 20 bp, synthetic construct
  misc_feature 1..20: note = Description of Artificial Sequence: Synthetic oligonucleotide
  misc_feature 1..20: note = Target: FXN; (+) strand; PAM type: NRG; PAM sequence: CAG
  source 1..20: mol_type = other DNA
ctgccttccaacctgggcga

SEQ ID NO: 16617 - DNA, 20 bp, synthetic construct
  misc_feature 1..20: note = Description of Artificial Sequence: Synthetic oligonucleotide
  misc_feature 1..20: note = Target: FXN; (+) strand; PAM type: NRG; PAM sequence: GAG
  source 1..20: mol_type = other DNA
gccttccaacctgggcgaca

SEQ ID NO: 16618 - DNA, 20 bp, synthetic construct
  misc_feature 1..20: note = Description of Artificial Sequence: Synthetic oligonucleotide
  misc_feature 1..20: note = Target: FXN; (+) strand; PAM type: NRG; PAM sequence: GAG
  source 1..20: mol_type = other DNA
tccaacctgggcgacagagc

SEQ ID NO: 16619 - DNA, 20 bp, synthetic construct
  misc_feature 1..20: note = Description of Artificial Sequence: Synthetic oligonucleotide
  misc_feature 1..20: note = Target: FXN; (+) strand; PAM type: NRG; PAM sequence: AAG
  source 1..20: mol_type = other DNA
tccgtctcaaaaaaaaaaaa

SEQ ID NO: 16620 - DNA, 20 bp, synthetic construct
  misc_feature 1..20: note = Description of Artificial Sequence: Synthetic oligonucleotide
  misc_feature 1..20: note = Target: FXN; (+) strand; PAM type: NRG; PAM sequence: AGG
  source 1..20: mol_type = other DNA
ccgtctcaaaaaaaaaaaaa

SEQ ID NO: 16621 - DNA, 20 bp, synthetic construct
  misc_feature 1..20: note = Description of Artificial Sequence: Synthetic oligonucleotide
  misc_feature 1..20: note = Target: FXN; (+) strand; PAM type: NRG; PAM sequence: AAG
  source 1..20: mol_type = other DNA
caaataattaaaattaaatg

SEQ ID NO: 16622 - DNA, 20 bp, synthetic construct
  misc_feature 1..20: note = Description of Artificial Sequence: Synthetic oligonucleotide
  misc_feature 1..20: note = Target: FXN; (+) strand; PAM type: NRG; PAM sequence: CAG
  source 1..20: mol_type = other DNA
attaaatgaagttgaaaatc

SEQ ID NO: 16623 - DNA, 20 bp, synthetic construct
  misc_feature 1..20: note = Description of Artificial Sequence: Synthetic oligonucleotide
  misc_feature 1..20: note = Target: FXN; (+) strand; PAM type: NRG; PAM sequence: AGG
  source 1..20: mol_type = other DNA
ttaaatgaagttgaaaatcc

SEQ ID NO: 16624 - DNA, 20 bp, synthetic construct
  misc_feature 1..20: note = Description of Artificial Sequence: Synthetic oligonucleotide
  misc_feature 1..20: note = Target: FXN; (+) strand; PAM type: NRG; PAM sequence: CAG
  source 1..20: mol_type = other DNA
aagttgaaaatccaggtcct

SEQ ID NO: 16625 - DNA, 20 bp, synthetic construct
  misc_feature 1..20: note = Description of Artificial Sequence: Synthetic oligonucleotide
  misc_feature 1..20: note = Target: FXN; (+) strand; PAM type: NRG; PAM sequence: TAG
  source 1..20: mol_type = other DNA
atccaggtcctcagtcccat

SEQ ID NO: 16626 - DNA, 20 bp, synthetic construct
  misc_feature 1..20: note = Description of Artificial Sequence: Synthetic oligonucleotide
  misc_feature 1..20: note = Target: FXN; (+) strand; PAM type: NRG; PAM sequence: TAG
  source 1..20: mol_type = other DNA
agtcccattagccacatttc

SEQ ID NO: 16627 - DNA, 20 bp, synthetic construct
  misc_feature 1..20: note = Description of Artificial Sequence: Synthetic oligonucleotide
  misc_feature 1..20: note = Target: FXN; (+) strand; PAM type: NRG; PAM sequence: CAG
  source 1..20: mol_type = other DNA
ttagccacatttctagtgct

SEQ ID NO: 16628 - DNA, 20 bp, synthetic construct
  misc_feature 1..20: note = Description of Artificial Sequence: Synthetic oligonucleotide
  misc_feature 1..20: note = Target: FXN; (+) strand; PAM type: NRG; PAM sequence: TAG
  source 1..20: mol_type = other DNA
gccacatttctagtgctcag

SEQ ID NO: 16629 - DNA, 20 bp, synthetic construct
  misc_feature 1..20: note = Description of Artificial Sequence: Synthetic oligonucleotide
  misc_feature 1..20: note = Target: FXN; (+) strand; PAM type: NRG; PAM sequence: CGG
  source 1..20: mol_type = other DNA
tttctagtgctcagtagcca

SEQ ID NO: 16630 - DNA, 20 bp, synthetic construct
  misc_feature 1..20: note = Description of Artificial Sequence: Synthetic oligonucleotide
  misc_feature 1..20: note = Target: FXN; (+) strand; PAM type: NRG; PAM sequence: GGG
  source 1..20: mol_type = other DNA
ttctagtgctcagtagccac

SEQ ID NO: 16631 - DNA, 20 bp, synthetic construct
  misc_feature 1..20: note = Description of Artificial Sequence: Synthetic oligonucleotide
  misc_feature 1..20: note = Target: FXN; (+) strand; PAM type: NRG; PAM sequence: GGG
  source 1..20: mol_type = other DNA
tctagtgctcagtagccacg

SEQ ID NO: 16632 - DNA, 20 bp, synthetic construct
  misc_feature 1..20: note = Description of Artificial Sequence: Synthetic oligonucleotide
  misc_feature 1..20: note = Target: FXN; (+) strand; PAM type: NRG; PAM sequence: GGG
  source 1..20: mol_type = other DNA
ctagtgctcagtagccacgg

SEQ ID NO: 16633 - DNA, 20 bp, synthetic construct
  misc_feature 1..20: note = Description of Artificial Sequence: Synthetic oligonucleotide
  misc_feature 1..20: note = Target: FXN; (+) strand; PAM type: NRG; PAM sequence: TGG
  source 1..20: mol_type = other DNA
tgctcagtagccacgggggc

SEQ ID NO: 16634 - DNA, 20 bp, synthetic construct
  misc_feature 1..20: note = Description of Artificial Sequence: Synthetic oligonucleotide
  misc_feature 1..20: note = Target: FXN; (+) strand; PAM type: NRG; PAM sequence: TGG
  source 1..20: mol_type = other DNA
gggggctggtgaccaccaca

SEQ ID NO: 16635 - DNA, 20 bp, synthetic construct
  misc_feature 1..20: note = Description of Artificial Sequence: Synthetic oligonucleotide
  misc_feature 1..20: note = Target: FXN; (+) strand; PAM type: NRG; PAM sequence: GGG
  source 1..20: mol_type = other DNA
ggggctggtgaccaccacat

SEQ ID NO: 16636 - DNA, 20 bp, synthetic construct
  misc_feature 1..20: note = Description of Artificial Sequence: Synthetic oligonucleotide
  misc_feature 1..20: note = Target: FXN; (+) strand; PAM type: NRG; PAM sequence: CAG
  source 1..20: mol_type = other DNA
ctggtgaccaccacatggga

SEQ ID NO: 16637 - DNA, 20 bp, synthetic construct
  misc_feature 1..20: note = Description of Artificial Sequence: Synthetic oligonucleotide
  misc_feature 1..20: note = Target: FXN; (+) strand; PAM type: NRG; PAM sequence: TAG
  source 1..20: mol_type = other DNA
accacatgggacagcatatt

SEQ ID NO: 16638 - DNA, 20 bp, synthetic construct
  misc_feature 1..20: note = Description of Artificial Sequence: Synthetic oligonucleotide
  misc_feature 1..20: note = Target: FXN; (+) strand; PAM type: NRG; PAM sequence: TGG
  source 1..20: mol_type = other DNA
catatttagtacctgatcat

SEQ ID NO: 16639 - DNA, 20 bp, synthetic construct
  misc_feature 1..20: note = Description of Artificial Sequence: Synthetic oligonucleotide
  misc_feature 1..20: note = Target: FXN; (+) strand; PAM type: NRG; PAM sequence: CAG
  source 1..20: mol_type = other DNA
agtacctgatcattggttct

SEQ ID NO: 16640 - DNA, 20 bp, synthetic construct
  misc_feature 1..20: note = Description of Artificial Sequence: Synthetic oligonucleotide
  misc_feature 1..20: note = Target: FXN; (+) strand; PAM type: NRG; PAM sequence: TGG
  source 1..20: mol_type = other DNA
tgatcattggttctcagatc

SEQ ID NO: 16641 - DNA, 20 bp, synthetic construct
  misc_feature 1..20: note = Description of Artificial Sequence: Synthetic oligonucleotide
  misc_feature 1..20: note = Target: FXN; (+) strand; PAM type: NRG; PAM sequence: CAG
  source 1..20: mol_type = other DNA
ggttctcagatctggctact

SEQ ID NO: 16642 - DNA, 20 bp, synthetic construct
  misc_feature 1..20: note = Description of Artificial Sequence: Synthetic oligonucleotide
  misc_feature 1..20: note = Target: FXN; (+) strand; PAM type: NRG; PAM sequence: CAG
  source 1..20: mol_type = other DNA
tctcagatctggctactcag

SEQ ID NO: 16643 - DNA, 20 bp, synthetic construct
  misc_feature 1..20: note = Description of Artificial Sequence: Synthetic oligonucleotide
  misc_feature 1..20: note = Target: FXN; (+) strand; PAM type: NRG; PAM sequence: AAG
  source 1..20: mol_type = other DNA
tctggctactcagcagaacc

SEQ ID NO: 16644 - DNA, 20 bp, synthetic construct
  misc_feature 1..20: note = Description of Artificial Sequence: Synthetic oligonucleotide
  misc_feature 1..20: note = Target: FXN; (+) strand; PAM type: NRG; PAM sequence: CAG
  source 1..20: mol_type = other DNA
tcagcagaaccaagaatcca

SEQ ID NO: 16645 - DNA, 20 bp, synthetic construct
  misc_feature 1..20: note = Description of Artificial Sequence: Synthetic oligonucleotide
  misc_feature 1..20: note = Target: FXN; (+) strand; PAM type: NRG; PAM sequence: CGG
  source 1..20: mol_type = other DNA
gaaccaagaatccacagaaa

SEQ ID NO: 16646 - DNA, 20 bp, synthetic construct
  misc_feature 1..20: note = Description of Artificial Sequence: Synthetic oligonucleotide
  misc_feature 1..20: note = Target: FXN; (+) strand; PAM type: NRG; PAM sequence: AAG
  source 1..20: mol_type = other DNA
tccacagaaacggcttttaa

SEQ ID NO: 16647 - DNA, 20 bp, synthetic construct
  misc_feature 1..20: note = Description of Artificial Sequence: Synthetic oligonucleotide
  misc_feature 1..20: note = Target: FXN; (+) strand; PAM type: NRG; PAM sequence: CAG
  source 1..20: mol_type = other DNA
agaaacggcttttaaaagca

SEQ ID NO: 16648 - DNA, 20 bp, synthetic construct
  misc_feature 1..20: note = Description of Artificial Sequence: Synthetic oligonucleotide
  misc_feature 1..20: note = Target: FXN; (+) strand; PAM type: NRG; PAM sequence: CAG
  source 1..20: mol_type = other DNA
cttttaaaagcacagcccca

SEQ ID NO: 16649 - DNA, 20 bp, synthetic construct
  misc_feature 1..20: note = Description of Artificial Sequence: Synthetic oligonucleotide
  misc_feature 1..20: note = Target: FXN; (+) strand; PAM type: NRG; PAM sequence: CAG
  source 1..20: mol_type = other DNA
aagcacagccccacagcccc

SEQ ID NO: 16650 - DNA, 20 bp, synthetic construct
  misc_feature 1..20: note = Description of Artificial Sequence: Synthetic oligonucleotide
  misc_feature 1..20: note = Target: FXN; (+) strand; PAM type: NRG; PAM sequence: CAG
  source 1..20: mol_type = other DNA
agccccacagcccccagccc

SEQ ID NO: 16651 - DNA, 20 bp, synthetic construct
  misc_feature 1..20: note = Description of Artificial Sequence: Synthetic oligonucleotide
  misc_feature 1..20: note = Target: FXN; (+) strand; PAM type: NRG; PAM sequence: TGG
  source 1..20: mol_type = other DNA
cagccccagccttacctacc

SEQ ID NO: 16652 - DNA, 20 bp, synthetic construct
  misc_feature 1..20: note = Description of Artificial Sequence: Synthetic oligonucleotide
  misc_feature 1..20: note = Target: FXN; (+) strand; PAM type: NRG; PAM sequence: GAG
  source 1..20: mol_type = other DNA
gccccagccttacctacctg

SEQ ID NO: 16653 - DNA, 20 bp, synthetic construct
  misc_feature 1..20: note = Description of Artificial Sequence: Synthetic oligonucleotide
  misc_feature 1..20: note = Target: FXN; (+) strand; PAM type: NRG; PAM sequence: AGG
  source 1..20: mol_type = other DNA
ccccagccttacctacctgg

SEQ ID NO: 16654 - DNA, 20 bp, synthetic construct
  misc_feature 1..20: note = Description of Artificial Sequence: Synthetic oligonucleotide
  misc_feature 1..20: note = Target: FXN; (+) strand; PAM type: NRG; PAM sequence: TGG
  source 1..20: mol_type = other DNA
agccttacctacctggaggc

SEQ ID NO: 16655 - DNA, 20 bp, synthetic construct
  misc_feature 1..20: note = Description of Artificial Sequence: Synthetic oligonucleotide
  misc_feature 1..20: note = Target: FXN; (+) strand; PAM type: NRG; PAM sequence: GGG
  source 1..20: mol_type = other DNA
gccttacctacctggaggct

SEQ ID NO: 16656 - DNA, 20 bp, synthetic construct
  misc_feature 1..20: note = Description of Artificial Sequence: Synthetic oligonucleotide
  misc_feature 1..20: note = Target: FXN; (+) strand; PAM type: NRG; PAM sequence: AAG
  source 1..20: mol_type = other DNA
ttacctacctggaggctggg

SEQ ID NO: 16657 - DNA, 20 bp, synthetic construct
  misc_feature 1..20: note = Description of Artificial Sequence: Synthetic oligonucleotide
  misc_feature 1..20: note = Target: FXN; (+) strand; PAM type: NRG; PAM sequence: AGG
  source 1..20: mol_type = other DNA
tacctacctggaggctggga

SEQ ID NO: 16658 - DNA, 20 bp, synthetic construct
  misc_feature 1..20: note = Description of Artificial Sequence: Synthetic oligonucleotide
  misc_feature 1..20: note = Target: FXN; (+) strand; PAM type: NRG; PAM sequence: GAG
  source 1..20: mol_type = other DNA
gggaaggactctgattccac

SEQ ID NO: 16659 - DNA, 20 bp, synthetic construct
  misc_feature 1..20: note = Description of Artificial Sequence: Synthetic oligonucleotide
  misc_feature 1..20: note = Target: FXN; (+) strand; PAM type: NRG; PAM sequence: AGG
  source 1..20: mol_type = other DNA
ggaaggactctgattccacg

SEQ ID NO: 16660 - DNA, 20 bp, synthetic construct
  misc_feature 1..20: note = Description of Artificial Sequence: Synthetic oligonucleotide
  misc_feature 1..20: note = Target: FXN; (+) strand; PAM type: NRG; PAM sequence: CAG
  source 1..20: mol_type = other DNA
aggactctgattccacgagg

SEQ ID NO: 16661 - DNA, 20 bp, synthetic construct
  misc_feature 1..20: note = Description of Artificial Sequence: Synthetic oligonucleotide
  misc_feature 1..20: note = Target: FXN; (+) strand; PAM type: NRG; PAM sequence: TGG
  source 1..20: mol_type = other DNA
aggcagcctatgttttttga

SEQ ID NO: 16662 - DNA, 20 bp, synthetic construct
  misc_feature 1..20: note = Description of Artificial Sequence: Synthetic oligonucleotide
  misc_feature 1..20: note = Target: FXN; (+) strand; PAM type: NRG; PAM sequence: GAG
  source 1..20: mol_type = other DNA
gcagcctatgttttttgatg

SEQ ID NO: 16663 - DNA, 20 bp, synthetic construct
  misc_feature 1..20: note = Description of Artificial Sequence: Synthetic oligonucleotide
  misc_feature 1..20: note = Target: FXN; (+) strand; PAM type: NRG; PAM sequence: AGG
  source 1..20: mol_type = other DNA
cagcctatgttttttgatgg

SEQ ID NO: 16664 - DNA, 20 bp, synthetic construct
  misc_feature 1..20: note = Description of Artificial Sequence: Synthetic oligonucleotide
  misc_feature 1..20: note = Target: FXN; (+) strand; PAM type: NRG; PAM sequence: GGG
  source 1..20: mol_type = other DNA
agcctatgttttttgatgga

SEQ ID NO: 16665 - DNA, 20 bp, synthetic construct
  misc_feature 1..20: note = Description of Artificial Sequence: Synthetic oligonucleotide
  misc_feature 1..20: note = Target: FXN; (+) strand; PAM type: NRG; PAM sequence: CAG
  source 1..20: mol_type = other DNA
tttttgatggagggatgtga

SEQ ID NO: 16666 - DNA, 20 bp, synthetic construct
  misc_feature 1..20: note = Description of Artificial Sequence: Synthetic oligonucleotide
  misc_feature 1..20: note = Target: FXN; (+) strand; PAM type: NRG; PAM sequence: AGG
  source 1..20: mol_type = other DNA
ttttgatggagggatgtgac

SEQ ID NO: 16667 - DNA, 20 bp, synthetic construct
  misc_feature 1..20: note = Description of Artificial Sequence: Synthetic oligonucleotide
  misc_feature 1..20: note = Target: FXN; (+) strand; PAM type: NRG; PAM sequence: GGG
  source 1..20: mol_type = other DNA
tttgatggagggatgtgaca

SEQ ID NO: 16668 - DNA, 20 bp, synthetic construct
  misc_feature 1..20: note = Description of Artificial Sequence: Synthetic oligonucleotide
  misc_feature 1..20: note = Target: FXN; (+) strand; PAM type: NRG; PAM sequence: GGG
  source 1..20: mol_type = other DNA
ttgatggagggatgtgacag

SEQ ID NO: 16669 - DNA, 20 bp, synthetic construct
  misc_feature 1..20: note = Description of Artificial Sequence: Synthetic oligonucleotide
  misc_feature 1..20: note = Target: FXN; (+) strand; PAM type: NRG; PAM sequence: TGG
  source 1..20: mol_type = other DNA
taacgtttcctcttaaatac

SEQ ID NO: 16670 - DNA, 20 bp, synthetic construct
  misc_feature 1..20: note = Description of Artificial Sequence: Synthetic oligonucleotide
  misc_feature 1..20: note = Target: FXN; (+) strand; PAM type: NRG; PAM sequence: GAG
  source 1..20: mol_type = other DNA
acgtttcctcttaaatactg

SEQ ID NO: 16671 - DNA, 20 bp, synthetic construct
  misc_feature 1..20: note = Description of Artificial Sequence: Synthetic oligonucleotide
  misc_feature 1..20: note = Target: FXN; (+) strand; PAM type: NRG; PAM sequence: CAG
  source 1..20: mol_type = other DNA
ttcctcttaaatactggaga

SEQ ID NO: 16672 - DNA, 20 bp, synthetic construct
  misc_feature 1..20: note = Description of Artificial Sequence: Synthetic oligonucleotide
  misc_feature 1..20: note = Target: FXN; (+) strand; PAM type: NRG; PAM sequence: GAG
  source 1..20: mol_type = other DNA
taaatactggagacagcttc

SEQ ID NO: 16673 - DNA, 20 bp, synthetic construct
  misc_feature 1..20: note = Description of Artificial Sequence: Synthetic oligonucleotide
  misc_feature 1..20: note = Target: FXN; (+) strand; PAM type: NRG; PAM sequence: AGG
  source 1..20: mol_type = other DNA
aaatactggagacagcttcg

SEQ ID NO: 16674 - DNA, 20 bp, synthetic construct
  misc_feature 1..20: note = Description of Artificial Sequence: Synthetic oligonucleotide
  misc_feature 1..20: note = Target: FXN; (+) strand; PAM type: NRG; PAM sequence: GAG
  source 1..20: mol_type = other DNA
atactggagacagcttcgag

SEQ ID NO: 16675 - DNA, 20 bp, synthetic construct
  misc_feature 1..20: note = Description of Artificial Sequence: Synthetic oligonucleotide
  misc_feature 1..20: note = Target: FXN; (+) strand; PAM type: NRG; PAM sequence: AGG
  source 1..20: mol_type = other DNA
tactggagacagcttcgagg

SEQ ID NO: 16676 - DNA, 20 bp, synthetic construct
  misc_feature 1..20: note = Description of Artificial Sequence: Synthetic oligonucleotide
  misc_feature 1..20: note = Target: FXN; (+) strand; PAM type: NRG; PAM sequence: GAG
  source 1..20: mol_type = other DNA
ctggagacagcttcgaggag

SEQ ID NO: 16677 - DNA, 20 bp, synthetic construct
  misc_feature 1..20: note = Description of Artificial Sequence: Synthetic oligonucleotide
  misc_feature 1..20: note = Target: FXN; (+) strand; PAM type: NRG; PAM sequence: TGG
  source 1..20: mol_type = other DNA
agcttcgaggaggagataac

SEQ ID NO: 16678 - DNA, 20 bp, synthetic construct
  misc_feature 1..20: note = Description of Artificial Sequence: Synthetic oligonucleotide
  misc_feature 1..20: note = Target: FXN; (+) strand; PAM type: NRG; PAM sequence: TAG
  source 1..20: mol_type = other DNA
ggagataactggatgtgtct

SEQ ID NO: 16679 - DNA, 20 bp, synthetic construct
  misc_feature 1..20: note = Description of Artificial Sequence: Synthetic oligonucleotide
  misc_feature 1..20: note = Target: FXN; (+) strand; PAM type: NRG; PAM sequence: TGG
  source 1..20: mol_type = other DNA
atgtgtcttagtccatttga

SEQ ID NO: 16680 - DNA, 20 bp, synthetic construct
  misc_feature 1..20: note = Description of Artificial Sequence: Synthetic oligonucleotide
  misc_feature 1..20: note = Target: FXN; (+) strand; PAM type: NRG; PAM sequence: GAG
  source 1..20: mol_type = other DNA
gtgtcttagtccatttgatg

SEQ ID NO: 16681 - DNA, 20 bp, synthetic construct
  misc_feature 1..20: note = Description of Artificial Sequence: Synthetic oligonucleotide
  misc_feature 1..20: note = Target: FXN; (+) strand; PAM type: NRG; PAM sequence: AGG
  source 1..20: mol_type = other DNA
tgtcttagtccatttgatgg

SEQ ID NO: 16682 - DNA, 20 bp, synthetic construct
  misc_feature 1..20: note = Description of Artificial Sequence: Synthetic oligonucleotide
  misc_feature 1..20: note = Target: FXN; (+) strand; PAM type: NRG; PAM sequence: GGG
  source 1..20: mol_type = other DNA
gtcttagtccatttgatgga

SEQ ID NO: 16683 - DNA, 20 bp, synthetic construct
  misc_feature 1..20: note = Description of Artificial Sequence: Synthetic oligonucleotide
  misc_feature 1..20: note = Target: FXN; (+) strand; PAM type: NRG; PAM sequence: CGG
  source 1..20: mol_type = other DNA
catttgatggagggatgtga

SEQ ID NO: 16684 - DNA, 20 bp, synthetic construct
  misc_feature 1..20: note = Description of Artificial Sequence: Synthetic oligonucleotide
  misc_feature 1..20: note = Target: FXN; (+) strand; PAM type: NRG; PAM sequence: GGG
  source 1..20: mol_type = other DNA
atttgatggagggatgtgac

SEQ ID NO: 16685 - DNA, 20 bp, synthetic construct
  misc_feature 1..20: note = Description of Artificial Sequence: Synthetic oligonucleotide
  misc_feature 1..20: note = Target: FXN; (+) strand; PAM type: NRG; PAM sequence: GGG
  source 1..20: mol_type = other DNA
tttgatggagggatgtgacg

SEQ ID NO: 16686 - DNA, 20 bp, synthetic construct
  misc_feature 1..20: note = Description of Artificial Sequence: Synthetic oligonucleotide
  misc_feature 1..20: note = Target: FXN; (+) strand; PAM type: NRG; PAM sequence: CGG
  source 1..20: mol_type = other DNA
taacgtttcctcttaaatac

SEQ ID NO: 16687 - DNA, 20 bp, synthetic construct
  misc_feature 1..20: note = Description of Artificial Sequence: Synthetic oligonucleotide
  misc_feature 1..20: note = Target: FXN; (+) strand; PAM type: NRG; PAM sequence: GAG
  source 1..20: mol_type = other DNA
acgtttcctcttaaataccg

SEQ ID NO: 16688 - DNA, 20 bp, synthetic construct
  misc_feature 1..20: note = Description of Artificial Sequence: Synthetic oligonucleotide
  misc_feature 1..20: note = Target: FXN; (+) strand; PAM type: NRG; PAM sequence: CAG
  source 1..20: mol_type = other DNA
ttcctcttaaataccggaga

SEQ ID NO: 16689 - DNA, 20 bp, synthetic construct
  misc_feature 1..20: note = Description of Artificial Sequence: Synthetic oligonucleotide
  misc_feature 1..20: note = Target: FXN; (+) strand; PAM type: NRG; PAM sequence: GAG
  source 1..20: mol_type = other DNA
taaataccggagacagcttc

SEQ ID NO: 16690 - DNA, 20 bp, synthetic construct
  misc_feature 1..20: note = Description of Artificial Sequence: Synthetic oligonucleotide
  misc_feature 1..20: note = Target: FXN; (+) strand; PAM type: NRG; PAM sequence: AAG
  source 1..20: mol_type = other DNA
ataccggagacagcttcgag

SEQ ID NO: 16691 - DNA, 20 bp, synthetic construct
  misc_feature 1..20: note = Description of Artificial Sequence: Synthetic oligonucleotide
  misc_feature 1..20: note = Target: FXN; (+) strand; PAM type: NRG; PAM sequence: AGG
  source 1..20: mol_type = other DNA
taccggagacagcttcgaga

SEQ ID NO: 16692 - DNA, 20 bp, synthetic construct
  misc_feature 1..20: note = Description of Artificial Sequence: Synthetic oligonucleotide
  misc_feature 1..20: note = Target: FXN; (+) strand; PAM type: NRG; PAM sequence: GAG
  source 1..20: mol_type = other DNA
ccggagacagcttcgagaag

SEQ ID NO: 16693 - DNA, 20 bp, synthetic construct
  misc_feature 1..20: note = Description of Artificial Sequence: Synthetic oligonucleotide
  misc_feature 1..20: note = Target: FXN; (+) strand; PAM type: NRG; PAM sequence: TGG
  source 1..20: mol_type = other DNA
agcttcgagaaggagataac

SEQ ID NO: 16694 - DNA, 20 bp, synthetic construct
  misc_feature 1..20: note = Description of Artificial Sequence: Synthetic oligonucleotide
  misc_feature 1..20: note = Target: FXN; (+) strand; PAM type: NRG; PAM sequence: TAG
  source 1..20: mol_type = other DNA
ggagataactggatgtttct

SEQ ID NO: 16695 - DNA, 20 bp, synthetic construct
  misc_feature 1..20: note = Description of Artificial Sequence: Synthetic oligonucleotide
  misc_feature 1..20: note = Target: FXN; (+) strand; PAM type: NRG; PAM sequence: CAG
  source 1..20: mol_type = other DNA
ccattttctgttgcttgtga

SEQ ID NO: 16696 - DNA, 20 bp, synthetic construct
  misc_feature 1..20: note = Description of Artificial Sequence: Synthetic oligonucleotide
  misc_feature 1..20: note = Target: FXN; (+) strand; PAM type: NRG; PAM sequence: TGG
  source 1..20: mol_type = other DNA
tgtgacagaatacctgaaac

SEQ ID NO: 16697 - DNA, 20 bp, synthetic construct
  misc_feature 1..20: note = Description of Artificial Sequence: Synthetic oligonucleotide
  misc_feature 1..20: note = Target: FXN; (+) strand; PAM type: NRG; PAM sequence: GGG
  source 1..20: mol_type = other DNA
gtgacagaatacctgaaact

SEQ ID NO: 16698 - DNA, 20 bp, synthetic construct
  misc_feature 1..20: note = Description of Artificial Sequence: Synthetic oligonucleotide
  misc_feature 1..20: note = Target: FXN; (+) strand; PAM type: NRG; PAM sequence: TGG
  source 1..20: mol_type = other DNA
ctgaaactgggcaatttata

SEQ ID NO: 16699 - DNA, 20 bp, synthetic construct
  misc_feature 1..20: note = Description of Artificial Sequence: Synthetic oligonucleotide
  misc_feature 1..20: note = Target: FXN; (+) strand; PAM type: NRG; PAM sequence: TGG
  source 1..20: mol_type = other DNA
aaattttcttcttactgctc

SEQ ID NO: 16700 - DNA, 20 bp, synthetic construct
  misc_feature 1..20: note = Description of Artificial Sequence: Synthetic oligonucleotide
  misc_feature 1..20: note = Target: FXN; (+) strand; PAM type: NRG; PAM sequence: GAG
  source 1..20: mol_type = other DNA
attttcttcttactgctctg

SEQ ID NO: 16701 - DNA, 20 bp, synthetic construct
  misc_feature 1..20: note = Description of Artificial Sequence: Synthetic oligonucleotide
  misc_feature 1..20: note = Target: FXN; (+) strand; PAM type: NRG; PAM sequence: AGG
  source 1..20: mol_type = other DNA
ttttcttcttactgctctgg

SEQ ID NO: 16702 - DNA, 20 bp, synthetic construct
  misc_feature 1..20: note = Description of Artificial Sequence: Synthetic oligonucleotide
  misc_feature 1..20: note = Target: FXN; (+) strand; PAM type: NRG; PAM sequence: GAG
  source 1..20: mol_type = other DNA
ttcttactgctctggaggct

SEQ ID NO: 16703 - DNA, 20 bp, synthetic construct
  misc_feature 1..20: note = Description of Artificial Sequence: Synthetic oligonucleotide
  misc_feature 1..20: note = Target: FXN; (+) strand; PAM type: NRG; PAM sequence: AAG
  source 1..20: mol_type = other DNA
ttactgctctggaggctgag

SEQ ID NO: 16704 - DNA, 20 bp, synthetic construct
  misc_feature 1..20: note = Description of Artificial Sequence: Synthetic oligonucleotide
  misc_feature 1..20: note = Target: FXN; (+) strand; PAM type: NRG; PAM sequence: AAG
  source 1..20: mol_type = other DNA
tctggaggctgagaagtcca

SEQ ID NO: 16705 - DNA, 20 bp, synthetic construct
  misc_feature 1..20: note = Description of Artificial Sequence: Synthetic oligonucleotide
  misc_feature 1..20: note = Target: FXN; (+) strand; PAM type: NRG; PAM sequence: AAG
  source 1..20: mol_type = other DNA
aggctgagaagtccaaagtc

SEQ ID NO: 16706 - DNA, 20 bp, synthetic construct
  misc_feature 1..20: note = Description of Artificial Sequence: Synthetic oligonucleotide
  misc_feature 1..20: note = Target: FXN; (+) strand; PAM type: NRG; PAM sequence: TGG
  source 1..20: mol_type = other DNA
aaagtcaagtcccttcttgc

SEQ ID NO: 16707 - DNA, 20 bp, synthetic construct
  misc_feature 1..20: note = Description of Artificial Sequence: Synthetic oligonucleotide
  misc_feature 1..20: note = Target: FXN; (+) strand; PAM type: NRG; PAM sequence: TGG
  source 1..20: mol_type = other DNA
gtcaagtcccttcttgctgg

SEQ ID NO: 16708 - DNA, 20 bp, synthetic construct
  misc_feature 1..20: note = Description of Artificial Sequence: Synthetic oligonucleotide
  misc_feature 1..20: note = Target: FXN; (+) strand; PAM type: NRG; PAM sequence: GGG
  source 1..20: mol_type = other DNA
tcaagtcccttcttgctggt

SEQ ID NO: 16709 - DNA, 20 bp, synthetic construct
  misc_feature 1..20: note = Description of Artificial Sequence: Synthetic oligonucleotide
  misc_feature 1..20: note = Target: FXN; (+) strand; PAM type: NRG; PAM sequence: GGG
  source 1..20: mol_type = other DNA
caagtcccttcttgctggtg

SEQ ID NO: 16710 - DNA, 20 bp, synthetic construct
  misc_feature 1..20: note = Description of Artificial Sequence: Synthetic oligonucleotide
  misc_feature 1..20: note = Target: FXN; (+) strand; PAM type: NRG; PAM sequence: CAG
  source 1..20: mol_type = other DNA
tcttgctggtggggactttg

SEQ ID NO: 16711 - DNA, 20 bp, synthetic construct
  misc_feature 1..20: note = Description of Artificial Sequence: Synthetic oligonucleotide
  misc_feature 1..20: note = Target: FXN; (+) strand; PAM type: NRG; PAM sequence: GAG
  source 1..20: mol_type = other DNA
ttgctggtggggactttgca

SEQ ID NO: 16712 - DNA, 20 bp, synthetic construct
  misc_feature 1..20: note = Description of Artificial Sequence: Synthetic oligonucleotide
  misc_feature 1..20: note = Target: FXN; (+) strand; PAM type: NRG; PAM sequence: GAG
  source 1..20: mol_type = other DNA
tggggactttgcagagtatt

SEQ ID NO: 16713 - DNA, 20 bp, synthetic construct
  misc_feature 1..20: note = Description of Artificial Sequence: Synthetic oligonucleotide
  misc_feature 1..20: note = Target: FXN; (+) strand; PAM type: NRG; PAM sequence: AGG
  source 1..20: mol_type = other DNA
ggggactttgcagagtattg

SEQ ID NO: 16714 - DNA, 20 bp, synthetic construct
  misc_feature 1..20: note = Description of Artificial Sequence: Synthetic oligonucleotide
  misc_feature 1..20: note = Target: FXN; (+) strand; PAM type: NRG; PAM sequence: CGG
  source 1..20: mol_type = other DNA
gactttgcagagtattgagg

SEQ ID NO: 16715 - DNA, 20 bp, synthetic construct
  misc_feature 1..20: note = Description of Artificial Sequence: Synthetic oligonucleotide
  misc_feature 1..20: note = Target: FXN; (+) strand; PAM type: NRG; PAM sequence: CGG
  source 1..20: mol_type = other DNA
gcagagtattgaggcggcac

SEQ ID NO: 16716 - DNA, 20 bp, synthetic construct
  misc_feature 1..20: note = Description of Artificial Sequence: Synthetic oligonucleotide
  misc_feature 1..20: note = Target: FXN; (+) strand; PAM type: NRG; PAM sequence: GGG
  source 1..20: mol_type = other DNA
cagagtattgaggcggcacc

SEQ ID NO: 16717 - DNA, 20 bp, synthetic construct
  misc_feature 1..20: note = Description of Artificial Sequence: Synthetic oligonucleotide
  misc_feature 1..20: note = Target: FXN; (+) strand; PAM type: NRG; PAM sequence: TGG
  source 1..20: mol_type = other DNA
aggcggcaccgggcgtcata

SEQ ID NO: 16718 - DNA, 20 bp, synthetic construct
  misc_feature 1..20: note = Description of Artificial Sequence: Synthetic oligonucleotide
  misc_feature 1..20: note = Target: FXN; (+) strand; PAM type: NRG; PAM sequence: AAG
  source 1..20: mol_type = other DNA
ggcaccgggcgtcatatggt

SEQ ID NO: 16719 - DNA, 20 bp, synthetic construct
  misc_feature 1..20: note = Description of Artificial Sequence: Synthetic oligonucleotide
  misc_feature 1..20: note = Target: FXN; (+) strand; PAM type: NRG; PAM sequence: AGG
  source 1..20: mol_type = other DNA
gcaccgggcgtcatatggta

SEQ ID NO: 16720 - DNA, 20 bp, synthetic construct
  misc_feature 1..20: note = Description of Artificial Sequence: Synthetic oligonucleotide
  misc_feature 1..20: note = Target: FXN; (+) strand; PAM type: NRG; PAM sequence: GGG
  source 1..20: mol_type = other DNA
caccgggcgtcatatggtaa

SEQ ID NO: 16721 - DNA, 20 bp, synthetic construct
  misc_feature 1..20: note = Description of Artificial Sequence: Synthetic oligonucleotide
  misc_feature 1..20: note = Target: FXN; (+) strand; PAM type: NRG; PAM sequence: GGG
  source 1..20: mol_type = other DNA
accgggcgtcatatggtaag

SEQ ID NO: 16722 - DNA, 20 bp, synthetic construct
  misc_feature 1..20: note = Description of Artificial Sequence: Synthetic oligonucleotide
  misc_feature 1..20: note = Target: FXN; (+) strand; PAM type: NRG; PAM sequence: GAG
  source 1..20: mol_type = other DNA
gcgtcatatggtaaggggct

SEQ ID NO: 16723 - DNA, 20 bp, synthetic construct
  misc_feature 1..20: note = Description of Artificial Sequence: Synthetic oligonucleotide
  misc_feature 1..20: note = Target: FXN; (+) strand; PAM type: NRG; PAM sequence: CAG
  source 1..20: mol_type = other DNA
aggggctgagtgtgctacct

SEQ ID NO: 16724 - DNA, 20 bp, synthetic construct
  misc_feature 1..20: note = Description of Artificial Sequence: Synthetic oligonucleotide
  misc_feature 1..20: note = Target: FXN; (+) strand; PAM type: NRG; PAM sequence: AGG
  source 1..20: mol_type = other DNA
ggggctgagtgtgctacctc

SEQ ID NO: 16725 - DNA, 20 bp, synthetic construct
  misc_feature 1..20: note = Description of Artificial Sequence: Synthetic oligonucleotide
  misc_feature 1..20: note = Target: FXN; (+) strand; PAM type: NRG; PAM sequence: AAG
  source 1..20: mol_type = other DNA
tgtctttttcttttcttata

SEQ ID NO: 16726 - DNA, 20 bp, synthetic construct
  misc_feature 1..20: note = Description of Artificial Sequence: Synthetic oligonucleotide
  misc_feature 1..20: note = Target: FXN; (+) strand; PAM type: NRG; PAM sequence: TAG
  source 1..20: mol_type = other DNA
cttttcttataaagcctaac

SEQ ID NO: 16727 - DNA, 20 bp, synthetic construct
  misc_feature 1..20: note = Description of Artificial Sequence: Synthetic oligonucleotide
  misc_feature 1..20: note = Target: FXN; (+) strand; PAM type: NRG; PAM sequence: TGG
  source 1..20: mol_type = other DNA
ataacccattaatctatgaa

SEQ ID NO: 16728 - DNA, 20 bp, synthetic construct
  misc_feature 1..20: note = Description of Artificial Sequence: Synthetic oligonucleotide
  misc_feature 1..20: note = Target: FXN; (+) strand; PAM type: NRG; PAM sequence: GAG
  source 1..20: mol_type = other DNA
gaatggattaatccattatt

SEQ ID NO: 16729 - DNA, 20 bp, synthetic construct
  misc_feature 1..20: note = Description of Artificial Sequence: Synthetic oligonucleotide
  misc_feature 1..20: note = Target: FXN; (+) strand; PAM type: NRG; PAM sequence: AGG
  source 1..20: mol_type = other DNA
aatggattaatccattattg

SEQ ID NO: 16730 - DNA, 20 bp, synthetic construct
  misc_feature 1..20: note = Description of Artificial Sequence: Synthetic oligonucleotide
  misc_feature 1..20: note = Target: FXN; (+) strand; PAM type: NRG; PAM sequence: GGG
  source 1..20: mol_type = other DNA
atggattaatccattattga

SEQ ID NO: 16731 - DNA, 20 bp, synthetic construct
  misc_feature 1..20: note = Description of Artificial Sequence: Synthetic oligonucleotide
  misc_feature 1..20: note = Target: FXN; (+) strand; PAM type: NRG; PAM sequence: AAG
  source 1..20: mol_type = other DNA
gattaatccattattgaggg

SEQ ID NO: 16732 - DNA, 20 bp, synthetic construct
  misc_feature 1..20: note = Description of Artificial Sequence: Synthetic oligonucleotide
  misc_feature 1..20: note = Target: FXN; (+) strand; PAM type: NRG; PAM sequence: CAG
  source 1..20: mol_type = other DNA
agggaagaaccttcatgacc

SEQ ID NO: 16733 - DNA, 20 bp, synthetic construct
  misc_feature 1..20: note = Description of Artificial Sequence: Synthetic oligonucleotide
  misc_feature 1..20: note = Target: FXN; (+) strand; PAM type: NRG; PAM sequence: AAG
  source 1..20: mol_type = other DNA
catgacccagtcaccgctta

SEQ ID NO: 16734 - DNA, 20 bp, synthetic construct
  misc_feature 1..20: note = Description of Artificial Sequence: Synthetic oligonucleotide
  misc_feature 1..20: note = Target: FXN; (+) strand; PAM type: NRG; PAM sequence: AGG
  source 1..20: mol_type = other DNA
atgacccagtcaccgcttaa

SEQ ID NO: 16735 - DNA, 20 bp, synthetic construct
  misc_feature 1..20: note = Description of Artificial Sequence: Synthetic oligonucleotide
  misc_feature 1..20: note = Target: FXN; (+) strand; PAM type: NRG; PAM sequence: CGG
  source 1..20: mol_type = other DNA
acctctcaatactgccacat

SEQ ID NO: 16736 - DNA, 20 bp, synthetic construct
  misc_feature 1..20: note = Description of Artificial Sequence: Synthetic oligonucleotide
  misc_feature 1..20: note = Target: FXN; (+) strand; PAM type: NRG; PAM sequence: GGG
  source 1..20: mol_type = other DNA
cctctcaatactgccacatc

SEQ ID NO: 16737 - DNA, 20 bp, synthetic construct
  misc_feature 1..20: note = Description of Artificial Sequence: Synthetic oligonucleotide
  misc_feature 1..20: note = Target: FXN; (+) strand; PAM type: NRG; PAM sequence: AAG
  source 1..20: mol_type = other DNA
atactgccacatcgggaatt

SEQ ID NO: 16738 - DNA, 20 bp, synthetic construct
  misc_feature 1..20: note = Description of Artificial Sequence: Synthetic oligonucleotide
  misc_feature 1..20: note = Target: FXN; (+) strand; PAM type: NRG; PAM sequence: GAG
  source 1..20: mol_type = other DNA
cgggaattaagtttcaacat

SEQ ID NO: 16739 - DNA, 20 bp, synthetic construct
  misc_feature 1..20: note = Description of Artificial Sequence: Synthetic oligonucleotide
  misc_feature 1..20: note = Target: FXN; (+) strand; PAM type: NRG; PAM sequence: CGG
  source 1..20: mol_type = other DNA
ttaagtttcaacatgagttt

SEQ ID NO: 16740 - DNA, 20 bp, synthetic construct
  misc_feature 1..20: note = Description of Artificial Sequence: Synthetic oligonucleotide
  misc_feature 1..20: note = Target: FXN; (+) strand; PAM type: NRG; PAM sequence: GAG
  source 1..20: mol_type = other DNA
aagtttcaacatgagtttcg

SEQ ID NO: 16741 - DNA, 20 bp, synthetic construct
  misc_feature 1..20: note = Description of Artificial Sequence: Synthetic oligonucleotide
  misc_feature 1..20: note = Target: FXN; (+) strand; PAM type: NRG; PAM sequence: AGG
  source 1..20: mol_type = other DNA
agtttcaacatgagtttcgg

SEQ ID NO: 16742 - DNA, 20 bp, synthetic construct
  misc_feature 1..20: note = Description of Artificial Sequence: Synthetic oligonucleotide
  misc_feature 1..20: note = Target: FXN; (+) strand; PAM type: NRG; PAM sequence: TAG
  source 1..20: mol_type = other DNA
ggtgacaaacattcaaacca

SEQ ID NO: 16743 - DNA, 20 bp, synthetic construct
  misc_feature 1..20: note = Description of Artificial Sequence: Synthetic oligonucleotide
  misc_feature 1..20: note = Target: FXN; (+) strand; PAM type: NRG; PAM sequence: AAG
  source 1..20: mol_type = other DNA
tgtctcttaaatgactcaat

SEQ ID NO: 16744 - DNA, 20 bp, synthetic construct
  misc_feature 1..20: note = Description of Artificial Sequence: Synthetic oligonucleotide
  misc_feature 1..20: note = Target: FXN; (+) strand; PAM type: NRG; PAM sequence: TGG
  source 1..20: mol_type = other DNA
aatgactcaataagctcctg

SEQ ID NO: 16745 - DNA, 20 bp, synthetic construct
  misc_feature 1..20: note = Description of Artificial Sequence: Synthetic oligonucleotide
  misc_feature 1..20: note = Target: FXN; (+) strand; PAM type: NRG; PAM sequence: TGG
  source 1..20: mol_type = other DNA
gcatccacttctgcatgcct

SEQ ID NO: 16746 - DNA, 20 bp, synthetic construct
  misc_feature 1..20: note = Description of Artificial Sequence: Synthetic oligonucleotide
  misc_feature 1..20: note = Target: FXN; (+) strand; PAM type: NRG; PAM sequence: GGG
  source 1..20: mol_type = other DNA
catccacttctgcatgcctt

SEQ ID NO: 16747 - DNA, 20 bp, synthetic construct
  misc_feature 1..20: note = Description of Artificial Sequence: Synthetic oligonucleotide
  misc_feature 1..20: note = Target: FXN; (+) strand; PAM type: NRG; PAM sequence: CAG
  source 1..20: mol_type = other DNA
ccacttctgcatgccttggg

SEQ ID NO: 16748 - DNA, 20 bp, synthetic construct
  misc_feature 1..20: note = Description of Artificial Sequence: Synthetic oligonucleotide
  misc_feature 1..20: note = Target: FXN; (+) strand; PAM type: NRG; PAM sequence: TAG
  source 1..20: mol_type = other DNA
tgcatgccttgggcagcttt

SEQ ID NO: 16749 - DNA, 20 bp, synthetic construct
  misc_feature 1..20: note = Description of Artificial Sequence: Synthetic oligonucleotide
  misc_feature 1..20: note = Target: FXN; (+) strand; PAM type: NRG; PAM sequence: TAG
  source 1..20: mol_type = other DNA
tagacatctgtccattttcc

SEQ ID NO: 16750 - DNA, 20 bp, synthetic construct
  misc_feature 1..20: note = Description of Artificial Sequence: Synthetic oligonucleotide
  misc_feature 1..20: note = Target: FXN; (+) strand; PAM type: NRG; PAM sequence: GAG
  source 1..20: mol_type = other DNA
gacatctgtccattttccta

SEQ ID NO: 16751 - DNA, 20 bp, synthetic construct
  misc_feature 1..20: note = Description of Artificial Sequence: Synthetic oligonucleotide
  misc_feature 1..20: note = Target: FXN; (+) strand; PAM type: NRG; PAM sequence: AGG
  source 1..20: mol_type = other DNA
acatctgtccattttcctag

SEQ ID NO: 16752 - DNA, 20 bp, synthetic construct
  misc_feature 1..20: note = Description of Artificial Sequence: Synthetic oligonucleotide
  misc_feature 1..20: note = Target: FXN; (+) strand; PAM type: NRG; PAM sequence: GGG
  source 1..20: mol_type = other DNA
catctgtccattttcctaga

SEQ ID NO: 16753 - DNA, 20 bp, synthetic construct
  misc_feature 1..20: note = Description of Artificial Sequence: Synthetic oligonucleotide
  misc_feature 1..20: note = Target: FXN; (+) strand; PAM type: NRG; PAM sequence: AAG
  source 1..20: mol_type = other DNA
gtccattttcctagagggac

SEQ ID NO: 16754 - DNA, 20 bp, synthetic construct
  misc_feature 1..20: note = Description of Artificial Sequence: Synthetic oligonucleotide
  misc_feature 1..20: note = Target: FXN; (+) strand; PAM type: NRG; PAM sequence: TGG
  source 1..20: mol_type = other DNA
cctgtgatcctatgaccttt

SEQ ID NO: 16755 - DNA, 20 bp, synthetic construct
  misc_feature 1..20: note = Description of Artificial Sequence: Synthetic oligonucleotide
  misc_feature 1..20: note = Target: FXN; (+) strand; PAM type: NRG; PAM sequence: TAG
  source 1..20: mol_type = other DNA
atcctatgaccttttggctt

SEQ ID NO: 16756 - DNA, 20 bp, synthetic construct
  misc_feature 1..20: note = Description of Artificial Sequence: Synthetic oligonucleotide
  misc_feature 1..20: note = Target: FXN; (+) strand; PAM type: NRG; PAM sequence: AGG
  source 1..20: mol_type = other DNA
tcctatgaccttttggcttt

SEQ ID NO: 16757 - DNA, 20 bp, synthetic construct
  misc_feature 1..20: note = Description of Artificial Sequence: Synthetic oligonucleotide
  misc_feature 1..20: note = Target: FXN; (+) strand; PAM type: NRG; PAM sequence: AAG
  source 1..20: mol_type = other DNA
cttttggctttaggcctaac

SEQ ID NO: 16758 - DNA, 20 bp, synthetic construct
  misc_feature 1..20: note = Description of Artificial Sequence: Synthetic oligonucleotide
  misc_feature 1..20: note = Target: FXN; (+) strand; PAM type: NRG; PAM sequence: CAG
  source 1..20: mol_type = other DNA
ttggctttaggcctaacaag

SEQ ID NO: 16759 - DNA, 20 bp, synthetic construct
  misc_feature 1..20: note = Description of Artificial Sequence: Synthetic oligonucleotide
  misc_feature 1..20: note = Target: FXN; (+) strand; PAM type: NRG; PAM sequence: AGG
  source 1..20: mol_type = other DNA
tggctttaggcctaacaagc

SEQ ID NO: 16760 - DNA, 20 bp, synthetic construct
  misc_feature 1..20: note = Description of Artificial Sequence: Synthetic oligonucleotide
  misc_feature 1..20: note = Target: FXN; (+) strand; PAM type: NRG; PAM sequence: CAG
  source 1..20: mol_type = other DNA
aaatcatttttattgtcttg

SEQ ID NO: 16761 - DNA, 20 bp, synthetic construct
  misc_feature 1..20: note = Description of Artificial Sequence: Synthetic oligonucleotide
  misc_feature 1..20: note = Target: FXN; (+) strand; PAM type: NRG; PAM sequence: AAG
  source 1..20: mol_type = other DNA
gtcttgcagacaatttacac

SEQ ID NO: 16762 - DNA, 20 bp, synthetic construct
  misc_feature 1..20: note = Description of Artificial Sequence: Synthetic oligonucleotide
  misc_feature 1..20: note = Target: FXN; (+) strand; PAM type: NRG; PAM sequence: TAG
  source 1..20: mol_type = other DNA
aatttacacaagtttacaca

SEQ ID NO: 16763 - DNA, 20 bp, synthetic construct
  misc_feature 1..20: note = Description of Artificial Sequence: Synthetic oligonucleotide
  misc_feature 1..20: note = Target: FXN; (+) strand; PAM type: NRG; PAM sequence: AAG
  source 1..20: mol_type = other DNA
acacaagtttacacatagaa

SEQ ID NO: 16764 - DNA, 20 bp, synthetic construct
  misc_feature 1..20: note = Description of Artificial Sequence: Synthetic oligonucleotide
  misc_feature 1..20: note = Target: FXN; (+) strand; PAM type: NRG; PAM sequence: AGG
  source 1..20: mol_type = other DNA
cacaagtttacacatagaaa

SEQ ID NO: 16765 - DNA, 20 bp, synthetic construct
  misc_feature 1..20: note = Description of Artificial Sequence: Synthetic oligonucleotide
  misc_feature 1..20: note = Target: FXN; (+) strand; PAM type: NRG; PAM sequence: CGG
  source 1..20: mol_type = other DNA
tgtaaatatttatacgctgc

SEQ ID NO: 16766 - DNA, 20 bp, synthetic construct
  misc_feature 1..20: note = Description of Artificial Sequence: Synthetic oligonucleotide
  misc_feature 1..20: note = Target: FXN; (+) strand; PAM type: NRG; PAM sequence: GGG
  source 1..20: mol_type = other DNA
gtaaatatttatacgctgcc

SEQ ID NO: 16767 - DNA, 20 bp, synthetic construct
  misc_feature 1..20: note = Description of Artificial Sequence: Synthetic oligonucleotide
  misc_feature 1..20: note = Target: FXN; (+) strand; PAM type: NRG; PAM sequence: CGG
  source 1..20: mol_type = other DNA
tatttatacgctgccgggcg

SEQ ID NO: 16768 - DNA, 20 bp, synthetic construct
  misc_feature 1..20: note = Description of Artificial Sequence: Synthetic oligonucleotide
  misc_feature 1..20: note = Target: FXN; (+) strand; PAM type: NRG; PAM sequence: TGG
  source 1..20: mol_type = other DNA
ttatacgctgccgggcgcgg

SEQ ID NO: 16769 - DNA, 20 bp, synthetic construct
  misc_feature 1..20: note = Description of Artificial Sequence: Synthetic oligonucleotide
  misc_feature 1..20: note = Target: FXN; (+) strand; PAM type: NRG; PAM sequence: CAG
  source 1..20: mol_type = other DNA
gtggctcacgcctgtaatcc

SEQ ID NO: 16770 - DNA, 20 bp, synthetic construct
  misc_feature 1..20: note = Description of Artificial Sequence: Synthetic oligonucleotide
  misc_feature 1..20: note = Target: FXN; (+) strand; PAM type: NRG; PAM sequence: TGG
  source 1..20: mol_type = other DNA
cgcctgtaatcccagcactt

SEQ ID NO: 16771 - DNA, 20 bp, synthetic construct
  misc_feature 1..20: note = Description of Artificial Sequence: Synthetic oligonucleotide
  misc_feature 1..20: note = Target: FXN; (+) strand; PAM type: NRG; PAM sequence: GGG
  source 1..20: mol_type = other DNA
gcctgtaatcccagcacttt

SEQ ID NO: 16772 - DNA, 20 bp, synthetic construct
  misc_feature 1..20: note = Description of Artificial Sequence: Synthetic oligonucleotide
  misc_feature 1..20: note = Target: FXN; (+) strand; PAM type: NRG; PAM sequence: GAG
  source 1..20: mol_type = other DNA
ctgtaatcccagcactttgg

SEQ ID NO: 16773 - DNA, 20 bp, synthetic construct
  misc_feature 1..20: note = Description of Artificial Sequence: Synthetic oligonucleotide
  misc_feature 1..20: note = Target: FXN; (+) strand; PAM type: NRG; PAM sequence: AGG
  source 1..20: mol_type = other DNA
tgtaatcccagcactttggg

SEQ ID NO: 16774 - DNA, 20 bp, synthetic construct
  misc_feature 1..20: note = Description of Artificial Sequence: Synthetic oligonucleotide
  misc_feature 1..20: note = Target: FXN; (+) strand; PAM type: NRG; PAM sequence: GAG
  source 1..20: mol_type = other DNA
tcccagcactttgggaggcc

SEQ ID NO: 16775 - DNA, 20 bp, synthetic construct
  misc_feature 1..20: note = Description of Artificial Sequence: Synthetic oligonucleotide
  misc_feature 1..20: note = Target: FXN; (+) strand; PAM type: NRG; PAM sequence: AGG
  source 1..20: mol_type = other DNA
cccagcactttgggaggccg

SEQ ID NO: 16776 - DNA, 20 bp, synthetic construct
  misc_feature 1..20: note = Description of Artificial Sequence: Synthetic oligonucleotide
  misc_feature 1..20: note = Target: FXN; (+) strand; PAM type: NRG; PAM sequence: CAG
  source 1..20: mol_type = other DNA
agcactttgggaggccgagg

SEQ ID NO: 16777 - DNA, 20 bp, synthetic construct
  misc_feature 1..20: note = Description of Artificial Sequence: Synthetic oligonucleotide
  misc_feature 1..20: note = Target: FXN; (+) strand; PAM type: NRG; PAM sequence: AGG
  source 1..20: mol_type = other DNA
gcactttgggaggccgaggc

SEQ ID NO: 16778 - DNA, 20 bp, synthetic construct
  misc_feature 1..20: note = Description of Artificial Sequence: Synthetic oligonucleotide
  misc_feature 1..20: note = Target: FXN; (+) strand; PAM type: NRG; PAM sequence: TGG
  source 1..20: mol_type = other DNA
ctttgggaggccgaggcagg

SEQ ID NO: 16779 - DNA, 20 bp, synthetic construct
  misc_feature 1..20: note = Description of Artificial Sequence: Synthetic oligonucleotide
  misc_feature 1..20: note = Target: FXN; (+) strand; PAM type: NRG; PAM sequence: GAG
  source 1..20: mol_type = other DNA
ggccgaggcaggtggatcac

SEQ ID NO: 16780 - DNA, 20 bp, synthetic construct
  misc_feature 1..20: note = Description of Artificial Sequence: Synthetic oligonucleotide
  misc_feature 1..20: note = Target: FXN; (+) strand; PAM type: NRG; PAM sequence: CAG
  source 1..20: mol_type = other DNA
aggcaggtggatcacgagtt

SEQ ID NO: 16781 - DNA, 20 bp, synthetic construct
  misc_feature 1..20: note = Description of Artificial Sequence: Synthetic oligonucleotide
  misc_feature 1..20: note = Target: FXN; (+) strand; PAM type: NRG; PAM sequence: AGG
  source 1..20: mol_type = other DNA
ggcaggtggatcacgagttc

SEQ ID NO: 16782 - DNA, 20 bp, synthetic construct
  misc_feature 1..20: note = Description of Artificial Sequence: Synthetic oligonucleotide
  misc_feature 1..20: note = Target: FXN; (+) strand; PAM type: NRG; PAM sequence: GAG
  source 1..20: mol_type = other DNA
caggtggatcacgagttcag

SEQ ID NO: 16783 - DNA, 20 bp, synthetic construct
  misc_feature 1..20: note = Description of Artificial Sequence: Synthetic oligonucleotide
  misc_feature 1..20: note = Target: FXN; (+) strand; PAM type: NRG; PAM sequence: TGG
  source 1..20: mol_type = other DNA
tggatcacgagttcaggaga

SEQ ID NO: 16784 - DNA, 20 bp, synthetic construct
  misc_feature 1..20: note = Description of Artificial Sequence: Synthetic oligonucleotide
  misc_feature 1..20: note = Target: FXN; (+) strand; PAM type: NRG; PAM sequence: GAG
  source 1..20: mol_type = other DNA
gatcacgagttcaggagatg

SEQ ID NO: 16785 - DNA, 20 bp, synthetic construct
  misc_feature 1..20: note = Description of Artificial Sequence: Synthetic oligonucleotide
  misc_feature 1..20: note = Target: FXN; (+) strand; PAM type: NRG; PAM sequence: TGG
  source 1..20: mol_type = other DNA
tcaggagatggagaccatcc

SEQ ID NO: 16786 - DNA, 20 bp, synthetic construct
  misc_feature 1..20: note = Description of Artificial Sequence: Synthetic oligonucleotide
  misc_feature 1..20: note = Target: FXN; (+) strand; PAM type: NRG; PAM sequence: TAG
  source 1..20: mol_type = other DNA
ctactaaaaatacaaaaaat

SEQ ID NO: 16787 - DNA, 20 bp, synthetic construct
  misc_feature 1..20: note = Description of Artificial Sequence: Synthetic oligonucleotide
  misc_feature 1..20: note = Target: FXN; (+) strand; PAM type: NRG; PAM sequence: CGG
  source 1..20: mol_type = other DNA
taaaaatacaaaaaattagc

SEQ ID NO: 16788 - DNA, 20 bp, synthetic construct
  misc_feature 1..20: note = Description of Artificial Sequence: Synthetic oligonucleotide
  misc_feature 1..20: note = Target: FXN; (+) strand; PAM type: NRG; PAM sequence: GGG
  source 1..20: mol_type = other DNA
aaaaatacaaaaaattagcc

SEQ ID NO: 16789 - DNA, 20 bp, synthetic construct
  misc_feature 1..20: note = Description of Artificial Sequence: Synthetic oligonucleotide
  misc_feature 1..20: note = Target: FXN; (+) strand; PAM type: NRG; PAM sequence: TGG
  source 1..20: mol_type = other DNA
tacaaaaaattagccgggcg

SEQ ID NO: 16790 - DNA, 20 bp, synthetic construct
  misc_feature 1..20: note = Description of Artificial Sequence: Synthetic oligonucleotide
  misc_feature 1..20: note = Target: FXN; (+) strand; PAM type: NRG; PAM sequence: CGG
  source 1..20: mol_type = other DNA
aaattagccgggcgtggtga

SEQ ID NO: 16791 - DNA, 20 bp, synthetic construct
  misc_feature 1..20: note = Description of Artificial Sequence: Synthetic oligonucleotide
  misc_feature 1..20: note = Target: FXN; (+) strand; PAM type: NRG; PAM sequence: GGG
  source 1..20: mol_type = other DNA
aattagccgggcgtggtgac

SEQ ID NO: 16792 - DNA, 20 bp, synthetic construct
  misc_feature 1..20: note = Description of Artificial Sequence: Synthetic oligonucleotide
  misc_feature 1..20: note = Target: FXN; (+) strand; PAM type: NRG; PAM sequence: TAG
  source 1..20: mol_type = other DNA
ggcgtggtgacgggtgcctg

SEQ ID NO: 16793 - DNA, 20 bp, synthetic construct
  misc_feature 1..20: note = Description of Artificial Sequence: Synthetic oligonucleotide
  misc_feature 1..20: note = Target: FXN; (+) strand; PAM type: NRG; PAM sequence: CGG
  source 1..20: mol_type = other DNA
tgcctgtagtccccactact

SEQ ID NO: 16794 - DNA, 20 bp, synthetic construct
  misc_feature 1..20: note = Description of Artificial Sequence: Synthetic oligonucleotide
  misc_feature 1..20: note = Target: FXN; (+) strand; PAM type: NRG; PAM sequence: GGG
  source 1..20: mol_type = other DNA
gcctgtagtccccactactc

SEQ ID NO: 16795 - DNA, 20 bp, synthetic construct
  misc_feature 1..20: note = Description of Artificial Sequence: Synthetic oligonucleotide
  misc_feature 1..20: note = Target: FXN; (+) strand; PAM type: NRG; PAM sequence: GAG
  source 1..20: mol_type = other DNA
tccccactactcgggacgct

SEQ ID NO: 16796 - DNA, 20 bp, synthetic construct
  misc_feature 1..20: note = Description of Artificial Sequence: Synthetic oligonucleotide
  misc_feature 1..20: note = Target: FXN; (+) strand; PAM type: NRG; PAM sequence: AGG
  source 1..20: mol_type = other DNA
ccccactactcgggacgctg

SEQ ID NO: 16797 - DNA, 20 bp, synthetic construct
  misc_feature 1..20: note = Description of Artificial Sequence: Synthetic oligonucleotide
  misc_feature 1..20: note = Target: FXN; (+) strand; PAM type: NRG; PAM sequence: CAG
  source 1..20: mol_type = other DNA
cactactcgggacgctgagg

SEQ ID NO: 16798 - DNA, 20 bp, synthetic construct
  misc_feature 1..20: note = Description of Artificial Sequence: Synthetic oligonucleotide
  misc_feature 1..20: note = Target: FXN; (+) strand; PAM type: NRG; PAM sequence: AGG
  source 1..20: mol_type = other DNA
actactcgggacgctgaggc

SEQ ID NO: 16799 - DNA, 20 bp, synthetic construct
  misc_feature 1..20: note = Description of Artificial Sequence: Synthetic oligonucleotide
  misc_feature 1..20: note = Target: FXN; (+) strand; PAM type: NRG; PAM sequence: GAG
  source 1..20: mol_type = other DNA
tactcgggacgctgaggcag

SEQ ID NO: 16800 - DNA, 20 bp, synthetic construct
  misc_feature 1..20: note = Description of Artificial Sequence: Synthetic oligonucleotide
  misc_feature 1..20: note = Target: FXN; (+) strand; PAM type: NRG; PAM sequence: TGG
  source 1..20: mol_type = other DNA
gggacgctgaggcaggagaa

SEQ ID NO: 16801 - DNA, 20 bp, synthetic construct
  misc_feature 1..20: note = Description of Artificial Sequence: Synthetic oligonucleotide
  misc_feature 1..20: note = Target: FXN; (+) strand; PAM type: NRG; PAM sequence: CGG
  source 1..20: mol_type = other DNA
gcaggagaatggcgtgaacc

SEQ ID NO: 16802 - DNA, 20 bp, synthetic construct
  misc_feature 1..20: note = Description of Artificial Sequence: Synthetic oligonucleotide
  misc_feature 1..20: note = Target: FXN; (+) strand; PAM type: NRG; PAM sequence: GGG
  source 1..20: mol_type = other DNA
caggagaatggcgtgaaccc

SEQ ID NO: 16803 - DNA, 20 bp, synthetic construct
  misc_feature 1..20: note = Description of Artificial Sequence: Synthetic oligonucleotide
  misc_feature 1..20: note = Target: FXN; (+) strand; PAM type: NRG; PAM sequence: GAG
  source 1..20: mol_type = other DNA
ggagaatggcgtgaacccgg

SEQ ID NO: 16804 - DNA, 20 bp, synthetic construct
  misc_feature 1..20: note = Description of Artificial Sequence: Synthetic oligonucleotide
  misc_feature 1..20: note = Target: FXN; (+) strand; PAM type: NRG; PAM sequence: AGG
  source 1..20: mol_type = other DNA
gagaatggcgtgaacccggg

SEQ ID NO: 16805 - DNA, 20 bp, synthetic construct
  misc_feature 1..20: note = Description of Artificial Sequence: Synthetic oligonucleotide
  misc_feature 1..20: note = Target: FXN; (+) strand; PAM type: NRG; PAM sequence: CAG
  source 1..20: mol_type = other DNA
aatggcgtgaacccgggagg

SEQ ID NO: 16806 - DNA, 20 bp, synthetic construct
  misc_feature 1..20: note = Description of Artificial Sequence: Synthetic oligonucleotide
  misc_feature 1..20: note = Target: FXN; (+) strand; PAM type: NRG; PAM sequence: GAG
  source 1..20: mol_type = other DNA
tggcgtgaacccgggaggca

SEQ ID NO: 16807 - DNA, 20 bp, synthetic construct
  misc_feature 1..20: note = Description of Artificial Sequence: Synthetic oligonucleotide
  misc_feature 1..20: note = Target: FXN; (+) strand; PAM type: NRG; PAM sequence: CAG
  source 1..20: mol_type = other DNA
aacccgggaggcagagcttg

SEQ ID NO: 16808 - DNA, 20 bp, synthetic construct
  misc_feature 1..20: note = Description of Artificial Sequence: Synthetic oligonucleotide
  misc_feature 1..20: note = Target: FXN; (+) strand; PAM type: NRG; PAM sequence: GAG
  source 1..20: mol_type = other DNA
ggcagagcttgcagtgatcc

SEQ ID NO: 16809 - DNA, 20 bp, synthetic construct
  misc_feature 1..20: note = Description of Artificial Sequence: Synthetic oligonucleotide
  misc_feature 1..20: note = Target: FXN; (+) strand; PAM type: NRG; PAM sequence: CAG
  source 1..20: mol_type = other DNA
gagatcgtgccactgcactc

SEQ ID NO: 16810 - DNA, 20 bp, synthetic construct
  misc_feature 1..20: note = Description of Artificial Sequence: Synthetic oligonucleotide
  misc_feature 1..20: note = Target: FXN; (+) strand; PAM type: NRG; PAM sequence: TGG
  source 1..20: mol_type = other DNA
cgtgccactgcactccagcc

SEQ ID NO: 16811 - DNA, 20 bp, synthetic construct
  misc_feature 1..20: note = Description of Artificial Sequence: Synthetic oligonucleotide
  misc_feature 1..20: note = Target: FXN; (+) strand; PAM type: NRG; PAM sequence: GGG
  source 1..20: mol_type = other DNA
gtgccactgcactccagcct

SEQ ID NO: 16812 - DNA, 20 bp, synthetic construct
  misc_feature 1..20: note = Description of Artificial Sequence: Synthetic oligonucleotide
  misc_feature 1..20: note = Target: FXN; (+) strand; PAM type: NRG; PAM sequence: CAG
  source 1..20: mol_type = other DNA
ctgcactccagcctgggtga

SEQ ID NO: 16813 - DNA, 20 bp, synthetic construct
  misc_feature 1..20: note = Description of Artificial Sequence: Synthetic oligonucleotide
  misc_feature 1..20: note = Target: FXN; (+) strand; PAM type: NRG; PAM sequence: GAG
  source 1..20: mol_type = other DNA
gcactccagcctgggtgaca

SEQ ID NO: 16814 - DNA, 20 bp, synthetic construct
  misc_feature 1..20: note = Description of Artificial Sequence: Synthetic oligonucleotide
  misc_feature 1..20: note = Target: FXN; (+) strand; PAM type: NRG; PAM sequence: GAG
  source 1..20: mol_type = other DNA
tccagcctgggtgacagagc

SEQ ID NO: 16815 - DNA, 20 bp, synthetic construct
  misc_feature 1..20: note = Description of Artificial Sequence: Synthetic oligonucleotide
  misc_feature 1..20: note = Target: FXN; (+) strand; PAM type: NRG; PAM sequence: AAG
  source 1..20: mol_type = other DNA
cagagcgagactgcatctca

SEQ ID NO: 16816 - DNA, 20 bp, synthetic construct
  misc_feature 1..20: note = Description of Artificial Sequence: Synthetic oligonucleotide
  misc_feature 1..20: note = Target: FXN; (+) strand; PAM type: NRG; PAM sequence: TGG
  source 1..20: mol_type = other DNA
taaactaataataaatgcta

SEQ ID NO: 16817 - DNA, 20 bp, synthetic construct
  misc_feature 1..20: note = Description of Artificial Sequence: Synthetic oligonucleotide
  misc_feature 1..20: note = Target: FXN; (+) strand; PAM type: NRG; PAM sequence: AAG
  source 1..20: mol_type = other DNA
atgttaaaacctaatcacca

SEQ ID NO: 16818 - DNA, 20 bp, synthetic construct
  misc_feature 1..20: note = Description of Artificial Sequence: Synthetic oligonucleotide
  misc_feature 1..20: note = Target: FXN; (+) strand; PAM type: NRG; PAM sequence: TAG
  source 1..20: mol_type = other DNA
cctaatcaccaaagtgatat

SEQ ID NO: 16819 - DNA, 20 bp, synthetic construct
  misc_feature 1..20: note = Description of Artificial Sequence: Synthetic oligonucleotide
  misc_feature 1..20: note = Target: FXN; (+) strand; PAM type: NRG; PAM sequence: AGG
  source 1..20: mol_type = other DNA
ctaatcaccaaagtgatatt

SEQ ID NO: 16820 - DNA, 20 bp, synthetic construct
  misc_feature 1..20: note = Description of Artificial Sequence: Synthetic oligonucleotide
  misc_feature 1..20: note = Target: FXN; (+) strand; PAM type: NRG; PAM sequence: GAG
  source 1..20: mol_type = other DNA
aatcaccaaagtgatattag

SEQ ID NO: 16821 - DNA, 20 bp, synthetic construct
  misc_feature 1..20: note = Description of Artificial Sequence: Synthetic oligonucleotide
  misc_feature 1..20: note = Target: FXN; (+) strand; PAM type: NRG; PAM sequence: AGG
  source 1..20: mol_type = other DNA
atcaccaaagtgatattagg

SEQ ID NO: 16822 - DNA, 20 bp, synthetic construct
  misc_feature 1..20: note = Description of Artificial Sequence: Synthetic oligonucleotide
  misc_feature 1..20: note = Target: FXN; (+) strand; PAM type: NRG; PAM sequence: TGG
  source 1..20: mol_type = other DNA
accaaagtgatattaggagg

SEQ ID NO: 16823 - DNA, 20 bp, synthetic construct
  misc_feature 1..20: note = Description of Artificial Sequence: Synthetic oligonucleotide
  misc_feature 1..20: note = Target: FXN; (+) strand; PAM type: NRG; PAM sequence: GGG
  source 1..20: mol_type = other DNA
ccaaagtgatattaggaggt

SEQ ID NO: 16824 - DNA, 20 bp, synthetic construct
  misc_feature 1..20: note = Description of Artificial Sequence: Synthetic oligonucleotide
  misc_feature 1..20: note = Target: FXN; (+) strand; PAM type: NRG; PAM sequence: GGG
  source 1..20: mol_type = other DNA
caaagtgatattaggaggtg

SEQ ID NO: 16825 - DNA, 20 bp, synthetic construct
  misc_feature 1..20: note = Description of Artificial Sequence: Synthetic oligonucleotide
  misc_feature 1..20: note = Target: FXN; (+) strand; PAM type: NRG; PAM sequence: TGG
  source 1..20: mol_type = other DNA
atattaggaggtggggccct

SEQ ID NO: 16826 - DNA, 20 bp, synthetic construct
  misc_feature 1..20: note = Description of Artificial Sequence: Synthetic oligonucleotide
  misc_feature 1..20: note = Target: FXN; (+) strand; PAM type: NRG; PAM sequence: GGG
  source 1..20: mol_type = other DNA
tattaggaggtggggccctt

SEQ ID NO: 16827 - DNA, 20 bp, synthetic construct
  misc_feature 1..20: note = Description of Artificial Sequence: Synthetic oligonucleotide
  misc_feature 1..20: note = Target: FXN; (+) strand; PAM type: NRG; PAM sequence: GAG
  source 1..20: mol_type = other DNA
ttaggaggtggggcccttgg

SEQ ID NO: 16828 - DNA, 20 bp, synthetic construct
  misc_feature 1..20: note = Description of Artificial Sequence: Synthetic oligonucleotide
  misc_feature 1..20: note = Target: FXN; (+) strand; PAM type: NRG; PAM sequence: AGG
  source 1..20: mol_type = other DNA
taggaggtggggcccttggg

SEQ ID NO: 16829 - DNA, 20 bp, synthetic construct
  misc_feature 1..20: note = Description of Artificial Sequence: Synthetic oligonucleotide
  misc_feature 1..20: note = Target: FXN; (+) strand; PAM type: NRG; PAM sequence: GAG
  source 1..20: mol_type = other DNA
tggggcccttgggaggtgat

SEQ ID NO: 16830 - DNA, 20 bp, synthetic construct
  misc_feature 1..20: note = Description of Artificial Sequence: Synthetic oligonucleotide
  misc_feature 1..20: note = Target: FXN; (+) strand; PAM type: NRG; PAM sequence: AGG
  source 1..20: mol_type = other DNA
ggggcccttgggaggtgatg

SEQ ID NO: 16831 - DNA, 20 bp, synthetic construct
  misc_feature 1..20: note = Description of Artificial Sequence: Synthetic oligonucleotide
  misc_feature 1..20: note = Target: FXN; (+) strand; PAM type: NRG; PAM sequence: GAG
  source 1..20: mol_type = other DNA
cttgggaggtgatgaggtat

SEQ ID NO: 16832 - DNA, 20 bp, synthetic construct
  misc_feature 1..20: note = Description of Artificial Sequence: Synthetic oligonucleotide
  misc_feature 1..20: note = Target: FXN; (+) strand; PAM type: NRG; PAM sequence: AGG
  source 1..20: mol_type = other DNA
ttgggaggtgatgaggtatg

SEQ ID NO: 16833 - DNA, 20 bp, synthetic construct
  misc_feature 1..20: note = Description of Artificial Sequence: Synthetic oligonucleotide
  misc_feature 1..20: note = Target: FXN; (+) strand; PAM type: NRG; PAM sequence: GGG
  source 1..20: mol_type = other DNA
tgggaggtgatgaggtatga

SEQ ID NO: 16834 - DNA, 20 bp, synthetic construct
  misc_feature 1..20: note = Description of Artificial Sequence: Synthetic oligonucleotide
  misc_feature 1..20: note = Target: FXN; (+) strand; PAM type: NRG; PAM sequence: TGG
  source 1..20: mol_type = other DNA
gaggtgatgaggtatgaggg

SEQ ID NO: 16835 - DNA, 20 bp, synthetic construct
  misc_feature 1..20: note = Description of Artificial Sequence: Synthetic oligonucleotide
  misc_feature 1..20: note = Target: FXN; (+) strand; PAM type: NRG; PAM sequence: GAG
  source 1..20: mol_type = other DNA
ggtgatgaggtatgagggtg

SEQ ID NO: 16836 - DNA, 20 bp, synthetic construct
  misc_feature 1..20: note = Description of Artificial Sequence: Synthetic oligonucleotide
  misc_feature 1..20: note = Target: FXN; (+) strand; PAM type: NRG; PAM sequence: TGG
  source 1..20: mol_type = other DNA
gagggtggagcccatatgat

SEQ ID NO: 16837 - DNA, 20 bp, synthetic construct
  misc_feature 1..20: note = Description of Artificial Sequence: Synthetic oligonucleotide
  misc_feature 1..20: note = Target: FXN; (+) strand; PAM type: NRG; PAM sequence: GGG
  source 1..20: mol_type = other DNA
agggtggagcccatatgatt

SEQ ID NO: 16838 - DNA, 20 bp, synthetic construct
  misc_feature 1..20: note = Description of Artificial Sequence: Synthetic oligonucleotide
  misc_feature 1..20: note = Target: FXN; (+) strand; PAM type: NRG; PAM sequence: TAG
  source 1..20: mol_type = other DNA
ggagcccatatgattgggat

SEQ ID NO: 16839 - DNA, 20 bp, synthetic construct
  misc_feature 1..20: note = Description of Artificial Sequence: Synthetic oligonucleotide
  misc_feature 1..20: note = Target: FXN; (+) strand; PAM type: NRG; PAM sequence: TAG
  source 1..20: mol_type = other DNA
ggattagtgcccttctaaaa

SEQ ID NO: 16840 - DNA, 20 bp, synthetic construct
  misc_feature 1..20: note = Description of Artificial Sequence: Synthetic oligonucleotide
  misc_feature 1..20: note = Target: FXN; (+) strand; PAM type: NRG; PAM sequence: CGG
  source 1..20: mol_type = other DNA
gcccttctaaaatagcccaa

SEQ ID NO: 16841 - DNA, 20 bp, synthetic construct
  misc_feature 1..20: note = Description of Artificial Sequence: Synthetic oligonucleotide
  misc_feature 1..20: note = Target: FXN; (+) strand; PAM type: NRG; PAM sequence: GAG
  source 1..20: mol_type = other DNA
ccttctaaaatagcccaacg

SEQ ID NO: 16842 - DNA, 20 bp, synthetic construct
  misc_feature 1..20: note = Description of Artificial Sequence: Synthetic oligonucleotide
  misc_feature 1..20: note = Target: FXN; (+) strand; PAM type: NRG; PAM sequence: CAG
  source 1..20: mol_type = other DNA
taaaatagcccaacggagcc

SEQ ID NO: 16843 - DNA, 20 bp, synthetic construct
  misc_feature 1..20: note = Description of Artificial Sequence: Synthetic oligonucleotide
  misc_feature 1..20: note = Target: FXN; (+) strand; PAM type: NRG; PAM sequence: AAG
  source 1..20: mol_type = other DNA
gcccaacggagcccagtgac

SEQ ID NO: 16844 - DNA, 20 bp, synthetic construct
  misc_feature 1..20: note = Description of Artificial Sequence: Synthetic oligonucleotide
  misc_feature 1..20: note = Target: FXN; (+) strand; PAM type: NRG; PAM sequence: AGG
  source 1..20: mol_type = other DNA
cccaacggagcccagtgaca

SEQ ID NO: 16845 - DNA, 20 bp, synthetic construct
  misc_feature 1..20: note = Description of Artificial Sequence: Synthetic oligonucleotide
  misc_feature 1..20: note = Target: FXN; (+) strand; PAM type: NRG; PAM sequence: CAG
  source 1..20: mol_type = other DNA
acaaggcatcatctatgaac

SEQ ID NO: 16846 - DNA, 20 bp, synthetic construct
  misc_feature 1..20: note = Description of Artificial Sequence: Synthetic oligonucleotide
  misc_feature 1..20: note = Target: FXN; (+) strand; PAM type: NRG; PAM sequence: AGG
  source 1..20: mol_type = other DNA
caaggcatcatctatgaacc

SEQ ID NO: 16847 - DNA, 20 bp, synthetic construct
  misc_feature 1..20: note = Description of Artificial Sequence: Synthetic oligonucleotide
  misc_feature 1..20: note = Target: FXN; (+) strand; PAM type: NRG; PAM sequence: TGG
  source 1..20: mol_type = other DNA
tcatctatgaaccaggaaac

SEQ ID NO: 16848 - DNA, 20 bp, synthetic construct
  misc_feature 1..20: note = Description of Artificial Sequence: Synthetic oligonucleotide
  misc_feature 1..20: note = Target: FXN; (+) strand; PAM type: NRG; PAM sequence: CAG
  source 1..20: mol_type = other DNA
accaggaaactggccctcac

SEQ ID NO: 16849 - DNA, 20 bp, synthetic construct
  misc_feature 1..20: note = Description of Artificial Sequence: Synthetic oligonucleotide
  misc_feature 1..20: note = Target: FXN; (+) strand; PAM type: NRG; PAM sequence: AAG
  source 1..20: mol_type = other DNA
ctggccctcaccagacacca

SEQ ID NO: 16850 - DNA, 20 bp, synthetic construct
  misc_feature 1..20: note = Description of Artificial Sequence: Synthetic oligonucleotide
  misc_feature 1..20: note = Target: FXN; (+) strand; PAM type: NRG; PAM sequence: TGG
  source 1..20: mol_type = other DNA
tcaccagacaccaaagctgt

SEQ ID NO: 16851 - DNA, 20 bp, synthetic construct
  misc_feature 1..20: note = Description of Artificial Sequence: Synthetic oligonucleotide
  misc_feature 1..20: note = Target: FXN; (+) strand; PAM type: NRG; PAM sequence: TGG
  source 1..20: mol_type = other DNA
agctgttggtgcattgatct

SEQ ID NO: 16852 - DNA, 20 bp, synthetic construct
  misc_feature 1..20: note = Description of Artificial Sequence: Synthetic oligonucleotide
  misc_feature 1..20: note = Target: FXN; (+) strand; PAM type: NRG; PAM sequence: CAG
  source 1..20: mol_type = other DNA
atcttggatttcccaccctc

SEQ ID NO: 16853 - DNA, 20 bp, synthetic construct
  misc_feature 1..20: note = Description of Artificial Sequence: Synthetic oligonucleotide
  misc_feature 1..20: note = Target: FXN; (+) strand; PAM type: NRG; PAM sequence: AGG
  source 1..20: mol_type = other DNA
tcttggatttcccaccctcc

SEQ ID NO: 16854 - DNA, 20 bp, synthetic construct
  misc_feature 1..20: note = Description of Artificial Sequence: Synthetic oligonucleotide
  misc_feature 1..20: note = Target: FXN; (+) strand; PAM type: NRG; PAM sequence: AAG
  source 1..20: mol_type = other DNA
ttcccaccctccaggactct

SEQ ID NO: 16855 - DNA, 20 bp, synthetic construct
  misc_feature 1..20: note = Description of Artificial Sequence: Synthetic oligonucleotide
  misc_feature 1..20: note = Target: FXN; (+) strand; PAM type: NRG; PAM sequence: AAG
  source 1..20: mol_type = other DNA
aacacatttctattgtttat

SEQ ID NO: 16856 - DNA, 20 bp, synthetic construct
  misc_feature 1..20: note = Description of Artificial Sequence: Synthetic oligonucleotide
  misc_feature 1..20: note = Target: FXN; (+) strand; PAM type: NRG; PAM sequence: CAG
  source 1..20: mol_type = other DNA
tctattgtttataagccacc

SEQ ID NO: 16857 - DNA, 20 bp, synthetic construct
  misc_feature 1..20: note = Description of Artificial Sequence: Synthetic oligonucleotide
  misc_feature 1..20: note = Target: FXN; (+) strand; PAM type: NRG; PAM sequence: TGG
  source 1..20: mol_type = other DNA
attgtttataagccacccag

SEQ ID NO: 16858 - DNA, 20 bp, synthetic construct
  misc_feature 1..20: note = Description of Artificial Sequence: Synthetic oligonucleotide
  misc_feature 1..20: note = Target: FXN; (+) strand; PAM type: NRG; PAM sequence: TGG
  source 1..20: mol_type = other DNA
tttataagccacccagtggc

SEQ ID NO: 16859 - DNA, 20 bp, synthetic construct
  misc_feature 1..20: note = Description of Artificial Sequence: Synthetic oligonucleotide
  misc_feature 1..20: note = Target: FXN; (+) strand; PAM type: NRG; PAM sequence: CAG
  source 1..20: mol_type = other DNA
ggtattttgttataacatcc

SEQ ID NO: 16860 - DNA, 20 bp, synthetic construct
  misc_feature 1..20: note = Description of Artificial Sequence: Synthetic oligonucleotide
  misc_feature 1..20: note = Target: FXN; (+) strand; PAM type: NRG; PAM sequence: AAG
  source 1..20: mol_type = other DNA
ttgttataacatcccagact

SEQ ID NO: 16861 - DNA, 20 bp, synthetic construct
  misc_feature 1..20: note = Description of Artificial Sequence: Synthetic oligonucleotide
  misc_feature 1..20: note = Target: FXN; (+) strand; PAM type: NRG; PAM sequence: CAG
  source 1..20: mol_type = other DNA
aatacttgtatccctgacac

SEQ ID NO: 16862 - DNA, 20 bp, synthetic construct
  misc_feature 1..20: note = Description of Artificial Sequence: Synthetic oligonucleotide
  misc_feature 1..20: note = Target: FXN; (+) strand; PAM type: NRG; PAM sequence: AGG
  source 1..20: mol_type = other DNA
atacttgtatccctgacacc

SEQ ID NO: 16863 - DNA, 20 bp, synthetic construct
  misc_feature 1..20: note = Description of Artificial Sequence: Synthetic oligonucleotide
  misc_feature 1..20: note = Target: FXN; (+) strand; PAM type: NRG; PAM sequence: AAG
  source 1..20: mol_type = other DNA
tgtatccctgacaccaggtt

SEQ ID NO: 16864 - DNA, 20 bp, synthetic construct
  misc_feature 1..20: note = Description of Artificial Sequence: Synthetic oligonucleotide
  misc_feature 1..20: note = Target: FXN; (+) strand; PAM type: NRG; PAM sequence: GAG
  source 1..20: mol_type = other DNA
tatccctgacaccaggttaa

SEQ ID NO: 16865 - DNA, 20 bp, synthetic construct
  misc_feature 1..20: note = Description of Artificial Sequence: Synthetic oligonucleotide
  misc_feature 1..20: note = Target: FXN; (+) strand; PAM type: NRG; PAM sequence: TAG
  source 1..20: mol_type = other DNA
cctgacaccaggttaagaga

SEQ ID NO: 16866 - DNA, 20 bp, synthetic construct
  misc_feature 1..20: note = Description of Artificial Sequence: Synthetic oligonucleotide
  misc_feature 1..20: note = Target: FXN; (+) strand; PAM type: NRG; PAM sequence: TGG
  source 1..20: mol_type = other DNA
atagaatttgtttgttcctc

SEQ ID NO: 16867 - DNA, 20 bp, synthetic construct
  misc_feature 1..20: note = Description of Artificial Sequence: Synthetic oligonucleotide
  misc_feature 1..20: note = Target: FXN; (+) strand; PAM type: NRG; PAM sequence: GAG
  source 1..20: mol_type = other DNA
agaatttgtttgttcctctg

SEQ ID NO: 16868 - DNA, 20 bp, synthetic construct
  misc_feature 1..20: note = Description of Artificial Sequence: Synthetic oligonucleotide
  misc_feature 1..20: note = Target: FXN; (+) strand; PAM type: NRG; PAM sequence: AGG
  source 1..20: mol_type = other DNA
gaatttgtttgttcctctgg

SEQ ID NO: 16869 - DNA, 20 bp, synthetic construct
  misc_feature 1..20: note = Description of Artificial Sequence: Synthetic oligonucleotide
  misc_feature 1..20: note = Target: FXN; (+) strand; PAM type: NRG; PAM sequence: TGG
  source 1..20: mol_type = other DNA
catcactgccctgtcctccc

SEQ ID NO: 16870 - DNA, 20 bp, synthetic construct
  misc_feature 1..20: note = Description of Artificial Sequence: Synthetic oligonucleotide
  misc_feature 1..20: note = Target: FXN; (+) strand; PAM type: NRG; PAM sequence: GAG
  source 1..20: mol_type = other DNA
tcactgccctgtcctccctg

SEQ ID NO: 16871 - DNA, 20 bp, synthetic construct
  misc_feature 1..20: note = Description of Artificial Sequence: Synthetic oligonucleotide
  misc_feature 1..20: note = Target: FXN; (+) strand; PAM type: NRG; PAM sequence: AGG
  source 1..20: mol_type = other DNA
cactgccctgtcctccctgg

SEQ ID NO: 16872 - DNA, 20 bp, synthetic construct
  misc_feature 1..20: note = Description of Artificial Sequence: Synthetic oligonucleotide
  misc_feature 1..20: note = Target: FXN; (+) strand; PAM type: NRG; PAM sequence: CAG
  source 1..20: mol_type = other DNA
tcctccctggaggaatctgc

SEQ ID NO: 16873 - DNA, 20 bp, synthetic construct
  misc_feature 1..20: note = Description of Artificial Sequence: Synthetic oligonucleotide
  misc_feature 1..20: note = Target: FXN; (+) strand; PAM type: NRG; PAM sequence: TAG
  source 1..20: mol_type = other DNA
tcatcgtaccctccttttct

SEQ ID NO: 16874 - DNA, 20 bp, synthetic construct
  misc_feature 1..20: note = Description of Artificial Sequence: Synthetic oligonucleotide
  misc_feature 1..20: note = Target: FXN; (+) strand; PAM type: NRG; PAM sequence: GAG
  source 1..20: mol_type = other DNA
atcgtaccctccttttctta

SEQ ID NO: 16875 - DNA, 20 bp, synthetic construct
  misc_feature 1..20: note = Description of Artificial Sequence: Synthetic oligonucleotide
  misc_feature 1..20: note = Target: FXN; (+) strand; PAM type: NRG; PAM sequence: AAG
  source 1..20: mol_type = other DNA
tccatgtattgcttatatac

SEQ ID NO: 16876 - DNA, 20 bp, synthetic construct
  misc_feature 1..20: note = Description of Artificial Sequence: Synthetic oligonucleotide
  misc_feature 1..20: note = Target: FXN; (+) strand; PAM type: NRG; PAM sequence: AGG
  source 1..20: mol_type = other DNA
ccatgtattgcttatataca

SEQ ID NO: 16877 - DNA, 20 bp, synthetic construct
  misc_feature 1..20: note = Description of Artificial Sequence: Synthetic oligonucleotide
  misc_feature 1..20: note = Target: FXN; (+) strand; PAM type: NRG; PAM sequence: TGG
  source 1..20: mol_type = other DNA
ctgctgtatctgttctgcta

SEQ ID NO: 16878 - DNA, 20 bp, synthetic construct
  misc_feature 1..20: note = Description of Artificial Sequence: Synthetic oligonucleotide
  misc_feature 1..20: note = Target: FXN; (+) strand; PAM type: NRG; PAM sequence: CAG
  source 1..20: mol_type = other DNA
gtcatctgcattgatgcatg

SEQ ID NO: 16879 - DNA, 20 bp, synthetic construct
  misc_feature 1..20: note = Description of Artificial Sequence: Synthetic oligonucleotide
  misc_feature 1..20: note = Target: FXN; (+) strand; PAM type: NRG; PAM sequence: TGG
  source 1..20: mol_type = other DNA
cctttatttgttctcactgc

SEQ ID NO: 16880 - DNA, 20 bp, synthetic construct
  misc_feature 1..20: note = Description of Artificial Sequence: Synthetic oligonucleotide
  misc_feature 1..20: note = Target: FXN; (+) strand; PAM type: NRG; PAM sequence: TAG
  source 1..20: mol_type = other DNA
tatttgttctcactgctgga

SEQ ID NO: 16881 - DNA, 20 bp, synthetic construct
  misc_feature 1..20: note = Description of Artificial Sequence: Synthetic oligonucleotide
  misc_feature 1..20: note = Target: FXN; (+) strand; PAM type: NRG; PAM sequence: TGG
  source 1..20: mol_type = other DNA
tctcactgctggatagtatc

SEQ ID NO: 16882 - DNA, 20 bp, synthetic construct
  misc_feature 1..20: note = Description of Artificial Sequence: Synthetic oligonucleotide
  misc_feature 1..20: note = Target: FXN; (+) strand; PAM type: NRG; PAM sequence: TGG
  source 1..20: mol_type = other DNA
actgctggatagtatctggt

SEQ ID NO: 16883 - DNA, 20 bp, synthetic construct
  misc_feature 1..20: note = Description of Artificial Sequence: Synthetic oligonucleotide
  misc_feature 1..20: note = Target: FXN; (+) strand; PAM type: NRG; PAM sequence: GGG
  source 1..20: mol_type = other DNA
ctgctggatagtatctggtt

SEQ ID NO: 16884 - DNA, 20 bp, synthetic construct
  misc_feature 1..20: note = Description of Artificial Sequence: Synthetic oligonucleotide
  misc_feature 1..20: note = Target: FXN; (+) strand; PAM type: NRG; PAM sequence: CAG
  source 1..20: mol_type = other DNA
acactgtaaatcacactatc

SEQ ID NO: 16885 - DNA, 20 bp, synthetic construct
  misc_feature 1..20: note = Description of Artificial Sequence: Synthetic oligonucleotide
  misc_feature 1..20: note = Target: FXN; (+) strand; PAM type: NRG; PAM sequence: AGG
  source 1..20: mol_type = other DNA
cactgtaaatcacactatcc

SEQ ID NO: 16886 - DNA, 20 bp, synthetic construct
  misc_feature 1..20: note = Description of Artificial Sequence: Synthetic oligonucleotide
  misc_feature 1..20: note = Target: FXN; (+) strand; PAM type: NRG; PAM sequence: TAG
  source 1..20: mol_type = other DNA
tcacactatccaggttcctt

SEQ ID NO: 16887 - DNA, 20 bp, synthetic construct
  misc_feature 1..20: note = Description of Artificial Sequence: Synthetic oligonucleotide
  misc_feature 1..20: note = Target: FXN; (+) strand; PAM type: NRG; PAM sequence: AGG
  source 1..20: mol_type = other DNA
cacactatccaggttccttt

SEQ ID NO: 16888 - DNA, 20 bp, synthetic construct
  misc_feature 1..20: note = Description of Artificial Sequence: Synthetic oligonucleotide
  misc_feature 1..20: note = Target: FXN; (+) strand; PAM type: NRG; PAM sequence: TGG
  source 1..20: mol_type = other DNA
aggttcctttaggtgacatt

SEQ ID NO: 16889 - DNA, 20 bp, synthetic construct
  misc_feature 1..20: note = Description of Artificial Sequence: Synthetic oligonucleotide
  misc_feature 1..20: note = Target: FXN; (+) strand; PAM type: NRG; PAM sequence: CAG
  source 1..20: mol_type = other DNA
aggtgacatttggttgattg

SEQ ID NO: 16890 - DNA, 20 bp, synthetic construct
  misc_feature 1..20: note = Description of Artificial Sequence: Synthetic oligonucleotide
  misc_feature 1..20: note = Target: FXN; (+) strand; PAM type: NRG; PAM sequence: TGG
  source 1..20: mol_type = other DNA
gcagtgttctgttgttacga

SEQ ID NO: 16891 - DNA, 20 bp, synthetic construct
  misc_feature 1..20: note = Description of Artificial Sequence: Synthetic oligonucleotide
  misc_feature 1..20: note = Target: FXN; (+) strand; PAM type: NRG; PAM sequence: TGG
  source 1..20: mol_type = other DNA
gctgtgactgttcttgtgca

SEQ ID NO: 16892 - DNA, 20 bp, synthetic construct
  misc_feature 1..20: note = Description of Artificial Sequence: Synthetic oligonucleotide
  misc_feature 1..20: note = Target: FXN; (+) strand; PAM type: NRG; PAM sequence: CAG
  source 1..20: mol_type = other DNA
tgactgttcttgtgcatgga

SEQ ID NO: 16893 - DNA, 20 bp, synthetic construct
  misc_feature 1..20: note = Description of Artificial Sequence: Synthetic oligonucleotide
  misc_feature 1..20: note = Target: FXN; (+) strand; PAM type: NRG; PAM sequence: AAG
  source 1..20: mol_type = other DNA
ctgttcttgtgcatggacag

SEQ ID NO: 16894 - DNA, 20 bp, synthetic construct
  misc_feature 1..20: note = Description of Artificial Sequence: Synthetic oligonucleotide
  misc_feature 1..20: note = Target: FXN; (+) strand; PAM type: NRG; PAM sequence: CAG
  source 1..20: mol_type = other DNA
gcatggacagaagttccttt

SEQ ID NO: 16895 - DNA, 20 bp, synthetic construct
  misc_feature 1..20: note = Description of Artificial Sequence: Synthetic oligonucleotide
  misc_feature 1..20: note = Target: FXN; (+) strand; PAM type: NRG; PAM sequence: AGG
  source 1..20: mol_type = other DNA
catggacagaagttcctttc

SEQ ID NO: 16896 - DNA, 20 bp, synthetic construct
  misc_feature 1..20: note = Description of Artificial Sequence: Synthetic oligonucleotide
  misc_feature 1..20: note = Target: FXN; (+) strand; PAM type: NRG; PAM sequence: CAG
  source 1..20: mol_type = other DNA
ttcctttcaggtgaatttct

SEQ ID NO: 16897 - DNA, 20 bp, synthetic construct
  misc_feature 1..20: note = Description of Artificial Sequence: Synthetic oligonucleotide
  misc_feature 1..20: note = Target: FXN; (+) strand; PAM type: NRG; PAM sequence: TGG
  source 1..20: mol_type = other DNA
ttcaggtgaatttctcagaa

SEQ ID NO: 16898 - DNA, 20 bp, synthetic construct
  misc_feature 1..20: note = Description of Artificial Sequence: Synthetic oligonucleotide
  misc_feature 1..20: note = Target: FXN; (+) strand; PAM type: NRG; PAM sequence: TGG
  source 1..20: mol_type = other DNA
atttctcagaatggaattgc

SEQ ID NO: 16899 - DNA, 20 bp, synthetic construct
  misc_feature 1..20: note = Description of Artificial Sequence: Synthetic oligonucleotide
  misc_feature 1..20: note = Target: FXN; (+) strand; PAM type: NRG; PAM sequence: GGG
  source 1..20: mol_type = other DNA
tttctcagaatggaattgct

SEQ ID NO: 16900 - DNA, 20 bp, synthetic construct
  misc_feature 1..20: note = Description of Artificial Sequence: Synthetic oligonucleotide
  misc_feature 1..20: note = Target: FXN; (+) strand; PAM type: NRG; PAM sequence: AAG
  source 1..20: mol_type = other DNA
cagaatggaattgctgggca

SEQ ID NO: 16901 - DNA, 20 bp, synthetic construct
  misc_feature 1..20: note = Description of Artificial Sequence: Synthetic oligonucleotide
  misc_feature 1..20: note = Target: FXN; (+) strand; PAM type: NRG; PAM sequence: AGG
  source 1..20: mol_type = other DNA
agaatggaattgctgggcaa

SEQ ID NO: 16902 - DNA, 20 bp, synthetic construct
  misc_feature 1..20: note = Description of Artificial Sequence: Synthetic oligonucleotide
  misc_feature 1..20: note = Target: FXN; (+) strand; PAM type: NRG; PAM sequence: GGG
  source 1..20: mol_type = other DNA
gaatggaattgctgggcaaa

SEQ ID NO: 16903 - DNA, 20 bp, synthetic construct
  misc_feature 1..20: note = Description of Artificial Sequence: Synthetic oligonucleotide
  misc_feature 1..20: note = Target: FXN; (+) strand; PAM type: NRG; PAM sequence: GGG
  source 1..20: mol_type = other DNA
aatggaattgctgggcaaag

SEQ ID NO: 16904 - DNA, 20 bp, synthetic construct
  misc_feature 1..20: note = Description of Artificial Sequence: Synthetic oligonucleotide
  misc_feature 1..20: note = Target: FXN; (+) strand; PAM type: NRG; PAM sequence: CAG
  source 1..20: mol_type = other DNA
ggaattgctgggcaaagggg

SEQ ID NO: 16905 - DNA, 20 bp, synthetic construct
  misc_feature 1..20: note = Description of Artificial Sequence: Synthetic oligonucleotide
  misc_feature 1..20: note = Target: FXN; (+) strand; PAM type: NRG; PAM sequence: AAG
  source 1..20: mol_type = other DNA
atcaactcatttgatgccaa

SEQ ID NO: 16906 - DNA, 20 bp, synthetic construct
  misc_feature 1..20: note = Description of Artificial Sequence: Synthetic oligonucleotide
  misc_feature 1..20: note = Target: FXN; (+) strand; PAM type: NRG; PAM sequence: TGG
  source 1..20: mol_type = other DNA
aactcatttgatgccaaaag

SEQ ID NO: 16907 - DNA, 20 bp, synthetic construct
  misc_feature 1..20: note = Description of Artificial Sequence: Synthetic oligonucleotide
  misc_feature 1..20: note = Target: FXN; (+) strand; PAM type: NRG; PAM sequence: TGG
  source 1..20: mol_type = other DNA
tcatttgatgccaaaagtgg

SEQ ID NO: 16908 - DNA, 20 bp, synthetic construct
  misc_feature 1..20: note = Description of Artificial Sequence: Synthetic oligonucleotide
  misc_feature 1..20: note = Target: FXN; (+) strand; PAM type: NRG; PAM sequence: CAG
  source 1..20: mol_type = other DNA
gatgccaaaagtggtggtgc

SEQ ID NO: 16909 - DNA, 20 bp, synthetic construct
  misc_feature 1..20: note = Description of Artificial Sequence: Synthetic oligonucleotide
  misc_feature 1..20: note = Target: FXN; (+) strand; PAM type: NRG; PAM sequence: GAG
  source 1..20: mol_type = other DNA
gccagttcatcctcccctgc

SEQ ID NO: 16910 - DNA, 20 bp, synthetic construct
  misc_feature 1..20: note = Description of Artificial Sequence: Synthetic oligonucleotide
  misc_feature 1..20: note = Target: FXN; (+) strand; PAM type: NRG; PAM sequence: AGG
  source 1..20: mol_type = other DNA
ccagttcatcctcccctgcg

SEQ ID NO: 16911 - DNA, 20 bp, synthetic construct
  misc_feature 1..20: note = Description of Artificial Sequence: Synthetic oligonucleotide
  misc_feature 1..20: note = Target: FXN; (+) strand; PAM type: NRG; PAM sequence: TGG
  source 1..20: mol_type = other DNA
tcatcctcccctgcgaggta

SEQ ID NO: 16912 - DNA, 20 bp, synthetic construct
  misc_feature 1..20: note = Description of Artificial Sequence: Synthetic oligonucleotide
  misc_feature 1..20: note = Target: FXN; (+) strand; PAM type: NRG; PAM sequence: GGG
  source 1..20: mol_type = other DNA
catcctcccctgcgaggtat

SEQ ID NO: 16913 - DNA, 20 bp, synthetic construct
  misc_feature 1..20: note = Description of Artificial Sequence: Synthetic oligonucleotide
  misc_feature 1..20: note = Target: FXN; (+) strand; PAM type: NRG; PAM sequence: AAG
  source 1..20: mol_type = other DNA
tgggtcctgattcactcttc

SEQ ID NO: 16914 - DNA, 20 bp, synthetic construct
  misc_feature 1..20: note = Description of Artificial Sequence: Synthetic oligonucleotide
  misc_feature 1..20: note = Target: FXN; (+) strand; PAM type: NRG; PAM sequence: TGG
  source 1..20: mol_type = other DNA
gattcactcttcaagtgctg

SEQ ID NO: 16915 - DNA, 20 bp, synthetic construct
  misc_feature 1..20: note = Description of Artificial Sequence: Synthetic oligonucleotide
  misc_feature 1..20: note = Target: FXN; (+) strand; PAM type: NRG; PAM sequence: CAG
  source 1..20: mol_type = other DNA
cttcaagtgctgtggtttga

SEQ ID NO: 16916 - DNA, 20 bp, synthetic construct
  misc_feature 1..20: note = Description of Artificial Sequence: Synthetic oligonucleotide
  misc_feature 1..20: note = Target: FXN; (+) strand; PAM type: NRG; PAM sequence: AGG
  source 1..20: mol_type = other DNA
ttcaagtgctgtggtttgac

SEQ ID NO: 16917 - DNA, 20 bp, synthetic construct
  misc_feature 1..20: note = Description of Artificial Sequence: Synthetic oligonucleotide
  misc_feature 1..20: note = Target: FXN; (+) strand; PAM type: NRG; PAM sequence: GGG
  source 1..20: mol_type = other DNA
tcaagtgctgtggtttgaca

SEQ ID NO: 16918 - DNA, 20 bp, synthetic construct
  misc_feature 1..20: note = Description of Artificial Sequence: Synthetic oligonucleotide
  misc_feature 1..20: note = Target: FXN; (+) strand; PAM type: NRG; PAM sequence: CGG
  source 1..20: mol_type = other DNA
gtgctgtggtttgacagggc

SEQ ID NO: 16919 - DNA, 20 bp, synthetic construct
  misc_feature 1..20: note = Description of Artificial Sequence: Synthetic oligonucleotide
  misc_feature 1..20: note = Target: FXN; (+) strand; PAM type: NRG; PAM sequence: GGG
  source 1..20: mol_type = other DNA
tgctgtggtttgacagggcc

SEQ ID NO: 16920 - DNA, 20 bp, synthetic construct
  misc_feature 1..20: note = Description of Artificial Sequence: Synthetic oligonucleotide
  misc_feature 1..20: note = Target: FXN; (+) strand; PAM type: NRG; PAM sequence: GGG
  source 1..20: mol_type = other DNA
gctgtggtttgacagggccg

SEQ ID NO: 16921 - DNA, 20 bp, synthetic construct
  misc_feature 1..20: note = Description of Artificial Sequence: Synthetic oligonucleotide
  misc_feature 1..20: note = Target: FXN; (+) strand; PAM type: NRG; PAM sequence: GGG
  source 1..20: mol_type = other DNA
ctgtggtttgacagggccgg

SEQ ID NO: 16922 - DNA, 20 bp, synthetic construct
  misc_feature 1..20: note = Description of Artificial Sequence: Synthetic oligonucleotide
  misc_feature 1..20: note = Target: FXN; (+) strand; PAM type: NRG; PAM sequence: AAG
  source 1..20: mol_type = other DNA
ttgacagggccgggggtgac

SEQ ID NO: 16923 - DNA, 20 bp, synthetic construct
  misc_feature 1..20: note = Description of Artificial Sequence: Synthetic oligonucleotide
  misc_feature 1..20: note = Target: FXN; (+) strand; PAM type: NRG; PAM sequence: AGG
  source 1..20: mol_type = other DNA
tgacagggccgggggtgaca

SEQ ID NO: 16924 - DNA, 20 bp, synthetic construct
  misc_feature 1..20: note = Description of Artificial Sequence: Synthetic oligonucleotide
  misc_feature 1..20: note = Target: FXN; (+) strand; PAM type: NRG; PAM sequence: GGG
  source 1..20: mol_type = other DNA
gacagggccgggggtgacaa

SEQ ID NO: 16925 - DNA, 20 bp, synthetic construct
  misc_feature 1..20: note = Description of Artificial Sequence: Synthetic oligonucleotide
  misc_feature 1..20: note = Target: FXN; (+) strand; PAM type: NRG; PAM sequence: GGG
  source 1..20: mol_type = other DNA
acagggccgggggtgacaag

SEQ ID NO: 16926 - DNA, 20 bp, synthetic construct
  misc_feature 1..20: note = Description of Artificial Sequence: Synthetic oligonucleotide
  misc_feature 1..20: note = Target: FXN; (+) strand; PAM type: NRG; PAM sequence: TGG
  source 1..20: mol_type = other DNA
gggggtgacaaggggacacc

SEQ ID NO: 16927 - DNA, 20 bp, synthetic construct
  misc_feature 1..20: note = Description of Artificial Sequence: Synthetic oligonucleotide
  misc_feature 1..20: note = Target: FXN; (+) strand; PAM type: NRG; PAM sequence: GGG
  source 1..20: mol_type = other DNA
ggggtgacaaggggacacct

SEQ ID NO: 16928 - DNA, 20 bp, synthetic construct
  misc_feature 1..20: note = Description of Artificial Sequence: Synthetic oligonucleotide
  misc_feature 1..20: note = Target: FXN; (+) strand; PAM type: NRG; PAM sequence: AAG
  source 1..20: mol_type = other DNA
gtgacaaggggacacctggg

SEQ ID NO: 16929 - DNA, 20 bp, synthetic construct
  misc_feature 1..20: note = Description of Artificial Sequence: Synthetic oligonucleotide
  misc_feature 1..20: note = Target: FXN; (+) strand; PAM type: NRG; PAM sequence: AGG
  source 1..20: mol_type = other DNA
tgacaaggggacacctggga

SEQ ID NO: 16930 - DNA, 20 bp, synthetic construct
  misc_feature 1..20: note = Description of Artificial Sequence: Synthetic oligonucleotide
  misc_feature 1..20: note = Target: FXN; (+) strand; PAM type: NRG; PAM sequence: AAG
  source 1..20: mol_type = other DNA
aaggggacacctgggaagga

SEQ ID NO: 16931 - DNA, 20 bp, synthetic construct
  misc_feature 1..20: note = Description of Artificial Sequence: Synthetic oligonucleotide
  misc_feature 1..20: note = Target: FXN; (+) strand; PAM type: NRG; PAM sequence: TGG
  source 1..20: mol_type = other DNA
ggacacctgggaaggaaagc

SEQ ID NO: 16932 - DNA, 20 bp, synthetic construct
  misc_feature 1..20: note = Description of Artificial Sequence: Synthetic oligonucleotide
  misc_feature 1..20: note = Target: FXN; (+) strand; PAM type: NRG; PAM sequence: GGG
  source 1..20: mol_type = other DNA
gacacctgggaaggaaagct

SEQ ID NO: 16933 - DNA, 20 bp, synthetic construct
  misc_feature 1..20: note = Description of Artificial Sequence: Synthetic oligonucleotide
  misc_feature 1..20: note = Target: FXN; (+) strand; PAM type: NRG; PAM sequence: TGG
  source 1..20: mol_type = other DNA
aggaaagctgggctccctgc

SEQ ID NO: 16934 - DNA, 20 bp, synthetic construct
  misc_feature 1..20: note = Description of Artificial Sequence: Synthetic oligonucleotide
  misc_feature 1..20: note = Target: FXN; (+) strand; PAM type: NRG; PAM sequence: CAG
  source 1..20: mol_type = other DNA
tgggctccctgctggccatc

SEQ ID NO: 16935 - DNA, 20 bp, synthetic construct
  misc_feature 1..20: note = Description of Artificial Sequence: Synthetic oligonucleotide
  misc_feature 1..20: note = Target: FXN; (+) strand; PAM type: NRG; PAM sequence: AGG
  source 1..20: mol_type = other DNA
gggctccctgctggccatcc

SEQ ID NO: 16936 - DNA, 20 bp, synthetic construct
  misc_feature 1..20: note = Description of Artificial Sequence: Synthetic oligonucleotide
  misc_feature 1..20: note = Target: FXN; (+) strand; PAM type: NRG; PAM sequence: CAG
  source 1..20: mol_type = other DNA
tccctgctggccatccaggc

SEQ ID NO: 16937 - DNA, 20 bp, synthetic construct
  misc_feature 1..20: note = Description of Artificial Sequence: Synthetic oligonucleotide
  misc_feature 1..20: note = Target: FXN; (+) strand; PAM type: NRG; PAM sequence: CAG
  source 1..20: mol_type = other DNA
ccatccaggccagtccttac

SEQ ID NO: 16938 - DNA, 20 bp, synthetic construct
  misc_feature 1..20: note = Description of Artificial Sequence: Synthetic oligonucleotide
  misc_feature 1..20: note = Target: FXN; (+) strand; PAM type: NRG; PAM sequence: AGG
  source 1..20: mol_type = other DNA
catccaggccagtccttacc

SEQ ID NO: 16939 - DNA, 20 bp, synthetic construct
  misc_feature 1..20: note = Description of Artificial Sequence: Synthetic oligonucleotide
  misc_feature 1..20: note = Target: FXN; (+) strand; PAM type: NRG; PAM sequence: GGG
  source 1..20: mol_type = other DNA
atccaggccagtccttacca

SEQ ID NO: 16940 - DNA, 20 bp, synthetic construct
  misc_feature 1..20: note = Description of Artificial Sequence: Synthetic oligonucleotide
  misc_feature 1..20: note = Target: FXN; (+) strand; PAM type: NRG; PAM sequence: GGG
  source 1..20: mol_type = other DNA
tccaggccagtccttaccag

SEQ ID NO: 16941 - DNA, 20 bp, synthetic construct
  misc_feature 1..20: note = Description of Artificial Sequence: Synthetic oligonucleotide
  misc_feature 1..20: note = Target: FXN; (+) strand; PAM type: NRG; PAM sequence: GGG
  source 1..20: mol_type = other DNA
ccaggccagtccttaccagg

SEQ ID NO: 16942 - DNA, 20 bp, synthetic construct
  misc_feature 1..20: note = Description of Artificial Sequence: Synthetic oligonucleotide
  misc_feature 1..20: note = Target: FXN; (+) strand; PAM type: NRG; PAM sequence: TAG
  source 1..20: mol_type = other DNA
ggccagtccttaccaggggg

SEQ ID NO: 16943 - DNA, 20 bp, synthetic construct
  misc_feature 1..20: note = Description of Artificial Sequence: Synthetic oligonucleotide
  misc_feature 1..20: note = Target: FXN; (+) strand; PAM type: NRG; PAM sequence: AGG
  source 1..20: mol_type = other DNA
gccagtccttaccagggggt

SEQ ID NO: 16944 - DNA, 20 bp, synthetic construct
  misc_feature 1..20: note = Description of Artificial Sequence: Synthetic oligonucleotide
  misc_feature 1..20: note = Target: FXN; (+) strand; PAM type: NRG; PAM sequence: TGG
  source 1..20: mol_type = other DNA
accagggggtaggcaatgat

SEQ ID NO: 16945 - DNA, 20 bp, synthetic construct
  misc_feature 1..20: note = Description of Artificial Sequence: Synthetic oligonucleotide
  misc_feature 1..20: note = Target: FXN; (+) strand; PAM type: NRG; PAM sequence: GGG
  source 1..20: mol_type = other DNA
ccagggggtaggcaatgatt

SEQ ID NO: 16946 - DNA, 20 bp, synthetic construct
  misc_feature 1..20: note = Description of Artificial Sequence: Synthetic oligonucleotide
  misc_feature 1..20: note = Target: FXN; (+) strand; PAM type: NRG; PAM sequence: AAG
  source 1..20: mol_type = other DNA
gggtaggcaatgattgggtc

SEQ ID NO: 16947 - DNA, 20 bp, synthetic construct
  misc_feature 1..20: note = Description of Artificial Sequence: Synthetic oligonucleotide
  misc_feature 1..20: note = Target: FXN; (+) strand; PAM type: NRG; PAM sequence: TGG
  source 1..20: mol_type = other DNA
taggcaatgattgggtcaag

SEQ ID NO: 16948 - DNA, 20 bp, synthetic construct
  misc_feature 1..20: note = Description of Artificial Sequence: Synthetic oligonucleotide
  misc_feature 1..20: note = Target: FXN; (+) strand; PAM type: NRG; PAM sequence: TGG
  source 1..20: mol_type = other DNA
gtcaagtggttcctgaccac

SEQ ID NO: 16949 - DNA, 20 bp, synthetic construct
  misc_feature 1..20: note = Description of Artificial Sequence: Synthetic oligonucleotide
  misc_feature 1..20: note = Target: FXN; (+) strand; PAM type: NRG; PAM sequence: GGG
  source 1..20: mol_type = other DNA
tcaagtggttcctgaccact

SEQ ID NO: 16950 - DNA, 20 bp, synthetic construct
  misc_feature 1..20: note = Description of Artificial Sequence: Synthetic oligonucleotide
  misc_feature 1..20: note = Target: FXN; (+) strand; PAM type: NRG; PAM sequence: GAG
  source 1..20: mol_type = other DNA
ggttcctgaccactgggcct

SEQ ID NO: 16951 - DNA, 20 bp, synthetic construct
  misc_feature 1..20: note = Description of Artificial Sequence: Synthetic oligonucleotide
  misc_feature 1..20: note = Target: FXN; (+) strand; PAM type: NRG; PAM sequence: CAG
  source 1..20: mol_type = other DNA
gaccactgggcctgagactt

SEQ ID NO: 16952 - DNA, 20 bp, synthetic construct
  misc_feature 1..20: note = Description of Artificial Sequence: Synthetic oligonucleotide
  misc_feature 1..20: note = Target: FXN; (+) strand; PAM type: NRG; PAM sequence: AGG
  source 1..20: mol_type = other DNA
accactgggcctgagacttc

SEQ ID NO: 16953 - DNA, 20 bp, synthetic construct
  misc_feature 1..20: note = Description of Artificial Sequence: Synthetic oligonucleotide
  misc_feature 1..20: note = Target: FXN; (+) strand; PAM type: NRG; PAM sequence: CAG
  source 1..20: mol_type = other DNA
tgggcctgagacttcaggcc

SEQ ID NO: 16954 - DNA, 20 bp, synthetic construct
  misc_feature 1..20: note = Description of Artificial Sequence: Synthetic oligonucleotide
  misc_feature 1..20: note = Target: FXN; (+) strand; PAM type: NRG; PAM sequence: GAG
  source 1..20: mol_type = other DNA
tttcctcaaatgcatcccat

SEQ ID NO: 16955 - DNA, 20 bp, synthetic construct
  misc_feature 1..20: note = Description of Artificial Sequence: Synthetic oligonucleotide
  misc_feature 1..20: note = Target: FXN; (+) strand; PAM type: NRG; PAM sequence: CAG
  source 1..20: mol_type = other DNA
cctcaaatgcatcccatgag

SEQ ID NO: 16956 - DNA, 20 bp, synthetic construct
  misc_feature 1..20: note = Description of Artificial Sequence: Synthetic oligonucleotide
  misc_feature 1..20: note = Target: FXN; (+) strand; PAM type: NRG; PAM sequence: AGG
  source 1..20: mol_type = other DNA
ctcaaatgcatcccatgagc

SEQ ID NO: 16957 - DNA, 20 bp, synthetic construct
  misc_feature 1..20: note = Description of Artificial Sequence: Synthetic oligonucleotide
  misc_feature 1..20: note = Target: FXN; (+) strand; PAM type: NRG; PAM sequence: GAG
  source 1..20: mol_type = other DNA
cccatgagcaggcactgtgt

SEQ ID NO: 16958 - DNA, 20 bp, synthetic construct
  misc_feature 1..20: note = Description of Artificial Sequence: Synthetic oligonucleotide
  misc_feature 1..20: note = Target: FXN; (+) strand; PAM type: NRG; PAM sequence: GAG
  source 1..20: mol_type = other DNA
tgagcaggcactgtgtgagt

SEQ ID NO: 16959 - DNA, 20 bp, synthetic construct
  misc_feature 1..20: note = Description of Artificial Sequence: Synthetic oligonucleotide
  misc_feature 1..20: note = Target: FXN; (+) strand; PAM type: NRG; PAM sequence: AAG
  source 1..20: mol_type = other DNA
tgagtgagcacacacatctg

SEQ ID NO: 16960 - DNA, 20 bp, synthetic construct
  misc_feature 1..20: note = Description of Artificial Sequence: Synthetic oligonucleotide
  misc_feature 1..20: note = Target: FXN; (+) strand; PAM type: NRG; PAM sequence: AAG
  source 1..20: mol_type = other DNA
gcacacacatctgaagcctc

SEQ ID NO: 16961 - DNA, 20 bp, synthetic construct
  misc_feature 1..20: note = Description of Artificial Sequence: Synthetic oligonucleotide
  misc_feature 1..20: note = Target: FXN; (+) strand; PAM type: NRG; PAM sequence: TAG
  source 1..20: mol_type = other DNA
acacatctgaagcctcaagc

SEQ ID NO: 16962 - DNA, 20 bp, synthetic construct
  misc_feature 1..20: note = Description of Artificial Sequence: Synthetic oligonucleotide
  misc_feature 1..20: note = Target: FXN; (+) strand; PAM type: NRG; PAM sequence: AGG
  source 1..20: mol_type = other DNA
cacatctgaagcctcaagct

SEQ ID NO: 16963 - DNA, 20 bp, synthetic construct
  misc_feature 1..20: note = Description of Artificial Sequence: Synthetic oligonucleotide
  misc_feature 1..20: note = Target: FXN; (+) strand; PAM type: NRG; PAM sequence: AAG
  source 1..20: mol_type = other DNA
tctgaagcctcaagctaggc

SEQ ID NO: 16964 - DNA, 20 bp, synthetic construct
  misc_feature 1..20: note = Description of Artificial Sequence: Synthetic oligonucleotide
  misc_feature 1..20: note = Target: FXN; (+) strand; PAM type: NRG; PAM sequence: TGG
  source 1..20: mol_type = other DNA
ggcaagcctaccatgacttg

SEQ ID NO: 16965 - DNA, 20 bp, synthetic construct
  misc_feature 1..20: note = Description of Artificial Sequence: Synthetic oligonucleotide
  misc_feature 1..20: note = Target: FXN; (+) strand; PAM type: NRG; PAM sequence: AAG
  source 1..20: mol_type = other DNA
cctaccatgacttgtggtcc

SEQ ID NO: 16966 - DNA, 20 bp, synthetic construct
  misc_feature 1..20: note = Description of Artificial Sequence: Synthetic oligonucleotide
  misc_feature 1..20: note = Target: FXN; (+) strand; PAM type: NRG; PAM sequence: AGG
  source 1..20: mol_type = other DNA
ctaccatgacttgtggtcca

SEQ ID NO: 16967 - DNA, 20 bp, synthetic construct
  misc_feature 1..20: note = Description of Artificial Sequence: Synthetic oligonucleotide
  misc_feature 1..20: note = Target: FXN; (+) strand; PAM type: NRG; PAM sequence: GGG
  source 1..20: mol_type = other DNA
taccatgacttgtggtccaa

SEQ ID NO: 16968 - DNA, 20 bp, synthetic construct
  misc_feature 1..20: note = Description of Artificial Sequence: Synthetic oligonucleotide
  misc_feature 1..20: note = Target: FXN; (+) strand; PAM type: NRG; PAM sequence: CGG
  source 1..20: mol_type = other DNA
acttgtggtccaagggctca

SEQ ID NO: 16969 - DNA, 20 bp, synthetic construct
  misc_feature 1..20: note = Description of Artificial Sequence: Synthetic oligonucleotide
  misc_feature 1..20: note = Target: FXN; (+) strand; PAM type: NRG; PAM sequence: GGG
  source 1..20: mol_type = other DNA
cttgtggtccaagggctcac

SEQ ID NO: 16970 - DNA, 20 bp, synthetic construct
  misc_feature 1..20: note = Description of Artificial Sequence: Synthetic oligonucleotide
  misc_feature 1..20: note = Target: FXN; (+) strand; PAM type: NRG; PAM sequence: TGG
  source 1..20: mol_type = other DNA
ccaagggctcacgggtgacc

SEQ ID NO: 16971 - DNA, 20 bp, synthetic construct
  misc_feature 1..20: note = Description of Artificial Sequence: Synthetic oligonucleotide
  misc_feature 1..20: note = Target: FXN; (+) strand; PAM type: NRG; PAM sequence: GAG
  source 1..20: mol_type = other DNA
aagggctcacgggtgacctg

SEQ ID NO: 16972 - DNA, 20 bp, synthetic construct
  misc_feature 1..20: note = Description of Artificial Sequence: Synthetic oligonucleotide
  misc_feature 1..20: note = Target: FXN; (+) strand; PAM type: NRG; PAM sequence: TAG
  source 1..20: mol_type = other DNA
gctcacgggtgacctggagt

SEQ ID NO: 16973 - DNA, 20 bp, synthetic construct
  misc_feature 1..20: note = Description of Artificial Sequence: Synthetic oligonucleotide
  misc_feature 1..20: note = Target: FXN; (+) strand; PAM type: NRG; PAM sequence: GAG
  source 1..20: mol_type = other DNA
tcacgggtgacctggagtta

SEQ ID NO: 16974 - DNA, 20 bp, synthetic construct
  misc_feature 1..20: note = Description of Artificial Sequence: Synthetic oligonucleotide
  misc_feature 1..20: note = Target: FXN; (+) strand; PAM type: NRG; PAM sequence: AGG
  source 1..20: mol_type = other DNA
cacgggtgacctggagttag

SEQ ID NO: 16975 - DNA, 20 bp, synthetic construct
  misc_feature 1..20: note = Description of Artificial Sequence: Synthetic oligonucleotide
  misc_feature 1..20: note = Target: FXN; (+) strand; PAM type: NRG; PAM sequence: GGG
  source 1..20: mol_type = other DNA
acgggtgacctggagttaga

SEQ ID NO: 16976 - DNA, 20 bp, synthetic construct
  misc_feature 1..20: note = Description of Artificial Sequence: Synthetic oligonucleotide
  misc_feature 1..20: note = Target: FXN; (+) strand; PAM type: NRG; PAM sequence: GAG
  source 1..20: mol_type = other DNA
gggtgacctggagttagagg

SEQ ID NO: 16977 - DNA, 20 bp, synthetic construct
  misc_feature 1..20: note = Description of Artificial Sequence: Synthetic oligonucleotide
  misc_feature 1..20: note = Target: FXN; (+) strand; PAM type: NRG; PAM sequence: TGG
  source 1..20: mol_type = other DNA
cctggagttagagggagaca

SEQ ID NO: 16978 - DNA, 20 bp, synthetic construct
  misc_feature 1..20: note = Description of Artificial Sequence: Synthetic oligonucleotide
  misc_feature 1..20: note = Target: FXN; (+) strand; PAM type: NRG; PAM sequence: CAG
  source 1..20: mol_type = other DNA
ttagagggagacatggctgc

SEQ ID NO: 16979 - DNA, 20 bp, synthetic construct
  misc_feature 1..20: note = Description of Artificial Sequence: Synthetic oligonucleotide
  misc_feature 1..20: note = Target: FXN; (+) strand; PAM type: NRG; PAM sequence: AGG
  source 1..20: mol_type = other DNA
tagagggagacatggctgcc

SEQ ID NO: 16980 - DNA, 20 bp, synthetic construct
  misc_feature 1..20: note = Description of Artificial Sequence: Synthetic oligonucleotide
  misc_feature 1..20: note = Target: FXN; (+) strand; PAM type: NRG; PAM sequence: TGG
  source 1..20: mol_type = other DNA
agggagacatggctgccagg

SEQ ID NO: 16981 - DNA, 20 bp, synthetic construct
  misc_feature 1..20: note = Description of Artificial Sequence: Synthetic oligonucleotide
  misc_feature 1..20: note = Target: FXN; (+) strand; PAM type: NRG; PAM sequence: TAG
  source 1..20: mol_type = other DNA
acatggctgccaggtggctt

SEQ ID NO: 16982 - DNA, 20 bp, synthetic construct
  misc_feature 1..20: note = Description of Artificial Sequence: Synthetic oligonucleotide
  misc_feature 1..20: note = Target: FXN; (+) strand; PAM type: NRG; PAM sequence: AAG
  source 1..20: mol_type = other DNA
ggctgccaggtggctttaga

SEQ ID NO: 16983 - DNA, 20 bp, synthetic construct
  misc_feature 1..20: note = Description of Artificial Sequence: Synthetic oligonucleotide
  misc_feature 1..20: note = Target: FXN; (+) strand; PAM type: NRG; PAM sequence: TGG
  source 1..20: mol_type = other DNA
tttagaaagaacactcatca

SEQ ID NO: 16984 - DNA, 20 bp, synthetic construct
  misc_feature 1..20: note = Description of Artificial Sequence: Synthetic oligonucleotide
  misc_feature 1..20: note = Target: FXN; (+) strand; PAM type: NRG; PAM sequence: CAG
  source 1..20: mol_type = other DNA
gaaagaacactcatcatggc

SEQ ID NO: 16985 - DNA, 20 bp, synthetic construct
  misc_feature 1..20: note = Description of Artificial Sequence: Synthetic oligonucleotide
  misc_feature 1..20: note = Target: FXN; (+) strand; PAM type: NRG; PAM sequence: AGG
  source 1..20: mol_type = other DNA
aaagaacactcatcatggcc

SEQ ID NO: 16986 - DNA, 20 bp, synthetic construct
  misc_feature 1..20: note = Description of Artificial Sequence: Synthetic oligonucleotide
  misc_feature 1..20: note = Target: FXN; (+) strand; PAM type: NRG; PAM sequence: CGG
  source 1..20: mol_type = other DNA
acactcatcatggccaggtg

SEQ ID NO: 16987 - DNA, 20 bp, synthetic construct
  misc_feature 1..20: note = Description of Artificial Sequence: Synthetic oligonucleotide
  misc_feature 1..20: note = Target: FXN; (+) strand; PAM type: NRG; PAM sequence: TGG
  source 1..20: mol_type = other DNA
ctcatcatggccaggtgcgg

SEQ ID NO: 16988 - DNA, 20 bp, synthetic construct
  misc_feature 1..20: note = Description of Artificial Sequence: Synthetic oligonucleotide
  misc_feature 1..20: note = Target: FXN; (+) strand; PAM type: NRG; PAM sequence: CAG
  source 1..20: mol_type = other DNA
gtggcttacgcctgtaatcc

SEQ ID NO: 16989 - DNA, 20 bp, synthetic construct
  misc_feature 1..20: note = Description of Artificial Sequence: Synthetic oligonucleotide
  misc_feature 1..20: note = Target: FXN; (+) strand; PAM type: NRG; PAM sequence: TGG
  source 1..20: mol_type = other DNA
cgcctgtaatcccagcactt

SEQ ID NO: 16990 - DNA, 20 bp, synthetic construct
  misc_feature 1..20: note = Description of Artificial Sequence: Synthetic oligonucleotide
  misc_feature 1..20: note = Target: FXN; (+) strand; PAM type: NRG; PAM sequence: GGG
  source 1..20: mol_type = other DNA
gcctgtaatcccagcacttt

SEQ ID NO: 16991 - DNA, 20 bp, synthetic construct
  misc_feature 1..20: note = Description of Artificial Sequence: Synthetic oligonucleotide
  misc_feature 1..20: note = Target: FXN; (+) strand; PAM type: NRG; PAM sequence: GAG
  source 1..20: mol_type = other DNA
ctgtaatcccagcactttgg

SEQ ID NO: 16992 - DNA, 20 bp, synthetic construct
  misc_feature 1..20: note = Description of Artificial Sequence: Synthetic oligonucleotide
  misc_feature 1..20: note = Target: FXN; (+) strand; PAM type: NRG; PAM sequence: AGG
  source 1..20: mol_type = other DNA
tgtaatcccagcactttggg

SEQ ID NO: 16993 - DNA, 20 bp, synthetic construct
  misc_feature 1..20: note = Description of Artificial Sequence: Synthetic oligonucleotide
  misc_feature 1..20: note = Target: FXN; (+) strand; PAM type: NRG; PAM sequence: AAG
  source 1..20: mol_type = other DNA
tcccagcactttgggaggcc

SEQ ID NO: 16994 - DNA, 20 bp, synthetic construct
  misc_feature 1..20: note = Description of Artificial Sequence: Synthetic oligonucleotide
  misc_feature 1..20: note = Target: FXN; (+) strand; PAM type: NRG; PAM sequence: AGG
  source 1..20: mol_type = other DNA
cccagcactttgggaggcca

SEQ ID NO: 16995 - DNA, 20 bp, synthetic construct
  misc_feature 1..20: note = Description of Artificial Sequence: Synthetic oligonucleotide
  misc_feature 1..20: note = Target: FXN; (+) strand; PAM type: NRG; PAM sequence: TGG
  source 1..20: mol_type = other DNA
agcactttgggaggccaagg

SEQ ID NO: 16996 - DNA, 20 bp, synthetic construct
  misc_feature 1..20: note = Description of Artificial Sequence: Synthetic oligonucleotide
  misc_feature 1..20: note = Target: FXN; (+) strand; PAM type: NRG; PAM sequence: GGG
  source 1..20: mol_type = other DNA
gcactttgggaggccaaggt

SEQ ID NO: 16997 - DNA, 20 bp, synthetic construct
  misc_feature 1..20: note = Description of Artificial Sequence: Synthetic oligonucleotide
  misc_feature 1..20: note = Target: FXN; (+) strand; PAM type: NRG; PAM sequence: TGG
  source 1..20: mol_type = other DNA
ctttgggaggccaaggtggg

SEQ ID NO: 16998 - DNA, 20 bp, synthetic construct
  misc_feature 1..20: note = Description of Artificial Sequence: Synthetic oligonucleotide
  misc_feature 1..20: note = Target: FXN; (+) strand; PAM type: NRG; PAM sequence: GAG
  source 1..20: mol_type = other DNA
ggccaaggtgggtggatcat

SEQ ID NO: 16999 - DNA, 20 bp, synthetic construct
  misc_feature 1..20: note = Description of Artificial Sequence: Synthetic oligonucleotide
  misc_feature 1..20: note = Target: FXN; (+) strand; PAM type: NRG; PAM sequence: AGG
  source 1..20: mol_type = other DNA
gccaaggtgggtggatcatg

SEQ ID NO: 17000 - DNA, 20 bp, synthetic construct
  misc_feature 1..20: note = Description of Artificial Sequence: Synthetic oligonucleotide
  misc_feature 1..20: note = Target: FXN; (+) strand; PAM type: NRG; PAM sequence: CAG
  source 1..20: mol_type = other DNA
aggtgggtggatcatgaggt

SEQ ID NO: 17001 - DNA, 20 bp, synthetic construct
  misc_feature 1..20: note = Description of Artificial Sequence: Synthetic oligonucleotide
  misc_feature 1..20: note = Target: FXN; (+) strand; PAM type: NRG; PAM sequence: AGG
  source 1..20: mol_type = other DNA
ggtgggtggatcatgaggtc

SEQ ID NO: 17002 - DNA, 20 bp, synthetic construct
  misc_feature 1..20: note = Description of Artificial Sequence: Synthetic oligonucleotide
  misc_feature 1..20: note = Target: FXN; (+) strand; PAM type: NRG; PAM sequence: GAG
  source 1..20: mol_type = other DNA
tgggtggatcatgaggtcag

SEQ ID NO: 17003 - DNA, 20 bp, synthetic construct
  misc_feature 1..20: note = Description of Artificial Sequence: Synthetic oligonucleotide
  misc_feature 1..20: note = Target: FXN; (+) strand; PAM type: NRG; PAM sequence: GAG
  source 1..20: mol_type = other DNA
tggatcatgaggtcaggagt

SEQ ID NO: 17004 - DNA, 20 bp, synthetic construct
  misc_feature 1..20: note = Description of Artificial Sequence: Synthetic oligonucleotide
  misc_feature 1..20: note = Target: FXN; (+) strand; PAM type: NRG; PAM sequence: CAG
  source 1..20: mol_type = other DNA
catgaggtcaggagtgagac

SEQ ID NO: 17005 - DNA, 20 bp, synthetic construct
  misc_feature 1..20: note = Description of Artificial Sequence: Synthetic oligonucleotide
  misc_feature 1..20: note = Target: FXN; (+) strand; PAM type: NRG; PAM sequence: TAG
  source 1..20: mol_type = other DNA
tctcctaaaaacacaaaaat

SEQ ID NO: 17006 - DNA, 20 bp, synthetic construct
  misc_feature 1..20: note = Description of Artificial Sequence: Synthetic oligonucleotide
  misc_feature 1..20: note = Target: FXN; (+) strand; PAM type: NRG; PAM sequence: TGG
  source 1..20: mol_type = other DNA
ctaaaaacacaaaaattagc

SEQ ID NO: 17007 - DNA, 20 bp, synthetic construct
  misc_feature 1..20: note = Description of Artificial Sequence: Synthetic oligonucleotide
  misc_feature 1..20: note = Target: FXN; (+) strand; PAM type: NRG; PAM sequence: GGG
  source 1..20: mol_type = other DNA
taaaaacacaaaaattagct

SEQ ID NO: 17008 - DNA, 20 bp, synthetic construct
  misc_feature 1..20: note = Description of Artificial Sequence: Synthetic oligonucleotide
  misc_feature 1..20: note = Target: FXN; (+) strand; PAM type: NRG; PAM sequence: TGG
  source 1..20: mol_type = other DNA
acacaaaaattagctgggca

SEQ ID NO: 17009 - DNA, 20 bp, synthetic construct
  misc_feature 1..20: note = Description of Artificial Sequence: Synthetic oligonucleotide
  misc_feature 1..20: note = Target: FXN; (+) strand; PAM type: NRG; PAM sequence: GAG
  source 1..20: mol_type = other DNA
acaaaaattagctgggcatg

SEQ ID NO: 17010 - DNA, 20 bp, synthetic construct
  misc_feature 1..20: note = Description of Artificial Sequence: Synthetic oligonucleotide
  misc_feature 1..20: note = Target: FXN; (+) strand; PAM type: NRG; PAM sequence: AGG
  source 1..20: mol_type = other DNA
caaaaattagctgggcatgg

SEQ ID NO: 17011 - DNA, 20 bp, synthetic construct
  misc_feature 1..20: note = Description of Artificial Sequence: Synthetic oligonucleotide
  misc_feature 1..20: note = Target: FXN; (+) strand; PAM type: NRG; PAM sequence: CAG
  source 1..20: mol_type = other DNA
gaggtgcacgcctgtaatcc

SEQ ID NO: 17012 - DNA, 20 bp, synthetic construct
  misc_feature 1..20: note = Description of Artificial Sequence: Synthetic oligonucleotide
  misc_feature 1..20: note = Target: FXN; (+) strand; PAM type: NRG; PAM sequence: CAG
  source 1..20: mol_type = other DNA
cgcctgtaatcccagctact

SEQ ID NO: 17013 - DNA, 20 bp, synthetic construct
  misc_feature 1..20: note = Description of Artificial Sequence: Synthetic oligonucleotide
  misc_feature 1..20: note = Target: FXN; (+) strand; PAM type: NRG; PAM sequence: AGG
  source 1..20: mol_type = other DNA
gcctgtaatcccagctactc

SEQ ID NO: 17014 - DNA, 20 bp, synthetic construct
  misc_feature 1..20: note = Description of Artificial Sequence: Synthetic oligonucleotide
  misc_feature 1..20: note = Target: FXN; (+) strand; PAM type: NRG; PAM sequence: GAG
  source 1..20: mol_type = other DNA
ctgtaatcccagctactcag

SEQ ID NO: 17015 - DNA, 20 bp, synthetic construct
  misc_feature 1..20: note = Description of Artificial Sequence: Synthetic oligonucleotide
  misc_feature 1..20: note = Target: FXN; (+) strand; PAM type: NRG; PAM sequence: AGG
  source 1..20: mol_type = other DNA
tgtaatcccagctactcagg

SEQ ID NO: 17016 - DNA, 20 bp, synthetic construct
  misc_feature 1..20: note = Description of Artificial Sequence: Synthetic oligonucleotide
  misc_feature 1..20: note = Target: FXN; (+) strand; PAM type: NRG; PAM sequence: GAG
  source 1..20: mol_type = other DNA
tcccagctactcaggaggct

SEQ ID NO: 17017 - DNA, 20 bp, synthetic construct
  misc_feature 1..20: note = Description of Artificial Sequence: Synthetic oligonucleotide
  misc_feature 1..20: note = Target: FXN; (+) strand; PAM type: NRG; PAM sequence: AGG
  source 1..20: mol_type = other DNA
cccagctactcaggaggctg

SEQ ID NO: 17018 - DNA, 20 bp, synthetic construct
  misc_feature 1..20: note = Description of Artificial Sequence: Synthetic oligonucleotide
  misc_feature 1..20: note = Target: FXN; (+) strand; PAM type: NRG; PAM sequence: CAG
  source 1..20: mol_type = other DNA
agctactcaggaggctgagg

SEQ ID NO: 17019 - DNA, 20 bp, synthetic construct
  misc_feature 1..20: note = Description of Artificial Sequence: Synthetic oligonucleotide
  misc_feature 1..20: note = Target: FXN; (+) strand; PAM type: NRG; PAM sequence: AGG
  source 1..20: mol_type = other DNA
gctactcaggaggctgaggc

SEQ ID NO: 17020 - DNA, 20 bp, synthetic construct
  misc_feature 1..20: note = Description of Artificial Sequence: Synthetic oligonucleotide
  misc_feature 1..20: note = Target: FXN; (+) strand; PAM type: NRG; PAM sequence: GAG
  source 1..20: mol_type = other DNA
tactcaggaggctgaggcag

SEQ ID NO: 17021 - DNA, 20 bp, synthetic construct
  misc_feature 1..20: note = Description of Artificial Sequence: Synthetic oligonucleotide
  misc_feature 1..20: note = Target: FXN; (+) strand; PAM type: NRG; PAM sequence: CGG
  source 1..20: mol_type = other DNA
gcaggagaatcacttgaacc

SEQ ID NO: 17022 - DNA, 20 bp, synthetic construct
  misc_feature 1..20: note = Description of Artificial Sequence: Synthetic oligonucleotide
  misc_feature 1..20: note = Target: FXN; (+) strand; PAM type: NRG; PAM sequence: GGG
  source 1..20: mol_type = other DNA
caggagaatcacttgaaccc

SEQ ID NO: 17023 - DNA, 20 bp, synthetic construct
  misc_feature 1..20: note = Description of Artificial Sequence: Synthetic oligonucleotide
  misc_feature 1..20: note = Target: FXN; (+) strand; PAM type: NRG; PAM sequence: GAG
  source 1..20: mol_type = other DNA
ggagaatcacttgaacccgg

SEQ ID NO: 17024 - DNA, 20 bp, synthetic construct
  misc_feature 1..20: note = Description of Artificial Sequence: Synthetic oligonucleotide
  misc_feature 1..20: note = Target: FXN; (+) strand; PAM type: NRG; PAM sequence: AGG
  source 1..20: mol_type = other DNA
gagaatcacttgaacccggg

SEQ ID NO: 17025 - DNA, 20 bp, synthetic construct
  misc_feature 1..20: note = Description of Artificial Sequence: Synthetic oligonucleotide
  misc_feature 1..20: note = Target: FXN; (+) strand; PAM type: NRG; PAM sequence: CGG
  source 1..20: mol_type = other DNA
aatcacttgaacccgggagg

SEQ ID NO: 17026 - DNA, 20 bp, synthetic construct
  misc_feature 1..20: note = Description of Artificial Sequence: Synthetic oligonucleotide
  misc_feature 1..20: note = Target: FXN; (+) strand; PAM type: NRG; PAM sequence: GAG
  source 1..20: mol_type = other DNA
tcacttgaacccgggaggcg

SEQ ID NO: 17027 - DNA, 20 bp, synthetic construct
  misc_feature 1..20: note = Description of Artificial Sequence: Synthetic oligonucleotide
  misc_feature 1..20: note = Target: FXN; (+) strand; PAM type: NRG; PAM sequence: AGG
  source 1..20: mol_type = other DNA
cacttgaacccgggaggcgg

SEQ ID NO: 17028 - DNA, 20 bp, synthetic construct
  misc_feature 1..20: note = Description of Artificial Sequence: Synthetic oligonucleotide
  misc_feature 1..20: note = Target: FXN; (+) strand; PAM type: NRG; PAM sequence: AAG
  source 1..20: mol_type = other DNA
cgggaggcggaggttgcaat

SEQ ID NO: 17029 - DNA, 20 bp, synthetic construct
  misc_feature 1..20: note = Description of Artificial Sequence: Synthetic oligonucleotide
  misc_feature 1..20: note = Target: FXN; (+) strand; PAM type: NRG; PAM sequence: TAG
  source 1..20: mol_type = other DNA
ggcggaggttgcaataagcc

SEQ ID NO: 17030 - DNA, 20 bp, synthetic construct
  misc_feature 1..20: note = Description of Artificial Sequence: Synthetic oligonucleotide
  misc_feature 1..20: note = Target: FXN; (+) strand; PAM type: NRG; PAM sequence: CAG
  source 1..20: mol_type = other DNA
tagattgtgccactgcattc

SEQ ID NO: 17031 - DNA, 20 bp, synthetic construct
  misc_feature 1..20: note = Description of Artificial Sequence: Synthetic oligonucleotide
  misc_feature 1..20: note = Target: FXN; (+) strand; PAM type: NRG; PAM sequence: TGG
  source 1..20: mol_type = other DNA
tgtgccactgcattccagcc

SEQ ID NO: 17032 - DNA, 20 bp, synthetic construct
  misc_feature 1..20: note = Description of Artificial Sequence: Synthetic oligonucleotide
  misc_feature 1..20: note = Target: FXN; (+) strand; PAM type: NRG; PAM sequence: GGG
  source 1..20: mol_type = other DNA
gtgccactgcattccagcct

SEQ ID NO: 17033 - DNA, 20 bp, synthetic construct
  misc_feature 1..20: note = Description of Artificial Sequence: Synthetic oligonucleotide
  misc_feature 1..20: note = Target: FXN; (+) strand; PAM type: NRG; PAM sequence: CAG
  source 1..20: mol_type = other DNA
ctgcattccagcctgggcaa

SEQ ID NO: 17034 - DNA, 20 bp, synthetic construct
  misc_feature 1..20: note = Description of Artificial Sequence: Synthetic oligonucleotide
  misc_feature 1..20: note = Target: FXN; (+) strand; PAM type: NRG; PAM sequence: GAG
  source 1..20: mol_type = other DNA
gcattccagcctgggcaaca

SEQ ID NO: 17035 - DNA, 20 bp, synthetic construct
  misc_feature 1..20: note = Description of Artificial Sequence: Synthetic oligonucleotide
  misc_feature 1..20: note = Target: FXN; (+) strand; PAM type: NRG; PAM sequence: AAG
  source 1..20: mol_type = other DNA
tccagcctgggcaacagagc

SEQ ID NO: 17036 - DNA, 20 bp, synthetic construct
  misc_feature 1..20: note = Description of Artificial Sequence: Synthetic oligonucleotide
  misc_feature 1..20: note = Target: FXN; (+) strand; PAM type: NRG; PAM sequence: CAG
  source 1..20: mol_type = other DNA
aacagagcaagactccgtct

SEQ ID NO: 17037 - DNA, 20 bp, synthetic construct
  misc_feature 1..20: note = Description of Artificial Sequence: Synthetic oligonucleotide
  misc_feature 1..20: note = Target: FXN; (+) strand; PAM type: NRG; PAM sequence: AAG
  source 1..20: mol_type = other DNA
gtctcagaaaaaaaaaaaaa

SEQ ID NO: 17038 - DNA, 20 bp, synthetic construct
  misc_feature 1..20: note = Description of Artificial Sequence: Synthetic oligonucleotide
  misc_feature 1..20: note = Target: FXN; (+) strand; PAM type: NRG; PAM sequence: AGG
  source 1..20: mol_type = other DNA
tctcagaaaaaaaaaaaaaa

SEQ ID NO: 17039 - DNA, 20 bp, synthetic construct
  misc_feature 1..20: note = Description of Artificial Sequence: Synthetic oligonucleotide
  misc_feature 1..20: note = Target: FXN; (+) strand; PAM type: NRG; PAM sequence: AAG
  source 1..20: mol_type = other DNA
cagaaaaaaaaaaaaaaagg

SEQ ID NO: 17040 - DNA, 20 bp, synthetic construct
  misc_feature 1..20: note = Description of Artificial Sequence: Synthetic oligonucleotide
  misc_feature 1..20: note = Target: FXN; (+) strand; PAM type: NRG; PAM sequence: AAG
  source 1..20: mol_type = other DNA
atcctatgaccttgacctcc

SEQ ID NO: 17041 - DNA, 20 bp, synthetic construct
  misc_feature 1..20: note = Description of Artificial Sequence: Synthetic oligonucleotide
  misc_feature 1..20: note = Target: FXN; (+) strand; PAM type: NRG; PAM sequence: AAG
  source 1..20: mol_type = other DNA
ctccaagctttgcctccctc

SEQ ID NO: 17042 - DNA, 20 bp, synthetic construct
  misc_feature 1..20: note = Description of Artificial Sequence: Synthetic oligonucleotide
  misc_feature 1..20: note = Target: FXN; (+) strand; PAM type: NRG; PAM sequence: CAG
  source 1..20: mol_type = other DNA
caagctttgcctccctcaag

SEQ ID NO: 17043 - DNA, 20 bp, synthetic construct
  misc_feature 1..20: note = Description of Artificial Sequence: Synthetic oligonucleotide
  misc_feature 1..20: note = Target: FXN; (+) strand; PAM type: NRG; PAM sequence: CAG
  source 1..20: mol_type = other DNA
tttgcctccctcaagcagaa

SEQ ID NO: 17044 - DNA, 20 bp, synthetic construct
  misc_feature 1..20: note = Description of Artificial Sequence: Synthetic oligonucleotide
  misc_feature 1..20: note = Target: FXN; (+) strand; PAM type: NRG; PAM sequence: TGG
  source 1..20: mol_type = other DNA
ctccctcaagcagaacagaa

SEQ ID NO: 17045 - DNA, 20 bp, synthetic construct
  misc_feature 1..20: note = Description of Artificial Sequence: Synthetic oligonucleotide
  misc_feature 1..20: note = Target: FXN; (+) strand; PAM type: NRG; PAM sequence: GAG
  source 1..20: mol_type = other DNA
ccctcaagcagaacagaatg

SEQ ID NO: 17046 - DNA, 20 bp, synthetic construct
  misc_feature 1..20: note = Description of Artificial Sequence: Synthetic oligonucleotide
  misc_feature 1..20: note = Target: FXN; (+) strand; PAM type: NRG; PAM sequence: TAG
  source 1..20: mol_type = other DNA
gaacagaatggagcctccct

SEQ ID NO: 17047 - DNA, 20 bp, synthetic construct
  misc_feature 1..20: note = Description of Artificial Sequence: Synthetic oligonucleotide
  misc_feature 1..20: note = Target: FXN; (+) strand; PAM type: NRG; PAM sequence: AGG
  source 1..20: mol_type = other DNA
aacagaatggagcctccctt

SEQ ID NO: 17048 - DNA, 20 bp, synthetic construct
  misc_feature 1..20: note = Description of Artificial Sequence: Synthetic oligonucleotide
  misc_feature 1..20: note = Target: FXN; (+) strand; PAM type: NRG; PAM sequence: CAG
  source 1..20: mol_type = other DNA
agaatggagcctcccttagg

SEQ ID NO: 17049 - DNA, 20 bp, synthetic construct
  misc_feature 1..20: note = Description of Artificial Sequence: Synthetic oligonucleotide
  misc_feature 1..20: note = Target: FXN; (+) strand; PAM type: NRG; PAM sequence: GAG
  source 1..20: mol_type = other DNA
aatggagcctcccttaggca

SEQ ID NO: 17050 - DNA, 20 bp, synthetic construct
  misc_feature 1..20: note = Description of Artificial Sequence: Synthetic oligonucleotide
  misc_feature 1..20: note = Target: FXN; (+) strand; PAM type: NRG; PAM sequence: AGG
  source 1..20: mol_type = other DNA
atggagcctcccttaggcag

SEQ ID NO: 17051 - DNA, 20 bp, synthetic construct
  misc_feature 1..20: note = Description of Artificial Sequence: Synthetic oligonucleotide
  misc_feature 1..20: note = Target: FXN; (+) strand; PAM type: NRG; PAM sequence: CGG
  source 1..20: mol_type = other DNA
gagcctcccttaggcagagg

SEQ ID NO: 17052 - DNA, 20 bp, synthetic construct
  misc_feature 1..20: note = Description of Artificial Sequence: Synthetic oligonucleotide
  misc_feature 1..20: note = Target: FXN; (+) strand; PAM type: NRG; PAM sequence: AAG
  source 1..20: mol_type = other DNA
cctcccttaggcagaggcgg

SEQ ID NO: 17053 - DNA, 20 bp, synthetic construct
  misc_feature 1..20: note = Description of Artificial Sequence: Synthetic oligonucleotide
  misc_feature 1..20: note = Target: FXN; (+) strand; PAM type: NRG; PAM sequence: TAG
  source 1..20: mol_type = other DNA
gcggaagtttgcctctcacc

SEQ ID NO: 17054 - DNA, 20 bp, synthetic construct
  misc_feature 1..20: note = Description of Artificial Sequence: Synthetic oligonucleotide
  misc_feature 1..20: note = Target: FXN; (+) strand; PAM type: NRG; PAM sequence: CAG
  source 1..20: mol_type = other DNA
tagttctccattcttttgtt

SEQ ID NO: 17055 - DNA, 20 bp, synthetic construct
  misc_feature 1..20: note = Description of Artificial Sequence: Synthetic oligonucleotide
  misc_feature 1..20: note = Target: FXN; (+) strand; PAM type: NRG; PAM sequence: GAG
  source 1..20: mol_type = other DNA
gttctccattcttttgttca

SEQ ID NO: 17056 - DNA, 20 bp, synthetic construct
  misc_feature 1..20: note = Description of Artificial Sequence: Synthetic oligonucleotide
  misc_feature 1..20: note = Target: FXN; (+) strand; PAM type: NRG; PAM sequence: CAG
  source 1..20: mol_type = other DNA
gttcagagcctgaataccct

SEQ ID NO: 17057 - DNA, 20 bp, synthetic construct
  misc_feature 1..20: note = Description of Artificial Sequence: Synthetic oligonucleotide
  misc_feature 1..20: note = Target: FXN; (+) strand; PAM type: NRG; PAM sequence: AGG
  source 1..20: mol_type = other DNA
ttcagagcctgaataccctc

SEQ ID NO: 17058 - DNA, 20 bp, synthetic construct
  misc_feature 1..20: note = Description of Artificial Sequence: Synthetic oligonucleotide
  misc_feature 1..20: note = Target: FXN; (+) strand; PAM type: NRG; PAM sequence: TGG
  source 1..20: mol_type = other DNA
ataccctcaggctctgtact

SEQ ID NO: 17059 - DNA, 20 bp, synthetic construct
  misc_feature 1..20: note = Description of Artificial Sequence: Synthetic oligonucleotide
  misc_feature 1..20: note = Target: FXN; (+) strand; PAM type: NRG; PAM sequence: GGG
  source 1..20: mol_type = other DNA
taccctcaggctctgtactt

SEQ ID NO: 17060 - DNA, 20 bp, synthetic construct
  misc_feature 1..20: note = Description of Artificial Sequence: Synthetic oligonucleotide
  misc_feature 1..20: note = Target: FXN; (+) strand; PAM type: NRG; PAM sequence: GGG
  source 1..20: mol_type = other DNA
accctcaggctctgtacttg

SEQ ID NO: 17061 - DNA, 20 bp, synthetic construct
  misc_feature 1..20: note = Description of Artificial Sequence: Synthetic oligonucleotide
  misc_feature 1..20: note = Target: FXN; (+) strand; PAM type: NRG; PAM sequence: CGG
  source 1..20: mol_type = other DNA
gttctcttgttttatgctca

SEQ ID NO: 17062 - DNA, 20 bp, synthetic construct
  misc_feature 1..20: note = Description of Artificial Sequence: Synthetic oligonucleotide
  misc_feature 1..20: note = Target: FXN; (+) strand; PAM type: NRG; PAM sequence: GAG
  source 1..20: mol_type = other DNA
tgttttatgctcacggttgt

SEQ ID NO: 17063 - DNA, 20 bp, synthetic construct
  misc_feature 1..20: note = Description of Artificial Sequence: Synthetic oligonucleotide
  misc_feature 1..20: note = Target: FXN; (+) strand; PAM type: NRG; PAM sequence: AGG
  source 1..20: mol_type = other DNA
gttttatgctcacggttgtg

SEQ ID NO: 17064 - DNA, 20 bp, synthetic construct
  misc_feature 1..20: note = Description of Artificial Sequence: Synthetic oligonucleotide
  misc_feature 1..20: note = Target: FXN; (+) strand; PAM type: NRG; PAM sequence: GAG
  source 1..20: mol_type = other DNA
acggttgtgaggtttgttgt

SEQ ID NO: 17065 - DNA, 20 bp, synthetic construct
  misc_feature 1..20: note = Description of Artificial Sequence: Synthetic oligonucleotide
  misc_feature 1..20: note = Target: FXN; (+) strand; PAM type: NRG; PAM sequence: CAG
  source 1..20: mol_type = other DNA
agtaccacgatcccttcctt

SEQ ID NO: 17066 - DNA, 20 bp, synthetic construct
  misc_feature 1..20: note = Description of Artificial Sequence: Synthetic oligonucleotide
  misc_feature 1..20: note = Target: FXN; (+) strand; PAM type: NRG; PAM sequence: GAG
  source 1..20: mol_type = other DNA
taccacgatcccttccttca

SEQ ID NO: 17067 - DNA, 20 bp, synthetic construct
  misc_feature 1..20: note = Description of Artificial Sequence: Synthetic oligonucleotide
  misc_feature 1..20: note = Target: FXN; (+) strand; PAM type: NRG; PAM sequence: AGG
  source 1..20: mol_type = other DNA
accacgatcccttccttcag

SEQ ID NO: 17068 - DNA, 20 bp, synthetic construct
  misc_feature 1..20: note = Description of Artificial Sequence: Synthetic oligonucleotide
  misc_feature 1..20: note = Target: FXN; (+) strand; PAM type: NRG; PAM sequence: GAG
  source 1..20: mol_type = other DNA
cacgatcccttccttcagag

SEQ ID NO: 17069 - DNA, 20 bp, synthetic construct
  misc_feature 1..20: note = Description of Artificial Sequence: Synthetic oligonucleotide
  misc_feature 1..20: note = Target: FXN; (+) strand; PAM type: NRG; PAM sequence: GAG
  source 1..20: mol_type = other DNA
ttccttcagaggagtaaact

SEQ ID NO: 17070 - DNA, 20 bp, synthetic construct
  misc_feature 1..20: note = Description of Artificial Sequence: Synthetic oligonucleotide
  misc_feature 1..20: note = Target: FXN; (+) strand; PAM type: NRG; PAM sequence: AGG
  source 1..20: mol_type = other DNA
tccttcagaggagtaaactg

SEQ ID NO: 17071 - DNA, 20 bp, synthetic construct
  misc_feature 1..20: note = Description of Artificial Sequence: Synthetic oligonucleotide
  misc_feature 1..20: note = Target: FXN; (+) strand; PAM type: NRG; PAM sequence: AAG
  source 1..20: mol_type = other DNA
ggagtaaactgaggttccaa

SEQ ID NO: 17072 - DNA, 20 bp, synthetic construct
  misc_feature 1..20: note = Description of Artificial Sequence: Synthetic oligonucleotide
  misc_feature 1..20: note = Target: FXN; (+) strand; PAM type: NRG; PAM sequence: AGG
  source 1..20: mol_type = other DNA
gagtaaactgaggttccaaa

SEQ ID NO: 17073 - DNA, 20 bp, synthetic construct
  misc_feature 1..20: note = Description of Artificial Sequence: Synthetic oligonucleotide
  misc_feature 1..20: note = Target: FXN; (+) strand; PAM type: NRG; PAM sequence: TAG
  source 1..20: mol_type = other DNA
aactgaggttccaaaaggtt

SEQ ID NO: 17074 - DNA, 20 bp, synthetic construct
  misc_feature 1..20: note = Description of Artificial Sequence: Synthetic oligonucleotide
  misc_feature 1..20: note = Target: FXN; (+) strand; PAM type: NRG; PAM sequence: CAG
  source 1..20: mol_type = other DNA
tgaggttccaaaaggtttag

SEQ ID NO: 17075 - DNA, 20 bp, synthetic construct
  misc_feature 1..20: note = Description of Artificial Sequence: Synthetic oligonucleotide
  misc_feature 1..20: note = Target: FXN; (+) strand; PAM type: NRG; PAM sequence: GAG
  source 1..20: mol_type = other DNA
aaaaggtttagcagttgccc

SEQ ID NO: 17076 - DNA, 20 bp, synthetic construct
  misc_feature 1..20: note = Description of Artificial Sequence: Synthetic oligonucleotide
  misc_feature 1..20: note = Target: FXN; (+) strand; PAM type: NRG; PAM sequence: AGG
  source 1..20: mol_type = other DNA
aaaggtttagcagttgcccg

SEQ ID NO: 17077 - DNA, 20 bp, synthetic construct
  misc_feature 1..20: note = Description of Artificial Sequence: Synthetic oligonucleotide
  misc_feature 1..20: note = Target: FXN; (+) strand; PAM type: NRG; PAM sequence: TGG
  source 1..20: mol_type = other DNA
ttgcccgaggaatattaaat

SEQ ID NO: 17078 - DNA, 20 bp, synthetic construct
  misc_feature 1..20: note = Description of Artificial Sequence: Synthetic oligonucleotide
  misc_feature 1..20: note = Target: FXN; (+) strand; PAM type: NRG; PAM sequence: AAG
  source 1..20: mol_type = other DNA
gaggaatattaaattggcaa

SEQ ID NO: 17079 - DNA, 20 bp, synthetic construct
  misc_feature 1..20: note = Description of Artificial Sequence: Synthetic oligonucleotide
  misc_feature 1..20: note = Target: FXN; (+) strand; PAM type: NRG; PAM sequence: CAG
  source 1..20: mol_type = other DNA
gaatattaaattggcaaaag

SEQ ID NO: 17080 - DNA, 20 bp, synthetic construct
  misc_feature 1..20: note = Description of Artificial Sequence: Synthetic oligonucleotide
  misc_feature 1..20: note = Target: FXN; (+) strand; PAM type: NRG; PAM sequence: AGG
  source 1..20: mol_type = other DNA
aatattaaattggcaaaagc

SEQ ID NO: 17081 - DNA, 20 bp, synthetic construct
  misc_feature 1..20: note = Description of Artificial Sequence: Synthetic oligonucleotide
  misc_feature 1..20: note = Target: FXN; (+) strand; PAM type: NRG; PAM sequence: TAG
  source 1..20: mol_type = other DNA
attaaattggcaaaagcagg

SEQ ID NO: 17082 - DNA, 20 bp, synthetic construct
  misc_feature 1..20: note = Description of Artificial Sequence: Synthetic oligonucleotide
  misc_feature 1..20: note = Target: FXN; (+) strand; PAM type: NRG; PAM sequence: AAG
  source 1..20: mol_type = other DNA
gcaaaagcaggtagaatata

SEQ ID NO: 17083 - DNA, 20 bp, synthetic construct
  misc_feature 1..20: note = Description of Artificial Sequence: Synthetic oligonucleotide
  misc_feature 1..20: note = Target: FXN; (+) strand; PAM type: NRG; PAM sequence: AAG
  source 1..20: mol_type = other DNA
aagcaggtagaatataaagc

SEQ ID NO: 17084 - DNA, 20 bp, synthetic construct
  misc_feature 1..20: note = Description of Artificial Sequence: Synthetic oligonucleotide
  misc_feature 1..20: note = Target: FXN; (+) strand; PAM type: NRG; PAM sequence: AGG
  source 1..20: mol_type = other DNA
agcaggtagaatataaagca

SEQ ID NO: 17085 - DNA, 20 bp, synthetic construct
  misc_feature 1..20: note = Description of Artificial Sequence: Synthetic oligonucleotide
  misc_feature 1..20: note = Target: FXN; (+) strand; PAM type: NRG; PAM sequence: GAG
  source 1..20: mol_type = other DNA
caggtagaatataaagcaag

SEQ ID NO: 17086 - DNA, 20 bp, synthetic construct
  misc_feature 1..20: note = Description of Artificial Sequence: Synthetic oligonucleotide
  misc_feature 1..20: note = Target: FXN; (+) strand; PAM type: NRG; PAM sequence: TGG
  source 1..20: mol_type = other DNA
aatataaagcaaggagtatt

SEQ ID NO: 17087 - DNA, 20 bp, synthetic construct
  misc_feature 1..20: note = Description of Artificial Sequence: Synthetic oligonucleotide
  misc_feature 1..20: note = Target: FXN; (+) strand; PAM type: NRG; PAM sequence: CGG
  source 1..20: mol_type = other DNA
aagcaaggagtatttggcaa

SEQ ID NO: 17088 - DNA, 20 bp, synthetic construct
  misc_feature 1..20: note = Description of Artificial Sequence: Synthetic oligonucleotide
  misc_feature 1..20: note = Target: FXN; (+) strand; PAM type: NRG; PAM sequence: CAG
  source 1..20: mol_type = other DNA
ttcttttttatgattaaaaa

SEQ ID NO: 17089 - DNA, 20 bp, synthetic construct
  misc_feature 1..20: note = Description of Artificial Sequence: Synthetic oligonucleotide
  misc_feature 1..20: note = Target: FXN; (+) strand; PAM type: NRG; PAM sequence: AAG
  source 1..20: mol_type = other DNA
tttatgattaaaaacagccg

SEQ ID NO: 17090 - DNA, 20 bp, synthetic construct
  misc_feature 1..20: note = Description of Artificial Sequence: Synthetic oligonucleotide
  misc_feature 1..20: note = Target: FXN; (+) strand; PAM type: NRG; PAM sequence: AAG
  source 1..20: mol_type = other DNA
tgattaaaaacagccgaaga

SEQ ID NO: 17091 - DNA, 20 bp, synthetic construct
  misc_feature 1..20: note = Description of Artificial Sequence: Synthetic oligonucleotide
  misc_feature 1..20: note = Target: FXN; (+) strand; PAM type: NRG; PAM sequence: AAG
  source 1..20: mol_type = other DNA
gacttctacttgtgcctttg

SEQ ID NO: 17092 - DNA, 20 bp, synthetic construct
  misc_feature 1..20: note = Description of Artificial Sequence: Synthetic oligonucleotide
  misc_feature 1..20: note = Target: FXN; (+) strand; PAM type: NRG; PAM sequence: AGG
  source 1..20: mol_type = other DNA
acttctacttgtgcctttga

SEQ ID NO: 17093 - DNA, 20 bp, synthetic construct
  misc_feature 1..20: note = Description of Artificial Sequence: Synthetic oligonucleotide
  misc_feature 1..20: note = Target: FXN; (+) strand; PAM type: NRG; PAM sequence: GAG
  source 1..20: mol_type = other DNA
ttctacttgtgcctttgaag

SEQ ID NO: 17094 - DNA, 20 bp, synthetic construct
  misc_feature 1..20: note = Description of Artificial Sequence: Synthetic oligonucleotide
  misc_feature 1..20: note = Target: FXN; (+) strand; PAM type: NRG; PAM sequence: CAG
  source 1..20: mol_type = other DNA
actgcatttgaccttcccac

SEQ ID NO: 17095 - DNA, 20 bp, synthetic construct
  misc_feature 1..20: note = Description of Artificial Sequence: Synthetic oligonucleotide
  misc_feature 1..20: note = Target: FXN; (+) strand; PAM type: NRG; PAM sequence: CAG
  source 1..20: mol_type = other DNA
cacacacacacaaacaaaaa

SEQ ID NO: 17096 - DNA, 20 bp, synthetic construct
  misc_feature 1..20: note = Description of Artificial Sequence: Synthetic oligonucleotide
  misc_feature 1..20: note = Target: FXN; (+) strand; PAM type: NRG; PAM sequence: AAG
  source 1..20: mol_type = other DNA
aaacaaaaacagctattgtg

SEQ ID NO: 17097 - DNA, 20 bp, synthetic construct
  misc_feature 1..20: note = Description of Artificial Sequence: Synthetic oligonucleotide
  misc_feature 1..20: note = Target: FXN; (+) strand; PAM type: NRG; PAM sequence: AGG
  source 1..20: mol_type = other DNA
aacaaaaacagctattgtga

SEQ ID NO: 17098 - DNA, 20 bp, synthetic construct
  misc_feature 1..20: note = Description of Artificial Sequence: Synthetic oligonucleotide
  misc_feature 1..20: note = Target: FXN; (+) strand; PAM type: NRG; PAM sequence: CAG
  source 1..20: mol_type = other DNA
aacagctattgtgaaggtat

SEQ ID NO: 17099 - DNA, 20 bp, synthetic construct
  misc_feature 1..20: note = Description of Artificial Sequence: Synthetic oligonucleotide
  misc_feature 1..20: note = Target: FXN; (+) strand; PAM type: NRG; PAM sequence: AAG
  source 1..20: mol_type = other DNA
ttgtgaaggtatcagcgact

SEQ ID NO: 17100 - DNA, 20 bp, synthetic construct
  misc_feature 1..20: note = Description of Artificial Sequence: Synthetic oligonucleotide
  misc_feature 1..20: note = Target: FXN; (+) strand; PAM type: NRG; PAM sequence: AAG
  source 1..20: mol_type = other DNA
tatcagcgactaagacaact

SEQ ID NO: 17101 - DNA, 20 bp, synthetic construct
  misc_feature 1..20: note = Description of Artificial Sequence: Synthetic oligonucleotide
  misc_feature 1..20: note = Target: FXN; (+) strand; PAM type: NRG; PAM sequence: AGG
  source 1..20: mol_type = other DNA
atcagcgactaagacaacta

SEQ ID NO: 17102 - DNA, 20 bp, synthetic construct
  misc_feature 1..20: note = Description of Artificial Sequence: Synthetic oligonucleotide
  misc_feature 1..20: note = Target: FXN; (+) strand; PAM type: NRG; PAM sequence: GAG
  source 1..20: mol_type = other DNA
gactaagacaactaaggttt

SEQ ID NO: 17103 - DNA, 20 bp, synthetic construct
  misc_feature 1..20: note = Description of Artificial Sequence: Synthetic oligonucleotide
  misc_feature 1..20: note = Target: FXN; (+) strand; PAM type: NRG; PAM sequence: AGG
  source 1..20: mol_type = other DNA
actaagacaactaaggtttg

SEQ ID NO: 17104 - DNA, 20 bp, synthetic construct
  misc_feature 1..20: note = Description of Artificial Sequence: Synthetic oligonucleotide
  misc_feature 1..20: note = Target: FXN; (+) strand; PAM type: NRG; PAM sequence: GGG
  source 1..20: mol_type = other DNA
ctaagacaactaaggtttga

SEQ ID NO: 17105 - DNA, 20 bp, synthetic construct
  misc_feature 1..20: note = Description of Artificial Sequence: Synthetic oligonucleotide
  misc_feature 1..20: note = Target: FXN; (+) strand; PAM type: NRG; PAM sequence: GGG
  source 1..20: mol_type = other DNA
taagacaactaaggtttgag

SEQ ID NO: 17106 - DNA, 20 bp, synthetic construct
  misc_feature 1..20: note = Description of Artificial Sequence: Synthetic oligonucleotide
  misc_feature 1..20: note = Target: FXN; (+) strand; PAM type: NRG; PAM sequence: CAG
  source 1..20: mol_type = other DNA
acaactaaggtttgaggggc

SEQ ID NO: 17107 - DNA, 20 bp, synthetic construct
  misc_feature 1..20: note = Description of Artificial Sequence: Synthetic oligonucleotide
  misc_feature 1..20: note = Target: FXN; (+) strand; PAM type: NRG; PAM sequence: AGG
  source 1..20: mol_type = other DNA
caactaaggtttgaggggcc

SEQ ID NO: 17108 - DNA, 20 bp, synthetic construct
  misc_feature 1..20: note = Description of Artificial Sequence: Synthetic oligonucleotide
  misc_feature 1..20: note = Target: FXN; (+) strand; PAM type: NRG; PAM sequence: TGG
  source 1..20: mol_type = other DNA
ggtttgaggggccaggatcc

SEQ ID NO: 17109 - DNA, 20 bp, synthetic construct
  misc_feature 1..20: note = Description of Artificial Sequence: Synthetic oligonucleotide
  misc_feature 1..20: note = Target: FXN; (+) strand; PAM type: NRG; PAM sequence: GAG
  source 1..20: mol_type = other DNA
tttgaggggccaggatcctg

SEQ ID NO: 17110 - DNA, 20 bp, synthetic construct
  misc_feature 1..20: note = Description of Artificial Sequence: Synthetic oligonucleotide
  misc_feature 1..20: note = Target: FXN; (+) strand; PAM type: NRG; PAM sequence: GAG
  source 1..20: mol_type = other DNA
tgaggggccaggatcctgga

SEQ ID NO: 17111 - DNA, 20 bp, synthetic construct
  misc_feature 1..20: note = Description of Artificial Sequence: Synthetic oligonucleotide
  misc_feature 1..20: note = Target: FXN; (+) strand; PAM type: NRG; PAM sequence: TGG
  source 1..20: mol_type = other DNA
gggccaggatcctggagaga

SEQ ID NO: 17112 - DNA, 20 bp, synthetic construct
  misc_feature 1..20: note = Description of Artificial Sequence: Synthetic oligonucleotide
  misc_feature 1..20: note = Target: FXN; (+) strand; PAM type: NRG; PAM sequence: GAG
  source 1..20: mol_type = other DNA
ggagagatggaaacttccct

SEQ ID NO: 17113 - DNA, 20 bp, synthetic construct
  misc_feature 1..20: note = Description of Artificial Sequence: Synthetic oligonucleotide
  misc_feature 1..20: note = Target: FXN; (+) strand; PAM type: NRG; PAM sequence: AGG
  source 1..20: mol_type = other DNA
gagagatggaaacttccctg

SEQ ID NO: 17114 - DNA, 20 bp, synthetic construct
  misc_feature 1..20: note = Description of Artificial Sequence: Synthetic oligonucleotide
  misc_feature 1..20: note = Target: FXN; (+) strand; PAM type: NRG; PAM sequence: GAG
  source 1..20: mol_type = other DNA
gatggaaacttccctgaggt

SEQ ID NO: 17115 - DNA, 20 bp, synthetic construct
  misc_feature 1..20: note = Description of Artificial Sequence: Synthetic oligonucleotide
  misc_feature 1..20: note = Target: FXN; (+) strand; PAM type: NRG; PAM sequence: CAG
  source 1..20: mol_type = other DNA
tgaggtgagccccacattct

SEQ ID NO: 17116 - DNA, 20 bp, synthetic construct
  misc_feature 1..20: note = Description of Artificial Sequence: Synthetic oligonucleotide
  misc_feature 1..20: note = Target: FXN; (+) strand; PAM type: NRG; PAM sequence: TGG
  source 1..20: mol_type = other DNA
cattctcagacacttttcct

SEQ ID NO: 17117 - DNA, 20 bp, synthetic construct
  misc_feature 1..20: note = Description of Artificial Sequence: Synthetic oligonucleotide
  misc_feature 1..20: note = Target: FXN; (+) strand; PAM type: NRG; PAM sequence: GAG
  source 1..20: mol_type = other DNA
cacttttccttggatgtttt

SEQ ID NO: 17118 - DNA, 20 bp, synthetic construct
  misc_feature 1..20: note = Description of Artificial Sequence: Synthetic oligonucleotide
  misc_feature 1..20: note = Target: FXN; (+) strand; PAM type: NRG; PAM sequence: TGG
  source 1..20: mol_type = other DNA
ttgagcactgctttaattcc

SEQ ID NO: 17119 - DNA, 20 bp, synthetic construct
  misc_feature 1..20: note = Description of Artificial Sequence: Synthetic oligonucleotide
  misc_feature 1..20: note = Target: FXN; (+) strand; PAM type: NRG; PAM sequence: GGG
  source 1..20: mol_type = other DNA
tgagcactgctttaattcct

SEQ ID NO: 17120 - DNA, 20 bp, synthetic construct
  misc_feature 1..20: note = Description of Artificial Sequence: Synthetic oligonucleotide
  misc_feature 1..20: note = Target: FXN; (+) strand; PAM type: NRG; PAM sequence: CAG
  source 1..20: mol_type = other DNA
acaattccttccactgtgca

SEQ ID NO: 17121 - DNA, 20 bp, synthetic construct
  misc_feature 1..20: note = Description of Artificial Sequence: Synthetic oligonucleotide
  misc_feature 1..20: note = Target: FXN; (+) strand; PAM type: NRG; PAM sequence: TGG
  source 1..20: mol_type = other DNA
cttccactgtgcacagactc

SEQ ID NO: 17122 - DNA, 20 bp, synthetic construct
  misc_feature 1..20: note = Description of Artificial Sequence: Synthetic oligonucleotide
  misc_feature 1..20: note = Target: FXN; (+) strand; PAM type: NRG; PAM sequence: GGG
  source 1..20: mol_type = other DNA
ttccactgtgcacagactct

SEQ ID NO: 17123 - DNA, 20 bp, synthetic construct
  misc_feature 1..20: note = Description of Artificial Sequence: Synthetic oligonucleotide
  misc_feature 1..20: note = Target: FXN; (+) strand; PAM type: NRG; PAM sequence: GGG
  source 1..20: mol_type = other DNA
tccactgtgcacagactctg

SEQ ID NO: 17124 - DNA, 20 bp, synthetic construct
  misc_feature 1..20: note = Description of Artificial Sequence: Synthetic oligonucleotide
  misc_feature 1..20: note = Target: FXN; (+) strand; PAM type: NRG; PAM sequence: CAG
  source 1..20: mol_type = other DNA
ctgtgcacagactctggggc

SEQ ID NO: 17125 - DNA, 20 bp, synthetic construct
  misc_feature 1..20: note = Description of Artificial Sequence: Synthetic oligonucleotide
  misc_feature 1..20: note = Target: FXN; (+) strand; PAM type: NRG; PAM sequence: CAG
  source 1..20: mol_type = other DNA
gcacagactctggggccaga

SEQ ID NO: 17126 - DNA, 20 bp, synthetic construct
  misc_feature 1..20: note = Description of Artificial Sequence: Synthetic oligonucleotide
  misc_feature 1..20: note = Target: FXN; (+) strand; PAM type: NRG; PAM sequence: TGG
  source 1..20: mol_type = other DNA
gactctggggccagacagct

SEQ ID NO: 17127 - DNA, 20 bp, synthetic construct
  misc_feature 1..20: note = Description of Artificial Sequence: Synthetic oligonucleotide
  misc_feature 1..20: note = Target: FXN; (+) strand; PAM type: NRG; PAM sequence: GGG
  source 1..20: mol_type = other DNA
actctggggccagacagctt

SEQ ID NO: 17128 - DNA, 20 bp, synthetic construct
  misc_feature 1..20: note = Description of Artificial Sequence: Synthetic oligonucleotide
  misc_feature 1..20: note = Target: FXN; (+) strand; PAM type: NRG; PAM sequence: CAG
  source 1..20: mol_type = other DNA
agacagcttgggttcaatcc

SEQ ID NO: 17129 - DNA, 20 bp, synthetic construct
  misc_feature 1..20: note = Description of Artificial Sequence: Synthetic oligonucleotide
  misc_feature 1..20: note = Target: FXN; (+) strand; PAM type: NRG; PAM sequence: TAG
  source 1..20: mol_type = other DNA
ttaatgtctgtgtatctgtg

SEQ ID NO: 17130 - DNA, 20 bp, synthetic construct
  misc_feature 1..20: note = Description of Artificial Sequence: Synthetic oligonucleotide
  misc_feature 1..20: note = Target: FXN; (+) strand; PAM type: NRG; PAM sequence: AGG
  source 1..20: mol_type = other DNA
taatgtctgtgtatctgtgt

SEQ ID NO: 17131 - DNA, 20 bp, synthetic construct
  misc_feature 1..20: note = Description of Artificial Sequence: Synthetic oligonucleotide
  misc_feature 1..20: note = Target: FXN; (+) strand; PAM type: NRG; PAM sequence: AAG
  source 1..20: mol_type = other DNA
gtctgtgtatctgtgtaggc

SEQ ID NO: 17132 - DNA, 20 bp, synthetic construct
  misc_feature 1..20: note = Description of Artificial Sequence: Synthetic oligonucleotide
  misc_feature 1..20: note = Target: FXN; (+) strand; PAM type: NRG; PAM sequence: TGG
  source 1..20: mol_type = other DNA
tgtgtaggcaagttaccctt

SEQ ID NO: 17133 - DNA, 20 bp, synthetic construct
  misc_feature 1..20: note = Description of Artificial Sequence: Synthetic oligonucleotide
  misc_feature 1..20: note = Target: FXN; (+) strand; PAM type: NRG; PAM sequence: CAG
  source 1..20: mol_type = other DNA
caagttaccctttggtgcgt

SEQ ID NO: 17134 - DNA, 20 bp, synthetic construct
  misc_feature 1..20: note = Description of Artificial Sequence: Synthetic oligonucleotide
  misc_feature 1..20: note = Target: FXN; (+) strand; PAM type: NRG; PAM sequence: TAG
  source 1..20: mol_type = other DNA
tcatctgtaaaacacaacta

SEQ ID NO: 17135 - DNA, 20 bp, synthetic construct
  misc_feature 1..20: note = Description of Artificial Sequence: Synthetic oligonucleotide
  misc_feature 1..20: note = Target: FXN; (+) strand; PAM type: NRG; PAM sequence: AAG
  source 1..20: mol_type = other DNA
atagttgatcctcattcgtt

SEQ ID NO: 17136 - DNA, 20 bp, synthetic construct
  misc_feature 1..20: note = Description of Artificial Sequence: Synthetic oligonucleotide
  misc_feature 1..20: note = Target: FXN; (+) strand; PAM type: NRG; PAM sequence: GAG
  source 1..20: mol_type = other DNA
agttgatcctcattcgttaa

SEQ ID NO: 17137 - DNA, 20 bp, synthetic construct
  misc_feature 1..20: note = Description of Artificial Sequence: Synthetic oligonucleotide
  misc_feature 1..20: note = Target: FXN; (+) strand; PAM type: NRG; PAM sequence: CAG
  source 1..20: mol_type = other DNA
aaaatttgttaccccaaaat

SEQ ID NO: 17138 - DNA, 20 bp, synthetic construct
  misc_feature 1..20: note = Description of Artificial Sequence: Synthetic oligonucleotide
  misc_feature 1..20: note = Target: FXN; (+) strand; PAM type: NRG; PAM sequence: TAG
  source 1..20: mol_type = other DNA
taccccaaaatcagtacccc

SEQ ID NO: 17139 - DNA, 20 bp, synthetic construct
  misc_feature 1..20: note = Description of Artificial Sequence: Synthetic oligonucleotide
  misc_feature 1..20: note = Target: FXN; (+) strand; PAM type: NRG; PAM sequence: TGG
  source 1..20: mol_type = other DNA
aatcagtacccctagccttt

SEQ ID NO: 17140 - DNA, 20 bp, synthetic construct
  misc_feature 1..20: note = Description of Artificial Sequence: Synthetic oligonucleotide
  misc_feature 1..20: note = Target: FXN; (+) strand; PAM type: NRG; PAM sequence: GGG
  source 1..20: mol_type = other DNA
atcagtacccctagcctttt

SEQ ID NO: 17141 - DNA, 20 bp, synthetic construct
  misc_feature 1..20: note = Description of Artificial Sequence: Synthetic oligonucleotide
  misc_feature 1..20: note = Target: FXN; (+) strand; PAM type: NRG; PAM sequence: GGG
  source 1..20: mol_type = other DNA
tcagtacccctagccttttg

SEQ ID NO: 17142 - DNA, 20 bp, synthetic construct
  misc_feature 1..20: note = Description of Artificial Sequence: Synthetic oligonucleotide
  misc_feature 1..20: note = Target: FXN; (+) strand; PAM type: NRG; PAM sequence: AAG
  source 1..20: mol_type = other DNA
agccttttggggtcgtttca

SEQ ID NO: 17143 - DNA, 20 bp, synthetic construct
  misc_feature 1..20: note = Description of Artificial Sequence: Synthetic oligonucleotide
  misc_feature 1..20: note = Target: FXN; (+) strand; PAM type: NRG; PAM sequence: CAG
  source 1..20: mol_type = other DNA
ggtcgtttcaaagatgtgtg

SEQ ID NO: 17144 - DNA, 20 bp, synthetic construct
  misc_feature 1..20: note = Description of Artificial Sequence: Synthetic oligonucleotide
  misc_feature 1..20: note = Target: FXN; (+) strand; PAM type: NRG; PAM sequence: GAG
  source 1..20: mol_type = other DNA
tcgtttcaaagatgtgtgca

SEQ ID NO: 17145 - DNA, 20 bp, synthetic construct
  misc_feature 1..20: note = Description of Artificial Sequence: Synthetic oligonucleotide
  misc_feature 1..20: note = Target: FXN; (+) strand; PAM type: NRG; PAM sequence: CGG
  source 1..20: mol_type = other DNA
tttcaaagatgtgtgcagag

SEQ ID NO: 17146 - DNA, 20 bp, synthetic construct
  misc_feature 1..20: note = Description of Artificial Sequence: Synthetic oligonucleotide
  misc_feature 1..20: note = Target: FXN; (+) strand; PAM type: NRG; PAM sequence: GAG
  source 1..20: mol_type = other DNA
gcagagcggcaaaaaaatgt

SEQ ID NO: 17147 - DNA, 20 bp, synthetic construct
  misc_feature 1..20: note = Description of Artificial Sequence: Synthetic oligonucleotide
  misc_feature 1..20: note = Target: FXN; (+) strand; PAM type: NRG; PAM sequence: CAG
  source 1..20: mol_type = other DNA
caaaaaaatgtgagctcctc

SEQ ID NO: 17148 - DNA, 20 bp, synthetic construct
  misc_feature 1..20: note = Description of Artificial Sequence: Synthetic oligonucleotide
  misc_feature 1..20: note = Target: FXN; (+) strand; PAM type: NRG; PAM sequence: AGG
  source 1..20: mol_type = other DNA
aaaaaaatgtgagctcctcc

SEQ ID NO: 17149 - DNA, 20 bp, synthetic construct
  misc_feature 1..20: note = Description of Artificial Sequence: Synthetic oligonucleotide
  misc_feature 1..20: note = Target: FXN; (+) strand; PAM type: NRG; PAM sequence: CAG
  source 1..20: mol_type = other DNA
ctcctccaggctcatgttcc

SEQ ID NO: 17150 - DNA, 20 bp, synthetic construct
  misc_feature 1..20: note = Description of Artificial Sequence: Synthetic oligonucleotide
  misc_feature 1..20: note = Target: FXN; (+) strand; PAM type: NRG; PAM sequence: AAG
  source 1..20: mol_type = other DNA
ccaggctcatgttcccagcc

SEQ ID NO: 17151 - DNA, 20 bp, synthetic construct
  misc_feature 1..20: note = Description of Artificial Sequence: Synthetic oligonucleotide
  misc_feature 1..20: note = Target: FXN; (+) strand; PAM type: NRG; PAM sequence: AGG
  source 1..20: mol_type = other DNA
caggctcatgttcccagcca

SEQ ID NO: 17152 - DNA, 20 bp, synthetic construct
  misc_feature 1..20: note = Description of Artificial Sequence: Synthetic oligonucleotide
  misc_feature 1..20: note = Target: FXN; (+) strand; PAM type: NRG; PAM sequence: AAG
  source 1..20: mol_type = other DNA
ttcccagccaaggtccaaca

SEQ ID NO: 17153 - DNA, 20 bp, synthetic construct
  misc_feature 1..20: note = Description of Artificial Sequence: Synthetic oligonucleotide
  misc_feature 1..20: note = Target: FXN; (+) strand; PAM type: NRG; PAM sequence: CAG
  source 1..20: mol_type = other DNA
gctgccctgccttcttattt

SEQ ID NO: 17154 - DNA, 20 bp, synthetic construct
  misc_feature 1..20: note = Description of Artificial Sequence: Synthetic oligonucleotide
  misc_feature 1..20: note = Target: FXN; (+) strand; PAM type: NRG; PAM sequence: TAG
  source 1..20: mol_type = other DNA
ccttcttatttcagctgtca

SEQ ID NO: 17155 - DNA, 20 bp, synthetic construct
  misc_feature 1..20: note = Description of Artificial Sequence: Synthetic oligonucleotide
  misc_feature 1..20: note = Target: FXN; (+) strand; PAM type: NRG; PAM sequence: CAG
  source 1..20: mol_type = other DNA
tgtaaactgtgtccttttca

SEQ ID NO: 17156 - DNA, 20 bp, synthetic construct
  misc_feature 1..20: note = Description of Artificial Sequence: Synthetic oligonucleotide
  misc_feature 1..20: note = Target: FXN; (+) strand; PAM type: NRG; PAM sequence: TAG
  source 1..20: mol_type = other DNA
tgtccttttcacagtctgat

SEQ ID NO: 17157 - DNA, 20 bp, synthetic construct
  misc_feature 1..20: note = Description of Artificial Sequence: Synthetic oligonucleotide
  misc_feature 1..20: note = Target: FXN; (+) strand; PAM type: NRG; PAM sequence: CAG
  source 1..20: mol_type = other DNA
ctgattagtgccatgttttt

SEQ ID NO: 17158 - DNA, 20 bp, synthetic construct
  misc_feature 1..20: note = Description of Artificial Sequence: Synthetic oligonucleotide
  misc_feature 1..20: note = Target: FXN; (+) strand; PAM type: NRG; PAM sequence: TGG
  source 1..20: mol_type = other DNA
agatttttatgcttttttct

SEQ ID NO: 17159 - DNA, 20 bp, synthetic construct
  misc_feature 1..20: note = Description of Artificial Sequence: Synthetic oligonucleotide
  misc_feature 1..20: note = Target: FXN; (+) strand; PAM type: NRG; PAM sequence: AAG
  source 1..20: mol_type = other DNA
tctctgttaaaattgtctcc

SEQ ID NO: 17160 - DNA, 20 bp, synthetic construct
  misc_feature 1..20: note = Description of Artificial Sequence: Synthetic oligonucleotide
  misc_feature 1..20: note = Target: FXN; (+) strand; PAM type: NRG; PAM sequence: TAG
  source 1..20: mol_type = other DNA
gttaaaattgtctccaagtg

SEQ ID NO: 17161 - DNA, 20 bp, synthetic construct
  misc_feature 1..20: note = Description of Artificial Sequence: Synthetic oligonucleotide
  misc_feature 1..20: note = Target: FXN; (+) strand; PAM type: NRG; PAM sequence: AAG
  source 1..20: mol_type = other DNA
ttgtctccaagtgtagtgca

SEQ ID NO: 17162 - DNA, 20 bp, synthetic construct
  misc_feature 1..20: note = Description of Artificial Sequence: Synthetic oligonucleotide
  misc_feature 1..20: note = Target: FXN; (+) strand; PAM type: NRG; PAM sequence: TAG
  source 1..20: mol_type = other DNA
tccaagtgtagtgcaaagtt

SEQ ID NO: 17163 - DNA, 20 bp, synthetic construct
  misc_feature 1..20: note = Description of Artificial Sequence: Synthetic oligonucleotide
  misc_feature 1..20: note = Target: FXN; (+) strand; PAM type: NRG; PAM sequence: GAG
  source 1..20: mol_type = other DNA
tgtagtgcaaagtttagcac

SEQ ID NO: 17164 - DNA, 20 bp, synthetic construct
  misc_feature 1..20: note = Description of Artificial Sequence: Synthetic oligonucleotide
  misc_feature 1..20: note = Target: FXN; (+) strand; PAM type: NRG; PAM sequence: AGG
  source 1..20: mol_type = other DNA
gtagtgcaaagtttagcacg

SEQ ID NO: 17165 - DNA, 20 bp, synthetic construct
  misc_feature 1..20: note = Description of Artificial Sequence: Synthetic oligonucleotide
  misc_feature 1..20: note = Target: FXN; (+) strand; PAM type: NRG; PAM sequence: GAG
  source 1..20: mol_type = other DNA
agtgcaaagtttagcacgag

SEQ ID NO: 17166 - DNA, 20 bp, synthetic construct
  misc_feature 1..20: note = Description of Artificial Sequence: Synthetic oligonucleotide
  misc_feature 1..20: note = Target: FXN; (+) strand; PAM type: NRG; PAM sequence: AGG
  source 1..20: mol_type = other DNA
gtgcaaagtttagcacgagg

SEQ ID NO: 17167 - DNA, 20 bp, synthetic construct
  misc_feature 1..20: note = Description of Artificial Sequence: Synthetic oligonucleotide
  misc_feature 1..20: note = Target: FXN; (+) strand; PAM type: NRG; PAM sequence: CAG
  source 1..20: mol_type = other DNA
ggaggctgtgatgttcctta

SEQ ID NO: 17168 - DNA, 20 bp, synthetic construct
  misc_feature 1..20: note = Description of Artificial Sequence: Synthetic oligonucleotide
  misc_feature 1..20: note = Target: FXN; (+) strand; PAM type: NRG; PAM sequence: GAG
  source 1..20: mol_type = other DNA
aggctgtgatgttccttaca

SEQ ID NO: 17169 - DNA, 20 bp, synthetic construct
  misc_feature 1..20: note = Description of Artificial Sequence: Synthetic oligonucleotide
  misc_feature 1..20: note = Target: FXN; (+) strand; PAM type: NRG; PAM sequence: TAG
  source 1..20: mol_type = other DNA
tacagagaaaatgcatgtgt

SEQ ID NO: 17170 - DNA, 20 bp, synthetic construct
  misc_feature 1..20: note = Description of Artificial Sequence: Synthetic oligonucleotide
  misc_feature 1..20: note = Target: FXN; (+) strand; PAM type: NRG; PAM sequence: GAG
  source 1..20: mol_type = other DNA
cagagaaaatgcatgtgtta

SEQ ID NO: 17171 - DNA, 20 bp, synthetic construct
  misc_feature 1..20: note = Description of Artificial Sequence: Synthetic oligonucleotide
  misc_feature 1..20: note = Target: FXN; (+) strand; PAM type: NRG; PAM sequence: AAG
  source 1..20: mol_type = other DNA
agaaaatgcatgtgttagag

SEQ ID NO: 17172 - DNA, 20 bp, synthetic construct
  misc_feature 1..20: note = Description of Artificial Sequence: Synthetic oligonucleotide
  misc_feature 1..20: note = Target: FXN; (+) strand; PAM type: NRG; PAM sequence: CAG
  source 1..20: mol_type = other DNA
atgtgttagagaagctttgt

SEQ ID NO: 17173 - DNA, 20 bp, synthetic construct
  misc_feature 1..20: note = Description of Artificial Sequence: Synthetic oligonucleotide
  misc_feature 1..20: note = Target: FXN; (+) strand; PAM type: NRG; PAM sequence: AGG
  source 1..20: mol_type = other DNA
tgtgttagagaagctttgtc

SEQ ID NO: 17174 - DNA, 20 bp, synthetic construct
  misc_feature 1..20: note = Description of Artificial Sequence: Synthetic oligonucleotide
  misc_feature 1..20: note = Target: FXN; (+) strand; PAM type: NRG; PAM sequence: GAG
  source 1..20: mol_type = other DNA
agagaagctttgtcaggcat

SEQ ID NO: 17175 - DNA, 20 bp, synthetic construct
  misc_feature 1..20: note = Description of Artificial Sequence: Synthetic oligonucleotide
  misc_feature 1..20: note = Target: FXN; (+) strand; PAM type: NRG; PAM sequence: AAG
  source 1..20: mol_type = other DNA
agctttgtcaggcatgagtt

SEQ ID NO: 17176 - DNA, 20 bp, synthetic construct
  misc_feature 1..20: note = Description of Artificial Sequence: Synthetic oligonucleotide
  misc_feature 1..20: note = Target: FXN; (+) strand; PAM type: NRG; PAM sequence: AGG
  source 1..20: mol_type = other DNA
gctttgtcaggcatgagtta

SEQ ID NO: 17177 - DNA, 20 bp, synthetic construct
  misc_feature 1..20: note = Description of Artificial Sequence: Synthetic oligonucleotide
  misc_feature 1..20: note = Target: FXN; (+) strand; PAM type: NRG; PAM sequence: GAG
  source 1..20: mol_type = other DNA
agttaaggtgctgttgtcct

SEQ ID NO: 17178 - DNA, 20 bp, synthetic construct
  misc_feature 1..20: note = Description of Artificial Sequence: Synthetic oligonucleotide
  misc_feature 1..20: note = Target: FXN; (+) strand; PAM type: NRG; PAM sequence: GAG
  source 1..20: mol_type = other DNA
atttgttgttgttgttgttt

SEQ ID NO: 17179 - DNA, 20 bp, synthetic construct
  misc_feature 1..20: note = Description of Artificial Sequence: Synthetic oligonucleotide
  misc_feature 1..20: note = Target: FXN; (+) strand; PAM type: NRG; PAM sequence: CAG
  source 1..20: mol_type = other DNA
gttgttgttgttgtttgaga

SEQ ID NO: 17180 - DNA, 20 bp, synthetic construct
  misc_feature 1..20: note = Description of Artificial Sequence: Synthetic oligonucleotide
  misc_feature 1..20: note = Target: FXN; (+) strand; PAM type: NRG; PAM sequence: AGG
  source 1..20: mol_type = other DNA
ttgttgttgttgtttgagac

SEQ ID NO: 17181 - DNA, 20 bp, synthetic construct
  misc_feature 1..20: note = Description of Artificial Sequence: Synthetic oligonucleotide
  misc_feature 1..20: note = Target: FXN; (+) strand; PAM type: NRG; PAM sequence: GGG
  source 1..20: mol_type = other DNA
tgttgttgttgtttgagaca

SEQ ID NO: 17182 - DNA, 20 bp, synthetic construct
  misc_feature 1..20: note = Description of Artificial Sequence: Synthetic oligonucleotide
  misc_feature 1..20: note = Target: FXN; (+) strand; PAM type: NRG; PAM sequence: CAG
  source 1..20: mol_type = other DNA
cagggtctccctctgttgcc

SEQ ID NO: 17183 - DNA, 20 bp, synthetic construct
  misc_feature 1..20: note = Description of Artificial Sequence: Synthetic oligonucleotide
  misc_feature 1..20: note = Target: FXN; (+) strand; PAM type: NRG; PAM sequence: AGG
  source 1..20: mol_type = other DNA
agggtctccctctgttgccc

SEQ ID NO: 17184 - DNA, 20 bp, synthetic construct
  misc_feature 1..20: note = Description of Artificial Sequence: Synthetic oligonucleotide
  misc_feature 1..20: note = Target: FXN; (+) strand; PAM type: NRG; PAM sequence: TGG
  source 1..20: mol_type = other DNA
ccctctgttgcccaggctgc

SEQ ID NO: 17185 - DNA, 20 bp, synthetic construct
  misc_feature 1..20: note = Description of Artificial Sequence: Synthetic oligonucleotide
  misc_feature 1..20: note = Target: FXN; (+) strand; PAM type: NRG; PAM sequence: GAG
  source 1..20: mol_type = other DNA
ctctgttgcccaggctgctg

SEQ ID NO: 17186 - DNA, 20 bp, synthetic construct
  misc_feature 1..20: note = Description of Artificial Sequence: Synthetic oligonucleotide
  misc_feature 1..20: note = Target: FXN; (+) strand; PAM type: NRG; PAM sequence: TGG
  source 1..20: mol_type = other DNA
cccaggctgctggagtgcaa

SEQ ID NO: 17187 - DNA, 20 bp, synthetic construct
  misc_feature 1..20: note = Description of Artificial Sequence: Synthetic oligonucleotide
  misc_feature 1..20: note = Target: FXN; (+) strand; PAM type: NRG; PAM sequence: TAG
  source 1..20: mol_type = other DNA
ggagtgcaatggtgtaatca

SEQ ID NO: 17188 - DNA, 20 bp, synthetic construct
  misc_feature 1..20: note = Description of Artificial Sequence: Synthetic oligonucleotide
  misc_feature 1..20: note = Target: FXN; (+) strand; PAM type: NRG; PAM sequence: CAG
  source 1..20: mol_type = other DNA
ggtgtaatcatagctcactg

SEQ ID NO: 17189 - DNA, 20 bp, synthetic construct
  misc_feature 1..20: note = Description of Artificial Sequence: Synthetic oligonucleotide
  misc_feature 1..20: note = Target: FXN; (+) strand; PAM type: NRG; PAM sequence: TGG
  source 1..20: mol_type = other DNA
cactgcagcctctacctctc

SEQ ID NO: 17190 - DNA, 20 bp, synthetic construct
  misc_feature 1..20: note = Description of Artificial Sequence: Synthetic oligonucleotide
  misc_feature 1..20: note = Target: FXN; (+) strand; PAM type: NRG; PAM sequence: AAG
  source 1..20: mol_type = other DNA
agcctctacctctctggctc

SEQ ID NO: 17191 - DNA, 20 bp, synthetic construct
  misc_feature 1..20: note = Description of Artificial Sequence: Synthetic oligonucleotide
  misc_feature 1..20: note = Target: FXN; (+) strand; PAM type: NRG; PAM sequence: CGG
  source 1..20: mol_type = other DNA
ctcaagcaatcctcccacct

SEQ ID NO: 17192 - DNA, 20 bp, synthetic construct
  misc_feature 1..20: note = Description of Artificial Sequence: Synthetic oligonucleotide
  misc_feature 1..20: note = Target: FXN; (+) strand; PAM type: NRG; PAM sequence: GAG
  source 1..20: mol_type = other DNA
tcctcccacctcggcctcct

SEQ ID NO: 17193 - DNA, 20 bp, synthetic construct
  misc_feature 1..20: note = Description of Artificial Sequence: Synthetic oligonucleotide
  misc_feature 1..20: note = Target: FXN; (+) strand; PAM type: NRG; PAM sequence: TAG
  source 1..20: mol_type = other DNA
tcccacctcggcctcctgag

SEQ ID NO: 17194 - DNA, 20 bp, synthetic construct
  misc_feature 1..20: note = Description of Artificial Sequence: Synthetic oligonucleotide
  misc_feature 1..20: note = Target: FXN; (+) strand; PAM type: NRG; PAM sequence: TGG
  source 1..20: mol_type = other DNA
acctcggcctcctgagtagc

SEQ ID NO: 17195 - DNA, 20 bp, synthetic construct
  misc_feature 1..20: note = Description of Artificial Sequence: Synthetic oligonucleotide
  misc_feature 1..20: note = Target: FXN; (+) strand; PAM type: NRG; PAM sequence: GGG
  source 1..20: mol_type = other DNA
cctcggcctcctgagtagct

SEQ ID NO: 17196 - DNA, 20 bp, synthetic construct
  misc_feature 1..20: note = Description of Artificial Sequence: Synthetic oligonucleotide
  misc_feature 1..20: note = Target: FXN; (+) strand; PAM type: NRG; PAM sequence: CAG
  source 1..20: mol_type = other DNA
ctcctgagtagctgggacta

SEQ ID NO: 17197 - DNA, 20 bp, synthetic construct
  misc_feature 1..20: note = Description of Artificial Sequence: Synthetic oligonucleotide
  misc_feature 1..20: note = Target: FXN; (+) strand; PAM type: NRG; PAM sequence: AGG
  source 1..20: mol_type = other DNA
tcctgagtagctgggactac

SEQ ID NO: 17198 - DNA, 20 bp, synthetic construct
  misc_feature 1..20: note = Description of Artificial Sequence: Synthetic oligonucleotide
  misc_feature 1..20: note = Target: FXN; (+) strand; PAM type: NRG; PAM sequence: CAG
  source 1..20: mol_type = other DNA
caggtacaccccaccacacc

SEQ ID NO: 17199 - DNA, 20 bp, synthetic construct
  misc_feature 1..20: note = Description of Artificial Sequence: Synthetic oligonucleotide
  misc_feature 1..20: note = Target: FXN; (+) strand; PAM type: NRG; PAM sequence: TAG
  source 1..20: mol_type = other DNA
taatgtttttgatatttttt

SEQ ID NO: 17200 - DNA, 20 bp, synthetic construct
  misc_feature 1..20: note = Description of Artificial Sequence: Synthetic oligonucleotide
  misc_feature 1..20: note = Target: FXN; (+) strand; PAM type: NRG; PAM sequence: AGG
  source 1..20: mol_type = other DNA
aatgtttttgatattttttt

SEQ ID NO: 17201 - DNA, 20 bp, synthetic construct
  misc_feature 1..20: note = Description of Artificial Sequence: Synthetic oligonucleotide
  misc_feature 1..20: note = Target: FXN; (+) strand; PAM type: NRG; PAM sequence: TGG
  source 1..20: mol_type = other DNA
gtttttgatatttttttagg

SEQ ID NO: 17202 - DNA, 20 bp, synthetic construct
  misc_feature 1..20: note = Description of Artificial Sequence: Synthetic oligonucleotide
  misc_feature 1..20: note = Target: FXN; (+) strand; PAM type: NRG; PAM sequence: CAG
  source 1..20: mol_type = other DNA
gtggaattttgctcatcacc

SEQ ID NO: 17203 - DNA, 20 bp, synthetic construct
  misc_feature 1..20: note = Description of Artificial Sequence: Synthetic oligonucleotide
  misc_feature 1..20: note = Target: FXN; (+) strand; PAM type: NRG; PAM sequence: AGG
  source 1..20: mol_type = other DNA
tggaattttgctcatcaccc

SEQ ID NO: 17204 - DNA, 20 bp, synthetic construct
  misc_feature 1..20: note = Description of Artificial Sequence: Synthetic oligonucleotide
  misc_feature 1..20: note = Target: FXN; (+) strand; PAM type: NRG; PAM sequence: TGG
  source 1..20: mol_type = other DNA
attttgctcatcacccaggc

SEQ ID NO: 17205 - DNA, 20 bp, synthetic construct
  misc_feature 1..20: note = Description of Artificial Sequence: Synthetic oligonucleotide
  misc_feature 1..20: note = Target: FXN; (+) strand; PAM type: NRG; PAM sequence: GAG
  source 1..20: mol_type = other DNA
tttgctcatcacccaggctg

SEQ ID NO: 17206 - DNA, 20 bp, synthetic construct
  misc_feature 1..20: note = Description of Artificial Sequence: Synthetic oligonucleotide
  misc_feature 1..20: note = Target: FXN; (+) strand; PAM type: NRG; PAM sequence: TGG
  source 1..20: mol_type = other DNA
tcacccaggctggagtgcaa

SEQ ID NO: 17207 - DNA, 20 bp, synthetic construct
  misc_feature 1..20: note = Description of Artificial Sequence: Synthetic oligonucleotide
  misc_feature 1..20: note = Target: FXN; (+) strand; PAM type: NRG; PAM sequence: TGG
  source 1..20: mol_type = other DNA
ggagtgcaatggtgcgatcc

SEQ ID NO: 17208 - DNA, 20 bp, synthetic construct
  misc_feature 1..20: note = Description of Artificial Sequence: Synthetic oligonucleotide
  misc_feature 1..20: note = Target: FXN; (+) strand; PAM type: NRG; PAM sequence: CGG
  source 1..20: mol_type = other DNA
tcactgcaacctccacctcc

SEQ ID NO: 17209 - DNA, 20 bp, synthetic construct
  misc_feature 1..20: note = Description of Artificial Sequence: Synthetic oligonucleotide
  misc_feature 1..20: note = Target: FXN; (+) strand; PAM type: NRG; PAM sequence: AAG
  source 1..20: mol_type = other DNA
aacctccacctcccggattc

SEQ ID NO: 17210 - DNA, 20 bp, synthetic construct
  misc_feature 1..20: note = Description of Artificial Sequence: Synthetic oligonucleotide
  misc_feature 1..20: note = Target: FXN; (+) strand; PAM type: NRG; PAM sequence: CAG
  source 1..20: mol_type = other DNA
ttcaagcaattcttctgcct

SEQ ID NO: 17211 - DNA, 20 bp, synthetic construct
  misc_feature 1..20: note = Description of Artificial Sequence: Synthetic oligonucleotide
  misc_feature 1..20: note = Target: FXN; (+) strand; PAM type: NRG; PAM sequence: GAG
  source 1..20: mol_type = other DNA
ttcttctgcctcagcctcct

SEQ ID NO: 17212 - DNA, 20 bp, synthetic construct
  misc_feature 1..20: note = Description of Artificial Sequence: Synthetic oligonucleotide
  misc_feature 1..20: note = Target: FXN; (+) strand; PAM type: NRG; PAM sequence: TAG
  source 1..20: mol_type = other DNA
ttctgcctcagcctcctgag

SEQ ID NO: 17213 - DNA, 20 bp, synthetic construct
  misc_feature 1..20: note = Description of Artificial Sequence: Synthetic oligonucleotide
  misc_feature 1..20: note = Target: FXN; (+) strand; PAM type: NRG; PAM sequence: CAG
  source 1..20: mol_type = other DNA
cctcagcctcctgagtagca

SEQ ID NO: 17214 - DNA, 20 bp, synthetic construct
  misc_feature 1..20: note = Description of Artificial Sequence: Synthetic oligonucleotide
  misc_feature 1..20: note = Target: FXN; (+) strand; PAM type: NRG; PAM sequence: CAG
  source 1..20: mol_type = other DNA
ctcctgagtagcacagatta

SEQ ID NO: 17215 - DNA, 20 bp, synthetic construct
  misc_feature 1..20: note = Description of Artificial Sequence: Synthetic oligonucleotide
  misc_feature 1..20: note = Target: FXN; (+) strand; PAM type: NRG; PAM sequence: AGG
  source 1..20: mol_type = other DNA
tcctgagtagcacagattac

SEQ ID NO: 17216 - DNA, 20 bp, synthetic construct
  misc_feature 1..20: note = Description of Artificial Sequence: Synthetic oligonucleotide
  misc_feature 1..20: note = Target: FXN; (+) strand; PAM type: NRG; PAM sequence: TAG
  source 1..20: mol_type = other DNA
cttgctaatttttgtgtttt

SEQ ID NO: 17217 - DNA, 20 bp, synthetic construct
  misc_feature 1..20: note = Description of Artificial Sequence: Synthetic oligonucleotide
  misc_feature 1..20: note = Target: FXN; (+) strand; PAM type: NRG; PAM sequence: TAG
  source 1..20: mol_type = other DNA
gctaatttttgtgtttttag

SEQ ID NO: 17218 - DNA, 20 bp, synthetic construct
  misc_feature 1..20: note = Description of Artificial Sequence: Synthetic oligonucleotide
  misc_feature 1..20: note = Target: FXN; (+) strand; PAM type: NRG; PAM sequence: GAG
  source 1..20: mol_type = other DNA
taatttttgtgtttttagta

SEQ ID NO: 17219 - DNA, 20 bp, synthetic construct
  misc_feature 1..20: note = Description of Artificial Sequence: Synthetic oligonucleotide
  misc_feature 1..20: note = Target: FXN; (+) strand; PAM type: NRG; PAM sequence: AGG
  source 1..20: mol_type = other DNA
aatttttgtgtttttagtag

SEQ ID NO: 17220 - DNA, 20 bp, synthetic construct
  misc_feature 1..20: note = Description of Artificial Sequence: Synthetic oligonucleotide
  misc_feature 1..20: note = Target: FXN; (+) strand; PAM type: NRG; PAM sequence: CGG
  source 1..20: mol_type = other DNA
ttttgtgtttttagtagagg

SEQ ID NO: 17221 - DNA, 20 bp, synthetic construct
  misc_feature 1..20: note = Description of Artificial Sequence: Synthetic oligonucleotide
  misc_feature 1..20: note = Target: FXN; (+) strand; PAM type: NRG; PAM sequence: GGG
  source 1..20: mol_type = other DNA
tttgtgtttttagtagaggc

SEQ ID NO: 17222 - DNA, 20 bp, synthetic construct
  misc_feature 1..20: note = Description of Artificial Sequence: Synthetic oligonucleotide
  misc_feature 1..20: note = Target: FXN; (+) strand; PAM type: NRG; PAM sequence: GGG
  source 1..20: mol_type = other DNA
ttgtgtttttagtagaggcg

SEQ ID NO: 17223 - DNA, 20 bp, synthetic construct
  misc_feature 1..20: note = Description of Artificial Sequence: Synthetic oligonucleotide
  misc_feature 1..20: note = Target: FXN; (+) strand; PAM type: NRG; PAM sequence: TGG
  source 1..20: mol_type = other DNA
gaggcggggtttcaccatgt

SEQ ID NO: 17224 - DNA, 20 bp, synthetic construct
  misc_feature 1..20: note = Description of Artificial Sequence: Synthetic oligonucleotide
  misc_feature 1..20: note = Target: FXN; (+) strand; PAM type: NRG; PAM sequence: CAG
  source 1..20: mol_type = other DNA
cggggtttcaccatgttggc

SEQ ID NO: 17225 - DNA, 20 bp, synthetic construct
  misc_feature 1..20: note = Description of Artificial Sequence: Synthetic oligonucleotide
  misc_feature 1..20: note = Target: FXN; (+) strand; PAM type: NRG; PAM sequence: AGG
  source 1..20: mol_type = other DNA
ggggtttcaccatgttggcc

SEQ ID NO: 17226 - DNA, 20 bp, synthetic construct
  misc_feature 1..20: note = Description of Artificial Sequence: Synthetic oligonucleotide
  misc_feature 1..20: note = Target: FXN; (+) strand; PAM type: NRG; PAM sequence: TAG
  source 1..20: mol_type = other DNA
tttcaccatgttggccaggc

SEQ ID NO: 17227 - DNA, 20 bp, synthetic construct
  misc_feature 1..20: note = Description of Artificial Sequence: Synthetic oligonucleotide
  misc_feature 1..20: note = Target: FXN; (+) strand; PAM type: NRG; PAM sequence: CAG
  source 1..20: mol_type = other DNA
tagtcttgaactcctgacct

SEQ ID NO: 17228 - DNA, 20 bp, synthetic construct
  misc_feature 1..20: note = Description of Artificial Sequence: Synthetic oligonucleotide
  misc_feature 1..20: note = Target: FXN; (+) strand; PAM type: NRG; PAM sequence: AGG
  source 1..20: mol_type = other DNA
agtcttgaactcctgacctc

SEQ ID NO: 17229 - DNA, 20 bp, synthetic construct
  misc_feature 1..20: note = Description of Artificial Sequence: Synthetic oligonucleotide
  misc_feature 1..20: note = Target: FXN; (+) strand; PAM type: NRG; PAM sequence: CAG
  source 1..20: mol_type = other DNA
cgcctccgcctcccaaactg

SEQ ID NO: 17230 - DNA, 20 bp, synthetic construct
  misc_feature 1..20: note = Description of Artificial Sequence: Synthetic oligonucleotide
  misc_feature 1..20: note = Target: FXN; (+) strand; PAM type: NRG; PAM sequence: GAG
  source 1..20: mol_type = other DNA
cctccgcctcccaaactgca

SEQ ID NO: 17231 - DNA, 20 bp, synthetic construct
  misc_feature 1..20: note = Description of Artificial Sequence: Synthetic oligonucleotide
  misc_feature 1..20: note = Target: FXN; (+) strand; PAM type: NRG; PAM sequence: TAG
  source 1..20: mol_type = other DNA
ctcccaaactgcagagatta

SEQ ID NO: 17232 - DNA, 20 bp, synthetic construct
  misc_feature 1..20: note = Description of Artificial Sequence: Synthetic oligonucleotide
  misc_feature 1..20: note = Target: FXN; (+) strand; PAM type: NRG; PAM sequence: AGG
  source 1..20: mol_type = other DNA
tcccaaactgcagagattat

SEQ ID NO: 17233 - DNA, 20 bp, synthetic construct
  misc_feature 1..20: note = Description of Artificial Sequence: Synthetic oligonucleotide
  misc_feature 1..20: note = Target: FXN; (+) strand; PAM type: NRG; PAM sequence: CGG
  source 1..20: mol_type = other DNA
taggcacgaaccacaatgcc

SEQ ID NO: 17234 - DNA, 20 bp, synthetic construct
  misc_feature 1..20: note = Description of Artificial Sequence: Synthetic oligonucleotide
  misc_feature 1..20: note = Target: FXN; (+) strand; PAM type: NRG; PAM sequence: AAG
  source 1..20: mol_type = other DNA
cctcatgttttttatttttc

SEQ ID NO: 17235 - DNA, 20 bp, synthetic construct
  misc_feature 1..20: note = Description of Artificial Sequence: Synthetic oligonucleotide
  misc_feature 1..20: note = Target: FXN; (+) strand; PAM type: NRG; PAM sequence: GAG
  source 1..20: mol_type = other DNA
tttatttttcaagttgaaat

SEQ ID NO: 17236 - DNA, 20 bp, synthetic construct
  misc_feature 1..20: note = Description of Artificial Sequence: Synthetic oligonucleotide
  misc_feature 1..20: note = Target: FXN; (+) strand; PAM type: NRG; PAM sequence: AGG
  source 1..20: mol_type = other DNA
ttatttttcaagttgaaatg

SEQ ID NO: 17237 - DNA, 20 bp, synthetic construct
  misc_feature 1..20: note = Description of Artificial Sequence: Synthetic oligonucleotide
  misc_feature 1..20: note = Target: FXN; (+) strand; PAM type: NRG; PAM sequence: CAG
  source 1..20: mol_type = other DNA
tgaggtctctctatgttgcc

SEQ ID NO: 17238 - DNA, 20 bp, synthetic construct
  misc_feature 1..20: note = Description of Artificial Sequence: Synthetic oligonucleotide
  misc_feature 1..20: note = Target: FXN; (+) strand; PAM type: NRG; PAM sequence: AGG
  source 1..20: mol_type = other DNA
gaggtctctctatgttgccc

SEQ ID NO: 17239 - DNA, 20 bp, synthetic construct
  misc_feature 1..20: note = Description of Artificial Sequence: Synthetic oligonucleotide
  misc_feature 1..20: note = Target: FXN; (+) strand; PAM type: NRG; PAM sequence: TGG
  source 1..20: mol_type = other DNA
tctctctatgttgcccaggt

SEQ ID NO: 17240 - DNA, 20 bp, synthetic construct
  misc_feature 1..20: note = Description of Artificial Sequence: Synthetic oligonucleotide
  misc_feature 1..20: note = Target: FXN; (+) strand; PAM type: NRG; PAM sequence: GAG
  source 1..20: mol_type = other DNA
caggttggtctcaaactctt

SEQ ID NO: 17241 - DNA, 20 bp, synthetic construct
  misc_feature 1..20: note = Description of Artificial Sequence: Synthetic oligonucleotide
  misc_feature 1..20: note = Target: FXN; (+) strand; PAM type: NRG; PAM sequence: AAG
  source 1..20: mol_type = other DNA
ggtctcaaactcttgagctc

SEQ ID NO: 17242 - DNA, 20 bp, synthetic construct
  misc_feature 1..20: note = Description of Artificial Sequence: Synthetic oligonucleotide
  misc_feature 1..20: note = Target: FXN; (+) strand; PAM type: NRG; PAM sequence: TGG
  source 1..20: mol_type = other DNA
ctcaagtaatcctcccacct

SEQ ID NO: 17243 - DNA, 20 bp, synthetic construct
  misc_feature 1..20: note = Description of Artificial Sequence: Synthetic oligonucleotide
  misc_feature 1..20: note = Target: FXN; (+) strand; PAM type: NRG; PAM sequence: AAG
  source 1..20: mol_type = other DNA
cctcccaccttggcctccca

SEQ ID NO: 17244 - DNA, 20 bp, synthetic construct
  misc_feature 1..20: note = Description of Artificial Sequence: Synthetic oligonucleotide
  misc_feature 1..20: note = Target: FXN; (+) strand; PAM type: NRG; PAM sequence: CGG
  source 1..20: mol_type = other DNA
caccttggcctcccaaagtg

SEQ ID NO: 17245 - DNA, 20 bp, synthetic construct
  misc_feature 1..20: note = Description of Artificial Sequence: Synthetic oligonucleotide
  misc_feature 1..20: note = Target: FXN; (+) strand; PAM type: NRG; PAM sequence: GGG
  source 1..20: mol_type = other DNA
accttggcctcccaaagtgc

SEQ ID NO: 17246 - DNA, 20 bp, synthetic construct
  misc_feature 1..20: note = Description of Artificial Sequence: Synthetic oligonucleotide
  misc_feature 1..20: note = Target: FXN; (+) strand; PAM type: NRG; PAM sequence: GGG
  source 1..20: mol_type = other DNA
ccttggcctcccaaagtgcg

SEQ ID NO: 17247 - DNA, 20 bp, synthetic construct
  misc_feature 1..20: note = Description of Artificial Sequence: Synthetic oligonucleotide
  misc_feature 1..20: note = Target: FXN; (+) strand; PAM type: NRG; PAM sequence: CAG
  source 1..20: mol_type = other DNA
ctcccaaagtgcggggatta

SEQ ID NO: 17248 - DNA, 20 bp, synthetic construct
  misc_feature 1..20: note = Description of Artificial Sequence: Synthetic oligonucleotide
  misc_feature 1..20: note = Target: FXN; (+) strand; PAM type: NRG; PAM sequence: AGG
  source 1..20: mol_type = other DNA
tcccaaagtgcggggattac

SEQ ID NO: 17249 - DNA, 20 bp, synthetic construct
  misc_feature 1..20: note = Description of Artificial Sequence: Synthetic oligonucleotide
  misc_feature 1..20: note = Target: FXN; (+) strand; PAM type: NRG; PAM sequence: GAG
  source 1..20: mol_type = other DNA
agtgcggggattacaggtgt

SEQ ID NO: 17250 - DNA, 20 bp, synthetic construct
  misc_feature 1..20: note = Description of Artificial Sequence: Synthetic oligonucleotide
  misc_feature 1..20: note = Target: FXN; (+) strand; PAM type: NRG; PAM sequence: CAG
  source 1..20: mol_type = other DNA
caggtgtgagctaccatgcc

SEQ ID NO: 17251 - DNA, 20 bp, synthetic construct
  misc_feature 1..20: note = Description of Artificial Sequence: Synthetic oligonucleotide
  misc_feature 1..20: note = Target: FXN; (+) strand; PAM type: NRG; PAM sequence: AAG
  source 1..20: mol_type = other DNA
gtgagctaccatgcccagcc

SEQ ID NO: 17252 - DNA, 20 bp, synthetic construct
  misc_feature 1..20: note = Description of Artificial Sequence: Synthetic oligonucleotide
  misc_feature 1..20: note = Target: FXN; (+) strand; PAM type: NRG; PAM sequence: CAG
  source 1..20: mol_type = other DNA
ctaccatgcccagccaagat

SEQ ID NO: 17253 - DNA, 20 bp, synthetic construct
  misc_feature 1..20: note = Description of Artificial Sequence: Synthetic oligonucleotide
  misc_feature 1..20: note = Target: FXN; (+) strand; PAM type: NRG; PAM sequence: AAG
  source 1..20: mol_type = other DNA
atcaactatatatattacat

SEQ ID NO: 17254 - DNA, 20 bp, synthetic construct
  misc_feature 1..20: note = Description of Artificial Sequence: Synthetic oligonucleotide
  misc_feature 1..20: note = Target: FXN; (+) strand; PAM type: NRG; PAM sequence: AGG
  source 1..20: mol_type = other DNA
tcaactatatatattacata

SEQ ID NO: 17255 - DNA, 20 bp, synthetic construct
  misc_feature 1..20: note = Description of Artificial Sequence: Synthetic oligonucleotide
  misc_feature 1..20: note = Target: FXN; (+) strand; PAM type: NRG; PAM sequence: CAG
  source 1..20: mol_type = other DNA
ttacataaggtgtctttaaa

SEQ ID NO: 17256 - DNA, 20 bp, synthetic construct
  misc_feature 1..20: note = Description of Artificial Sequence: Synthetic oligonucleotide
  misc_feature 1..20: note = Target: FXN; (+) strand; PAM type: NRG; PAM sequence: AAG
  source 1..20: mol_type = other DNA
aggtgtctttaaacagaaat

SEQ ID NO: 17257 - DNA, 20 bp, synthetic construct
  misc_feature 1..20: note = Description of Artificial Sequence: Synthetic oligonucleotide
  misc_feature 1..20: note = Target: FXN; (+) strand; PAM type: NRG; PAM sequence: AGG
  source 1..20: mol_type = other DNA
ggtgtctttaaacagaaata

SEQ ID NO: 17258 - DNA, 20 bp, synthetic construct
  misc_feature 1..20: note = Description of Artificial Sequence: Synthetic oligonucleotide
  misc_feature 1..20: note = Target: FXN; (+) strand; PAM type: NRG; PAM sequence: TGG
  source 1..20: mol_type = other DNA
aaggttatatattgatcgat

SEQ ID NO: 17259 - DNA, 20 bp, synthetic construct
  misc_feature 1..20: note = Description of Artificial Sequence: Synthetic oligonucleotide
  misc_feature 1..20: note = Target: FXN; (+) strand; PAM type: NRG; PAM sequence: CAG
  source 1..20: mol_type = other DNA
attggtaacaatgttgtgac

SEQ ID NO: 17260 - DNA, 20 bp, synthetic construct
  misc_feature 1..20: note = Description of Artificial Sequence: Synthetic oligonucleotide
  misc_feature 1..20: note = Target: FXN; (+) strand; PAM type: NRG; PAM sequence: CAG
  source 1..20: mol_type = other DNA
ggtaacaatgttgtgaccag

SEQ ID NO: 17261 - DNA, 20 bp, synthetic construct
  misc_feature 1..20: note = Description of Artificial Sequence: Synthetic oligonucleotide
  misc_feature 1..20: note = Target: FXN; (+) strand; PAM type: NRG; PAM sequence: CAG
  source 1..20: mol_type = other DNA
atgttgtgaccagcagctta

SEQ ID NO: 17262 - DNA, 20 bp, synthetic construct
  misc_feature 1..20: note = Description of Artificial Sequence: Synthetic oligonucleotide
  misc_feature 1..20: note = Target: FXN; (+) strand; PAM type: NRG; PAM sequence: AGG
  source 1..20: mol_type = other DNA
tgttgtgaccagcagcttac

SEQ ID NO: 17263 - DNA, 20 bp, synthetic construct
  misc_feature 1..20: note = Description of Artificial Sequence: Synthetic oligonucleotide
  misc_feature 1..20: note = Target: FXN; (+) strand; PAM type: NRG; PAM sequence: GGG
  source 1..20: mol_type = other DNA
gttgtgaccagcagcttaca

SEQ ID NO: 17264 - DNA, 20 bp, synthetic construct
  misc_feature 1..20: note = Description of Artificial Sequence: Synthetic oligonucleotide
  misc_feature 1..20: note = Target: FXN; (+) strand; PAM type: NRG; PAM sequence: TAG
  source 1..20: mol_type = other DNA
ccagcagcttacagggtacc

SEQ ID NO: 17265 - DNA, 20 bp, synthetic construct
  misc_feature 1..20: note = Description of Artificial Sequence: Synthetic oligonucleotide
  misc_feature 1..20: note = Target: FXN; (+) strand; PAM type: NRG; PAM sequence: GAG
  source 1..20: mol_type = other DNA
ctataaataatttgctcgtt

SEQ ID NO: 17266 - DNA, 20 bp, synthetic construct
  misc_feature 1..20: note = Description of Artificial Sequence: Synthetic oligonucleotide
  misc_feature 1..20: note = Target: FXN; (+) strand; PAM type: NRG; PAM sequence: TGG
  source 1..20: mol_type = other DNA
atttgctcgttgagtgtttg

SEQ ID NO: 17267 - DNA, 20 bp, synthetic construct
  misc_feature 1..20: note = Description of Artificial Sequence: Synthetic oligonucleotide
  misc_feature 1..20: note = Target: FXN; (+) strand; PAM type: NRG; PAM sequence: TAG
  source 1..20: mol_type = other DNA
gagtgtttgtggcaactttg

SEQ ID NO: 17268 - DNA, 20 bp, synthetic construct
  misc_feature 1..20: note = Description of Artificial Sequence: Synthetic oligonucleotide
  misc_feature 1..20: note = Target: FXN; (+) strand; PAM type: NRG; PAM sequence: AAG
  source 1..20: mol_type = other DNA
ctttgtagcacataactacc

SEQ ID NO: 17269 - DNA, 20 bp, synthetic construct
  misc_feature 1..20: note = Description of Artificial Sequence: Synthetic oligonucleotide
  misc_feature 1..20: note = Target: FXN; (+) strand; PAM type: NRG; PAM sequence: AAG
  source 1..20: mol_type = other DNA
agcacataactaccaagaat

SEQ ID NO: 17270 - DNA, 20 bp, synthetic construct
  misc_feature 1..20: note = Description of Artificial Sequence: Synthetic oligonucleotide
  misc_feature 1..20: note = Target: FXN; (+) strand; PAM type: NRG; PAM sequence: AGG
  source 1..20: mol_type = other DNA
gcacataactaccaagaata

SEQ ID NO: 17271 - DNA, 20 bp, synthetic construct
  misc_feature 1..20: note = Description of Artificial Sequence: Synthetic oligonucleotide
  misc_feature 1..20: note = Target: FXN; (+) strand; PAM type: NRG; PAM sequence: AAG
  source 1..20: mol_type = other DNA
ccaagaataaggactgtaat

SEQ ID NO: 17272 - DNA, 20 bp, synthetic construct
  misc_feature 1..20: note = Description of Artificial Sequence: Synthetic oligonucleotide
  misc_feature 1..20: note = Target: FXN; (+) strand; PAM type: NRG; PAM sequence: GAG
  source 1..20: mol_type = other DNA
aagaataaggactgtaataa

SEQ ID NO: 17273 - DNA, 20 bp, synthetic construct
  misc_feature 1..20: note = Description of Artificial Sequence: Synthetic oligonucleotide
  misc_feature 1..20: note = Target: FXN; (+) strand; PAM type: NRG; PAM sequence: CAG
  source 1..20: mol_type = other DNA
taataagagtacgtccctca

SEQ ID NO: 17274 - DNA, 20 bp, synthetic construct
  misc_feature 1..20: note = Description of Artificial Sequence: Synthetic oligonucleotide
  misc_feature 1..20: note = Target: FXN; (+) strand; PAM type: NRG; PAM sequence: AGG
  source 1..20: mol_type = other DNA
aataagagtacgtccctcac

SEQ ID NO: 17275 - DNA, 20 bp, synthetic construct
  misc_feature 1..20: note = Description of Artificial Sequence: Synthetic oligonucleotide
  misc_feature 1..20: note = Target: FXN; (+) strand; PAM type: NRG; PAM sequence: AAG
  source 1..20: mol_type = other DNA
tccctcacaggattgtaatg

SEQ ID NO: 17276 - DNA, 20 bp, synthetic construct
  misc_feature 1..20: note = Description of Artificial Sequence: Synthetic oligonucleotide
  misc_feature 1..20: note = Target: FXN; (+) strand; PAM type: NRG; PAM sequence: GAG
  source 1..20: mol_type = other DNA
acaggattgtaatgaagact

SEQ ID NO: 17277 - DNA, 20 bp, synthetic construct
  misc_feature 1..20: note = Description of Artificial Sequence: Synthetic oligonucleotide
  misc_feature 1..20: note = Target: FXN; (+) strand; PAM type: NRG; PAM sequence: AAG
  source 1..20: mol_type = other DNA
agactgagtccatttacata

SEQ ID NO: 17278 - DNA, 20 bp, synthetic construct
  misc_feature 1..20: note = Description of Artificial Sequence: Synthetic oligonucleotide
  misc_feature 1..20: note = Target: FXN; (+) strand; PAM type: NRG; PAM sequence: AGG
  source 1..20: mol_type = other DNA
gactgagtccatttacataa

SEQ ID NO: 17279 - DNA, 20 bp, synthetic construct
  misc_feature 1..20: note = Description of Artificial Sequence: Synthetic oligonucleotide
  misc_feature 1..20: note = Target: FXN; (+) strand; PAM type: NRG; PAM sequence: GAG
  source 1..20: mol_type = other DNA
agtccatttacataaaggct

SEQ ID NO: 17280 - DNA, 20 bp, synthetic construct
  misc_feature 1..20: note = Description of Artificial Sequence: Synthetic oligonucleotide
  misc_feature 1..20: note = Target: FXN; (+) strand; PAM type: NRG; PAM sequence: GAG
  source 1..20: mol_type = other DNA
tccatttacataaaggctga

SEQ ID NO: 17281 - DNA, 20 bp, synthetic construct
  misc_feature 1..20: note = Description of Artificial Sequence: Synthetic oligonucleotide
  misc_feature 1..20: note = Target: FXN; (+) strand; PAM type: NRG; PAM sequence: CAG
  source 1..20: mol_type = other DNA
atttacataaaggctgagag

SEQ ID NO: 17282 - DNA, 20 bp, synthetic construct
  misc_feature 1..20: note = Description of Artificial Sequence: Synthetic oligonucleotide
  misc_feature 1..20: note = Target: FXN; (+) strand; PAM type: NRG; PAM sequence: AAG
  source 1..20: mol_type = other DNA
taaaggctgagagcagtgtc

SEQ ID NO: 17283 - DNA, 20 bp, synthetic construct
  misc_feature 1..20: note = Description of Artificial Sequence: Synthetic oligonucleotide
  misc_feature 1..20: note = Target: FXN; (+) strand; PAM type: NRG; PAM sequence: CAG
  source 1..20: mol_type = other DNA
aggctgagagcagtgtcaag

SEQ ID NO: 17284 - DNA, 20 bp, synthetic construct
  misc_feature 1..20: note = Description of Artificial Sequence: Synthetic oligonucleotide
  misc_feature 1..20: note = Target: FXN; (+) strand; PAM type: NRG; PAM sequence: TGG
  source 1..20: mol_type = other DNA
tgagagcagtgtcaagcaga

SEQ ID NO: 17285 - DNA, 20 bp, synthetic construct
  misc_feature 1..20: note = Description of Artificial Sequence: Synthetic oligonucleotide
  misc_feature 1..20: note = Target: FXN; (+) strand; PAM type: NRG; PAM sequence: GAG
  source 1..20: mol_type = other DNA
agagcagtgtcaagcagatg

SEQ ID NO: 17286 - DNA, 20 bp, synthetic construct
  misc_feature 1..20: note = Description of Artificial Sequence: Synthetic oligonucleotide
  misc_feature 1..20: note = Target: FXN; (+) strand; PAM type: NRG; PAM sequence: TAG
  source 1..20: mol_type = other DNA
caagcagatggagaacactg

SEQ ID NO: 17287 - DNA, 20 bp, synthetic construct
  misc_feature 1..20: note = Description of Artificial Sequence: Synthetic oligonucleotide
  misc_feature 1..20: note = Target: FXN; (+) strand; PAM type: NRG; PAM sequence: TAG
  source 1..20: mol_type = other DNA
gaacactgtagaatgtgcga

SEQ ID NO: 17288 - DNA, 20 bp, synthetic construct
  misc_feature 1..20: note = Description of Artificial Sequence: Synthetic oligonucleotide
  misc_feature 1..20: note = Target: FXN; (+) strand; PAM type: NRG; PAM sequence: CAG
  source 1..20: mol_type = other DNA
agaatgtgcgatagctctaa

SEQ ID NO: 17289 - DNA, 20 bp, synthetic construct
  misc_feature 1..20: note = Description of Artificial Sequence: Synthetic oligonucleotide
  misc_feature 1..20: note = Target: FXN; (+) strand; PAM type: NRG; PAM sequence: TGG
  source 1..20: mol_type = other DNA
atgtgcgatagctctaacag

SEQ ID NO: 17290 - DNA, 20 bp, synthetic construct
  misc_feature 1..20: note = Description of Artificial Sequence: Synthetic oligonucleotide
  misc_feature 1..20: note = Target: FXN; (+) strand; PAM type: NRG; PAM sequence: TGG
  source 1..20: mol_type = other DNA
agctctaacagtggttatca

SEQ ID NO: 17291 - DNA, 20 bp, synthetic construct
  misc_feature 1..20: note = Description of Artificial Sequence: Synthetic oligonucleotide
  misc_feature 1..20: note = Target: FXN; (+) strand; PAM type: NRG; PAM sequence: CAG
  source 1..20: mol_type = other DNA
tggctgccctctcacttctt

SEQ ID NO: 17292 - DNA, 20 bp, synthetic construct
  misc_feature 1..20: note = Description of Artificial Sequence: Synthetic oligonucleotide
  misc_feature 1..20: note = Target: FXN; (+) strand; PAM type: NRG; PAM sequence: GAG
  source 1..20: mol_type = other DNA
gctgccctctcacttcttca

SEQ ID NO: 17293 - DNA, 20 bp, synthetic construct
  misc_feature 1..20: note = Description of Artificial Sequence: Synthetic oligonucleotide
  misc_feature 1..20: note = Target: FXN; (+) strand; PAM type: NRG; PAM sequence: AAG
  source 1..20: mol_type = other DNA
cttcagagacatgtgtttct

SEQ ID NO: 17294 - DNA, 20 bp, synthetic construct
  misc_feature 1..20: note = Description of Artificial Sequence: Synthetic oligonucleotide
  misc_feature 1..20: note = Target: FXN; (+) strand; PAM type: NRG; PAM sequence: AGG
  source 1..20: mol_type = other DNA
ttcagagacatgtgtttcta

SEQ ID NO: 17295 - DNA, 20 bp, synthetic construct
  misc_feature 1..20: note = Description of Artificial Sequence: Synthetic oligonucleotide
  misc_feature 1..20: note = Target: FXN; (+) strand; PAM type: NRG; PAM sequence: CAG
  source 1..20: mol_type = other DNA
cctccccatccactgtcccc

SEQ ID NO: 17296 - DNA, 20 bp, synthetic construct
  misc_feature 1..20: note = Description of Artificial Sequence: Synthetic oligonucleotide
  misc_feature 1..20: note = Target: FXN; (+) strand; PAM type: NRG; PAM sequence: CAG
  source 1..20: mol_type = other DNA
ttcctcctccacttacttcc

SEQ ID NO: 17297 - DNA, 20 bp, synthetic construct
  misc_feature 1..20: note = Description of Artificial Sequence: Synthetic oligonucleotide
  misc_feature 1..20: note = Target: FXN; (+) strand; PAM type: NRG; PAM sequence: GAG
  source 1..20: mol_type = other DNA
ccttctgccttctcttttct

SEQ ID NO: 17298 - DNA, 20 bp, synthetic construct
  misc_feature 1..20: note = Description of Artificial Sequence: Synthetic oligonucleotide
  misc_feature 1..20: note = Target: FXN; (+) strand; PAM type: NRG; PAM sequence: AAG
  source 1..20: mol_type = other DNA
ttctcttttctgagtttgct

SEQ ID NO: 17299 - DNA, 20 bp, synthetic construct
  misc_feature 1..20: note = Description of Artificial Sequence: Synthetic oligonucleotide
  misc_feature 1..20: note = Target: FXN; (+) strand; PAM type: NRG; PAM sequence: AGG
  source 1..20: mol_type = other DNA
tctcttttctgagtttgcta

SEQ ID NO: 17300 - DNA, 20 bp, synthetic construct
  misc_feature 1..20: note = Description of Artificial Sequence: Synthetic oligonucleotide
  misc_feature 1..20: note = Target: FXN; (+) strand; PAM type: NRG; PAM sequence: GGG
  source 1..20: mol_type = other DNA
ctcttttctgagtttgctaa

SEQ ID NO: 17301 - DNA, 20 bp, synthetic construct
  misc_feature 1..20: note = Description of Artificial Sequence: Synthetic oligonucleotide
  misc_feature 1..20: note = Target: FXN; (+) strand; PAM type: NRG; PAM sequence: TGG
  source 1..20: mol_type = other DNA
gagtttgctaagggcactgc

SEQ ID NO: 17302 - DNA, 20 bp, synthetic construct
  misc_feature 1..20: note = Description of Artificial Sequence: Synthetic oligonucleotide
  misc_feature 1..20: note = Target: FXN; (+) strand; PAM type: NRG; PAM sequence: AAG
  source 1..20: mol_type = other DNA
gctaagggcactgctggctc

SEQ ID NO: 17303 - DNA, 20 bp, synthetic construct
  misc_feature 1..20: note = Description of Artificial Sequence: Synthetic oligonucleotide
  misc_feature 1..20: note = Target: FXN; (+) strand; PAM type: NRG; PAM sequence: GAG
  source 1..20: mol_type = other DNA
taagggcactgctggctcaa

SEQ ID NO: 17304 - DNA, 20 bp, synthetic construct
  misc_feature 1..20: note = Description of Artificial Sequence: Synthetic oligonucleotide
  misc_feature 1..20: note = Target: FXN; (+) strand; PAM type: NRG; PAM sequence: CAG
  source 1..20: mol_type = other DNA
gggcactgctggctcaagag

SEQ ID NO: 17305 - DNA, 20 bp, synthetic construct
  misc_feature 1..20: note = Description of Artificial Sequence: Synthetic oligonucleotide
  misc_feature 1..20: note = Target: FXN; (+) strand; PAM type: NRG; PAM sequence: CAG
  source 1..20: mol_type = other DNA
ggctcaagagcagtaactaa

SEQ ID NO: 17306 - DNA, 20 bp, synthetic construct
  misc_feature 1..20: note = Description of Artificial Sequence: Synthetic oligonucleotide
  misc_feature 1..20: note = Target: FXN; (+) strand; PAM type: NRG; PAM sequence: TGG
  source 1..20: mol_type = other DNA
tctctcgcctcttctctcca

SEQ ID NO: 17307 - DNA, 20 bp, synthetic construct
  misc_feature 1..20: note = Description of Artificial Sequence: Synthetic oligonucleotide
  misc_feature 1..20: note = Target: FXN; (+) strand; PAM type: NRG; PAM sequence: CAG
  source 1..20: mol_type = other DNA
cctcttctctccatggcaac

SEQ ID NO: 17308 - DNA, 20 bp, synthetic construct
  misc_feature 1..20: note = Description of Artificial Sequence: Synthetic oligonucleotide
  misc_feature 1..20: note = Target: FXN; (+) strand; PAM type: NRG; PAM sequence: TGG
  source 1..20: mol_type = other DNA
ccatggcaaccagtgacctt

SEQ ID NO: 17309 - DNA, 20 bp, synthetic construct
  misc_feature 1..20: note = Description of Artificial Sequence: Synthetic oligonucleotide
  misc_feature 1..20: note = Target: FXN; (+) strand; PAM type: NRG; PAM sequence: GAG
  source 1..20: mol_type = other DNA
atggcaaccagtgacctttg

SEQ ID NO: 17310 - DNA, 20 bp, synthetic construct
  misc_feature 1..20: note = Description of Artificial Sequence: Synthetic oligonucleotide
  misc_feature 1..20: note = Target: FXN; (+) strand; PAM type: NRG; PAM sequence: AAG
  source 1..20: mol_type = other DNA
accttatcaccaatctctta

SEQ ID NO: 17311 - DNA, 20 bp, synthetic construct
  misc_feature 1..20: note = Description of Artificial Sequence: Synthetic oligonucleotide
  misc_feature 1..20: note = Target: FXN; (+) strand; PAM type: NRG; PAM sequence: CGG
  source 1..20: mol_type = other DNA
accaatctcttaaagccctt

SEQ ID NO: 17312 - DNA, 20 bp, synthetic construct
  misc_feature 1..20: note = Description of Artificial Sequence: Synthetic oligonucleotide
  misc_feature 1..20: note = Target: FXN; (+) strand; PAM type: NRG; PAM sequence: CAG
  source 1..20: mol_type = other DNA
aaagcccttcggtgccttcc

SEQ ID NO: 17313 - DNA, 20 bp, synthetic construct
  misc_feature 1..20: note = Description of Artificial Sequence: Synthetic oligonucleotide
  misc_feature 1..20: note = Target: FXN; (+) strand; PAM type: NRG; PAM sequence: AGG
  source 1..20: mol_type = other DNA
aagcccttcggtgccttccc

SEQ ID NO: 17314 - DNA, 20 bp, synthetic construct
  misc_feature 1..20: note = Description of Artificial Sequence: Synthetic oligonucleotide
  misc_feature 1..20: note = Target: FXN; (+) strand; PAM type: NRG; PAM sequence: CAG
  source 1..20: mol_type = other DNA
tgccttcccaggatgacgtc

SEQ ID NO: 17315 - DNA, 20 bp, synthetic construct
  misc_feature 1..20: note = Description of Artificial Sequence: Synthetic oligonucleotide
  misc_feature 1..20: note = Target: FXN; (+) strand; PAM type: NRG; PAM sequence: GAG
  source 1..20: mol_type = other DNA
tcccaggatgacgtccagct

SEQ ID NO: 17316 - DNA, 20 bp, synthetic construct
  misc_feature 1..20: note = Description of Artificial Sequence: Synthetic oligonucleotide
  misc_feature 1..20: note = Target: FXN; (+) strand; PAM type: NRG; PAM sequence: AGG
  source 1..20: mol_type = other DNA
cccaggatgacgtccagctg

SEQ ID NO: 17317 - DNA, 20 bp, synthetic construct
  misc_feature 1..20: note = Description of Artificial Sequence: Synthetic oligonucleotide
  misc_feature 1..20: note = Target: FXN; (+) strand; PAM type: NRG; PAM sequence: TGG
  source 1..20: mol_type = other DNA
tgacgtccagctgaggtcct

SEQ ID NO: 17318 - DNA, 20 bp, synthetic construct
  misc_feature 1..20: note = Description of Artificial Sequence: Synthetic oligonucleotide
  misc_feature 1..20: note = Target: FXN; (+) strand; PAM type: NRG; PAM sequence: AAG
  source 1..20: mol_type = other DNA
gtccagctgaggtccttggc

SEQ ID NO: 17319 - DNA, 20 bp, synthetic construct
  misc_feature 1..20: note = Description of Artificial Sequence: Synthetic oligonucleotide
  misc_feature 1..20: note = Target: FXN; (+) strand; PAM type: NRG; PAM sequence: CAG
  source 1..20: mol_type = other DNA
ctgaggtccttggcaagacc

SEQ ID NO: 17320 - DNA, 20 bp, synthetic construct
  misc_feature 1..20: note = Description of Artificial Sequence: Synthetic oligonucleotide
  misc_feature 1..20: note = Target: FXN; (+) strand; PAM type: NRG; PAM sequence: AGG
  source 1..20: mol_type = other DNA
tgaggtccttggcaagaccc

SEQ ID NO: 17321 - DNA, 20 bp, synthetic construct
  misc_feature 1..20: note = Description of Artificial Sequence: Synthetic oligonucleotide
  misc_feature 1..20: note = Target: FXN; (+) strand; PAM type: NRG; PAM sequence: GGG
  source 1..20: mol_type = other DNA
gaggtccttggcaagaccca

SEQ ID NO: 17322 - DNA, 20 bp, synthetic construct
  misc_feature 1..20: note = Description of Artificial Sequence: Synthetic oligonucleotide
  misc_feature 1..20: note = Target: FXN; (+) strand; PAM type: NRG; PAM sequence: CAG
  source 1..20: mol_type = other DNA
tcccctgcatctccctactc

SEQ ID NO: 17323 - DNA, 20 bp, synthetic construct
  misc_feature 1..20: note = Description of Artificial Sequence: Synthetic oligonucleotide
  misc_feature 1..20: note = Target: FXN; (+) strand; PAM type: NRG; PAM sequence: CAG
  source 1..20: mol_type = other DNA
gctgcaccactcttgtgccc

SEQ ID NO: 17324 - DNA, 20 bp, synthetic construct
  misc_feature 1..20: note = Description of Artificial Sequence: Synthetic oligonucleotide
  misc_feature 1..20: note = Target: FXN; (+) strand; PAM type: NRG; PAM sequence: TGG
  source 1..20: mol_type = other DNA
gcaccactcttgtgccccag

SEQ ID NO: 17325 - DNA, 20 bp, synthetic construct
  misc_feature 1..20: note = Description of Artificial Sequence: Synthetic oligonucleotide
  misc_feature 1..20: note = Target: FXN; (+) strand; PAM type: NRG; PAM sequence: CAG
  source 1..20: mol_type = other DNA
gattatttccttcatctccc

SEQ ID NO: 17326 - DNA, 20 bp, synthetic construct
  misc_feature 1..20: note = Description of Artificial Sequence: Synthetic oligonucleotide
  misc_feature 1..20: note = Target: FXN; (+) strand; PAM type: NRG; PAM sequence: TGG
  source 1..20: mol_type = other DNA
atttccttcatctccccagc

SEQ ID NO: 17327 - DNA, 20 bp, synthetic construct
  misc_feature 1..20: note = Description of Artificial Sequence: Synthetic oligonucleotide
  misc_feature 1..20: note = Target: FXN; (+) strand; PAM type: NRG; PAM sequence: CAG
  source 1..20: mol_type = other DNA
ccttcatctccccagctggt

SEQ ID NO: 17328 - DNA, 20 bp, synthetic construct
  misc_feature 1..20: note = Description of Artificial Sequence: Synthetic oligonucleotide
  misc_feature 1..20: note = Target: FXN; (+) strand; PAM type: NRG; PAM sequence: CAG
  source 1..20: mol_type = other DNA
tcatctccccagctggtcag

SEQ ID NO: 17329 - DNA, 20 bp, synthetic construct
  misc_feature 1..20: note = Description of Artificial Sequence: Synthetic oligonucleotide
  misc_feature 1..20: note = Target: FXN; (+) strand; PAM type: NRG; PAM sequence: GAG
  source 1..20: mol_type = other DNA
atctccccagctggtcagca

SEQ ID NO: 17330 - DNA, 20 bp, synthetic construct
  misc_feature 1..20: note = Description of Artificial Sequence: Synthetic oligonucleotide
  misc_feature 1..20: note = Target: FXN; (+) strand; PAM type: NRG; PAM sequence: TGG
  source 1..20: mol_type = other DNA
ccccagctggtcagcagagc

SEQ ID NO: 17331 - DNA, 20 bp, synthetic construct
  misc_feature 1..20: note = Description of Artificial Sequence: Synthetic oligonucleotide
  misc_feature 1..20: note = Target: FXN; (+) strand; PAM type: NRG; PAM sequence: TGG
  source 1..20: mol_type = other DNA
cagctggtcagcagagctgg

SEQ ID NO: 17332 - DNA, 20 bp, synthetic construct
  misc_feature 1..20: note = Description of Artificial Sequence: Synthetic oligonucleotide
  misc_feature 1..20: note = Target: FXN; (+) strand; PAM type: NRG; PAM sequence: CAG
  source 1..20: mol_type = other DNA
agagctggtggtaatcaact

SEQ ID NO: 17333 - DNA, 20 bp, synthetic construct
  misc_feature 1..20: note = Description of Artificial Sequence: Synthetic oligonucleotide
  misc_feature 1..20: note = Target: FXN; (+) strand; PAM type: NRG; PAM sequence: TGG
  source 1..20: mol_type = other DNA
tcaactcagaccctgtcacc

SEQ ID NO: 17334 - DNA, 20 bp, synthetic construct
  misc_feature 1..20: note = Description of Artificial Sequence: Synthetic oligonucleotide
  misc_feature 1..20: note = Target: FXN; (+) strand; PAM type: NRG; PAM sequence: CAG
  source 1..20: mol_type = other DNA
gaccctgtcacctggatgtc

SEQ ID NO: 17335 - DNA, 20 bp, synthetic construct
  misc_feature 1..20: note = Description of Artificial Sequence: Synthetic oligonucleotide
  misc_feature 1..20: note = Target: FXN; (+) strand; PAM type: NRG; PAM sequence: CAG
  source 1..20: mol_type = other DNA
cctgtcacctggatgtccag

SEQ ID NO: 17336 - DNA, 20 bp, synthetic construct
  misc_feature 1..20: note = Description of Artificial Sequence: Synthetic oligonucleotide
  misc_feature 1..20: note = Target: FXN; (+) strand; PAM type: NRG; PAM sequence: TAG
  source 1..20: mol_type = other DNA
tcacctggatgtccagcagt

SEQ ID NO: 17337 - DNA, 20 bp, synthetic construct
  misc_feature 1..20: note = Description of Artificial Sequence: Synthetic oligonucleotide
  misc_feature 1..20: note = Target: FXN; (+) strand; PAM type: NRG; PAM sequence: AGG
  source 1..20: mol_type = other DNA
cacctggatgtccagcagtt

SEQ ID NO: 17338 - DNA, 20 bp, synthetic construct
  misc_feature 1..20: note = Description of Artificial Sequence: Synthetic oligonucleotide
  misc_feature 1..20: note = Target: FXN; (+) strand; PAM type: NRG; PAM sequence: GGG
  source 1..20: mol_type = other DNA
acctggatgtccagcagtta

SEQ ID NO: 17339 - DNA, 20 bp, synthetic construct
  misc_feature 1..20: note = Description of Artificial Sequence: Synthetic oligonucleotide
  misc_feature 1..20: note = Target: FXN; (+) strand; PAM type: NRG; PAM sequence: CAG
  source 1..20: mol_type = other DNA
tagggactaaaaaaaatcaa

SEQ ID NO: 17340 - DNA, 20 bp, synthetic construct
  misc_feature 1..20: note = Description of Artificial Sequence: Synthetic oligonucleotide
  misc_feature 1..20: note = Target: FXN; (+) strand; PAM type: NRG; PAM sequence: AGG
  source 1..20: mol_type = other DNA
agggactaaaaaaaatcaac

SEQ ID NO: 17341 - DNA, 20 bp, synthetic construct
  misc_feature 1..20: note = Description of Artificial Sequence: Synthetic oligonucleotide
  misc_feature 1..20: note = Target: FXN; (+) strand; PAM type: NRG; PAM sequence: CAG
  source 1..20: mol_type = other DNA
acaggtcacattctgtcctg

SEQ ID NO: 17342 - DNA, 20 bp, synthetic construct
  misc_feature 1..20: note = Description of Artificial Sequence: Synthetic oligonucleotide
  misc_feature 1..20: note = Target: FXN; (+) strand; PAM type: NRG; PAM sequence: AAG
  source 1..20: mol_type = other DNA
gtcctgcagatcatgataat

SEQ ID NO: 17343 - DNA, 20 bp, synthetic construct
  misc_feature 1..20: note = Description of Artificial Sequence: Synthetic oligonucleotide
  misc_feature 1..20: note = Target: FXN; (+) strand; PAM type: NRG; PAM sequence: CAG
  source 1..20: mol_type = other DNA
atcatgataataagatctgt

SEQ ID NO: 17344 - DNA, 20 bp, synthetic construct
  misc_feature 1..20: note = Description of Artificial Sequence: Synthetic oligonucleotide
  misc_feature 1..20: note = Target: FXN; (+) strand; PAM type: NRG; PAM sequence: CAG
  source 1..20: mol_type = other DNA
tgataataagatctgtcaga

SEQ ID NO: 17345 - DNA, 20 bp, synthetic construct
  misc_feature 1..20: note = Description of Artificial Sequence: Synthetic oligonucleotide
  misc_feature 1..20: note = Target: FXN; (+) strand; PAM type: NRG; PAM sequence: CAG
  source 1..20: mol_type = other DNA
taataagatctgtcagacag

SEQ ID NO: 17346 - DNA, 20 bp, synthetic construct
  misc_feature 1..20: note = Description of Artificial Sequence: Synthetic oligonucleotide
  misc_feature 1..20: note = Target: FXN; (+) strand; PAM type: NRG; PAM sequence: CAG
  source 1..20: mol_type = other DNA
aagatctgtcagacagcagt

SEQ ID NO: 17347 - DNA, 20 bp, synthetic construct
  misc_feature 1..20: note = Description of Artificial Sequence: Synthetic oligonucleotide
  misc_feature 1..20: note = Target: FXN; (+) strand; PAM type: NRG; PAM sequence: CAG
  source 1..20: mol_type = other DNA
atctgtcagacagcagtcag

SEQ ID NO: 17348 - DNA, 20 bp, synthetic construct
  misc_feature 1..20: note = Description of Artificial Sequence: Synthetic oligonucleotide
  misc_feature 1..20: note = Target: FXN; (+) strand; PAM type: NRG; PAM sequence: CAG
  source 1..20: mol_type = other DNA
gtcagacagcagtcagcagt

SEQ ID NO: 17349 - DNA, 20 bp, synthetic construct
  misc_feature 1..20: note = Description of Artificial Sequence: Synthetic oligonucleotide
  misc_feature 1..20: note = Target: FXN; (+) strand; PAM type: NRG; PAM sequence: GAG
  source 1..20: mol_type = other DNA
cagacagcagtcagcagtca

SEQ ID NO: 17350 - DNA, 20 bp, synthetic construct
  misc_feature 1..20: note = Description of Artificial Sequence: Synthetic oligonucleotide
  misc_feature 1..20: note = Target: FXN; (+) strand; PAM type: NRG; PAM sequence: TGG
  source 1..20: mol_type = other DNA
gcagtcagagccaaatcttc

SEQ ID NO: 17351 - DNA, 20 bp, synthetic construct
  misc_feature 1..20: note = Description of Artificial Sequence: Synthetic oligonucleotide
  misc_feature 1..20: note = Target: FXN; (+) strand; PAM type: NRG; PAM sequence: CAG
  source 1..20: mol_type = other DNA
gagccaaatcttctggactt

SEQ ID NO: 17352 - DNA, 20 bp, synthetic construct
  misc_feature 1..20: note = Description of Artificial Sequence: Synthetic oligonucleotide
  misc_feature 1..20: note = Target: FXN; (+) strand; PAM type: NRG; PAM sequence: CAG
  source 1..20: mol_type = other DNA
ccaaatcttctggacttcag

SEQ ID NO: 17353 - DNA, 20 bp, synthetic construct
  misc_feature 1..20: note = Description of Artificial Sequence: Synthetic oligonucleotide
  misc_feature 1..20: note = Target: FXN; (+) strand; PAM type: NRG; PAM sequence: AGG
  source 1..20: mol_type = other DNA
caaatcttctggacttcagc

SEQ ID NO: 17354 - DNA, 20 bp, synthetic construct
  misc_feature 1..20: note = Description of Artificial Sequence: Synthetic oligonucleotide
  misc_feature 1..20: note = Target: FXN; (+) strand; PAM type: NRG; PAM sequence: TAG
  source 1..20: mol_type = other DNA
ctatttcctgttgcctctct

SEQ ID NO: 17355 - DNA, 20 bp, synthetic construct
  misc_feature 1..20: note = Description of Artificial Sequence: Synthetic oligonucleotide
  misc_feature 1..20: note = Target: FXN; (+) strand; PAM type: NRG; PAM sequence: AAG
  source 1..20: mol_type = other DNA
gcctctcttagtgacctttt

SEQ ID NO: 17356 - DNA, 20 bp, synthetic construct
  misc_feature 1..20: note = Description of Artificial Sequence: Synthetic oligonucleotide
  misc_feature 1..20: note = Target: FXN; (+) strand; PAM type: NRG; PAM sequence: GAG
  source 1..20: mol_type = other DNA
ctctcttagtgaccttttaa

SEQ ID NO: 17357 - DNA, 20 bp, synthetic construct
  misc_feature 1..20: note = Description of Artificial Sequence: Synthetic oligonucleotide
  misc_feature 1..20: note = Target: FXN; (+) strand; PAM type: NRG; PAM sequence: TGG
  source 1..20: mol_type = other DNA
gtgaccttttaagagcattg

SEQ ID NO: 17358 - DNA, 20 bp, synthetic construct
  misc_feature 1..20: note = Description of Artificial Sequence: Synthetic oligonucleotide
  misc_feature 1..20: note = Target: FXN; (+) strand; PAM type: NRG; PAM sequence: CAG
  source 1..20: mol_type = other DNA
agagcattgtggatgcctcc

SEQ ID NO: 17359 - DNA, 20 bp, synthetic construct
  misc_feature 1..20: note = Description of Artificial Sequence: Synthetic oligonucleotide
  misc_feature 1..20: note = Target: FXN; (+) strand; PAM type: NRG; PAM sequence: CAG
  source 1..20: mol_type = other DNA
taaccaccctgtaacctgaa

SEQ ID NO: 17360 - DNA, 20 bp, synthetic construct
  misc_feature 1..20: note = Description of Artificial Sequence: Synthetic oligonucleotide
  misc_feature 1..20: note = Target: FXN; (+) strand; PAM type: NRG; PAM sequence: CAG
  source 1..20: mol_type = other DNA
cctgtaacctgaacagcctg

SEQ ID NO: 17361 - DNA, 20 bp, synthetic construct
  misc_feature 1..20: note = Description of Artificial Sequence: Synthetic oligonucleotide
  misc_feature 1..20: note = Target: FXN; (+) strand; PAM type: NRG; PAM sequence: CAG
  source 1..20: mol_type = other DNA
gtaacctgaacagcctgcag

SEQ ID NO: 17362 - DNA, 20 bp, synthetic construct
  misc_feature 1..20: note = Description of Artificial Sequence: Synthetic oligonucleotide
  misc_feature 1..20: note = Target: FXN; (+) strand; PAM type: NRG; PAM sequence: CAG
  source 1..20: mol_type = other DNA
cagcctgcagcagccctgcc

SEQ ID NO: 17363 - DNA, 20 bp, synthetic construct
  misc_feature 1..20: note = Description of Artificial Sequence: Synthetic oligonucleotide
  misc_feature 1..20: note = Target: FXN; (+) strand; PAM type: NRG; PAM sequence: TAG
  source 1..20: mol_type = other DNA
cctgcagcagccctgcccag

SEQ ID NO: 17364 - DNA, 20 bp, synthetic construct
  misc_feature 1..20: note = Description of Artificial Sequence: Synthetic oligonucleotide
  misc_feature 1..20: note = Target: FXN; (+) strand; PAM type: NRG; PAM sequence: TGG
  source 1..20: mol_type = other DNA
agtagaacttcctgatgtga

SEQ ID NO: 17365 - DNA, 20 bp, synthetic construct
  misc_feature 1..20: note = Description of Artificial Sequence: Synthetic oligonucleotide
  misc_feature 1..20: note = Target: FXN; (+) strand; PAM type: NRG; PAM sequence: TAG
  source 1..20: mol_type = other DNA
aaatgctgtgtctgcaccac

SEQ ID NO: 17366 - DNA, 20 bp, synthetic construct
  misc_feature 1..20: note = Description of Artificial Sequence: Synthetic oligonucleotide
  misc_feature 1..20: note = Target: FXN; (+) strand; PAM type: NRG; PAM sequence: TGG
  source 1..20: mol_type = other DNA
tctgcaccactagccacatg

SEQ ID NO: 17367 - DNA, 20 bp, synthetic construct
  misc_feature 1..20: note = Description of Artificial Sequence: Synthetic oligonucleotide
  misc_feature 1..20: note = Target: FXN; (+) strand; PAM type: NRG; PAM sequence: CAG
  source 1..20: mol_type = other DNA
ccactagccacatgtggcca

SEQ ID NO: 17368 - DNA, 20 bp, synthetic construct
  misc_feature 1..20: note = Description of Artificial Sequence: Synthetic oligonucleotide
  misc_feature 1..20: note = Target: FXN; (+) strand; PAM type: NRG; PAM sequence: AGG
  source 1..20: mol_type = other DNA
cactagccacatgtggccac

SEQ ID NO: 17369 - DNA, 20 bp, synthetic construct
  misc_feature 1..20: note = Description of Artificial Sequence: Synthetic oligonucleotide
  misc_feature 1..20: note = Target: FXN; (+) strand; PAM type: NRG; PAM sequence: TGG
  source 1..20: mol_type = other DNA
ggccacaggattctcgaaac

SEQ ID NO: 17370 - DNA, 20 bp, synthetic construct
  misc_feature 1..20: note = Description of Artificial Sequence: Synthetic oligonucleotide
  misc_feature 1..20: note = Target: FXN; (+) strand; PAM type: NRG; PAM sequence: TGG
  source 1..20: mol_type = other DNA
cacaggattctcgaaactgg

SEQ ID NO: 17371 - DNA, 20 bp, synthetic construct
  misc_feature 1..20: note = Description of Artificial Sequence: Synthetic oligonucleotide
  misc_feature 1..20: note = Target: FXN; (+) strand; PAM type: NRG; PAM sequence: CAG
  source 1..20: mol_type = other DNA
gattctcgaaactggtggtg

SEQ ID NO: 17372 - DNA, 20 bp, synthetic construct
  misc_feature 1..20: note = Description of Artificial Sequence: Synthetic oligonucleotide
  misc_feature 1..20: note = Target: FXN; (+) strand; PAM type: NRG; PAM sequence: GAG
  source 1..20: mol_type = other DNA
tcgaaactggtggtgcagtt

SEQ ID NO: 17373 - DNA, 20 bp, synthetic construct
  misc_feature 1..20: note = Description of Artificial Sequence: Synthetic oligonucleotide
  misc_feature 1..20: note = Target: FXN; (+) strand; PAM type: NRG; PAM sequence: AGG
  source 1..20: mol_type = other DNA
cgaaactggtggtgcagttg

SEQ ID NO: 17374 - DNA, 20 bp, synthetic construct
  misc_feature 1..20: note = Description of Artificial Sequence: Synthetic oligonucleotide
  misc_feature 1..20: note = Target: FXN; (+) strand; PAM type: NRG; PAM sequence: GAG
  source 1..20: mol_type = other DNA
aaactggtggtgcagttgag

SEQ ID NO: 17375 - DNA, 20 bp, synthetic construct
  misc_feature 1..20: note = Description of Artificial Sequence: Synthetic oligonucleotide
  misc_feature 1..20: note = Target: FXN; (+) strand; PAM type: NRG; PAM sequence: TAG
  source 1..20: mol_type = other DNA
tcattaaatttaaatgtaaa

SEQ ID NO: 17376 - DNA, 20 bp, synthetic construct
  misc_feature 1..20: note = Description of Artificial Sequence: Synthetic oligonucleotide
  misc_feature 1..20: note = Target: FXN; (+) strand; PAM type: NRG; PAM sequence: TGG
  source 1..20: mol_type = other DNA
taaatgtaaatagctacgtg

SEQ ID NO: 17377 - DNA, 20 bp, synthetic construct
  misc_feature 1..20: note = Description of Artificial Sequence: Synthetic oligonucleotide
  misc_feature 1..20: note = Target: FXN; (+) strand; PAM type: NRG; PAM sequence: TGG
  source 1..20: mol_type = other DNA
aatagctacgtgtggcttgt

SEQ ID NO: 17378 - DNA, 20 bp, synthetic construct
  misc_feature 1..20: note = Description of Artificial Sequence: Synthetic oligonucleotide
  misc_feature 1..20: note = Target: FXN; (+) strand; PAM type: NRG; PAM sequence: TAG
  source 1..20: mol_type = other DNA
gctacgtgtggcttgttggc

SEQ ID NO: 17379 - DNA, 20 bp, synthetic construct
  misc_feature 1..20: note = Description of Artificial Sequence: Synthetic oligonucleotide
  misc_feature 1..20: note = Target: FXN; (+) strand; PAM type: NRG; PAM sequence: TGG
  source 1..20: mol_type = other DNA
tggcttgttggctagcctat

SEQ ID NO: 17380 - DNA, 20 bp, synthetic construct
  misc_feature 1..20: note = Description of Artificial Sequence: Synthetic oligonucleotide
  misc_feature 1..20: note = Target: FXN; (+) strand; PAM type: NRG; PAM sequence: CGG
  source 1..20: mol_type = other DNA
ggctagcctattggaaaaca

SEQ ID NO: 17381 - DNA, 20 bp, synthetic construct
  misc_feature 1..20: note = Description of Artificial Sequence: Synthetic oligonucleotide
  misc_feature 1..20: note = Target: FXN; (+) strand; PAM type: NRG; PAM sequence: GGG
  source 1..20: mol_type = other DNA
gctagcctattggaaaacac

SEQ ID NO: 17382 - DNA, 20 bp, synthetic construct
  misc_feature 1..20: note = Description of Artificial Sequence: Synthetic oligonucleotide
  misc_feature 1..20: note = Target: FXN; (+) strand; PAM type: NRG; PAM sequence: TAG
  source 1..20: mol_type = other DNA
cctattggaaaacacgggct

SEQ ID NO: 17383 - DNA, 20 bp, synthetic construct
  misc_feature 1..20: note = Description of Artificial Sequence: Synthetic oligonucleotide
  misc_feature 1..20: note = Target: FXN; (+) strand; PAM type: NRG; PAM sequence: GAG
  source 1..20: mol_type = other DNA
tattggaaaacacgggctta

SEQ ID NO: 17384 - DNA, 20 bp, synthetic construct
  misc_feature 1..20: note = Description of Artificial Sequence: Synthetic oligonucleotide
  misc_feature 1..20: note = Target: FXN; (+) strand; PAM type: NRG; PAM sequence: GAG
  source 1..20: mol_type = other DNA
ttggaaaacacgggcttaga

SEQ ID NO: 17385 - DNA, 20 bp, synthetic construct
  misc_feature 1..20: note = Description of Artificial Sequence: Synthetic oligonucleotide
  misc_feature 1..20: note = Target: FXN; (+) strand; PAM type: NRG; PAM sequence: CAG
  source 1..20: mol_type = other DNA
aacacgggcttagagagaca

SEQ ID NO: 17386 - DNA, 20 bp, synthetic construct
  misc_feature 1..20: note = Description of Artificial Sequence: Synthetic oligonucleotide
  misc_feature 1..20: note = Target: FXN; (+) strand; PAM type: NRG; PAM sequence: AGG
  source 1..20: mol_type = other DNA
acacgggcttagagagacac

SEQ ID NO: 17387 - DNA, 20 bp, synthetic construct
  misc_feature 1..20: note = Description of Artificial Sequence: Synthetic oligonucleotide
  misc_feature 1..20: note = Target: FXN; (+) strand; PAM type: NRG; PAM sequence: GGG
  source 1..20: mol_type = other DNA
cacgggcttagagagacaca

SEQ ID NO: 17388 - DNA, 20 bp, synthetic construct
  misc_feature 1..20: note = Description of Artificial Sequence: Synthetic oligonucleotide
  misc_feature 1..20: note = Target: FXN; (+) strand; PAM type: NRG; PAM sequence: GAG
  source 1..20: mol_type = other DNA
cgggcttagagagacacagg

SEQ ID NO: 17389 - DNA, 20 bp, synthetic construct
  misc_feature 1..20: note = Description of Artificial Sequence: Synthetic oligonucleotide
  misc_feature 1..20: note = Target: FXN; (+) strand; PAM type: NRG; PAM sequence: AAG
  source 1..20: mol_type = other DNA
gaatcactgtaatgcactaa

SEQ ID NO: 17390 - DNA, 20 bp, synthetic construct
  misc_feature 1..20: note = Description of Artificial Sequence: Synthetic oligonucleotide
  misc_feature 1..20: note = Target: FXN; (+) strand; PAM type: NRG; PAM sequence: AAG
  source 1..20: mol_type = other DNA
tcactgtaatgcactaaaag

SEQ ID NO: 17391 - DNA, 20 bp, synthetic construct
  misc_feature 1..20: note = Description of Artificial Sequence: Synthetic oligonucleotide
  misc_feature 1..20: note = Target: FXN; (+) strand; PAM type: NRG; PAM sequence: AGG
  source 1..20: mol_type = other DNA
cactgtaatgcactaaaaga

SEQ ID NO: 17392 - DNA, 20 bp, synthetic construct
  misc_feature 1..20: note = Description of Artificial Sequence: Synthetic oligonucleotide
  misc_feature 1..20: note = Target: FXN; (+) strand; PAM type: NRG; PAM sequence: AAG
  source 1..20: mol_type = other DNA
ggtaaaaaaaaaaaaatcct

SEQ ID NO: 17393 - DNA, 20 bp, synthetic construct
  misc_feature 1..20: note = Description of Artificial Sequence: Synthetic oligonucleotide
  misc_feature 1..20: note = Target: FXN; (+) strand; PAM type: NRG; PAM sequence: TAG
  source 1..20: mol_type = other DNA
attcctaaaatactttaata

SEQ ID NO: 17394 - DNA, 20 bp, synthetic construct
  misc_feature 1..20: note = Description of Artificial Sequence: Synthetic oligonucleotide
  misc_feature 1..20: note = Target: FXN; (+) strand; PAM type: NRG; PAM sequence: AGG
  source 1..20: mol_type = other DNA
ttcctaaaatactttaatat

SEQ ID NO: 17395 - DNA, 20 bp, synthetic construct
  misc_feature 1..20: note = Description of Artificial Sequence: Synthetic oligonucleotide
  misc_feature 1..20: note = Target: FXN; (+) strand; PAM type: NRG; PAM sequence: GGG
  source 1..20: mol_type = other DNA
tcctaaaatactttaatata

SEQ ID NO: 17396 - DNA, 20 bp, synthetic construct
  misc_feature 1..20: note = Description of Artificial Sequence: Synthetic oligonucleotide
  misc_feature 1..20: note = Target: FXN; (+) strand; PAM type: NRG; PAM sequence: TGG
  source 1..20: mol_type = other DNA
aaaatactttaatatagggc

SEQ ID NO: 17397 - DNA, 20 bp, synthetic construct
  misc_feature 1..20: note = Description of Artificial Sequence: Synthetic oligonucleotide
  misc_feature 1..20: note = Target: FXN; (+) strand; PAM type: NRG; PAM sequence: GGG
  source 1..20: mol_type = other DNA
aaatactttaatatagggct

SEQ ID NO: 17398 - DNA, 20 bp, synthetic construct
  misc_feature 1..20: note = Description of Artificial Sequence: Synthetic oligonucleotide
  misc_feature 1..20: note = Target: FXN; (+) strand; PAM type: NRG; PAM sequence: CGG
  source 1..20: mol_type = other DNA
ctttaatatagggctgggtg

SEQ ID NO: 17399 - DNA, 20 bp, synthetic construct
  misc_feature 1..20: note = Description of Artificial Sequence: Synthetic oligonucleotide
  misc_feature 1..20: note = Target: FXN; (+) strand; PAM type: NRG; PAM sequence: TGG
  source 1..20: mol_type = other DNA
taatatagggctgggtgcgg

SEQ ID NO: 17400 - DNA, 20 bp, synthetic construct
  misc_feature 1..20: note = Description of Artificial Sequence: Synthetic oligonucleotide
  misc_feature 1..20: note = Target: FXN; (+) strand; PAM type: NRG; PAM sequence: CAG
  source 1..20: mol_type = other DNA
tgggtgcggtggctcacatc

SEQ ID NO: 17401 - DNA, 20 bp, synthetic construct
  misc_feature 1..20: note = Description of Artificial Sequence: Synthetic oligonucleotide
  misc_feature 1..20: note = Target: FXN; (+) strand; PAM type: NRG; PAM sequence: TGG
  source 1..20: mol_type = other DNA
gtggctcacatccagcattt

SEQ ID NO: 17402 - DNA, 20 bp, synthetic construct
  misc_feature 1..20: note = Description of Artificial Sequence: Synthetic oligonucleotide
  misc_feature 1..20: note = Target: FXN; (+) strand; PAM type: NRG; PAM sequence: GGG
  source 1..20: mol_type = other DNA
tggctcacatccagcatttt

SEQ ID NO: 17403 - DNA, 20 bp, synthetic construct
  misc_feature 1..20: note = Description of Artificial Sequence: Synthetic oligonucleotide
  misc_feature 1..20: note = Target: FXN; (+) strand; PAM type: NRG; PAM sequence: AAG
  source 1..20: mol_type = other DNA
ctcacatccagcattttggg

SEQ ID NO: 17404 - DNA, 20 bp, synthetic construct
  misc_feature 1..20: note = Description of Artificial Sequence: Synthetic oligonucleotide
  misc_feature 1..20: note = Target: FXN; (+) strand; PAM type: NRG; PAM sequence: GAG
  source 1..20: mol_type = other DNA
atccagcattttgggaagct

SEQ ID NO: 17405 - DNA, 20 bp, synthetic construct
  misc_feature 1..20: note = Description of Artificial Sequence: Synthetic oligonucleotide
  misc_feature 1..20: note = Target: FXN; (+) strand; PAM type: NRG; PAM sequence: AGG
  source 1..20: mol_type = other DNA
tccagcattttgggaagctg

SEQ ID NO: 17406 - DNA, 20 bp, synthetic construct
  misc_feature 1..20: note = Description of Artificial Sequence: Synthetic oligonucleotide
  misc_feature 1..20: note = Target: FXN; (+) strand; PAM type: NRG; PAM sequence: GAG
  source 1..20: mol_type = other DNA
cagcattttgggaagctgag

SEQ ID NO: 17407 - DNA, 20 bp, synthetic construct
  misc_feature 1..20: note = Description of Artificial Sequence: Synthetic oligonucleotide
  misc_feature 1..20: note = Target: FXN; (+) strand; PAM type: NRG; PAM sequence: AGG
  source 1..20: mol_type = other DNA
agcattttgggaagctgagg

SEQ ID NO: 17408 - DNA, 20 bp, synthetic construct
  misc_feature 1..20: note = Description of Artificial Sequence: Synthetic oligonucleotide
  misc_feature 1..20: note = Target: FXN; (+) strand; PAM type: NRG; PAM sequence: GGG
  source 1..20: mol_type = other DNA
gcattttgggaagctgagga

SEQ ID NO: 17409 - DNA, 20 bp, synthetic construct
  misc_feature 1..20: note = Description of Artificial Sequence: Synthetic oligonucleotide
  misc_feature 1..20: note = Target: FXN; (+) strand; PAM type: NRG; PAM sequence: CAG
  source 1..20: mol_type = other DNA
ttttgggaagctgaggaggg

SEQ ID NO: 17410 - DNA, 20 bp, synthetic construct
  misc_feature 1..20: note = Description of Artificial Sequence: Synthetic oligonucleotide
  misc_feature 1..20: note = Target: FXN; (+) strand; PAM type: NRG; PAM sequence: GAG
  source 1..20: mol_type = other DNA
ctgaggagggcagatcactt

SEQ ID NO: 17411 - DNA, 20 bp, synthetic construct
  misc_feature 1..20: note = Description of Artificial Sequence: Synthetic oligonucleotide
  misc_feature 1..20: note = Target: FXN; (+) strand; PAM type: NRG; PAM sequence: AGG
  source 1..20: mol_type = other DNA
tgaggagggcagatcacttg

SEQ ID NO: 17412 - DNA, 20 bp, synthetic construct
  misc_feature 1..20: note = Description of Artificial Sequence: Synthetic oligonucleotide
  misc_feature 1..20: note = Target: FXN; (+) strand; PAM type: NRG; PAM sequence: CAG
  source 1..20: mol_type = other DNA
gagggcagatcacttgaggc

SEQ ID NO: 17413 - DNA, 20 bp, synthetic construct
  misc_feature 1..20: note = Description of Artificial Sequence: Synthetic oligonucleotide
  misc_feature 1..20: note = Target: FXN; (+) strand; PAM type: NRG; PAM sequence: AGG
  source 1..20: mol_type = other DNA
agggcagatcacttgaggcc

SEQ ID NO: 17414 - DNA, 20 bp, synthetic construct
  misc_feature 1..20: note = Description of Artificial Sequence: Synthetic oligonucleotide
  misc_feature 1..20: note = Target: FXN; (+) strand; PAM type: NRG; PAM sequence: GAG
  source 1..20: mol_type = other DNA
ggcagatcacttgaggccag

SEQ ID NO: 17415 - DNA, 20 bp, synthetic construct
  misc_feature 1..20: note = Description of Artificial Sequence: Synthetic oligonucleotide
  misc_feature 1..20: note = Target: FXN; (+) strand; PAM type: NRG; PAM sequence: AAG
  source 1..20: mol_type = other DNA
tcacttgaggccaggagttc

SEQ ID NO: 17416 - DNA, 20 bp, synthetic construct
  misc_feature 1..20: note = Description of Artificial Sequence: Synthetic oligonucleotide
  misc_feature 1..20: note = Target: FXN; (+) strand; PAM type: NRG; PAM sequence: CAG
  source 1..20: mol_type = other DNA
tgaggccaggagttcaagac

SEQ ID NO: 17417 - DNA, 20 bp, synthetic construct
  misc_feature 1..20: note = Description of Artificial Sequence: Synthetic oligonucleotide
  misc_feature 1..20: note = Target: FXN; (+) strand; PAM type: NRG; PAM sequence: TGG
  source 1..20: mol_type = other DNA
ccaggagttcaagaccagcc

SEQ ID NO: 17418 - DNA, 20 bp, synthetic construct
  misc_feature 1..20: note = Description of Artificial Sequence: Synthetic oligonucleotide
  misc_feature 1..20: note = Target: FXN; (+) strand; PAM type: NRG; PAM sequence: TGG
  source 1..20: mol_type = other DNA
caagaccagcctggccaaca

SEQ ID NO: 17419 - DNA, 20 bp, synthetic construct
  misc_feature 1..20: note = Description of Artificial Sequence: Synthetic oligonucleotide
  misc_feature 1..20: note = Target: FXN; (+) strand; PAM type: NRG; PAM sequence: CGG
  source 1..20: mol_type = other DNA
ctactaaaaatacaaaaaat

SEQ ID NO: 17420 - DNA, 20 bp, synthetic construct
  misc_feature 1..20: note = Description of Artificial Sequence: Synthetic oligonucleotide
  misc_feature 1..20: note = Target: FXN; (+) strand; PAM type: NRG; PAM sequence: GGG
  source 1..20: mol_type = other DNA
tactaaaaatacaaaaaatc

SEQ ID NO: 17421 - DNA, 20 bp, synthetic construct
  misc_feature 1..20: note = Description of Artificial Sequence: Synthetic oligonucleotide
  misc_feature 1..20: note = Target: FXN; (+) strand; PAM type: NRG; PAM sequence: CGG
  source 1..20: mol_type = other DNA
aaaatacaaaaaatcgggtg

SEQ ID NO: 17422 - DNA, 20 bp, synthetic construct
  misc_feature 1..20: note = Description of Artificial Sequence: Synthetic oligonucleotide
  misc_feature 1..20: note = Target: FXN; (+) strand; PAM type: NRG; PAM sequence: TGG
  source 1..20: mol_type = other DNA
atacaaaaaatcgggtgcgg

SEQ ID NO: 17423 - DNA, 20 bp, synthetic construct
  misc_feature 1..20: note = Description of Artificial Sequence: Synthetic oligonucleotide
  misc_feature 1..20: note = Target: FXN; (+) strand; PAM type: NRG; PAM sequence: CGG
  source 1..20: mol_type = other DNA
caaaaaatcgggtgcggtgg

SEQ ID NO: 17424 - DNA, 20 bp, synthetic construct
  misc_feature 1..20: note = Description of Artificial Sequence: Synthetic oligonucleotide
  misc_feature 1..20: note = Target: FXN; (+) strand; PAM type: NRG; PAM sequence: GGG
  source 1..20: mol_type = other DNA
aaaaaatcgggtgcggtggc

SEQ ID NO: 17425 - DNA, 20 bp, synthetic construct
  misc_feature 1..20: note = Description of Artificial Sequence: Synthetic oligonucleotide
  misc_feature 1..20: note = Target: FXN; (+) strand; PAM type: NRG; PAM sequence: CAG
  source 1..20: mol_type = other DNA
gtggcgggtgcctgtaatcc

SEQ ID NO: 17426 - DNA, 20 bp, synthetic construct
  misc_feature 1..20: note = Description of Artificial Sequence: Synthetic oligonucleotide
  misc_feature 1..20: note = Target: FXN; (+) strand; PAM type: NRG; PAM sequence: CGG
  source 1..20: mol_type = other DNA
tgcctgtaatcccagctacg

SEQ ID NO: 17427 - DNA, 20 bp, synthetic construct
  misc_feature 1..20: note = Description of Artificial Sequence: Synthetic oligonucleotide
  misc_feature 1..20: note = Target: FXN; (+) strand; PAM type: NRG; PAM sequence: GGG
  source 1..20: mol_type = other DNA
gcctgtaatcccagctacgc

SEQ ID NO: 17428 - DNA, 20 bp, synthetic construct
  misc_feature 1..20: note = Description of Artificial Sequence: Synthetic oligonucleotide
  misc_feature 1..20: note = Target: FXN; (+) strand; PAM type: NRG; PAM sequence: GAG
  source 1..20: mol_type = other DNA
ctgtaatcccagctacgcgg

SEQ ID NO: 17429 - DNA, 20 bp, synthetic construct
  misc_feature 1..20: note = Description of Artificial Sequence: Synthetic oligonucleotide
  misc_feature 1..20: note = Target: FXN; (+) strand; PAM type: NRG; PAM sequence: AGG
  source 1..20: mol_type = other DNA
tgtaatcccagctacgcggg

SEQ ID NO: 17430 - DNA, 20 bp, synthetic construct
  misc_feature 1..20: note = Description of Artificial Sequence: Synthetic oligonucleotide
  misc_feature 1..20: note = Target: FXN; (+) strand; PAM type: NRG; PAM sequence: GAG
  source 1..20: mol_type = other DNA
tcccagctacgcgggaggct

SEQ ID NO: 17431 - DNA, 20 bp, synthetic construct
  misc_feature 1..20: note = Description of Artificial Sequence: Synthetic oligonucleotide
  misc_feature 1..20: note = Target: FXN; (+) strand; PAM type: NRG; PAM sequence: AGG
  source 1..20: mol_type = other DNA
cccagctacgcgggaggctg

SEQ ID NO: 17432 - DNA, 20 bp, synthetic construct
  misc_feature 1..20: note = Description of Artificial Sequence: Synthetic oligonucleotide
  misc_feature 1..20: note = Target: FXN; (+) strand; PAM type: NRG; PAM sequence: GAG
  source 1..20: mol_type = other DNA
tacgcgggaggctgaggcac

SEQ ID NO: 17433 - DNA, 20 bp, synthetic construct
  misc_feature 1..20: note = Description of Artificial Sequence: Synthetic oligonucleotide
  misc_feature 1..20: note = Target: FXN; (+) strand; PAM type: NRG; PAM sequence: CGG
  source 1..20: mol_type = other DNA
gcacgagaatcactcgaacc

SEQ ID NO: 17434 - DNA, 20 bp, synthetic construct
  misc_feature 1..20: note = Description of Artificial Sequence: Synthetic oligonucleotide
  misc_feature 1..20: note = Target: FXN; (+) strand; PAM type: NRG; PAM sequence: GGG
  source 1..20: mol_type = other DNA
cacgagaatcactcgaaccc

SEQ ID NO: 17435 - DNA, 20 bp, synthetic construct
  misc_feature 1..20: note = Description of Artificial Sequence: Synthetic oligonucleotide
  misc_feature 1..20: note = Target: FXN; (+) strand; PAM type: NRG; PAM sequence: GAG
  source 1..20: mol_type = other DNA
cgagaatcactcgaacccgg

SEQ ID NO: 17436 - DNA, 20 bp, synthetic construct
  misc_feature 1..20: note = Description of Artificial Sequence: Synthetic oligonucleotide
  misc_feature 1..20: note = Target: FXN; (+) strand; PAM type: NRG; PAM sequence: AGG
  source 1..20: mol_type = other DNA
gagaatcactcgaacccggg

SEQ ID NO: 17437 - DNA, 20 bp, synthetic construct
  misc_feature 1..20: note = Description of Artificial Sequence: Synthetic oligonucleotide
  misc_feature 1..20: note = Target: FXN; (+) strand; PAM type: NRG; PAM sequence: CGG
  source 1..20: mol_type = other DNA
aatcactcgaacccgggagg

SEQ ID NO: 17438 - DNA, 20 bp, synthetic construct
  misc_feature 1..20: note = Description of Artificial Sequence: Synthetic oligonucleotide
  misc_feature 1..20: note = Target: FXN; (+) strand; PAM type: NRG; PAM sequence: GGG
  source 1..20: mol_type = other DNA
atcactcgaacccgggaggc

SEQ ID NO: 17439 - DNA, 20 bp, synthetic construct
  misc_feature 1..20: note = Description of Artificial Sequence: Synthetic oligonucleotide
  misc_feature 1..20: note = Target: FXN; (+) strand; PAM type: NRG; PAM sequence: GGG
  source 1..20: mol_type = other DNA
tcactcgaacccgggaggcg

SEQ ID NO: 17440 - DNA, 20 bp, synthetic construct
  misc_feature 1..20: note = Description of Artificial Sequence: Synthetic oligonucleotide
  misc_feature 1..20: note = Target: FXN; (+) strand; PAM type: NRG; PAM sequence: GGG
  source 1..20: mol_type = other DNA
cactcgaacccgggaggcgg

SEQ ID NO: 17441 - DNA, 20 bp, synthetic construct
  misc_feature 1..20: note = Description of Artificial Sequence: Synthetic oligonucleotide
  misc_feature 1..20: note = Target: FXN; (+) strand; PAM type: NRG; PAM sequence: CAG
  source 1..20: mol_type = other DNA
aacccgggaggcgggggttg

SEQ ID NO: 17442 - DNA, 20 bp, synthetic construct
  misc_feature 1..20: note = Description of Artificial Sequence: Synthetic oligonucleotide
  misc_feature 1..20: note = Target: FXN; (+) strand; PAM type: NRG; PAM sequence: GAG
  source 1..20: mol_type = other DNA
cgggaggcgggggttgcagt

SEQ ID NO: 17443 - DNA, 20 bp, synthetic construct
  misc_feature 1..20: note = Description of Artificial Sequence: Synthetic oligonucleotide
  misc_feature 1..20: note = Target: FXN; (+) strand; PAM type: NRG; PAM sequence: GAG
  source 1..20: mol_type = other DNA
ggcgggggttgcagtgagcc

SEQ ID NO: 17444 - DNA, 20 bp, synthetic construct
  misc_feature 1..20: note = Description of Artificial Sequence: Synthetic oligonucleotide
  misc_feature 1..20: note = Target: FXN; (+) strand; PAM type: NRG; PAM sequence: CAG
  source 1..20: mol_type = other DNA
gagatcgtgccactgcactc

SEQ ID NO: 17445 - DNA, 20 bp, synthetic construct
  misc_feature 1..20: note = Description of Artificial Sequence: Synthetic oligonucleotide
  misc_feature 1..20: note = Target: FXN; (+) strand; PAM type: NRG; PAM sequence: TGG
  source 1..20: mol_type = other DNA
cgtgccactgcactccagcc

SEQ ID NO: 17446 - DNA, 20 bp, synthetic construct
  misc_feature 1..20: note = Description of Artificial Sequence: Synthetic oligonucleotide
  misc_feature 1..20: note = Target: FXN; (+) strand; PAM type: NRG; PAM sequence: GGG
  source 1..20: mol_type = other DNA
gtgccactgcactccagcct

SEQ ID NO: 17447 - DNA, 20 bp, synthetic construct
  misc_feature 1..20: note = Description of Artificial Sequence: Synthetic oligonucleotide
  misc_feature 1..20: note = Target: FXN; (+) strand; PAM type: NRG; PAM sequence: CAG
  source 1..20: mol_type = other DNA
ctgcactccagcctgggcga

SEQ ID NO: 17448 - DNA, 20 bp, synthetic construct
  misc_feature 1..20: note = Description of Artificial Sequence: Synthetic oligonucleotide
  misc_feature 1..20: note = Target: FXN; (+) strand; PAM type: NRG; PAM sequence: GAG
  source 1..20: mol_type = other DNA
gcactccagcctgggcgaca

SEQ ID NO: 17449 - DNA, 20 bp, synthetic construct
  misc_feature 1..20: note = Description of Artificial Sequence: Synthetic oligonucleotide
  misc_feature 1..20: note = Target: FXN; (+) strand; PAM type: NRG; PAM sequence: GAG
  source 1..20: mol_type = other DNA
tccagcctgggcgacagagc

SEQ ID NO: 17450 - DNA, 20 bp, synthetic construct
  misc_feature 1..20: note = Description of Artificial Sequence: Synthetic oligonucleotide
  misc_feature 1..20: note = Target: FXN; (+) strand; PAM type: NRG; PAM sequence: CAG
  source 1..20: mol_type = other DNA
aaaaccaaaaaaaaaaactt

SEQ ID NO: 17451 - DNA, 20 bp, synthetic construct
  misc_feature 1..20: note = Description of Artificial Sequence: Synthetic oligonucleotide
  misc_feature 1..20: note = Target: FXN; (+) strand; PAM type: NRG; PAM sequence: CAG
  source 1..20: mol_type = other DNA
atgattatttaaccaaaatg

SEQ ID NO: 17452 - DNA, 20 bp, synthetic construct
  misc_feature 1..20: note = Description of Artificial Sequence: Synthetic oligonucleotide
  misc_feature 1..20: note = Target: FXN; (+) strand; PAM type: NRG; PAM sequence: AGG
  source 1..20: mol_type = other DNA
tgattatttaaccaaaatgc

SEQ ID NO: 17453 - DNA, 20 bp, synthetic construct
  misc_feature 1..20: note = Description of Artificial Sequence: Synthetic oligonucleotide
  misc_feature 1..20: note = Target: FXN; (+) strand; PAM type: NRG; PAM sequence: TAG
  source 1..20: mol_type = other DNA
tatttaaccaaaatgcaggt

SEQ ID NO: 17454 - DNA, 20 bp, synthetic construct
  misc_feature 1..20: note = Description of Artificial Sequence: Synthetic oligonucleotide
  misc_feature 1..20: note = Target: FXN; (+) strand; PAM type: NRG; PAM sequence: CGG
  source 1..20: mol_type = other DNA
aatgcaggttagttgttcac

SEQ ID NO: 17455 - DNA, 20 bp, synthetic construct
  misc_feature 1..20: note = Description of Artificial Sequence: Synthetic oligonucleotide
  misc_feature 1..20: note = Target: FXN; (+) strand; PAM type: NRG; PAM sequence: CAG
  source 1..20: mol_type = other DNA
ggttagttgttcaccggatg

SEQ ID NO: 17456 - DNA, 20 bp, synthetic construct
  misc_feature 1..20: note = Description of Artificial Sequence: Synthetic oligonucleotide
  misc_feature 1..20: note = Target: FXN; (+) strand; PAM type: NRG; PAM sequence: GAG
  source 1..20: mol_type = other DNA
ttagttgttcaccggatgca

SEQ ID NO: 17457 - DNA, 20 bp, synthetic construct
  misc_feature 1..20: note = Description of Artificial Sequence: Synthetic oligonucleotide
  misc_feature 1..20: note = Target: FXN; (+) strand; PAM type: NRG; PAM sequence: AAG
  source 1..20: mol_type = other DNA
ggatgcagagtccaattaac

SEQ ID NO: 17458 - DNA, 20 bp, synthetic construct
  misc_feature 1..20: note = Description of Artificial Sequence: Synthetic oligonucleotide
  misc_feature 1..20: note = Target: FXN; (+) strand; PAM type: NRG; PAM sequence: GAG
  source 1..20: mol_type = other DNA
atgcagagtccaattaacaa

SEQ ID NO: 17459 - DNA, 20 bp, synthetic construct
  misc_feature 1..20: note = Description of Artificial Sequence: Synthetic oligonucleotide
  misc_feature 1..20: note = Target: FXN; (+) strand; PAM type: NRG; PAM sequence: AAG
  source 1..20: mol_type = other DNA
agagtccaattaacaagagc

SEQ ID NO: 17460 - DNA, 20 bp, synthetic construct
  misc_feature 1..20: note = Description of Artificial Sequence: Synthetic oligonucleotide
  misc_feature 1..20: note = Target: FXN; (+) strand; PAM type: NRG; PAM sequence: AGG
  source 1..20: mol_type = other DNA
gagtccaattaacaagagca

SEQ ID NO: 17461 - DNA, 20 bp, synthetic construct
  misc_feature 1..20: note = Description of Artificial Sequence: Synthetic oligonucleotide
  misc_feature 1..20: note = Target: FXN; (+) strand; PAM type: NRG; PAM sequence: TGG
  source 1..20: mol_type = other DNA
caattaacaagagcaaggcc

SEQ ID NO: 17462 - DNA, 20 bp, synthetic construct
  misc_feature 1..20: note = Description of Artificial Sequence: Synthetic oligonucleotide
  misc_feature 1..20: note = Target: FXN; (+) strand; PAM type: NRG; PAM sequence: AAG
  source 1..20: mol_type = other DNA
gcaaggcctggtaccaaaaa

SEQ ID NO: 17463 - DNA, 20 bp, synthetic construct
  misc_feature 1..20: note = Description of Artificial Sequence: Synthetic oligonucleotide
  misc_feature 1..20: note = Target: FXN; (+) strand; PAM type: NRG; PAM sequence: TAG
  source 1..20: mol_type = other DNA
aagtgaatttactccgaaac

SEQ ID NO: 17464 - DNA, 20 bp, synthetic construct
  misc_feature 1..20: note = Description of Artificial Sequence: Synthetic oligonucleotide
  misc_feature 1..20: note = Target: FXN; (+) strand; PAM type: NRG; PAM sequence: TGG
  source 1..20: mol_type = other DNA
aatttactccgaaactagct

SEQ ID NO: 17465 - DNA, 20 bp, synthetic construct
  misc_feature 1..20: note = Description of Artificial Sequence: Synthetic oligonucleotide
  misc_feature 1..20: note = Target: FXN; (+) strand; PAM type: NRG; PAM sequence: GGG
  source 1..20: mol_type = other DNA
atttactccgaaactagctt

SEQ ID NO: 17466 - DNA, 20 bp, synthetic construct
  misc_feature 1..20: note = Description of Artificial Sequence: Synthetic oligonucleotide
  misc_feature 1..20: note = Target: FXN; (+) strand; PAM type: NRG; PAM sequence: GAG
  source 1..20: mol_type = other DNA
actccgaaactagcttgggt

SEQ ID NO: 17467 - DNA, 20 bp, synthetic construct
  misc_feature 1..20: note = Description of Artificial Sequence: Synthetic oligonucleotide
  misc_feature 1..20: note = Target: FXN; (+) strand; PAM type: NRG; PAM sequence: AGG
  source 1..20: mol_type = other DNA
ctccgaaactagcttgggtg

SEQ ID NO: 17468 - DNA, 20 bp, synthetic construct
  misc_feature 1..20: note = Description of Artificial Sequence: Synthetic oligonucleotide
  misc_feature 1..20: note = Target: FXN; (+) strand; PAM type: NRG; PAM sequence: GGG
  source 1..20: mol_type = other DNA
tccgaaactagcttgggtga

SEQ ID NO: 17469 - DNA, 20 bp, synthetic construct
  misc_feature 1..20: note = Description of Artificial Sequence: Synthetic oligonucleotide
  misc_feature 1..20: note = Target: FXN; (+) strand; PAM type: NRG; PAM sequence: GGG
  source 1..20: mol_type = other DNA
ccgaaactagcttgggtgag

SEQ ID NO: 17470 - DNA, 20 bp, synthetic construct
  misc_feature 1..20: note = Description of Artificial Sequence: Synthetic oligonucleotide
  misc_feature 1..20: note = Target: FXN; (+) strand; PAM type: NRG; PAM sequence: AAG
  source 1..20: mol_type = other DNA
tagcttgggtgaggggtaca

SEQ ID NO: 17471 - DNA, 20 bp, synthetic construct
  misc_feature 1..20: note = Description of Artificial Sequence: Synthetic oligonucleotide
  misc_feature 1..20: note = Target: FXN; (+) strand; PAM type: NRG; PAM sequence: AAG
  source 1..20: mol_type = other DNA
agcatcctgcctttctttaa

SEQ ID NO: 17472 - DNA, 20 bp, synthetic construct
  misc_feature 1..20: note = Description of Artificial Sequence: Synthetic oligonucleotide
  misc_feature 1..20: note = Target: FXN; (+) strand; PAM type: NRG; PAM sequence: TGG
  source 1..20: mol_type = other DNA
ttaaaagtgctgcttcccct

SEQ ID NO: 17473 - DNA, 20 bp, synthetic construct
  misc_feature 1..20: note = Description of Artificial Sequence: Synthetic oligonucleotide
  misc_feature 1..20: note = Target: FXN; (+) strand; PAM type: NRG; PAM sequence: AAG
  source 1..20: mol_type = other DNA
aaagtgctgcttccccttgg

SEQ ID NO: 17474 - DNA, 20 bp, synthetic construct
  misc_feature 1..20: note = Description of Artificial Sequence: Synthetic oligonucleotide
  misc_feature 1..20: note = Target: FXN; (+) strand; PAM type: NRG; PAM sequence: TAG
  source 1..20: mol_type = other DNA
gtgctgcttccccttggaag

SEQ ID NO: 17475 - DNA, 20 bp, synthetic construct
  misc_feature 1..20: note = Description of Artificial Sequence: Synthetic oligonucleotide
  misc_feature 1..20: note = Target: FXN; (+) strand; PAM type: NRG; PAM sequence: AAG
  source 1..20: mol_type = other DNA
tgcttccccttggaagtaga

SEQ ID NO: 17476 - DNA, 20 bp, synthetic construct
  misc_feature 1..20: note = Description of Artificial Sequence: Synthetic oligonucleotide
  misc_feature 1..20: note = Target: FXN; (+) strand; PAM type: NRG; PAM sequence: TGG
  source 1..20: mol_type = other DNA
ttccccttggaagtagaaag

SEQ ID NO: 17477 - DNA, 20 bp, synthetic construct
  misc_feature 1..20: note = Description of Artificial Sequence: Synthetic oligonucleotide
  misc_feature 1..20: note = Target: FXN; (+) strand; PAM type: NRG; PAM sequence: AAG
  source 1..20: mol_type = other DNA
tagaaagtggacacttttat

SEQ ID NO: 17478 - DNA, 20 bp, synthetic construct
  misc_feature 1..20: note = Description of Artificial Sequence: Synthetic oligonucleotide
  misc_feature 1..20: note = Target: FXN; (+) strand; PAM type: NRG; PAM sequence: AGG
  source 1..20: mol_type = other DNA
agaaagtggacacttttata

SEQ ID NO: 17479 - DNA, 20 bp, synthetic construct
  misc_feature 1..20: note = Description of Artificial Sequence: Synthetic oligonucleotide
  misc_feature 1..20: note = Target: FXN; (+) strand; PAM type: NRG; PAM sequence: AAG
  source 1..20: mol_type = other DNA
agtggacacttttataaggt

SEQ ID NO: 17480 - DNA, 20 bp, synthetic construct
  misc_feature 1..20: note = Description of Artificial Sequence: Synthetic oligonucleotide
  misc_feature 1..20: note = Target: FXN; (+) strand; PAM type: NRG; PAM sequence: AGG
  source 1..20: mol_type = other DNA
gtggacacttttataaggta

SEQ ID NO: 17481 - DNA, 20 bp, synthetic construct
  misc_feature 1..20: note = Description of Artificial Sequence: Synthetic oligonucleotide
  misc_feature 1..20: note = Target: FXN; (+) strand; PAM type: NRG; PAM sequence: GGG
  source 1..20: mol_type = other DNA
tggacacttttataaggtaa

SEQ ID NO: 17482 - DNA, 20 bp, synthetic construct
  misc_feature 1..20: note = Description of Artificial Sequence: Synthetic oligonucleotide
  misc_feature 1..20: note = Target: FXN; (+) strand; PAM type: NRG; PAM sequence: GGG
  source 1..20: mol_type = other DNA
ggacacttttataaggtaag

SEQ ID NO: 17483 - DNA, 20 bp, synthetic construct
  misc_feature 1..20: note = Description of Artificial Sequence: Synthetic oligonucleotide
  misc_feature 1..20: note = Target: FXN; (+) strand; PAM type: NRG; PAM sequence: GGG
  source 1..20: mol_type = other DNA
gacacttttataaggtaagg

SEQ ID NO: 17484 - DNA, 20 bp, synthetic construct
  misc_feature 1..20: note = Description of Artificial Sequence: Synthetic oligonucleotide
  misc_feature 1..20: note = Target: FXN; (+) strand; PAM type: NRG; PAM sequence: GGG
  source 1..20: mol_type = other DNA
acacttttataaggtaaggg

SEQ ID NO: 17485 - DNA, 20 bp, synthetic construct
  misc_feature 1..20: note = Description of Artificial Sequence: Synthetic oligonucleotide
  misc_feature 1..20: note = Target: FXN; (+) strand; PAM type: NRG; PAM sequence: AAG
  source 1..20: mol_type = other DNA
cttttataaggtaagggggg

SEQ ID NO: 17486 - DNA, 20 bp, synthetic construct
  misc_feature 1..20: note = Description of Artificial Sequence: Synthetic oligonucleotide
  misc_feature 1..20: note = Target: FXN; (+) strand; PAM type: NRG; PAM sequence: AAG
  source 1..20: mol_type = other DNA
aggtaaggggggaagtgtgc

SEQ ID NO: 17487 - DNA, 20 bp, synthetic construct
  misc_feature 1..20: note = Description of Artificial Sequence: Synthetic oligonucleotide
  misc_feature 1..20: note = Target: FXN; (+) strand; PAM type: NRG; PAM sequence: AGG
  source 1..20: mol_type = other DNA
ggtaaggggggaagtgtgca

SEQ ID NO: 17488 - DNA, 20 bp, synthetic construct
  misc_feature 1..20: note = Description of Artificial Sequence: Synthetic oligonucleotide
  misc_feature 1..20: note = Target: FXN; (+) strand; PAM type: NRG; PAM sequence: GGG
  source 1..20: mol_type = other DNA
gtaaggggggaagtgtgcaa

SEQ ID NO: 17489 - DNA, 20 bp, synthetic construct
  misc_feature 1..20: note = Description of Artificial Sequence: Synthetic oligonucleotide
  misc_feature 1..20: note = Target: FXN; (+) strand; PAM type: NRG; PAM sequence: AAG
  source 1..20: mol_type = other DNA
ggggggaagtgtgcaagggc

SEQ ID NO: 17490 - DNA, 20 bp, synthetic construct
  misc_feature 1..20: note = Description of Artificial Sequence: Synthetic oligonucleotide
  misc_feature 1..20: note = Target: FXN; (+) strand; PAM type: NRG; PAM sequence: TGG
  source 1..20: mol_type = other DNA
gggaagtgtgcaagggcaag

SEQ ID NO: 17491 - DNA, 20 bp, synthetic construct
  misc_feature 1..20: note = Description of Artificial Sequence: Synthetic oligonucleotide
  misc_feature 1..20: note = Target: FXN; (+) strand; PAM type: NRG; PAM sequence: GGG
  source 1..20: mol_type = other DNA
ggaagtgtgcaagggcaagt

SEQ ID NO: 17492 - DNA, 20 bp, synthetic construct
  misc_feature 1..20: note = Description of Artificial Sequence: Synthetic oligonucleotide
  misc_feature 1..20: note = Target: FXN; (+) strand; PAM type: NRG; PAM sequence: GGG
  source 1..20: mol_type = other DNA
gaagtgtgcaagggcaagtg

SEQ ID NO: 17493 - DNA, 20 bp, synthetic construct
  misc_feature 1..20: note = Description of Artificial Sequence: Synthetic oligonucleotide
  misc_feature 1..20: note = Target: FXN; (+) strand; PAM type: NRG; PAM sequence: GGG
  source 1..20: mol_type = other DNA
aagtgtgcaagggcaagtgg

SEQ ID NO: 17494 - DNA, 20 bp, synthetic construct
  misc_feature 1..20: note = Description of Artificial Sequence: Synthetic oligonucleotide
  misc_feature 1..20: note = Target: FXN; (+) strand; PAM type: NRG; PAM sequence: GGG
  source 1..20: mol_type = other DNA
agtgtgcaagggcaagtggg

SEQ ID NO: 17495 - DNA, 20 bp, synthetic construct
  misc_feature 1..20: note = Description of Artificial Sequence: Synthetic oligonucleotide
  misc_feature 1..20: note = Target: FXN; (+) strand; PAM type: NRG; PAM sequence: GGG
  source 1..20: mol_type = other DNA
gtgtgcaagggcaagtgggg

SEQ ID NO: 17496 - DNA, 20 bp, synthetic construct
  misc_feature 1..20: note = Description of Artificial Sequence: Synthetic oligonucleotide
  misc_feature 1..20: note = Target: FXN; (+) strand; PAM type: NRG; PAM sequence: TAG
  source 1..20: mol_type = other DNA
aagtgggggggtccctctgc

SEQ ID NO: 17497 - DNA, 20 bp, synthetic construct
  misc_feature 1..20: note = Description of Artificial Sequence: Synthetic oligonucleotide
  misc_feature 1..20: note = Target: FXN; (+) strand; PAM type: NRG; PAM sequence: CAG
  source 1..20: mol_type = other DNA
ctagttccgtgcatactcta

SEQ ID NO: 17498 - DNA, 20 bp, synthetic construct
  misc_feature 1..20: note = Description of Artificial Sequence: Synthetic oligonucleotide
  misc_feature 1..20: note = Target: FXN; (+) strand; PAM type: NRG; PAM sequence: AGG
  source 1..20: mol_type = other DNA
tagttccgtgcatactctac

SEQ ID NO: 17499 - DNA, 20 bp, synthetic construct
  misc_feature 1..20: note = Description of Artificial Sequence: Synthetic oligonucleotide
  misc_feature 1..20: note = Target: FXN; (+) strand; PAM type: NRG; PAM sequence: CAG
  source 1..20: mol_type = other DNA
tccgtgcatactctacagga

SEQ ID NO: 17500 - DNA, 20 bp, synthetic construct
  misc_feature 1..20: note = Description of Artificial Sequence: Synthetic oligonucleotide
  misc_feature 1..20: note = Target: FXN; (+) strand; PAM type: NRG; PAM sequence: TGG
  source 1..20: mol_type = other DNA
actctacaggacagttgact

SEQ ID NO: 17501 - DNA, 20 bp, synthetic construct
  misc_feature 1..20: note = Description of Artificial Sequence: Synthetic oligonucleotide
  misc_feature 1..20: note = Target: FXN; (+) strand; PAM type: NRG; PAM sequence: TGG
  source 1..20: mol_type = other DNA
cagttgacttggcaccttcc

SEQ ID NO: 17502 - DNA, 20 bp, synthetic construct
  misc_feature 1..20: note = Description of Artificial Sequence: Synthetic oligonucleotide
  misc_feature 1..20: note = Target: FXN; (+) strand; PAM type: NRG; PAM sequence: TAG
  source 1..20: mol_type = other DNA
tgacttggcaccttcctggt

SEQ ID NO: 17503 - DNA, 20 bp, synthetic construct
  misc_feature 1..20: note = Description of Artificial Sequence: Synthetic oligonucleotide
  misc_feature 1..20: note = Target: FXN; (+) strand; PAM type: NRG; PAM sequence: AAG
  source 1..20: mol_type = other DNA
gcaccttcctggttagtaat

SEQ ID NO: 17504 - DNA, 20 bp, synthetic construct
  misc_feature 1..20: note = Description of Artificial Sequence: Synthetic oligonucleotide
  misc_feature 1..20: note = Target: FXN; (+) strand; PAM type: NRG; PAM sequence: TAG
  source 1..20: mol_type = other DNA
tcctggttagtaataagctg

SEQ ID NO: 17505 - DNA, 20 bp, synthetic construct
  misc_feature 1..20: note = Description of Artificial Sequence: Synthetic oligonucleotide
  misc_feature 1..20: note = Target: FXN; (+) strand; PAM type: NRG; PAM sequence: CAG
  source 1..20: mol_type = other DNA
tggttagtaataagctgtag

SEQ ID NO: 17506 - DNA, 20 bp, synthetic construct
  misc_feature 1..20: note = Description of Artificial Sequence: Synthetic oligonucleotide
  misc_feature 1..20: note = Target: FXN; (+) strand; PAM type: NRG; PAM sequence: TGG
  source 1..20: mol_type = other DNA
ttagtaataagctgtagcag

SEQ ID NO: 17507 - DNA, 20 bp, synthetic construct
  misc_feature 1..20: note = Description of Artificial Sequence: Synthetic oligonucleotide
  misc_feature 1..20: note = Target: FXN; (+) strand; PAM type: NRG; PAM sequence: AAG
  source 1..20: mol_type = other DNA
aataagctgtagcagtggcc

SEQ ID NO: 17508 - DNA, 20 bp, synthetic construct
  misc_feature 1..20: note = Description of Artificial Sequence: Synthetic oligonucleotide
  misc_feature 1..20: note = Target: FXN; (+) strand; PAM type: NRG; PAM sequence: TGG
  source 1..20: mol_type = other DNA
aagctgtagcagtggccaag

SEQ ID NO: 17509 - DNA, 20 bp, synthetic construct
  misc_feature 1..20: note = Description of Artificial Sequence: Synthetic oligonucleotide
  misc_feature 1..20: note = Target: FXN; (+) strand; PAM type: NRG; PAM sequence: GGG
  source 1..20: mol_type = other DNA
agctgtagcagtggccaagt

SEQ ID NO: 17510 - DNA, 20 bp, synthetic construct
  misc_feature 1..20: note = Description of Artificial Sequence: Synthetic oligonucleotide
  misc_feature 1..20: note = Target: FXN; (+) strand; PAM type: NRG; PAM sequence: CAG
  source 1..20: mol_type = other DNA
tggccaagtgggcatgcttt

SEQ ID NO: 17511 - DNA, 20 bp, synthetic construct
  misc_feature 1..20: note = Description of Artificial Sequence: Synthetic oligonucleotide
  misc_feature 1..20: note = Target: FXN; (+) strand; PAM type: NRG; PAM sequence: CAG
  source 1..20: mol_type = other DNA
atgctttcagtatgccctcc

SEQ ID NO: 17512 - DNA, 20 bp, synthetic construct
  misc_feature 1..20: note = Description of Artificial Sequence: Synthetic oligonucleotide
  misc_feature 1..20: note = Target: FXN; (+) strand; PAM type: NRG; PAM sequence: AAG
  source 1..20: mol_type = other DNA
tatgccctcccagtgaatga

SEQ ID NO: 17513 - DNA, 20 bp, synthetic construct
  misc_feature 1..20: note = Description of Artificial Sequence: Synthetic oligonucleotide
  misc_feature 1..20: note = Target: FXN; (+) strand; PAM type: NRG; PAM sequence: GAG
  source 1..20: mol_type = other DNA
tcccagtgaatgaaagtcct

SEQ ID NO: 17514 - DNA, 20 bp, synthetic construct
  misc_feature 1..20: note = Description of Artificial Sequence: Synthetic oligonucleotide
  misc_feature 1..20: note = Target: FXN; (+) strand; PAM type: NRG; PAM sequence: AGG
  source 1..20: mol_type = other DNA
cccagtgaatgaaagtcctg

SEQ ID NO: 17515 - DNA, 20 bp, synthetic construct
  misc_feature 1..20: note = Description of Artificial Sequence: Synthetic oligonucleotide
  misc_feature 1..20: note = Target: FXN; (+) strand; PAM type: NRG; PAM sequence: AAG
  source 1..20: mol_type = other DNA
aaagtcctgaggcaaccccc

SEQ ID NO: 17516 - DNA, 20 bp, synthetic construct
  misc_feature 1..20: note = Description of Artificial Sequence: Synthetic oligonucleotide
  misc_feature 1..20: note = Target: FXN; (+) strand; PAM type: NRG; PAM sequence: AGG
  source 1..20: mol_type = other DNA
aagtcctgaggcaaccccca

SEQ ID NO: 17517 - DNA, 20 bp, synthetic construct
  misc_feature 1..20: note = Description of Artificial Sequence: Synthetic oligonucleotide
  misc_feature 1..20: note = Target: FXN; (+) strand; PAM type: NRG; PAM sequence: GGG
  source 1..20: mol_type = other DNA
agtcctgaggcaacccccaa

SEQ ID NO: 17518 - DNA, 20 bp, synthetic construct
  misc_feature 1..20: note = Description of Artificial Sequence: Synthetic oligonucleotide
  misc_feature 1..20: note = Target: FXN; (+) strand; PAM type: NRG; PAM sequence: TGG
  source 1..20: mol_type = other DNA
cctgaggcaacccccaaggg

SEQ ID NO: 17519 - DNA, 20 bp, synthetic construct
  misc_feature 1..20: note = Description of Artificial Sequence: Synthetic oligonucleotide
  misc_feature 1..20: note = Target: FXN; (+) strand; PAM type: NRG; PAM sequence: AAG
  source 1..20: mol_type = other DNA
gaggcaacccccaagggtgg

SEQ ID NO: 17520 - DNA, 20 bp, synthetic construct
  misc_feature 1..20: note = Description of Artificial Sequence: Synthetic oligonucleotide
  misc_feature 1..20: note = Target: FXN; (+) strand; PAM type: NRG; PAM sequence: CAG
  source 1..20: mol_type = other DNA
acccccaagggtggaagtgc

SEQ ID NO: 17521 - DNA, 20 bp, synthetic construct
  misc_feature 1..20: note = Description of Artificial Sequence: Synthetic oligonucleotide
  misc_feature 1..20: note = Target: FXN; (+) strand; PAM type: NRG; PAM sequence: AGG
  source 1..20: mol_type = other DNA
cccccaagggtggaagtgcc

SEQ ID NO: 17522 - DNA, 20 bp, synthetic construct
  misc_feature 1..20: note = Description of Artificial Sequence: Synthetic oligonucleotide
  misc_feature 1..20: note = Target: FXN; (+) strand; PAM type: NRG; PAM sequence: TGG
  source 1..20: mol_type = other DNA
agtgccaggccaccacccac

SEQ ID NO: 17523 - DNA, 20 bp, synthetic construct
  misc_feature 1..20: note = Description of Artificial Sequence: Synthetic oligonucleotide
  misc_feature 1..20: note = Target: FXN; (+) strand; PAM type: NRG; PAM sequence: GAG
  source 1..20: mol_type = other DNA
tgccaggccaccacccactg

SEQ ID NO: 17524 - DNA, 20 bp, synthetic construct
  misc_feature 1..20: note = Description of Artificial Sequence: Synthetic oligonucleotide
  misc_feature 1..20: note = Target: FXN; (+) strand; PAM type: NRG; PAM sequence: AGG
  source 1..20: mol_type = other DNA
gccaggccaccacccactgg

SEQ ID NO: 17525 - DNA, 20 bp, synthetic construct
  misc_feature 1..20: note = Description of Artificial Sequence: Synthetic oligonucleotide
  misc_feature 1..20: note = Target: FXN; (+) strand; PAM type: NRG; PAM sequence: AAG
  source 1..20: mol_type = other DNA
ccaccacccactggaggtga

SEQ ID NO: 17526 - DNA, 20 bp, synthetic construct
  misc_feature 1..20: note = Description of Artificial Sequence: Synthetic oligonucleotide
  misc_feature 1..20: note = Target: FXN; (+) strand; PAM type: NRG; PAM sequence: TGG
  source 1..20: mol_type = other DNA
tggaggtgaaagttccgtga

SEQ ID NO: 17527 - DNA, 20 bp, synthetic construct
  misc_feature 1..20: note = Description of Artificial Sequence: Synthetic oligonucleotide
  misc_feature 1..20: note = Target: FXN; (+) strand; PAM type: NRG; PAM sequence: GGG
  source 1..20: mol_type = other DNA
ggaggtgaaagttccgtgat

SEQ ID NO: 17528 - DNA, 20 bp, synthetic construct
  misc_feature 1..20: note = Description of Artificial Sequence: Synthetic oligonucleotide
  misc_feature 1..20: note = Target: FXN; (+) strand; PAM type: NRG; PAM sequence: TGG
  source 1..20: mol_type = other DNA
gttccgtgatgggtttgctt

SEQ ID NO: 17529 - DNA, 20 bp, synthetic construct
  misc_feature 1..20: note = Description of Artificial Sequence: Synthetic oligonucleotide
  misc_feature 1..20: note = Target: FXN; (+) strand; PAM type: NRG; PAM sequence: TGG
  source 1..20: mol_type = other DNA
tctgcgaatctactgtcatg

SEQ ID NO: 17530 - DNA, 20 bp, synthetic construct
  misc_feature 1..20: note = Description of Artificial Sequence: Synthetic oligonucleotide
  misc_feature 1..20: note = Target: FXN; (+) strand; PAM type: NRG; PAM sequence: GAG
  source 1..20: mol_type = other DNA
tgcgaatctactgtcatgtg

SEQ ID NO: 17531 - DNA, 20 bp, synthetic construct
  misc_feature 1..20: note = Description of Artificial Sequence: Synthetic oligonucleotide
  misc_feature 1..20: note = Target: FXN; (+) strand; PAM type: NRG; PAM sequence: GAG
  source 1..20: mol_type = other DNA
cgaatctactgtcatgtgga

SEQ ID NO: 17532 - DNA, 20 bp, synthetic construct
  misc_feature 1..20: note = Description of Artificial Sequence: Synthetic oligonucleotide
  misc_feature 1..20: note = Target: FXN; (+) strand; PAM type: NRG; PAM sequence: TGG
  source 1..20: mol_type = other DNA
atgtggagagatctgtgctc

SEQ ID NO: 17533 - DNA, 20 bp, synthetic construct
  misc_feature 1..20: note = Description of Artificial Sequence: Synthetic oligonucleotide
  misc_feature 1..20: note = Target: FXN; (+) strand; PAM type: NRG; PAM sequence: AAG
  source 1..20: mol_type = other DNA
tggagagatctgtgctctgg

SEQ ID NO: 17534 - DNA, 20 bp, synthetic construct
  misc_feature 1..20: note = Description of Artificial Sequence: Synthetic oligonucleotide
  misc_feature 1..20: note = Target: FXN; (+) strand; PAM type: NRG; PAM sequence: GAG
  source 1..20: mol_type = other DNA
gagagatctgtgctctggaa

SEQ ID NO: 17535 - DNA, 20 bp, synthetic construct
  misc_feature 1..20: note = Description of Artificial Sequence: Synthetic oligonucleotide
  misc_feature 1..20: note = Target: FXN; (+) strand; PAM type: NRG; PAM sequence: CAG
  source 1..20: mol_type = other DNA
ctgtgctctggaagagcata

SEQ ID NO: 17536 - DNA, 20 bp, synthetic construct
  misc_feature 1..20: note = Description of Artificial Sequence: Synthetic oligonucleotide
  misc_feature 1..20: note = Target: FXN; (+) strand; PAM type: NRG; PAM sequence: TAG
  source 1..20: mol_type = other DNA
gctctggaagagcatacagt

SEQ ID NO: 17537 - DNA, 20 bp, synthetic construct
  misc_feature 1..20: note = Description of Artificial Sequence: Synthetic oligonucleotide
  misc_feature 1..20: note = Target: FXN; (+) strand; PAM type: NRG; PAM sequence: AAG
  source 1..20: mol_type = other DNA
ggaagagcatacagttagaa

SEQ ID NO: 17538 - DNA, 20 bp, synthetic construct
  misc_feature 1..20: note = Description of Artificial Sequence: Synthetic oligonucleotide
  misc_feature 1..20: note = Target: FXN; (+) strand; PAM type: NRG; PAM sequence: AAG
  source 1..20: mol_type = other DNA
agttagaaaagcttgccctg

SEQ ID NO: 17539 - DNA, 20 bp, synthetic construct
  misc_feature 1..20: note = Description of Artificial Sequence: Synthetic oligonucleotide
  misc_feature 1..20: note = Target: FXN; (+) strand; PAM type: NRG; PAM sequence: AGG
  source 1..20: mol_type = other DNA
gttagaaaagcttgccctga

SEQ ID NO: 17540 - DNA, 20 bp, synthetic construct
  misc_feature 1..20: note = Description of Artificial Sequence: Synthetic oligonucleotide
  misc_feature 1..20: note = Target: FXN; (+) strand; PAM type: NRG; PAM sequence: GGG
  source 1..20: mol_type = other DNA
ttagaaaagcttgccctgaa

SEQ ID NO: 17541 - DNA, 20 bp, synthetic construct
  misc_feature 1..20: note = Description of Artificial Sequence: Synthetic oligonucleotide
  misc_feature 1..20: note = Target: FXN; (+) strand; PAM type: NRG; PAM sequence: TGG
  source 1..20: mol_type = other DNA
cttgccctgaagggaatgta

SEQ ID NO: 17542 - DNA, 20 bp, synthetic construct
  misc_feature 1..20: note = Description of Artificial Sequence: Synthetic oligonucleotide
  misc_feature 1..20: note = Target: FXN; (+) strand; PAM type: NRG; PAM sequence: AAG
  source 1..20: mol_type = other DNA
cctgaagggaatgtatggtg

SEQ ID NO: 17543 - DNA, 20 bp, synthetic construct
  misc_feature 1..20: note = Description of Artificial Sequence: Synthetic oligonucleotide
  misc_feature 1..20: note = Target: FXN; (+) strand; PAM type: NRG; PAM sequence: AGG
  source 1..20: mol_type = other DNA
ctgaagggaatgtatggtga

SEQ ID NO: 17544 - DNA, 20 bp, synthetic construct
  misc_feature 1..20: note = Description of Artificial Sequence: Synthetic oligonucleotide
  misc_feature 1..20: note = Target: FXN; (+) strand; PAM type: NRG; PAM sequence: GGG
  source 1..20: mol_type = other DNA
tgaagggaatgtatggtgaa

SEQ ID NO: 17545 - DNA, 20 bp, synthetic construct
  misc_feature 1..20: note = Description of Artificial Sequence: Synthetic oligonucleotide
  misc_feature 1..20: note = Target: FXN; (+) strand; PAM type: NRG; PAM sequence: GGG
  source 1..20: mol_type = other DNA
gaagggaatgtatggtgaag

SEQ ID NO: 17546 - DNA, 20 bp, synthetic construct
  misc_feature 1..20: note = Description of Artificial Sequence: Synthetic oligonucleotide
  misc_feature 1..20: note = Target: FXN; (+) strand; PAM type: NRG; PAM sequence: GAG
  source 1..20: mol_type = other DNA
agggaatgtatggtgaaggg

SEQ ID NO: 17547 - DNA, 20 bp, synthetic construct
  misc_feature 1..20: note = Description of Artificial Sequence: Synthetic oligonucleotide
  misc_feature 1..20: note = Target: FXN; (+) strand; PAM type: NRG; PAM sequence: AGG
  source 1..20: mol_type = other DNA
gggaatgtatggtgaagggg

SEQ ID NO: 17548 - DNA, 20 bp, synthetic construct
  misc_feature 1..20: note = Description of Artificial Sequence: Synthetic oligonucleotide
  misc_feature 1..20: note = Target: FXN; (+) strand; PAM type: NRG; PAM sequence: AAG
  source 1..20: mol_type = other DNA
gtatggtgaaggggaggtga

SEQ ID NO: 17549 - DNA, 20 bp, synthetic construct
  misc_feature 1..20: note = Description of Artificial Sequence: Synthetic oligonucleotide
  misc_feature 1..20: note = Target: FXN; (+) strand; PAM type: NRG; PAM sequence: AGG
  source 1..20: mol_type = other DNA
tatggtgaaggggaggtgaa

SEQ ID NO: 17550 - DNA, 20 bp, synthetic construct
  misc_feature 1..20: note = Description of Artificial Sequence: Synthetic oligonucleotide
  misc_feature 1..20: note = Target: FXN; (+) strand; PAM type: NRG; PAM sequence: AAG
  source 1..20: mol_type = other DNA
aggttatatttgcatttctg

SEQ ID NO: 17551 - DNA, 20 bp, synthetic construct
  misc_feature 1..20: note = Description of Artificial Sequence: Synthetic oligonucleotide
  misc_feature 1..20: note = Target: FXN; (+) strand; PAM type: NRG; PAM sequence: AGG
  source 1..20: mol_type = other DNA
ggttatatttgcatttctga

SEQ ID NO: 17552 - DNA, 20 bp, synthetic construct
  misc_feature 1..20: note = Description of Artificial Sequence: Synthetic oligonucleotide
  misc_feature 1..20: note = Target: FXN; (+) strand; PAM type: NRG; PAM sequence: GGG
  source 1..20: mol_type = other DNA
gttatatttgcatttctgaa

SEQ ID NO: 17553 - DNA, 20 bp, synthetic construct
  misc_feature 1..20: note = Description of Artificial Sequence: Synthetic oligonucleotide
  misc_feature 1..20: note = Target: FXN; (+) strand; PAM type: NRG; PAM sequence: AAG
  source 1..20: mol_type = other DNA
atttgcatttctgaagggct

SEQ ID NO: 17554 - DNA, 20 bp, synthetic construct
  misc_feature 1..20: note = Description of Artificial Sequence: Synthetic oligonucleotide
  misc_feature 1..20: note = Target: FXN; (+) strand; PAM type: NRG; PAM sequence: TAG
  source 1..20: mol_type = other DNA
tgcatttctgaagggctaag

SEQ ID NO: 17555 - DNA, 20 bp, synthetic construct
  misc_feature 1..20: note = Description of Artificial Sequence: Synthetic oligonucleotide
  misc_feature 1..20: note = Target: FXN; (+) strand; PAM type: NRG; PAM sequence: AGG
  source 1..20: mol_type = other DNA
gcatttctgaagggctaagt

SEQ ID NO: 17556 - DNA, 20 bp, synthetic construct
  misc_feature 1..20: note = Description of Artificial Sequence: Synthetic oligonucleotide
  misc_feature 1..20: note = Target: FXN; (+) strand; PAM type: NRG; PAM sequence: CGG
  source 1..20: mol_type = other DNA
tgaagggctaagtaggaaac

SEQ ID NO: 17557 - DNA, 20 bp, synthetic construct
  misc_feature 1..20: note = Description of Artificial Sequence: Synthetic oligonucleotide
  misc_feature 1..20: note = Target: FXN; (+) strand; PAM type: NRG; PAM sequence: GGG
  source 1..20: mol_type = other DNA
gaagggctaagtaggaaacc

SEQ ID NO: 17558 - DNA, 20 bp, synthetic construct
  misc_feature 1..20: note = Description of Artificial Sequence: Synthetic oligonucleotide
  misc_feature 1..20: note = Target: FXN; (+) strand; PAM type: NRG; PAM sequence: CAG
  source 1..20: mol_type = other DNA
ctaagtaggaaaccgggaac

SEQ ID NO: 17559 - DNA, 20 bp, synthetic construct
  misc_feature 1..20: note = Description of Artificial Sequence: Synthetic oligonucleotide
  misc_feature 1..20: note = Target: FXN; (+) strand; PAM type: NRG; PAM sequence: AGG
  source 1..20: mol_type = other DNA
taagtaggaaaccgggaacc

SEQ ID NO: 17560 - DNA, 20 bp, synthetic construct
  misc_feature 1..20: note = Description of Artificial Sequence: Synthetic oligonucleotide
  misc_feature 1..20: note = Target: FXN; (+) strand; PAM type: NRG; PAM sequence: GGG
  source 1..20: mol_type = other DNA
aagtaggaaaccgggaacca

SEQ ID NO: 17561 - DNA, 20 bp, synthetic construct
  misc_feature 1..20: note = Description of Artificial Sequence: Synthetic oligonucleotide
  misc_feature 1..20: note = Target: FXN; (+) strand; PAM type: NRG; PAM sequence: GGG
  source 1..20: mol_type = other DNA
agtaggaaaccgggaaccag

SEQ ID NO: 17562 - DNA, 20 bp, synthetic construct
  misc_feature 1..20: note = Description of Artificial Sequence: Synthetic oligonucleotide
  misc_feature 1..20: note = Target: FXN; (+) strand; PAM type: NRG; PAM sequence: GAG
  source 1..20: mol_type = other DNA
taggaaaccgggaaccaggg

SEQ ID NO: 17563 - DNA, 20 bp, synthetic construct
  misc_feature 1..20: note = Description of Artificial Sequence: Synthetic oligonucleotide
  misc_feature 1..20: note = Target: FXN; (+) strand; PAM type: NRG; PAM sequence: GAG
  source 1..20: mol_type = other DNA
ggaaaccgggaaccagggga

SEQ ID NO: 17564 - DNA, 20 bp, synthetic construct
  misc_feature 1..20: note = Description of Artificial Sequence: Synthetic oligonucleotide
  misc_feature 1..20: note = Target: FXN; (+) strand; PAM type: NRG; PAM sequence: AGG
  source 1..20: mol_type = other DNA
gaaaccgggaaccaggggag

SEQ ID NO: 17565 - DNA, 20 bp, synthetic construct
  misc_feature 1..20: note = Description of Artificial Sequence: Synthetic oligonucleotide
  misc_feature 1..20: note = Target: FXN; (+) strand; PAM type: NRG; PAM sequence: GAG
  source 1..20: mol_type = other DNA
aaccgggaaccaggggagag

SEQ ID NO: 17566 - DNA, 20 bp, synthetic construct
  misc_feature 1..20: note = Description of Artificial Sequence: Synthetic oligonucleotide
  misc_feature 1..20: note = Target: FXN; (+) strand; PAM type: NRG; PAM sequence: AAG
  source 1..20: mol_type = other DNA
cgggaaccaggggagaggag

SEQ ID NO: 17567 - DNA, 20 bp, synthetic construct
  misc_feature 1..20: note = Description of Artificial Sequence: Synthetic oligonucleotide
  misc_feature 1..20: note = Target: FXN; (+) strand; PAM type: NRG; PAM sequence: GAG
  source 1..20: mol_type = other DNA
ggaaccaggggagaggagaa

SEQ ID NO: 17568 - DNA, 20 bp, synthetic construct
  misc_feature 1..20: note = Description of Artificial Sequence: Synthetic oligonucleotide
  misc_feature 1..20: note = Target: FXN; (+) strand; PAM type: NRG; PAM sequence: AAG
  source 1..20: mol_type = other DNA
accaggggagaggagaagag

SEQ ID NO: 17569 - DNA, 20 bp, synthetic construct
  misc_feature 1..20: note = Description of Artificial Sequence: Synthetic oligonucleotide
  misc_feature 1..20: note = Target: FXN; (+) strand; PAM type: NRG; PAM sequence: GAG
  source 1..20: mol_type = other DNA
caggggagaggagaagagaa

SEQ ID NO: 17570 - DNA, 20 bp, synthetic construct
  misc_feature 1..20: note = Description of Artificial Sequence: Synthetic oligonucleotide
  misc_feature 1..20: note = Target: FXN; (+) strand; PAM type: NRG; PAM sequence: GAG
  source 1..20: mol_type = other DNA
ggggagaggagaagagaaga

SEQ ID NO: 17571 - DNA, 20 bp, synthetic construct
  misc_feature 1..20: note = Description of Artificial Sequence: Synthetic oligonucleotide
  misc_feature 1..20: note = Target: FXN; (+) strand; PAM type: NRG; PAM sequence: AGG
  source 1..20: mol_type = other DNA
gggagaggagaagagaagag

SEQ ID NO: 17572 - DNA, 20 bp, synthetic construct
  misc_feature 1..20: note = Description of Artificial Sequence: Synthetic oligonucleotide
  misc_feature 1..20: note = Target: FXN; (+) strand; PAM type: NRG; PAM sequence: AAG
  source 1..20: mol_type = other DNA
aagagaggataatttttttt

SEQ ID NO: 17573 - DNA, 20 bp, synthetic construct
  misc_feature 1..20: note = Description of Artificial Sequence: Synthetic oligonucleotide
  misc_feature 1..20: note = Target: FXN; (+) strand; PAM type: NRG; PAM sequence: AAG
  source 1..20: mol_type = other DNA
aggataattttttttaagaa

SEQ ID NO: 17574 - DNA, 20 bp, synthetic construct
  misc_feature 1..20: note = Description of Artificial Sequence: Synthetic oligonucleotide
  misc_feature 1..20: note = Target: FXN; (+) strand; PAM type: NRG; PAM sequence: TAG
  source 1..20: mol_type = other DNA
gcaacatattccctttttct

SEQ ID NO: 17575 - DNA, 20 bp, synthetic construct
  misc_feature 1..20: note = Description of Artificial Sequence: Synthetic oligonucleotide
  misc_feature 1..20: note = Target: FXN; (+) strand; PAM type: NRG; PAM sequence: TGG
  source 1..20: mol_type = other DNA
tccctttttcttagaaaaaa

SEQ ID NO: 17576 - DNA, 20 bp, synthetic construct
  misc_feature 1..20: note = Description of Artificial Sequence: Synthetic oligonucleotide
  misc_feature 1..20: note = Target: FXN; (+) strand; PAM type: NRG; PAM sequence: GAG
  source 1..20: mol_type = other DNA
cctttttcttagaaaaaatg

SEQ ID NO: 17577 - DNA, 20 bp, synthetic construct
  misc_feature 1..20: note = Description of Artificial Sequence: Synthetic oligonucleotide
  misc_feature 1..20: note = Target: FXN; (+) strand; PAM type: NRG; PAM sequence: CGG
  source 1..20: mol_type = other DNA
cttagaaaaaatggagcact

SEQ ID NO: 17578 - DNA, 20 bp, synthetic construct
  misc_feature 1..20: note = Description of Artificial Sequence: Synthetic oligonucleotide
  misc_feature 1..20: note = Target: FXN; (+) strand; PAM type: NRG; PAM sequence: CAG
  source 1..20: mol_type = other DNA
aaaaatggagcactcggtta

SEQ ID NO: 17579 - DNA, 20 bp, synthetic construct
  misc_feature 1..20: note = Description of Artificial Sequence: Synthetic oligonucleotide
  misc_feature 1..20: note = Target: FXN; (+) strand; PAM type: NRG; PAM sequence: AGG
  source 1..20: mol_type = other DNA
aaaatggagcactcggttac

SEQ ID NO: 17580 - DNA, 20 bp, synthetic construct
  misc_feature 1..20: note = Description of Artificial Sequence: Synthetic oligonucleotide
  misc_feature 1..20: note = Target: FXN; (+) strand; PAM type: NRG; PAM sequence: TAG
  source 1..20: mol_type = other DNA
cggttacaggcactcgaatg

SEQ ID NO: 17581 - DNA, 20 bp, synthetic construct
  misc_feature 1..20: note = Description of Artificial Sequence: Synthetic oligonucleotide
  misc_feature 1..20: note = Target: FXN; (+) strand; PAM type: NRG; PAM sequence: AAG
  source 1..20: mol_type = other DNA
ttacaggcactcgaatgtag

SEQ ID NO: 17582 - DNA, 20 bp, synthetic construct
  misc_feature 1..20: note = Description of Artificial Sequence: Synthetic oligonucleotide
  misc_feature 1..20: note = Target: FXN; (+) strand; PAM type: NRG; PAM sequence: TAG
  source 1..20: mol_type = other DNA
caggcactcgaatgtagaag

SEQ ID NO: 17583 - DNA, 20 bp, synthetic construct
  misc_feature 1..20: note = Description of Artificial Sequence: Synthetic oligonucleotide
  misc_feature 1..20: note = Target: FXN; (+) strand; PAM type: NRG; PAM sequence: TGG
  source 1..20: mol_type = other DNA
atatataaattatgcattaa

SEQ ID NO: 17584 - DNA, 20 bp, synthetic construct
  misc_feature 1..20: note = Description of Artificial Sequence: Synthetic oligonucleotide
  misc_feature 1..20: note = Target: FXN; (+) strand; PAM type: NRG; PAM sequence: GGG
  source 1..20: mol_type = other DNA
tatataaattatgcattaat

SEQ ID NO: 17585 - DNA, 20 bp, synthetic construct
  misc_feature 1..20: note = Description of Artificial Sequence: Synthetic oligonucleotide
  misc_feature 1..20: note = Target: FXN; (+) strand; PAM type: NRG; PAM sequence: TAG
  source 1..20: mol_type = other DNA
ggttataattcactgaaaaa

SEQ ID NO: 17586 - DNA, 20 bp, synthetic construct
  misc_feature 1..20: note = Description of Artificial Sequence: Synthetic oligonucleotide
  misc_feature 1..20: note = Target: FXN; (+) strand; PAM type: NRG; PAM sequence: TGG
  source 1..20: mol_type = other DNA
agtaacgtacttcttaactt

SEQ ID NO: 17587 - DNA, 20 bp, synthetic construct
  misc_feature 1..20: note = Description of Artificial Sequence: Synthetic oligonucleotide
  misc_feature 1..20: note = Target: FXN; (+) strand; PAM type: NRG; PAM sequence: CAG
  source 1..20: mol_type = other DNA
tacttcttaactttggcttt

SEQ ID NO: 17588 - DNA, 20 bp, synthetic construct
  misc_feature 1..20: note = Description of Artificial Sequence: Synthetic oligonucleotide
  misc_feature 1..20: note = Target: FXN; (+) strand; PAM type: NRG; PAM sequence: GAG
  source 1..20: mol_type = other DNA
cttcttaactttggctttca

SEQ ID NO: 17589 - DNA, 20 bp, synthetic construct
  misc_feature 1..20: note = Description of Artificial Sequence: Synthetic oligonucleotide
  misc_feature 1..20: note = Target: FXN; (+) strand; PAM type: NRG; PAM sequence: TGG
  source 1..20: mol_type = other DNA
tttcagagttcgaaccaacg

SEQ ID NO: 17590 - DNA, 20 bp, synthetic construct
  misc_feature 1..20: note = Description of Artificial Sequence: Synthetic oligonucleotide
  misc_feature 1..20: note = Target: FXN; (+) strand; PAM type: NRG; PAM sequence: CAG
  source 1..20: mol_type = other DNA
cgaaccaacgtggcctcaac

SEQ ID NO: 17591 - DNA, 20 bp, synthetic construct
  misc_feature 1..20: note = Description of Artificial Sequence: Synthetic oligonucleotide
  misc_feature 1..20: note = Target: FXN; (+) strand; PAM type: NRG; PAM sequence: TGG
  source 1..20: mol_type = other DNA
aacgtggcctcaaccagatt

SEQ ID NO: 17592 - DNA, 20 bp, synthetic construct
  misc_feature 1..20: note = Description of Artificial Sequence: Synthetic oligonucleotide
  misc_feature 1..20: note = Target: FXN; (+) strand; PAM type: NRG; PAM sequence: AAG
  source 1..20: mol_type = other DNA
accagatttggaatgtcaaa

SEQ ID NO: 17593 - DNA, 20 bp, synthetic construct
  misc_feature 1..20: note = Description of Artificial Sequence: Synthetic oligonucleotide
  misc_feature 1..20: note = Target: FXN; (+) strand; PAM type: NRG; PAM sequence: CAG
  source 1..20: mol_type = other DNA
agatttggaatgtcaaaaag

SEQ ID NO: 17594 - DNA, 20 bp, synthetic construct
  misc_feature 1..20: note = Description of Artificial Sequence: Synthetic oligonucleotide
  misc_feature 1..20: note = Target: FXN; (+) strand; PAM type: NRG; PAM sequence: GAG
  source 1..20: mol_type = other DNA
atttggaatgtcaaaaagca

SEQ ID NO: 17595 - DNA, 20 bp, synthetic construct
  misc_feature 1..20: note = Description of Artificial Sequence: Synthetic oligonucleotide
  misc_feature 1..20: note = Target: FXN; (+) strand; PAM type: NRG; PAM sequence: GAG
  source 1..20: mol_type = other DNA
agtgtctatttgatgaattt

SEQ ID NO: 17596 - DNA, 20 bp, synthetic construct
  misc_feature 1..20: note = Description of Artificial Sequence: Synthetic oligonucleotide
  misc_feature 1..20: note = Target: FXN; (+) strand; PAM type: NRG; PAM sequence: AGG
  source 1..20: mol_type = other DNA
gtgtctatttgatgaatttg

SEQ ID NO: 17597 - DNA, 20 bp, synthetic construct
  misc_feature 1..20: note = Description of Artificial Sequence: Synthetic oligonucleotide
  misc_feature 1..20: note = Target: FXN; (+) strand; PAM type: NRG; PAM sequence: TGG
  source 1..20: mol_type = other DNA
ttgatgaatttgaggaaatc

SEQ ID NO: 17598 - DNA, 20 bp, synthetic construct
  misc_feature 1..20: note = Description of Artificial Sequence: Synthetic oligonucleotide
  misc_feature 1..20: note = Target: FXN; (+) strand; PAM type: NRG; PAM sequence: TGG
  source 1..20: mol_type = other DNA
tttgaggaaatctggaactt

SEQ ID NO: 17599 - DNA, 20 bp, synthetic construct
  misc_feature 1..20: note = Description of Artificial Sequence: Synthetic oligonucleotide
  misc_feature 1..20: note = Target: FXN; (+) strand; PAM type: NRG; PAM sequence: GGG
  source 1..20: mol_type = other DNA
ttgaggaaatctggaacttt

SEQ ID NO: 17600 - DNA, 20 bp, synthetic construct
  misc_feature 1..20: note = Description of Artificial Sequence: Synthetic oligonucleotide
  misc_feature 1..20: note = Target: FXN; (+) strand; PAM type: NRG; PAM sequence: CAG
  source 1..20: mol_type = other DNA
atctggaactttgggccacc

SEQ ID NO: 17601 - DNA, 20 bp, synthetic construct
  misc_feature 1..20: note = Description of Artificial Sequence: Synthetic oligonucleotide
  misc_feature 1..20: note = Target: FXN; (+) strand; PAM type: NRG; PAM sequence: AGG
  source 1..20: mol_type = other DNA
tctggaactttgggccaccc

SEQ ID NO: 17602 - DNA, 20 bp, synthetic construct
  misc_feature 1..20: note = Description of Artificial Sequence: Synthetic oligonucleotide
  misc_feature 1..20: note = Target: FXN; (+) strand; PAM type: NRG; PAM sequence: GGG
  source 1..20: mol_type = other DNA
ctggaactttgggccaccca

SEQ ID NO: 17603 - DNA, 20 bp, synthetic construct
  misc_feature 1..20: note = Description of Artificial Sequence: Synthetic oligonucleotide
  misc_feature 1..20: note = Target: FXN; (+) strand; PAM type: NRG; PAM sequence: AAG
  source 1..20: mol_type = other DNA
aactttgggccacccagggt

SEQ ID NO: 17604 - DNA, 20 bp, synthetic construct
  misc_feature 1..20: note = Description of Artificial Sequence: Synthetic oligonucleotide
  misc_feature 1..20: note = Target: FXN; (+) strand; PAM type: NRG; PAM sequence: TAG
  source 1..20: mol_type = other DNA
ataaaacaccttccacgtca

SEQ ID NO: 17605 - DNA, 20 bp, synthetic construct
  misc_feature 1..20: note = Description of Artificial Sequence: Synthetic oligonucleotide
  misc_feature 1..20: note = Target: FXN; (+) strand; PAM type: NRG; PAM sequence: AGG
  source 1..20: mol_type = other DNA
taaaacaccttccacgtcat

SEQ ID NO: 17606 - DNA, 20 bp, synthetic construct
  misc_feature 1..20: note = Description of Artificial Sequence: Synthetic oligonucleotide
  misc_feature 1..20: note = Target: FXN; (+) strand; PAM type: NRG; PAM sequence: TAG
  source 1..20: mol_type = other DNA
tccttccctgcctctcccat

SEQ ID NO: 17607 - DNA, 20 bp, synthetic construct
  misc_feature 1..20: note = Description of Artificial Sequence: Synthetic oligonucleotide
  misc_feature 1..20: note = Target: FXN; (+) strand; PAM type: NRG; PAM sequence: TGG
  source 1..20: mol_type = other DNA
ctgcctctcccattagaacc

SEQ ID NO: 17608 - DNA, 20 bp, synthetic construct
  misc_feature 1..20: note = Description of Artificial Sequence: Synthetic oligonucleotide
  misc_feature 1..20: note = Target: FXN; (+) strand; PAM type: NRG; PAM sequence: GAG
  source 1..20: mol_type = other DNA
tagaacctggttttcttcct

SEQ ID NO: 17609 - DNA, 20 bp, synthetic construct
  misc_feature 1..20: note = Description of Artificial Sequence: Synthetic oligonucleotide
  misc_feature 1..20: note = Target: FXN; (+) strand; PAM type: NRG; PAM sequence: CAG
  source 1..20: mol_type = other DNA
aacctggttttcttcctgag

SEQ ID NO: 17610 - DNA, 20 bp, synthetic construct
  misc_feature 1..20: note = Description of Artificial Sequence: Synthetic oligonucleotide
  misc_feature 1..20: note = Target: FXN; (+) strand; PAM type: NRG; PAM sequence: TAG
  source 1..20: mol_type = other DNA
ttcctgagcagcaacaatct

SEQ ID NO: 17611 - DNA, 20 bp, synthetic construct
  misc_feature 1..20: note = Description of Artificial Sequence: Synthetic oligonucleotide
  misc_feature 1..20: note = Target: FXN; (+) strand; PAM type: NRG; PAM sequence: AGG
  source 1..20: mol_type = other DNA
tcctgagcagcaacaatctt

SEQ ID NO: 17612 - DNA, 20 bp, synthetic construct
  misc_feature 1..20: note = Description of Artificial Sequence: Synthetic oligonucleotide
  misc_feature 1..20: note = Target: FXN; (+) strand; PAM type: NRG; PAM sequence: GAG
  source 1..20: mol_type = other DNA
aggcatctttccatgtgact

SEQ ID NO: 17613 - DNA, 20 bp, synthetic construct
  misc_feature 1..20: note = Description of Artificial Sequence: Synthetic oligonucleotide
  misc_feature 1..20: note = Target: FXN; (+) strand; PAM type: NRG; PAM sequence: TAG
  source 1..20: mol_type = other DNA
ccacattatttttaatgaaa

SEQ ID NO: 17614 - DNA, 20 bp, synthetic construct
  misc_feature 1..20: note = Description of Artificial Sequence: Synthetic oligonucleotide
  misc_feature 1..20: note = Target: FXN; (+) strand; PAM type: NRG; PAM sequence: TAG
  source 1..20: mol_type = other DNA
tatttttaatgaaatagtat

SEQ ID NO: 17615 - DNA, 20 bp, synthetic construct
  misc_feature 1..20: note = Description of Artificial Sequence: Synthetic oligonucleotide
  misc_feature 1..20: note = Target: FXN; (+) strand; PAM type: NRG; PAM sequence: TGG
  source 1..20: mol_type = other DNA
tgaaatagtattagattgca

SEQ ID NO: 17616 - DNA, 20 bp, synthetic construct
  misc_feature 1..20: note = Description of Artificial Sequence: Synthetic oligonucleotide
  misc_feature 1..20: note = Target: FXN; (+) strand; PAM type: NRG; PAM sequence: TGG
  source 1..20: mol_type = other DNA
tttaacccatcccctactgt

SEQ ID NO: 17617 - DNA, 20 bp, synthetic construct
  misc_feature 1..20: note = Description of Artificial Sequence: Synthetic oligonucleotide
  misc_feature 1..20: note = Target: FXN; (+) strand; PAM type: NRG; PAM sequence: CAG
  source 1..20: mol_type = other DNA
atcccctactgttggacatt

SEQ ID NO: 17618 - DNA, 20 bp, synthetic construct
  misc_feature 1..20: note = Description of Artificial Sequence: Synthetic oligonucleotide
  misc_feature 1..20: note = Target: FXN; (+) strand; PAM type: NRG; PAM sequence: AGG
  source 1..20: mol_type = other DNA
tcccctactgttggacattc

SEQ ID NO: 17619 - DNA, 20 bp, synthetic construct
  misc_feature 1..20: note = Description of Artificial Sequence: Synthetic oligonucleotide
  misc_feature 1..20: note = Target: FXN; (+) strand; PAM type: NRG; PAM sequence: CAG
  source 1..20: mol_type = other DNA
ttggacattcaggttgtttc

SEQ ID NO: 17620 - DNA, 20 bp, synthetic construct
  misc_feature 1..20: note = Description of Artificial Sequence: Synthetic oligonucleotide
  misc_feature 1..20: note = Target: FXN; (+) strand; PAM type: NRG; PAM sequence: GAG
  source 1..20: mol_type = other DNA
ggacattcaggttgtttcca

SEQ ID NO: 17621 - DNA, 20 bp, synthetic construct
  misc_feature 1..20: note = Description of Artificial Sequence: Synthetic oligonucleotide
  misc_feature 1..20: note = Target: FXN; (+) strand; PAM type: NRG; PAM sequence: TAG
  source 1..20: mol_type = other DNA
tattttatttaataccctaa

SEQ ID NO: 17622 - DNA, 20 bp, synthetic construct
  misc_feature 1..20: note = Description of Artificial Sequence: Synthetic oligonucleotide
  misc_feature 1..20: note = Target: FXN; (+) strand; PAM type: NRG; PAM sequence: TAG
  source 1..20: mol_type = other DNA
ttatttaataccctaatagt

SEQ ID NO: 17623 - DNA, 20 bp, synthetic construct
  misc_feature 1..20: note = Description of Artificial Sequence: Synthetic oligonucleotide
  misc_feature 1..20: note = Target: FXN; (+) strand; PAM type: NRG; PAM sequence: GAG
  source 1..20: mol_type = other DNA
atttaataccctaatagtta

SEQ ID NO: 17624 - DNA, 20 bp, synthetic construct
  misc_feature 1..20: note = Description of Artificial Sequence: Synthetic oligonucleotide
  misc_feature 1..20: note = Target: FXN; (+) strand; PAM type: NRG; PAM sequence: CAG
  source 1..20: mol_type = other DNA
taataccctaatagttagag

SEQ ID NO: 17625 - DNA, 20 bp, synthetic construct
  misc_feature 1..20: note = Description of Artificial Sequence: Synthetic oligonucleotide
  misc_feature 1..20: note = Target: FXN; (+) strand; PAM type: NRG; PAM sequence: AGG
  source 1..20: mol_type = other DNA
aataccctaatagttagagc

SEQ ID NO: 17626 - DNA, 20 bp, synthetic construct
  misc_feature 1..20: note = Description of Artificial Sequence: Synthetic oligonucleotide
  misc_feature 1..20: note = Target: FXN; (+) strand; PAM type: NRG; PAM sequence: TAG
  source 1..20: mol_type = other DNA
ggccatgctgctatcacaaa

SEQ ID NO: 17627 - DNA, 20 bp, synthetic construct
  misc_feature 1..20: note = Description of Artificial Sequence: Synthetic oligonucleotide
  misc_feature 1..20: note = Target: FXN; (+) strand; PAM type: NRG; PAM sequence: TAG
  source 1..20: mol_type = other DNA
aaatagacccaaatatttaa

SEQ ID NO: 17628 - DNA, 20 bp, synthetic construct
  misc_feature 1..20: note = Description of Artificial Sequence: Synthetic oligonucleotide
  misc_feature 1..20: note = Target: FXN; (+) strand; PAM type: NRG; PAM sequence: TGG
  source 1..20: mol_type = other DNA
aacgtttgtgtcctcctctc

SEQ ID NO: 17629 - DNA, 20 bp, synthetic construct
  misc_feature 1..20: note = Description of Artificial Sequence: Synthetic oligonucleotide
  misc_feature 1..20: note = Target: FXN; (+) strand; PAM type: NRG; PAM sequence: GGG
  source 1..20: mol_type = other DNA
acgtttgtgtcctcctctct

SEQ ID NO: 17630 - DNA, 20 bp, synthetic construct
  misc_feature 1..20: note = Description of Artificial Sequence: Synthetic oligonucleotide
  misc_feature 1..20: note = Target: FXN; (+) strand; PAM type: NRG; PAM sequence: CAG
  source 1..20: mol_type = other DNA
tttgtgtcctcctctctggg

SEQ ID NO: 17631 - DNA, 20 bp, synthetic construct
  misc_feature 1..20: note = Description of Artificial Sequence: Synthetic oligonucleotide
  misc_feature 1..20: note = Target: FXN; (+) strand; PAM type: NRG; PAM sequence: CAG
  source 1..20: mol_type = other DNA
gtcctcctctctgggcagta

SEQ ID NO: 17632 - DNA, 20 bp, synthetic construct
  misc_feature 1..20: note = Description of Artificial Sequence: Synthetic oligonucleotide
  misc_feature 1..20: note = Target: FXN; (+) strand; PAM type: NRG; PAM sequence: AGG
  source 1..20: mol_type = other DNA
tcctcctctctgggcagtac

SEQ ID NO: 17633 - DNA, 20 bp, synthetic construct
  misc_feature 1..20: note = Description of Artificial Sequence: Synthetic oligonucleotide
  misc_feature 1..20: note = Target: FXN; (+) strand; PAM type: NRG; PAM sequence: GGG
  source 1..20: mol_type = other DNA
cctcctctctgggcagtaca

SEQ ID NO: 17634 - DNA, 20 bp, synthetic construct
  misc_feature 1..20: note = Description of Artificial Sequence: Synthetic oligonucleotide
  misc_feature 1..20: note = Target: FXN; (+) strand; PAM type: NRG; PAM sequence: TGG
  source 1..20: mol_type = other DNA
ctctctgggcagtacagggt

SEQ ID NO: 17635 - DNA, 20 bp, synthetic construct
  misc_feature 1..20: note = Description of Artificial Sequence: Synthetic oligonucleotide
  misc_feature 1..20: note = Target: FXN; (+) strand; PAM type: NRG; PAM sequence: AAG
  source 1..20: mol_type = other DNA
cagggttggcatacctcctg

SEQ ID NO: 17636 - DNA, 20 bp, synthetic construct
  misc_feature 1..20: note = Description of Artificial Sequence: Synthetic oligonucleotide
  misc_feature 1..20: note = Target: FXN; (+) strand; PAM type: NRG; PAM sequence: TAG
  source 1..20: mol_type = other DNA
gcatacctcctgaagtgaat

SEQ ID NO: 17637 - DNA, 20 bp, synthetic construct
  misc_feature 1..20: note = Description of Artificial Sequence: Synthetic oligonucleotide
  misc_feature 1..20: note = Target: FXN; (+) strand; PAM type: NRG; PAM sequence: AGG
  source 1..20: mol_type = other DNA
catacctcctgaagtgaatt

SEQ ID NO: 17638 - DNA, 20 bp, synthetic construct
  misc_feature 1..20: note = Description of Artificial Sequence: Synthetic oligonucleotide
  misc_feature 1..20: note = Target: FXN; (+) strand; PAM type: NRG; PAM sequence: CAG
  source 1..20: mol_type = other DNA
attaggaactacactcattc

SEQ ID NO: 17639 - DNA, 20 bp, synthetic construct
  misc_feature 1..20: note = Description of Artificial Sequence: Synthetic oligonucleotide
  misc_feature 1..20: note = Target: FXN; (+) strand; PAM type: NRG; PAM sequence: CAG
  source 1..20: mol_type = other DNA
actacactcattccagcttc

SEQ ID NO: 17640 - DNA, 20 bp, synthetic construct
  misc_feature 1..20: note = Description of Artificial Sequence: Synthetic oligonucleotide
  misc_feature 1..20: note = Target: FXN; (+) strand; PAM type: NRG; PAM sequence: TGG
  source 1..20: mol_type = other DNA
actcattccagcttccagtt

SEQ ID NO: 17641 - DNA, 20 bp, synthetic construct
  misc_feature 1..20: note = Description of Artificial Sequence: Synthetic oligonucleotide
  misc_feature 1..20: note = Target: FXN; (+) strand; PAM type: NRG; PAM sequence: CAG
  source 1..20: mol_type = other DNA
ccagtttggtctttatctgt

SEQ ID NO: 17642 - DNA, 20 bp, synthetic construct
  misc_feature 1..20: note = Description of Artificial Sequence: Synthetic oligonucleotide
  misc_feature 1..20: note = Target: FXN; (+) strand; PAM type: NRG; PAM sequence: GAG
  source 1..20: mol_type = other DNA
ttactgtcctctgcattgtt

SEQ ID NO: 17643 - DNA, 20 bp, synthetic construct
  misc_feature 1..20: note = Description of Artificial Sequence: Synthetic oligonucleotide
  misc_feature 1..20: note = Target: FXN; (+) strand; PAM type: NRG; PAM sequence: CAG
  source 1..20: mol_type = other DNA
tcctctgcattgttgagtct

SEQ ID NO: 17644 - DNA, 20 bp, synthetic construct
  misc_feature 1..20: note = Description of Artificial Sequence: Synthetic oligonucleotide
  misc_feature 1..20: note = Target: FXN; (+) strand; PAM type: NRG; PAM sequence: AAG
  source 1..20: mol_type = other DNA
gagtctcagtcaccttgtcc

SEQ ID NO: 17645 - DNA, 20 bp, synthetic construct
  misc_feature 1..20: note = Description of Artificial Sequence: Synthetic oligonucleotide
  misc_feature 1..20: note = Target: FXN; (+) strand; PAM type: NRG; PAM sequence: TGG
  source 1..20: mol_type = other DNA
tcaccttgtccaagttccat

SEQ ID NO: 17646 - DNA, 20 bp, synthetic construct
  misc_feature 1..20: note = Description of Artificial Sequence: Synthetic oligonucleotide
  misc_feature 1..20: note = Target: FXN; (+) strand; PAM type: NRG; PAM sequence: CAG
  source 1..20: mol_type = other DNA
cttgtccaagttccattggc

SEQ ID NO: 17647 - DNA, 20 bp, synthetic construct
  misc_feature 1..20: note = Description of Artificial Sequence: Synthetic oligonucleotide
  misc_feature 1..20: note = Target: FXN; (+) strand; PAM type: NRG; PAM sequence: AAG
  source 1..20: mol_type = other DNA
tccaagttccattggccaga

SEQ ID NO: 17648 - DNA, 20 bp, synthetic construct
  misc_feature 1..20: note = Description of Artificial Sequence: Synthetic oligonucleotide
  misc_feature 1..20: note = Target: FXN; (+) strand; PAM type: NRG; PAM sequence: AGG
  source 1..20: mol_type = other DNA
ccaagttccattggccagaa

SEQ ID NO: 17649 - DNA, 20 bp, synthetic construct
  misc_feature 1..20: note = Description of Artificial Sequence: Synthetic oligonucleotide
  misc_feature 1..20: note = Target: FXN; (+) strand; PAM type: NRG; PAM sequence: GGG
  source 1..20: mol_type = other DNA
caagttccattggccagaaa

SEQ ID NO: 17650 - DNA, 20 bp, synthetic construct
  misc_feature 1..20: note = Description of Artificial Sequence: Synthetic oligonucleotide
  misc_feature 1..20: note = Target: FXN; (+) strand; PAM type: NRG; PAM sequence: TAG
  source 1..20: mol_type = other DNA
ttccattggccagaaagggc

SEQ ID NO: 17651 - DNA, 20 bp, synthetic construct
  misc_feature 1..20: note = Description of Artificial Sequence: Synthetic oligonucleotide
  misc_feature 1..20: note = Target: FXN; (+) strand; PAM type: NRG; PAM sequence: AAG
  source 1..20: mol_type = other DNA
cattggccagaaagggctag

SEQ ID NO: 17652 - DNA, 20 bp, synthetic construct
  misc_feature 1..20: note = Description of Artificial Sequence: Synthetic oligonucleotide
  misc_feature 1..20: note = Target: FXN; (+) strand; PAM type: NRG; PAM sequence: CAG
  source 1..20: mol_type = other DNA
gccagaaagggctagaagca

SEQ ID NO: 17653 - DNA, 20 bp, synthetic construct
  misc_feature 1..20: note = Description of Artificial Sequence: Synthetic oligonucleotide
  misc_feature 1..20: note = Target: FXN; (+) strand; PAM type: NRG; PAM sequence: AAG
  source 1..20: mol_type = other DNA
agaaagggctagaagcacag

SEQ ID NO: 17654 - DNA, 20 bp, synthetic construct
  misc_feature 1..20: note = Description of Artificial Sequence: Synthetic oligonucleotide
  misc_feature 1..20: note = Target: FXN; (+) strand; PAM type: NRG; PAM sequence: AGG
  source 1..20: mol_type = other DNA
gaaagggctagaagcacaga

SEQ ID NO: 17655 - DNA, 20 bp, synthetic construct
  misc_feature 1..20: note = Description of Artificial Sequence: Synthetic oligonucleotide
  misc_feature 1..20: note = Target: FXN; (+) strand; PAM type: NRG; PAM sequence: GGG
  source 1..20: mol_type = other DNA
aaagggctagaagcacagaa

SEQ ID NO: 17656 - DNA, 20 bp, synthetic construct
  misc_feature 1..20: note = Description of Artificial Sequence: Synthetic oligonucleotide
  misc_feature 1..20: note = Target: FXN; (+) strand; PAM type: NRG; PAM sequence: TGG
  source 1..20: mol_type = other DNA
ggctagaagcacagaagggc

SEQ ID NO: 17657 - DNA, 20 bp, synthetic construct
  misc_feature 1..20: note = Description of Artificial Sequence: Synthetic oligonucleotide
  misc_feature 1..20: note = Target: FXN; (+) strand; PAM type: NRG; PAM sequence: AAG
  source 1..20: mol_type = other DNA
tagaagcacagaagggctgg

SEQ ID NO: 17658 - DNA, 20 bp, synthetic construct
  misc_feature 1..20: note = Description of Artificial Sequence: Synthetic oligonucleotide
  misc_feature 1..20: note = Target: FXN; (+) strand; PAM type: NRG; PAM sequence: TGG
  source 1..20: mol_type = other DNA
aagcacagaagggctggaag

SEQ ID NO: 17659 - DNA, 20 bp, synthetic construct
  misc_feature 1..20: note = Description of Artificial Sequence: Synthetic oligonucleotide
  misc_feature 1..20: note = Target: FXN; (+) strand; PAM type: NRG; PAM sequence: TGG
  source 1..20: mol_type = other DNA
tttgttcctcactcacattc

SEQ ID NO: 17660 - DNA, 20 bp, synthetic construct
  misc_feature 1..20: note = Description of Artificial Sequence: Synthetic oligonucleotide
  misc_feature 1..20: note = Target: FXN; (+) strand; PAM type: NRG; PAM sequence: TGG
  source 1..20: mol_type = other DNA
gttcctcactcacattctgg

SEQ ID NO: 17661 - DNA, 20 bp, synthetic construct
  misc_feature 1..20: note = Description of Artificial Sequence: Synthetic oligonucleotide
  misc_feature 1..20: note = Target: FXN; (+) strand; PAM type: NRG; PAM sequence: GGG
  source 1..20: mol_type = other DNA
ttcctcactcacattctggt

SEQ ID NO: 17662 - DNA, 20 bp, synthetic construct
  misc_feature 1..20: note = Description of Artificial Sequence: Synthetic oligonucleotide
  misc_feature 1..20: note = Target: FXN; (+) strand; PAM type: NRG; PAM sequence: AAG
  source 1..20: mol_type = other DNA
ctcactcacattctggtggg

SEQ ID NO: 17663 - DNA, 20 bp, synthetic construct
  misc_feature 1..20: note = Description of Artificial Sequence: Synthetic oligonucleotide
  misc_feature 1..20: note = Target: FXN; (+) strand; PAM type: NRG; PAM sequence: TAG
  source 1..20: mol_type = other DNA
acattctggtgggaagaact

SEQ ID NO: 17664 - DNA, 20 bp, synthetic construct
  misc_feature 1..20: note = Description of Artificial Sequence: Synthetic oligonucleotide
  misc_feature 1..20: note = Target: FXN; (+) strand; PAM type: NRG; PAM sequence: TGG
  source 1..20: mol_type = other DNA
ttctggtgggaagaacttag

SEQ ID NO: 17665 - DNA, 20 bp, synthetic construct
  misc_feature 1..20: note = Description of Artificial Sequence: Synthetic oligonucleotide
  misc_feature 1..20: note = Target: FXN; (+) strand; PAM type: NRG; PAM sequence: TGG
  source 1..20: mol_type = other DNA
gtgggaagaacttagtggtg

SEQ ID NO: 17666 - DNA, 20 bp, synthetic construct
  misc_feature 1..20: note = Description of Artificial Sequence: Synthetic oligonucleotide
  misc_feature 1..20: note = Target: FXN; (+) strand; PAM type: NRG; PAM sequence: TAG
  source 1..20: mol_type = other DNA
agaacttagtggtgtggcct

SEQ ID NO: 17667 - DNA, 20 bp, synthetic construct
  misc_feature 1..20: note = Description of Artificial Sequence: Synthetic oligonucleotide
  misc_feature 1..20: note = Target: FXN; (+) strand; PAM type: NRG; PAM sequence: AAG
  source 1..20: mol_type = other DNA
gtgtggccttagctgactgt

SEQ ID NO: 17668 - DNA, 20 bp, synthetic construct
  misc_feature 1..20: note = Description of Artificial Sequence: Synthetic oligonucleotide
  misc_feature 1..20: note = Target: FXN; (+) strand; PAM type: NRG; PAM sequence: AGG
  source 1..20: mol_type = other DNA
tgtggccttagctgactgta

SEQ ID NO: 17669 - DNA, 20 bp, synthetic construct
  misc_feature 1..20: note = Description of Artificial Sequence: Synthetic oligonucleotide
  misc_feature 1..20: note = Target: FXN; (+) strand; PAM type: NRG; PAM sequence: GGG
  source 1..20: mol_type = other DNA
gtggccttagctgactgtaa

SEQ ID NO: 17670 - DNA, 20 bp, synthetic construct
  misc_feature 1..20: note = Description of Artificial Sequence: Synthetic oligonucleotide
  misc_feature 1..20: note = Target: FXN; (+) strand; PAM type: NRG; PAM sequence: GAG
  source 1..20: mol_type = other DNA
ggccttagctgactgtaagg

SEQ ID NO: 17671 - DNA, 20 bp, synthetic construct
  misc_feature 1..20: note = Description of Artificial Sequence: Synthetic oligonucleotide
  misc_feature 1..20: note = Target: FXN; (+) strand; PAM type: NRG; PAM sequence: AGG
  source 1..20: mol_type = other DNA
gccttagctgactgtaaggg

SEQ ID NO: 17672 - DNA, 20 bp, synthetic construct
  misc_feature 1..20: note = Description of Artificial Sequence: Synthetic oligonucleotide
  misc_feature 1..20: note = Target: FXN; (+) strand; PAM type: NRG; PAM sequence: TGG
  source 1..20: mol_type = other DNA
tagctgactgtaagggaggc

SEQ ID NO: 17673 - DNA, 20 bp, synthetic construct
  misc_feature 1..20: note = Description of Artificial Sequence: Synthetic oligonucleotide
  misc_feature 1..20: note = Target: FXN; (+) strand; PAM type: NRG; PAM sequence: GGG
  source 1..20: mol_type = other DNA
agctgactgtaagggaggct

SEQ ID NO: 17674 - DNA, 20 bp, synthetic construct
  misc_feature 1..20: note = Description of Artificial Sequence: Synthetic oligonucleotide
  misc_feature 1..20: note = Target: FXN; (+) strand; PAM type: NRG; PAM sequence: TAG
  source 1..20: mol_type = other DNA
gtaagggaggctgggaaata

SEQ ID NO: 17675 - DNA, 20 bp, synthetic construct
  misc_feature 1..20: note = Description of Artificial Sequence: Synthetic oligonucleotide
  misc_feature 1..20: note = Target: FXN; (+) strand; PAM type: NRG; PAM sequence: TAG
  source 1..20: mol_type = other DNA
ggaggctgggaaatatagtc

SEQ ID NO: 17676 - DNA, 20 bp, synthetic construct
  misc_feature 1..20: note = Description of Artificial Sequence: Synthetic oligonucleotide
  misc_feature 1..20: note = Target: FXN; (+) strand; PAM type: NRG; PAM sequence: GAG
  source 1..20: mol_type = other DNA
gctgggaaatatagtctagc

SEQ ID NO: 17677 - DNA, 20 bp, synthetic construct
  misc_feature 1..20: note = Description of Artificial Sequence: Synthetic oligonucleotide
  misc_feature 1..20: note = Target: FXN; (+) strand; PAM type: NRG; PAM sequence: TGG
  source 1..20: mol_type = other DNA
atatagtctagcgagtgccc

SEQ ID NO: 17678 - DNA, 20 bp, synthetic construct
  misc_feature 1..20: note = Description of Artificial Sequence: Synthetic oligonucleotide
  misc_feature 1..20: note = Target: FXN; (+) strand; PAM type: NRG; PAM sequence: AAG
  source 1..20: mol_type = other DNA
tctagcgagtgccctggaaa

SEQ ID NO: 17679 - DNA, 20 bp, synthetic construct
  misc_feature 1..20: note = Description of Artificial Sequence: Synthetic oligonucleotide
  misc_feature 1..20: note = Target: FXN; (+) strand; PAM type: NRG; PAM sequence: CGG
  source 1..20: mol_type = other DNA
gcgagtgccctggaaaaagc

SEQ ID NO: 17680 - DNA, 20 bp, synthetic construct
  misc_feature 1..20: note = Description of Artificial Sequence: Synthetic oligonucleotide
  misc_feature 1..20: note = Target: FXN; (+) strand; PAM type: NRG; PAM sequence: CGG
  source 1..20: mol_type = other DNA
tgccctggaaaaagccggca

SEQ ID NO: 17681 - DNA, 20 bp, synthetic construct
  misc_feature 1..20: note = Description of Artificial Sequence: Synthetic oligonucleotide
  misc_feature 1..20: note = Target: FXN; (+) strand; PAM type: NRG; PAM sequence: TGG
  source 1..20: mol_type = other DNA
agccggcacggcattcccca

SEQ ID NO: 17682 - DNA, 20 bp, synthetic construct
  misc_feature 1..20: note = Description of Artificial Sequence: Synthetic oligonucleotide
  misc_feature 1..20: note = Target: FXN; (+) strand; PAM type: NRG; PAM sequence: AAG
  source 1..20: mol_type = other DNA
ggcacggcattccccatgga

SEQ ID NO: 17683 - DNA, 20 bp, synthetic construct
  misc_feature 1..20: note = Description of Artificial Sequence: Synthetic oligonucleotide
  misc_feature 1..20: note = Target: FXN; (+) strand; PAM type: NRG; PAM sequence: CAG
  source 1..20: mol_type = other DNA
cattccccatggaaagctgt

SEQ ID NO: 17684 - DNA, 20 bp, synthetic construct
  misc_feature 1..20: note = Description of Artificial Sequence: Synthetic oligonucleotide
  misc_feature 1..20: note = Target: FXN; (+) strand; PAM type: NRG; PAM sequence: AGG
  source 1..20: mol_type = other DNA
attccccatggaaagctgtc

SEQ ID NO: 17685 - DNA, 20 bp, synthetic construct
  misc_feature 1..20: note = Description of Artificial Sequence: Synthetic oligonucleotide
  misc_feature 1..20: note = Target: FXN; (+) strand; PAM type: NRG; PAM sequence: CGG
  source 1..20: mol_type = other DNA
ccatggaaagctgtcaggca

SEQ ID NO: 17686 - DNA, 20 bp, synthetic construct
  misc_feature 1..20: note = Description of Artificial Sequence: Synthetic oligonucleotide
  misc_feature 1..20: note = Target: FXN; (+) strand; PAM type: NRG; PAM sequence: CAG
  source 1..20: mol_type = other DNA
aaagctgtcaggcacggcta

SEQ ID NO: 17687 - DNA, 20 bp, synthetic construct
  misc_feature 1..20: note = Description of Artificial Sequence: Synthetic oligonucleotide
  misc_feature 1..20: note = Target: FXN; (+) strand; PAM type: NRG; PAM sequence: CAG
  source 1..20: mol_type = other DNA
acagtctaccccctgccaac

SEQ ID NO: 17688 - DNA, 20 bp, synthetic construct
  misc_feature 1..20: note = Description of Artificial Sequence: Synthetic oligonucleotide
  misc_feature 1..20: note = Target: FXN; (+) strand; PAM type: NRG; PAM sequence: TGG
  source 1..20: mol_type = other DNA
cctgccaaccagtatctgca

SEQ ID NO: 17689 - DNA, 20 bp, synthetic construct
  misc_feature 1..20: note = Description of Artificial Sequence: Synthetic oligonucleotide
  misc_feature 1..20: note = Target: FXN; (+) strand; PAM type: NRG; PAM sequence: CAG
  source 1..20: mol_type = other DNA
atggaccctccttccacact

SEQ ID NO: 17690 - DNA, 20 bp, synthetic construct
  misc_feature 1..20: note = Description of Artificial Sequence: Synthetic oligonucleotide
  misc_feature 1..20: note = Target: FXN; (+) strand; PAM type: NRG; PAM sequence: CAG
  source 1..20: mol_type = other DNA
cactcagatgcatttacccc

SEQ ID NO: 17691 - DNA, 20 bp, synthetic construct
  misc_feature 1..20: note = Description of Artificial Sequence: Synthetic oligonucleotide
  misc_feature 1..20: note = Target: FXN; (+) strand; PAM type: NRG; PAM sequence: AAG
  source 1..20: mol_type = other DNA
atgcatttacccccagcccc

SEQ ID NO: 17692 - DNA, 20 bp, synthetic construct
  misc_feature 1..20: note = Description of Artificial Sequence: Synthetic oligonucleotide
  misc_feature 1..20: note = Target: FXN; (+) strand; PAM type: NRG; PAM sequence: GAG
  source 1..20: mol_type = other DNA
gcatttacccccagccccaa

SEQ ID NO: 17693 - DNA, 20 bp, synthetic construct
  misc_feature 1..20: note = Description of Artificial Sequence: Synthetic oligonucleotide
  misc_feature 1..20: note = Target: FXN; (+) strand; PAM type: NRG; PAM sequence: GAG
  source 1..20: mol_type = other DNA
atttacccccagccccaaga

SEQ ID NO: 17694 - DNA, 20 bp, synthetic construct
  misc_feature 1..20: note = Description of Artificial Sequence: Synthetic oligonucleotide
  misc_feature 1..20: note = Target: FXN; (+) strand; PAM type: NRG; PAM sequence: TGG
  source 1..20: mol_type = other DNA
agagccaaccgatgcccatg

SEQ ID NO: 17695 - DNA, 20 bp, synthetic construct
  misc_feature 1..20: note = Description of Artificial Sequence: Synthetic oligonucleotide
  misc_feature 1..20: note = Target: FXN; (+) strand; PAM type: NRG; PAM sequence: CAG
  source 1..20: mol_type = other DNA
cgatgcccatgtggtcacca

SEQ ID NO: 17696 - DNA, 20 bp, synthetic construct
  misc_feature 1..20: note = Description of Artificial Sequence: Synthetic oligonucleotide
  misc_feature 1..20: note = Target: FXN; (+) strand; PAM type: NRG; PAM sequence: GAG
  source 1..20: mol_type = other DNA
tggtcaccacagccacctcc

SEQ ID NO: 17697 - DNA, 20 bp, synthetic construct
  misc_feature 1..20: note = Description of Artificial Sequence: Synthetic oligonucleotide
  misc_feature 1..20: note = Target: FXN; (+) strand; PAM type: NRG; PAM sequence: AAG
  source 1..20: mol_type = other DNA
ccacagccacctccgagtcc

SEQ ID NO: 17698 - DNA, 20 bp, synthetic construct
  misc_feature 1..20: note = Description of Artificial Sequence: Synthetic oligonucleotide
  misc_feature 1..20: note = Target: FXN; (+) strand; PAM type: NRG; PAM sequence: CAG
  source 1..20: mol_type = other DNA
acctccgagtccaagatttc

SEQ ID NO: 17699 - DNA, 20 bp, synthetic construct
  misc_feature 1..20: note = Description of Artificial Sequence: Synthetic oligonucleotide
  misc_feature 1..20: note = Target: FXN; (+) strand; PAM type: NRG; PAM sequence: AGG
  source 1..20: mol_type = other DNA
cctccgagtccaagatttcc

SEQ ID NO: 17700 - DNA, 20 bp, synthetic construct
  misc_feature 1..20: note = Description of Artificial Sequence: Synthetic oligonucleotide
  misc_feature 1..20: note = Target: FXN; (+) strand; PAM type: NRG; PAM sequence: CAG
  source 1..20: mol_type = other DNA
caagatttccaggtgacatg

SEQ ID NO: 17701 - DNA, 20 bp, synthetic construct
  misc_feature 1..20: note = Description of Artificial Sequence: Synthetic oligonucleotide
  misc_feature 1..20: note = Target: FXN; (+) strand; PAM type: NRG; PAM sequence: CAG
  source 1..20: mol_type = other DNA
acatgcagtctcctctctcc

SEQ ID NO: 17702 - DNA, 20 bp, synthetic construct
  misc_feature 1..20: note = Description of Artificial Sequence: Synthetic oligonucleotide
  misc_feature 1..20: note = Target: FXN; (+) strand; PAM type: NRG; PAM sequence: TAG
  source 1..20: mol_type = other DNA
agtctcctctctcccagctt

SEQ ID NO: 17703 - DNA, 20 bp, synthetic construct
  misc_feature 1..20: note = Description of Artificial Sequence: Synthetic oligonucleotide
  misc_feature 1..20: note = Target: FXN; (+) strand; PAM type: NRG; PAM sequence: AGG
  source 1..20: mol_type = other DNA
gtctcctctctcccagcttt

SEQ ID NO: 17704 - DNA, 20 bp, synthetic construct
  misc_feature 1..20: note = Description of Artificial Sequence: Synthetic oligonucleotide
  misc_feature 1..20: note = Target: FXN; (+) strand; PAM type: NRG; PAM sequence: TGG
  source 1..20: mol_type = other DNA
ctctctcccagctttaggaa

SEQ ID NO: 17705 - DNA, 20 bp, synthetic construct
  misc_feature 1..20: note = Description of Artificial Sequence: Synthetic oligonucleotide
  misc_feature 1..20: note = Target: FXN; (+) strand; PAM type: NRG; PAM sequence: CAG
  source 1..20: mol_type = other DNA
ggcttcttctgatctacaca

SEQ ID NO: 17706 - DNA, 20 bp, synthetic construct
  misc_feature 1..20: note = Description of Artificial Sequence: Synthetic oligonucleotide
  misc_feature 1..20: note = Target: FXN; (+) strand; PAM type: NRG; PAM sequence: CAG
  source 1..20: mol_type = other DNA
ttctgatctacacacagaca

SEQ ID NO: 17707 - DNA, 20 bp, synthetic construct
  misc_feature 1..20: note = Description of Artificial Sequence: Synthetic oligonucleotide
  misc_feature 1..20: note = Target: FXN; (+) strand; PAM type: NRG; PAM sequence: CAG
  source 1..20: mol_type = other DNA
cagacacagacacacacaca

SEQ ID NO: 17708 - DNA, 20 bp, synthetic construct
  misc_feature 1..20: note = Description of Artificial Sequence: Synthetic oligonucleotide
  misc_feature 1..20: note = Target: FXN; (+) strand; PAM type: NRG; PAM sequence: TGG
  source 1..20: mol_type = other DNA
acacacacacacacacacga

SEQ ID NO: 17709 - DNA, 20 bp, synthetic construct
  misc_feature 1..20: note = Description of Artificial Sequence: Synthetic oligonucleotide
  misc_feature 1..20: note = Target: FXN; (+) strand; PAM type: NRG; PAM sequence: GAG
  source 1..20: mol_type = other DNA
acacacacacacacacgatg

SEQ ID NO: 17710 - DNA, 20 bp, synthetic construct
  misc_feature 1..20: note = Description of Artificial Sequence: Synthetic oligonucleotide
  misc_feature 1..20: note = Target: FXN; (+) strand; PAM type: NRG; PAM sequence: GAG
  source 1..20: mol_type = other DNA
acacacacacacacgatgga

SEQ ID NO: 17711 - DNA, 20 bp, synthetic construct
  misc_feature 1..20: note = Description of Artificial Sequence: Synthetic oligonucleotide
  misc_feature 1..20: note = Target: FXN; (+) strand; PAM type: NRG; PAM sequence: AGG
  source 1..20: mol_type = other DNA
cacacacacacacgatggag

SEQ ID NO: 17712 - DNA, 20 bp, synthetic construct
  misc_feature 1..20: note = Description of Artificial Sequence: Synthetic oligonucleotide
  misc_feature 1..20: note = Target: FXN; (+) strand; PAM type: NRG; PAM sequence: GGG
  source 1..20: mol_type = other DNA
acacacacacacgatggaga

SEQ ID NO: 17713 - DNA, 20 bp, synthetic construct
  misc_feature 1..20: note = Description of Artificial Sequence: Synthetic oligonucleotide
  misc_feature 1..20: note = Target: FXN; (+) strand; PAM type: NRG; PAM sequence: GGG
  source 1..20: mol_type = other DNA
cacacacacacgatggagag

SEQ ID NO: 17714 - DNA, 20 bp, synthetic construct
  misc_feature 1..20: note = Description of Artificial Sequence: Synthetic oligonucleotide
  misc_feature 1..20: note = Target: FXN; (+) strand; PAM type: NRG; PAM sequence: CAG
  source 1..20: mol_type = other DNA
acacacacgatggagagggg

SEQ ID NO: 17715 - DNA, 20 bp, synthetic construct
  misc_feature 1..20: note = Description of Artificial Sequence: Synthetic oligonucleotide
  misc_feature 1..20: note = Target: FXN; (+) strand; PAM type: NRG; PAM sequence: AGG
  source 1..20: mol_type = other DNA
cacacacgatggagaggggc

SEQ ID NO: 17716 - DNA, 20 bp, synthetic construct
  misc_feature 1..20: note = Description of Artificial Sequence: Synthetic oligonucleotide
  misc_feature 1..20: note = Target: FXN; (+) strand; PAM type: NRG; PAM sequence: CAG
  source 1..20: mol_type = other DNA
actgcaactgtaactccatt

SEQ ID NO: 17717 - DNA, 20 bp, synthetic construct
  misc_feature 1..20: note = Description of Artificial Sequence: Synthetic oligonucleotide
  misc_feature 1..20: note = Target: FXN; (+) strand; PAM type: NRG; PAM sequence: AAG
  source 1..20: mol_type = other DNA
aactgtaactccattcagaa

SEQ ID NO: 17718 - DNA, 20 bp, synthetic construct
  misc_feature 1..20: note = Description of Artificial Sequence: Synthetic oligonucleotide
  misc_feature 1..20: note = Target: FXN; (+) strand; PAM type: NRG; PAM sequence: GAG
  source 1..20: mol_type = other DNA
ctgtaactccattcagaaaa

SEQ ID NO: 17719 - DNA, 20 bp, synthetic construct
  misc_feature 1..20: note = Description of Artificial Sequence: Synthetic oligonucleotide
  misc_feature 1..20: note = Target: FXN; (+) strand; PAM type: NRG; PAM sequence: AGG
  source 1..20: mol_type = other DNA
tgtaactccattcagaaaag

SEQ ID NO: 17720 - DNA, 20 bp, synthetic construct
  misc_feature 1..20: note = Description of Artificial Sequence: Synthetic oligonucleotide
  misc_feature 1..20: note = Target: FXN; (+) strand; PAM type: NRG; PAM sequence: CAG
  source 1..20: mol_type = other DNA
ctccattcagaaaagaggca

SEQ ID NO: 17721 - DNA, 20 bp, synthetic construct
  misc_feature 1..20: note = Description of Artificial Sequence: Synthetic oligonucleotide
  misc_feature 1..20: note = Target: FXN; (+) strand; PAM type: NRG; PAM sequence: TAG
  source 1..20: mol_type = other DNA
tcagaaaagaggcacagcac

SEQ ID NO: 17722 - DNA, 20 bp, synthetic construct
  misc_feature 1..20: note = Description of Artificial Sequence: Synthetic oligonucleotide
  misc_feature 1..20: note = Target: FXN; (+) strand; PAM type: NRG; PAM sequence: CAG
  source 1..20: mol_type = other DNA
ggcacagcactagctgcccg

SEQ ID NO: 17723 - DNA, 20 bp, synthetic construct
  misc_feature 1..20: note = Description of Artificial Sequence: Synthetic oligonucleotide
  misc_feature 1..20: note = Target: FXN; (+) strand; PAM type: NRG; PAM sequence: TGG
  source 1..20: mol_type = other DNA
gcactagctgcccgcagcac

SEQ ID NO: 17724 - DNA, 20 bp, synthetic construct
  misc_feature 1..20: note = Description of Artificial Sequence: Synthetic oligonucleotide
  misc_feature 1..20: note = Target: FXN; (+) strand; PAM type: NRG; PAM sequence: GAG
  source 1..20: mol_type = other DNA
actagctgcccgcagcactg

SEQ ID NO: 17725 - DNA, 20 bp, synthetic construct
  misc_feature 1..20: note = Description of Artificial Sequence: Synthetic oligonucleotide
  misc_feature 1..20: note = Target: FXN; (+) strand; PAM type: NRG; PAM sequence: TGG
  source 1..20: mol_type = other DNA
ccgcagcactggagccctgc

SEQ ID NO: 17726 - DNA, 20 bp, synthetic construct
  misc_feature 1..20: note = Description of Artificial Sequence: Synthetic oligonucleotide
  misc_feature 1..20: note = Target: FXN; (+) strand; PAM type: NRG; PAM sequence: GGG
  source 1..20: mol_type = other DNA
cgcagcactggagccctgct

SEQ ID NO: 17727 - DNA, 20 bp, synthetic construct
  misc_feature 1..20: note = Description of Artificial Sequence: Synthetic oligonucleotide
  misc_feature 1..20: note = Target: FXN; (+) strand; PAM type: NRG; PAM sequence: CAG
  source 1..20: mol_type = other DNA
agcactggagccctgctggg

SEQ ID NO: 17728 - DNA, 20 bp, synthetic construct
  misc_feature 1..20: note = Description of Artificial Sequence: Synthetic oligonucleotide
  misc_feature 1..20: note = Target: FXN; (+) strand; PAM type: NRG; PAM sequence: TGG
  source 1..20: mol_type = other DNA
ggagccctgctgggcagcac

SEQ ID NO: 17729 - DNA, 20 bp, synthetic construct
  misc_feature 1..20: note = Description of Artificial Sequence: Synthetic oligonucleotide
  misc_feature 1..20: note = Target: FXN; (+) strand; PAM type: NRG; PAM sequence: TGG
  source 1..20: mol_type = other DNA
cactggatcaacctctgccc

SEQ ID NO: 17730 - DNA, 20 bp, synthetic construct
  misc_feature 1..20: note = Description of Artificial Sequence: Synthetic oligonucleotide
  misc_feature 1..20: note = Target: FXN; (+) strand; PAM type: NRG; PAM sequence: CAG
  source 1..20: mol_type = other DNA
tggatcaacctctgccctgg

SEQ ID NO: 17731 - DNA, 20 bp, synthetic construct
  misc_feature 1..20: note = Description of Artificial Sequence: Synthetic oligonucleotide
  misc_feature 1..20: note = Target: FXN; (+) strand; PAM type: NRG; PAM sequence: GAG
  source 1..20: mol_type = other DNA
gatcaacctctgccctggca

SEQ ID NO: 17732 - DNA, 20 bp, synthetic construct
  misc_feature 1..20: note = Description of Artificial Sequence: Synthetic oligonucleotide
  misc_feature 1..20: note = Target: FXN; (+) strand; PAM type: NRG; PAM sequence: AGG
  source 1..20: mol_type = other DNA
atcaacctctgccctggcag

SEQ ID NO: 17733 - DNA, 20 bp, synthetic construct
  misc_feature 1..20: note = Description of Artificial Sequence: Synthetic oligonucleotide
  misc_feature 1..20: note = Target: FXN; (+) strand; PAM type: NRG; PAM sequence: GAG
  source 1..20: mol_type = other DNA
caacctctgccctggcagag

SEQ ID NO: 17734 - DNA, 20 bp, synthetic construct
  misc_feature 1..20: note = Description of Artificial Sequence: Synthetic oligonucleotide
  misc_feature 1..20: note = Target: FXN; (+) strand; PAM type: NRG; PAM sequence: CAG
  source 1..20: mol_type = other DNA
tcctccacaaatccctgctt

SEQ ID NO: 17735 - DNA, 20 bp, synthetic construct
  misc_feature 1..20: note = Description of Artificial Sequence: Synthetic oligonucleotide
  misc_feature 1..20: note = Target: FXN; (+) strand; PAM type: NRG; PAM sequence: GAG
  source 1..20: mol_type = other DNA
aatccctgcttcagcctctc

SEQ ID NO: 17736 - DNA, 20 bp, synthetic construct
  misc_feature 1..20: note = Description of Artificial Sequence: Synthetic oligonucleotide
  misc_feature 1..20: note = Target: FXN; (+) strand; PAM type: NRG; PAM sequence: GAG
  source 1..20: mol_type = other DNA
tccctgcttcagcctctcga

SEQ ID NO: 17737 - DNA, 20 bp, synthetic construct
  misc_feature 1..20: note = Description of Artificial Sequence: Synthetic oligonucleotide
  misc_feature 1..20: note = Target: FXN; (+) strand; PAM type: NRG; PAM sequence: AGG
  source 1..20: mol_type = other DNA
ccctgcttcagcctctcgag

SEQ ID NO: 17738 - DNA, 20 bp, synthetic construct
  misc_feature 1..20: note = Description of Artificial Sequence: Synthetic oligonucleotide
  misc_feature 1..20: note = Target: FXN; (+) strand; PAM type: NRG; PAM sequence: TGG
  source 1..20: mol_type = other DNA
tccttgtctgttattttcct

SEQ ID NO: 17739 - DNA, 20 bp, synthetic construct
  misc_feature 1..20: note = Description of Artificial Sequence: Synthetic oligonucleotide
  misc_feature 1..20: note = Target: FXN; (+) strand; PAM type: NRG; PAM sequence: AAG
  source 1..20: mol_type = other DNA
ctgttattttccttggccac

SEQ ID NO: 17740 - DNA, 20 bp, synthetic construct
  misc_feature 1..20: note = Description of Artificial Sequence: Synthetic oligonucleotide
  misc_feature 1..20: note = Target: FXN; (+) strand; PAM type: NRG; PAM sequence: AGG
  source 1..20: mol_type = other DNA
tgttattttccttggccaca

SEQ ID NO: 17741 - DNA, 20 bp, synthetic construct
  misc_feature 1..20: note = Description of Artificial Sequence: Synthetic oligonucleotide
  misc_feature 1..20: note = Target: FXN; (+) strand; PAM type: NRG; PAM sequence: CAG
  source 1..20: mol_type = other DNA
tattttccttggccacaagg

SEQ ID NO: 17742 - DNA, 20 bp, synthetic construct
  misc_feature 1..20: note = Description of Artificial Sequence: Synthetic oligonucleotide
  misc_feature 1..20: note = Target: FXN; (+) strand; PAM type: NRG; PAM sequence: AGG
  source 1..20: mol_type = other DNA
attttccttggccacaaggc

SEQ ID NO: 17743 - DNA, 20 bp, synthetic construct
  misc_feature 1..20: note = Description of Artificial Sequence: Synthetic oligonucleotide
  misc_feature 1..20: note = Target: FXN; (+) strand; PAM type: NRG; PAM sequence: CAG
  source 1..20: mol_type = other DNA
ttccttggccacaaggcagg

SEQ ID NO: 17744 - DNA, 20 bp, synthetic construct
  misc_feature 1..20: note = Description of Artificial Sequence: Synthetic oligonucleotide
  misc_feature 1..20: note = Target: FXN; (+) strand; PAM type: NRG; PAM sequence: AGG
  source 1..20: mol_type = other DNA
tccttggccacaaggcaggc

SEQ ID NO: 17745 - DNA, 20 bp, synthetic construct
  misc_feature 1..20: note = Description of Artificial Sequence: Synthetic oligonucleotide
  misc_feature 1..20: note = Target: FXN; (+) strand; PAM type: NRG; PAM sequence: CAG
  source 1..20: mol_type = other DNA
ttggccacaaggcaggcagg

SEQ ID NO: 17746 - DNA, 20 bp, synthetic construct
  misc_feature 1..20: note = Description of Artificial Sequence: Synthetic oligonucleotide
  misc_feature 1..20: note = Target: FXN; (+) strand; PAM type: NRG; PAM sequence: TGG
  source 1..20: mol_type = other DNA
gccacaaggcaggcaggcag

SEQ ID NO: 17747 - DNA, 20 bp, synthetic construct
  misc_feature 1..20: note = Description of Artificial Sequence: Synthetic oligonucleotide
  misc_feature 1..20: note = Target: FXN; (+) strand; PAM type: NRG; PAM sequence: GGG
  source 1..20: mol_type = other DNA
ccacaaggcaggcaggcagt

SEQ ID NO: 17748 - DNA, 20 bp, synthetic construct
  misc_feature 1..20: note = Description of Artificial Sequence: Synthetic oligonucleotide
  misc_feature 1..20: note = Target: FXN; (+) strand; PAM type: NRG; PAM sequence: AAG
  source 1..20: mol_type = other DNA
caaggcaggcaggcagtggg

SEQ ID NO: 17749 - DNA, 20 bp, synthetic construct
  misc_feature 1..20: note = Description of Artificial Sequence: Synthetic oligonucleotide
  misc_feature 1..20: note = Target: FXN; (+) strand; PAM type: NRG; PAM sequence: CGG
  source 1..20: mol_type = other DNA
gtgggaagtgtgccctcctc

SEQ ID NO: 17750 - DNA, 20 bp, synthetic construct
  misc_feature 1..20: note = Description of Artificial Sequence: Synthetic oligonucleotide
  misc_feature 1..20: note = Target: FXN; (+) strand; PAM type: NRG; PAM sequence: GGG
  source 1..20: mol_type = other DNA
tgggaagtgtgccctcctcc

SEQ ID NO: 17751 - DNA, 20 bp, synthetic construct
  misc_feature 1..20: note = Description of Artificial Sequence: Synthetic oligonucleotide
  misc_feature 1..20: note = Target: FXN; (+) strand; PAM type: NRG; PAM sequence: GGG
  source 1..20: mol_type = other DNA
gggaagtgtgccctcctccg

SEQ ID NO: 17752 - DNA, 20 bp, synthetic construct
  misc_feature 1..20: note = Description of Artificial Sequence: Synthetic oligonucleotide
  misc_feature 1..20: note = Target: FXN; (+) strand; PAM type: NRG; PAM sequence: AAG
  source 1..20: mol_type = other DNA
agtgtgccctcctccggggc

SEQ ID NO: 17753 - DNA, 20 bp, synthetic construct
  misc_feature 1..20: note = Description of Artificial Sequence: Synthetic oligonucleotide
  misc_feature 1..20: note = Target: FXN; (+) strand; PAM type: NRG; PAM sequence: AGG
  source 1..20: mol_type = other DNA
gtgtgccctcctccggggca

SEQ ID NO: 17754 - DNA, 20 bp, synthetic construct
  misc_feature 1..20: note = Description of Artificial Sequence: Synthetic oligonucleotide
  misc_feature 1..20: note = Target: FXN; (+) strand; PAM type: NRG; PAM sequence: GAG
  source 1..20: mol_type = other DNA
gtgccctcctccggggcaag

SEQ ID NO: 17755 - DNA, 20 bp, synthetic construct
  misc_feature 1..20: note = Description of Artificial Sequence: Synthetic oligonucleotide
  misc_feature 1..20: note = Target: FXN; (+) strand; PAM type: NRG; PAM sequence: CAG
  source 1..20: mol_type = other DNA
tccggggcaaggagccttca

SEQ ID NO: 17756 - DNA, 20 bp, synthetic construct
  misc_feature 1..20: note = Description of Artificial Sequence: Synthetic oligonucleotide
  misc_feature 1..20: note = Target: FXN; (+) strand; PAM type: NRG; PAM sequence: CAG
  source 1..20: mol_type = other DNA
agcccacttcctgctaataa

SEQ ID NO: 17757 - DNA, 20 bp, synthetic construct
  misc_feature 1..20: note = Description of Artificial Sequence: Synthetic oligonucleotide
  misc_feature 1..20: note = Target: FXN; (+) strand; PAM type: NRG; PAM sequence: TGG
  source 1..20: mol_type = other DNA
acttcctgctaataacagtt

SEQ ID NO: 17758 - DNA, 20 bp, synthetic construct
  misc_feature 1..20: note = Description of Artificial Sequence: Synthetic oligonucleotide
  misc_feature 1..20: note = Target: FXN; (+) strand; PAM type: NRG; PAM sequence: GGG
  source 1..20: mol_type = other DNA
cttcctgctaataacagttt

SEQ ID NO: 17759 - DNA, 20 bp, synthetic construct
  misc_feature 1..20: note = Description of Artificial Sequence: Synthetic oligonucleotide
  misc_feature 1..20: note = Target: FXN; (+) strand; PAM type: NRG; PAM sequence: GGG
  source 1..20: mol_type = other DNA
ttcctgctaataacagtttg

SEQ ID NO: 17760 - DNA, 20 bp, synthetic construct
  misc_feature 1..20: note = Description of Artificial Sequence: Synthetic oligonucleotide
  misc_feature 1..20: note = Target: FXN; (+) strand; PAM type: NRG; PAM sequence: CAG
  source 1..20: mol_type = other DNA
aataacagtttggggttcca

SEQ ID NO: 17761 - DNA, 20 bp, synthetic construct
  misc_feature 1..20: note = Description of Artificial Sequence: Synthetic oligonucleotide
  misc_feature 1..20: note = Target: FXN; (+) strand; PAM type: NRG; PAM sequence: AGG
  source 1..20: mol_type = other DNA
ataacagtttggggttccac

SEQ ID NO: 17762 - DNA, 20 bp, synthetic construct
  misc_feature 1..20: note = Description of Artificial Sequence: Synthetic oligonucleotide
  misc_feature 1..20: note = Target: FXN; (+) strand; PAM type: NRG; PAM sequence: GGG
  source 1..20: mol_type = other DNA
taacagtttggggttccaca

SEQ ID NO: 17763 - DNA, 20 bp, synthetic construct
  misc_feature 1..20: note = Description of Artificial Sequence: Synthetic oligonucleotide
  misc_feature 1..20: note = Target: FXN; (+) strand; PAM type: NRG; PAM sequence: AAG
  source 1..20: mol_type = other DNA
ggggttccacagggtgtttt

SEQ ID NO: 17764 - DNA, 20 bp, synthetic construct
  misc_feature 1..20: note = Description of Artificial Sequence: Synthetic oligonucleotide
  misc_feature 1..20: note = Target: FXN; (+) strand; PAM type: NRG; PAM sequence: CAG
  source 1..20: mol_type = other DNA
cacagggtgttttaagactc

SEQ ID NO: 17765 - DNA, 20 bp, synthetic construct
  misc_feature 1..20: note = Description of Artificial Sequence: Synthetic oligonucleotide
  misc_feature 1..20: note = Target: FXN; (+) strand; PAM type: NRG; PAM sequence: CAG
  source 1..20: mol_type = other DNA
gggtgttttaagactccagt

SEQ ID NO: 17766 - DNA, 20 bp, synthetic construct
  misc_feature 1..20: note = Description of Artificial Sequence: Synthetic oligonucleotide
  misc_feature 1..20: note = Target: FXN; (+) strand; PAM type: NRG; PAM sequence: TAG
  source 1..20: mol_type = other DNA
aagactccagtcagctattt

SEQ ID NO: 17767 - DNA, 20 bp, synthetic construct
  misc_feature 1..20: note = Description of Artificial Sequence: Synthetic oligonucleotide
  misc_feature 1..20: note = Target: FXN; (+) strand; PAM type: NRG; PAM sequence: AGG
  source 1..20: mol_type = other DNA
agactccagtcagctatttt

SEQ ID NO: 17768 - DNA, 20 bp, synthetic construct
  misc_feature 1..20: note = Description of Artificial Sequence: Synthetic oligonucleotide
  misc_feature 1..20: note = Target: FXN; (+) strand; PAM type: NRG; PAM sequence: CAG
  source 1..20: mol_type = other DNA
tccagtcagctattttaggc

SEQ ID NO: 17769 - DNA, 20 bp, synthetic construct
  misc_feature 1..20: note = Description of Artificial Sequence: Synthetic oligonucleotide
  misc_feature 1..20: note = Target: FXN; (+) strand; PAM type: NRG; PAM sequence: GAG
  source 1..20: mol_type = other DNA
cttttatgaaatcacaccct

SEQ ID NO: 17770 - DNA, 20 bp, synthetic construct
  misc_feature 1..20: note = Description of Artificial Sequence: Synthetic oligonucleotide
  misc_feature 1..20: note = Target: FXN; (+) strand; PAM type: NRG; PAM sequence: CAG
  source 1..20: mol_type = other DNA
tgaaatcacaccctgagacc

SEQ ID NO: 17771 - DNA, 20 bp, synthetic construct
  misc_feature 1..20: note = Description of Artificial Sequence: Synthetic oligonucleotide
  misc_feature 1..20: note = Target: FXN; (+) strand; PAM type: NRG; PAM sequence: AGG
  source 1..20: mol_type = other DNA
gaaatcacaccctgagaccc

SEQ ID NO: 17772 - DNA, 20 bp, synthetic construct
  misc_feature 1..20: note = Description of Artificial Sequence: Synthetic oligonucleotide
  misc_feature 1..20: note = Target: FXN; (+) strand; PAM type: NRG; PAM sequence: TGG
  source 1..20: mol_type = other DNA
tcacaccctgagacccaggc

SEQ ID NO: 17773 - DNA, 20 bp, synthetic construct
  misc_feature 1..20: note = Description of Artificial Sequence: Synthetic oligonucleotide
  misc_feature 1..20: note = Target: FXN; (+) strand; PAM type: NRG; PAM sequence: GAG
  source 1..20: mol_type = other DNA
acaccctgagacccaggctg

SEQ ID NO: 17774 - DNA, 20 bp, synthetic construct
  misc_feature 1..20: note = Description of Artificial Sequence: Synthetic oligonucleotide
  misc_feature 1..20: note = Target: FXN; (+) strand; PAM type: NRG; PAM sequence: CAG
  source 1..20: mol_type = other DNA
ctgagacccaggctggagtg

SEQ ID NO: 17775 - DNA, 20 bp, synthetic construct
  misc_feature 1..20: note = Description of Artificial Sequence: Synthetic oligonucleotide
  misc_feature 1..20: note = Target: FXN; (+) strand; PAM type: NRG; PAM sequence: TGG
  source 1..20: mol_type = other DNA
agacccaggctggagtgcag

SEQ ID NO: 17776 - DNA, 20 bp, synthetic construct
  misc_feature 1..20: note = Description of Artificial Sequence: Synthetic oligonucleotide
  misc_feature 1..20: note = Target: FXN; (+) strand; PAM type: NRG; PAM sequence: CGG
  source 1..20: mol_type = other DNA
ggagtgcagtggtgcgatct

SEQ ID NO: 17777 - DNA, 20 bp, synthetic construct
  misc_feature 1..20: note = Description of Artificial Sequence: Synthetic oligonucleotide
  misc_feature 1..20: note = Target: FXN; (+) strand; PAM type: NRG; PAM sequence: CAG
  source 1..20: mol_type = other DNA
ggtgcgatctcggctcactg

SEQ ID NO: 17778 - DNA, 20 bp, synthetic construct
  misc_feature 1..20: note = Description of Artificial Sequence: Synthetic oligonucleotide
  misc_feature 1..20: note = Target: FXN; (+) strand; PAM type: NRG; PAM sequence: CGG
  source 1..20: mol_type = other DNA
tcactgcagcctccgcctcc

SEQ ID NO: 17779 - DNA, 20 bp, synthetic construct
  misc_feature 1..20: note = Description of Artificial Sequence: Synthetic oligonucleotide
  misc_feature 1..20: note = Target: FXN; (+) strand; PAM type: NRG; PAM sequence: GGG
  source 1..20: mol_type = other DNA
cactgcagcctccgcctccc

SEQ ID NO: 17780 - DNA, 20 bp, synthetic construct
  misc_feature 1..20: note = Description of Artificial Sequence: Synthetic oligonucleotide
  misc_feature 1..20: note = Target: FXN; (+) strand; PAM type: NRG; PAM sequence: AAG
  source 1..20: mol_type = other DNA
agcctccgcctcccgggttc

SEQ ID NO: 17781 - DNA, 20 bp, synthetic construct
  misc_feature 1..20: note = Description of Artificial Sequence: Synthetic oligonucleotide
  misc_feature 1..20: note = Target: FXN; (+) strand; PAM type: NRG; PAM sequence: CAG
  source 1..20: mol_type = other DNA
ttcaagcaatcctcctgcct

SEQ ID NO: 17782 - DNA, 20 bp, synthetic construct
  misc_feature 1..20: note = Description of Artificial Sequence: Synthetic oligonucleotide
  misc_feature 1..20: note = Target: FXN; (+) strand; PAM type: NRG; PAM sequence: GAG
  source 1..20: mol_type = other DNA
tcctcctgcctcagcctcct

SEQ ID NO: 17783 - DNA, 20 bp, synthetic construct
  misc_feature 1..20: note = Description of Artificial Sequence: Synthetic oligonucleotide
  misc_feature 1..20: note = Target: FXN; (+) strand; PAM type: NRG; PAM sequence: TAG
  source 1..20: mol_type = other DNA
tcctgcctcagcctcctgag

SEQ ID NO: 17784 - DNA, 20 bp, synthetic construct
  misc_feature 1..20: note = Description of Artificial Sequence: Synthetic oligonucleotide
  misc_feature 1..20: note = Target: FXN; (+) strand; PAM type: NRG; PAM sequence: TGG
  source 1..20: mol_type = other DNA
gcctcagcctcctgagtagc

SEQ ID NO: 17785 - DNA, 20 bp, synthetic construct
  misc_feature 1..20: note = Description of Artificial Sequence: Synthetic oligonucleotide
  misc_feature 1..20: note = Target: FXN; (+) strand; PAM type: NRG; PAM sequence: GGG
  source 1..20: mol_type = other DNA
cctcagcctcctgagtagct

SEQ ID NO: 17786 - DNA, 20 bp, synthetic construct
  misc_feature 1..20: note = Description of Artificial Sequence: Synthetic oligonucleotide
  misc_feature 1..20: note = Target: FXN; (+) strand; PAM type: NRG; PAM sequence: TAG
  source 1..20: mol_type = other DNA
ctcctgagtagctgggacta

SEQ ID NO: 17787 - DNA, 20 bp, synthetic construct
  misc_feature 1..20: note = Description of Artificial Sequence: Synthetic oligonucleotide
  misc_feature 1..20: note = Target: FXN; (+) strand; PAM type: NRG; PAM sequence: AGG
  source 1..20: mol_type = other DNA
tcctgagtagctgggactat

SEQ ID NO: 17788 - DNA, 20 bp, synthetic construct
  misc_feature 1..20: note = Description of Artificial Sequence: Synthetic oligonucleotide
  misc_feature 1..20: note = Target: FXN; (+) strand; PAM type: NRG; PAM sequence: CAG
  source 1..20: mol_type = other DNA
tagctgggactataggcgtg

SEQ ID NO: 17789 - DNA, 20 bp, synthetic construct
  misc_feature 1..20: note = Description of Artificial Sequence: Synthetic oligonucleotide
  misc_feature 1..20: note = Target: FXN; (+) strand; PAM type: NRG; PAM sequence: TAG
  source 1..20: mol_type = other DNA
taggcgtgcagtgccacacc

SEQ ID NO: 17790 - DNA, 20 bp, synthetic construct
  misc_feature 1..20: note = Description of Artificial Sequence: Synthetic oligonucleotide
  misc_feature 1..20: note = Target: FXN; (+) strand; PAM type: NRG; PAM sequence: TAG
  source 1..20: mol_type = other DNA
ctagctaatttttgtatttt

SEQ ID NO: 17791 - DNA, 20 bp, synthetic construct
  misc_feature 1..20: note = Description of Artificial Sequence: Synthetic oligonucleotide
  misc_feature 1..20: note = Target: FXN; (+) strand; PAM type: NRG; PAM sequence: AAG
  source 1..20: mol_type = other DNA
taatttttgtatttttagta

SEQ ID NO: 17792 - DNA, 20 bp, synthetic construct
  misc_feature 1..20: note = Description of Artificial Sequence: Synthetic oligonucleotide
  misc_feature 1..20: note = Target: FXN; (+) strand; PAM type: NRG; PAM sequence: CGG
  source 1..20: mol_type = other DNA
ttttgtatttttagtaaaga

SEQ ID NO: 17793 - DNA, 20 bp, synthetic construct
  misc_feature 1..20: note = Description of Artificial Sequence: Synthetic oligonucleotide
  misc_feature 1..20: note = Target: FXN; (+) strand; PAM type: NRG; PAM sequence: GGG
  source 1..20: mol_type = other DNA
tttgtatttttagtaaagac

SEQ ID NO: 17794 - DNA, 20 bp, synthetic construct
  misc_feature 1..20: note = Description of Artificial Sequence: Synthetic oligonucleotide
  misc_feature 1..20: note = Target: FXN; (+) strand; PAM type: NRG; PAM sequence: GGG
  source 1..20: mol_type = other DNA
ttgtatttttagtaaagacg

SEQ ID NO: 17795 - DNA, 20 bp, synthetic construct
  misc_feature 1..20: note = Description of Artificial Sequence: Synthetic oligonucleotide
  misc_feature 1..20: note = Target: FXN; (+) strand; PAM type: NRG; PAM sequence: TGG
  source 1..20: mol_type = other DNA
aagacggggtttcaccatgt

SEQ ID NO: 17796 - DNA, 20 bp, synthetic construct
  misc_feature 1..20: note = Description of Artificial Sequence: Synthetic oligonucleotide
  misc_feature 1..20: note = Target: FXN; (+) strand; PAM type: NRG; PAM sequence: CAG
  source 1..20: mol_type = other DNA
cggggtttcaccatgttggc

SEQ ID NO: 17797 - DNA, 20 bp, synthetic construct
  misc_feature 1..20: note = Description of Artificial Sequence: Synthetic oligonucleotide
  misc_feature 1..20: note = Target: FXN; (+) strand; PAM type: NRG; PAM sequence: AGG
  source 1..20: mol_type = other DNA
ggggtttcaccatgttggcc

SEQ ID NO: 17798 - DNA, 20 bp, synthetic construct
  misc_feature 1..20: note = Description of Artificial Sequence: Synthetic oligonucleotide
  misc_feature 1..20: note = Target: FXN; (+) strand; PAM type: NRG; PAM sequence: TGG
  source 1..20: mol_type = other DNA
tttcaccatgttggccaggc

SEQ ID NO: 17799 - DNA, 20 bp, synthetic construct
  misc_feature 1..20: note = Description of Artificial Sequence: Synthetic oligonucleotide
  misc_feature 1..20: note = Target: FXN; (+) strand; PAM type: NRG; PAM sequence: CAG
  source 1..20: mol_type = other DNA
tggtcttgaactcctgacct

SEQ ID NO: 17800 - DNA, 20 bp, synthetic construct
  misc_feature 1..20: note = Description of Artificial Sequence: Synthetic oligonucleotide
  misc_feature 1..20: note = Target: FXN; (+) strand; PAM type: NRG; PAM sequence: CGG
  source 1..20: mol_type = other DNA
ctcagatgatccgcccgcct

SEQ ID NO: 17801 - DNA, 20 bp, synthetic construct
  misc_feature 1..20: note = Description of Artificial Sequence: Synthetic oligonucleotide
  misc_feature 1..20: note = Target: FXN; (+) strand; PAM type: NRG; PAM sequence: AAG
  source 1..20: mol_type = other DNA
ccgcccgcctcggcctccca

SEQ ID NO: 17802 - DNA, 20 bp, synthetic construct
  misc_feature 1..20: note = Description of Artificial Sequence: Synthetic oligonucleotide
  misc_feature 1..20: note = Target: FXN; (+) strand; PAM type: NRG; PAM sequence: TGG
  source 1..20: mol_type = other DNA
gcctcggcctcccaaagtgc

SEQ ID NO: 17803 - DNA, 20 bp, synthetic construct
  misc_feature 1..20: note = Description of Artificial Sequence: Synthetic oligonucleotide
  misc_feature 1..20: note = Target: FXN; (+) strand; PAM type: NRG; PAM sequence: GGG
  source 1..20: mol_type = other DNA
cctcggcctcccaaagtgct

SEQ ID NO: 17804 - DNA, 20 bp, synthetic construct
  misc_feature 1..20: note = Description of Artificial Sequence: Synthetic oligonucleotide
  misc_feature 1..20: note = Target: FXN; (+) strand; PAM type: NRG; PAM sequence: TGG
  source 1..20: mol_type = other DNA
tcccaaagtgctgggattac

SEQ ID NO: 17805 - DNA, 20 bp, synthetic construct
  misc_feature 1..20: note = Description of Artificial Sequence: Synthetic oligonucleotide
  misc_feature 1..20: note = Target: FXN; (+) strand; PAM type: NRG; PAM sequence: GAG
  source 1..20: mol_type = other DNA
agtgctgggattactggcat

SEQ ID NO: 17806 - DNA, 20 bp, synthetic construct
  misc_feature 1..20: note = Description of Artificial Sequence: Synthetic oligonucleotide
  misc_feature 1..20: note = Target: FXN; (+) strand; PAM type: NRG; PAM sequence: CAG
  source 1..20: mol_type = other DNA
ctggcatgagccactgcgcc

SEQ ID NO: 17807 - DNA, 20 bp, synthetic construct
  misc_feature 1..20: note = Description of Artificial Sequence: Synthetic oligonucleotide
  misc_feature 1..20: note = Target: FXN; (+) strand; PAM type: NRG; PAM sequence: CAG
  source 1..20: mol_type = other DNA
atgagccactgcgcccagcc

SEQ ID NO: 17808 - DNA, 20 bp, synthetic construct
  misc_feature 1..20: note = Description of Artificial Sequence: Synthetic oligonucleotide
  misc_feature 1..20: note = Target: FXN; (+) strand; PAM type: NRG; PAM sequence: GAG
  source 1..20: mol_type = other DNA
gcccagactcatttttcttt

SEQ ID NO: 17809 - DNA, 20 bp, synthetic construct
  misc_feature 1..20: note = Description of Artificial Sequence: Synthetic oligonucleotide
  misc_feature 1..20: note = Target: FXN; (+) strand; PAM type: NRG; PAM sequence: GAG
  source 1..20: mol_type = other DNA
ccagactcatttttctttga

SEQ ID NO: 17810 - DNA, 20 bp, synthetic construct
  misc_feature 1..20: note = Description of Artificial Sequence: Synthetic oligonucleotide
  misc_feature 1..20: note = Target: FXN; (+) strand; PAM type: NRG; PAM sequence: TAG
  source 1..20: mol_type = other DNA
gactcatttttctttgagag

SEQ ID NO: 17811 - DNA, 20 bp, synthetic construct
  misc_feature 1..20: note = Description of Artificial Sequence: Synthetic oligonucleotide
  misc_feature 1..20: note = Target: FXN; (+) strand; PAM type: NRG; PAM sequence: AGG
  source 1..20: mol_type = other DNA
actcatttttctttgagagt

SEQ ID NO: 17812 - DNA, 20 bp, synthetic construct
  misc_feature 1..20: note = Description of Artificial Sequence: Synthetic oligonucleotide
  misc_feature 1..20: note = Target: FXN; (+) strand; PAM type: NRG; PAM sequence: AAG
  source 1..20: mol_type = other DNA
tgagagtaggcttttcccaa

SEQ ID NO: 17813 - DNA, 20 bp, synthetic construct
  misc_feature 1..20: note = Description of Artificial Sequence: Synthetic oligonucleotide
  misc_feature 1..20: note = Target: FXN; (+) strand; PAM type: NRG; PAM sequence: TAG
  source 1..20: mol_type = other DNA
gagtaggcttttcccaaaag

SEQ ID NO: 17814 - DNA, 20 bp, synthetic construct
  misc_feature 1..20: note = Description of Artificial Sequence: Synthetic oligonucleotide
  misc_feature 1..20: note = Target: FXN; (+) strand; PAM type: NRG; PAM sequence: AGG
  source 1..20: mol_type = other DNA
agtaggcttttcccaaaagt

SEQ ID NO: 17815 - DNA, 20 bp, synthetic construct
  misc_feature 1..20: note = Description of Artificial Sequence: Synthetic oligonucleotide
  misc_feature 1..20: note = Target: FXN; (+) strand; PAM type: NRG; PAM sequence: GAG
  source 1..20: mol_type = other DNA
tttcccaaaagtaggcttct

SEQ ID NO: 17816 - DNA, 20 bp, synthetic construct
  misc_feature 1..20: note = Description of Artificial Sequence: Synthetic oligonucleotide
  misc_feature 1..20: note = Target: FXN; (+) strand; PAM type: NRG; PAM sequence: CAG
  source 1..20: mol_type = other DNA
gcttctgagctattcacttt

SEQ ID NO: 17817 - DNA, 20 bp, synthetic construct
  misc_feature 1..20: note = Description of Artificial Sequence: Synthetic oligonucleotide
  misc_feature 1..20: note = Target: FXN; (+) strand; PAM type: NRG; PAM sequence: AGG
  source 1..20: mol_type = other DNA
cttctgagctattcactttc

SEQ ID NO: 17818 - DNA, 20 bp, synthetic construct
  misc_feature 1..20: note = Description of Artificial Sequence: Synthetic oligonucleotide
  misc_feature 1..20: note = Target: FXN; (+) strand; PAM type: NRG; PAM sequence: CAG
  source 1..20: mol_type = other DNA
ctgagctattcactttcagg

SEQ ID NO: 17819 - DNA, 20 bp, synthetic construct
  misc_feature 1..20: note = Description of Artificial Sequence: Synthetic oligonucleotide
  misc_feature 1..20: note = Target: FXN; (+) strand; PAM type: NRG; PAM sequence: CAG
  source 1..20: mol_type = other DNA
tttcaggcagtcccatgtgc

SEQ ID NO: 17820 - DNA, 20 bp, synthetic construct
  misc_feature 1..20: note = Description of Artificial Sequence: Synthetic oligonucleotide
  misc_feature 1..20: note = Target: FXN; (+) strand; PAM type: NRG; PAM sequence: AGG
  source 1..20: mol_type = other DNA
ttcaggcagtcccatgtgcc

SEQ ID NO: 17821 - DNA, 20 bp, synthetic construct
  misc_feature 1..20: note = Description of Artificial Sequence: Synthetic oligonucleotide
  misc_feature 1..20: note = Target: FXN; (+) strand; PAM type: NRG; PAM sequence: TGG
  source 1..20: mol_type = other DNA
ccacatccaaatttcctccg

SEQ ID NO: 17822 - DNA, 20 bp, synthetic construct
  misc_feature 1..20: note = Description of Artificial Sequence: Synthetic oligonucleotide
  misc_feature 1..20: note = Target: FXN; (+) strand; PAM type: NRG; PAM sequence: TGG
  source 1..20: mol_type = other DNA
atccaaatttcctccgtgga

SEQ ID NO: 17823 - DNA, 20 bp, synthetic construct
  misc_feature 1..20: note = Description of Artificial Sequence: Synthetic oligonucleotide
  misc_feature 1..20: note = Target: FXN; (+) strand; PAM type: NRG; PAM sequence: GGG
  source 1..20: mol_type = other DNA
tccaaatttcctccgtggat

SEQ ID NO: 17824 - DNA, 20 bp, synthetic construct
  misc_feature 1..20: note = Description of Artificial Sequence: Synthetic oligonucleotide
  misc_feature 1..20: note = Target: FXN; (+) strand; PAM type: NRG; PAM sequence: GAG
  source 1..20: mol_type = other DNA
caaatttcctccgtggatgg

SEQ ID NO: 17825 - DNA, 20 bp, synthetic construct
  misc_feature 1..20: note = Description of Artificial Sequence: Synthetic oligonucleotide
  misc_feature 1..20: note = Target: FXN; (+) strand; PAM type: NRG; PAM sequence: CAG
  source 1..20: mol_type = other DNA
tcctccgtggatgggagtct

SEQ ID NO: 17826 - DNA, 20 bp, synthetic construct
  misc_feature 1..20: note = Description of Artificial Sequence: Synthetic oligonucleotide
  misc_feature 1..20: note = Target: FXN; (+) strand; PAM type: NRG; PAM sequence: AGG
  source 1..20: mol_type = other DNA
cctccgtggatgggagtctc

SEQ ID NO: 17827 - DNA, 20 bp, synthetic construct
  misc_feature 1..20: note = Description of Artificial Sequence: Synthetic oligonucleotide
  misc_feature 1..20: note = Target: FXN; (+) strand; PAM type: NRG; PAM sequence: CAG
  source 1..20: mol_type = other DNA
tccttgcatgtccccatgcc

SEQ ID NO: 17828 - DNA, 20 bp, synthetic construct
  misc_feature 1..20: note = Description of Artificial Sequence: Synthetic oligonucleotide
  misc_feature 1..20: note = Target: FXN; (+) strand; PAM type: NRG; PAM sequence: CAG
  source 1..20: mol_type = other DNA
gtccccatgcccagctgtct

SEQ ID NO: 17829 - DNA, 20 bp, synthetic construct
  misc_feature 1..20: note = Description of Artificial Sequence: Synthetic oligonucleotide
  misc_feature 1..20: note = Target: FXN; (+) strand; PAM type: NRG; PAM sequence: AAG
  source 1..20: mol_type = other DNA
atgcccagctgtctcagcct

SEQ ID NO: 17830 - DNA, 20 bp, synthetic construct
  misc_feature 1..20: note = Description of Artificial Sequence: Synthetic oligonucleotide
  misc_feature 1..20: note = Target: FXN; (+) strand; PAM type: NRG; PAM sequence: AGG
  source 1..20: mol_type = other DNA
tgcccagctgtctcagccta

SEQ ID NO: 17831 - DNA, 20 bp, synthetic construct
  misc_feature 1..20: note = Description of Artificial Sequence: Synthetic oligonucleotide
  misc_feature 1..20: note = Target: FXN; (+) strand; PAM type: NRG; PAM sequence: GGG
  source 1..20: mol_type = other DNA
gcccagctgtctcagcctaa

SEQ ID NO: 17832 - DNA, 20 bp, synthetic construct
  misc_feature 1..20: note = Description of Artificial Sequence: Synthetic oligonucleotide
  misc_feature 1..20: note = Target: FXN; (+) strand; PAM type: NRG; PAM sequence: CAG
  source 1..20: mol_type = other DNA
cagctgtctcagcctaaggg

SEQ ID NO: 17833 - DNA, 20 bp, synthetic construct
  misc_feature 1..20: note = Description of Artificial Sequence: Synthetic oligonucleotide
  misc_feature 1..20: note = Target: FXN; (+) strand; PAM type: NRG; PAM sequence: AGG
  source 1..20: mol_type = other DNA
agctgtctcagcctaagggc

SEQ ID NO: 17834 - DNA, 20 bp, synthetic construct
  misc_feature 1..20: note = Description of Artificial Sequence: Synthetic oligonucleotide
  misc_feature 1..20: note = Target: FXN; (+) strand; PAM type: NRG; PAM sequence: AAG
  source 1..20: mol_type = other DNA
gcctaagggcaggtaccttg

SEQ ID NO: 17835 - DNA, 20 bp, synthetic construct
  misc_feature 1..20: note = Description of Artificial Sequence: Synthetic oligonucleotide
  misc_feature 1..20: note = Target: FXN; (+) strand; PAM type: NRG; PAM sequence: AAG
  source 1..20: mol_type = other DNA
agggcaggtaccttgaagtc

SEQ ID NO: 17836 - DNA, 20 bp, synthetic construct
  misc_feature 1..20: note = Description of Artificial Sequence: Synthetic oligonucleotide
  misc_feature 1..20: note = Target: FXN; (+) strand; PAM type: NRG; PAM sequence: AAG
  source 1..20: mol_type = other DNA
ttgaagtcaagttaaacaat

SEQ ID NO: 17837 - DNA, 20 bp, synthetic construct
  misc_feature 1..20: note = Description of Artificial Sequence: Synthetic oligonucleotide
  misc_feature 1..20: note = Target: FXN; (+) strand; PAM type: NRG; PAM sequence: TGG
  source 1..20: mol_type = other DNA
gtcaagttaaacaataagat

SEQ ID NO: 17838 - DNA, 20 bp, synthetic construct
  misc_feature 1..20: note = Description of Artificial Sequence: Synthetic oligonucleotide
  misc_feature 1..20: note = Target: FXN; (+) strand; PAM type: NRG; PAM sequence: GAG
  source 1..20: mol_type = other DNA
caagttaaacaataagattg

SEQ ID NO: 17839 - DNA, 20 bp, synthetic construct
  misc_feature 1..20: note = Description of Artificial Sequence: Synthetic oligonucleotide
  misc_feature 1..20: note = Target: FXN; (+) strand; PAM type: NRG; PAM sequence: CAG
  source 1..20: mol_type = other DNA
taaacaataagattggagac

SEQ ID NO: 17840 - DNA, 20 bp, synthetic construct
  misc_feature 1..20: note = Description of Artificial Sequence: Synthetic oligonucleotide
  misc_feature 1..20: note = Target: FXN; (+) strand; PAM type: NRG; PAM sequence: CAG
  source 1..20: mol_type = other DNA
ttggagaccagcaatgccct

SEQ ID NO: 17841 - DNA, 20 bp, synthetic construct
  misc_feature 1..20: note = Description of Artificial Sequence: Synthetic oligonucleotide
  misc_feature 1..20: note = Target: FXN; (+) strand; PAM type: NRG; PAM sequence: TGG
  source 1..20: mol_type = other DNA
gaccagcaatgccctcagcc

SEQ ID NO: 17842 - DNA, 20 bp, synthetic construct
  misc_feature 1..20: note = Description of Artificial Sequence: Synthetic oligonucleotide
  misc_feature 1..20: note = Target: FXN; (+) strand; PAM type: NRG; PAM sequence: CAG
  source 1..20: mol_type = other DNA
tgccctcagcctggtttttg

SEQ ID NO: 17843 - DNA, 20 bp, synthetic construct
  misc_feature 1..20: note = Description of Artificial Sequence: Synthetic oligonucleotide
  misc_feature 1..20: note = Target: FXN; (+) strand; PAM type: NRG; PAM sequence: CAG
  source 1..20: mol_type = other DNA
cctcagcctggtttttgcag

SEQ ID NO: 17844 - DNA, 20 bp, synthetic construct
  misc_feature 1..20: note = Description of Artificial Sequence: Synthetic oligonucleotide
  misc_feature 1..20: note = Target: FXN; (+) strand; PAM type: NRG; PAM sequence: AGG
  source 1..20: mol_type = other DNA
ctcagcctggtttttgcagc

SEQ ID NO: 17845 - DNA, 20 bp, synthetic construct
  misc_feature 1..20: note = Description of Artificial Sequence: Synthetic oligonucleotide
  misc_feature 1..20: note = Target: FXN; (+) strand; PAM type: NRG; PAM sequence: GAG
  source 1..20: mol_type = other DNA
ctggtttttgcagcaggact

SEQ ID NO: 17846 - DNA, 20 bp, synthetic construct
  misc_feature 1..20: note = Description of Artificial Sequence: Synthetic oligonucleotide
  misc_feature 1..20: note = Target: FXN; (+) strand; PAM type: NRG; PAM sequence: TGG
  source 1..20: mol_type = other DNA
caggactgagtcccttgttt

SEQ ID NO: 17847 - DNA, 20 bp, synthetic construct
  misc_feature 1..20: note = Description of Artificial Sequence: Synthetic oligonucleotide
  misc_feature 1..20: note = Target: FXN; (+) strand; PAM type: NRG; PAM sequence: TGG
  source 1..20: mol_type = other DNA
agtcccttgttttggctcaa

SEQ ID NO: 17848 - DNA, 20 bp, synthetic construct
  misc_feature 1..20: note = Description of Artificial Sequence: Synthetic oligonucleotide
  misc_feature 1..20: note = Target: FXN; (+) strand; PAM type: NRG; PAM sequence: GGG
  source 1..20: mol_type = other DNA
gtcccttgttttggctcaat

SEQ ID NO: 17849 - DNA, 20 bp, synthetic construct
  misc_feature 1..20: note = Description of Artificial Sequence: Synthetic oligonucleotide
  misc_feature 1..20: note = Target: FXN; (+) strand; PAM type: NRG; PAM sequence: AAG
  source 1..20: mol_type = other DNA
ccttgttttggctcaatggg

SEQ ID NO: 17850 - DNA, 20 bp, synthetic construct
  misc_feature 1..20: note = Description of Artificial Sequence: Synthetic oligonucleotide
  misc_feature 1..20: note = Target: FXN; (+) strand; PAM type: NRG; PAM sequence: AAG
  source 1..20: mol_type = other DNA
tgggaagtctttgctgttca

SEQ ID NO: 17851 - DNA, 20 bp, synthetic construct
  misc_feature 1..20: note = Description of Artificial Sequence: Synthetic oligonucleotide
  misc_feature 1..20: note = Target: FXN; (+) strand; PAM type: NRG; PAM sequence: TAG
  source 1..20: mol_type = other DNA
gtctttgctgttcaaagcct

SEQ ID NO: 17852 - DNA, 20 bp, synthetic construct
  misc_feature 1..20: note = Description of Artificial Sequence: Synthetic oligonucleotide
  misc_feature 1..20: note = Target: FXN; (+) strand; PAM type: NRG; PAM sequence: TGG
  source 1..20: mol_type = other DNA
gttcaaagccttagcttctc

SEQ ID NO: 17853 - DNA, 20 bp, synthetic construct
  misc_feature 1..20: note = Description of Artificial Sequence: Synthetic oligonucleotide
  misc_feature 1..20: note = Target: FXN; (+) strand; PAM type: NRG; PAM sequence: GAG
  source 1..20: mol_type = other DNA
aagccttagcttctctggct

SEQ ID NO: 17854 - DNA, 20 bp, synthetic construct
  misc_feature 1..20: note = Description of Artificial Sequence: Synthetic oligonucleotide
  misc_feature 1..20: note = Target: FXN; (+) strand; PAM type: NRG; PAM sequence: CGG
  source 1..20: mol_type = other DNA
ttagcttctctggctgagtg

SEQ ID NO: 17855 - DNA, 20 bp, synthetic construct
  misc_feature 1..20: note = Description of Artificial Sequence: Synthetic oligonucleotide
  misc_feature 1..20: note = Target: FXN; (+) strand; PAM type: NRG; PAM sequence: TGG
  source 1..20: mol_type = other DNA
gcttctctggctgagtgcgg

SEQ ID NO: 17856 - DNA, 20 bp, synthetic construct
  misc_feature 1..20: note = Description of Artificial Sequence: Synthetic oligonucleotide
  misc_feature 1..20: note = Target: FXN; (+) strand; PAM type: NRG; PAM sequence: TAG
  source 1..20: mol_type = other DNA
gtggctcacgcctgtcatcc

SEQ ID NO: 17857 - DNA, 20 bp, synthetic construct
  misc_feature 1..20: note = Description of Artificial Sequence: Synthetic oligonucleotide
  misc_feature 1..20: note = Target: FXN; (+) strand; PAM type: NRG; PAM sequence: TGG
  source 1..20: mol_type = other DNA
cgcctgtcatcctagctctt

SEQ ID NO: 17858 - DNA, 20 bp, synthetic construct
  misc_feature 1..20: note = Description of Artificial Sequence: Synthetic oligonucleotide
  misc_feature 1..20: note = Target: FXN; (+) strand; PAM type: NRG; PAM sequence: GGG
  source 1..20: mol_type = other DNA
gcctgtcatcctagctcttt

SEQ ID NO: 17859 - DNA, 20 bp, synthetic construct
  misc_feature 1..20: note = Description of Artificial Sequence: Synthetic oligonucleotide
  misc_feature 1..20: note = Target: FXN; (+) strand; PAM type: NRG; PAM sequence: GAG
  source 1..20: mol_type = other DNA
ctgtcatcctagctctttgg

SEQ ID NO: 17860 - DNA, 20 bp, synthetic construct
  misc_feature 1..20: note = Description of Artificial Sequence: Synthetic oligonucleotide
  misc_feature 1..20: note = Target: FXN; (+) strand; PAM type: NRG; PAM sequence: AGG
  source 1..20: mol_type = other DNA
tgtcatcctagctctttggg

SEQ ID NO: 17861 - DNA, 20 bp, synthetic construct
  misc_feature 1..20: note = Description of Artificial Sequence: Synthetic oligonucleotide
  misc_feature 1..20: note = Target: FXN; (+) strand; PAM type: NRG; PAM sequence: GAG
  source 1..20: mol_type = other DNA
tcctagctctttgggaggcc

SEQ ID NO: 17862 - DNA, 20 bp, synthetic construct
  misc_feature 1..20: note = Description of Artificial Sequence: Synthetic oligonucleotide
  misc_feature 1..20: note = Target: FXN; (+) strand; PAM type: NRG; PAM sequence: AGG
  source 1..20: mol_type = other DNA
cctagctctttgggaggccg

SEQ ID NO: 17863 - DNA, 20 bp, synthetic construct
  misc_feature 1..20: note = Description of Artificial Sequence: Synthetic oligonucleotide
  misc_feature 1..20: note = Target: FXN; (+) strand; PAM type: NRG; PAM sequence: GAG
  source 1..20: mol_type = other DNA
gctctttgggaggccgaggt

SEQ ID NO: 17864 - DNA, 20 bp, synthetic construct
  misc_feature 1..20: note = Description of Artificial Sequence: Synthetic oligonucleotide
  misc_feature 1..20: note = Target: FXN; (+) strand; PAM type: NRG; PAM sequence: CAG
  source 1..20: mol_type = other DNA
ctttgggaggccgaggtgag

SEQ ID NO: 17865 - DNA, 20 bp, synthetic construct
  misc_feature 1..20: note = Description of Artificial Sequence: Synthetic oligonucleotide
  misc_feature 1..20: note = Target: FXN; (+) strand; PAM type: NRG; PAM sequence: GAG
  source 1..20: mol_type = other DNA
gccgaggtgagcagatcact

SEQ ID NO: 17866 - DNA, 20 bp, synthetic construct
  misc_feature 1..20: note = Description of Artificial Sequence: Synthetic oligonucleotide
  misc_feature 1..20: note = Target: FXN; (+) strand; PAM type: NRG; PAM sequence: AGG
  source 1..20: mol_type = other DNA
ccgaggtgagcagatcactg

SEQ ID NO: 17867 - DNA, 20 bp, synthetic construct
  misc_feature 1..20: note = Description of Artificial Sequence: Synthetic oligonucleotide
  misc_feature 1..20: note = Target: FXN; (+) strand; PAM type: NRG; PAM sequence: CAG
  source 1..20: mol_type = other DNA
ggtgagcagatcactgaggc

SEQ ID NO: 17868 - DNA, 20 bp, synthetic construct
  misc_feature 1..20: note = Description of Artificial Sequence: Synthetic oligonucleotide
  misc_feature 1..20: note = Target: FXN; (+) strand; PAM type: NRG; PAM sequence: AGG
  source 1..20: mol_type = other DNA
gtgagcagatcactgaggcc

SEQ ID NO: 17869 - DNA, 20 bp, synthetic construct
  misc_feature 1..20: note = Description of Artificial Sequence: Synthetic oligonucleotide
  misc_feature 1..20: note = Target: FXN; (+) strand; PAM type: NRG; PAM sequence: GAG
  source 1..20: mol_type = other DNA
gagcagatcactgaggccag

SEQ ID NO: 17870 - DNA, 20 bp, synthetic construct
  misc_feature 1..20: note = Description of Artificial Sequence: Synthetic oligonucleotide
  misc_feature 1..20: note = Target: FXN; (+) strand; PAM type: NRG; PAM sequence: AAG
  source 1..20: mol_type = other DNA
atcactgaggccaggagttc

SEQ ID NO: 17871 - DNA, 20 bp, synthetic construct
  misc_feature 1..20: note = Description of Artificial Sequence: Synthetic oligonucleotide
  misc_feature 1..20: note = Target: FXN; (+) strand; PAM type: NRG; PAM sequence: CAG
  source 1..20: mol_type = other DNA
tgaggccaggagttcaagac

SEQ ID NO: 17872 - DNA, 20 bp, synthetic construct
  misc_feature 1..20: note = Description of Artificial Sequence: Synthetic oligonucleotide
  misc_feature 1..20: note = Target: FXN; (+) strand; PAM type: NRG; PAM sequence: TGG
  source 1..20: mol_type = other DNA
ccaggagttcaagaccagcc

SEQ ID NO: 17873 - DNA, 20 bp, synthetic construct
  misc_feature 1..20: note = Description of Artificial Sequence: Synthetic oligonucleotide
  misc_feature 1..20: note = Target: FXN; (+) strand; PAM type: NRG; PAM sequence: TGG
  source 1..20: mol_type = other DNA
caagaccagcctggccaaca

SEQ ID NO: 17874 - DNA, 20 bp, synthetic construct
  misc_feature 1..20: note = Description of Artificial Sequence: Synthetic oligonucleotide
  misc_feature 1..20: note = Target: FXN; (+) strand; PAM type: NRG; PAM sequence: AAG
  source 1..20: mol_type = other DNA
gtctctactaaaaatacaaa

SEQ ID NO: 17875 - DNA, 20 bp, synthetic construct
  misc_feature 1..20: note = Description of Artificial Sequence: Synthetic oligonucleotide
  misc_feature 1..20: note = Target: FXN; (+) strand; PAM type: NRG; PAM sequence: TAG
  source 1..20: mol_type = other DNA
ctactaaaaatacaaaaagt

SEQ ID NO: 17876 - DNA, 20 bp, synthetic construct
  misc_feature 1..20: note = Description of Artificial Sequence: Synthetic oligonucleotide
  misc_feature 1..20: note = Target: FXN; (+) strand; PAM type: NRG; PAM sequence: CAG
  source 1..20: mol_type = other DNA
taaaaatacaaaaagttagc

SEQ ID NO: 17877 - DNA, 20 bp, synthetic construct
  misc_feature 1..20: note = Description of Artificial Sequence: Synthetic oligonucleotide
  misc_feature 1..20: note = Target: FXN; (+) strand; PAM type: NRG; PAM sequence: AGG
  source 1..20: mol_type = other DNA
aaaaatacaaaaagttagcc

SEQ ID NO: 17878 - DNA, 20 bp, synthetic construct
  misc_feature 1..20: note = Description of Artificial Sequence: Synthetic oligonucleotide
  misc_feature 1..20: note = Target: FXN; (+) strand; PAM type: NRG; PAM sequence: TGG
  source 1..20: mol_type = other DNA
tacaaaaagttagccaggcg

SEQ ID NO: 17879 - DNA, 20 bp, synthetic construct
  misc_feature 1..20: note = Description of Artificial Sequence: Synthetic oligonucleotide
  misc_feature 1..20: note = Target: FXN; (+) strand; PAM type: NRG; PAM sequence: TGG
  source 1..20: mol_type = other DNA
aaaaagttagccaggcgtgg

SEQ ID NO: 17880 - DNA, 20 bp, synthetic construct
  misc_feature 1..20: note = Description of Artificial Sequence: Synthetic oligonucleotide
  misc_feature 1..20: note = Target: FXN; (+) strand; PAM type: NRG; PAM sequence: CAG
  source 1..20: mol_type = other DNA
aagttagccaggcgtggtgg

SEQ ID NO: 17881 - DNA, 20 bp, synthetic construct
  misc_feature 1..20: note = Description of Artificial Sequence: Synthetic oligonucleotide
  misc_feature 1..20: note = Target: FXN; (+) strand; PAM type: NRG; PAM sequence: AGG
  source 1..20: mol_type = other DNA
agttagccaggcgtggtggc

SEQ ID NO: 17882 - DNA, 20 bp, synthetic construct
  misc_feature 1..20: note = Description of Artificial Sequence: Synthetic oligonucleotide
  misc_feature 1..20: note = Target: FXN; (+) strand; PAM type: NRG; PAM sequence: CAG
  source 1..20: mol_type = other DNA
gtggcaggcacctgtaatcc

SEQ ID NO: 17883 - DNA, 20 bp, synthetic construct
  misc_feature 1..20: note = Description of Artificial Sequence: Synthetic oligonucleotide
  misc_feature 1..20: note = Target: FXN; (+) strand; PAM type: NRG; PAM sequence: CGG
  source 1..20: mol_type = other DNA
cacctgtaatcccagctact

SEQ ID NO: 17884 - DNA, 20 bp, synthetic construct
  misc_feature 1..20: note = Description of Artificial Sequence: Synthetic oligonucleotide
  misc_feature 1..20: note = Target: FXN; (+) strand; PAM type: NRG; PAM sequence: GGG
  source 1..20: mol_type = other DNA
acctgtaatcccagctactc

SEQ ID NO: 17885 - DNA, 20 bp, synthetic construct
  misc_feature 1..20: note = Description of Artificial Sequence: Synthetic oligonucleotide
  misc_feature 1..20: note = Target: FXN; (+) strand; PAM type: NRG; PAM sequence: GAG
  source 1..20: mol_type = other DNA
ctgtaatcccagctactcgg

SEQ ID NO: 17886 - DNA, 20 bp, synthetic construct
  misc_feature 1..20: note = Description of Artificial Sequence: Synthetic oligonucleotide
  misc_feature 1..20: note = Target: FXN; (+) strand; PAM type: NRG; PAM sequence: GAG
  source 1..20: mol_type = other DNA
tcccagctactcgggagcct

SEQ ID NO: 17887 - DNA, 20 bp, synthetic construct
  misc_feature 1..20: note = Description of Artificial Sequence: Synthetic oligonucleotide
  misc_feature 1..20: note = Target: FXN; (+) strand; PAM type: NRG; PAM sequence: AGG
  source 1..20: mol_type = other DNA
cccagctactcgggagcctg

SEQ ID NO: 17888 - DNA, 20 bp, synthetic construct
  misc_feature 1..20: note = Description of Artificial Sequence: Synthetic oligonucleotide
  misc_feature 1..20: note = Target: FXN; (+) strand; PAM type: NRG; PAM sequence: CAG
  source 1..20: mol_type = other DNA
agctactcgggagcctgagg

SEQ ID NO: 17889 - DNA, 20 bp, synthetic construct
  misc_feature 1..20: note = Description of Artificial Sequence: Synthetic oligonucleotide
  misc_feature 1..20: note = Target: FXN; (+) strand; PAM type: NRG; PAM sequence: AGG
  source 1..20: mol_type = other DNA
gctactcgggagcctgaggc

SEQ ID NO: 17890 - DNA, 20 bp, synthetic construct
  misc_feature 1..20: note = Description of Artificial Sequence: Synthetic oligonucleotide
  misc_feature 1..20: note = Target: FXN; (+) strand; PAM type: NRG; PAM sequence: GAG
  source 1..20: mol_type = other DNA
tactcgggagcctgaggcag

SEQ ID NO: 17891 - DNA, 20 bp, synthetic construct
  misc_feature 1..20: note = Description of Artificial Sequence: Synthetic oligonucleotide
  misc_feature 1..20: note = Target: FXN; (+) strand; PAM type: NRG; PAM sequence: CAG
  source 1..20: mol_type = other DNA
gcaggagaatcgcttaaacc

SEQ ID NO: 17892 - DNA, 20 bp, synthetic construct
  misc_feature 1..20: note = Description of Artificial Sequence: Synthetic oligonucleotide
  misc_feature 1..20: note = Target: FXN; (+) strand; PAM type: NRG; PAM sequence: AGG
  source 1..20: mol_type = other DNA
caggagaatcgcttaaaccc

SEQ ID NO: 17893 - DNA, 20 bp, synthetic construct
  misc_feature 1..20: note = Description of Artificial Sequence: Synthetic oligonucleotide
  misc_feature 1..20: note = Target: FXN; (+) strand; PAM type: NRG; PAM sequence: GAG
  source 1..20: mol_type = other DNA
ggagaatcgcttaaacccag

SEQ ID NO: 17894 - DNA, 20 bp, synthetic construct
  misc_feature 1..20: note = Description of Artificial Sequence: Synthetic oligonucleotide
  misc_feature 1..20: note = Target: FXN; (+) strand; PAM type: NRG; PAM sequence: TGG
  source 1..20: mol_type = other DNA
aatcgcttaaacccaggaga

SEQ ID NO: 17895 - DNA, 20 bp, synthetic construct
  misc_feature 1..20: note = Description of Artificial Sequence: Synthetic oligonucleotide
  misc_feature 1..20: note = Target: FXN; (+) strand; PAM type: NRG; PAM sequence: GAG
  source 1..20: mol_type = other DNA
tcgcttaaacccaggagatg

SEQ ID NO: 17896 - DNA, 20 bp, synthetic construct
  misc_feature 1..20: note = Description of Artificial Sequence: Synthetic oligonucleotide
  misc_feature 1..20: note = Target: FXN; (+) strand; PAM type: NRG; PAM sequence: AGG
  source 1..20: mol_type = other DNA
cgcttaaacccaggagatgg

SEQ ID NO: 17897 - DNA, 20 bp, synthetic construct
  misc_feature 1..20: note = Description of Artificial Sequence: Synthetic oligonucleotide
  misc_feature 1..20: note = Target: FXN; (+) strand; PAM type: NRG; PAM sequence: CAG
  source 1..20: mol_type = other DNA
aacccaggagatggaggctg

SEQ ID NO: 17898 - DNA, 20 bp, synthetic construct
  misc_feature 1..20: note = Description of Artificial Sequence: Synthetic oligonucleotide
  misc_feature 1..20: note = Target: FXN; (+) strand; PAM type: NRG; PAM sequence: GAG
  source 1..20: mol_type = other DNA
caggagatggaggctgcagt

SEQ ID NO: 17899 - DNA, 20 bp, synthetic construct
  misc_feature 1..20: note = Description of Artificial Sequence: Synthetic oligonucleotide
  misc_feature 1..20: note = Target: FXN; (+) strand; PAM type: NRG; PAM sequence: GAG
  source 1..20: mol_type = other DNA
gatggaggctgcagtgagct

SEQ ID NO: 17900 - DNA, 20 bp, synthetic construct
  misc_feature 1..20: note = Description of Artificial Sequence: Synthetic oligonucleotide
  misc_feature 1..20: note = Target: FXN; (+) strand; PAM type: NRG; PAM sequence: CAG
  source 1..20: mol_type = other DNA
gagatcatgccattgcactc

SEQ ID NO: 17901 - DNA, 20 bp, synthetic construct
  misc_feature 1..20: note = Description of Artificial Sequence: Synthetic oligonucleotide
  misc_feature 1..20: note = Target: FXN; (+) strand; PAM type: NRG; PAM sequence: TGG
  source 1..20: mol_type = other DNA
catgccattgcactccagcc

SEQ ID NO: 17902 - DNA, 20 bp, synthetic construct
  misc_feature 1..20: note = Description of Artificial Sequence: Synthetic oligonucleotide
  misc_feature 1..20: note = Target: FXN; (+) strand; PAM type: NRG; PAM sequence: GGG
  source 1..20: mol_type = other DNA
atgccattgcactccagcct

SEQ ID NO: 17903 - DNA, 20 bp, synthetic construct
  misc_feature 1..20: note = Description of Artificial Sequence: Synthetic oligonucleotide
  misc_feature 1..20: note = Target: FXN; (+) strand; PAM type: NRG; PAM sequence: GAG
  source 1..20: mol_type = other DNA
tgcactccagcctgggtaac

SEQ ID NO: 17904 - DNA, 20 bp, synthetic construct
  misc_feature 1..20: note = Description of Artificial Sequence: Synthetic oligonucleotide
  misc_feature 1..20: note = Target: FXN; (+) strand; PAM type: NRG; PAM sequence: AAG
  source 1..20: mol_type = other DNA
gaaattccatctctaaaaaa

SEQ ID NO: 17905 - DNA, 20 bp, synthetic construct
  misc_feature 1..20: note = Description of Artificial Sequence: Synthetic oligonucleotide
  misc_feature 1..20: note = Target: FXN; (+) strand; PAM type: NRG; PAM sequence: AAG
  source 1..20: mol_type = other DNA
tctaaaaaaaagaaaaaaaa

SEQ ID NO: 17906 - DNA, 20 bp, synthetic construct
  misc_feature 1..20: note = Description of Artificial Sequence: Synthetic oligonucleotide
  misc_feature 1..20: note = Target: FXN; (+) strand; PAM type: NRG; PAM sequence: AGG
  source 1..20: mol_type = other DNA
ctaaaaaaaagaaaaaaaaa

SEQ ID NO: 17907 - DNA, 20 bp, synthetic construct
  misc_feature 1..20: note = Description of Artificial Sequence: Synthetic oligonucleotide
  misc_feature 1..20: note = Target: FXN; (+) strand; PAM type: NRG; PAM sequence: TAG
  source 1..20: mol_type = other DNA
aaaagaaaaaaaaaaggcct

SEQ ID NO: 17908 - DNA, 20 bp, synthetic construct
  misc_feature 1..20: note = Description of Artificial Sequence: Synthetic oligonucleotide
  misc_feature 1..20: note = Target: FXN; (+) strand; PAM type: NRG; PAM sequence: CAG
  source 1..20: mol_type = other DNA
tttgactttccacgtttgtg

SEQ ID NO: 17909 - DNA, 20 bp, synthetic construct
  misc_feature 1..20: note = Description of Artificial Sequence: Synthetic oligonucleotide
  misc_feature 1..20: note = Target: FXN; (+) strand; PAM type: NRG; PAM sequence: TGG
  source 1..20: mol_type = other DNA
ctccatttcattccatctcc

SEQ ID NO: 17910 - DNA, 20 bp, synthetic construct
  misc_feature 1..20: note = Description of Artificial Sequence: Synthetic oligonucleotide
  misc_feature 1..20: note = Target: FXN; (+) strand; PAM type: NRG; PAM sequence: AAG
  source 1..20: mol_type = other DNA
tttcttgtcacatctactaa

SEQ ID NO: 17911 - DNA, 20 bp, synthetic construct
  misc_feature 1..20: note = Description of Artificial Sequence: Synthetic oligonucleotide
  misc_feature 1..20: note = Target: FXN; (+) strand; PAM type: NRG; PAM sequence: AAG
  source 1..20: mol_type = other DNA
tcacatctactaaaagcaac

SEQ ID NO: 17912 - DNA, 20 bp, synthetic construct
  misc_feature 1..20: note = Description of Artificial Sequence: Synthetic oligonucleotide
  misc_feature 1..20: note = Target: FXN; (+) strand; PAM type: NRG; PAM sequence: AAG
  source 1..20: mol_type = other DNA
catctactaaaagcaacaag

SEQ ID NO: 17913 - DNA, 20 bp, synthetic construct
  misc_feature 1..20: note = Description of Artificial Sequence: Synthetic oligonucleotide
  misc_feature 1..20: note = Target: FXN; (+) strand; PAM type: NRG; PAM sequence: CGG
  source 1..20: mol_type = other DNA
taaaagcaacaagaagccac

SEQ ID NO: 17914 - DNA, 20 bp, synthetic construct
  misc_feature 1..20: note = Description of Artificial Sequence: Synthetic oligonucleotide
  misc_feature 1..20: note = Target: FXN; (+) strand; PAM type: NRG; PAM sequence: CAG
  source 1..20: mol_type = other DNA
aacaagaagccaccggtatt

SEQ ID NO: 17915 - DNA, 20 bp, synthetic construct
  misc_feature 1..20: note = Description of Artificial Sequence: Synthetic oligonucleotide
  misc_feature 1..20: note = Target: FXN; (+) strand; PAM type: NRG; PAM sequence: AGG
  source 1..20: mol_type = other DNA
acaagaagccaccggtattc

SEQ ID NO: 17916 - DNA, 20 bp, synthetic construct
  misc_feature 1..20: note = Description of Artificial Sequence: Synthetic oligonucleotide
  misc_feature 1..20: note = Target: FXN; (+) strand; PAM type: NRG; PAM sequence: CAG
  source 1..20: mol_type = other DNA
aggaacattctacctgtccc

SEQ ID NO: 17917 - DNA, 20 bp, synthetic construct
  misc_feature 1..20: note = Description of Artificial Sequence: Synthetic oligonucleotide
  misc_feature 1..20: note = Target: FXN; (+) strand; PAM type: NRG; PAM sequence: GAG
  source 1..20: mol_type = other DNA
gaacattctacctgtcccca

SEQ ID NO: 17918 - DNA, 20 bp, synthetic construct
  misc_feature 1..20: note = Description of Artificial Sequence: Synthetic oligonucleotide
  misc_feature 1..20: note = Target: FXN; (+) strand; PAM type: NRG; PAM sequence: CAG
  source 1..20: mol_type = other DNA
tgtccccagagctatatgct

SEQ ID NO: 17919 - DNA, 20 bp, synthetic construct
  misc_feature 1..20: note = Description of Artificial Sequence: Synthetic oligonucleotide
  misc_feature 1..20: note = Target: FXN; (+) strand; PAM type: NRG; PAM sequence: TAG
  source 1..20: mol_type = other DNA
ccccagagctatatgctcag

SEQ ID NO: 17920 - DNA, 20 bp, synthetic construct
  misc_feature 1..20: note = Description of Artificial Sequence: Synthetic oligonucleotide
  misc_feature 1..20: note = Target: FXN; (+) strand; PAM type: NRG; PAM sequence: AGG
  source 1..20: mol_type = other DNA
cccagagctatatgctcagt

SEQ ID NO: 17921 - DNA, 20 bp, synthetic construct
  misc_feature 1..20: note = Description of Artificial Sequence: Synthetic oligonucleotide
  misc_feature 1..20: note = Target: FXN; (+) strand; PAM type: NRG; PAM sequence: CAG
  source 1..20: mol_type = other DNA
ctatatgctcagtaggcata

SEQ ID NO: 17922 - DNA, 20 bp, synthetic construct
  misc_feature 1..20: note = Description of Artificial Sequence: Synthetic oligonucleotide
  misc_feature 1..20: note = Target: FXN; (+) strand; PAM type: NRG; PAM sequence: TGG
  source 1..20: mol_type = other DNA
atgctcagtaggcatacagt

SEQ ID NO: 17923 - DNA, 20 bp, synthetic construct
  misc_feature 1..20: note = Description of Artificial Sequence: Synthetic oligonucleotide
  misc_feature 1..20: note = Target: FXN; (+) strand; PAM type: NRG; PAM sequence: CAG
  source 1..20: mol_type = other DNA
taggcatacagttggccctc

SEQ ID NO: 17924 - DNA, 20 bp, synthetic construct
  misc_feature 1..20: note = Description of Artificial Sequence: Synthetic oligonucleotide
  misc_feature 1..20: note = Target: FXN; (+) strand; PAM type: NRG; PAM sequence: AGG
  source 1..20: mol_type = other DNA
aggcatacagttggccctcc

SEQ ID NO: 17925 - DNA, 20 bp, synthetic construct
  misc_feature 1..20: note = Description of Artificial Sequence: Synthetic oligonucleotide
  misc_feature 1..20: note = Target: FXN; (+) strand; PAM type: NRG; PAM sequence: GAG
  source 1..20: mol_type = other DNA
gttggccctccaggttatct

SEQ ID NO: 17926 - DNA, 20 bp, synthetic construct
  misc_feature 1..20: note = Description of Artificial Sequence: Synthetic oligonucleotide
  misc_feature 1..20: note = Target: FXN; (+) strand; PAM type: NRG; PAM sequence: CAG
  source 1..20: mol_type = other DNA
cctccaggttatctgagact

SEQ ID NO: 17927 - DNA, 20 bp, synthetic construct
  misc_feature 1..20: note = Description of Artificial Sequence: Synthetic oligonucleotide
  misc_feature 1..20: note = Target: FXN; (+) strand; PAM type: NRG; PAM sequence: CAG
  source 1..20: mol_type = other DNA
ttatctgagactcagatttc

SEQ ID NO: 17928 - DNA, 20 bp, synthetic construct
  misc_feature 1..20: note = Description of Artificial Sequence: Synthetic oligonucleotide
  misc_feature 1..20: note = Target: FXN; (+) strand; PAM type: NRG; PAM sequence: GAG
  source 1..20: mol_type = other DNA
atctgagactcagatttcca

SEQ ID NO: 17929 - DNA, 20 bp, synthetic construct
  misc_feature 1..20: note = Description of Artificial Sequence: Synthetic oligonucleotide
  misc_feature 1..20: note = Target: FXN; (+) strand; PAM type: NRG; PAM sequence: AGG
  source 1..20: mol_type = other DNA
tctgagactcagatttccag

SEQ ID NO: 17930 - DNA, 20 bp, synthetic construct
  misc_feature 1..20: note = Description of Artificial Sequence: Synthetic oligonucleotide
  misc_feature 1..20: note = Target: FXN; (+) strand; PAM type: NRG; PAM sequence: GGG
  source 1..20: mol_type = other DNA
ctgagactcagatttccaga

SEQ ID NO: 17931 - DNA, 20 bp, synthetic construct
  misc_feature 1..20: note = Description of Artificial Sequence: Synthetic oligonucleotide
  misc_feature 1..20: note = Target: FXN; (+) strand; PAM type: NRG; PAM sequence: TGG
  source 1..20: mol_type = other DNA
gatttccagagggctttgca

SEQ ID NO: 17932 - DNA, 20 bp, synthetic construct
  misc_feature 1..20: note = Description of Artificial Sequence: Synthetic oligonucleotide
  misc_feature 1..20: note = Target: FXN; (+) strand; PAM type: NRG; PAM sequence: AAG
  source 1..20: mol_type = other DNA
gagggctttgcatggctcac

SEQ ID NO: 17933 - DNA, 20 bp, synthetic construct
  misc_feature 1..20: note = Description of Artificial Sequence: Synthetic oligonucleotide
  misc_feature 1..20: note = Target: FXN; (+) strand; PAM type: NRG; PAM sequence: AGG
  source 1..20: mol_type = other DNA
agggctttgcatggctcaca

SEQ ID NO: 17934 - DNA, 20 bp, synthetic construct
  misc_feature 1..20: note = Description of Artificial Sequence: Synthetic oligonucleotide
  misc_feature 1..20: note = Target: FXN; (+) strand; PAM type: NRG; PAM sequence: AAG
  source 1..20: mol_type = other DNA
tgcatggctcacaaggtctg

SEQ ID NO: 17935 - DNA, 20 bp, synthetic construct
  misc_feature 1..20: note = Description of Artificial Sequence: Synthetic oligonucleotide
  misc_feature 1..20: note = Target: FXN; (+) strand; PAM type: NRG; PAM sequence: GAG
  source 1..20: mol_type = other DNA
acaaggtctgaagaacctct

SEQ ID NO: 17936 - DNA, 20 bp, synthetic construct
  misc_feature 1..20: note = Description of Artificial Sequence: Synthetic oligonucleotide
  misc_feature 1..20: note = Target: FXN; (+) strand; PAM type: NRG; PAM sequence: CGG
  source 1..20: mol_type = other DNA
acctctgagcctcccgcctg

SEQ ID NO: 17937 - DNA, 20 bp, synthetic construct
  misc_feature 1..20: note = Description of Artificial Sequence: Synthetic oligonucleotide
  misc_feature 1..20: note = Target: FXN; (+) strand; PAM type: NRG; PAM sequence: CAG
  source 1..20: mol_type = other DNA
tctgttcattgactttgcca

SEQ ID NO: 17938 - DNA, 20 bp, synthetic construct
  misc_feature 1..20: note = Description of Artificial Sequence: Synthetic oligonucleotide
  misc_feature 1..20: note = Target: FXN; (+) strand; PAM type: NRG; PAM sequence: AAG
  source 1..20: mol_type = other DNA
ttgactttgccacagtctca

SEQ ID NO: 17939 - DNA, 20 bp, synthetic construct
  misc_feature 1..20: note = Description of Artificial Sequence: Synthetic oligonucleotide
  misc_feature 1..20: note = Target: FXN; (+) strand; PAM type: NRG; PAM sequence: GAG
  source 1..20: mol_type = other DNA
gactttgccacagtctcaaa

SEQ ID NO: 17940 - DNA, 20 bp, synthetic construct
  misc_feature 1..20: note = Description of Artificial Sequence: Synthetic oligonucleotide
  misc_feature 1..20: note = Target: FXN; (+) strand; PAM type: NRG; PAM sequence: AGG
  source 1..20: mol_type = other DNA
actttgccacagtctcaaag

SEQ ID NO: 17941 - DNA, 20 bp, synthetic construct
  misc_feature 1..20: note = Description of Artificial Sequence: Synthetic oligonucleotide
  misc_feature 1..20: note = Target: FXN; (+) strand; PAM type: NRG; PAM sequence: GAG
  source 1..20: mol_type = other DNA
gcactgcatgctgcatgttt

SEQ ID NO: 17942 - DNA, 20 bp, synthetic construct
  misc_feature 1..20: note = Description of Artificial Sequence: Synthetic oligonucleotide
  misc_feature 1..20: note = Target: FXN; (+) strand; PAM type: NRG; PAM sequence: AGG
  source 1..20: mol_type = other DNA
cactgcatgctgcatgtttg

SEQ ID NO: 17943 - DNA, 20 bp, synthetic construct
  misc_feature 1..20: note = Description of Artificial Sequence: Synthetic oligonucleotide
  misc_feature 1..20: note = Target: FXN; (+) strand; PAM type: NRG; PAM sequence: TGG
  source 1..20: mol_type = other DNA
catgtttgaggtttttgctt

SEQ ID NO: 17944 - DNA, 20 bp, synthetic construct
  misc_feature 1..20: note = Description of Artificial Sequence: Synthetic oligonucleotide
  misc_feature 1..20: note = Target: FXN; (+) strand; PAM type: NRG; PAM sequence: TGG
  source 1..20: mol_type = other DNA
gtttgaggtttttgctttgg

SEQ ID NO: 17945 - DNA, 20 bp, synthetic construct
  misc_feature 1..20: note = Description of Artificial Sequence: Synthetic oligonucleotide
  misc_feature 1..20: note = Target: FXN; (+) strand; PAM type: NRG; PAM sequence: CAG
  source 1..20: mol_type = other DNA
gctttggtggcatccatttc

SEQ ID NO: 17946 - DNA, 20 bp, synthetic construct
  misc_feature 1..20: note = Description of Artificial Sequence: Synthetic oligonucleotide
  misc_feature 1..20: note = Target: FXN; (+) strand; PAM type: NRG; PAM sequence: CGG
  source 1..20: mol_type = other DNA
gtggcatccatttccagcct

SEQ ID NO: 17947 - DNA, 20 bp, synthetic construct
  misc_feature 1..20: note = Description of Artificial Sequence: Synthetic oligonucleotide
  misc_feature 1..20: note = Target: FXN; (+) strand; PAM type: NRG; PAM sequence: CGG
  source 1..20: mol_type = other DNA
ccatttccagcctcggcttc

SEQ ID NO: 17948 - DNA, 20 bp, synthetic construct
  misc_feature 1..20: note = Description of Artificial Sequence: Synthetic oligonucleotide
  misc_feature 1..20: note = Target: FXN; (+) strand; PAM type: NRG; PAM sequence: CAG
  source 1..20: mol_type = other DNA
ggcttccggcattcctcccc

SEQ ID NO: 17949 - DNA, 20 bp, synthetic construct
  misc_feature 1..20: note = Description of Artificial Sequence: Synthetic oligonucleotide
  misc_feature 1..20: note = Target: FXN; (+) strand; PAM type: NRG; PAM sequence: CAG
  source 1..20: mol_type = other DNA
ttccggcattcctcccccag

SEQ ID NO: 17950 - DNA, 20 bp, synthetic construct
  misc_feature 1..20: note = Description of Artificial Sequence: Synthetic oligonucleotide
  misc_feature 1..20: note = Target: FXN; (+) strand; PAM type: NRG; PAM sequence: TGG
  source 1..20: mol_type = other DNA
tgctttccccttactccttc

SEQ ID NO: 17951 - DNA, 20 bp, synthetic construct
  misc_feature 1..20: note = Description of Artificial Sequence: Synthetic oligonucleotide
  misc_feature 1..20: note = Target: FXN; (+) strand; PAM type: NRG; PAM sequence: CAG
  source 1..20: mol_type = other DNA
tttccccttactccttctgg

SEQ ID NO: 17952 - DNA, 20 bp, synthetic construct
  misc_feature 1..20: note = Description of Artificial Sequence: Synthetic oligonucleotide
  misc_feature 1..20: note = Target: FXN; (+) strand; PAM type: NRG; PAM sequence: TGG
  source 1..20: mol_type = other DNA
cttactccttctggcagttc

SEQ ID NO: 17953 - DNA, 20 bp, synthetic construct
  misc_feature 1..20: note = Description of Artificial Sequence: Synthetic oligonucleotide
  misc_feature 1..20: note = Target: FXN; (+) strand; PAM type: NRG; PAM sequence: GGG
  source 1..20: mol_type = other DNA
ttactccttctggcagttct

SEQ ID NO: 17954 - DNA, 20 bp, synthetic construct
  misc_feature 1..20: note = Description of Artificial Sequence: Synthetic oligonucleotide
  misc_feature 1..20: note = Target: FXN; (+) strand; PAM type: NRG; PAM sequence: GAG
  source 1..20: mol_type = other DNA
actccttctggcagttctgg

SEQ ID NO: 17955 - DNA, 20 bp, synthetic construct
  misc_feature 1..20: note = Description of Artificial Sequence: Synthetic oligonucleotide
  misc_feature 1..20: note = Target: FXN; (+) strand; PAM type: NRG; PAM sequence: AGG
  source 1..20: mol_type = other DNA
ctccttctggcagttctggg

SEQ ID NO: 17956 - DNA, 20 bp, synthetic construct
  misc_feature 1..20: note = Description of Artificial Sequence: Synthetic oligonucleotide
  misc_feature 1..20: note = Target: FXN; (+) strand; PAM type: NRG; PAM sequence: TAG
  source 1..20: mol_type = other DNA
ggcagttctgggaggttgca

SEQ ID NO: 17957 - DNA, 20 bp, synthetic construct
  misc_feature 1..20: note = Description of Artificial Sequence: Synthetic oligonucleotide
  misc_feature 1..20: note = Target: FXN; (+) strand; PAM type: NRG; PAM sequence: AGG
  source 1..20: mol_type = other DNA
gcagttctgggaggttgcat

SEQ ID NO: 17958 - DNA, 20 bp, synthetic construct
  misc_feature 1..20: note = Description of Artificial Sequence: Synthetic oligonucleotide
  misc_feature 1..20: note = Target: FXN; (+) strand; PAM type: NRG; PAM sequence: GGG
  source 1..20: mol_type = other DNA
cagttctgggaggttgcata

SEQ ID NO: 17959 - DNA, 20 bp, synthetic construct
  misc_feature 1..20: note = Description of Artificial Sequence: Synthetic oligonucleotide
  misc_feature 1..20: note = Target: FXN; (+) strand; PAM type: NRG; PAM sequence: CAG
  source 1..20: mol_type = other DNA
gaggttgcatagggcccttg

SEQ ID NO: 17960 - DNA, 20 bp, synthetic construct
  misc_feature 1..20: note = Description of Artificial Sequence: Synthetic oligonucleotide
  misc_feature 1..20: note = Target: FXN; (+) strand; PAM type: NRG; PAM sequence: AGG
  source 1..20: mol_type = other DNA
aggttgcatagggcccttgc

SEQ ID NO: 17961 - DNA, 20 bp, synthetic construct
  misc_feature 1..20: note = Description of Artificial Sequence: Synthetic oligonucleotide
  misc_feature 1..20: note = Target: FXN; (+) strand; PAM type: NRG; PAM sequence: AAG
  source 1..20: mol_type = other DNA
gggcccttgcaggatgcccc

SEQ ID NO: 17962 - DNA, 20 bp, synthetic construct
  misc_feature 1..20: note = Description of Artificial Sequence: Synthetic oligonucleotide
  misc_feature 1..20: note = Target: FXN; (+) strand; PAM type: NRG; PAM sequence: CAG
  source 1..20: mol_type = other DNA
cttgcaggatgccccaagtc

SEQ ID NO: 17963 - DNA, 20 bp, synthetic construct
  misc_feature 1..20: note = Description of Artificial Sequence: Synthetic oligonucleotide
  misc_feature 1..20: note = Target: FXN; (+) strand; PAM type: NRG; PAM sequence: TGG
  source 1..20: mol_type = other DNA
gccccaagtccagctgcctc

SEQ ID NO: 17964 - DNA, 20 bp, synthetic construct
  misc_feature 1..20: note = Description of Artificial Sequence: Synthetic oligonucleotide
  misc_feature 1..20: note = Target: FXN; (+) strand; PAM type: NRG; PAM sequence: TGG
  source 1..20: mol_type = other DNA
gtccagctgcctctggcctc

SEQ ID NO: 17965 - DNA, 20 bp, synthetic construct
  misc_feature 1..20: note = Description of Artificial Sequence: Synthetic oligonucleotide
  misc_feature 1..20: note = Target: FXN; (+) strand; PAM type: NRG; PAM sequence: GGG
  source 1..20: mol_type = other DNA
tccagctgcctctggcctct

SEQ ID NO: 17966 - DNA, 20 bp, synthetic construct
  misc_feature 1..20: note = Description of Artificial Sequence: Synthetic oligonucleotide
  misc_feature 1..20: note = Target: FXN; (+) strand; PAM type: NRG; PAM sequence: AAG
  source 1..20: mol_type = other DNA
agctgcctctggcctctggg

SEQ ID NO: 17967 - DNA, 20 bp, synthetic construct
  misc_feature 1..20: note = Description of Artificial Sequence: Synthetic oligonucleotide
  misc_feature 1..20: note = Target: FXN; (+) strand; PAM type: NRG; PAM sequence: TAG
  source 1..20: mol_type = other DNA
cacccttgacctgccatgtg

SEQ ID NO: 17968 - DNA, 20 bp, synthetic construct
  misc_feature 1..20: note = Description of Artificial Sequence: Synthetic oligonucleotide
  misc_feature 1..20: note = Target: FXN; (+) strand; PAM type: NRG; PAM sequence: AGG
  source 1..20: mol_type = other DNA
acccttgacctgccatgtgt

SEQ ID NO: 17969 - DNA, 20 bp, synthetic construct
  misc_feature 1..20: note = Description of Artificial Sequence: Synthetic oligonucleotide
  misc_feature 1..20: note = Target: FXN; (+) strand; PAM type: NRG; PAM sequence: AAG
  source 1..20: mol_type = other DNA
cttgacctgccatgtgtagg

SEQ ID NO: 17970 - DNA, 20 bp, synthetic construct
  misc_feature 1..20: note = Description of Artificial Sequence: Synthetic oligonucleotide
  misc_feature 1..20: note = Target: FXN; (+) strand; PAM type: NRG; PAM sequence: CAG
  source 1..20: mol_type = other DNA
acctgccatgtgtaggaaga

SEQ ID NO: 17971 - DNA, 20 bp, synthetic construct
  misc_feature 1..20: note = Description of Artificial Sequence: Synthetic oligonucleotide
  misc_feature 1..20: note = Target: FXN; (+) strand; PAM type: NRG; PAM sequence: CAG
  source 1..20: mol_type = other DNA
ggaagacagcccgcttctgc

SEQ ID NO: 17972 - DNA, 20 bp, synthetic construct
  misc_feature 1..20: note = Description of Artificial Sequence: Synthetic oligonucleotide
  misc_feature 1..20: note = Target: FXN; (+) strand; PAM type: NRG; PAM sequence: AGG
  source 1..20: mol_type = other DNA
gaagacagcccgcttctgcc

SEQ ID NO: 17973 - DNA, 20 bp, synthetic construct
  misc_feature 1..20: note = Description of Artificial Sequence: Synthetic oligonucleotide
  misc_feature 1..20: note = Target: FXN; (+) strand; PAM type: NRG; PAM sequence: GGG
  source 1..20: mol_type = other DNA
aagacagcccgcttctgcca

SEQ ID NO: 17974 - DNA, 20 bp, synthetic construct
  misc_feature 1..20: note = Description of Artificial Sequence: Synthetic oligonucleotide
  misc_feature 1..20: note = Target: FXN; (+) strand; PAM type: NRG; PAM sequence: CGG
  source 1..20: mol_type = other DNA
ctgccagggcccaactctgc

SEQ ID NO: 17975 - DNA, 20 bp, synthetic construct
  misc_feature 1..20: note = Description of Artificial Sequence: Synthetic oligonucleotide
  misc_feature 1..20: note = Target: FXN; (+) strand; PAM type: NRG; PAM sequence: CAG
  source 1..20: mol_type = other DNA
ccagggcccaactctgccgg

SEQ ID NO: 17976 - DNA, 20 bp, synthetic construct
  misc_feature 1..20: note = Description of Artificial Sequence: Synthetic oligonucleotide
  misc_feature 1..20: note = Target: FXN; (+) strand; PAM type: NRG; PAM sequence: AGG
  source 1..20: mol_type = other DNA
cagggcccaactctgccggc

SEQ ID NO: 17977 - DNA, 20 bp, synthetic construct
  misc_feature 1..20: note = Description of Artificial Sequence: Synthetic oligonucleotide
  misc_feature 1..20: note = Target: FXN; (+) strand; PAM type: NRG; PAM sequence: TAG
  source 1..20: mol_type = other DNA
ggcccaactctgccggcagg

SEQ ID NO: 17978 - DNA, 20 bp, synthetic construct
  misc_feature 1..20: note = Description of Artificial Sequence: Synthetic oligonucleotide
  misc_feature 1..20: note = Target: FXN; (+) strand; PAM type: NRG; PAM sequence: TGG
  source 1..20: mol_type = other DNA
accttccaacctcttcactt

SEQ ID NO: 17979 - DNA, 20 bp, synthetic construct
  misc_feature 1..20: note = Description of Artificial Sequence: Synthetic oligonucleotide
  misc_feature 1..20: note = Target: FXN; (+) strand; PAM type: NRG; PAM sequence: CAG
  source 1..20: mol_type = other DNA
actttggactttataactgt

SEQ ID NO: 17980 - DNA, 20 bp, synthetic construct
  misc_feature 1..20: note = Description of Artificial Sequence: Synthetic oligonucleotide
  misc_feature 1..20: note = Target: FXN; (+) strand; PAM type: NRG; PAM sequence: AGG
  source 1..20: mol_type = other DNA
ctttggactttataactgtc

SEQ ID NO: 17981 - DNA, 20 bp, synthetic construct
  misc_feature 1..20: note = Description of Artificial Sequence: Synthetic oligonucleotide
  misc_feature 1..20: note = Target: FXN; (+) strand; PAM type: NRG; PAM sequence: AAG
  source 1..20: mol_type = other DNA
ctttataactgtcaggtata

SEQ ID NO: 17982 - DNA, 20 bp, synthetic construct
  misc_feature 1..20: note = Description of Artificial Sequence: Synthetic oligonucleotide
  misc_feature 1..20: note = Target: FXN; (+) strand; PAM type: NRG; PAM sequence: CGG
  source 1..20: mol_type = other DNA
ataactgtcaggtataaagt

SEQ ID NO: 17983 - DNA, 20 bp, synthetic construct
  misc_feature 1..20: note = Description of Artificial Sequence: Synthetic oligonucleotide
  misc_feature 1..20: note = Target: FXN; (+) strand; PAM type: NRG; PAM sequence: AAG
  source 1..20: mol_type = other DNA
ttacgtttctcaaattcttc

SEQ ID NO: 17984 - DNA, 20 bp, synthetic construct
  misc_feature 1..20: note = Description of Artificial Sequence: Synthetic oligonucleotide
  misc_feature 1..20: note = Target: FXN; (+) strand; PAM type: NRG; PAM sequence: CAG
  source 1..20: mol_type = other DNA
attcttcaagacacgtcaac

SEQ ID NO: 17985 - DNA, 20 bp, synthetic construct
  misc_feature 1..20: note = Description of Artificial Sequence: Synthetic oligonucleotide
  misc_feature 1..20: note = Target: FXN; (+) strand; PAM type: NRG; PAM sequence: CAG
  source 1..20: mol_type = other DNA
cctctcctacgcattctctc

SEQ ID NO: 17986 - DNA, 20 bp, synthetic construct
  misc_feature 1..20: note = Description of Artificial Sequence: Synthetic oligonucleotide
  misc_feature 1..20: note = Target: FXN; (+) strand; PAM type: NRG; PAM sequence: CAG
  source 1..20: mol_type = other DNA
cctacgcattctctccagct

SEQ ID NO: 17987 - DNA, 20 bp, synthetic construct
  misc_feature 1..20: note = Description of Artificial Sequence: Synthetic oligonucleotide
  misc_feature 1..20: note = Target: FXN; (+) strand; PAM type: NRG; PAM sequence: CAG
  source 1..20: mol_type = other DNA
caaaacacaccctttctctc

SEQ ID NO: 17988 - DNA, 20 bp, synthetic construct
  misc_feature 1..20: note = Description of Artificial Sequence: Synthetic oligonucleotide
  misc_feature 1..20: note = Target: FXN; (+) strand; PAM type: NRG; PAM sequence: CAG
  source 1..20: mol_type = other DNA
actctcaaaacacaccctat

SEQ ID NO: 17989 - DNA, 20 bp, synthetic construct
  misc_feature 1..20: note = Description of Artificial Sequence: Synthetic oligonucleotide
  misc_feature 1..20: note = Target: FXN; (+) strand; PAM type: NRG; PAM sequence: AGG
  source 1..20: mol_type = other DNA
ctctcaaaacacaccctatc

SEQ ID NO: 17990 - DNA, 20 bp, synthetic construct
  misc_feature 1..20: note = Description of Artificial Sequence: Synthetic oligonucleotide
  misc_feature 1..20: note = Target: FXN; (+) strand; PAM type: NRG; PAM sequence: AAG
  source 1..20: mol_type = other DNA
caggccaaccactcttttta

SEQ ID NO: 17991 - DNA, 20 bp, synthetic construct
  misc_feature 1..20: note = Description of Artificial Sequence: Synthetic oligonucleotide
  misc_feature 1..20: note = Target: FXN; (+) strand; PAM type: NRG; PAM sequence: AGG
  source 1..20: mol_type = other DNA
aggccaaccactctttttaa

SEQ ID NO: 17992 - DNA, 20 bp, synthetic construct
  misc_feature 1..20: note = Description of Artificial Sequence: Synthetic oligonucleotide
  misc_feature 1..20: note = Target: FXN; (+) strand; PAM type: NRG; PAM sequence: CAG
  source 1..20: mol_type = other DNA
caaccactctttttaaagga

SEQ ID NO: 17993 - DNA, 20 bp, synthetic construct
  misc_feature 1..20: note = Description of Artificial Sequence: Synthetic oligonucleotide
  misc_feature 1..20: note = Target: FXN; (+) strand; PAM type: NRG; PAM sequence: CAG
  source 1..20: mol_type = other DNA
aggacagctcctcaccaatc

SEQ ID NO: 17994 - DNA, 20 bp, synthetic construct
  misc_feature 1..20: note = Description of Artificial Sequence: Synthetic oligonucleotide
  misc_feature 1..20: note = Target: FXN; (+) strand; PAM type: NRG; PAM sequence: CAG
  source 1..20: mol_type = other DNA
cagctcctcaccaatccagt

SEQ ID NO: 17995 - DNA, 20 bp, synthetic construct
  misc_feature 1..20: note = Description of Artificial Sequence: Synthetic oligonucleotide
  misc_feature 1..20: note = Target: FXN; (+) strand; PAM type: NRG; PAM sequence: AGG
  source 1..20: mol_type = other DNA
agctcctcaccaatccagtc

SEQ ID NO: 17996 - DNA, 20 bp, synthetic construct
  misc_feature 1..20: note = Description of Artificial Sequence: Synthetic oligonucleotide
  misc_feature 1..20: note = Target: FXN; (+) strand; PAM type: NRG; PAM sequence: TAG
  source 1..20: mol_type = other DNA
tcctcaccaatccagtcagg

SEQ ID NO: 17997 - DNA, 20 bp, synthetic construct
  misc_feature 1..20: note = Description of Artificial Sequence: Synthetic oligonucleotide
  misc_feature 1..20: note = Target: FXN; (+) strand; PAM type: NRG; PAM sequence: TGG
  source 1..20: mol_type = other DNA
gccttccccacattgtatcc

SEQ ID NO: 17998 - DNA, 20 bp, synthetic construct
  misc_feature 1..20: note = Description of Artificial Sequence: Synthetic oligonucleotide
  misc_feature 1..20: note = Target: FXN; (+) strand; PAM type: NRG; PAM sequence: AAG
  source 1..20: mol_type = other DNA
ttccccacattgtatcctgg

SEQ ID NO: 17999 - DNA, 20 bp, synthetic construct
  misc_feature 1..20: note = Description of Artificial Sequence: Synthetic oligonucleotide
  misc_feature 1..20: note = Target: FXN; (+) strand; PAM type: NRG; PAM sequence: TGG
  source 1..20: mol_type = other DNA
cccacattgtatcctggaag

SEQ ID NO: 18000 - DNA, 20 bp, synthetic construct
  misc_feature 1..20: note = Description of Artificial Sequence: Synthetic oligonucleotide
  misc_feature 1..20: note = Target: FXN; (+) strand; PAM type: NRG; PAM sequence: GGG
  source 1..20: mol_type = other DNA
ccacattgtatcctggaagt

SEQ ID NO: 18001 - DNA, 20 bp, synthetic construct
  misc_feature 1..20: note = Description of Artificial Sequence: Synthetic oligonucleotide
  misc_feature 1..20: note = Target: FXN; (+) strand; PAM type: NRG; PAM sequence: TGG
  source 1..20: mol_type = other DNA
tgtatcctggaagtgggtga

SEQ ID NO: 18002 - DNA, 20 bp, synthetic construct
  misc_feature 1..20: note = Description of Artificial Sequence: Synthetic oligonucleotide
  misc_feature 1..20: note = Target: FXN; (+) strand; PAM type: NRG; PAM sequence: TGG
  source 1..20: mol_type = other DNA
cctggaagtgggtgatggac

SEQ ID NO: 18003 - DNA, 20 bp, synthetic construct
  misc_feature 1..20: note = Description of Artificial Sequence: Synthetic oligonucleotide
  misc_feature 1..20: note = Target: FXN; (+) strand; PAM type: NRG; PAM sequence: GGG
  source 1..20: mol_type = other DNA
ctggaagtgggtgatggact

SEQ ID NO: 18004 - DNA, 20 bp, synthetic construct
  misc_feature 1..20: note = Description of Artificial Sequence: Synthetic oligonucleotide
  misc_feature 1..20: note = Target: FXN; (+) strand; PAM type: NRG; PAM sequence: TGG
  source 1..20: mol_type = other DNA
gaagtgggtgatggactggg

SEQ ID NO: 18005 - DNA, 20 bp, synthetic construct
  misc_feature 1..20: note = Description of Artificial Sequence: Synthetic oligonucleotide
  misc_feature 1..20: note = Target: FXN; (+) strand; PAM type: NRG; PAM sequence: GGG
  source 1..20: mol_type = other DNA
aagtgggtgatggactgggt

SEQ ID NO: 18006 - DNA, 20 bp, synthetic construct
  misc_feature 1..20: note = Description of Artificial Sequence: Synthetic oligonucleotide
  misc_feature 1..20: note = Target: FXN; (+) strand; PAM type: NRG; PAM sequence: GGG
  source 1..20: mol_type = other DNA
agtgggtgatggactgggtg

SEQ ID NO: 18007 - DNA, 20 bp, synthetic construct
  misc_feature 1..20: note = Description of Artificial Sequence: Synthetic oligonucleotide
  misc_feature 1..20: note = Target: FXN; (+) strand; PAM type: NRG; PAM sequence: AAG
  source 1..20: mol_type = other DNA
gggtgatggactgggtgggg

SEQ ID NO: 18008 - DNA, 20 bp, synthetic construct
  misc_feature 1..20: note = Description of Artificial Sequence: Synthetic oligonucleotide
  misc_feature 1..20: note = Target: FXN; (+) strand; PAM type: NRG; PAM sequence: GAG
  source 1..20: mol_type = other DNA
gtgatggactgggtggggaa

SEQ ID NO: 18009 - DNA, 20 bp, synthetic construct
  misc_feature 1..20: note = Description of Artificial Sequence: Synthetic oligonucleotide
  misc_feature 1..20: note = Target: FXN; (+) strand; PAM type: NRG; PAM sequence: AGG
  source 1..20: mol_type = other DNA
tgatggactgggtggggaag

SEQ ID NO: 18010 - DNA, 20 bp, synthetic construct
  misc_feature 1..20: note = Description of Artificial Sequence: Synthetic oligonucleotide
  misc_feature 1..20: note = Target: FXN; (+) strand; PAM type: NRG; PAM sequence: GGG
  source 1..20: mol_type = other DNA
gatggactgggtggggaaga

SEQ ID NO: 18011 - DNA, 20 bp, synthetic construct
  misc_feature 1..20: note = Description of Artificial Sequence: Synthetic oligonucleotide
  misc_feature 1..20: note = Target: FXN; (+) strand; PAM type: NRG; PAM sequence: TGG
  source 1..20: mol_type = other DNA
gggtggggaagagggtcata

SEQ ID NO: 18012 - DNA, 20 bp, synthetic construct
  misc_feature 1..20: note = Description of Artificial Sequence: Synthetic oligonucleotide
  misc_feature 1..20: note = Target: FXN; (+) strand; PAM type: NRG; PAM sequence: CAG
  source 1..20: mol_type = other DNA
tggcaaatctgtatgtctta

SEQ ID NO: 18013 - DNA, 20 bp, synthetic construct
  misc_feature 1..20: note = Description of Artificial Sequence: Synthetic oligonucleotide
  misc_feature 1..20: note = Target: FXN; (+) strand; PAM type: NRG; PAM sequence: TAG
  source 1..20: mol_type = other DNA
tatgtcttacagtaattgtc

SEQ ID NO: 18014 - DNA, 20 bp, synthetic construct
  misc_feature 1..20: note = Description of Artificial Sequence: Synthetic oligonucleotide
  misc_feature 1..20: note = Target: FXN; (+) strand; PAM type: NRG; PAM sequence: CAG
  source 1..20: mol_type = other DNA
gtcttacagtaattgtctag

SEQ ID NO: 18015 - DNA, 20 bp, synthetic construct
  misc_feature 1..20: note = Description of Artificial Sequence: Synthetic oligonucleotide
  misc_feature 1..20: note = Target: FXN; (+) strand; PAM type: NRG; PAM sequence: TGG
  source 1..20: mol_type = other DNA
agtaattgtctagcagcccc

SEQ ID NO: 18016 - DNA, 20 bp, synthetic construct
  misc_feature 1..20: note = Description of Artificial Sequence: Synthetic oligonucleotide
  misc_feature 1..20: note = Target: FXN; (+) strand; PAM type: NRG; PAM sequence: TAG
  source 1..20: mol_type = other DNA
cagcccctggtgtcttactt

SEQ ID NO: 18017 - DNA, 20 bp, synthetic construct
  misc_feature 1..20: note = Description of Artificial Sequence: Synthetic oligonucleotide
  misc_feature 1..20: note = Target: FXN; (+) strand; PAM type: NRG; PAM sequence: AGG
  source 1..20: mol_type = other DNA
agcccctggtgtcttacttt

SEQ ID NO: 18018 - DNA, 20 bp, synthetic construct
  misc_feature 1..20: note = Description of Artificial Sequence: Synthetic oligonucleotide
  misc_feature 1..20: note = Target: FXN; (+) strand; PAM type: NRG; PAM sequence: TGG
  source 1..20: mol_type = other DNA
gtgtcttactttaggccccc

SEQ ID NO: 18019 - DNA, 20 bp, synthetic construct
  misc_feature 1..20: note = Description of Artificial Sequence: Synthetic oligonucleotide
  misc_feature 1..20: note = Target: FXN; (+) strand; PAM type: NRG; PAM sequence: CAG
  source 1..20: mol_type = other DNA
ttaggccccctggaaacttt

SEQ ID NO: 18020 - DNA, 20 bp, synthetic construct
  misc_feature 1..20: note = Description of Artificial Sequence: Synthetic oligonucleotide
  misc_feature 1..20: note = Target: FXN; (+) strand; PAM type: NRG; PAM sequence: TAG
  source 1..20: mol_type = other DNA
gccccctggaaactttcaga

SEQ ID NO: 18021 - DNA, 20 bp, synthetic construct
  misc_feature 1..20: note = Description of Artificial Sequence: Synthetic oligonucleotide
  misc_feature 1..20: note = Target: FXN; (+) strand; PAM type: NRG; PAM sequence: TGG
  source 1..20: mol_type = other DNA
ccctggaaactttcagatag

SEQ ID NO: 18022 - DNA, 20 bp, synthetic construct
  misc_feature 1..20: note = Description of Artificial Sequence: Synthetic oligonucleotide
  misc_feature 1..20: note = Target: FXN; (+) strand; PAM type: NRG; PAM sequence: GAG
  source 1..20: mol_type = other DNA
ctggaaactttcagatagtg

SEQ ID NO: 18023 - DNA, 20 bp, synthetic construct
  misc_feature 1..20: note = Description of Artificial Sequence: Synthetic oligonucleotide
  misc_feature 1..20: note = Target: FXN; (+) strand; PAM type: NRG; PAM sequence: CAG
  source 1..20: mol_type = other DNA
gatacatatcttataaccta

SEQ ID NO: 18024 - DNA, 20 bp, synthetic construct
  misc_feature 1..20: note = Description of Artificial Sequence: Synthetic oligonucleotide
  misc_feature 1..20: note = Target: FXN; (+) strand; PAM type: NRG; PAM sequence: CAG
  source 1..20: mol_type = other DNA
cagatattaatatatcctca

SEQ ID NO: 18025 - DNA, 20 bp, synthetic construct
  misc_feature 1..20: note = Description of Artificial Sequence: Synthetic oligonucleotide
  misc_feature 1..20: note = Target: FXN; (+) strand; PAM type: NRG; PAM sequence: AGG
  source 1..20: mol_type = other DNA
agatattaatatatcctcac

SEQ ID NO: 18026 - DNA, 20 bp, synthetic construct
  misc_feature 1..20: note = Description of Artificial Sequence: Synthetic oligonucleotide
  misc_feature 1..20: note = Target: FXN; (+) strand; PAM type: NRG; PAM sequence: GGG
  source 1..20: mol_type = other DNA
gatattaatatatcctcaca

SEQ ID NO: 18027 - DNA, 20 bp, synthetic construct
  misc_feature 1..20: note = Description of Artificial Sequence: Synthetic oligonucleotide
  misc_feature 1..20: note = Target: FXN; (+) strand; PAM type: NRG; PAM sequence: GGG
  source 1..20: mol_type = other DNA
atattaatatatcctcacag

SEQ ID NO: 18028 - DNA, 20 bp, synthetic construct
  misc_feature 1..20: note = Description of Artificial Sequence: Synthetic oligonucleotide
  misc_feature 1..20: note = Target: FXN; (+) strand; PAM type: NRG; PAM sequence: AAG
  source 1..20: mol_type = other DNA
atatcctcacaggggcacaa

SEQ ID NO: 18029 - DNA, 20 bp, synthetic construct
  misc_feature 1..20: note = Description of Artificial Sequence: Synthetic oligonucleotide
  misc_feature 1..20: note = Target: FXN; (+) strand; PAM type: NRG; PAM sequence: AAG
  source 1..20: mol_type = other DNA
aggggcacaaaagctcttac

SEQ ID NO: 18030 - DNA, 20 bp, synthetic construct
  misc_feature 1..20: note = Description of Artificial Sequence: Synthetic oligonucleotide
  misc_feature 1..20: note = Target: FXN; (+) strand; PAM type: NRG; PAM sequence: AGG
  source 1..20: mol_type = other DNA
ggggcacaaaagctcttaca

SEQ ID NO: 18031 - DNA, 20 bp, synthetic construct
  misc_feature 1..20: note = Description of Artificial Sequence: Synthetic oligonucleotide
  misc_feature 1..20: note = Target: FXN; (+) strand; PAM type: NRG; PAM sequence: AAG
  source 1..20: mol_type = other DNA
cattttaaaatgtataatgc

SEQ ID NO: 18032 - DNA, 20 bp, synthetic construct
  misc_feature 1..20: note = Description of Artificial Sequence: Synthetic oligonucleotide
  misc_feature 1..20: note = Target: FXN; (+) strand; PAM type: NRG; PAM sequence: AGG
  source 1..20: mol_type = other DNA
attttaaaatgtataatgca

SEQ ID NO: 18033 - DNA, 20 bp, synthetic construct
  misc_feature 1..20: note = Description of Artificial Sequence: Synthetic oligonucleotide
  misc_feature 1..20: note = Target: FXN; (+) strand; PAM type: NRG; PAM sequence: GGG
  source 1..20: mol_type = other DNA
ttttaaaatgtataatgcaa

SEQ ID NO: 18034 - DNA, 20 bp, synthetic construct
  misc_feature 1..20: note = Description of Artificial Sequence: Synthetic oligonucleotide
  misc_feature 1..20: note = Target: FXN; (+) strand; PAM type: NRG; PAM sequence: TAG
  source 1..20: mol_type = other DNA
atgtataatgcaagggtttt

SEQ ID NO: 18035 - DNA, 20 bp, synthetic construct
  misc_feature 1..20: note = Description of Artificial Sequence: Synthetic oligonucleotide
  misc_feature 1..20: note = Target: FXN; (+) strand; PAM type: NRG; PAM sequence: AAG
  source 1..20: mol_type = other DNA
agggtttttagtatattcac

SEQ ID NO: 18036 - DNA, 20 bp, synthetic construct
  misc_feature 1..20: note = Description of Artificial Sequence: Synthetic oligonucleotide
  misc_feature 1..20: note = Target: FXN; (+) strand; PAM type: NRG; PAM sequence: CAG
  source 1..20: mol_type = other DNA
agtatattcacaagattgtg

SEQ ID NO: 18037 - DNA, 20 bp, synthetic construct
  misc_feature 1..20: note = Description of Artificial Sequence: Synthetic oligonucleotide
  misc_feature 1..20: note = Target: FXN; (+) strand; PAM type: NRG; PAM sequence: CAG
  source 1..20: mol_type = other DNA
gcagctgtcactactaattc

SEQ ID NO: 18038 - DNA, 20 bp, synthetic construct
  misc_feature 1..20: note = Description of Artificial Sequence: Synthetic oligonucleotide
  misc_feature 1..20: note = Target: FXN; (+) strand; PAM type: NRG; PAM sequence: CAG
  source 1..20: mol_type = other DNA
ccagaacattttcattattc

SEQ ID NO: 18039 - DNA, 20 bp, synthetic construct
  misc_feature 1..20: note = Description of Artificial Sequence: Synthetic oligonucleotide
  misc_feature 1..20: note = Target: FXN; (+) strand; PAM type: NRG; PAM sequence: AAG
  source 1..20: mol_type = other DNA
gaacattttcattattccag

SEQ ID NO: 18040 - DNA, 20 bp, synthetic construct
  misc_feature 1..20: note = Description of Artificial Sequence: Synthetic oligonucleotide
  misc_feature 1..20: note = Target: FXN; (+) strand; PAM type: NRG; PAM sequence: AGG
  source 1..20: mol_type = other DNA
aacattttcattattccaga

SEQ ID NO: 18041 - DNA, 20 bp, synthetic construct
  misc_feature 1..20: note = Description of Artificial Sequence: Synthetic oligonucleotide
  misc_feature 1..20: note = Target: FXN; (+) strand; PAM type: NRG; PAM sequence: TAG
  source 1..20: mol_type = other DNA
gaaggaaaccctattcatat

SEQ ID NO: 18042 - DNA, 20 bp, synthetic construct
  misc_feature 1..20: note = Description of Artificial Sequence: Synthetic oligonucleotide
  misc_feature 1..20: note = Target: FXN; (+) strand; PAM type: NRG; PAM sequence: CAG
  source 1..20: mol_type = other DNA
ttccgcctttccctaaaacc

SEQ ID NO: 18043 - DNA, 20 bp, synthetic construct
  misc_feature 1..20: note = Description of Artificial Sequence: Synthetic oligonucleotide
  misc_feature 1..20: note = Target: FXN; (+) strand; PAM type: NRG; PAM sequence: TGG
  source 1..20: mol_type = other DNA
taatctactttctgtctctg

SEQ ID NO: 18044 - DNA, 20 bp, synthetic construct
  misc_feature 1..20: note = Description of Artificial Sequence: Synthetic oligonucleotide
  misc_feature 1..20: note = Target: FXN; (+) strand; PAM type: NRG; PAM sequence: AAG
  source 1..20: mol_type = other DNA
tttctgtctctgtggattta

SEQ ID NO: 18045 - DNA, 20 bp, synthetic construct
  misc_feature 1..20: note = Description of Artificial Sequence: Synthetic oligonucleotide
  misc_feature 1..20: note = Target: FXN; (+) strand; PAM type: NRG; PAM sequence: TAG
  source 1..20: mol_type = other DNA
gtaattttaaatttgaaaaa

SEQ ID NO: 18046 - DNA, 20 bp, synthetic construct
  misc_feature 1..20: note = Description of Artificial Sequence: Synthetic oligonucleotide
  misc_feature 1..20: note = Target: FXN; (+) strand; PAM type: NRG; PAM sequence: AAG
  source 1..20: mol_type = other DNA
atttgaaaaatagtatctat

SEQ ID NO: 18047 - DNA, 20 bp, synthetic construct
  misc_feature 1..20: note = Description of Artificial Sequence: Synthetic oligonucleotide
  misc_feature 1..20: note = Target: FXN; (+) strand; PAM type: NRG; PAM sequence: AGG
  source 1..20: mol_type = other DNA
tttgaaaaatagtatctata

SEQ ID NO: 18048 - DNA, 20 bp, synthetic construct
  misc_feature 1..20: note = Description of Artificial Sequence: Synthetic oligonucleotide
  misc_feature 1..20: note = Target: FXN; (+) strand; PAM type: NRG; PAM sequence: TAG
  source 1..20: mol_type = other DNA
tatctataaggaaatgtatc

SEQ ID NO: 18049 - DNA, 20 bp, synthetic construct
  misc_feature 1..20: note = Description of Artificial Sequence: Synthetic oligonucleotide
  misc_feature 1..20: note = Target: FXN; (+) strand; PAM type: NRG; PAM sequence: AAG
  source 1..20: mol_type = other DNA
aaggaaatgtatctagtcac

SEQ ID NO: 18050 - DNA, 20 bp, synthetic construct
  misc_feature 1..20: note = Description of Artificial Sequence: Synthetic oligonucleotide
  misc_feature 1..20: note = Target: FXN; (+) strand; PAM type: NRG; PAM sequence: CAG
  source 1..20: mol_type = other DNA
tgtatctagtcacaagcata

SEQ ID NO: 18051 - DNA, 20 bp, synthetic construct
  misc_feature 1..20: note = Description of Artificial Sequence: Synthetic oligonucleotide
  misc_feature 1..20: note = Target: FXN; (+) strand; PAM type: NRG; PAM sequence: CAG
  source 1..20: mol_type = other DNA
atgaatttgtaaaaattgaa

SEQ ID NO: 18052 - DNA, 20 bp, synthetic construct
  misc_feature 1..20: note = Description of Artificial Sequence: Synthetic oligonucleotide
  misc_feature 1..20: note = Target: FXN; (+) strand; PAM type: NRG; PAM sequence: AAG
  source 1..20: mol_type = other DNA
gtcctatgaacataccctgt

SEQ ID NO: 18053 - DNA, 20 bp, synthetic construct
  misc_feature 1..20: note = Description of Artificial Sequence: Synthetic oligonucleotide
  misc_feature 1..20: note = Target: FXN; (+) strand; PAM type: NRG; PAM sequence: AAG
  source 1..20: mol_type = other DNA
tgaacataccctgtaagctc

SEQ ID NO: 18054 - DNA, 20 bp, synthetic construct
  misc_feature 1..20: note = Description of Artificial Sequence: Synthetic oligonucleotide
  misc_feature 1..20: note = Target: FXN; (+) strand; PAM type: NRG; PAM sequence: TAG
  source 1..20: mol_type = other DNA
taccctgtaagctcaagaca

SEQ ID NO: 18055 - DNA, 20 bp, synthetic construct
  misc_feature 1..20: note = Description of Artificial Sequence: Synthetic oligonucleotide
  misc_feature 1..20: note = Target: FXN; (+) strand; PAM type: NRG; PAM sequence: CAG
  source 1..20: mol_type = other DNA
ctcaagacatagaatgttac

SEQ ID NO: 18056 - DNA, 20 bp, synthetic construct
  misc_feature 1..20: note = Description of Artificial Sequence: Synthetic oligonucleotide
  misc_feature 1..20: note = Target: FXN; (+) strand; PAM type: NRG; PAM sequence: AAG
  source 1..20: mol_type = other DNA
agaatgttaccagcccctgc

SEQ ID NO: 18057 - DNA, 20 bp, synthetic construct
  misc_feature 1..20: note = Description of Artificial Sequence: Synthetic oligonucleotide
  misc_feature 1..20: note = Target: FXN; (+) strand; PAM type: NRG; PAM sequence: AAG
  source 1..20: mol_type = other DNA
tgttaccagcccctgcaagc

SEQ ID NO: 18058 - DNA, 20 bp, synthetic construct
  misc_feature 1..20: note = Description of Artificial Sequence: Synthetic oligonucleotide
  misc_feature 1..20: note = Target: FXN; (+) strand; PAM type: NRG; PAM sequence: TAG
  source 1..20: mol_type = other DNA
gcaagctgcctgctcacttc

SEQ ID NO: 18059 - DNA, 20 bp, synthetic construct
  misc_feature 1..20: note = Description of Artificial Sequence: Synthetic oligonucleotide
  misc_feature 1..20: note = Target: FXN; (+) strand; PAM type: NRG; PAM sequence: TAG
  source 1..20: mol_type = other DNA
acccctccctcttttccttc

SEQ ID NO: 18060 - DNA, 20 bp, synthetic construct
  misc_feature 1..20: note = Description of Artificial Sequence: Synthetic oligonucleotide
  misc_feature 1..20: note = Target: FXN; (+) strand; PAM type: NRG; PAM sequence: CAG
  source 1..20: mol_type = other DNA
ccttctagtcattaaccctt

SEQ ID NO: 18061 - DNA, 20 bp, synthetic construct
  misc_feature 1..20: note = Description of Artificial Sequence: Synthetic oligonucleotide
  misc_feature 1..20: note = Target: FXN; (+) strand; PAM type: NRG; PAM sequence: GAG
  source 1..20: mol_type = other DNA
ttctagtcattaacccttca

SEQ ID NO: 18062 - DNA, 20 bp, synthetic construct
  misc_feature 1..20: note = Description of Artificial Sequence: Synthetic oligonucleotide
  misc_feature 1..20: note = Target: FXN; (+) strand; PAM type: NRG; PAM sequence: TAG
  source 1..20: mol_type = other DNA
gtaactattctgattaccaa

SEQ ID NO: 18063 - DNA, 20 bp, synthetic construct
  misc_feature 1..20: note = Description of Artificial Sequence: Synthetic oligonucleotide
  misc_feature 1..20: note = Target: FXN; (+) strand; PAM type: NRG; PAM sequence: TAG
  source 1..20: mol_type = other DNA
tattctgattaccaatagca

SEQ ID NO: 18064 - DNA, 20 bp, synthetic construct
  misc_feature 1..20: note = Description of Artificial Sequence: Synthetic oligonucleotide
  misc_feature 1..20: note = Target: FXN; (+) strand; PAM type: NRG; PAM sequence: TAG
  source 1..20: mol_type = other DNA
tgattaccaatagcatagat

SEQ ID NO: 18065 - DNA, 20 bp, synthetic construct
  misc_feature 1..20: note = Description of Artificial Sequence: Synthetic oligonucleotide
  misc_feature 1..20: note = Target: FXN; (+) strand; PAM type: NRG; PAM sequence: AAG
  source 1..20: mol_type = other DNA
tttatataaactgtctcatt

SEQ ID NO: 18066 - DNA, 20 bp, synthetic construct
  misc_feature 1..20: note = Description of Artificial Sequence: Synthetic oligonucleotide
  misc_feature 1..20: note = Target: FXN; (+) strand; PAM type: NRG; PAM sequence: GAG
  source 1..20: mol_type = other DNA
tctatcacaatgatgtttgt

SEQ ID NO: 18067 - DNA, 20 bp, synthetic construct
  misc_feature 1..20: note = Description of Artificial Sequence: Synthetic oligonucleotide
  misc_feature 1..20: note = Target: FXN; (+) strand; PAM type: NRG; PAM sequence: TAG
  source 1..20: mol_type = other DNA
attcatccatgctgttccta

SEQ ID NO: 18068 - DNA, 20 bp, synthetic construct
  misc_feature 1..20: note = Description of Artificial Sequence: Synthetic oligonucleotide
  misc_feature 1..20: note = Target: FXN; (+) strand; PAM type: NRG; PAM sequence: CAG
  source 1..20: mol_type = other DNA
ctatagacaattctattttg

SEQ ID NO: 18069 - DNA, 20 bp, synthetic construct
  misc_feature 1..20: note = Description of Artificial Sequence: Synthetic oligonucleotide
  misc_feature 1..20: note = Target: FXN; (+) strand; PAM type: NRG; PAM sequence: TAG
  source 1..20: mol_type = other DNA
gacaattctattttgcagcg

SEQ ID NO: 18070 - DNA, 20 bp, synthetic construct
  misc_feature 1..20: note = Description of Artificial Sequence: Synthetic oligonucleotide
  misc_feature 1..20: note = Target: FXN; (+) strand; PAM type: NRG; PAM sequence: AAG
  source 1..20: mol_type = other DNA
aatttatctgtgatattaca

SEQ ID NO: 18071 - DNA, 20 bp, synthetic construct
  misc_feature 1..20: note = Description of Artificial Sequence: Synthetic oligonucleotide
  misc_feature 1..20: note = Target: FXN; (+) strand; PAM type: NRG; PAM sequence: AGG
  source 1..20: mol_type = other DNA
atttatctgtgatattacaa

SEQ ID NO: 18072 - DNA, 20 bp, synthetic construct
  misc_feature 1..20: note = Description of Artificial Sequence: Synthetic oligonucleotide
  misc_feature 1..20: note = Target: FXN; (+) strand; PAM type: NRG; PAM sequence: TGG
  source 1..20: mol_type = other DNA
tgatattacaaaggaatact

SEQ ID NO: 18073 - DNA, 20 bp, synthetic construct
  misc_feature 1..20: note = Description of Artificial Sequence: Synthetic oligonucleotide
  misc_feature 1..20: note = Target: FXN; (+) strand; PAM type: NRG; PAM sequence: GGG
  source 1..20: mol_type = other DNA
gatattacaaaggaatactt

SEQ ID NO: 18074 - DNA, 20 bp, synthetic construct
  misc_feature 1..20: note = Description of Artificial Sequence: Synthetic oligonucleotide
  misc_feature 1..20: note = Target: FXN; (+) strand; PAM type: NRG; PAM sequence: CAG
  source 1..20: mol_type = other DNA
attacaaaggaatacttggg

SEQ ID NO: 18075 - DNA, 20 bp, synthetic construct
  misc_feature 1..20: note = Description of Artificial Sequence: Synthetic oligonucleotide
  misc_feature 1..20: note = Target: FXN; (+) strand; PAM type: NRG; PAM sequence: CAG
  source 1..20: mol_type = other DNA
aggaatacttgggcagtttc

SEQ ID NO: 18076 - DNA, 20 bp, synthetic construct
  misc_feature 1..20: note = Description of Artificial Sequence: Synthetic oligonucleotide
  misc_feature 1..20: note = Target: FXN; (+) strand; PAM type: NRG; PAM sequence: TGG
  source 1..20: mol_type = other DNA
tacttgggcagtttccagtt

SEQ ID NO: 18077 - DNA, 20 bp, synthetic construct
  misc_feature 1..20: note = Description of Artificial Sequence: Synthetic oligonucleotide
  misc_feature 1..20: note = Target: FXN; (+) strand; PAM type: NRG; PAM sequence: GGG
  source 1..20: mol_type = other DNA
acttgggcagtttccagttt

SEQ ID NO: 18078 - DNA, 20 bp, synthetic construct
  misc_feature 1..20: note = Description of Artificial Sequence: Synthetic oligonucleotide
  misc_feature 1..20: note = Target: FXN; (+) strand; PAM type: NRG; PAM sequence: GGG
  source 1..20: mol_type = other DNA
cttgggcagtttccagtttg

SEQ ID NO: 18079 - DNA, 20 bp, synthetic construct
  misc_feature 1..20: note = Description of Artificial Sequence: Synthetic oligonucleotide
  misc_feature 1..20: note = Target: FXN; (+) strand; PAM type: NRG; PAM sequence: TAG
  source 1..20: mol_type = other DNA
cagtttccagtttggggcta

SEQ ID NO: 18080 - DNA, 20 bp, synthetic construct
  misc_feature 1..20: note = Description of Artificial Sequence: Synthetic oligonucleotide
  misc_feature 1..20: note = Target: FXN; (+) strand; PAM type: NRG; PAM sequence: AGG
  source 1..20: mol_type = other DNA
agtttccagtttggggctat

SEQ ID NO: 18081 - DNA, 20 bp, synthetic construct
  misc_feature 1..20: note = Description of Artificial Sequence: Synthetic oligonucleotide
  misc_feature 1..20: note = Target: FXN; (+) strand; PAM type: NRG; PAM sequence: TAG
  source 1..20: mol_type = other DNA
tccagtttggggctatagga

SEQ ID NO: 18082 - DNA, 20 bp, synthetic construct
  misc_feature 1..20: note = Description of Artificial Sequence: Synthetic oligonucleotide
  misc_feature 1..20: note = Target: FXN; (+) strand; PAM type: NRG; PAM sequence: TAG
  source 1..20: mol_type = other DNA
tagttgtgatacaaatattt

SEQ ID NO: 18083 - DNA, 20 bp, synthetic construct
  misc_feature 1..20: note = Description of Artificial Sequence: Synthetic oligonucleotide
  misc_feature 1..20: note = Target: FXN; (+) strand; PAM type: NRG; PAM sequence: TAG
  source 1..20: mol_type = other DNA
gtgatacaaatattttagta

SEQ ID NO: 18084 - DNA, 20 bp, synthetic construct
  misc_feature 1..20: note = Description of Artificial Sequence: Synthetic oligonucleotide
  misc_feature 1..20: note = Target: FXN; (+) strand; PAM type: NRG; PAM sequence: TGG
  source 1..20: mol_type = other DNA
ttagtatagtacatgtcttt

SEQ ID NO: 18085 - DNA, 20 bp, synthetic construct
  misc_feature 1..20: note = Description of Artificial Sequence: Synthetic oligonucleotide
  misc_feature 1..20: note = Target: FXN; (+) strand; PAM type: NRG; PAM sequence: TGG
  source 1..20: mol_type = other DNA
tacatgtcttttggtgaacc

SEQ ID NO: 18086 - DNA, 20 bp, synthetic construct
  misc_feature 1..20: note = Description of Artificial Sequence: Synthetic oligonucleotide
  misc_feature 1..20: note = Target: FXN; (+) strand; PAM type: NRG; PAM sequence: GGG
  source 1..20: mol_type = other DNA
acatgtcttttggtgaacct

SEQ ID NO: 18087 - DNA, 20 bp, synthetic construct
  misc_feature 1..20: note = Description of Artificial Sequence: Synthetic oligonucleotide
  misc_feature 1..20: note = Target: FXN; (+) strand; PAM type: NRG; PAM sequence: AAG
  source 1..20: mol_type = other DNA
ttctgttgtgtatacccctt

SEQ ID NO: 18088 - DNA, 20 bp, synthetic construct
  misc_feature 1..20: note = Description of Artificial Sequence: Synthetic oligonucleotide
  misc_feature 1..20: note = Target: FXN; (+) strand; PAM type: NRG; PAM sequence: GAG
  source 1..20: mol_type = other DNA
ctgttgtgtataccccttaa

SEQ ID NO: 18089 - DNA, 20 bp, synthetic construct
  misc_feature 1..20: note = Description of Artificial Sequence: Synthetic oligonucleotide
  misc_feature 1..20: note = Target: FXN; (+) strand; PAM type: NRG; PAM sequence: TGG
  source 1..20: mol_type = other DNA
ttgtgtataccccttaagag

SEQ ID NO: 18090 - DNA, 20 bp, synthetic construct
  misc_feature 1..20: note = Description of Artificial Sequence: Synthetic oligonucleotide
  misc_feature 1..20: note = Target: FXN; (+) strand; PAM type: NRG; PAM sequence: GAG
  source 1..20: mol_type = other DNA
gtgtataccccttaagagtg

SEQ ID NO: 18091 - DNA, 20 bp, synthetic construct
  misc_feature 1..20: note = Description of Artificial Sequence: Synthetic oligonucleotide
  misc_feature 1..20: note = Target: FXN; (+) strand; PAM type: NRG; PAM sequence: TGG
  source 1..20: mol_type = other DNA
aagagtggagctgatgatcc

SEQ ID NO: 18092 - DNA, 20 bp, synthetic construct
  misc_feature 1..20: note = Description of Artificial Sequence: Synthetic oligonucleotide
  misc_feature 1..20: note = Target: FXN; (+) strand; PAM type: NRG; PAM sequence: AAG
  source 1..20: mol_type = other DNA
agctgatgatcctggctaac

SEQ ID NO: 18093 - DNA, 20 bp, synthetic construct
  misc_feature 1..20: note = Description of Artificial Sequence: Synthetic oligonucleotide
  misc_feature 1..20: note = Target: FXN; (+) strand; PAM type: NRG; PAM sequence: AGG
  source 1..20: mol_type = other DNA
gctgatgatcctggctaaca

SEQ ID NO: 18094 - DNA, 20 bp, synthetic construct
  misc_feature 1..20: note = Description of Artificial Sequence: Synthetic oligonucleotide
  misc_feature 1..20: note = Target: FXN; (+) strand; PAM type: NRG; PAM sequence: TAG
  source 1..20: mol_type = other DNA
ctactaaaaatacaaaaaat

SEQ ID NO: 18095 - DNA, 20 bp, synthetic construct
  misc_feature 1..20: note = Description of Artificial Sequence: Synthetic oligonucleotide
  misc_feature 1..20: note = Target: FXN; (+) strand; PAM type: NRG; PAM sequence: CGG
  source 1..20: mol_type = other DNA
taaaaatacaaaaaattagc

SEQ ID NO: 18096 - DNA, 20 bp, synthetic construct
  misc_feature 1..20: note = Description of Artificial Sequence: Synthetic oligonucleotide
  misc_feature 1..20: note = Target: FXN; (+) strand; PAM type: NRG; PAM sequence: GGG
  source 1..20: mol_type = other DNA
aaaaatacaaaaaattagcc

SEQ ID NO: 18097 - DNA, 20 bp, synthetic construct
  misc_feature 1..20: note = Description of Artificial Sequence: Synthetic oligonucleotide
  misc_feature 1..20: note = Target: FXN; (+) strand; PAM type: NRG; PAM sequence: TGG
  source 1..20: mol_type = other DNA
tacaaaaaattagccgggcg

SEQ ID NO: 18098 - DNA, 20 bp, synthetic construct
  misc_feature 1..20: note = Description of Artificial Sequence: Synthetic oligonucleotide
  misc_feature 1..20: note = Target: FXN; (+) strand; PAM type: NRG; PAM sequence: TAG
  source 1..20: mol_type = other DNA
aaaaaattagccgggcgtgg

SEQ ID NO: 18099 - DNA, 20 bp, synthetic construct
  misc_feature 1..20: note = Description of Artificial Sequence: Synthetic oligonucleotide
  misc_feature 1..20: note = Target: FXN; (+) strand; PAM type: NRG; PAM sequence: CGG
  source 1..20: mol_type = other DNA
aaattagccgggcgtggtag

SEQ ID NO: 18100 - DNA, 20 bp, synthetic construct
  misc_feature 1..20: note = Description of Artificial Sequence: Synthetic oligonucleotide
  misc_feature 1..20: note = Target: FXN; (+) strand; PAM type: NRG; PAM sequence: GGG
  source 1..20: mol_type = other DNA
aattagccgggcgtggtagc

SEQ ID NO: 18101 - DNA, 20 bp, synthetic construct
  misc_feature 1..20: note = Description of Artificial Sequence: Synthetic oligonucleotide
  misc_feature 1..20: note = Target: FXN; (+) strand; PAM type: NRG; PAM sequence: TAG
  source 1..20: mol_type = other DNA
ggcgtggtagcgggcgcctg

SEQ ID NO: 18102 - DNA, 20 bp, synthetic construct
  misc_feature 1..20: note = Description of Artificial Sequence: Synthetic oligonucleotide
  misc_feature 1..20: note = Target: FXN; (+) strand; PAM type: NRG; PAM sequence: CAG
  source 1..20: mol_type = other DNA
gtagcgggcgcctgtagtcc

SEQ ID NO: 18103 - DNA, 20 bp, synthetic construct
  misc_feature 1..20: note = Description of Artificial Sequence: Synthetic oligonucleotide
  misc_feature 1..20: note = Target: FXN; (+) strand; PAM type: NRG; PAM sequence: CGG
  source 1..20: mol_type = other DNA
cgcctgtagtcccagctact

SEQ ID NO: 18104 - DNA, 20 bp, synthetic construct
  misc_feature 1..20: note = Description of Artificial Sequence: Synthetic oligonucleotide
  misc_feature 1..20: note = Target: FXN; (+) strand; PAM type: NRG; PAM sequence: GGG
  source 1..20: mol_type = other DNA
gcctgtagtcccagctactc

SEQ ID NO: 18105 - DNA, 20 bp, synthetic construct
  misc_feature 1..20: note = Description of Artificial Sequence: Synthetic oligonucleotide
  misc_feature 1..20: note = Target: FXN; (+) strand; PAM type: NRG; PAM sequence: GAG
  source 1..20: mol_type = other DNA
ctgtagtcccagctactcgg

SEQ ID NO: 18106 - DNA, 20 bp, synthetic construct
  misc_feature 1..20: note = Description of Artificial Sequence: Synthetic oligonucleotide
  misc_feature 1..20: note = Target: FXN; (+) strand; PAM type: NRG; PAM sequence: AGG
  source 1..20: mol_type = other DNA
tgtagtcccagctactcggg

SEQ ID NO: 18107 - DNA, 20 bp, synthetic construct
  misc_feature 1..20: note = Description of Artificial Sequence: Synthetic oligonucleotide
  misc_feature 1..20: note = Target: FXN; (+) strand; PAM type: NRG; PAM sequence: GAG
  source 1..20: mol_type = other DNA
tcccagctactcgggaggct

SEQ ID NO: 18108 - DNA, 20 bp, synthetic construct
  misc_feature 1..20: note = Description of Artificial Sequence: Synthetic oligonucleotide
  misc_feature 1..20: note = Target: FXN; (+) strand; PAM type: NRG; PAM sequence: AGG
  source 1..20: mol_type = other DNA
cccagctactcgggaggctg

SEQ ID NO: 18109 - DNA, 20 bp, synthetic construct
  misc_feature 1..20: note = Description of Artificial Sequence: Synthetic oligonucleotide
  misc_feature 1..20: note = Target: FXN; (+) strand; PAM type: NRG; PAM sequence: CAG
  source 1..20: mol_type = other DNA
agctactcgggaggctgagg

SEQ ID NO: 18110 - DNA, 20 bp, synthetic construct
  misc_feature 1..20: note = Description of Artificial Sequence: Synthetic oligonucleotide
  misc_feature 1..20: note = Target: FXN; (+) strand; PAM type: NRG; PAM sequence: AGG
  source 1..20: mol_type = other DNA
gctactcgggaggctgaggc

SEQ ID NO: 18111 - DNA, 20 bp, synthetic construct
  misc_feature 1..20: note = Description of Artificial Sequence: Synthetic oligonucleotide
  misc_feature 1..20: note = Target: FXN; (+) strand; PAM type: NRG; PAM sequence: GAG
  source 1..20: mol_type = other DNA
tactcgggaggctgaggcag

SEQ ID NO: 18112 - DNA, 20 bp, synthetic construct
  misc_feature 1..20: note = Description of Artificial Sequence: Synthetic oligonucleotide
  misc_feature 1..20: note = Target: FXN; (+) strand; PAM type: NRG; PAM sequence: TGG
  source 1..20: mol_type = other DNA
gggaggctgaggcaggagaa

SEQ ID NO: 18113 - DNA, 20 bp, synthetic construct
  misc_feature 1..20: note = Description of Artificial Sequence: Synthetic oligonucleotide
  misc_feature 1..20: note = Target: FXN; (+) strand; PAM type: NRG; PAM sequence: CGG
  source 1..20: mol_type = other DNA
gcaggagaatggcgtgaacc

SEQ ID NO: 18114 - DNA, 20 bp, synthetic construct
  misc_feature 1..20: note = Description of Artificial Sequence: Synthetic oligonucleotide
  misc_feature 1..20: note = Target: FXN; (+) strand; PAM type: NRG; PAM sequence: GGG
  source 1..20: mol_type = other DNA
caggagaatggcgtgaaccc

SEQ ID NO: 18115 - DNA, 20 bp, synthetic construct
  misc_feature 1..20: note = Description of Artificial Sequence: Synthetic oligonucleotide
  misc_feature 1..20: note = Target: FXN; (+) strand; PAM type: NRG; PAM sequence: GAG
  source 1..20: mol_type = other DNA
ggagaatggcgtgaacccgg

SEQ ID NO: 18116 - DNA, 20 bp, synthetic construct
  misc_feature 1..20: note = Description of Artificial Sequence: Synthetic oligonucleotide
  misc_feature 1..20: note = Target: FXN; (+) strand; PAM type: NRG; PAM sequence: AGG
  source 1..20: mol_type = other DNA
gagaatggcgtgaacccggg

SEQ ID NO: 18117 - DNA, 20 bp, synthetic construct
  misc_feature 1..20: note = Description of Artificial Sequence: Synthetic oligonucleotide
  misc_feature 1..20: note = Target: FXN; (+) strand; PAM type: NRG; PAM sequence: CGG
  source 1..20: mol_type = other DNA
aatggcgtgaacccgggagg

SEQ ID NO: 18118 - DNA, 20 bp, synthetic construct
  misc_feature 1..20: note = Description of Artificial Sequence: Synthetic oligonucleotide
  misc_feature 1..20: note = Target: FXN; (+) strand; PAM type: NRG; PAM sequence: GAG
  source 1..20: mol_type = other DNA
tggcgtgaacccgggaggcg

SEQ ID NO: 18119 - DNA, 20 bp, synthetic construct
  misc_feature 1..20: note = Description of Artificial Sequence: Synthetic oligonucleotide
  misc_feature 1..20: note = Target: FXN; (+) strand; PAM type: NRG; PAM sequence: CAG
  source 1..20: mol_type = other DNA
cgggaggcggagcttgcttg

SEQ ID NO: 18120 - DNA, 20 bp, synthetic construct
  misc_feature 1..20: note = Description of Artificial Sequence: Synthetic oligonucleotide
  misc_feature 1..20: note = Target: FXN; (+) strand; PAM type: NRG; PAM sequence: GAG
  source 1..20: mol_type = other DNA
aggcggagcttgcttgcagt

SEQ ID NO: 18121 - DNA, 20 bp, synthetic construct
  misc_feature 1..20: note = Description of Artificial Sequence: Synthetic oligonucleotide
  misc_feature 1..20: note = Target: FXN; (+) strand; PAM type: NRG; PAM sequence: GAG
  source 1..20: mol_type = other DNA
gagcttgcttgcagtgagcc

SEQ ID NO: 18122 - DNA, 20 bp, synthetic construct
  misc_feature 1..20: note = Description of Artificial Sequence: Synthetic oligonucleotide
  misc_feature 1..20: note = Target: FXN; (+) strand; PAM type: NRG; PAM sequence: CAG
  source 1..20: mol_type = other DNA
gagatcgcgccactgcactc

SEQ ID NO: 18123 - DNA, 20 bp, synthetic construct
  misc_feature 1..20: note = Description of Artificial Sequence: Synthetic oligonucleotide
  misc_feature 1..20: note = Target: FXN; (+) strand; PAM type: NRG; PAM sequence: TGG
  source 1..20: mol_type = other DNA
cgcgccactgcactccagcc

SEQ ID NO: 18124 - DNA, 20 bp, synthetic construct
  misc_feature 1..20: note = Description of Artificial Sequence: Synthetic oligonucleotide
  misc_feature 1..20: note = Target: FXN; (+) strand; PAM type: NRG; PAM sequence: GGG
  source 1..20: mol_type = other DNA
gcgccactgcactccagcct

SEQ ID NO: 18125 - DNA, 20 bp, synthetic construct
  misc_feature 1..20: note = Description of Artificial Sequence: Synthetic oligonucleotide
  misc_feature 1..20: note = Target: FXN; (+) strand; PAM type: NRG; PAM sequence: CAG
  source 1..20: mol_type = other DNA
ctgcactccagcctgggcga

SEQ ID NO: 18126 - DNA, 20 bp, synthetic construct
  misc_feature 1..20: note = Description of Artificial Sequence: Synthetic oligonucleotide
  misc_feature 1..20: note = Target: FXN; (+) strand; PAM type: NRG; PAM sequence: GAG
  source 1..20: mol_type = other DNA
gcactccagcctgggcgaca

SEQ ID NO: 18127 - DNA, 20 bp, synthetic construct
  misc_feature 1..20: note = Description of Artificial Sequence: Synthetic oligonucleotide
  misc_feature 1..20: note = Target: FXN; (+) strand; PAM type: NRG; PAM sequence: GAG
  source 1..20: mol_type = other DNA
tccagcctgggcgacagagc

SEQ ID NO: 18128 - DNA, 20 bp, synthetic construct
  misc_feature 1..20: note = Description of Artificial Sequence: Synthetic oligonucleotide
  misc_feature 1..20: note = Target: FXN; (+) strand; PAM type: NRG; PAM sequence: AAG
  source 1..20: mol_type = other DNA
ctcaaaaaaaaaaaaaaaaa

SEQ ID NO: 18129 - DNA, 20 bp, synthetic construct
  misc_feature 1..20: note = Description of Artificial Sequence: Synthetic oligonucleotide
  misc_feature 1..20: note = Target: FXN; (+) strand; PAM type: NRG; PAM sequence: GAG
  source 1..20: mol_type = other DNA
caaaaaaaaaaaaaaaaaaa

SEQ ID NO: 18130 - DNA, 20 bp, synthetic construct
  misc_feature 1..20: note = Description of Artificial Sequence: Synthetic oligonucleotide
  misc_feature 1..20: note = Target: FXN; (+) strand; PAM type: NRG; PAM sequence: TGG
  source 1..20: mol_type = other DNA
aaaaaaaaaaaaaaaaagag

SEQ ID NO: 18131 - DNA, 20 bp, synthetic construct
  misc_feature 1..20: note = Description of Artificial Sequence: Synthetic oligonucleotide
  misc_feature 1..20: note = Target: FXN; (+) strand; PAM type: NRG; PAM sequence: GAG
  source 1..20: mol_type = other DNA
aaaaaaaaaaaaaaagagtg

SEQ ID NO: 18132 - DNA, 20 bp, synthetic construct
  misc_feature 1..20: note = Description of Artificial Sequence: Synthetic oligonucleotide
  misc_feature 1..20: note = Target: FXN; (+) strand; PAM type: NRG; PAM sequence: TGG
  source 1..20: mol_type = other DNA
aaaaaaaagagtggagctga

SEQ ID NO: 18133 - DNA, 20 bp, synthetic construct
  misc_feature 1..20: note = Description of Artificial Sequence: Synthetic oligonucleotide
  misc_feature 1..20: note = Target: FXN; (+) strand; PAM type: NRG; PAM sequence: GGG
  source 1..20: mol_type = other DNA
aaaaaaagagtggagctgat

SEQ ID NO: 18134 - DNA, 20 bp, synthetic construct
  misc_feature 1..20: note = Description of Artificial Sequence: Synthetic oligonucleotide
  misc_feature 1..20: note = Target: FXN; (+) strand; PAM type: NRG; PAM sequence: TAG
  source 1..20: mol_type = other DNA
agagtggagctgatgggtca

SEQ ID NO: 18135 - DNA, 20 bp, synthetic construct
  misc_feature 1..20: note = Description of Artificial Sequence: Synthetic oligonucleotide
  misc_feature 1..20: note = Target: FXN; (+) strand; PAM type: NRG; PAM sequence: TAG
  source 1..20: mol_type = other DNA
catgtaaatgcattcaactt

SEQ ID NO: 18136 - DNA, 20 bp, synthetic construct
  misc_feature 1..20: note = Description of Artificial Sequence: Synthetic oligonucleotide
  misc_feature 1..20: note = Target: FXN; (+) strand; PAM type: NRG; PAM sequence: TAG
  source 1..20: mol_type = other DNA
gtaaatgcattcaactttag

SEQ ID NO: 18137 - DNA, 20 bp, synthetic construct
  misc_feature 1..20: note = Description of Artificial Sequence: Synthetic oligonucleotide
  misc_feature 1..20: note = Target: FXN; (+) strand; PAM type: NRG; PAM sequence: CAG
  source 1..20: mol_type = other DNA
ctttagtagatactgtccaa

SEQ ID NO: 18138 - DNA, 20 bp, synthetic construct
  misc_feature 1..20: note = Description of Artificial Sequence: Synthetic oligonucleotide
  misc_feature 1..20: note = Target: FXN; (+) strand; PAM type: NRG; PAM sequence: AAG
  source 1..20: mol_type = other DNA
tactgtccaacagttttcca

SEQ ID NO: 18139 - DNA, 20 bp, synthetic construct
  misc_feature 1..20: note = Description of Artificial Sequence: Synthetic oligonucleotide
  misc_feature 1..20: note = Target: FXN; (+) strand; PAM type: NRG; PAM sequence: CAG
  source 1..20: mol_type = other DNA
tgtccaacttacttgcctat

SEQ ID NO: 18140 - DNA, 20 bp, synthetic construct
  misc_feature 1..20: note = Description of Artificial Sequence: Synthetic oligonucleotide
  misc_feature 1..20: note = Target: FXN; (+) strand; PAM type: NRG; PAM sequence: CAG
  source 1..20: mol_type = other DNA
ccaacttacttgcctatcag

SEQ ID NO: 18141 - DNA, 20 bp, synthetic construct
  misc_feature 1..20: note = Description of Artificial Sequence: Synthetic oligonucleotide
  misc_feature 1..20: note = Target: FXN; (+) strand; PAM type: NRG; PAM sequence: AAG
  source 1..20: mol_type = other DNA
gcctatcagcagtatctgaa

SEQ ID NO: 18142 - DNA, 20 bp, synthetic construct
  misc_feature 1..20: note = Description of Artificial Sequence: Synthetic oligonucleotide
  misc_feature 1..20: note = Target: FXN; (+) strand; PAM type: NRG; PAM sequence: TAG
  source 1..20: mol_type = other DNA
tcagcagtatctgaaaagtc

SEQ ID NO: 18143 - DNA, 20 bp, synthetic construct
  misc_feature 1..20: note = Description of Artificial Sequence: Synthetic oligonucleotide
  misc_feature 1..20: note = Target: FXN; (+) strand; PAM type: NRG; PAM sequence: TGG
  source 1..20: mol_type = other DNA
agtctagttgcttcttttct

SEQ ID NO: 18144 - DNA, 20 bp, synthetic construct
  misc_feature 1..20: note = Description of Artificial Sequence: Synthetic oligonucleotide
  misc_feature 1..20: note = Target: FXN; (+) strand; PAM type: NRG; PAM sequence: GAG
  source 1..20: mol_type = other DNA
ccaactcttttttttttttt

SEQ ID NO: 18145 - DNA, 20 bp, synthetic construct
  misc_feature 1..20: note = Description of Artificial Sequence: Synthetic oligonucleotide
  misc_feature 1..20: note = Target: FXN; (+) strand; PAM type: NRG; PAM sequence: TGG
  source 1..20: mol_type = other DNA
ctctttttttttttttgaga

SEQ ID NO: 18146 - DNA, 20 bp, synthetic construct
  misc_feature 1..20: note = Description of Artificial Sequence: Synthetic oligonucleotide
  misc_feature 1..20: note = Target: FXN; (+) strand; PAM type: NRG; PAM sequence: GAG
  source 1..20: mol_type = other DNA
ctttttttttttttgagatg

SEQ ID NO: 18147 - DNA, 20 bp, synthetic construct
  misc_feature 1..20: note = Description of Artificial Sequence: Synthetic oligonucleotide
  misc_feature 1..20: note = Target: FXN; (+) strand; PAM type: NRG; PAM sequence: CAG
  source 1..20: mol_type = other DNA
ggagttttgctcttgttgcc

SEQ ID NO: 18148 - DNA, 20 bp, synthetic construct
  misc_feature 1..20: note = Description of Artificial Sequence: Synthetic oligonucleotide
  misc_feature 1..20: note = Target: FXN; (+) strand; PAM type: NRG; PAM sequence: AGG
  source 1..20: mol_type = other DNA
gagttttgctcttgttgccc

SEQ ID NO: 18149 - DNA, 20 bp, synthetic construct
  misc_feature 1..20: note = Description of Artificial Sequence: Synthetic oligonucleotide
  misc_feature 1..20: note = Target: FXN; (+) strand; PAM type: NRG; PAM sequence: TGG
  source 1..20: mol_type = other DNA
tttgctcttgttgcccaggc

SEQ ID NO: 18150 - DNA, 20 bp, synthetic construct
  misc_feature 1..20: note = Description of Artificial Sequence: Synthetic oligonucleotide
  misc_feature 1..20: note = Target: FXN; (+) strand; PAM type: NRG; PAM sequence: GAG
  source 1..20: mol_type = other DNA
tgctcttgttgcccaggctg

SEQ ID NO: 18151 - DNA, 20 bp, synthetic construct
  misc_feature 1..20: note = Description of Artificial Sequence: Synthetic oligonucleotide
  misc_feature 1..20: note = Target: FXN; (+) strand; PAM type: NRG; PAM sequence: TGG
  source 1..20: mol_type = other DNA
ttgcccaggctggagcgcaa

SEQ ID NO: 18152 - DNA, 20 bp, synthetic construct
  misc_feature 1..20: note = Description of Artificial Sequence: Synthetic oligonucleotide
  misc_feature 1..20: note = Target: FXN; (+) strand; PAM type: NRG; PAM sequence: TGG
  source 1..20: mol_type = other DNA
tcactgcaacctccgcctcc

SEQ ID NO: 18153 - DNA, 20 bp, synthetic construct
  misc_feature 1..20: note = Description of Artificial Sequence: Synthetic oligonucleotide
  misc_feature 1..20: note = Target: FXN; (+) strand; PAM type: NRG; PAM sequence: GGG
  source 1..20: mol_type = other DNA
cactgcaacctccgcctcct

SEQ ID NO: 18154 - DNA, 20 bp, synthetic construct
  misc_feature 1..20: note = Description of Artificial Sequence: Synthetic oligonucleotide
  misc_feature 1..20: note = Target: FXN; (+) strand; PAM type: NRG; PAM sequence: AAG
  source 1..20: mol_type = other DNA
aacctccgcctcctgggttc

SEQ ID NO: 18155 - DNA, 20 bp, synthetic construct
  misc_feature 1..20: note = Description of Artificial Sequence: Synthetic oligonucleotide
  misc_feature 1..20: note = Target: FXN; (+) strand; PAM type: NRG; PAM sequence: CAG
  source 1..20: mol_type = other DNA
ttcaagcaattctcctgcct

SEQ ID NO: 18156 - DNA, 20 bp, synthetic construct
  misc_feature 1..20: note = Description of Artificial Sequence: Synthetic oligonucleotide
  misc_feature 1..20: note = Target: FXN; (+) strand; PAM type: NRG; PAM sequence: GAG
  source 1..20: mol_type = other DNA
ttctcctgcctcagcctccc

SEQ ID NO: 18157 - DNA, 20 bp, synthetic construct
  misc_feature 1..20: note = Description of Artificial Sequence: Synthetic oligonucleotide
  misc_feature 1..20: note = Target: FXN; (+) strand; PAM type: NRG; PAM sequence: TAG
  source 1..20: mol_type = other DNA
tcctgcctcagcctcccgag

SEQ ID NO: 18158 - DNA, 20 bp, synthetic construct
  misc_feature 1..20: note = Description of Artificial Sequence: Synthetic oligonucleotide
  misc_feature 1..20: note = Target: FXN; (+) strand; PAM type: NRG; PAM sequence: TGG
  source 1..20: mol_type = other DNA
gcctcagcctcccgagtagc

SEQ ID NO: 18159 - DNA, 20 bp, synthetic construct
  misc_feature 1..20: note = Description of Artificial Sequence: Synthetic oligonucleotide
  misc_feature 1..20: note = Target: FXN; (+) strand; PAM type: NRG; PAM sequence: GGG
  source 1..20: mol_type = other DNA
cctcagcctcccgagtagct

SEQ ID NO: 18160 - DNA, 20 bp, synthetic construct
  misc_feature 1..20: note = Description of Artificial Sequence: Synthetic oligonucleotide
  misc_feature 1..20: note = Target: FXN; (+) strand; PAM type: NRG; PAM sequence: CAG
  source 1..20: mol_type = other DNA
ctcccgagtagctgggatta

SEQ ID NO: 18161 - DNA, 20 bp, synthetic construct
  misc_feature 1..20: note = Description of Artificial Sequence: Synthetic oligonucleotide
  misc_feature 1..20: note = Target: FXN; (+) strand; PAM type: NRG; PAM sequence: AGG
  source 1..20: mol_type = other DNA
tcccgagtagctgggattac

SEQ ID NO: 18162 - DNA, 20 bp, synthetic construct
  misc_feature 1..20: note = Description of Artificial Sequence: Synthetic oligonucleotide
  misc_feature 1..20: note = Target: FXN; (+) strand; PAM type: NRG; PAM sequence: CGG
  source 1..20: mol_type = other DNA
caggcatgcgccactatgcc

SEQ ID NO: 18163 - DNA, 20 bp, synthetic construct
  misc_feature 1..20: note = Description of Artificial Sequence: Synthetic oligonucleotide
  misc_feature 1..20: note = Target: FXN; (+) strand; PAM type: NRG; PAM sequence: TAG
  source 1..20: mol_type = other DNA
cccggctaattttgtatttt

SEQ ID NO: 18164 - DNA, 20 bp, synthetic construct
  misc_feature 1..20: note = Description of Artificial Sequence: Synthetic oligonucleotide
  misc_feature 1..20: note = Target: FXN; (+) strand; PAM type: NRG; PAM sequence: TAG
  source 1..20: mol_type = other DNA
ggctaattttgtatttttag

SEQ ID NO: 18165 - DNA, 20 bp, synthetic construct
  misc_feature 1..20: note = Description of Artificial Sequence: Synthetic oligonucleotide
  misc_feature 1..20: note = Target: FXN; (+) strand; PAM type: NRG; PAM sequence: GAG
  source 1..20: mol_type = other DNA
ctaattttgtatttttagta

SEQ ID NO: 18166 - DNA, 20 bp, synthetic construct
  misc_feature 1..20: note = Description of Artificial Sequence: Synthetic oligonucleotide
  misc_feature 1..20: note = Target: FXN; (+) strand; PAM type: NRG; PAM sequence: CAG
  source 1..20: mol_type = other DNA
ttttgtatttttagtagaga

SEQ ID NO: 18167 - DNA, 20 bp, synthetic construct
  misc_feature 1..20: note = Description of Artificial Sequence: Synthetic oligonucleotide
  misc_feature 1..20: note = Target: FXN; (+) strand; PAM type: NRG; PAM sequence: AGG
  source 1..20: mol_type = other DNA
tttgtatttttagtagagac

SEQ ID NO: 18168 - DNA, 20 bp, synthetic construct
  misc_feature 1..20: note = Description of Artificial Sequence: Synthetic oligonucleotide
  misc_feature 1..20: note = Target: FXN; (+) strand; PAM type: NRG; PAM sequence: GGG
  source 1..20: mol_type = other DNA
ttgtatttttagtagagaca

SEQ ID NO: 18169 - DNA, 20 bp, synthetic construct
  misc_feature 1..20: note = Description of Artificial Sequence: Synthetic oligonucleotide
  misc_feature 1..20: note = Target: FXN; (+) strand; PAM type: NRG; PAM sequence: TGG
  source 1..20: mol_type = other DNA
gagacagggtttctccatgt

SEQ ID NO: 18170 - DNA, 20 bp, synthetic construct
  misc_feature 1..20: note = Description of Artificial Sequence: Synthetic oligonucleotide
  misc_feature 1..20: note = Target: FXN; (+) strand; PAM type: NRG; PAM sequence: AAG
  source 1..20: mol_type = other DNA
agggtttctccatgttggtc

SEQ ID NO: 18171 - DNA, 20 bp, synthetic construct
  misc_feature 1..20: note = Description of Artificial Sequence: Synthetic oligonucleotide
  misc_feature 1..20: note = Target: FXN; (+) strand; PAM type: NRG; PAM sequence: TGG
  source 1..20: mol_type = other DNA
tttctccatgttggtcaagc

SEQ ID NO: 18172 - DNA, 20 bp, synthetic construct
  misc_feature 1..20: note = Description of Artificial Sequence: Synthetic oligonucleotide
  misc_feature 1..20: note = Target: FXN; (+) strand; PAM type: NRG; PAM sequence: CAG
  source 1..20: mol_type = other DNA
tggtctcgaactcctaacct

SEQ ID NO: 18173 - DNA, 20 bp, synthetic construct
  misc_feature 1..20: note = Description of Artificial Sequence: Synthetic oligonucleotide
  misc_feature 1..20: note = Target: FXN; (+) strand; PAM type: NRG; PAM sequence: AGG
  source 1..20: mol_type = other DNA
ggtctcgaactcctaacctc

SEQ ID NO: 18174 - DNA, 20 bp, synthetic construct
  misc_feature 1..20: note = Description of Artificial Sequence: Synthetic oligonucleotide
  misc_feature 1..20: note = Target: FXN; (+) strand; PAM type: NRG; PAM sequence: CGG
  source 1..20: mol_type = other DNA
ctcaggtgatccgcccgcct

SEQ ID NO: 18175 - DNA, 20 bp, synthetic construct
  misc_feature 1..20: note = Description of Artificial Sequence: Synthetic oligonucleotide
  misc_feature 1..20: note = Target: FXN; (+) strand; PAM type: NRG; PAM sequence: AAG
  source 1..20: mol_type = other DNA
ccgcccgcctcggcctcccg

SEQ ID NO: 18176 - DNA, 20 bp, synthetic construct
  misc_feature 1..20: note = Description of Artificial Sequence: Synthetic oligonucleotide
  misc_feature 1..20: note = Target: FXN; (+) strand; PAM type: NRG; PAM sequence: TGG
  source 1..20: mol_type = other DNA
gcctcggcctcccgaagtgc

SEQ ID NO: 18177 - DNA, 20 bp, synthetic construct
  misc_feature 1..20: note = Description of Artificial Sequence: Synthetic oligonucleotide
  misc_feature 1..20: note = Target: FXN; (+) strand; PAM type: NRG; PAM sequence: GGG
  source 1..20: mol_type = other DNA
cctcggcctcccgaagtgct

SEQ ID NO: 18178 - DNA, 20 bp, synthetic construct
  misc_feature 1..20: note = Description of Artificial Sequence: Synthetic oligonucleotide
  misc_feature 1..20: note = Target: FXN; (+) strand; PAM type: NRG; PAM sequence: CAG
  source 1..20: mol_type = other DNA
ctcccgaagtgctgggatta

SEQ ID NO: 18179 - DNA, 20 bp, synthetic construct
  misc_feature 1..20: note = Description of Artificial Sequence: Synthetic oligonucleotide
  misc_feature 1..20: note = Target: FXN; (+) strand; PAM type: NRG; PAM sequence: AGG
  source 1..20: mol_type = other DNA
tcccgaagtgctgggattac

SEQ ID NO: 18180 - DNA, 20 bp, synthetic construct
  misc_feature 1..20: note = Description of Artificial Sequence: Synthetic oligonucleotide
  misc_feature 1..20: note = Target: FXN; (+) strand; PAM type: NRG; PAM sequence: GAG
  source 1..20: mol_type = other DNA
agtgctgggattacaggcat

SEQ ID NO: 18181 - DNA, 20 bp, synthetic construct
  misc_feature 1..20: note = Description of Artificial Sequence: Synthetic oligonucleotide
  misc_feature 1..20: note = Target: FXN; (+) strand; PAM type: NRG; PAM sequence: CAG
  source 1..20: mol_type = other DNA
acaggcatgagccaccgcgc

SEQ ID NO: 18182 - DNA, 20 bp, synthetic construct
  misc_feature 1..20: note = Description of Artificial Sequence: Synthetic oligonucleotide
  misc_feature 1..20: note = Target: FXN; (+) strand; PAM type: NRG; PAM sequence: AGG
  source 1..20: mol_type = other DNA
caggcatgagccaccgcgcc

SEQ ID NO: 18183 - DNA, 20 bp, synthetic construct
  misc_feature 1..20: note = Description of Artificial Sequence: Synthetic oligonucleotide
  misc_feature 1..20: note = Target: FXN; (+) strand; PAM type: NRG; PAM sequence: CGG
  source 1..20: mol_type = other DNA
catgagccaccgcgccaggc

SEQ ID NO: 18184 - DNA, 20 bp, synthetic construct
  misc_feature 1..20: note = Description of Artificial Sequence: Synthetic oligonucleotide
  misc_feature 1..20: note = Target: FXN; (+) strand; PAM type: NRG; PAM sequence: AAG
  source 1..20: mol_type = other DNA
ttttattttattttacttta

SEQ ID NO: 18185 - DNA, 20 bp, synthetic construct
  misc_feature 1..20: note = Description of Artificial Sequence: Synthetic oligonucleotide
  misc_feature 1..20: note = Target: FXN; (+) strand; PAM type: NRG; PAM sequence: CAG
  source 1..20: mol_type = other DNA
attttattttactttaaaga

SEQ ID NO: 18186 - DNA, 20 bp, synthetic construct
  misc_feature 1..20: note = Description of Artificial Sequence: Synthetic oligonucleotide
  misc_feature 1..20: note = Target: FXN; (+) strand; PAM type: NRG; PAM sequence: AGG
  source 1..20: mol_type = other DNA
ttttattttactttaaagac

SEQ ID NO: 18187 - DNA, 20 bp, synthetic construct
  misc_feature 1..20: note = Description of Artificial Sequence: Synthetic oligonucleotide
  misc_feature 1..20: note = Target: FXN; (+) strand; PAM type: NRG; PAM sequence: GGG
  source 1..20: mol_type = other DNA
tttattttactttaaagaca

SEQ ID NO: 18188 - DNA, 20 bp, synthetic construct
  misc_feature 1..20: note = Description of Artificial Sequence: Synthetic oligonucleotide
  misc_feature 1..20: note = Target: FXN; (+) strand; PAM type: NRG; PAM sequence: CAG
  source 1..20: mol_type = other DNA
cagggtttcactttgtcacc

SEQ ID NO: 18189 - DNA, 20 bp, synthetic construct
  misc_feature 1..20: note = Description of Artificial Sequence: Synthetic oligonucleotide
  misc_feature 1..20: note = Target: FXN; (+) strand; PAM type: NRG; PAM sequence: AGG
  source 1..20: mol_type = other DNA
agggtttcactttgtcaccc

SEQ ID NO: 18190 - DNA, 20 bp, synthetic construct
  misc_feature 1..20: note = Description of Artificial Sequence: Synthetic oligonucleotide
  misc_feature 1..20: note = Target: FXN; (+) strand; PAM type: NRG; PAM sequence: TGG
  source 1..20: mol_type = other DNA
tttcactttgtcacccagga

SEQ ID NO: 18191 - DNA, 20 bp, synthetic construct
  misc_feature 1..20: note = Description of Artificial Sequence: Synthetic oligonucleotide
  misc_feature 1..20: note = Target: FXN; (+) strand; PAM type: NRG; PAM sequence: TGG
  source 1..20: mol_type = other DNA
tcacccaggatggaatgcaa

SEQ ID NO: 18192 - DNA, 20 bp, synthetic construct
  misc_feature 1..20: note = Description of Artificial Sequence: Synthetic oligonucleotide
  misc_feature 1..20: note = Target: FXN; (+) strand; PAM type: NRG; PAM sequence: CAG
  source 1..20: mol_type = other DNA
ggaatgcaatggcacgatca

SEQ ID NO: 18193 - DNA, 20 bp, synthetic construct
  misc_feature 1..20: note = Description of Artificial Sequence: Synthetic oligonucleotide
  misc_feature 1..20: note = Target: FXN; (+) strand; PAM type: NRG; PAM sequence: CAG
  source 1..20: mol_type = other DNA
ggcacgatcacagctcactg

SEQ ID NO: 18194 - DNA, 20 bp, synthetic construct
  misc_feature 1..20: note = Description of Artificial Sequence: Synthetic oligonucleotide
  misc_feature 1..20: note = Target: FXN; (+) strand; PAM type: NRG; PAM sequence: TGG
  source 1..20: mol_type = other DNA
cactgcagccttgacctccc

SEQ ID NO: 18195 - DNA, 20 bp, synthetic construct
  misc_feature 1..20: note = Description of Artificial Sequence: Synthetic oligonucleotide
  misc_feature 1..20: note = Target: FXN; (+) strand; PAM type: NRG; PAM sequence: CGG
  source 1..20: mol_type = other DNA
cagccttgacctccctggct

SEQ ID NO: 18196 - DNA, 20 bp, synthetic construct
  misc_feature 1..20: note = Description of Artificial Sequence: Synthetic oligonucleotide
  misc_feature 1..20: note = Target: FXN; (+) strand; PAM type: NRG; PAM sequence: GGG
  source 1..20: mol_type = other DNA
agccttgacctccctggctc

SEQ ID NO: 18197 - DNA, 20 bp, synthetic construct
  misc_feature 1..20: note = Description of Artificial Sequence: Synthetic oligonucleotide
  misc_feature 1..20: note = Target: FXN; (+) strand; PAM type: NRG; PAM sequence: CAG
  source 1..20: mol_type = other DNA
tcgggtgatccctcccacct

SEQ ID NO: 18198 - DNA, 20 bp, synthetic construct
  misc_feature 1..20: note = Description of Artificial Sequence: Synthetic oligonucleotide
  misc_feature 1..20: note = Target: FXN; (+) strand; PAM type: NRG; PAM sequence: AGG
  source 1..20: mol_type = other DNA
cgggtgatccctcccacctc

SEQ ID NO: 18199 - DNA, 20 bp, synthetic construct
  misc_feature 1..20: note = Description of Artificial Sequence: Synthetic oligonucleotide
  misc_feature 1..20: note = Target: FXN; (+) strand; PAM type: NRG; PAM sequence: GAG
  source 1..20: mol_type = other DNA
ccctcccacctcaggctcct

SEQ ID NO: 18200 - DNA, 20 bp, synthetic construct
  misc_feature 1..20: note = Description of Artificial Sequence: Synthetic oligonucleotide
  misc_feature 1..20: note = Target: FXN; (+) strand; PAM type: NRG; PAM sequence: AGG
  source 1..20: mol_type = other DNA
cctcccacctcaggctcctg

SEQ ID NO: 18201 - DNA, 20 bp, synthetic construct
  misc_feature 1..20: note = Description of Artificial Sequence: Synthetic oligonucleotide
  misc_feature 1..20: note = Target: FXN; (+) strand; PAM type: NRG; PAM sequence: GAG
  source 1..20: mol_type = other DNA
tcccacctcaggctcctgag

SEQ ID NO: 18202 - DNA, 20 bp, synthetic construct
  misc_feature 1..20: note = Description of Artificial Sequence: Synthetic oligonucleotide
  misc_feature 1..20: note = Target: FXN; (+) strand; PAM type: NRG; PAM sequence: TAG
  source 1..20: mol_type = other DNA
acctcaggctcctgaggagc

SEQ ID NO: 18203 - DNA, 20 bp, synthetic construct
  misc_feature 1..20: note = Description of Artificial Sequence: Synthetic oligonucleotide
  misc_feature 1..20: note = Target: FXN; (+) strand; PAM type: NRG; PAM sequence: CAG
  source 1..20: mol_type = other DNA
ctcctgaggagctagaacta

SEQ ID NO: 18204 - DNA, 20 bp, synthetic construct
  misc_feature 1..20: note = Description of Artificial Sequence: Synthetic oligonucleotide
  misc_feature 1..20: note = Target: FXN; (+) strand; PAM type: NRG; PAM sequence: AGG
  source 1..20: mol_type = other DNA
tcctgaggagctagaactac

SEQ ID NO: 18205 - DNA, 20 bp, synthetic construct
  misc_feature 1..20: note = Description of Artificial Sequence: Synthetic oligonucleotide
  misc_feature 1..20: note = Target: FXN; (+) strand; PAM type: NRG; PAM sequence: TGG
  source 1..20: mol_type = other DNA
aggagctagaactacaggca

SEQ ID NO: 18206 - DNA, 20 bp, synthetic construct
  misc_feature 1..20: note = Description of Artificial Sequence: Synthetic oligonucleotide
  misc_feature 1..20: note = Target: FXN; (+) strand; PAM type: NRG; PAM sequence: GGG
  source 1..20: mol_type = other DNA
ggagctagaactacaggcat

SEQ ID NO: 18207 - DNA, 20 bp, synthetic construct
  misc_feature 1..20: note = Description of Artificial Sequence: Synthetic oligonucleotide
  misc_feature 1..20: note = Target: FXN; (+) strand; PAM type: NRG; PAM sequence: CAG
  source 1..20: mol_type = other DNA
ctacaggcatgggccatgcc

SEQ ID NO: 18208 - DNA, 20 bp, synthetic construct
  misc_feature 1..20: note = Description of Artificial Sequence: Synthetic oligonucleotide
  misc_feature 1..20: note = Target: FXN; (+) strand; PAM type: NRG; PAM sequence: TGG
  source 1..20: mol_type = other DNA
ccagctaattttttaatttt

SEQ ID NO: 18209 - DNA, 20 bp, synthetic construct
  misc_feature 1..20: note = Description of Artificial Sequence: Synthetic oligonucleotide
  misc_feature 1..20: note = Target: FXN; (+) strand; PAM type: NRG; PAM sequence: TAG
  source 1..20: mol_type = other DNA
gctaattttttaatttttgg

SEQ ID NO: 18210 - DNA, 20 bp, synthetic construct
  misc_feature 1..20: note = Description of Artificial Sequence: Synthetic oligonucleotide
  misc_feature 1..20: note = Target: FXN; (+) strand; PAM type: NRG; PAM sequence: GAG
  source 1..20: mol_type = other DNA
taattttttaatttttggta

SEQ ID NO: 18211 - DNA, 20 bp, synthetic construct
  misc_feature 1..20: note = Description of Artificial Sequence: Synthetic oligonucleotide
  misc_feature 1..20: note = Target: FXN; (+) strand; PAM type: NRG; PAM sequence: CGG
  source 1..20: mol_type = other DNA
tttttaatttttggtagaga

SEQ ID NO: 18212 - DNA, 20 bp, synthetic construct
  misc_feature 1..20: note = Description of Artificial Sequence: Synthetic oligonucleotide
  misc_feature 1..20: note = Target: FXN; (+) strand; PAM type: NRG; PAM sequence: GGG
  source 1..20: mol_type = other DNA
ttttaatttttggtagagac

SEQ ID NO: 18213 - DNA, 20 bp, synthetic construct
  misc_feature 1..20: note = Description of Artificial Sequence: Synthetic oligonucleotide
  misc_feature 1..20: note = Target: FXN; (+) strand; PAM type: NRG; PAM sequence: GGG
  source 1..20: mol_type = other DNA
tttaatttttggtagagacg

SEQ ID NO: 18214 - DNA, 20 bp, synthetic construct
  misc_feature 1..20: note = Description of Artificial Sequence: Synthetic oligonucleotide
  misc_feature 1..20: note = Target: FXN; (+) strand; PAM type: NRG; PAM sequence: CAG
  source 1..20: mol_type = other DNA
agacggggtctctgttgtct

SEQ ID NO: 18215 - DNA, 20 bp, synthetic construct
  misc_feature 1..20: note = Description of Artificial Sequence: Synthetic oligonucleotide
  misc_feature 1..20: note = Target: FXN; (+) strand; PAM type: NRG; PAM sequence: TGG
  source 1..20: mol_type = other DNA
tctctgttgtctcagattcc

SEQ ID NO: 18216 - DNA, 20 bp, synthetic construct
  misc_feature 1..20: note = Description of Artificial Sequence: Synthetic oligonucleotide
  misc_feature 1..20: note = Target: FXN; (+) strand; PAM type: NRG; PAM sequence: GGG
  source 1..20: mol_type = other DNA
ctctgttgtctcagattcct

SEQ ID NO: 18217 - DNA, 20 bp, synthetic construct
  misc_feature 1..20: note = Description of Artificial Sequence: Synthetic oligonucleotide
  misc_feature 1..20: note = Target: FXN; (+) strand; PAM type: NRG; PAM sequence: AAG
  source 1..20: mol_type = other DNA
tgtctcagattcctgggttc

SEQ ID NO: 18218 - DNA, 20 bp, synthetic construct
  misc_feature 1..20: note = Description of Artificial Sequence: Synthetic oligonucleotide
  misc_feature 1..20: note = Target: FXN; (+) strand; PAM type: NRG; PAM sequence: TGG
  source 1..20: mol_type = other DNA
ttcaagtgatccttctccct

SEQ ID NO: 18219 - DNA, 20 bp, synthetic construct
  misc_feature 1..20: note = Description of Artificial Sequence: Synthetic oligonucleotide
  misc_feature 1..20: note = Target: FXN; (+) strand; PAM type: NRG; PAM sequence: AAG
  source 1..20: mol_type = other DNA
ccttctcccttggcctccca

SEQ ID NO: 18220 - DNA, 20 bp, synthetic construct
  misc_feature 1..20: note = Description of Artificial Sequence: Synthetic oligonucleotide
  misc_feature 1..20: note = Target: FXN; (+) strand; PAM type: NRG; PAM sequence: TGG
  source 1..20: mol_type = other DNA
cccttggcctcccaaagttc

SEQ ID NO: 18221 - DNA, 20 bp, synthetic construct
  misc_feature 1..20: note = Description of Artificial Sequence: Synthetic oligonucleotide
  misc_feature 1..20: note = Target: FXN; (+) strand; PAM type: NRG; PAM sequence: CAG
  source 1..20: mol_type = other DNA
ctcccaaagttctggtatta

SEQ ID NO: 18222 - DNA, 20 bp, synthetic construct
  misc_feature 1..20: note = Description of Artificial Sequence: Synthetic oligonucleotide
  misc_feature 1..20: note = Target: FXN; (+) strand; PAM type: NRG; PAM sequence: AGG
  source 1..20: mol_type = other DNA
tcccaaagttctggtattac

SEQ ID NO: 18223 - DNA, 20 bp, synthetic construct
  misc_feature 1..20: note = Description of Artificial Sequence: Synthetic oligonucleotide
  misc_feature 1..20: note = Target: FXN; (+) strand; PAM type: NRG; PAM sequence: GAG
  source 1..20: mol_type = other DNA
agttctggtattacaggcat

SEQ ID NO: 18224 - DNA, 20 bp, synthetic construct
  misc_feature 1..20: note = Description of Artificial Sequence: Synthetic oligonucleotide
  misc_feature 1..20: note = Target: FXN; (+) strand; PAM type: NRG; PAM sequence: CAG
  source 1..20: mol_type = other DNA
caggcatgagccactgcacc

SEQ ID NO: 18225 - DNA, 20 bp, synthetic construct
  misc_feature 1..20: note = Description of Artificial Sequence: Synthetic oligonucleotide
  misc_feature 1..20: note = Target: FXN; (+) strand; PAM type: NRG; PAM sequence: TGG
  source 1..20: mol_type = other DNA
gagccactgcacccagccca

SEQ ID NO: 18226 - DNA, 20 bp, synthetic construct
  misc_feature 1..20: note = Description of Artificial Sequence: Synthetic oligonucleotide
  misc_feature 1..20: note = Target: FXN; (+) strand; PAM type: NRG; PAM sequence: CAG
  source 1..20: mol_type = other DNA
cactgcacccagcccatggc

SEQ ID NO: 18227 - DNA, 20 bp, synthetic construct
  misc_feature 1..20: note = Description of Artificial Sequence: Synthetic oligonucleotide
  misc_feature 1..20: note = Target: FXN; (+) strand; PAM type: NRG; PAM sequence: GAG
  source 1..20: mol_type = other DNA
tctttttttttttttaattt

SEQ ID NO: 18228 - DNA, 20 bp, synthetic construct
  misc_feature 1..20: note = Description of Artificial Sequence: Synthetic oligonucleotide
  misc_feature 1..20: note = Target: FXN; (+) strand; PAM type: NRG; PAM sequence: AAG
  source 1..20: mol_type = other DNA
ttttttttttttaatttgag

SEQ ID NO: 18229 - DNA, 20 bp, synthetic construct
  misc_feature 1..20: note = Description of Artificial Sequence: Synthetic oligonucleotide
  misc_feature 1..20: note = Target: FXN; (+) strand; PAM type: NRG; PAM sequence: CAG
  source 1..20: mol_type = other DNA
aaccacaccaaaatgtcttt

SEQ ID NO: 18230 - DNA, 20 bp, synthetic construct
  misc_feature 1..20: note = Description of Artificial Sequence: Synthetic oligonucleotide
  misc_feature 1..20: note = Target: FXN; (+) strand; PAM type: NRG; PAM sequence: AAG
  source 1..20: mol_type = other DNA
acaccaaaatgtctttcagt

SEQ ID NO: 18231 - DNA, 20 bp, synthetic construct
  misc_feature 1..20: note = Description of Artificial Sequence: Synthetic oligonucleotide
  misc_feature 1..20: note = Target: FXN; (+) strand; PAM type: NRG; PAM sequence: TAG
  source 1..20: mol_type = other DNA
gtaagtaaaatgaaccattt

SEQ ID NO: 18232 - DNA, 20 bp, synthetic construct
  misc_feature 1..20: note = Description of Artificial Sequence: Synthetic oligonucleotide
  misc_feature 1..20: note = Target: FXN; (+) strand; PAM type: NRG; PAM sequence: CAG
  source 1..20: mol_type = other DNA
aaaatgaaccattttagata

SEQ ID NO: 18233 - DNA, 20 bp, synthetic construct
  misc_feature 1..20: note = Description of Artificial Sequence: Synthetic oligonucleotide
  misc_feature 1..20: note = Target: FXN; (+) strand; PAM type: NRG; PAM sequence: TAG
  source 1..20: mol_type = other DNA
tagatacagaaaattctaat

SEQ ID NO: 18234 - DNA, 20 bp, synthetic construct
  misc_feature 1..20: note = Description of Artificial Sequence: Synthetic oligonucleotide
  misc_feature 1..20: note = Target: FXN; (+) strand; PAM type: NRG; PAM sequence: TGG
  source 1..20: mol_type = other DNA
acagaaaattctaattagat

SEQ ID NO: 18235 - DNA, 20 bp, synthetic construct
  misc_feature 1..20: note = Description of Artificial Sequence: Synthetic oligonucleotide
  misc_feature 1..20: note = Target: FXN; (+) strand; PAM type: NRG; PAM sequence: TAG
  source 1..20: mol_type = other DNA
aaattctaattagattggca

SEQ ID NO: 18236 - DNA, 20 bp, synthetic construct
  misc_feature 1..20: note = Description of Artificial Sequence: Synthetic oligonucleotide
  misc_feature 1..20: note = Target: FXN; (+) strand; PAM type: NRG; PAM sequence: AAG
  source 1..20: mol_type = other DNA
ctaattagattggcatagtt

SEQ ID NO: 18237 - DNA, 20 bp, synthetic construct
  misc_feature 1..20: note = Description of Artificial Sequence: Synthetic oligonucleotide
  misc_feature 1..20: note = Target: FXN; (+) strand; PAM type: NRG; PAM sequence: AGG
  source 1..20: mol_type = other DNA
taattagattggcatagtta

SEQ ID NO: 18238 - DNA, 20 bp, synthetic construct
  misc_feature 1..20: note = Description of Artificial Sequence: Synthetic oligonucleotide
  misc_feature 1..20: note = Target: FXN; (+) strand; PAM type: NRG; PAM sequence: AAG
  source 1..20: mol_type = other DNA
tagttaaggccaaaaatata

SEQ ID NO: 18239 - DNA, 20 bp, synthetic construct
  misc_feature 1..20: note = Description of Artificial Sequence: Synthetic oligonucleotide
  misc_feature 1..20: note = Target: FXN; (+) strand; PAM type: NRG; PAM sequence: CAG
  source 1..20: mol_type = other DNA
tgacattgctaccttatctt

SEQ ID NO: 18240 - DNA, 20 bp, synthetic construct
  misc_feature 1..20: note = Description of Artificial Sequence: Synthetic oligonucleotide
  misc_feature 1..20: note = Target: FXN; (+) strand; PAM type: NRG; PAM sequence: AAG
  source 1..20: mol_type = other DNA
tatcttcagcccttgccttt

SEQ ID NO: 18241 - DNA, 20 bp, synthetic construct
  misc_feature 1..20: note = Description of Artificial Sequence: Synthetic oligonucleotide
  misc_feature 1..20: note = Target: FXN; (+) strand; PAM type: NRG; PAM sequence: GAG
  source 1..20: mol_type = other DNA
tcttcagcccttgcctttaa

SEQ ID NO: 18242 - DNA, 20 bp, synthetic construct
  misc_feature 1..20: note = Description of Artificial Sequence: Synthetic oligonucleotide
  misc_feature 1..20: note = Target: FXN; (+) strand; PAM type: NRG; PAM sequence: AGG
  source 1..20: mol_type = other DNA
cttcagcccttgcctttaag

SEQ ID NO: 18243 - DNA, 20 bp, synthetic construct
  misc_feature 1..20: note = Description of Artificial Sequence: Synthetic oligonucleotide
  misc_feature 1..20: note = Target: FXN; (+) strand; PAM type: NRG; PAM sequence: CAG
  source 1..20: mol_type = other DNA
aggcaaatgaacacaaaata

SEQ ID NO: 18244 - DNA, 20 bp, synthetic construct
  misc_feature 1..20: note = Description of Artificial Sequence: Synthetic oligonucleotide
  misc_feature 1..20: note = Target: FXN; (+) strand; PAM type: NRG; PAM sequence: AGG
  source 1..20: mol_type = other DNA
ggcaaatgaacacaaaatac

SEQ ID NO: 18245 - DNA, 20 bp, synthetic construct
  misc_feature 1..20: note = Description of Artificial Sequence: Synthetic oligonucleotide
  misc_feature 1..20: note = Target: FXN; (+) strand; PAM type: NRG; PAM sequence: TGG
  source 1..20: mol_type = other DNA
aaatacaggtgaatcttgct

SEQ ID NO: 18246 - DNA, 20 bp, synthetic construct
  misc_feature 1..20: note = Description of Artificial Sequence: Synthetic oligonucleotide
  misc_feature 1..20: note = Target: FXN; (+) strand; PAM type: NRG; PAM sequence: GAG
  source 1..20: mol_type = other DNA
ggtgaatcttgcttggttct

SEQ ID NO: 18247 - DNA, 20 bp, synthetic construct
  misc_feature 1..20: note = Description of Artificial Sequence: Synthetic oligonucleotide
  misc_feature 1..20: note = Target: FXN; (+) strand; PAM type: NRG; PAM sequence: CAG
  source 1..20: mol_type = other DNA
aatcttgcttggttctgaga

SEQ ID NO: 18248 - DNA, 20 bp, synthetic construct
  misc_feature 1..20: note = Description of Artificial Sequence: Synthetic oligonucleotide
  misc_feature 1..20: note = Target: FXN; (+) strand; PAM type: NRG; PAM sequence: AAG
  source 1..20: mol_type = other DNA
tgcttggttctgagacagtg

SEQ ID NO: 18249 - DNA, 20 bp, synthetic construct
  misc_feature 1..20: note = Description of Artificial Sequence: Synthetic oligonucleotide
  misc_feature 1..20: note = Target: FXN; (+) strand; PAM type: NRG; PAM sequence: AGG
  source 1..20: mol_type = other DNA
gcttggttctgagacagtga

SEQ ID NO: 18250 - DNA, 20 bp, synthetic construct
  misc_feature 1..20: note = Description of Artificial Sequence: Synthetic oligonucleotide
  misc_feature 1..20: note = Target: FXN; (+) strand; PAM type: NRG; PAM sequence: CAG
  source 1..20: mol_type = other DNA
gacagtgaaggactttcccc

SEQ ID NO: 18251 - DNA, 20 bp, synthetic construct
  misc_feature 1..20: note = Description of Artificial Sequence: Synthetic oligonucleotide
  misc_feature 1..20: note = Target: FXN; (+) strand; PAM type: NRG; PAM sequence: CAG
  source 1..20: mol_type = other DNA
tttaaatatatttacataac

SEQ ID NO: 18252 - DNA, 20 bp, synthetic construct
  misc_feature 1..20: note = Description of Artificial Sequence: Synthetic oligonucleotide
  misc_feature 1..20: note = Target: FXN; (+) strand; PAM type: NRG; PAM sequence: TAG
  source 1..20: mol_type = other DNA
aatattaaaaaaatctccaa

SEQ ID NO: 18253 - DNA, 20 bp, synthetic construct
  misc_feature 1..20: note = Description of Artificial Sequence: Synthetic oligonucleotide
  misc_feature 1..20: note = Target: FXN; (+) strand; PAM type: NRG; PAM sequence: TAG
  source 1..20: mol_type = other DNA
aaaaaatctccaatagattt

SEQ ID NO: 18254 - DNA, 20 bp, synthetic construct
  misc_feature 1..20: note = Description of Artificial Sequence: Synthetic oligonucleotide
  misc_feature 1..20: note = Target: FXN; (+) strand; PAM type: NRG; PAM sequence: TGG
  source 1..20: mol_type = other DNA
aatctccaatagattttaga

SEQ ID NO: 18255 - DNA, 20 bp, synthetic construct
  misc_feature 1..20: note = Description of Artificial Sequence: Synthetic oligonucleotide
  misc_feature 1..20: note = Target: FXN; (+) strand; PAM type: NRG; PAM sequence: AAG
  source 1..20: mol_type = other DNA
gcattcaccatctttgtgaa

SEQ ID NO: 18256 - DNA, 20 bp, synthetic construct
  misc_feature 1..20: note = Description of Artificial Sequence: Synthetic oligonucleotide
  misc_feature 1..20: note = Target: FXN; (+) strand; PAM type: NRG; PAM sequence: TAG
  source 1..20: mol_type = other DNA
atgaaatctgatcatatctt

SEQ ID NO: 18257 - DNA, 20 bp, synthetic construct
  misc_feature 1..20: note = Description of Artificial Sequence: Synthetic oligonucleotide
  misc_feature 1..20: note = Target: FXN; (+) strand; PAM type: NRG; PAM sequence: AAG
  source 1..20: mol_type = other DNA
aaatctgatcatatctttag

SEQ ID NO: 18258 - DNA, 20 bp, synthetic construct
  misc_feature 1..20: note = Description of Artificial Sequence: Synthetic oligonucleotide
  misc_feature 1..20: note = Target: FXN; (+) strand; PAM type: NRG; PAM sequence: AGG
  source 1..20: mol_type = other DNA
aatctgatcatatctttaga

SEQ ID NO: 18259 - DNA, 20 bp, synthetic construct
  misc_feature 1..20: note = Description of Artificial Sequence: Synthetic oligonucleotide
  misc_feature 1..20: note = Target: FXN; (+) strand; PAM type: NRG; PAM sequence: CAG
  source 1..20: mol_type = other DNA
catatctttagaaggataaa

SEQ ID NO: 18260 - DNA, 20 bp, synthetic construct
  misc_feature 1..20: note = Description of Artificial Sequence: Synthetic oligonucleotide
  misc_feature 1..20: note = Target: FXN; (+) strand; PAM type: NRG; PAM sequence: TAG
  source 1..20: mol_type = other DNA
tttagaaggataaacagtga

SEQ ID NO: 18261 - DNA, 20 bp, synthetic construct
  misc_feature 1..20: note = Description of Artificial Sequence: Synthetic oligonucleotide
  misc_feature 1..20: note = Target: FXN; (+) strand; PAM type: NRG; PAM sequence: CAG
  source 1..20: mol_type = other DNA
agtgatagcatttactgaat

SEQ ID NO: 18262 - DNA, 20 bp, synthetic construct
  misc_feature 1..20: note = Description of Artificial Sequence: Synthetic oligonucleotide
  misc_feature 1..20: note = Target: FXN; (+) strand; PAM type: NRG; PAM sequence: TGG
  source 1..20: mol_type = other DNA
gaatcagaataactgttttt

SEQ ID NO: 18263 - DNA, 20 bp, synthetic construct
  misc_feature 1..20: note = Description of Artificial Sequence: Synthetic oligonucleotide
  misc_feature 1..20: note = Target: FXN; (+) strand; PAM type: NRG; PAM sequence: GGG
  source 1..20: mol_type = other DNA
aatcagaataactgtttttt

SEQ ID NO: 18264 - DNA, 20 bp, synthetic construct
  misc_feature 1..20: note = Description of Artificial Sequence: Synthetic oligonucleotide
  misc_feature 1..20: note = Target: FXN; (+) strand; PAM type: NRG; PAM sequence: GGG
  source 1..20: mol_type = other DNA
atcagaataactgttttttg

SEQ ID NO: 18265 - DNA, 20 bp, synthetic construct
  misc_feature 1..20: note = Description of Artificial Sequence: Synthetic oligonucleotide
  misc_feature 1..20: note = Target: FXN; (+) strand; PAM type: NRG; PAM sequence: GAG
  source 1..20: mol_type = other DNA
tgttttttggggttttcttt

SEQ ID NO: 18266 - DNA, 20 bp, synthetic construct
  misc_feature 1..20: note = Description of Artificial Sequence: Synthetic oligonucleotide
  misc_feature 1..20: note = Target: FXN; (+) strand; PAM type: NRG; PAM sequence: CGG
  source 1..20: mol_type = other DNA
ttttggggttttctttgaga

SEQ ID NO: 18267 - DNA, 20 bp, synthetic construct
  misc_feature 1..20: note = Description of Artificial Sequence: Synthetic oligonucleotide
  misc_feature 1..20: note = Target: FXN; (+) strand; PAM type: NRG; PAM sequence: GAG
  source 1..20: mol_type = other DNA
ttggggttttctttgagacg

SEQ ID NO: 18268 - DNA, 20 bp, synthetic construct
  misc_feature 1..20: note = Description of Artificial Sequence: Synthetic oligonucleotide
  misc_feature 1..20: note = Target: FXN; (+) strand; PAM type: NRG; PAM sequence: CAG
  source 1..20: mol_type = other DNA
ggagttttgctcttgttgcc

SEQ ID NO: 18269 - DNA, 20 bp, synthetic construct
  misc_feature 1..20: note = Description of Artificial Sequence: Synthetic oligonucleotide
  misc_feature 1..20: note = Target: FXN; (+) strand; PAM type: NRG; PAM sequence: AGG
  source 1..20: mol_type = other DNA
gagttttgctcttgttgccc

SEQ ID NO: 18270 - DNA, 20 bp, synthetic construct
  misc_feature 1..20: note = Description of Artificial Sequence: Synthetic oligonucleotide
  misc_feature 1..20: note = Target: FXN; (+) strand; PAM type: NRG; PAM sequence: TGG
  source 1..20: mol_type = other DNA
tttgctcttgttgcccaggc

SEQ ID NO: 18271 - DNA, 20 bp, synthetic construct
  misc_feature 1..20: note = Description of Artificial Sequence: Synthetic oligonucleotide
  misc_feature 1..20: note = Target: FXN; (+) strand; PAM type: NRG; PAM sequence: GAG
  source 1..20: mol_type = other DNA
tgctcttgttgcccaggctg

SEQ ID NO: 18272 - DNA, 20 bp, synthetic construct
  misc_feature 1..20: note = Description of Artificial Sequence: Synthetic oligonucleotide
  misc_feature 1..20: note = Target: FXN; (+) strand; PAM type: NRG; PAM sequence: CAG
  source 1..20: mol_type = other DNA
ttgttgcccaggctggagtg

SEQ ID NO: 18273 - DNA, 20 bp, synthetic construct
  misc_feature 1..20: note = Description of Artificial Sequence: Synthetic oligonucleotide
  misc_feature 1..20: note = Target: FXN; (+) strand; PAM type: NRG; PAM sequence: TGG
  source 1..20: mol_type = other DNA
ttgcccaggctggagtgcag

SEQ ID NO: 18274 - DNA, 20 bp, synthetic construct
  misc_feature 1..20: note = Description of Artificial Sequence: Synthetic oligonucleotide
  misc_feature 1..20: note = Target: FXN; (+) strand; PAM type: NRG; PAM sequence: CAG
  source 1..20: mol_type = other DNA
ggagtgcagtggtgccacct

SEQ ID NO: 18275 - DNA, 20 bp, synthetic construct
  misc_feature 1..20: note = Description of Artificial Sequence: Synthetic oligonucleotide
  misc_feature 1..20: note = Target: FXN; (+) strand; PAM type: NRG; PAM sequence: TGG
  source 1..20: mol_type = other DNA
tcactgcaacctccgccccc

SEQ ID NO: 18276 - DNA, 20 bp, synthetic construct
  misc_feature 1..20: note = Description of Artificial Sequence: Synthetic oligonucleotide
  misc_feature 1..20: note = Target: FXN; (+) strand; PAM type: NRG; PAM sequence: AAG
  source 1..20: mol_type = other DNA
aacctccgccccctggattc

SEQ ID NO: 18277 - DNA, 20 bp, synthetic construct
  misc_feature 1..20: note = Description of Artificial Sequence: Synthetic oligonucleotide
  misc_feature 1..20: note = Target: FXN; (+) strand; PAM type: NRG; PAM sequence: GAG
  source 1..20: mol_type = other DNA
cctccgccccctggattcaa

SEQ ID NO: 18278 - DNA, 20 bp, synthetic construct
  misc_feature 1..20: note = Description of Artificial Sequence: Synthetic oligonucleotide
  misc_feature 1..20: note = Target: FXN; (+) strand; PAM type: NRG; PAM sequence: CAG
  source 1..20: mol_type = other DNA
ttcaagagattatcctgcct

SEQ ID NO: 18279 - DNA, 20 bp, synthetic construct
  misc_feature 1..20: note = Description of Artificial Sequence: Synthetic oligonucleotide
  misc_feature 1..20: note = Target: FXN; (+) strand; PAM type: NRG; PAM sequence: GAG
  source 1..20: mol_type = other DNA
ttatcctgcctcagcctccc

SEQ ID NO: 18280 - DNA, 20 bp, synthetic construct
  misc_feature 1..20: note = Description of Artificial Sequence: Synthetic oligonucleotide
  misc_feature 1..20: note = Target: FXN; (+) strand; PAM type: NRG; PAM sequence: TAG
  source 1..20: mol_type = other DNA
tcctgcctcagcctcccgag

SEQ ID NO: 18281 - DNA, 20 bp, synthetic construct
  misc_feature 1..20: note = Description of Artificial Sequence: Synthetic oligonucleotide
  misc_feature 1..20: note = Target: FXN; (+) strand; PAM type: NRG; PAM sequence: TGG
  source 1..20: mol_type = other DNA
gcctcagcctcccgagtagc

SEQ ID NO: 18282 - DNA, 20 bp, synthetic construct
  misc_feature 1..20: note = Description of Artificial Sequence: Synthetic oligonucleotide
  misc_feature 1..20: note = Target: FXN; (+) strand; PAM type: NRG; PAM sequence: GGG
  source 1..20: mol_type = other DNA
cctcagcctcccgagtagct

SEQ ID NO: 18283 - DNA, 20 bp, synthetic construct
  misc_feature 1..20: note = Description of Artificial Sequence: Synthetic oligonucleotide
  misc_feature 1..20: note = Target: FXN; (+) strand; PAM type: NRG; PAM sequence: CAG
  source 1..20: mol_type = other DNA
ctcccgagtagctgggatta

SEQ ID NO: 18284 - DNA, 20 bp, synthetic construct
  misc_feature 1..20: note = Description of Artificial Sequence: Synthetic oligonucleotide
  misc_feature 1..20: note = Target: FXN; (+) strand; PAM type: NRG; PAM sequence: AGG
  source 1..20: mol_type = other DNA
tcccgagtagctgggattac

SEQ ID NO: 18285 - DNA, 20 bp, synthetic construct
  misc_feature 1..20: note = Description of Artificial Sequence: Synthetic oligonucleotide
  misc_feature 1..20: note = Target: FXN; (+) strand; PAM type: NRG; PAM sequence: CAG
  source 1..20: mol_type = other DNA
caggctcgccccaccatgcc

SEQ ID NO: 18286 - DNA, 20 bp, synthetic construct
  misc_feature 1..20: note = Description of Artificial Sequence: Synthetic oligonucleotide
  misc_feature 1..20: note = Target: FXN; (+) strand; PAM type: NRG; PAM sequence: TAG
  source 1..20: mol_type = other DNA
ccagctaatttttgtatttt

SEQ ID NO: 18287 - DNA, 20 bp, synthetic construct
  misc_feature 1..20: note = Description of Artificial Sequence: Synthetic oligonucleotide
  misc_feature 1..20: note = Target: FXN; (+) strand; PAM type: NRG; PAM sequence: TAG
  source 1..20: mol_type = other DNA
gctaatttttgtatttttag

SEQ ID NO: 18288 - DNA, 20 bp, synthetic construct
  misc_feature 1..20: note = Description of Artificial Sequence: Synthetic oligonucleotide
  misc_feature 1..20: note = Target: FXN; (+) strand; PAM type: NRG; PAM sequence: GAG
  source 1..20: mol_type = other DNA
taatttttgtatttttagta

SEQ ID NO: 18289 - DNA, 20 bp, synthetic construct
  misc_feature 1..20: note = Description of Artificial Sequence: Synthetic oligonucleotide
  misc_feature 1..20: note = Target: FXN; (+) strand; PAM type: NRG; PAM sequence: AGG
  source 1..20: mol_type = other DNA
aatttttgtatttttagtag

SEQ ID NO: 18290 - DNA, 20 bp, synthetic construct
  misc_feature 1..20: note = Description of Artificial Sequence: Synthetic oligonucleotide
  misc_feature 1..20: note = Target: FXN; (+) strand; PAM type: NRG; PAM sequence: GAG
  source 1..20: mol_type = other DNA
tttgtatttttagtagaggc

SEQ ID NO: 18291 - DNA, 20 bp, synthetic construct
  misc_feature 1..20: note = Description of Artificial Sequence: Synthetic oligonucleotide
  misc_feature 1..20: note = Target: FXN; (+) strand; PAM type: NRG; PAM sequence: AGG
  source 1..20: mol_type = other DNA
ttgtatttttagtagaggcg

SEQ ID NO: 18292 - DNA, 20 bp, synthetic construct
  misc_feature 1..20: note = Description of Artificial Sequence: Synthetic oligonucleotide
  misc_feature 1..20: note = Target: FXN; (+) strand; PAM type: NRG; PAM sequence: CAG
  source 1..20: mol_type = other DNA
gaggcgaggtttcaccatgt

SEQ ID NO: 18293 - DNA, 20 bp, synthetic construct
  misc_feature 1..20: note = Description of Artificial Sequence: Synthetic oligonucleotide
  misc_feature 1..20: note = Target: FXN; (+) strand; PAM type: NRG; PAM sequence: CAG
  source 1..20: mol_type = other DNA
cgaggtttcaccatgtcagc

SEQ ID NO: 18294 - DNA, 20 bp, synthetic construct
  misc_feature 1..20: note = Description of Artificial Sequence: Synthetic oligonucleotide
  misc_feature 1..20: note = Target: FXN; (+) strand; PAM type: NRG; PAM sequence: AGG
  source 1..20: mol_type = other DNA
gaggtttcaccatgtcagcc

SEQ ID NO: 18295 - DNA, 20 bp, synthetic construct
  misc_feature 1..20: note = Description of Artificial Sequence: Synthetic oligonucleotide
  misc_feature 1..20: note = Target: FXN; (+) strand; PAM type: NRG; PAM sequence: TGG
  source 1..20: mol_type = other DNA
tttcaccatgtcagccaggc

SEQ ID NO: 18296 - DNA, 20 bp, synthetic construct
  misc_feature 1..20: note = Description of Artificial Sequence: Synthetic oligonucleotide
  misc_feature 1..20: note = Target: FXN; (+) strand; PAM type: NRG; PAM sequence: CAG
  source 1..20: mol_type = other DNA
tggtcttgaactcctgacct

SEQ ID NO: 18297 - DNA, 20 bp, synthetic construct
  misc_feature 1..20: note = Description of Artificial Sequence: Synthetic oligonucleotide
  misc_feature 1..20: note = Target: FXN; (+) strand; PAM type: NRG; PAM sequence: AGG
  source 1..20: mol_type = other DNA
ggtcttgaactcctgacctc

SEQ ID NO: 18298 - DNA, 20 bp, synthetic construct
  misc_feature 1..20: note = Description of Artificial Sequence: Synthetic oligonucleotide
  misc_feature 1..20: note = Target: FXN; (+) strand; PAM type: NRG; PAM sequence: CAG
  source 1..20: mol_type = other DNA
ctcaggtgatccacccgcct

SEQ ID NO: 18299 - DNA, 20 bp, synthetic construct
  misc_feature 1..20: note = Description of Artificial Sequence: Synthetic oligonucleotide
  misc_feature 1..20: note = Target: FXN; (+) strand; PAM type: NRG; PAM sequence: TAG
  source 1..20: mol_type = other DNA
gcctcagcctcccaaaatgc

SEQ ID NO: 18300 - DNA, 20 bp, synthetic construct
  misc_feature 1..20: note = Description of Artificial Sequence: Synthetic oligonucleotide
  misc_feature 1..20: note = Target: FXN; (+) strand; PAM type: NRG; PAM sequence: AGG
  source 1..20: mol_type = other DNA
cctcagcctcccaaaatgct

SEQ ID NO: 18301 - DNA, 20 bp, synthetic construct
  misc_feature 1..20: note = Description of Artificial Sequence: Synthetic oligonucleotide
  misc_feature 1..20: note = Target: FXN; (+) strand; PAM type: NRG; PAM sequence: CAG
  source 1..20: mol_type = other DNA
ctcccaaaatgctaggatta

SEQ ID NO: 18302 - DNA, 20 bp, synthetic construct
  misc_feature 1..20: note = Description of Artificial Sequence: Synthetic oligonucleotide
  misc_feature 1..20: note = Target: FXN; (+) strand; PAM type: NRG; PAM sequence: AGG
  source 1..20: mol_type = other DNA
tcccaaaatgctaggattac

SEQ ID NO: 18303 - DNA, 20 bp, synthetic construct
  misc_feature 1..20: note = Description of Artificial Sequence: Synthetic oligonucleotide
  misc_feature 1..20: note = Target: FXN; (+) strand; PAM type: NRG; PAM sequence: GAG
  source 1..20: mol_type = other DNA
aatgctaggattacaggcgt

SEQ ID NO: 18304 - DNA, 20 bp, synthetic construct
  misc_feature 1..20: note = Description of Artificial Sequence: Synthetic oligonucleotide
  misc_feature 1..20: note = Target: FXN; (+) strand; PAM type: NRG; PAM sequence: CAG
  source 1..20: mol_type = other DNA
ggattacaggcgtgagccac

SEQ ID NO: 18305 - DNA, 20 bp, synthetic construct
  misc_feature 1..20: note = Description of Artificial Sequence: Synthetic oligonucleotide
  misc_feature 1..20: note = Target: FXN; (+) strand; PAM type: NRG; PAM sequence: AGG
  source 1..20: mol_type = other DNA
gattacaggcgtgagccacc

SEQ ID NO: 18306 - DNA, 20 bp, synthetic construct
  misc_feature 1..20: note = Description of Artificial Sequence: Synthetic oligonucleotide
  misc_feature 1..20: note = Target: FXN; (+) strand; PAM type: NRG; PAM sequence: CAG
  source 1..20: mol_type = other DNA
caggcgtgagccaccaggcc

SEQ ID NO: 18307 - DNA, 20 bp, synthetic construct
  misc_feature 1..20: note = Description of Artificial Sequence: Synthetic oligonucleotide
  misc_feature 1..20: note = Target: FXN; (+) strand; PAM type: NRG; PAM sequence: GAG
  source 1..20: mol_type = other DNA
ttttttttttttcttttttt

SEQ ID NO: 18308 - DNA, 20 bp, synthetic construct
  misc_feature 1..20: note = Description of Artificial Sequence: Synthetic oligonucleotide
  misc_feature 1..20: note = Target: FXN; (+) strand; PAM type: NRG; PAM sequence: CGG
  source 1..20: mol_type = other DNA
ttttttttctttttttgaga

SEQ ID NO: 18309 - DNA, 20 bp, synthetic construct
  misc_feature 1..20: note = Description of Artificial Sequence: Synthetic oligonucleotide
  misc_feature 1..20: note = Target: FXN; (+) strand; PAM type: NRG; PAM sequence: GAG
  source 1..20: mol_type = other DNA
ttttttctttttttgagacg

SEQ ID NO: 18310 - DNA, 20 bp, synthetic construct
  misc_feature 1..20: note = Description of Artificial Sequence: Synthetic oligonucleotide
  misc_feature 1..20: note = Target: FXN; (+) strand; PAM type: NRG; PAM sequence: CAG
  source 1..20: mol_type = other DNA
cggagtctcactctgtcacc

SEQ ID NO: 18311 - DNA, 20 bp, synthetic construct
  misc_feature 1..20: note = Description of Artificial Sequence: Synthetic oligonucleotide
  misc_feature 1..20: note = Target: FXN; (+) strand; PAM type: NRG; PAM sequence: AGG
  source 1..20: mol_type = other DNA
ggagtctcactctgtcaccc

SEQ ID NO: 18312 - DNA, 20 bp, synthetic construct
  misc_feature 1..20: note = Description of Artificial Sequence: Synthetic oligonucleotide
  misc_feature 1..20: note = Target: FXN; (+) strand; PAM type: NRG; PAM sequence: TGG
  source 1..20: mol_type = other DNA
tctcactctgtcacccaggc

SEQ ID NO: 18313 - DNA, 20 bp, synthetic construct
  misc_feature 1..20: note = Description of Artificial Sequence: Synthetic oligonucleotide
  misc_feature 1..20: note = Target: FXN; (+) strand; PAM type: NRG; PAM sequence: GAG
  source 1..20: mol_type = other DNA
tcactctgtcacccaggctg

SEQ ID NO: 18314 - DNA, 20 bp, synthetic construct
  misc_feature 1..20: note = Description of Artificial Sequence: Synthetic oligonucleotide
  misc_feature 1..20: note = Target: FXN; (+) strand; PAM type: NRG; PAM sequence: CAG
  source 1..20: mol_type = other DNA
ctgtcacccaggctggagtg

SEQ ID NO: 18315 - DNA, 20 bp, synthetic construct
  misc_feature 1..20: note = Description of Artificial Sequence: Synthetic oligonucleotide
  misc_feature 1..20: note = Target: FXN; (+) strand; PAM type: NRG; PAM sequence: TGG
  source 1..20: mol_type = other DNA
tcacccaggctggagtgcag

SEQ ID NO: 18316 - DNA, 20 bp, synthetic construct
  misc_feature 1..20: note = Description of Artificial Sequence: Synthetic oligonucleotide
  misc_feature 1..20: note = Target: FXN; (+) strand; PAM type: NRG; PAM sequence: CAG
  source 1..20: mol_type = other DNA
ggagtgcagtggcacaatgt

SEQ ID NO: 18317 - DNA, 20 bp, synthetic construct
  misc_feature 1..20: note = Description of Artificial Sequence: Synthetic oligonucleotide
  misc_feature 1..20: note = Target: FXN; (+) strand; PAM type: NRG; PAM sequence: CGG
  source 1..20: mol_type = other DNA
ctcattgcaacctccacctc

SEQ ID NO: 18318 - DNA, 20 bp, synthetic construct
  misc_feature 1..20: note = Description of Artificial Sequence: Synthetic oligonucleotide
  misc_feature 1..20: note = Target: FXN; (+) strand; PAM type: NRG; PAM sequence: GGG
  source 1..20: mol_type = other DNA
tcattgcaacctccacctcc

SEQ ID NO: 18319 - DNA, 20 bp, synthetic construct
  misc_feature 1..20: note = Description of Artificial Sequence: Synthetic oligonucleotide
  misc_feature 1..20: note = Target: FXN; (+) strand; PAM type: NRG; PAM sequence: GGG
  source 1..20: mol_type = other DNA
cattgcaacctccacctccg

SEQ ID NO: 18320 - DNA, 20 bp, synthetic construct
  misc_feature 1..20: note = Description of Artificial Sequence: Synthetic oligonucleotide
  misc_feature 1..20: note = Target: FXN; (+) strand; PAM type: NRG; PAM sequence: CAG
  source 1..20: mol_type = other DNA
aacctccacctccggggttt

SEQ ID NO: 18321 - DNA, 20 bp, synthetic construct
  misc_feature 1..20: note = Description of Artificial Sequence: Synthetic oligonucleotide
  misc_feature 1..20: note = Target: FXN; (+) strand; PAM type: NRG; PAM sequence: CAG
  source 1..20: mol_type = other DNA
tttcagtgattctcctgtct

SEQ ID NO: 18322 - DNA, 20 bp, synthetic construct
  misc_feature 1..20: note = Description of Artificial Sequence: Synthetic oligonucleotide
  misc_feature 1..20: note = Target: FXN; (+) strand; PAM type: NRG; PAM sequence: AAG
  source 1..20: mol_type = other DNA
ttctcctgtctcagcctccc

SEQ ID NO: 18323 - DNA, 20 bp, synthetic construct
  misc_feature 1..20: note = Description of Artificial Sequence: Synthetic oligonucleotide
  misc_feature 1..20: note = Target: FXN; (+) strand; PAM type: NRG; PAM sequence: TAG
  source 1..20: mol_type = other DNA
tcctgtctcagcctcccaag

SEQ ID NO: 18324 - DNA, 20 bp, synthetic construct
  misc_feature 1..20: note = Description of Artificial Sequence: Synthetic oligonucleotide
  misc_feature 1..20: note = Target: FXN; (+) strand; PAM type: NRG; PAM sequence: TGG
  source 1..20: mol_type = other DNA
gtctcagcctcccaagtagc

SEQ ID NO: 18325 - DNA, 20 bp, synthetic construct
  misc_feature 1..20: note = Description of Artificial Sequence: Synthetic oligonucleotide
  misc_feature 1..20: note = Target: FXN; (+) strand; PAM type: NRG; PAM sequence: GGG
  source 1..20: mol_type = other DNA
tctcagcctcccaagtagct

SEQ ID NO: 18326 - DNA, 20 bp, synthetic construct
  misc_feature 1..20: note = Description of Artificial Sequence: Synthetic oligonucleotide
  misc_feature 1..20: note = Target: FXN; (+) strand; PAM type: NRG; PAM sequence: CAG
  source 1..20: mol_type = other DNA
tcccaagtagctgggaacta

SEQ ID NO: 18327 - DNA, 20 bp, synthetic construct
  misc_feature 1..20: note = Description of Artificial Sequence: Synthetic oligonucleotide
  misc_feature 1..20: note = Target: FXN; (+) strand; PAM type: NRG; PAM sequence: AGG
  source 1..20: mol_type = other DNA
cccaagtagctgggaactac

SEQ ID NO: 18328 - DNA, 20 bp, synthetic construct
  misc_feature 1..20: note = Description of Artificial Sequence: Synthetic oligonucleotide
  misc_feature 1..20: note = Target: FXN; (+) strand; PAM type: NRG; PAM sequence: AAG
  source 1..20: mol_type = other DNA
gaactacaggcgtgcaccac

SEQ ID NO: 18329 - DNA, 20 bp, synthetic construct
  misc_feature 1..20: note = Description of Artificial Sequence: Synthetic oligonucleotide
  misc_feature 1..20: note = Target: FXN; (+) strand; PAM type: NRG; PAM sequence: CAG
  source 1..20: mol_type = other DNA
acaggcgtgcaccacaagcc

SEQ ID NO: 18330 - DNA, 20 bp, synthetic construct
  misc_feature 1..20: note = Description of Artificial Sequence: Synthetic oligonucleotide
  misc_feature 1..20: note = Target: FXN; (+) strand; PAM type: NRG; PAM sequence: TAG
  source 1..20: mol_type = other DNA
ccagctaatttttgtatttt

SEQ ID NO: 18331 - DNA, 20 bp, synthetic construct
  misc_feature 1..20: note = Description of Artificial Sequence: Synthetic oligonucleotide
  misc_feature 1..20: note = Target: FXN; (+) strand; PAM type: NRG; PAM sequence: TAG
  source 1..20: mol_type = other DNA
gctaatttttgtatttttag

SEQ ID NO: 18332 - DNA, 20 bp, synthetic construct
  misc_feature 1..20: note = Description of Artificial Sequence: Synthetic oligonucleotide
  misc_feature 1..20: note = Target: FXN; (+) strand; PAM type: NRG; PAM sequence: GAG
  source 1..20: mol_type = other DNA
taatttttgtatttttagta

SEQ ID NO: 18333 - DNA, 20 bp, synthetic construct
  misc_feature 1..20: note = Description of Artificial Sequence: Synthetic oligonucleotide
  misc_feature 1..20: note = Target: FXN; (+) strand; PAM type: NRG; PAM sequence: CAG
  source 1..20: mol_type = other DNA
ttttgtatttttagtagaga

SEQ ID NO: 18334 - DNA, 20 bp, synthetic construct
  misc_feature 1..20: note = Description of Artificial Sequence: Synthetic oligonucleotide
  misc_feature 1..20: note = Target: FXN; (+) strand; PAM type: NRG; PAM sequence: AGG
  source 1..20: mol_type = other DNA
tttgtatttttagtagagac

SEQ ID NO: 18335 - DNA, 20 bp, synthetic construct
  misc_feature 1..20: note = Description of Artificial Sequence: Synthetic oligonucleotide
  misc_feature 1..20: note = Target: FXN; (+) strand; PAM type: NRG; PAM sequence: GGG
  source 1..20: mol_type = other DNA
ttgtatttttagtagagaca

SEQ ID NO: 18336 - DNA, 20 bp, synthetic construct
  misc_feature 1..20: note = Description of Artificial Sequence: Synthetic oligonucleotide
  misc_feature 1..20: note = Target: FXN; (+) strand; PAM type: NRG; PAM sequence: TGG
  source 1..20: mol_type = other DNA
gagacagggttttgccatat

SEQ ID NO: 18337 - DNA, 20 bp, synthetic construct
  misc_feature 1..20: note = Description of Artificial Sequence: Synthetic oligonucleotide
  misc_feature 1..20: note = Target: FXN; (+) strand; PAM type: NRG; PAM sequence: TGG
  source 1..20: mol_type = other DNA
agggttttgccatattggcc

SEQ ID NO: 18338 - DNA, 20 bp, synthetic construct
  misc_feature 1..20: note = Description of Artificial Sequence: Synthetic oligonucleotide
  misc_feature 1..20: note = Target: FXN; (+) strand; PAM type: NRG; PAM sequence: TAG
  source 1..20: mol_type = other DNA
ttttgccatattggcctggc

SEQ ID NO: 18339 - DNA, 20 bp, synthetic construct
  misc_feature 1..20: note = Description of Artificial Sequence: Synthetic oligonucleotide
  misc_feature 1..20: note = Target: FXN; (+) strand; PAM type: NRG; PAM sequence: CAG
  source 1..20: mol_type = other DNA
tagtttcaaactcctgacct

SEQ ID NO: 18340 - DNA, 20 bp, synthetic construct
  misc_feature 1..20: note = Description of Artificial Sequence: Synthetic oligonucleotide
  misc_feature 1..20: note = Target: FXN; (+) strand; PAM type: NRG; PAM sequence: AGG
  source 1..20: mol_type = other DNA
agtttcaaactcctgacctc

SEQ ID NO: 18341 - DNA, 20 bp, synthetic construct
  misc_feature 1..20: note = Description of Artificial Sequence: Synthetic oligonucleotide
  misc_feature 1..20: note = Target: FXN; (+) strand; PAM type: NRG; PAM sequence: GAG
  source 1..20: mol_type = other DNA
tcaaactcctgacctcaggt

SEQ ID NO: 18342 - DNA, 20 bp, synthetic construct
  misc_feature 1..20: note = Description of Artificial Sequence: Synthetic oligonucleotide
  misc_feature 1..20: note = Target: FXN; (+) strand; PAM type: NRG; PAM sequence: CGG
  source 1..20: mol_type = other DNA
ctcaggtgagccacctacct

SEQ ID NO: 18343 - DNA, 20 bp, synthetic construct
  misc_feature 1..20: note = Description of Artificial Sequence: Synthetic oligonucleotide
  misc_feature 1..20: note = Target: FXN; (+) strand; PAM type: NRG; PAM sequence: AAG
  source 1..20: mol_type = other DNA
ccacctacctcggcctccga

SEQ ID NO: 18344 - DNA, 20 bp, synthetic construct
  misc_feature 1..20: note = Description of Artificial Sequence: Synthetic oligonucleotide
  misc_feature 1..20: note = Target: FXN; (+) strand; PAM type: NRG; PAM sequence: TGG
  source 1..20: mol_type = other DNA
acctcggcctccgaaagtcc

SEQ ID NO: 18345 - DNA, 20 bp, synthetic construct
  misc_feature 1..20: note = Description of Artificial Sequence: Synthetic oligonucleotide
  misc_feature 1..20: note = Target: FXN; (+) strand; PAM type: NRG; PAM sequence: GGG
  source 1..20: mol_type = other DNA
cctcggcctccgaaagtcct

SEQ ID NO: 18346 - DNA, 20 bp, synthetic construct
  misc_feature 1..20: note = Description of Artificial Sequence: Synthetic oligonucleotide
  misc_feature 1..20: note = Target: FXN; (+) strand; PAM type: NRG; PAM sequence: CAG
  source 1..20: mol_type = other DNA
ctccgaaagtcctgggatta

SEQ ID NO: 18347 - DNA, 20 bp, synthetic construct
  misc_feature 1..20: note = Description of Artificial Sequence: Synthetic oligonucleotide
  misc_feature 1..20: note = Target: FXN; (+) strand; PAM type: NRG; PAM sequence: GAG
  source 1..20: mol_type = other DNA
agtcctgggattacagacgt

SEQ ID NO: 18348 - DNA, 20 bp, synthetic construct
  misc_feature 1..20: note = Description of Artificial Sequence: Synthetic oligonucleotide
  misc_feature 1..20: note = Target: FXN; (+) strand; PAM type: NRG; PAM sequence: TGG
  source 1..20: mol_type = other DNA
acgtgagccactgcactgcc

SEQ ID NO: 18349 - DNA, 20 bp, synthetic construct
  misc_feature 1..20: note = Description of Artificial Sequence: Synthetic oligonucleotide
  misc_feature 1..20: note = Target: FXN; (+) strand; PAM type: NRG; PAM sequence: CAG
  source 1..20: mol_type = other DNA
agccactgcactgcctggcc

SEQ ID NO: 18350 - DNA, 20 bp, synthetic construct
  misc_feature 1..20: note = Description of Artificial Sequence: Synthetic oligonucleotide
  misc_feature 1..20: note = Target: FXN; (+) strand; PAM type: NRG; PAM sequence: AAG
  source 1..20: mol_type = other DNA
actgcactgcctggcccaga

SEQ ID NO: 18351 - DNA, 20 bp, synthetic construct
  misc_feature 1..20: note = Description of Artificial Sequence: Synthetic oligonucleotide
  misc_feature 1..20: note = Target: FXN; (+) strand; PAM type: NRG; PAM sequence: AGG
  source 1..20: mol_type = other DNA
ctgcactgcctggcccagaa

SEQ ID NO: 18352 - DNA, 20 bp, synthetic construct
  misc_feature 1..20: note = Description of Artificial Sequence: Synthetic oligonucleotide
  misc_feature 1..20: note = Target: FXN; (+) strand; PAM type: NRG; PAM sequence: TAG
  source 1..20: mol_type = other DNA
ccagaaaggactattaattg

SEQ ID NO: 18353 - DNA, 20 bp, synthetic construct
  misc_feature 1..20: note = Description of Artificial Sequence: Synthetic oligonucleotide
  misc_feature 1..20: note = Target: FXN; (+) strand; PAM type: NRG; PAM sequence: TGG
  source 1..20: mol_type = other DNA
ctattaattgtagttgcctc

SEQ ID NO: 18354 - DNA, 20 bp, synthetic construct
  misc_feature 1..20: note = Description of Artificial Sequence: Synthetic oligonucleotide
  misc_feature 1..20: note = Target: FXN; (+) strand; PAM type: NRG; PAM sequence: GGG
  source 1..20: mol_type = other DNA
tattaattgtagttgcctct

SEQ ID NO: 18355 - DNA, 20 bp, synthetic construct
  misc_feature 1..20: note = Description of Artificial Sequence: Synthetic oligonucleotide
  misc_feature 1..20: note = Target: FXN; (+) strand; PAM type: NRG; PAM sequence: TGG
  source 1..20: mol_type = other DNA
attgtagttgcctctgggaa

SEQ ID NO: 18356 - DNA, 20 bp, synthetic construct
  misc_feature 1..20: note = Description of Artificial Sequence: Synthetic oligonucleotide
  misc_feature 1..20: note = Target: FXN; (+) strand; PAM type: NRG; PAM sequence: GGG
  source 1..20: mol_type = other DNA
ttgtagttgcctctgggaat

SEQ ID NO: 18357 - DNA, 20 bp, synthetic construct
  misc_feature 1..20: note = Description of Artificial Sequence: Synthetic oligonucleotide
  misc_feature 1..20: note = Target: FXN; (+) strand; PAM type: NRG; PAM sequence: GGG
  source 1..20: mol_type = other DNA
tgtagttgcctctgggaatg

SEQ ID NO: 18358 - DNA, 20 bp, synthetic construct
  misc_feature 1..20: note = Description of Artificial Sequence: Synthetic oligonucleotide
  misc_feature 1..20: note = Target: FXN; (+) strand; PAM type: NRG; PAM sequence: GGG
  source 1..20: mol_type = other DNA
gtagttgcctctgggaatgg

SEQ ID NO: 18359 - DNA, 20 bp, synthetic construct
  misc_feature 1..20: note = Description of Artificial Sequence: Synthetic oligonucleotide
  misc_feature 1..20: note = Target: FXN; (+) strand; PAM type: NRG; PAM sequence: GAG
  source 1..20: mol_type = other DNA
tttttttttttttttttttt

SEQ ID NO: 18360 - DNA, 20 bp, synthetic construct
  misc_feature 1..20: note = Description of Artificial Sequence: Synthetic oligonucleotide
  misc_feature 1..20: note = Target: FXN; (+) strand; PAM type: NRG; PAM sequence: CAG
  source 1..20: mol_type = other DNA
ttttttttttttttttgaga

SEQ ID NO: 18361 - DNA, 20 bp, synthetic construct
  misc_feature 1..20: note = Description of Artificial Sequence: Synthetic oligonucleotide
  misc_feature 1..20: note = Target: FXN; (+) strand; PAM type: NRG; PAM sequence: GAG
  source 1..20: mol_type = other DNA
ttttttttttttttgagaca

SEQ ID NO: 18362 - DNA, 20 bp, synthetic construct
  misc_feature 1..20: note = Description of Artificial Sequence: Synthetic oligonucleotide
  misc_feature 1..20: note = Target: FXN; (+) strand; PAM type: NRG; PAM sequence: CAG
  source 1..20: mol_type = other DNA
cagagtctcgctctgtcgcc

SEQ ID NO: 18363 - DNA, 20 bp, synthetic construct
  misc_feature 1..20: note = Description of Artificial Sequence: Synthetic oligonucleotide
  misc_feature 1..20: note = Target: FXN; (+) strand; PAM type: NRG; PAM sequence: AGG
  source 1..20: mol_type = other DNA
agagtctcgctctgtcgccc

SEQ ID NO: 18364 - DNA, 20 bp, synthetic construct
  misc_feature 1..20: note = Description of Artificial Sequence: Synthetic oligonucleotide
  misc_feature 1..20: note = Target: FXN; (+) strand; PAM type: NRG; PAM sequence: TGG
  source 1..20: mol_type = other DNA
tctcgctctgtcgcccaggc

SEQ ID NO: 18365 - DNA, 20 bp, synthetic construct
  misc_feature 1..20: note = Description of Artificial Sequence: Synthetic oligonucleotide
  misc_feature 1..20: note = Target: FXN; (+) strand; PAM type: NRG; PAM sequence: GAG
  source 1..20: mol_type = other DNA
tcgctctgtcgcccaggctg

SEQ ID NO: 18366 - DNA, 20 bp, synthetic construct
  misc_feature 1..20: note = Description of Artificial Sequence: Synthetic oligonucleotide
  misc_feature 1..20: note = Target: FXN; (+) strand; PAM type: NRG; PAM sequence: CAG
  source 1..20: mol_type = other DNA
ctgtcgcccaggctggagtg

SEQ ID NO: 18367 - DNA, 20 bp, synthetic construct
  misc_feature 1..20: note = Description of Artificial Sequence: Synthetic oligonucleotide
  misc_feature 1..20: note = Target: FXN; (+) strand; PAM type: NRG; PAM sequence: TGG
  source 1..20: mol_type = other DNA
tcgcccaggctggagtgcag

SEQ ID NO: 18368 - DNA, 20 bp, synthetic construct
  misc_feature 1..20: note = Description of Artificial Sequence: Synthetic oligonucleotide
  misc_feature 1..20: note = Target: FXN; (+) strand; PAM type: NRG; PAM sequence: CGG
  source 1..20: mol_type = other DNA
ggagtgcagtggcgcaatct

SEQ ID NO: 18369 - DNA, 20 bp, synthetic construct
  misc_feature 1..20: note = Description of Artificial Sequence: Synthetic oligonucleotide
  misc_feature 1..20: note = Target: FXN; (+) strand; PAM type: NRG; PAM sequence: AAG
  source 1..20: mol_type = other DNA
gcgcaatctcggctcactgc

SEQ ID NO: 18370 - DNA, 20 bp, synthetic construct
  misc_feature 1..20: note = Description of Artificial Sequence: Synthetic oligonucleotide
  misc_feature 1..20: note = Target: FXN; (+) strand; PAM type: NRG; PAM sequence: CAG
  source 1..20: mol_type = other DNA
tcactgcaagctccgcctcc

SEQ ID NO: 18371 - DNA, 20 bp, synthetic construct
  misc_feature 1..20: note = Description of Artificial Sequence: Synthetic oligonucleotide
  misc_feature 1..20: note = Target: FXN; (+) strand; PAM type: NRG; PAM sequence: AGG
  source 1..20: mol_type = other DNA
cactgcaagctccgcctccc

SEQ ID NO: 18372 - DNA, 20 bp, synthetic construct
  misc_feature 1..20: note = Description of Artificial Sequence: Synthetic oligonucleotide
  misc_feature 1..20: note = Target: FXN; (+) strand; PAM type: NRG; PAM sequence: CAG
  source 1..20: mol_type = other DNA
ttcacgccattctcctgcct

SEQ ID NO: 18373 - DNA, 20 bp, synthetic construct
  misc_feature 1..20: note = Description of Artificial Sequence: Synthetic oligonucleotide
  misc_feature 1..20: note = Target: FXN; (+) strand; PAM type: NRG; PAM sequence: GAG
  source 1..20: mol_type = other DNA
ttctcctgcctcagcctcct

SEQ ID NO: 18374 - DNA, 20 bp, synthetic construct
  misc_feature 1..20: note = Description of Artificial Sequence: Synthetic oligonucleotide
  misc_feature 1..20: note = Target: FXN; (+) strand; PAM type: NRG; PAM sequence: TAG
  source 1..20: mol_type = other DNA
tcctgcctcagcctcctgag

SEQ ID NO: 18375 - DNA, 20 bp, synthetic construct
  misc_feature 1..20: note = Description of Artificial Sequence: Synthetic oligonucleotide
  misc_feature 1..20: note = Target: FXN; (+) strand; PAM type: NRG; PAM sequence: TGG
  source 1..20: mol_type = other DNA
gcctcagcctcctgagtagc

SEQ ID NO: 18376 - DNA, 20 bp, synthetic construct
  misc_feature 1..20: note = Description of Artificial Sequence: Synthetic oligonucleotide
  misc_feature 1..20: note = Target: FXN; (+) strand; PAM type: NRG; PAM sequence: GGG
  source 1..20: mol_type = other DNA
cctcagcctcctgagtagct

SEQ ID NO: 18377 - DNA, 20 bp, synthetic construct
  misc_feature 1..20: note = Description of Artificial Sequence: Synthetic oligonucleotide
  misc_feature 1..20: note = Target: FXN; (+) strand; PAM type: NRG; PAM sequence: CAG
  source 1..20: mol_type = other DNA
ctcctgagtagctgggacta

SEQ ID NO: 18378 - DNA, 20 bp, synthetic construct
  misc_feature 1..20: note = Description of Artificial Sequence: Synthetic oligonucleotide
  misc_feature 1..20: note = Target: FXN; (+) strand; PAM type: NRG; PAM sequence: AGG
  source 1..20: mol_type = other DNA
tcctgagtagctgggactac

SEQ ID NO: 18379 - DNA, 20 bp, synthetic construct
  misc_feature 1..20: note = Description of Artificial Sequence: Synthetic oligonucleotide
  misc_feature 1..20: note = Target: FXN; (+) strand; PAM type: NRG; PAM sequence: CGG
  source 1..20: mol_type = other DNA
caggcacccgtcaccacgcc

SEQ ID NO: 18380 - DNA, 20 bp, synthetic construct
  misc_feature 1..20: note = Description of Artificial Sequence: Synthetic oligonucleotide
  misc_feature 1..20: note = Target: FXN; (+) strand; PAM type: NRG; PAM sequence: CAG
  source 1..20: mol_type = other DNA
cggctaattttttgtatttt

SEQ ID NO: 18381 - DNA, 20 bp, synthetic construct
  misc_feature 1..20: note = Description of Artificial Sequence: Synthetic oligonucleotide
  misc_feature 1..20: note = Target: FXN; (+) strand; PAM type: NRG; PAM sequence: TAG
  source 1..20: mol_type = other DNA
ctaattttttgtattttcag

SEQ ID NO: 18382 - DNA, 20 bp, synthetic construct
  misc_feature 1..20: note = Description of Artificial Sequence: Synthetic oligonucleotide
  misc_feature 1..20: note = Target: FXN; (+) strand; PAM type: NRG; PAM sequence: GAG
  source 1..20: mol_type = other DNA
aattttttgtattttcagta

SEQ ID NO: 18383 - DNA, 20 bp, synthetic construct
  misc_feature 1..20: note = Description of Artificial Sequence: Synthetic oligonucleotide
  misc_feature 1..20: note = Target: FXN; (+) strand; PAM type: NRG; PAM sequence: CGG
  source 1..20: mol_type = other DNA
ttttgtattttcagtagaga

SEQ ID NO: 18384 - DNA, 20 bp, synthetic construct
  misc_feature 1..20: note = Description of Artificial Sequence: Synthetic oligonucleotide
  misc_feature 1..20: note = Target: FXN; (+) strand; PAM type: NRG; PAM sequence: GGG
  source 1..20: mol_type = other DNA
tttgtattttcagtagagac

SEQ ID NO: 18385 - DNA, 20 bp, synthetic construct
  misc_feature 1..20: note = Description of Artificial Sequence: Synthetic oligonucleotide
  misc_feature 1..20: note = Target: FXN; (+) strand; PAM type: NRG; PAM sequence: GGG
  source 1..20: mol_type = other DNA
ttgtattttcagtagagacg

SEQ ID NO: 18386 - DNA, 20 bp, synthetic construct
  misc_feature 1..20: note = Description of Artificial Sequence: Synthetic oligonucleotide
  misc_feature 1..20: note = Target: FXN; (+) strand; PAM type: NRG; PAM sequence: TAG
  source 1..20: mol_type = other DNA
gagacggggtttcaccatgt

SEQ ID NO: 18387 - DNA, 20 bp, synthetic construct
  misc_feature 1..20: note = Description of Artificial Sequence: Synthetic oligonucleotide
  misc_feature 1..20: note = Target: FXN; (+) strand; PAM type: NRG; PAM sequence: CAG
  source 1..20: mol_type = other DNA
cggggtttcaccatgttagc

SEQ ID NO: 18388 - DNA, 20 bp, synthetic construct
  misc_feature 1..20: note = Description of Artificial Sequence: Synthetic oligonucleotide
  misc_feature 1..20: note = Target: FXN; (+) strand; PAM type: NRG; PAM sequence: AGG
  source 1..20: mol_type = other DNA
ggggtttcaccatgttagcc

SEQ ID NO: 18389 - DNA, 20 bp, synthetic construct
  misc_feature 1..20: note = Description of Artificial Sequence: Synthetic oligonucleotide
  misc_feature 1..20: note = Target: FXN; (+) strand; PAM type: NRG; PAM sequence: TGG
  source 1..20: mol_type = other DNA
tttcaccatgttagccagga

SEQ ID NO: 18390 - DNA, 20 bp, synthetic construct
  misc_feature 1..20: note = Description of Artificial Sequence: Synthetic oligonucleotide
  misc_feature 1..20: note = Target: FXN; (+) strand; PAM type: NRG; PAM sequence: CGG
  source 1..20: mol_type = other DNA
accgtgttatctgcctgcct

SEQ ID NO: 18391 - DNA, 20 bp, synthetic construct
  misc_feature 1..20: note = Description of Artificial Sequence: Synthetic oligonucleotide
  misc_feature 1..20: note = Target: FXN; (+) strand; PAM type: NRG; PAM sequence: CAG
  source 1..20: mol_type = other DNA
atctgcctgcctcggcctcc

SEQ ID NO: 18392 - DNA, 20 bp, synthetic construct
  misc_feature 1..20: note = Description of Artificial Sequence: Synthetic oligonucleotide
  misc_feature 1..20: note = Target: FXN; (+) strand; PAM type: NRG; PAM sequence: GAG
  source 1..20: mol_type = other DNA
ctgcctgcctcggcctccca

SEQ ID NO: 18393 - DNA, 20 bp, synthetic construct
  misc_feature 1..20: note = Description of Artificial Sequence: Synthetic oligonucleotide
  misc_feature 1..20: note = Target: FXN; (+) strand; PAM type: NRG; PAM sequence: TGG
  source 1..20: mol_type = other DNA
gcctcggcctcccagagtgc

SEQ ID NO: 18394 - DNA, 20 bp, synthetic construct
  misc_feature 1..20: note = Description of Artificial Sequence: Synthetic oligonucleotide
  misc_feature 1..20: note = Target: FXN; (+) strand; PAM type: NRG; PAM sequence: GGG
  source 1..20: mol_type = other DNA
cctcggcctcccagagtgct

SEQ ID NO: 18395 - DNA, 20 bp, synthetic construct
  misc_feature 1..20: note = Description of Artificial Sequence: Synthetic oligonucleotide
  misc_feature 1..20: note = Target: FXN; (+) strand; PAM type: NRG; PAM sequence: CAG
  source 1..20: mol_type = other DNA
ctcccagagtgctgggatta

SEQ ID NO: 18396 - DNA, 20 bp, synthetic construct
  misc_feature 1..20: note = Description of Artificial Sequence: Synthetic oligonucleotide
  misc_feature 1..20: note = Target: FXN; (+) strand; PAM type: NRG; PAM sequence: AGG
  source 1..20: mol_type = other DNA
tcccagagtgctgggattac

SEQ ID NO: 18397 - DNA, 20 bp, synthetic construct
  misc_feature 1..20: note = Description of Artificial Sequence: Synthetic oligonucleotide
  misc_feature 1..20: note = Target: FXN; (+) strand; PAM type: NRG; PAM sequence: GAG
  source 1..20: mol_type = other DNA
agtgctgggattacaggcat

SEQ ID NO: 18398 - DNA, 20 bp, synthetic construct
  misc_feature 1..20: note = Description of Artificial Sequence: Synthetic oligonucleotide
  misc_feature 1..20: note = Target: FXN; (+) strand; PAM type: NRG; PAM sequence: CGG
  source 1..20: mol_type = other DNA
caggcatgagctaccacgcc

SEQ ID NO: 18399 - DNA, 20 bp, synthetic construct
  misc_feature 1..20: note = Description of Artificial Sequence: Synthetic oligonucleotide
  misc_feature 1..20: note = Target: FXN; (+) strand; PAM type: NRG; PAM sequence: TGG
  source 1..20: mol_type = other DNA
cggcctttaaatttttactt

SEQ ID NO: 18400 - DNA, 20 bp, synthetic construct
  misc_feature 1..20: note = Description of Artificial Sequence: Synthetic oligonucleotide
  misc_feature 1..20: note = Target: FXN; (+) strand; PAM type: NRG; PAM sequence: GGG
  source 1..20: mol_type = other DNA
ggcctttaaatttttacttt

SEQ ID NO: 18401 - DNA, 20 bp, synthetic construct
  misc_feature 1..20: note = Description of Artificial Sequence: Synthetic oligonucleotide
  misc_feature 1..20: note = Target: FXN; (+) strand; PAM type: NRG; PAM sequence: CGG
  source 1..20: mol_type = other DNA
tttaaatttttactttgggc

SEQ ID NO: 18402 - DNA, 20 bp, synthetic construct
  misc_feature 1..20: note = Description of Artificial Sequence: Synthetic oligonucleotide
  misc_feature 1..20: note = Target: FXN; (+) strand; PAM type: NRG; PAM sequence: GGG
  source 1..20: mol_type = other DNA
ttaaatttttactttgggcc

SEQ ID NO: 18403 - DNA, 20 bp, synthetic construct
  misc_feature 1..20: note = Description of Artificial Sequence: Synthetic oligonucleotide
  misc_feature 1..20: note = Target: FXN; (+) strand; PAM type: NRG; PAM sequence: CGG
  source 1..20: mol_type = other DNA
tttttactttgggccgggca

SEQ ID NO: 18404 - DNA, 20 bp, synthetic construct
  misc_feature 1..20: note = Description of Artificial Sequence: Synthetic oligonucleotide
  misc_feature 1..20: note = Target: FXN; (+) strand; PAM type: NRG; PAM sequence: GAG
  source 1..20: mol_type = other DNA
gcctgtaatcctaacatttc

SEQ ID NO: 18405 - DNA, 20 bp, synthetic construct
  misc_feature 1..20: note = Description of Artificial Sequence: Synthetic oligonucleotide
  misc_feature 1..20: note = Target: FXN; (+) strand; PAM type: NRG; PAM sequence: AAG
  source 1..20: mol_type = other DNA
tgtaatcctaacatttcgag

SEQ ID NO: 18406 - DNA, 20 bp, synthetic construct
  misc_feature 1..20: note = Description of Artificial Sequence: Synthetic oligonucleotide
  misc_feature 1..20: note = Target: FXN; (+) strand; PAM type: NRG; PAM sequence: GAG
  source 1..20: mol_type = other DNA
tcctaacatttcgagaagct

SEQ ID NO: 18407 - DNA, 20 bp, synthetic construct
  misc_feature 1..20: note = Description of Artificial Sequence: Synthetic oligonucleotide
  misc_feature 1..20: note = Target: FXN; (+) strand; PAM type: NRG; PAM sequence: AGG
  source 1..20: mol_type = other DNA
cctaacatttcgagaagctg

SEQ ID NO: 18408 - DNA, 20 bp, synthetic construct
  misc_feature 1..20: note = Description of Artificial Sequence: Synthetic oligonucleotide
  misc_feature 1..20: note = Target: FXN; (+) strand; PAM type: NRG; PAM sequence: TGG
  source 1..20: mol_type = other DNA
tttcgagaagctgaggcacg

SEQ ID NO: 18409 - DNA, 20 bp, synthetic construct
  misc_feature 1..20: note = Description of Artificial Sequence: Synthetic oligonucleotide
  misc_feature 1..20: note = Target: FXN; (+) strand; PAM type: NRG; PAM sequence: TGG
  source 1..20: mol_type = other DNA
cgagaagctgaggcacgtgg

SEQ ID NO: 18410 - DNA, 20 bp, synthetic construct
  misc_feature 1..20: note = Description of Artificial Sequence: Synthetic oligonucleotide
  misc_feature 1..20: note = Target: FXN; (+) strand; PAM type: NRG; PAM sequence: GAG
  source 1..20: mol_type = other DNA
ggtggatcacttgatgtcac

SEQ ID NO: 18411 - DNA, 20 bp, synthetic construct
  misc_feature 1..20: note = Description of Artificial Sequence: Synthetic oligonucleotide
  misc_feature 1..20: note = Target: FXN; (+) strand; PAM type: NRG; PAM sequence: CAG
  source 1..20: mol_type = other DNA
atcacttgatgtcacgagtt

SEQ ID NO: 18412 - DNA, 20 bp, synthetic construct
  misc_feature 1..20: note = Description of Artificial Sequence: Synthetic oligonucleotide
  misc_feature 1..20: note = Target: FXN; (+) strand; PAM type: NRG; PAM sequence: CAG
  source 1..20: mol_type = other DNA
ttgatgtcacgagttcagac

SEQ ID NO: 18413 - DNA, 20 bp, synthetic construct
  misc_feature 1..20: note = Description of Artificial Sequence: Synthetic oligonucleotide
  misc_feature 1..20: note = Target: FXN; (+) strand; PAM type: NRG; PAM sequence: CAG
  source 1..20: mol_type = other DNA
tcagaccagccactgcactc

SEQ ID NO: 18414 - DNA, 20 bp, synthetic construct
  misc_feature 1..20: note = Description of Artificial Sequence: Synthetic oligonucleotide
  misc_feature 1..20: note = Target: FXN; (+) strand; PAM type: NRG; PAM sequence: TGG
  source 1..20: mol_type = other DNA
ccagccactgcactccagcc

SEQ ID NO: 18415 - DNA, 20 bp, synthetic construct
  misc_feature 1..20: note = Description of Artificial Sequence: Synthetic oligonucleotide
  misc_feature 1..20: note = Target: FXN; (+) strand; PAM type: NRG; PAM sequence: GGG
  source 1..20: mol_type = other DNA
cagccactgcactccagcct

SEQ ID NO: 18416 - DNA, 20 bp, synthetic construct
  misc_feature 1..20: note = Description of Artificial Sequence: Synthetic oligonucleotide
  misc_feature 1..20: note = Target: FXN; (+) strand; PAM type: NRG; PAM sequence: CAG
  source 1..20: mol_type = other DNA
ctgcactccagcctgggtga

SEQ ID NO: 18417 - DNA, 20 bp, synthetic construct
  misc_feature 1..20: note = Description of Artificial Sequence: Synthetic oligonucleotide
  misc_feature 1..20: note = Target: FXN; (+) strand; PAM type: NRG; PAM sequence: GAG
  source 1..20: mol_type = other DNA
gcactccagcctgggtgaca

SEQ ID NO: 18418 - DNA, 20 bp, synthetic construct
  misc_feature 1..20: note = Description of Artificial Sequence: Synthetic oligonucleotide
  misc_feature 1..20: note = Target: FXN; (+) strand; PAM type: NRG; PAM sequence: GAG
  source 1..20: mol_type = other DNA
tccagcctgggtgacagagt

SEQ ID NO: 18419 - DNA, 20 bp, synthetic construct
  misc_feature 1..20: note = Description of Artificial Sequence: Synthetic oligonucleotide
  misc_feature 1..20: note = Target: FXN; (+) strand; PAM type: NRG; PAM sequence: AAG
  source 1..20: mol_type = other DNA
tgtctcaaaaaaaaaaaaaa

SEQ ID NO: 18420 - DNA, 20 bp, synthetic construct
  misc_feature 1..20: note = Description of Artificial Sequence: Synthetic oligonucleotide
  misc_feature 1..20: note = Target: FXN; (+) strand; PAM type: NRG; PAM sequence: AAG
  source 1..20: mol_type = other DNA
tcaaaaaaaaaaaaaaaaga

SEQ ID NO: 18421 - DNA, 20 bp, synthetic construct
  misc_feature 1..20: note = Description of Artificial Sequence: Synthetic oligonucleotide
  misc_feature 1..20: note = Target: FXN; (+) strand; PAM type: NRG; PAM sequence: TGG
  source 1..20: mol_type = other DNA
taaatttgatattaataaaa

SEQ ID NO: 18422 - DNA, 20 bp, synthetic construct
  misc_feature 1..20: note = Description of Artificial Sequence: Synthetic oligonucleotide
  misc_feature 1..20: note = Target: FXN; (+) strand; PAM type: NRG; PAM sequence: AAG
  source 1..20: mol_type = other DNA
atttgatattaataaaatgg

SEQ ID NO: 18423 - DNA, 20 bp, synthetic construct
  misc_feature 1..20: note = Description of Artificial Sequence: Synthetic oligonucleotide
  misc_feature 1..20: note = Target: FXN; (+) strand; PAM type: NRG; PAM sequence: TGG
  source 1..20: mol_type = other DNA
attaataaaatggaagcatt

SEQ ID NO: 18424 - DNA, 20 bp, synthetic construct
  misc_feature 1..20: note = Description of Artificial Sequence: Synthetic oligonucleotide
  misc_feature 1..20: note = Target: FXN; (+) strand; PAM type: NRG; PAM sequence: TGG
  source 1..20: mol_type = other DNA
agcatttggtaatcatgttt

SEQ ID NO: 18425 - DNA, 20 bp, synthetic construct
  misc_feature 1..20: note = Description of Artificial Sequence: Synthetic oligonucleotide
  misc_feature 1..20: note = Target: FXN; (+) strand; PAM type: NRG; PAM sequence: GGG
  source 1..20: mol_type = other DNA
gcatttggtaatcatgtttt

SEQ ID NO: 18426 - DNA, 20 bp, synthetic construct
  misc_feature 1..20: note = Description of Artificial Sequence: Synthetic oligonucleotide
  misc_feature 1..20: note = Target: FXN; (+) strand; PAM type: NRG; PAM sequence: CAG
  source 1..20: mol_type = other DNA
tgggttttgtgcttcctctg

SEQ ID NO: 18427 - DNA, 20 bp, synthetic construct
  misc_feature 1..20: note = Description of Artificial Sequence: Synthetic oligonucleotide
  misc_feature 1..20: note = Target: FXN; (+) strand; PAM type: NRG; PAM sequence: TAG
  source 1..20: mol_type = other DNA
gtgcttcctctgcagctctc

SEQ ID NO: 18428 - DNA, 20 bp, synthetic construct
  misc_feature 1..20: note = Description of Artificial Sequence: Synthetic oligonucleotide
  misc_feature 1..20: note = Target: FXN; (+) strand; PAM type: NRG; PAM sequence: GAG
  source 1..20: mol_type = other DNA
tcctctgcagctctctagat

SEQ ID NO: 18429 - DNA, 20 bp, synthetic construct
  misc_feature 1..20: note = Description of Artificial Sequence: Synthetic oligonucleotide
  misc_feature 1..20: note = Target: FXN; (+) strand; PAM type: NRG; PAM sequence: AAG
  source 1..20: mol_type = other DNA
ctagatgagaccacctatga

SEQ ID NO: 18430 - DNA, 20 bp, synthetic construct
  misc_feature 1..20: note = Description of Artificial Sequence: Synthetic oligonucleotide
  misc_feature 1..20: note = Target: FXN; (+) strand; PAM type: NRG; PAM sequence: TAG
  source 1..20: mol_type = other DNA
tgagaccacctatgaaagac

SEQ ID NO: 18431 - DNA, 20 bp, synthetic construct
  misc_feature 1..20: note = Description of Artificial Sequence: Synthetic oligonucleotide
  misc_feature 1..20: note = Target: FXN; (+) strand; PAM type: NRG; PAM sequence: CAG
  source 1..20: mol_type = other DNA
gaccacctatgaaagactag

SEQ ID NO: 18432 - DNA, 20 bp, synthetic construct
  misc_feature 1..20: note = Description of Artificial Sequence: Synthetic oligonucleotide
  misc_feature 1..20: note = Target: FXN; (+) strand; PAM type: NRG; PAM sequence: GAG
  source 1..20: mol_type = other DNA
ccacctatgaaagactagca

SEQ ID NO: 18433 - DNA, 20 bp, synthetic construct
  misc_feature 1..20: note = Description of Artificial Sequence: Synthetic oligonucleotide
  misc_feature 1..20: note = Target: FXN; (+) strand; PAM type: NRG; PAM sequence: AGG
  source 1..20: mol_type = other DNA
cacctatgaaagactagcag

SEQ ID NO: 18434 - DNA, 20 bp, synthetic construct
  misc_feature 1..20: note = Description of Artificial Sequence: Synthetic oligonucleotide
  misc_feature 1..20: note = Target: FXN; (+) strand; PAM type: NRG; PAM sequence: TGG
  source 1..20: mol_type = other DNA
aagactagcagaggaaacgc

SEQ ID NO: 18435 - DNA, 20 bp, synthetic construct
  misc_feature 1..20: note = Description of Artificial Sequence: Synthetic oligonucleotide
  misc_feature 1..20: note = Target: FXN; (+) strand; PAM type: NRG; PAM sequence: TAG
  source 1..20: mol_type = other DNA
agaggaaacgctggactctt

SEQ ID NO: 18436 - DNA, 20 bp, synthetic construct
  misc_feature 1..20: note = Description of Artificial Sequence: Synthetic oligonucleotide
  misc_feature 1..20: note = Target: FXN; (+) strand; PAM type: NRG; PAM sequence: CAG
  source 1..20: mol_type = other DNA
ggaaacgctggactctttag

SEQ ID NO: 18437 - DNA, 20 bp, synthetic construct
  misc_feature 1..20: note = Description of Artificial Sequence: Synthetic oligonucleotide
  misc_feature 1..20: note = Target: FXN; (+) strand; PAM type: NRG; PAM sequence: GAG
  source 1..20: mol_type = other DNA
aaacgctggactctttagca

SEQ ID NO: 18438 - DNA, 20 bp, synthetic construct
  misc_feature 1..20: note = Description of Artificial Sequence: Synthetic oligonucleotide
  misc_feature 1..20: note = Target: FXN; (+) strand; PAM type: NRG; PAM sequence: AAG
  source 1..20: mol_type = other DNA
ctctttagcagagttttttg

SEQ ID NO: 18439 - DNA, 20 bp, synthetic construct
  misc_feature 1..20: note = Description of Artificial Sequence: Synthetic oligonucleotide
  misc_feature 1..20: note = Target: FXN; (+) strand; PAM type: NRG; PAM sequence: CAG
  source 1..20: mol_type = other DNA
agagttttttgaagaccttg

SEQ ID NO: 18440 - DNA, 20 bp, synthetic construct
  misc_feature 1..20: note = Description of Artificial Sequence: Synthetic oligonucleotide
  misc_feature 1..20: note = Target: FXN; (+) strand; PAM type: NRG; PAM sequence: AAG
  source 1..20: mol_type = other DNA
tttttgaagaccttgcagac

SEQ ID NO: 18441 - DNA, 20 bp, synthetic construct
  misc_feature 1..20: note = Description of Artificial Sequence: Synthetic oligonucleotide
  misc_feature 1..20: note = Target: FXN; (+) strand; PAM type: NRG; PAM sequence: GAG
  source 1..20: mol_type = other DNA
cagacaagccatacacgttt

SEQ ID NO: 18442 - DNA, 20 bp, synthetic construct
  misc_feature 1..20: note = Description of Artificial Sequence: Synthetic oligonucleotide
  misc_feature 1..20: note = Target: FXN; (+) strand; PAM type: NRG; PAM sequence: AGG
  source 1..20: mol_type = other DNA
agacaagccatacacgtttg

SEQ ID NO: 18443 - DNA, 20 bp, synthetic construct
  misc_feature 1..20: note = Description of Artificial Sequence: Synthetic oligonucleotide
  misc_feature 1..20: note = Target: FXN; (+) strand; PAM type: NRG; PAM sequence: TGG
  source 1..20: mol_type = other DNA
gaggactatgatgtctcctt

SEQ ID NO: 18444 - DNA, 20 bp, synthetic construct
  misc_feature 1..20: note = Description of Artificial Sequence: Synthetic oligonucleotide
  misc_feature 1..20: note = Target: FXN; (+) strand; PAM type: NRG; PAM sequence: GGG
  source 1..20: mol_type = other DNA
aggactatgatgtctccttt

SEQ ID NO: 18445 - DNA, 20 bp, synthetic construct
  misc_feature 1..20: note = Description of Artificial Sequence: Synthetic oligonucleotide
  misc_feature 1..20: note = Target: FXN; (+) strand; PAM type: NRG; PAM sequence: GGG
  source 1..20: mol_type = other DNA
ggactatgatgtctcctttg

SEQ ID NO: 18446 - DNA, 20 bp, synthetic construct
  misc_feature 1..20: note = Description of Artificial Sequence: Synthetic oligonucleotide
  misc_feature 1..20: note = Target: FXN; (+) strand; PAM type: NRG; PAM sequence: AAG
  source 1..20: mol_type = other DNA
atttttctgtttccccctct

SEQ ID NO: 18447 - DNA, 20 bp, synthetic construct
  misc_feature 1..20: note = Description of Artificial Sequence: Synthetic oligonucleotide
  misc_feature 1..20: note = Target: FXN; (+) strand; PAM type: NRG; PAM sequence: TAG
  source 1..20: mol_type = other DNA
gtttccccctctaagaattt

SEQ ID NO: 18448 - DNA, 20 bp, synthetic construct
  misc_feature 1..20: note = Description of Artificial Sequence: Synthetic oligonucleotide
  misc_feature 1..20: note = Target: FXN; (+) strand; PAM type: NRG; PAM sequence: AAG
  source 1..20: mol_type = other DNA
aattttagttcactaaaatg

SEQ ID NO: 18449 - DNA, 20 bp, synthetic construct
  misc_feature 1..20: note = Description of Artificial Sequence: Synthetic oligonucleotide
  misc_feature 1..20: note = Target: FXN; (+) strand; PAM type: NRG; PAM sequence: CAG
  source 1..20: mol_type = other DNA
taaaatgaagaatttccctc

SEQ ID NO: 18450 - DNA, 20 bp, synthetic construct
  misc_feature 1..20: note = Description of Artificial Sequence: Synthetic oligonucleotide
  misc_feature 1..20: note = Target: FXN; (+) strand; PAM type: NRG; PAM sequence: CAG
  source 1..20: mol_type = other DNA
aatgaagaatttccctccag

SEQ ID NO: 18451 - DNA, 20 bp, synthetic construct
  misc_feature 1..20: note = Description of Artificial Sequence: Synthetic oligonucleotide
  misc_feature 1..20: note = Target: FXN; (+) strand; PAM type: NRG; PAM sequence: GAG
  source 1..20: mol_type = other DNA
tgaagaatttccctccagca

SEQ ID NO: 18452 - DNA, 20 bp, synthetic construct
  misc_feature 1..20: note = Description of Artificial Sequence: Synthetic oligonucleotide
  misc_feature 1..20: note = Target: FXN; (+) strand; PAM type: NRG; PAM sequence: AAG
  source 1..20: mol_type = other DNA
aatttccctccagcagagct

SEQ ID NO: 18453 - DNA, 20 bp, synthetic construct
  misc_feature 1..20: note = Description of Artificial Sequence: Synthetic oligonucleotide
  misc_feature 1..20: note = Target: FXN; (+) strand; PAM type: NRG; PAM sequence: AAG
  source 1..20: mol_type = other DNA
ctccagcagagctaagcatc

SEQ ID NO: 18454 - DNA, 20 bp, synthetic construct
  misc_feature 1..20: note = Description of Artificial Sequence: Synthetic oligonucleotide
  misc_feature 1..20: note = Target: FXN; (+) strand; PAM type: NRG; PAM sequence: TAG
  source 1..20: mol_type = other DNA
cagcagagctaagcatcaag

SEQ ID NO: 18455 - DNA, 20 bp, synthetic construct
  misc_feature 1..20: note = Description of Artificial Sequence: Synthetic oligonucleotide
  misc_feature 1..20: note = Target: FXN; (+) strand; PAM type: NRG; PAM sequence: TAG
  source 1..20: mol_type = other DNA
gctaagcatcaagtagcatg

SEQ ID NO: 18456 - DNA, 20 bp, synthetic construct
  misc_feature 1..20: note = Description of Artificial Sequence: Synthetic oligonucleotide
  misc_feature 1..20: note = Target: FXN; (+) strand; PAM type: NRG; PAM sequence: TAG
  source 1..20: mol_type = other DNA
catcaagtagcatgtagttg

SEQ ID NO: 18457 - DNA, 20 bp, synthetic construct
  misc_feature 1..20: note = Description of Artificial Sequence: Synthetic oligonucleotide
  misc_feature 1..20: note = Target: FXN; (+) strand; PAM type: NRG; PAM sequence: AGG
  source 1..20: mol_type = other DNA
atcaagtagcatgtagttgt

SEQ ID NO: 18458 - DNA, 20 bp, synthetic construct
  misc_feature 1..20: note = Description of Artificial Sequence: Synthetic oligonucleotide
  misc_feature 1..20: note = Target: FXN; (+) strand; PAM type: NRG; PAM sequence: TAG
  source 1..20: mol_type = other DNA
aagtagcatgtagttgtagg

SEQ ID NO: 18459 - DNA, 20 bp, synthetic construct
  misc_feature 1..20: note = Description of Artificial Sequence: Synthetic oligonucleotide
  misc_feature 1..20: note = Target: FXN; (+) strand; PAM type: NRG; PAM sequence: AGG
  source 1..20: mol_type = other DNA
agtagcatgtagttgtaggt

SEQ ID NO: 18460 - DNA, 20 bp, synthetic construct
  misc_feature 1..20: note = Description of Artificial Sequence: Synthetic oligonucleotide
  misc_feature 1..20: note = Target: FXN; (+) strand; PAM type: NRG; PAM sequence: AAG
  source 1..20: mol_type = other DNA
gtagttgtaggtaggattaa

SEQ ID NO: 18461 - DNA, 20 bp, synthetic construct
  misc_feature 1..20: note = Description of Artificial Sequence: Synthetic oligonucleotide
  misc_feature 1..20: note = Target: FXN; (+) strand; PAM type: NRG; PAM sequence: TAG
  source 1..20: mol_type = other DNA
tgtaggtaggattaaaagac

SEQ ID NO: 18462 - DNA, 20 bp, synthetic construct
  misc_feature 1..20: note = Description of Artificial Sequence: Synthetic oligonucleotide
  misc_feature 1..20: note = Target: FXN; (+) strand; PAM type: NRG; PAM sequence: AGG
  source 1..20: mol_type = other DNA
gtaggtaggattaaaagact

SEQ ID NO: 18463 - DNA, 20 bp, synthetic construct
  misc_feature 1..20: note = Description of Artificial Sequence: Synthetic oligonucleotide
  misc_feature 1..20: note = Target: FXN; (+) strand; PAM type: NRG; PAM sequence: GGG
  source 1..20: mol_type = other DNA
taggtaggattaaaagacta

SEQ ID NO: 18464 - DNA, 20 bp, synthetic construct
  misc_feature 1..20: note = Description of Artificial Sequence: Synthetic oligonucleotide
  misc_feature 1..20: note = Target: FXN; (+) strand; PAM type: NRG; PAM sequence: CGG
  source 1..20: mol_type = other DNA
ggattaaaagactagggttc

SEQ ID NO: 18465 - DNA, 20 bp, synthetic construct
  misc_feature 1..20: note = Description of Artificial Sequence: Synthetic oligonucleotide
  misc_feature 1..20: note = Target: FXN; (+) strand; PAM type: NRG; PAM sequence: GGG
  source 1..20: mol_type = other DNA
gattaaaagactagggttcc

SEQ ID NO: 18466 - DNA, 20 bp, synthetic construct
  misc_feature 1..20: note = Description of Artificial Sequence: Synthetic oligonucleotide
  misc_feature 1..20: note = Target: FXN; (+) strand; PAM type: NRG; PAM sequence: GAG
  source 1..20: mol_type = other DNA
ttaaaagactagggttccgg

SEQ ID NO: 18467 - DNA, 20 bp, synthetic construct
  misc_feature 1..20: note = Description of Artificial Sequence: Synthetic oligonucleotide
  misc_feature 1..20: note = Target: FXN; (+) strand; PAM type: NRG; PAM sequence: AGG
  source 1..20: mol_type = other DNA
taaaagactagggttccggg

SEQ ID NO: 18468 - DNA, 20 bp, synthetic construct
  misc_feature 1..20: note = Description of Artificial Sequence: Synthetic oligonucleotide
  misc_feature 1..20: note = Target: FXN; (+) strand; PAM type: NRG; PAM sequence: AAG
  source 1..20: mol_type = other DNA
gactagggttccgggaggtg

SEQ ID NO: 18469 - DNA, 20 bp, synthetic construct
  misc_feature 1..20: note = Description of Artificial Sequence: Synthetic oligonucleotide
  misc_feature 1..20: note = Target: FXN; (+) strand; PAM type: NRG; PAM sequence: AGG
  source 1..20: mol_type = other DNA
actagggttccgggaggtga

SEQ ID NO: 18470 - DNA, 20 bp, synthetic construct
  misc_feature 1..20: note = Description of Artificial Sequence: Synthetic oligonucleotide
  misc_feature 1..20: note = Target: FXN; (+) strand; PAM type: NRG; PAM sequence: CAG
  source 1..20: mol_type = other DNA
gttccgggaggtgaaggttg

SEQ ID NO: 18471 - DNA, 20 bp, synthetic construct
  misc_feature 1..20: note = Description of Artificial Sequence: Synthetic oligonucleotide
  misc_feature 1..20: note = Target: FXN; (+) strand; PAM type: NRG; PAM sequence: GAG
  source 1..20: mol_type = other DNA
cgggaggtgaaggttgcagt

SEQ ID NO: 18472 - DNA, 20 bp, synthetic construct
  misc_feature 1..20: note = Description of Artificial Sequence: Synthetic oligonucleotide
  misc_feature 1..20: note = Target: FXN; (+) strand; PAM type: NRG; PAM sequence: CAG
  source 1..20: mol_type = other DNA
aaaatcacgccactgcactc

SEQ ID NO: 18473 - DNA, 20 bp, synthetic construct
  misc_feature 1..20: note = Description of Artificial Sequence: Synthetic oligonucleotide
  misc_feature 1..20: note = Target: FXN; (+) strand; PAM type: NRG; PAM sequence: TGG
  source 1..20: mol_type = other DNA
cacgccactgcactccagcc

SEQ ID NO: 18474 - DNA, 20 bp, synthetic construct
  misc_feature 1..20: note = Description of Artificial Sequence: Synthetic oligonucleotide
  misc_feature 1..20: note = Target: FXN; (+) strand; PAM type: NRG; PAM sequence: GGG
  source 1..20: mol_type = other DNA
acgccactgcactccagcct

SEQ ID NO: 18475 - DNA, 20 bp, synthetic construct
  misc_feature 1..20: note = Description of Artificial Sequence: Synthetic oligonucleotide
  misc_feature 1..20: note = Target: FXN; (+) strand; PAM type: NRG; PAM sequence: CAG
  source 1..20: mol_type = other DNA
ctgcactccagcctgggtga

SEQ ID NO: 18476 - DNA, 20 bp, synthetic construct
  misc_feature 1..20: note = Description of Artificial Sequence: Synthetic oligonucleotide
  misc_feature 1..20: note = Target: FXN; (+) strand; PAM type: NRG; PAM sequence: GAG
  source 1..20: mol_type = other DNA
gcactccagcctgggtgaca

SEQ ID NO: 18477 - DNA, 20 bp, synthetic construct
  misc_feature 1..20: note = Description of Artificial Sequence: Synthetic oligonucleotide
  misc_feature 1..20: note = Target: FXN; (+) strand; PAM type: NRG; PAM sequence: GAG
  source 1..20: mol_type = other DNA
tccagcctgggtgacagagc

SEQ ID NO: 18478 - DNA, 20 bp, synthetic construct
  misc_feature 1..20: note = Description of Artificial Sequence: Synthetic oligonucleotide
  misc_feature 1..20: note = Target: FXN; (+) strand; PAM type: NRG; PAM sequence: TAG
  source 1..20: mol_type = other DNA
gacagagcgagactctgtca

SEQ ID NO: 18479 - DNA, 20 bp, synthetic construct
  misc_feature 1..20: note = Description of Artificial Sequence: Synthetic oligonucleotide
  misc_feature 1..20: note = Target: FXN; (+) strand; PAM type: NRG; PAM sequence: TGG
  source 1..20: mol_type = other DNA
gagcgagactctgtcataga

SEQ ID NO: 18480 - DNA, 20 bp, synthetic construct
  misc_feature 1..20: note = Description of Artificial Sequence: Synthetic oligonucleotide
  misc_feature 1..20: note = Target: FXN; (+) strand; PAM type: NRG; PAM sequence: TGG
  source 1..20: mol_type = other DNA
gagactctgtcatagatgga

SEQ ID NO: 18481 - DNA, 20 bp, synthetic construct
  misc_feature 1..20: note = Description of Artificial Sequence: Synthetic oligonucleotide
  misc_feature 1..20: note = Target: FXN; (+) strand; PAM type: NRG; PAM sequence: TGG
  source 1..20: mol_type = other DNA
ctctgtcatagatggatgga

SEQ ID NO: 18482 - DNA, 20 bp, synthetic construct
  misc_feature 1..20: note = Description of Artificial Sequence: Synthetic oligonucleotide
  misc_feature 1..20: note = Target: FXN; (+) strand; PAM type: NRG; PAM sequence: TGG
  source 1..20: mol_type = other DNA
gtcatagatggatggatgga

SEQ ID NO: 18483 - DNA, 20 bp, synthetic construct
  misc_feature 1..20: note = Description of Artificial Sequence: Synthetic oligonucleotide
  misc_feature 1..20: note = Target: FXN; (+) strand; PAM type: NRG; PAM sequence: TGG
  source 1..20: mol_type = other DNA
tagatggatggatggatgga

SEQ ID NO: 18484 - DNA, 20 bp, synthetic construct
  misc_feature 1..20: note = Description of Artificial Sequence: Synthetic oligonucleotide
  misc_feature 1..20: note = Target: FXN; (+) strand; PAM type: NRG; PAM sequence: TGG
  source 1..20: mol_type = other DNA
tggatggatggatggatgga

SEQ ID NO: 18485 - DNA, 20 bp, synthetic construct
  misc_feature 1..20: note = Description of Artificial Sequence: Synthetic oligonucleotide
  misc_feature 1..20: note = Target: FXN; (+) strand; PAM type: NRG; PAM sequence: TGG
  source 1..20: mol_type = other DNA
tggatggatggatggatgga

SEQ ID NO: 18486 - DNA, 20 bp, synthetic construct
  misc_feature 1..20: note = Description of Artificial Sequence: Synthetic oligonucleotide
  misc_feature 1..20: note = Target: FXN; (+) strand; PAM type: NRG; PAM sequence: TGG
  source 1..20: mol_type = other DNA
tggatggatggatggatgga

SEQ ID NO: 18487 - DNA, 20 bp, synthetic construct
  misc_feature 1..20: note = Description of Artificial Sequence: Synthetic oligonucleotide
  misc_feature 1..20: note = Target: FXN; (+) strand; PAM type: NRG; PAM sequence: TGG
  source 1..20: mol_type = other DNA
tggatggatggatggatgga

SEQ ID NO: 18488 - DNA, 20 bp, synthetic construct
  misc_feature 1..20: note = Description of Artificial Sequence: Synthetic oligonucleotide
  misc_feature 1..20: note = Target: FXN; (+) strand; PAM type: NRG; PAM sequence: TAG
  source 1..20: mol_type = other DNA
tggatggatggatggatgga

SEQ ID NO: 18489 - DNA, 20 bp, synthetic construct
  misc_feature 1..20: note = Description of Artificial Sequence: Synthetic oligonucleotide
  misc_feature 1..20: note = Target: FXN; (+) strand; PAM type: NRG; PAM sequence: TAG
  source 1..20: mol_type = other DNA
tggatggatggatggataga

SEQ ID NO: 18490 - DNA, 20 bp, synthetic construct
  misc_feature 1..20: note = Description of Artificial Sequence: Synthetic oligonucleotide
  misc_feature 1..20: note = Target: FXN; (+) strand; PAM type: NRG; PAM sequence: TAG
  source 1..20: mol_type = other DNA
tggatggatggatagataga

SEQ ID NO: 18491 - DNA, 20 bp, synthetic construct
  misc_feature 1..20: note = Description of Artificial Sequence: Synthetic oligonucleotide
  misc_feature 1..20: note = Target: FXN; (+) strand; PAM type: NRG; PAM sequence: TAG
  source 1..20: mol_type = other DNA
tggatggatagatagataga

SEQ ID NO: 18492 - DNA, 20 bp, synthetic construct
  misc_feature 1..20: note = Description of Artificial Sequence: Synthetic oligonucleotide
  misc_feature 1..20: note = Target: FXN; (+) strand; PAM type: NRG; PAM sequence: TAG
  source 1..20: mol_type = other DNA
tggatagatagatagataga

SEQ ID NO: 18493 - DNA, 20 bp, synthetic construct
  misc_feature 1..20: note = Description of Artificial Sequence: Synthetic oligonucleotide
  misc_feature 1..20: note = Target: FXN; (+) strand; PAM type: NRG; PAM sequence: TAG
  source 1..20: mol_type = other DNA
tagatagatagatagataga

SEQ ID NO: 18494 - DNA, 20 bp, synthetic construct
  misc_feature 1..20: note = Description of Artificial Sequence: Synthetic oligonucleotide
  misc_feature 1..20: note = Target: FXN; (+) strand; PAM type: NRG; PAM sequence: TAG
  source 1..20: mol_type = other DNA
tagatagatagatagataga

SEQ ID NO: 18495 - DNA, 20 bp, synthetic construct
  misc_feature 1..20: note = Description of Artificial Sequence: Synthetic oligonucleotide
  misc_feature 1..20: note = Target: FXN; (+) strand; PAM type: NRG; PAM sequence: TGG
  source 1..20: mol_type = other DNA
tagatagatagatagatagc

SEQ ID NO: 18496 - DNA, 20 bp, synthetic construct
  misc_feature 1..20: note = Description of Artificial Sequence: Synthetic oligonucleotide
  misc_feature 1..20: note = Target: FXN; (+) strand; PAM type: NRG; PAM sequence: TAG
  source 1..20: mol_type = other DNA
tagatagatagatagctgga

SEQ ID NO: 18497 - DNA, 20 bp, synthetic construct
  misc_feature 1..20: note = Description of Artificial Sequence: Synthetic oligonucleotide
  misc_feature 1..20: note = Target: FXN; (+) strand; PAM type: NRG; PAM sequence: TAG
  source 1..20: mol_type = other DNA
tagatagatagctggataga

SEQ ID NO: 18498 - DNA, 20 bp, synthetic construct
  misc_feature 1..20: note = Description of Artificial Sequence: Synthetic oligonucleotide
  misc_feature 1..20: note = Target: FXN; (+) strand; PAM type: NRG; PAM sequence: AAG
  source 1..20: mol_type = other DNA
agatagctggatagatagat

SEQ ID NO: 18499 - DNA, 20 bp, synthetic construct
  misc_feature 1..20: note = Description of Artificial Sequence: Synthetic oligonucleotide
  misc_feature 1..20: note = Target: FXN; (+) strand; PAM type: NRG; PAM sequence: TAG
  source 1..20: mol_type = other DNA
agctggatagatagataaga

SEQ ID NO: 18500 - DNA, 20 bp, synthetic construct
  misc_feature 1..20: note = Description of Artificial Sequence: Synthetic oligonucleotide
  misc_feature 1..20: note = Target: FXN; (+) strand; PAM type: NRG; PAM sequence: AAG
  source 1..20: mol_type = other DNA
gatagatagataagatagat

SEQ ID NO: 18501 - DNA, 20 bp, synthetic construct
  misc_feature 1..20: note = Description of Artificial Sequence: Synthetic oligonucleotide
  misc_feature 1..20: note = Target: FXN; (+) strand; PAM type: NRG; PAM sequence: AAG
  source 1..20: mol_type = other DNA
atagataagatagataagac

SEQ ID NO: 18502 - DNA, 20 bp, synthetic construct
  misc_feature 1..20: note = Description of Artificial Sequence: Synthetic oligonucleotide
  misc_feature 1..20: note = Target: FXN; (+) strand; PAM type: NRG; PAM sequence: TAG
  source 1..20: mol_type = other DNA
taagatagataagacaagac

SEQ ID NO: 18503 - DNA, 20 bp, synthetic construct
  misc_feature 1..20: note = Description of Artificial Sequence: Synthetic oligonucleotide
  misc_feature 1..20: note = Target: FXN; (+) strand; PAM type: NRG; PAM sequence: AGG
  source 1..20: mol_type = other DNA
aagatagataagacaagact

SEQ ID NO: 18504 - DNA, 20 bp, synthetic construct
  misc_feature 1..20: note = Description of Artificial Sequence: Synthetic oligonucleotide
  misc_feature 1..20: note = Target: FXN; (+) strand; PAM type: NRG; PAM sequence: AAG
  source 1..20: mol_type = other DNA
ataagacaagactaggcttc

SEQ ID NO: 18505 - DNA, 20 bp, synthetic construct
  misc_feature 1..20: note = Description of Artificial Sequence: Synthetic oligonucleotide
  misc_feature 1..20: note = Target: FXN; (+) strand; PAM type: NRG; PAM sequence: CAG
  source 1..20: mol_type = other DNA
caagactaggcttcaagctg

SEQ ID NO: 18506 - DNA, 20 bp, synthetic construct
  misc_feature 1..20: note = Description of Artificial Sequence: Synthetic oligonucleotide
  misc_feature 1..20: note = Target: FXN; (+) strand; PAM type: NRG; PAM sequence: CAG
  source 1..20: mol_type = other DNA
ctaggcttcaagctgcagtc

SEQ ID NO: 18507 - DNA, 20 bp, synthetic construct
  misc_feature 1..20: note = Description of Artificial Sequence: Synthetic oligonucleotide
  misc_feature 1..20: note = Target: FXN; (+) strand; PAM type: NRG; PAM sequence: CAG
  source 1..20: mol_type = other DNA
aagctgcagtccagctctac

SEQ ID NO: 18508 - DNA, 20 bp, synthetic construct
  misc_feature 1..20: note = Description of Artificial Sequence: Synthetic oligonucleotide
  misc_feature 1..20: note = Target: FXN; (+) strand; PAM type: NRG; PAM sequence: AGG
  source 1..20: mol_type = other DNA
agctgcagtccagctctacc

SEQ ID NO: 18509 - DNA, 20 bp, synthetic construct
  misc_feature 1..20: note = Description of Artificial Sequence: Synthetic oligonucleotide
  misc_feature 1..20: note = Target: FXN; (+) strand; PAM type: NRG; PAM sequence: TGG
  source 1..20: mol_type = other DNA
taccaggcttgttgtgactc

SEQ ID NO: 18510 - DNA, 20 bp, synthetic construct
  misc_feature 1..20: note = Description of Artificial Sequence: Synthetic oligonucleotide
  misc_feature 1..20: note = Target: FXN; (+) strand; PAM type: NRG; PAM sequence: GGG
  source 1..20: mol_type = other DNA
accaggcttgttgtgactct

SEQ ID NO: 18511 - DNA, 20 bp, synthetic construct
  misc_feature 1..20: note = Description of Artificial Sequence: Synthetic oligonucleotide
  misc_feature 1..20: note = Target: FXN; (+) strand; PAM type: NRG; PAM sequence: AAG
  source 1..20: mol_type = other DNA
ggcttgttgtgactctgggc

SEQ ID NO: 18512 - DNA, 20 bp, synthetic construct
  misc_feature 1..20: note = Description of Artificial Sequence: Synthetic oligonucleotide
  misc_feature 1..20: note = Target: FXN; (+) strand; PAM type: NRG; PAM sequence: CAG
  source 1..20: mol_type = other DNA
gtgactctgggcaagtcact

SEQ ID NO: 18513 - DNA, 20 bp, synthetic construct
  misc_feature 1..20: note = Description of Artificial Sequence: Synthetic oligonucleotide
  misc_feature 1..20: note = Target: FXN; (+) strand; PAM type: NRG; PAM sequence: GAG
  source 1..20: mol_type = other DNA
gcaagtcactcagcctctct

SEQ ID NO: 18514 - DNA, 20 bp, synthetic construct
  misc_feature 1..20: note = Description of Artificial Sequence: Synthetic oligonucleotide
  misc_feature 1..20: note = Target: FXN; (+) strand; PAM type: NRG; PAM sequence: CAG
  source 1..20: mol_type = other DNA
cctctctgagcctcattttc

SEQ ID NO: 18515 - DNA, 20 bp, synthetic construct
  misc_feature 1..20: note = Description of Artificial Sequence: Synthetic oligonucleotide
  misc_feature 1..20: note = Target: FXN; (+) strand; PAM type: NRG; PAM sequence: CAG
  source 1..20: mol_type = other DNA
tgagcctcattttccagctt

SEQ ID NO: 18516 - DNA, 20 bp, synthetic construct
  misc_feature 1..20: note = Description of Artificial Sequence: Synthetic oligonucleotide
  misc_feature 1..20: note = Target: FXN; (+) strand; PAM type: NRG; PAM sequence: TGG
  source 1..20: mol_type = other DNA
gcctcattttccagcttcag

SEQ ID NO: 18517 - DNA, 20 bp, synthetic construct
  misc_feature 1..20: note = Description of Artificial Sequence: Synthetic oligonucleotide
  misc_feature 1..20: note = Target: FXN; (+) strand; PAM type: NRG; PAM sequence: AAG
  source 1..20: mol_type = other DNA
agcttcagtggatacccatg

SEQ ID NO: 18518 - DNA, 20 bp, synthetic construct
  misc_feature 1..20: note = Description of Artificial Sequence: Synthetic oligonucleotide
  misc_feature 1..20: note = Target: FXN; (+) strand; PAM type: NRG; PAM sequence: AGG
  source 1..20: mol_type = other DNA
gcttcagtggatacccatga

SEQ ID NO: 18519 - DNA, 20 bp, synthetic construct
  misc_feature 1..20: note = Description of Artificial Sequence: Synthetic oligonucleotide
  misc_feature 1..20: note = Target: FXN; (+) strand; PAM type: NRG; PAM sequence: CAG
  source 1..20: mol_type = other DNA
ggatacccatgaaggcaaat

SEQ ID NO: 18520 - DNA, 20 bp, synthetic construct
  misc_feature 1..20: note = Description of Artificial Sequence: Synthetic oligonucleotide
  misc_feature 1..20: note = Target: FXN; (+) strand; PAM type: NRG; PAM sequence: GAG
  source 1..20: mol_type = other DNA
atacccatgaaggcaaatca

SEQ ID NO: 18521 - DNA, 20 bp, synthetic construct
  misc_feature 1..20: note = Description of Artificial Sequence: Synthetic oligonucleotide
  misc_feature 1..20: note = Target: FXN; (+) strand; PAM type: NRG; PAM sequence: GAG
  source 1..20: mol_type = other DNA
acccatgaaggcaaatcaga

SEQ ID NO: 18522 - DNA, 20 bp, synthetic construct
  misc_feature 1..20: note = Description of Artificial Sequence: Synthetic oligonucleotide
  misc_feature 1..20: note = Target: FXN; (+) strand; PAM type: NRG; PAM sequence: AGG
  source 1..20: mol_type = other DNA
cccatgaaggcaaatcagag

SEQ ID NO: 18523 - DNA, 20 bp, synthetic construct
  misc_feature 1..20: note = Description of Artificial Sequence: Synthetic oligonucleotide
  misc_feature 1..20: note = Target: FXN; (+) strand; PAM type: NRG; PAM sequence: GGG
  source 1..20: mol_type = other DNA
ccatgaaggcaaatcagaga

SEQ ID NO: 18524 - DNA, 20 bp, synthetic construct
  misc_feature 1..20: note = Description of Artificial Sequence: Synthetic oligonucleotide
  misc_feature 1..20: note = Target: FXN; (+) strand; PAM type: NRG; PAM sequence: GGG
  source 1..20: mol_type = other DNA
catgaaggcaaatcagagag

SEQ ID NO: 18525 - DNA, 20 bp, synthetic construct
  misc_feature 1..20: note = Description of Artificial Sequence: Synthetic oligonucleotide
  misc_feature 1..20: note = Target: FXN; (+) strand; PAM type: NRG; PAM sequence: GAG
  source 1..20: mol_type = other DNA
ggcaaatcagagaggggcct

SEQ ID NO: 18526 - DNA, 20 bp, synthetic construct
  misc_feature 1..20: note = Description of Artificial Sequence: Synthetic oligonucleotide
  misc_feature 1..20: note = Target: FXN; (+) strand; PAM type: NRG; PAM sequence: CAG
  source 1..20: mol_type = other DNA
ggcctgagtgtgtatttgtc

SEQ ID NO: 18527 - DNA, 20 bp, synthetic construct
  misc_feature 1..20: note = Description of Artificial Sequence: Synthetic oligonucleotide
  misc_feature 1..20: note = Target: FXN; (+) strand; PAM type: NRG; PAM sequence: CAG
  source 1..20: mol_type = other DNA
ctgagtgtgtatttgtccag

SEQ ID NO: 18528 - DNA, 20 bp, synthetic construct
  misc_feature 1..20: note = Description of Artificial Sequence: Synthetic oligonucleotide
  misc_feature 1..20: note = Target: FXN; (+) strand; PAM type: NRG; PAM sequence: AGG
  source 1..20: mol_type = other DNA
tgagtgtgtatttgtccagc

SEQ ID NO: 18529 - DNA, 20 bp, synthetic construct
  misc_feature 1..20: note = Description of Artificial Sequence: Synthetic oligonucleotide
  misc_feature 1..20: note = Target: FXN; (+) strand; PAM type: NRG; PAM sequence: CAG
  source 1..20: mol_type = other DNA
gtgtgtatttgtccagcagg

SEQ ID NO: 18530 - DNA, 20 bp, synthetic construct
  misc_feature 1..20: note = Description of Artificial Sequence: Synthetic oligonucleotide
  misc_feature 1..20: note = Target: FXN; (+) strand; PAM type: NRG; PAM sequence: TGG
  source 1..20: mol_type = other DNA
gtatttgtccagcaggcaga

SEQ ID NO: 18531 - DNA, 20 bp, synthetic construct
  misc_feature 1..20: note = Description of Artificial Sequence: Synthetic oligonucleotide
  misc_feature 1..20: note = Target: FXN; (+) strand; PAM type: NRG; PAM sequence: GAG
  source 1..20: mol_type = other DNA
atttgtccagcaggcagatg

SEQ ID NO: 18532 - DNA, 20 bp, synthetic construct
  misc_feature 1..20: note = Description of Artificial Sequence: Synthetic oligonucleotide
  misc_feature 1..20: note = Target: FXN; (+) strand; PAM type: NRG; PAM sequence: AGG
  source 1..20: mol_type = other DNA
tttgtccagcaggcagatgg

SEQ ID NO: 18533 - DNA, 20 bp, synthetic construct
  misc_feature 1..20: note = Description of Artificial Sequence: Synthetic oligonucleotide
  misc_feature 1..20: note = Target: FXN; (+) strand; PAM type: NRG; PAM sequence: GGG
  source 1..20: mol_type = other DNA
ttgtccagcaggcagatgga

SEQ ID NO: 18534 - DNA, 20 bp, synthetic construct
  misc_feature 1..20: note = Description of Artificial Sequence: Synthetic oligonucleotide
  misc_feature 1..20: note = Target: FXN; (+) strand; PAM type: NRG; PAM sequence: TAG
  source 1..20: mol_type = other DNA
agatggagggaacaacaaac

SEQ ID NO: 18535 - DNA, 20 bp, synthetic construct
  misc_feature 1..20: note = Description of Artificial Sequence: Synthetic oligonucleotide
  misc_feature 1..20: note = Target: FXN; (+) strand; PAM type: NRG; PAM sequence: TAG
  source 1..20: mol_type = other DNA
ggaacaacaaactagacccg

SEQ ID NO: 18536 - DNA, 20 bp, synthetic construct
  misc_feature 1..20: note = Description of Artificial Sequence: Synthetic oligonucleotide
  misc_feature 1..20: note = Target: FXN; (+) strand; PAM type: NRG; PAM sequence: CAG
  source 1..20: mol_type = other DNA
aaactagacccgtagttctt

SEQ ID NO: 18537 - DNA, 20 bp, synthetic construct
  misc_feature 1..20: note = Description of Artificial Sequence: Synthetic oligonucleotide
  misc_feature 1..20: note = Target: FXN; (+) strand; PAM type: NRG; PAM sequence: TAG
  source 1..20: mol_type = other DNA
ctagacccgtagttcttcag

SEQ ID NO: 18538 - DNA, 20 bp, synthetic construct
  misc_feature 1..20: note = Description of Artificial Sequence: Synthetic oligonucleotide
  misc_feature 1..20: note = Target: FXN; (+) strand; PAM type: NRG; PAM sequence: AGG
  source 1..20: mol_type = other DNA
tagacccgtagttcttcagt

SEQ ID NO: 18539 - DNA, 20 bp, synthetic construct
  misc_feature 1..20: note = Description of Artificial Sequence: Synthetic oligonucleotide
  misc_feature 1..20: note = Target: FXN; (+) strand; PAM type: NRG; PAM sequence: GGG
  source 1..20: mol_type = other DNA
agacccgtagttcttcagta

SEQ ID NO: 18540 - DNA, 20 bp, synthetic construct
  misc_feature 1..20: note = Description of Artificial Sequence: Synthetic oligonucleotide
  misc_feature 1..20: note = Target: FXN; (+) strand; PAM type: NRG; PAM sequence: AAG
  source 1..20: mol_type = other DNA
cgtagttcttcagtagggat

SEQ ID NO: 18541 - DNA, 20 bp, synthetic construct
  misc_feature 1..20: note = Description of Artificial Sequence: Synthetic oligonucleotide
  misc_feature 1..20: note = Target: FXN; (+) strand; PAM type: NRG; PAM sequence: AAG
  source 1..20: mol_type = other DNA
gggataagataactgcccaa

SEQ ID NO: 18542 - DNA, 20 bp, synthetic construct
  misc_feature 1..20: note = Description of Artificial Sequence: Synthetic oligonucleotide
  misc_feature 1..20: note = Target: FXN; (+) strand; PAM type: NRG; PAM sequence: TAG
  source 1..20: mol_type = other DNA
ataactgcccaaaagttatt

SEQ ID NO: 18543 - DNA, 20 bp, synthetic construct
  misc_feature 1..20: note = Description of Artificial Sequence: Synthetic oligonucleotide
  misc_feature 1..20: note = Target: FXN; (+) strand; PAM type: NRG; PAM sequence: AAG
  source 1..20: mol_type = other DNA
caaaagttatttagattaca

SEQ ID NO: 18544 - DNA, 20 bp, synthetic construct
  misc_feature 1..20: note = Description of Artificial Sequence: Synthetic oligonucleotide
  misc_feature 1..20: note = Target: FXN; (+) strand; PAM type: NRG; PAM sequence: GAG
  source 1..20: mol_type = other DNA
tatttagattacaaagactt

SEQ ID NO: 18545 - DNA, 20 bp, synthetic construct
  misc_feature 1..20: note = Description of Artificial Sequence: Synthetic oligonucleotide
  misc_feature 1..20: note = Target: FXN; (+) strand; PAM type: NRG; PAM sequence: GAG
  source 1..20: mol_type = other DNA
gacttgagccctgctcctgt

SEQ ID NO: 18546 - DNA, 20 bp, synthetic construct
  misc_feature 1..20: note = Description of Artificial Sequence: Synthetic oligonucleotide
  misc_feature 1..20: note = Target: FXN; (+) strand; PAM type: NRG; PAM sequence: CAG
  source 1..20: mol_type = other DNA
tgagccctgctcctgtgaga

SEQ ID NO: 18547 - DNA, 20 bp, synthetic construct
  misc_feature 1..20: note = Description of Artificial Sequence: Synthetic oligonucleotide
  misc_feature 1..20: note = Target: FXN; (+) strand; PAM type: NRG; PAM sequence: TGG
  source 1..20: mol_type = other DNA
ctgctcctgtgagacagtga

SEQ ID NO: 18548 - DNA, 20 bp, synthetic construct
  misc_feature 1..20: note = Description of Artificial Sequence: Synthetic oligonucleotide
  misc_feature 1..20: note = Target: FXN; (+) strand; PAM type: NRG; PAM sequence: GGG
  source 1..20: mol_type = other DNA
tgctcctgtgagacagtgat

SEQ ID NO: 18549 - DNA, 20 bp, synthetic construct
  misc_feature 1..20: note = Description of Artificial Sequence: Synthetic oligonucleotide
  misc_feature 1..20: note = Target: FXN; (+) strand; PAM type: NRG; PAM sequence: GGG
  source 1..20: mol_type = other DNA
gctcctgtgagacagtgatg

SEQ ID NO: 18550 - DNA, 20 bp, synthetic construct
  misc_feature 1..20: note = Description of Artificial Sequence: Synthetic oligonucleotide
  misc_feature 1..20: note = Target: FXN; (+) strand; PAM type: NRG; PAM sequence: TAG
  source 1..20: mol_type = other DNA
cctgtgagacagtgatgggg

SEQ ID NO: 18551 - DNA, 20 bp, synthetic construct
  misc_feature 1..20: note = Description of Artificial Sequence: Synthetic oligonucleotide
  misc_feature 1..20: note = Target: FXN; (+) strand; PAM type: NRG; PAM sequence: AGG
  source 1..20: mol_type = other DNA
ctgtgagacagtgatggggt

SEQ ID NO: 18552 - DNA, 20 bp, synthetic construct
  misc_feature 1..20: note = Description of Artificial Sequence: Synthetic oligonucleotide
  misc_feature 1..20: note = Target: FXN; (+) strand; PAM type: NRG; PAM sequence: CGG
  source 1..20: mol_type = other DNA
gagacagtgatggggtaggt

SEQ ID NO: 18553 - DNA, 20 bp, synthetic construct
  misc_feature 1..20: note = Description of Artificial Sequence: Synthetic oligonucleotide
  misc_feature 1..20: note = Target: FXN; (+) strand; PAM type: NRG; PAM sequence: GGG
  source 1..20: mol_type = other DNA
agacagtgatggggtaggtc

SEQ ID NO: 18554 - DNA, 20 bp, synthetic construct
  misc_feature 1..20: note = Description of Artificial Sequence: Synthetic oligonucleotide
  misc_feature 1..20: note = Target: FXN; (+) strand; PAM type: NRG; PAM sequence: TGG
  source 1..20: mol_type = other DNA
gggtaggtcgggtgcattcc

SEQ ID NO: 18555 - DNA, 20 bp, synthetic construct
  misc_feature 1..20: note = Description of Artificial Sequence: Synthetic oligonucleotide
  misc_feature 1..20: note = Target: FXN; (+) strand; PAM type: NRG; PAM sequence: GGG
  source 1..20: mol_type = other DNA
ggtaggtcgggtgcattcct

SEQ ID NO: 18556 - DNA, 20 bp, synthetic construct
  misc_feature 1..20: note = Description of Artificial Sequence: Synthetic oligonucleotide
  misc_feature 1..20: note = Target: FXN; (+) strand; PAM type: NRG; PAM sequence: AAG
  source 1..20: mol_type = other DNA
aggtcgggtgcattcctggg

SEQ ID NO: 18557 - DNA, 20 bp, synthetic construct
  misc_feature 1..20: note = Description of Artificial Sequence: Synthetic oligonucleotide
  misc_feature 1..20: note = Target: FXN; (+) strand; PAM type: NRG; PAM sequence: AAG
  source 1..20: mol_type = other DNA
ctgggaagcatatttttgaa

SEQ ID NO: 18558 - DNA, 20 bp, synthetic construct
  misc_feature 1..20: note = Description of Artificial Sequence: Synthetic oligonucleotide
  misc_feature 1..20: note = Target: FXN; (+) strand; PAM type: NRG; PAM sequence: TGG
  source 1..20: mol_type = other DNA
atatttttgaaaagctcacc

SEQ ID NO: 18559 - DNA, 20 bp, synthetic construct
  misc_feature 1..20: note = Description of Artificial Sequence: Synthetic oligonucleotide
  misc_feature 1..20: note = Target: FXN; (+) strand; PAM type: NRG; PAM sequence: GGG
  source 1..20: mol_type = other DNA
tatttttgaaaagctcacct

SEQ ID NO: 18560 - DNA, 20 bp, synthetic construct
  misc_feature 1..20: note = Description of Artificial Sequence: Synthetic oligonucleotide
  misc_feature 1..20: note = Target: FXN; (+) strand; PAM type: NRG; PAM sequence: TAG
  source 1..20: mol_type = other DNA
gggattctaatgtgtatccc

SEQ ID NO: 18561 - DNA, 20 bp, synthetic construct
  misc_feature 1..20: note = Description of Artificial Sequence: Synthetic oligonucleotide
  misc_feature 1..20: note = Target: FXN; (+) strand; PAM type: NRG; PAM sequence: AGG
  source 1..20: mol_type = other DNA
ggattctaatgtgtatccct

SEQ ID NO: 18562 - DNA, 20 bp, synthetic construct
  misc_feature 1..20: note = Description of Artificial Sequence: Synthetic oligonucleotide
  misc_feature 1..20: note = Target: FXN; (+) strand; PAM type: NRG; PAM sequence: TAG
  source 1..20: mol_type = other DNA
gtatccctaggtcttattcc

SEQ ID NO: 18563 - DNA, 20 bp, synthetic construct
  misc_feature 1..20: note = Description of Artificial Sequence: Synthetic oligonucleotide
  misc_feature 1..20: note = Target: FXN; (+) strand; PAM type: NRG; PAM sequence: GAG
  source 1..20: mol_type = other DNA
atccctaggtcttattccta

SEQ ID NO: 18564 - DNA, 20 bp, synthetic construct
  misc_feature 1..20: note = Description of Artificial Sequence: Synthetic oligonucleotide
  misc_feature 1..20: note = Target: FXN; (+) strand; PAM type: NRG; PAM sequence: TGG
  source 1..20: mol_type = other DNA
tcctagagattttgattact

SEQ ID NO: 18565 - DNA, 20 bp, synthetic construct
  misc_feature 1..20: note = Description of Artificial Sequence: Synthetic oligonucleotide
  misc_feature 1..20: note = Target: FXN; (+) strand; PAM type: NRG; PAM sequence: TGG
  source 1..20: mol_type = other DNA
gagattttgattacttggtc

SEQ ID NO: 18566 - DNA, 20 bp, synthetic construct
  misc_feature 1..20: note = Description of Artificial Sequence: Synthetic oligonucleotide
  misc_feature 1..20: note = Target: FXN; (+) strand; PAM type: NRG; PAM sequence: GGG
  source 1..20: mol_type = other DNA
agattttgattacttggtct

SEQ ID NO: 18567 - DNA, 20 bp, synthetic construct
  misc_feature 1..20: note = Description of Artificial Sequence: Synthetic oligonucleotide
  misc_feature 1..20: note = Target: FXN; (+) strand; PAM type: NRG; PAM sequence: GGG
  source 1..20: mol_type = other DNA
gattttgattacttggtctg

SEQ ID NO: 18568 - DNA, 20 bp, synthetic construct
  misc_feature 1..20: note = Description of Artificial Sequence: Synthetic oligonucleotide
  misc_feature 1..20: note = Target: FXN; (+) strand; PAM type: NRG; PAM sequence: TGG
  source 1..20: mol_type = other DNA
tgattacttggtctggggtg

SEQ ID NO: 18569 - DNA, 20 bp, synthetic construct
  misc_feature 1..20: note = Description of Artificial Sequence: Synthetic oligonucleotide
  misc_feature 1..20: note = Target: FXN; (+) strand; PAM type: NRG; PAM sequence: TGG
  source 1..20: mol_type = other DNA
gtctggggtgtggcatgacc

SEQ ID NO: 18570 - DNA, 20 bp, synthetic construct
  misc_feature 1..20: note = Description of Artificial Sequence: Synthetic oligonucleotide
  misc_feature 1..20: note = Target: FXN; (+) strand; PAM type: NRG; PAM sequence: GGG
  source 1..20: mol_type = other DNA
tctggggtgtggcatgacct

SEQ ID NO: 18571 - DNA, 20 bp, synthetic construct
  misc_feature 1..20: note = Description of Artificial Sequence: Synthetic oligonucleotide
  misc_feature 1..20: note = Target: FXN; (+) strand; PAM type: NRG; PAM sequence: CAG
  source 1..20: mol_type = other DNA
ggggtgtggcatgacctggg

SEQ ID NO: 18572 - DNA, 20 bp, synthetic construct
  misc_feature 1..20: note = Description of Artificial Sequence: Synthetic oligonucleotide
  misc_feature 1..20: note = Target: FXN; (+) strand; PAM type: NRG; PAM sequence: AGG
  source 1..20: mol_type = other DNA
gggtgtggcatgacctgggc

SEQ ID NO: 18573 - DNA, 20 bp, synthetic construct
  misc_feature 1..20: note = Description of Artificial Sequence: Synthetic oligonucleotide
  misc_feature 1..20: note = Target: FXN; (+) strand; PAM type: NRG; PAM sequence: GGG
  source 1..20: mol_type = other DNA
ggtgtggcatgacctgggca

SEQ ID NO: 18574 - DNA, 20 bp, synthetic construct
  misc_feature 1..20: note = Description of Artificial Sequence: Synthetic oligonucleotide
  misc_feature 1..20: note = Target: FXN; (+) strand; PAM type: NRG; PAM sequence: TGG
  source 1..20: mol_type = other DNA
gcatgacctgggcagggcac

SEQ ID NO: 18575 - DNA, 20 bp, synthetic construct
  misc_feature 1..20: note = Description of Artificial Sequence: Synthetic oligonucleotide
  misc_feature 1..20: note = Target: FXN; (+) strand; PAM type: NRG; PAM sequence: GGG
  source 1..20: mol_type = other DNA
catgacctgggcagggcact

SEQ ID NO: 18576 - DNA, 20 bp, synthetic construct
  misc_feature 1..20: note = Description of Artificial Sequence: Synthetic oligonucleotide
  misc_feature 1..20: note = Target: FXN; (+) strand; PAM type: NRG; PAM sequence: AAG
  source 1..20: mol_type = other DNA
ggcagggcactgggattttt

SEQ ID NO: 18577 - DNA, 20 bp, synthetic construct
  misc_feature 1..20: note = Description of Artificial Sequence: Synthetic oligonucleotide
  misc_feature 1..20: note = Target: FXN; (+) strand; PAM type: NRG; PAM sequence: CAG
  source 1..20: mol_type = other DNA
actgggatttttaagctcca

SEQ ID NO: 18578 - DNA, 20 bp, synthetic construct
  misc_feature 1..20: note = Description of Artificial Sequence: Synthetic oligonucleotide
  misc_feature 1..20: note = Target: FXN; (+) strand; PAM type: NRG; PAM sequence: CAG
  source 1..20: mol_type = other DNA
ccacagatgattccaatatg

SEQ ID NO: 18579 - DNA, 20 bp, synthetic construct
  misc_feature 1..20: note = Description of Artificial Sequence: Synthetic oligonucleotide
  misc_feature 1..20: note = Target: FXN; (+) strand; PAM type: NRG; PAM sequence: TAG
  source 1..20: mol_type = other DNA
agatgattccaatatgcagc

SEQ ID NO: 18580 - DNA, 20 bp, synthetic construct
  misc_feature 1..20: note = Description of Artificial Sequence: Synthetic oligonucleotide
  misc_feature 1..20: note = Target: FXN; (+) strand; PAM type: NRG; PAM sequence: GAG
  source 1..20: mol_type = other DNA
ttccaatatgcagctagtat

SEQ ID NO: 18581 - DNA, 20 bp, synthetic construct
  misc_feature 1..20: note = Description of Artificial Sequence: Synthetic oligonucleotide
  misc_feature 1..20: note = Target: FXN; (+) strand; PAM type: NRG; PAM sequence: AAG
  source 1..20: mol_type = other DNA
tgagaacttgtttttttttg

SEQ ID NO: 18582 - DNA, 20 bp, synthetic construct
  misc_feature 1..20: note = Description of Artificial Sequence: Synthetic oligonucleotide
  misc_feature 1..20: note = Target: FXN; (+) strand; PAM type: NRG; PAM sequence: AGG
  source 1..20: mol_type = other DNA
gagaacttgtttttttttga

SEQ ID NO: 18583 - DNA, 20 bp, synthetic construct
  misc_feature 1..20: note = Description of Artificial Sequence: Synthetic oligonucleotide
  misc_feature 1..20: note = Target: FXN; (+) strand; PAM type: NRG; PAM sequence: GAG
  source 1..20: mol_type = other DNA
gaacttgtttttttttgaag

SEQ ID NO: 18584 - DNA, 20 bp, synthetic construct
  misc_feature 1..20: note = Description of Artificial Sequence: Synthetic oligonucleotide
  misc_feature 1..20: note = Target: FXN; (+) strand; PAM type: NRG; PAM sequence: CAG
  source 1..20: mol_type = other DNA
aggagtctcactctgtcacc

SEQ ID NO: 18585 - DNA, 20 bp, synthetic construct
  misc_feature 1..20: note = Description of Artificial Sequence: Synthetic oligonucleotide
  misc_feature 1..20: note = Target: FXN; (+) strand; PAM type: NRG; PAM sequence: AGG
  source 1..20: mol_type = other DNA
ggagtctcactctgtcaccc

SEQ ID NO: 18586 - DNA, 20 bp, synthetic construct
  misc_feature 1..20: note = Description of Artificial Sequence: Synthetic oligonucleotide
  misc_feature 1..20: note = Target: FXN; (+) strand; PAM type: NRG; PAM sequence: TGG
  source 1..20: mol_type = other DNA
tctcactctgtcacccaggc

SEQ ID NO: 18587 - DNA, 20 bp, synthetic construct
  misc_feature 1..20: note = Description of Artificial Sequence: Synthetic oligonucleotide
  misc_feature 1..20: note = Target: FXN; (+) strand; PAM type: NRG; PAM sequence: GAG
  source 1..20: mol_type = other DNA
tcactctgtcacccaggctg

SEQ ID NO: 18588 - DNA, 20 bp, synthetic construct
  misc_feature 1..20: note = Description of Artificial Sequence: Synthetic oligonucleotide
  misc_feature 1..20: note = Target: FXN; (+) strand; PAM type: NRG; PAM sequence: CAG
  source 1..20: mol_type = other DNA
ctgtcacccaggctggagtg

SEQ ID NO: 18589 - DNA, 20 bp, synthetic construct
  misc_feature 1..20: note = Description of Artificial Sequence: Synthetic oligonucleotide
  misc_feature 1..20: note = Target: FXN; (+) strand; PAM type: NRG; PAM sequence: TGG
  source 1..20: mol_type = other DNA
tcacccaggctggagtgcag

SEQ ID NO: 18590 - DNA, 20 bp, synthetic construct
  misc_feature 1..20: note = Description of Artificial Sequence: Synthetic oligonucleotide
  misc_feature 1..20: note = Target: FXN; (+) strand; PAM type: NRG; PAM sequence: CGG
  source 1..20: mol_type = other DNA
ggagtgcagtggcgcaatct

SEQ ID NO: 18591 - DNA, 20 bp, synthetic construct
  misc_feature 1..20: note = Description of Artificial Sequence: Synthetic oligonucleotide
  misc_feature 1..20: note = Target: FXN; (+) strand; PAM type: NRG; PAM sequence: TGG
  source 1..20: mol_type = other DNA
cggctcactgctccgcttcc

SEQ ID NO: 18592 - DNA, 20 bp, synthetic construct
  misc_feature 1..20: note = Description of Artificial Sequence: Synthetic oligonucleotide
  misc_feature 1..20: note = Target: FXN; (+) strand; PAM type: NRG; PAM sequence: GGG
  source 1..20: mol_type = other DNA
ggctcactgctccgcttcct

SEQ ID NO: 18593 - DNA, 20 bp, synthetic construct
  misc_feature 1..20: note = Description of Artificial Sequence: Synthetic oligonucleotide
  misc_feature 1..20: note = Target: FXN; (+) strand; PAM type: NRG; PAM sequence: AAG
  source 1..20: mol_type = other DNA
ctgctccgcttcctgggttc

SEQ ID NO: 18594 - DNA, 20 bp, synthetic construct
  misc_feature 1..20: note = Description of Artificial Sequence: Synthetic oligonucleotide
  misc_feature 1..20: note = Target: FXN; (+) strand; PAM type: NRG; PAM sequence: CAG
  source 1..20: mol_type = other DNA
ctccgcttcctgggttcaag

SEQ ID NO: 18595 - DNA, 20 bp, synthetic construct
  misc_feature 1..20: note = Description of Artificial Sequence: Synthetic oligonucleotide
  misc_feature 1..20: note = Target: FXN; (+) strand; PAM type: NRG; PAM sequence: CAG
  source 1..20: mol_type = other DNA
ttcaagcagttctcctgcct

SEQ ID NO: 18596 - DNA, 20 bp, synthetic construct
  misc_feature 1..20: note = Description of Artificial Sequence: Synthetic oligonucleotide
  misc_feature 1..20: note = Target: FXN; (+) strand; PAM type: NRG; PAM sequence: GAG
  source 1..20: mol_type = other DNA
ttctcctgcctcagcctccc

SEQ ID NO: 18597 - DNA, 20 bp, synthetic construct
  misc_feature 1..20: note = Description of Artificial Sequence: Synthetic oligonucleotide
  misc_feature 1..20: note = Target: FXN; (+) strand; PAM type: NRG; PAM sequence: TAG
  source 1..20: mol_type = other DNA
tcctgcctcagcctcccgag

SEQ ID NO: 18598 - DNA, 20 bp, synthetic construct
  misc_feature 1..20: note = Description of Artificial Sequence: Synthetic oligonucleotide
  misc_feature 1..20: note = Target: FXN; (+) strand; PAM type: NRG; PAM sequence: TGG
  source 1..20: mol_type = other DNA
gcctcagcctcccgagtagc

SEQ ID NO: 18599 - DNA, 20 bp, synthetic construct
  misc_feature 1..20: note = Description of Artificial Sequence: Synthetic oligonucleotide
  misc_feature 1..20: note = Target: FXN; (+) strand; PAM type: NRG; PAM sequence: GGG
  source 1..20: mol_type = other DNA
cctcagcctcccgagtagct

SEQ ID NO: 18600 - DNA, 20 bp, synthetic construct
  misc_feature 1..20: note = Description of Artificial Sequence: Synthetic oligonucleotide
  misc_feature 1..20: note = Target: FXN; (+) strand; PAM type: NRG; PAM sequence: TAG
  source 1..20: mol_type = other DNA
ctcccgagtagctgggatta

SEQ ID NO: 18601 - DNA, 20 bp, synthetic construct
  misc_feature 1..20: note = Description of Artificial Sequence: Synthetic oligonucleotide
  misc_feature 1..20: note = Target: FXN; (+) strand; PAM type: NRG; PAM sequence: AGG
  source 1..20: mol_type = other DNA
tcccgagtagctgggattat

SEQ ID NO: 18602 - DNA, 20 bp, synthetic construct
  misc_feature 1..20: note = Description of Artificial Sequence: Synthetic oligonucleotide
  misc_feature 1..20: note = Target: FXN; (+) strand; PAM type: NRG; PAM sequence: CAG
  source 1..20: mol_type = other DNA
taggcatctgccaccatgcc

SEQ ID NO: 18603 - DNA, 20 bp, synthetic construct
  misc_feature 1..20: note = Description of Artificial Sequence: Synthetic oligonucleotide
  misc_feature 1..20: note = Target: FXN; (+) strand; PAM type: NRG; PAM sequence: TAG
  source 1..20: mol_type = other DNA
cccagctaatttttgcattt

SEQ ID NO: 18604 - DNA, 20 bp, synthetic construct
  misc_feature 1..20: note = Description of Artificial Sequence: Synthetic oligonucleotide
  misc_feature 1..20: note = Target: FXN; (+) strand; PAM type: NRG; PAM sequence: AAG
  source 1..20: mol_type = other DNA
ctaatttttgcattttagta

SEQ ID NO: 18605 - DNA, 20 bp, synthetic construct
  misc_feature 1..20: note = Description of Artificial Sequence: Synthetic oligonucleotide
  misc_feature 1..20: note = Target: FXN; (+) strand; PAM type: NRG; PAM sequence: CGG
  source 1..20: mol_type = other DNA
tttttgcattttagtaaaga

SEQ ID NO: 18606 - DNA, 20 bp, synthetic construct
  misc_feature 1..20: note = Description of Artificial Sequence: Synthetic oligonucleotide
  misc_feature 1..20: note = Target: FXN; (+) strand; PAM type: NRG; PAM sequence: GGG
  source 1..20: mol_type = other DNA
ttttgcattttagtaaagac

SEQ ID NO: 18607 - DNA, 20 bp, synthetic construct
  misc_feature 1..20: note = Description of Artificial Sequence: Synthetic oligonucleotide
  misc_feature 1..20: note = Target: FXN; (+) strand; PAM type: NRG; PAM sequence: GGG
  source 1..20: mol_type = other DNA
tttgcattttagtaaagacg

SEQ ID NO: 18608 - DNA, 20 bp, synthetic construct
  misc_feature 1..20: note = Description of Artificial Sequence: Synthetic oligonucleotide
  misc_feature 1..20: note = Target: FXN; (+) strand; PAM type: NRG; PAM sequence: TGG
  source 1..20: mol_type = other DNA
aagacggggtttcaccatgt

SEQ ID NO: 18609 - DNA, 20 bp, synthetic construct
  misc_feature 1..20: note = Description of Artificial Sequence: Synthetic oligonucleotide
  misc_feature 1..20: note = Target: FXN; (+) strand; PAM type: NRG; PAM sequence: TAG
  source 1..20: mol_type = other DNA
cggggtttcaccatgttggt

SEQ ID NO: 18610 - DNA, 20 bp, synthetic construct
  misc_feature 1..20: note = Description of Artificial Sequence: Synthetic oligonucleotide
  misc_feature 1..20: note = Target: FXN; (+) strand; PAM type: NRG; PAM sequence: AGG
  source 1..20: mol_type = other DNA
ggggtttcaccatgttggtt

SEQ ID NO: 18611 - DNA, 20 bp, synthetic construct
  misc_feature 1..20: note = Description of Artificial Sequence: Synthetic oligonucleotide
  misc_feature 1..20: note = Target: FXN; (+) strand; PAM type: NRG; PAM sequence: TGG
  source 1..20: mol_type = other DNA
tttcaccatgttggttaggc

SEQ ID NO: 18612 - DNA, 20 bp, synthetic construct
  misc_feature 1..20: note = Description of Artificial Sequence: Synthetic oligonucleotide
  misc_feature 1..20: note = Target: FXN; (+) strand; PAM type: NRG; PAM sequence: TGG
  source 1..20: mol_type = other DNA
ctcgatctcctgacctcaaa

SEQ ID NO: 18613 - DNA, 20 bp, synthetic construct
  misc_feature 1..20: note = Description of Artificial Sequence: Synthetic oligonucleotide
  misc_feature 1..20: note = Target: FXN; (+) strand; PAM type: NRG; PAM sequence: CAG
  source 1..20: mol_type = other DNA
ctcaaatggtccacccccat

SEQ ID NO: 18614 - DNA, 20 bp, synthetic construct
  misc_feature 1..20: note = Description of Artificial Sequence: Synthetic oligonucleotide
  misc_feature 1..20: note = Target: FXN; (+) strand; PAM type: NRG; PAM sequence: AAG
  source 1..20: mol_type = other DNA
ccacccccatcagccttcca

SEQ ID NO: 18615 - DNA, 20 bp, synthetic construct
  misc_feature 1..20: note = Description of Artificial Sequence: Synthetic oligonucleotide
  misc_feature 1..20: note = Target: FXN; (+) strand; PAM type: NRG; PAM sequence: TGG
  source 1..20: mol_type = other DNA
ccatcagccttccaaagttt

SEQ ID NO: 18616 - DNA, 20 bp, synthetic construct
  misc_feature 1..20: note = Description of Artificial Sequence: Synthetic oligonucleotide
  misc_feature 1..20: note = Target: FXN; (+) strand; PAM type: NRG; PAM sequence: GGG
  source 1..20: mol_type = other DNA
catcagccttccaaagtttt

SEQ ID NO: 18617 - DNA, 20 bp, synthetic construct
  misc_feature 1..20: note = Description of Artificial Sequence: Synthetic oligonucleotide
  misc_feature 1..20: note = Target: FXN; (+) strand; PAM type: NRG; PAM sequence: CAG
  source 1..20: mol_type = other DNA
cttccaaagttttgggataa

SEQ ID NO: 18618 - DNA, 20 bp, synthetic construct
  misc_feature 1..20: note = Description of Artificial Sequence: Synthetic oligonucleotide
  misc_feature 1..20: note = Target: FXN; (+) strand; PAM type: NRG; PAM sequence: AGG
  source 1..20: mol_type = other DNA
ttccaaagttttgggataac

SEQ ID NO: 18619 - DNA, 20 bp, synthetic construct
  misc_feature 1..20: note = Description of Artificial Sequence: Synthetic oligonucleotide
  misc_feature 1..20: note = Target: FXN; (+) strand; PAM type: NRG; PAM sequence: GAG
  source 1..20: mol_type = other DNA
agttttgggataacaggcgt

SEQ ID NO: 18620 - DNA, 20 bp, synthetic construct
  misc_feature 1..20: note = Description of Artificial Sequence: Synthetic oligonucleotide
  misc_feature 1..20: note = Target: FXN; (+) strand; PAM type: NRG; PAM sequence: CAG
  source 1..20: mol_type = other DNA
ggataacaggcgtgagccac

SEQ ID NO: 18621 - DNA, 20 bp, synthetic construct
  misc_feature 1..20: note = Description of Artificial Sequence: Synthetic oligonucleotide
  misc_feature 1..20: note = Target: FXN; (+) strand; PAM type: NRG; PAM sequence: AGG
  source 1..20: mol_type = other DNA
gataacaggcgtgagccacc

SEQ ID NO: 18622 - DNA, 20 bp, synthetic construct
  misc_feature 1..20: note = Description of Artificial Sequence: Synthetic oligonucleotide
  misc_feature 1..20: note = Target: FXN; (+) strand; PAM type: NRG; PAM sequence: CGG
  source 1..20: mol_type = other DNA
caggcgtgagccaccaggtc

SEQ ID NO: 18623 - DNA, 20 bp, synthetic construct
  misc_feature 1..20: note = Description of Artificial Sequence: Synthetic oligonucleotide
  misc_feature 1..20: note = Target: FXN; (+) strand; PAM type: NRG; PAM sequence: TGG
  source 1..20: mol_type = other DNA
gtgagccaccaggtccggcc

SEQ ID NO: 18624 - DNA, 20 bp, synthetic construct
  misc_feature 1..20: note = Description of Artificial Sequence: Synthetic oligonucleotide
  misc_feature 1..20: note = Target: FXN; (+) strand; PAM type: NRG; PAM sequence: GAG
  source 1..20: mol_type = other DNA
caccaggtccggcctggtgt

SEQ ID NO: 18625 - DNA, 20 bp, synthetic construct
  misc_feature 1..20: note = Description of Artificial Sequence: Synthetic oligonucleotide
  misc_feature 1..20: note = Target: FXN; (+) strand; PAM type: NRG; PAM sequence: GAG
  source 1..20: mol_type = other DNA
ggcctggtgtgagaacttct

SEQ ID NO: 18626 - DNA, 20 bp, synthetic construct
  misc_feature 1..20: note = Description of Artificial Sequence: Synthetic oligonucleotide
  misc_feature 1..20: note = Target: FXN; (+) strand; PAM type: NRG; PAM sequence: TGG
  source 1..20: mol_type = other DNA
tggtgtgagaacttctgagt

SEQ ID NO: 18627 - DNA, 20 bp, synthetic construct
  misc_feature 1..20: note = Description of Artificial Sequence: Synthetic oligonucleotide
  misc_feature 1..20: note = Target: FXN; (+) strand; PAM type: NRG; PAM sequence: TAG
  source 1..20: mol_type = other DNA
ttctgagttggatgaaacat

SEQ ID NO: 18628 - DNA, 20 bp, synthetic construct
  misc_feature 1..20: note = Description of Artificial Sequence: Synthetic oligonucleotide
  misc_feature 1..20: note = Target: FXN; (+) strand; PAM type: NRG; PAM sequence: CAG
  source 1..20: mol_type = other DNA
gttggatgaaacattagccc

SEQ ID NO: 18629 - DNA, 20 bp, synthetic construct
  misc_feature 1..20: note = Description of Artificial Sequence: Synthetic oligonucleotide
  misc_feature 1..20: note = Target: FXN; (+) strand; PAM type: NRG; PAM sequence: TAG
  source 1..20: mol_type = other DNA
gaaacattagccccagatcc

SEQ ID NO: 18630 - DNA, 20 bp, synthetic construct
  misc_feature 1..20: note = Description of Artificial Sequence: Synthetic oligonucleotide
  misc_feature 1..20: note = Target: FXN; (+) strand; PAM type: NRG; PAM sequence: AAG
  source 1..20: mol_type = other DNA
acattagccccagatcctag

SEQ ID NO: 18631 - DNA, 20 bp, synthetic construct
  misc_feature 1..20: note = Description of Artificial Sequence: Synthetic oligonucleotide
  misc_feature 1..20: note = Target: FXN; (+) strand; PAM type: NRG; PAM sequence: CAG
  source 1..20: mol_type = other DNA
tagccccagatcctagaagc

SEQ ID NO: 18632 - DNA, 20 bp, synthetic construct
  misc_feature 1..20: note = Description of Artificial Sequence: Synthetic oligonucleotide
  misc_feature 1..20: note = Target: FXN; (+) strand; PAM type: NRG; PAM sequence: AGG
  source 1..20: mol_type = other DNA
agccccagatcctagaagcc

SEQ ID NO: 18633 - DNA, 20 bp, synthetic construct
  misc_feature 1..20: note = Description of Artificial Sequence: Synthetic oligonucleotide
  misc_feature 1..20: note = Target: FXN; (+) strand; PAM type: NRG; PAM sequence: GGG
  source 1..20: mol_type = other DNA
gccccagatcctagaagcca

SEQ ID NO: 18634 - DNA, 20 bp, synthetic construct
  misc_feature 1..20: note = Description of Artificial Sequence: Synthetic oligonucleotide
  misc_feature 1..20: note = Target: FXN; (+) strand; PAM type: NRG; PAM sequence: AAG
  source 1..20: mol_type = other DNA
ccagatcctagaagccaggg

SEQ ID NO: 18635 - DNA, 20 bp, synthetic construct
  misc_feature 1..20: note = Description of Artificial Sequence: Synthetic oligonucleotide
  misc_feature 1..20: note = Target: FXN; (+) strand; PAM type: NRG; PAM sequence: TGG
  source 1..20: mol_type = other DNA
cctagaagccagggaagtgc

SEQ ID NO: 18636 - DNA, 20 bp, synthetic construct
  misc_feature 1..20: note = Description of Artificial Sequence: Synthetic oligonucleotide
  misc_feature 1..20: note = Target: FXN; (+) strand; PAM type: NRG; PAM sequence: TGG
  source 1..20: mol_type = other DNA
aagtgctggtctttatcgac

SEQ ID NO: 18637 - DNA, 20 bp, synthetic construct
  misc_feature 1..20: note = Description of Artificial Sequence: Synthetic oligonucleotide
  misc_feature 1..20: note = Target: FXN; (+) strand; PAM type: NRG; PAM sequence: CAG
  source 1..20: mol_type = other DNA
ggtctttatcgactggccac

SEQ ID NO: 18638 - DNA, 20 bp, synthetic construct
  misc_feature 1..20: note = Description of Artificial Sequence: Synthetic oligonucleotide
  misc_feature 1..20: note = Target: FXN; (+) strand; PAM type: NRG; PAM sequence: AGG
  source 1..20: mol_type = other DNA
gtctttatcgactggccacc

SEQ ID NO: 18639 - DNA, 20 bp, synthetic construct
  misc_feature 1..20: note = Description of Artificial Sequence: Synthetic oligonucleotide
  misc_feature 1..20: note = Target: FXN; (+) strand; PAM type: NRG; PAM sequence: TGG
  source 1..20: mol_type = other DNA
tttatcgactggccaccagg

SEQ ID NO: 18640 - DNA, 20 bp, synthetic construct
  misc_feature 1..20: note = Description of Artificial Sequence: Synthetic oligonucleotide
  misc_feature 1..20: note = Target: FXN; (+) strand; PAM type: NRG; PAM sequence: CAG
  source 1..20: mol_type = other DNA
atcgactggccaccaggtgg

SEQ ID NO: 18641 - DNA, 20 bp, synthetic construct
  misc_feature 1..20: note = Description of Artificial Sequence: Synthetic oligonucleotide
  misc_feature 1..20: note = Target: FXN; (+) strand; PAM type: NRG; PAM sequence: TGG
  source 1..20: mol_type = other DNA
tggccaccaggtggcagatt

SEQ ID NO: 18642 - DNA, 20 bp, synthetic construct
  misc_feature 1..20: note = Description of Artificial Sequence: Synthetic oligonucleotide
  misc_feature 1..20: note = Target: FXN; (+) strand; PAM type: NRG; PAM sequence: GGG
  source 1..20: mol_type = other DNA
ggccaccaggtggcagattt

SEQ ID NO: 18643 - DNA, 20 bp, synthetic construct
  misc_feature 1..20: note = Description of Artificial Sequence: Synthetic oligonucleotide
  misc_feature 1..20: note = Target: FXN; (+) strand; PAM type: NRG; PAM sequence: AAG
  source 1..20: mol_type = other DNA
accaggtggcagatttgggc

SEQ ID NO: 18644 - DNA, 20 bp, synthetic construct
  misc_feature 1..20: note = Description of Artificial Sequence: Synthetic oligonucleotide
  misc_feature 1..20: note = Target: FXN; (+) strand; PAM type: NRG; PAM sequence: AGG
  source 1..20: mol_type = other DNA
ccaggtggcagatttgggca

SEQ ID NO: 18645 - DNA, 20 bp, synthetic construct
  misc_feature 1..20: note = Description of Artificial Sequence: Synthetic oligonucleotide
  misc_feature 1..20: note = Target: FXN; (+) strand; PAM type: NRG; PAM sequence: GGG
  source 1..20: mol_type = other DNA
caggtggcagatttgggcaa

SEQ ID NO: 18646 - DNA, 20 bp, synthetic construct
  misc_feature 1..20: note = Description of Artificial Sequence: Synthetic oligonucleotide
  misc_feature 1..20: note = Target: FXN; (+) strand; PAM type: NRG; PAM sequence: TGG
  source 1..20: mol_type = other DNA
tttgggcaagggtctgcctt

SEQ ID NO: 18647 - DNA, 20 bp, synthetic construct
  misc_feature 1..20: note = Description of Artificial Sequence: Synthetic oligonucleotide
  misc_feature 1..20: note = Target: FXN; (+) strand; PAM type: NRG; PAM sequence: GGG
  source 1..20: mol_type = other DNA
ttgggcaagggtctgccttt

SEQ ID NO: 18648 - DNA, 20 bp, synthetic construct
  misc_feature 1..20: note = Description of Artificial Sequence: Synthetic oligonucleotide
  misc_feature 1..20: note = Target: FXN; (+) strand; PAM type: NRG; PAM sequence: TAG
  source 1..20: mol_type = other DNA
caagggtctgcctttgggtt

SEQ ID NO: 18649 - DNA, 20 bp, synthetic construct
  misc_feature 1..20: note = Description of Artificial Sequence: Synthetic oligonucleotide
  misc_feature 1..20: note = Target: FXN; (+) strand; PAM type: NRG; PAM sequence: TAG
  source 1..20: mol_type = other DNA
ttgggtttagaattattgct

SEQ ID NO: 18650 - DNA, 20 bp, synthetic construct
  misc_feature 1..20: note = Description of Artificial Sequence: Synthetic oligonucleotide
  misc_feature 1..20: note = Target: FXN; (+) strand; PAM type: NRG; PAM sequence: AGG
  source 1..20: mol_type = other DNA
tgggtttagaattattgctt

SEQ ID NO: 18651 - DNA, 20 bp, synthetic construct
  misc_feature 1..20: note = Description of Artificial Sequence: Synthetic oligonucleotide
  misc_feature 1..20: note = Target: FXN; (+) strand; PAM type: NRG; PAM sequence: AAG
  source 1..20: mol_type = other DNA
gaattattgcttaggcctta

SEQ ID NO: 18652 - DNA, 20 bp, synthetic construct
  misc_feature 1..20: note = Description of Artificial Sequence: Synthetic oligonucleotide
  misc_feature 1..20: note = Target: FXN; (+) strand; PAM type: NRG; PAM sequence: TAG
  source 1..20: mol_type = other DNA
ttattgcttaggccttaaag

SEQ ID NO: 18653 - DNA, 20 bp, synthetic construct
  misc_feature 1..20: note = Description of Artificial Sequence: Synthetic oligonucleotide
  misc_feature 1..20: note = Target: FXN; (+) strand; PAM type: NRG; PAM sequence: CAG
  source 1..20: mol_type = other DNA
ttaaagtagttcttttttgc

SEQ ID NO: 18654 - DNA, 20 bp, synthetic construct
  misc_feature 1..20: note = Description of Artificial Sequence: Synthetic oligonucleotide
  misc_feature 1..20: note = Target: FXN; (+) strand; PAM type: NRG; PAM sequence: TGG
  source 1..20: mol_type = other DNA
aagtagttcttttttgccag

SEQ ID NO: 18655 - DNA, 20 bp, synthetic construct
  misc_feature 1..20: note = Description of Artificial Sequence: Synthetic oligonucleotide
  misc_feature 1..20: note = Target: FXN; (+) strand; PAM type: NRG; PAM sequence: GGG
  source 1..20: mol_type = other DNA
agtagttcttttttgccagt

SEQ ID NO: 18656 - DNA, 20 bp, synthetic construct
  misc_feature 1..20: note = Description of Artificial Sequence: Synthetic oligonucleotide
  misc_feature 1..20: note = Target: FXN; (+) strand; PAM type: NRG; PAM sequence: GAG
  source 1..20: mol_type = other DNA
tagttcttttttgccagtgg

SEQ ID NO: 18657 - DNA, 20 bp, synthetic construct
  misc_feature 1..20: note = Description of Artificial Sequence: Synthetic oligonucleotide
  misc_feature 1..20: note = Target: FXN; (+) strand; PAM type: NRG; PAM sequence: AAG
  source 1..20: mol_type = other DNA
cagtgggagaaaatccctca

SEQ ID NO: 18658 - DNA, 20 bp, synthetic construct
  misc_feature 1..20: note = Description of Artificial Sequence: Synthetic oligonucleotide
  misc_feature 1..20: note = Target: FXN; (+) strand; PAM type: NRG; PAM sequence: TGG
  source 1..20: mol_type = other DNA
gggagaaaatccctcaaaga

SEQ ID NO: 18659 - DNA, 20 bp, synthetic construct
  misc_feature 1..20: note = Description of Artificial Sequence: Synthetic oligonucleotide
  misc_feature 1..20: note = Target: FXN; (+) strand; PAM type: NRG; PAM sequence: TGG
  source 1..20: mol_type = other DNA
atccctcaaagatggttttc

SEQ ID NO: 18660 - DNA, 20 bp, synthetic construct
  misc_feature 1..20: note = Description of Artificial Sequence: Synthetic oligonucleotide
  misc_feature 1..20: note = Target: FXN; (+) strand; PAM type: NRG; PAM sequence: GGG
  source 1..20: mol_type = other DNA
tccctcaaagatggttttct

SEQ ID NO: 18661 - DNA, 20 bp, synthetic construct
  misc_feature 1..20: note = Description of Artificial Sequence: Synthetic oligonucleotide
  misc_feature 1..20: note = Target: FXN; (+) strand; PAM type: NRG; PAM sequence: TGG
  source 1..20: mol_type = other DNA
tcaaagatggttttctgggt

SEQ ID NO: 18662 - DNA, 20 bp, synthetic construct
  misc_feature 1..20: note = Description of Artificial Sequence: Synthetic oligonucleotide
  misc_feature 1..20: note = Target: FXN; (+) strand; PAM type: NRG; PAM sequence: TGG
  source 1..20: mol_type = other DNA
agatggttttctgggttggt

SEQ ID NO: 18663 - DNA, 20 bp, synthetic construct
  misc_feature 1..20: note = Description of Artificial Sequence: Synthetic oligonucleotide
  misc_feature 1..20: note = Target: FXN; (+) strand; PAM type: NRG; PAM sequence: GAG
  source 1..20: mol_type = other DNA
tgtctgtttgtttgtttttt

SEQ ID NO: 18664 - DNA, 20 bp, synthetic construct
  misc_feature 1..20: note = Description of Artificial Sequence: Synthetic oligonucleotide
  misc_feature 1..20: note = Target: FXN; (+) strand; PAM type: NRG; PAM sequence: CAG
  source 1..20: mol_type = other DNA
tgtttgtttgttttttgaga

SEQ ID NO: 18665 - DNA, 20 bp, synthetic construct
  misc_feature 1..20: note = Description of Artificial Sequence: Synthetic oligonucleotide
  misc_feature 1..20: note = Target: FXN; (+) strand; PAM type: NRG; PAM sequence: GAG
  source 1..20: mol_type = other DNA
tttgtttgttttttgagaca

SEQ ID NO: 18666 - DNA, 20 bp, synthetic construct
  misc_feature 1..20: note = Description of Artificial Sequence: Synthetic oligonucleotide
  misc_feature 1..20: note = Target: FXN; (+) strand; PAM type: NRG; PAM sequence: CAG
  source 1..20: mol_type = other DNA
cagagtctccctctgttatt

SEQ ID NO: 18667 - DNA, 20 bp, synthetic construct
  misc_feature 1..20: note = Description of Artificial Sequence: Synthetic oligonucleotide
  misc_feature 1..20: note = Target: FXN; (+) strand; PAM type: NRG; PAM sequence: TGG
  source 1..20: mol_type = other DNA
tctccctctgttattcagcc

SEQ ID NO: 18668 - DNA, 20 bp, synthetic construct
  misc_feature 1..20: note = Description of Artificial Sequence: Synthetic oligonucleotide
  misc_feature 1..20: note = Target: FXN; (+) strand; PAM type: NRG; PAM sequence: GAG
  source 1..20: mol_type = other DNA
tccctctgttattcagcctg

SEQ ID NO: 18669 - DNA, 20 bp, synthetic construct
  misc_feature 1..20: note = Description of Artificial Sequence: Synthetic oligonucleotide
  misc_feature 1..20: note = Target: FXN; (+) strand; PAM type: NRG; PAM sequence: CAG
  source 1..20: mol_type = other DNA
ctgttattcagcctggagtg

SEQ ID NO: 18670 - DNA, 20 bp, synthetic construct
  misc_feature 1..20: note = Description of Artificial Sequence: Synthetic oligonucleotide
  misc_feature 1..20: note = Target: FXN; (+) strand; PAM type: NRG; PAM sequence: TGG
  source 1..20: mol_type = other DNA
ttattcagcctggagtgcag

SEQ ID NO: 18671 - DNA, 20 bp, synthetic construct
  misc_feature 1..20: note = Description of Artificial Sequence: Synthetic oligonucleotide
  misc_feature 1..20: note = Target: FXN; (+) strand; PAM type: NRG; PAM sequence: CGG
  source 1..20: mol_type = other DNA
tcactgcaacctctgcctct

SEQ ID NO: 18672 - DNA, 20 bp, synthetic construct
  misc_feature 1..20: note = Description of Artificial Sequence: Synthetic oligonucleotide
  misc_feature 1..20: note = Target: FXN; (+) strand; PAM type: NRG; PAM sequence: GGG
  source 1..20: mol_type = other DNA
cactgcaacctctgcctctc

SEQ ID NO: 18673 - DNA, 20 bp, synthetic construct
  misc_feature 1..20: note = Description of Artificial Sequence: Synthetic oligonucleotide
  misc_feature 1..20: note = Target: FXN; (+) strand; PAM type: NRG; PAM sequence: AAG
  source 1..20: mol_type = other DNA
aacctctgcctctcgggttc

SEQ ID NO: 18674 - DNA, 20 bp, synthetic construct
  misc_feature 1..20: note = Description of Artificial Sequence: Synthetic oligonucleotide
  misc_feature 1..20: note = Target: FXN; (+) strand; PAM type: NRG; PAM sequence: CAG
  source 1..20: mol_type = other DNA
ctctgcctctcgggttcaag

SEQ ID NO: 18675 - DNA, 20 bp, synthetic construct
  misc_feature 1..20: note = Description of Artificial Sequence: Synthetic oligonucleotide
  misc_feature 1..20: note = Target: FXN; (+) strand; PAM type: NRG; PAM sequence: AAG
  source 1..20: mol_type = other DNA
ttctcctgcctcaacctccc

SEQ ID NO: 18676 - DNA, 20 bp, synthetic construct
  misc_feature 1..20: note = Description of Artificial Sequence: Synthetic oligonucleotide
  misc_feature 1..20: note = Target: FXN; (+) strand; PAM type: NRG; PAM sequence: TAG
  source 1..20: mol_type = other DNA
tcctgcctcaacctcccaag

SEQ ID NO: 18677 - DNA, 20 bp, synthetic construct
  misc_feature 1..20: note = Description of Artificial Sequence: Synthetic oligonucleotide
  misc_feature 1..20: note = Target: FXN; (+) strand; PAM type: NRG; PAM sequence: TGG
  source 1..20: mol_type = other DNA
gcctcaacctcccaagtagc

SEQ ID NO: 18678 - DNA, 20 bp, synthetic construct
  misc_feature 1..20: note = Description of Artificial Sequence: Synthetic oligonucleotide
  misc_feature 1..20: note = Target: FXN; (+) strand; PAM type: NRG; PAM sequence: TAG
  source 1..20: mol_type = other DNA
ctcccaagtagctggaatta

SEQ ID NO: 18679 - DNA, 20 bp, synthetic construct
  misc_feature 1..20: note = Description of Artificial Sequence: Synthetic oligonucleotide
  misc_feature 1..20: note = Target: FXN; (+) strand; PAM type: NRG; PAM sequence: AGG
  source 1..20: mol_type = other DNA
tcccaagtagctggaattat

SEQ ID NO: 18680 - DNA, 20 bp, synthetic construct
  misc_feature 1..20: note = Description of Artificial Sequence: Synthetic oligonucleotide
  misc_feature 1..20: note = Target: FXN; (+) strand; PAM type: NRG; PAM sequence: CAG
  source 1..20: mol_type = other DNA
taggcacacgcccccacacc

SEQ ID NO: 18681 - DNA, 20 bp, synthetic construct
  misc_feature 1..20: note = Description of Artificial Sequence: Synthetic oligonucleotide
  misc_feature 1..20: note = Target: FXN; (+) strand; PAM type: NRG; PAM sequence: TAG
  source 1..20: mol_type = other DNA
ccagctaatttttgtatttt

SEQ ID NO: 18682 - DNA, 20 bp, synthetic construct
  misc_feature 1..20: note = Description of Artificial Sequence: Synthetic oligonucleotide
  misc_feature 1..20: note = Target: FXN; (+) strand; PAM type: NRG; PAM sequence: TAG
  source 1..20: mol_type = other DNA
gctaatttttgtatttttag

SEQ ID NO: 18683 - DNA, 20 bp, synthetic construct
  misc_feature 1..20: note = Description of Artificial Sequence: Synthetic oligonucleotide
  misc_feature 1..20: note = Target: FXN; (+) strand; PAM type: NRG; PAM sequence: GAG
  source 1..20: mol_type = other DNA
taatttttgtatttttagta

SEQ ID NO: 18684 - DNA, 20 bp, synthetic construct
  misc_feature 1..20: note = Description of Artificial Sequence: Synthetic oligonucleotide
  misc_feature 1..20: note = Target: FXN; (+) strand; PAM type: NRG; PAM sequence: CAG
  source 1..20: mol_type = other DNA
ttttgtatttttagtagaga

SEQ ID NO: 18685 - DNA, 20 bp, synthetic construct
  misc_feature 1..20: note = Description of Artificial Sequence: Synthetic oligonucleotide
  misc_feature 1..20: note = Target: FXN; (+) strand; PAM type: NRG; PAM sequence: TGG
  source 1..20: mol_type = other DNA
gagacagtgtttcaccacgt

SEQ ID NO: 18686 - DNA, 20 bp, synthetic construct
  misc_feature 1..20: note = Description of Artificial Sequence: Synthetic oligonucleotide
  misc_feature 1..20: note = Target: FXN; (+) strand; PAM type: NRG; PAM sequence: CAG
  source 1..20: mol_type = other DNA
cagtgtttcaccacgttggc

SEQ ID NO: 18687 - DNA, 20 bp, synthetic construct
  misc_feature 1..20: note = Description of Artificial Sequence: Synthetic oligonucleotide
  misc_feature 1..20: note = Target: FXN; (+) strand; PAM type: NRG; PAM sequence: AGG
  source 1..20: mol_type = other DNA
agtgtttcaccacgttggcc

SEQ ID NO: 18688 - DNA, 20 bp, synthetic construct
  misc_feature 1..20: note = Description of Artificial Sequence: Synthetic oligonucleotide
  misc_feature 1..20: note = Target: FXN; (+) strand; PAM type: NRG; PAM sequence: TGG
  source 1..20: mol_type = other DNA
tttcaccacgttggccaggc

SEQ ID NO: 18689 - DNA, 20 bp, synthetic construct
  misc_feature 1..20: note = Description of Artificial Sequence: Synthetic oligonucleotide
  misc_feature 1..20: note = Target: FXN; (+) strand; PAM type: NRG; PAM sequence: AAG
  source 1..20: mol_type = other DNA
ggttttgaactcctgaactc

SEQ ID NO: 18690 - DNA, 20 bp, synthetic construct
  misc_feature 1..20: note = Description of Artificial Sequence: Synthetic oligonucleotide
  misc_feature 1..20: note = Target: FXN; (+) strand; PAM type: NRG; PAM sequence: CAG
  source 1..20: mol_type = other DNA
ctcaagtaatcctcccacct

SEQ ID NO: 18691 - DNA, 20 bp, synthetic construct
  misc_feature 1..20: note = Description of Artificial Sequence: Synthetic oligonucleotide
  misc_feature 1..20: note = Target: FXN; (+) strand; PAM type: NRG; PAM sequence: AAG
  source 1..20: mol_type = other DNA
cctcccacctcagcctccca

SEQ ID NO: 18692 - DNA, 20 bp, synthetic construct
  misc_feature 1..20: note = Description of Artificial Sequence: Synthetic oligonucleotide
  misc_feature 1..20: note = Target: FXN; (+) strand; PAM type: NRG; PAM sequence: TAG
  source 1..20: mol_type = other DNA
acctcagcctcccaaagtgc

SEQ ID NO: 18693 - DNA, 20 bp, synthetic construct
  misc_feature 1..20: note = Description of Artificial Sequence: Synthetic oligonucleotide
  misc_feature 1..20: note = Target: FXN; (+) strand; PAM type: NRG; PAM sequence: AGG
  source 1..20: mol_type = other DNA
cctcagcctcccaaagtgct

SEQ ID NO: 18694 - DNA, 20 bp, synthetic construct
  misc_feature 1..20: note = Description of Artificial Sequence: Synthetic oligonucleotide
  misc_feature 1..20: note = Target: FXN; (+) strand; PAM type: NRG; PAM sequence: CAG
  source 1..20: mol_type = other DNA
ctcccaaagtgctaggatta

SEQ ID NO: 18695 - DNA, 20 bp, synthetic construct
  misc_feature 1..20: note = Description of Artificial Sequence: Synthetic oligonucleotide
  misc_feature 1..20: note = Target: FXN; (+) strand; PAM type: NRG; PAM sequence: AGG
  source 1..20: mol_type = other DNA
tcccaaagtgctaggattac

SEQ ID NO: 18696 - DNA, 20 bp, synthetic construct
  misc_feature 1..20: note = Description of Artificial Sequence: Synthetic oligonucleotide
  misc_feature 1..20: note = Target: FXN; (+) strand; PAM type: NRG; PAM sequence: GAG
  source 1..20: mol_type = other DNA
agtgctaggattacaggtgt

SEQ ID NO: 18697 - DNA, 20 bp, synthetic construct
  misc_feature 1..20: note = Description of Artificial Sequence: Synthetic oligonucleotide
  misc_feature 1..20: note = Target: FXN; (+) strand; PAM type: NRG; PAM sequence: TGG
  source 1..20: mol_type = other DNA
caggtgtgagccaccgcgcc

SEQ ID NO: 18698 - DNA, 20 bp, synthetic construct
  misc_feature 1..20: note = Description of Artificial Sequence: Synthetic oligonucleotide
  misc_feature 1..20: note = Target: FXN; (+) strand; PAM type: NRG; PAM sequence: AAG
  source 1..20: mol_type = other DNA
ccaccgcgcctggctcctca

SEQ ID NO: 18699 - DNA, 20 bp, synthetic construct
  misc_feature 1..20: note = Description of Artificial Sequence: Synthetic oligonucleotide
  misc_feature 1..20: note = Target: FXN; (+) strand; PAM type: NRG; PAM sequence: TGG
  source 1..20: mol_type = other DNA
aaagatgttaatcctcttga

SEQ ID NO: 18700 - DNA, 20 bp, synthetic construct
  misc_feature 1..20: note = Description of Artificial Sequence: Synthetic oligonucleotide
  misc_feature 1..20: note = Target: FXN; (+) strand; PAM type: NRG; PAM sequence: CAG
  source 1..20: mol_type = other DNA
tgatggcaattgactaatac

SEQ ID NO: 18701 - DNA, 20 bp, synthetic construct
  misc_feature 1..20: note = Description of Artificial Sequence: Synthetic oligonucleotide
  misc_feature 1..20: note = Target: FXN; (+) strand; PAM type: NRG; PAM sequence: AAG
  source 1..20: mol_type = other DNA
taataccagaaaatgtcacg

SEQ ID NO: 18702 - DNA, 20 bp, synthetic construct
  misc_feature 1..20: note = Description of Artificial Sequence: Synthetic oligonucleotide
  misc_feature 1..20: note = Target: FXN; (+) strand; PAM type: NRG; PAM sequence: TGG
  source 1..20: mol_type = other DNA
atgtcacgaagcgtgcattt

SEQ ID NO: 18703 - DNA, 20 bp, synthetic construct
  misc_feature 1..20: note = Description of Artificial Sequence: Synthetic oligonucleotide
  misc_feature 1..20: note = Target: FXN; (+) strand; PAM type: NRG; PAM sequence: TGG
  source 1..20: mol_type = other DNA
gtgcattttggattcaatca

SEQ ID NO: 18704 - DNA, 20 bp, synthetic construct
  misc_feature 1..20: note = Description of Artificial Sequence: Synthetic oligonucleotide
  misc_feature 1..20: note = Target: FXN; (+) strand; PAM type: NRG; PAM sequence: GAG
  source 1..20: mol_type = other DNA
gattcaatcatggaattgtt

SEQ ID NO: 18705 - DNA, 20 bp, synthetic construct
  misc_feature 1..20: note = Description of Artificial Sequence: Synthetic oligonucleotide
  misc_feature 1..20: note = Target: FXN; (+) strand; PAM type: NRG; PAM sequence: AGG
  source 1..20: mol_type = other DNA
attcaatcatggaattgttg

SEQ ID NO: 18706 - DNA, 20 bp, synthetic construct
  misc_feature 1..20: note = Description of Artificial Sequence: Synthetic oligonucleotide
  misc_feature 1..20: note = Target: FXN; (+) strand; PAM type: NRG; PAM sequence: CAG
  source 1..20: mol_type = other DNA
atggaattgttgaggacaat

SEQ ID NO: 18707 - DNA, 20 bp, synthetic construct
  misc_feature 1..20: note = Description of Artificial Sequence: Synthetic oligonucleotide
  misc_feature 1..20: note = Target: FXN; (+) strand; PAM type: NRG; PAM sequence: CAG
  source 1..20: mol_type = other DNA
tgttgaggacaatcagccat

SEQ ID NO: 18708 - DNA, 20 bp, synthetic construct
  misc_feature 1..20: note = Description of Artificial Sequence: Synthetic oligonucleotide
  misc_feature 1..20: note = Target: FXN; (+) strand; PAM type: NRG; PAM sequence: AAG
  source 1..20: mol_type = other DNA
gacaatcagccatcagacta

SEQ ID NO: 18709 - DNA, 20 bp, synthetic construct
  misc_feature 1..20: note = Description of Artificial Sequence: Synthetic oligonucleotide
  misc_feature 1..20: note = Target: FXN; (+) strand; PAM type: NRG; PAM sequence: TAG
  source 1..20: mol_type = other DNA
cagccatcagactaaagcga

SEQ ID NO: 18710 - DNA, 20 bp, synthetic construct
  misc_feature 1..20: note = Description of Artificial Sequence: Synthetic oligonucleotide
  misc_feature 1..20: note = Target: FXN; (+) strand; PAM type: NRG; PAM sequence: TAG
  source 1..20: mol_type = other DNA
tcagactaaagcgatagaaa

SEQ ID NO: 18711 - DNA, 20 bp, synthetic construct
  misc_feature 1..20: note = Description of Artificial Sequence: Synthetic oligonucleotide
  misc_feature 1..20: note = Target: FXN; (+) strand; PAM type: NRG; PAM sequence: TGG
  source 1..20: mol_type = other DNA
taaagcgatagaaatagtat

SEQ ID NO: 18712 - DNA, 20 bp, synthetic construct
  misc_feature 1..20: note = Description of Artificial Sequence: Synthetic oligonucleotide
  misc_feature 1..20: note = Target: FXN; (+) strand; PAM type: NRG; PAM sequence: CAG
  source 1..20: mol_type = other DNA
agaaatagtattggaaattg

SEQ ID NO: 18713 - DNA, 20 bp, synthetic construct
  misc_feature 1..20: note = Description of Artificial Sequence: Synthetic oligonucleotide
  misc_feature 1..20: note = Target: FXN; (+) strand; PAM type: NRG; PAM sequence: CGG
  source 1..20: mol_type = other DNA
aatagtattggaaattgcag

SEQ ID NO: 18714 - DNA, 20 bp, synthetic construct
  misc_feature 1..20: note = Description of Artificial Sequence: Synthetic oligonucleotide
  misc_feature 1..20: note = Target: FXN; (+) strand; PAM type: NRG; PAM sequence: GGG
  source 1..20: mol_type = other DNA
atagtattggaaattgcagc

SEQ ID NO: 18715 - DNA, 20 bp, synthetic construct
  misc_feature 1..20: note = Description of Artificial Sequence: Synthetic oligonucleotide
  misc_feature 1..20: note = Target: FXN; (+) strand; PAM type: NRG; PAM sequence: GAG
  source 1..20: mol_type = other DNA
agtattggaaattgcagcgg

SEQ ID NO: 18716 - DNA, 20 bp, synthetic construct
  misc_feature 1..20: note = Description of Artificial Sequence: Synthetic oligonucleotide
  misc_feature 1..20: note = Target: FXN; (+) strand; PAM type: NRG; PAM sequence: TGG
  source 1..20: mol_type = other DNA
attgcagcgggagcactgaa

SEQ ID NO: 18717 - DNA, 20 bp, synthetic construct
  misc_feature 1..20: note = Description of Artificial Sequence: Synthetic oligonucleotide
  misc_feature 1..20: note = Target: FXN; (+) strand; PAM type: NRG; PAM sequence: GAG
  source 1..20: mol_type = other DNA
tgcagcgggagcactgaatg

SEQ ID NO: 18718 - DNA, 20 bp, synthetic construct
  misc_feature 1..20: note = Description of Artificial Sequence: Synthetic oligonucleotide
  misc_feature 1..20: note = Target: FXN; (+) strand; PAM type: NRG; PAM sequence: AAG
  source 1..20: mol_type = other DNA
agcgggagcactgaatggag

SEQ ID NO: 18719 - DNA, 20 bp, synthetic construct
  misc_feature 1..20: note = Description of Artificial Sequence: Synthetic oligonucleotide
  misc_feature 1..20: note = Target: FXN; (+) strand; PAM type: NRG; PAM sequence: AGG
  source 1..20: mol_type = other DNA
gcgggagcactgaatggaga

SEQ ID NO: 18720 - DNA, 20 bp, synthetic construct
  misc_feature 1..20: note = Description of Artificial Sequence: Synthetic oligonucleotide
  misc_feature 1..20: note = Target: FXN; (+) strand; PAM type: NRG; PAM sequence: TGG
  source 1..20: mol_type = other DNA
ggagaaggcactccacataa

SEQ ID NO: 18721 - DNA, 20 bp, synthetic construct
  misc_feature 1..20: note = Description of Artificial Sequence: Synthetic oligonucleotide
  misc_feature 1..20: note = Target: FXN; (+) strand; PAM type: NRG; PAM sequence: GAG
  source 1..20: mol_type = other DNA
agaaggcactccacataatg

SEQ ID NO: 18722 - DNA, 20 bp, synthetic construct
  misc_feature 1..20: note = Description of Artificial Sequence: Synthetic oligonucleotide
  misc_feature 1..20: note = Target: FXN; (+) strand; PAM type: NRG; PAM sequence: AGG
  source 1..20: mol_type = other DNA
gaaggcactccacataatgg

SEQ ID NO: 18723 - DNA, 20 bp, synthetic construct
  misc_feature 1..20: note = Description of Artificial Sequence: Synthetic oligonucleotide
  misc_feature 1..20: note = Target: FXN; (+) strand; PAM type: NRG; PAM sequence: GAG
  source 1..20: mol_type = other DNA
aggcactccacataatggag

SEQ ID NO: 18724 - DNA, 20 bp, synthetic construct
  misc_feature 1..20: note = Description of Artificial Sequence: Synthetic oligonucleotide
  misc_feature 1..20: note = Target: FXN; (+) strand; PAM type: NRG; PAM sequence: AGG
  source 1..20: mol_type = other DNA
ggcactccacataatggagg

SEQ ID NO: 18725 - DNA, 20 bp, synthetic construct
  misc_feature 1..20: note = Description of Artificial Sequence: Synthetic oligonucleotide
  misc_feature 1..20: note = Target: FXN; (+) strand; PAM type: NRG; PAM sequence: AAG
  source 1..20: mol_type = other DNA
acataatggaggaggcaacc

SEQ ID NO: 18726 - DNA, 20 bp, synthetic construct
  misc_feature 1..20: note = Description of Artificial Sequence: Synthetic oligonucleotide
  misc_feature 1..20: note = Target: FXN; (+) strand; PAM type: NRG; PAM sequence: TAG
  source 1..20: mol_type = other DNA
tggaggaggcaaccaagtct

SEQ ID NO: 18727 - DNA, 20 bp, synthetic construct
  misc_feature 1..20: note = Description of Artificial Sequence: Synthetic oligonucleotide
  misc_feature 1..20: note = Target: FXN; (+) strand; PAM type: NRG; PAM sequence: GAG
  source 1..20: mol_type = other DNA
gaggaggcaaccaagtctta

SEQ ID NO: 18728 - DNA, 20 bp, synthetic construct
  misc_feature 1..20: note = Description of Artificial Sequence: Synthetic oligonucleotide
  misc_feature 1..20: note = Target: FXN; (+) strand; PAM type: NRG; PAM sequence: AAG
  source 1..20: mol_type = other DNA
gaggcaaccaagtcttagag

SEQ ID NO: 18729 - DNA, 20 bp, synthetic construct
  misc_feature 1..20: note = Description of Artificial Sequence: Synthetic oligonucleotide
  misc_feature 1..20: note = Target: FXN; (+) strand; PAM type: NRG; PAM sequence: AGG
  source 1..20: mol_type = other DNA
aggcaaccaagtcttagaga

SEQ ID NO: 18730 - DNA, 20 bp, synthetic construct
  misc_feature 1..20: note = Description of Artificial Sequence: Synthetic oligonucleotide
  misc_feature 1..20: note = Target: FXN; (+) strand; PAM type: NRG; PAM sequence: AAG
  source 1..20: mol_type = other DNA
caagtcttagagaaggtatc

SEQ ID NO: 18731 - DNA, 20 bp, synthetic construct
  misc_feature 1..20: note = Description of Artificial Sequence: Synthetic oligonucleotide
  misc_feature 1..20: note = Target: FXN; (+) strand; PAM type: NRG; PAM sequence: AAG
  source 1..20: mol_type = other DNA
aaggtatcaagcctgactat

SEQ ID NO: 18732 - DNA, 20 bp, synthetic construct
  misc_feature 1..20: note = Description of Artificial Sequence: Synthetic oligonucleotide
  misc_feature 1..20: note = Target: FXN; (+) strand; PAM type: NRG; PAM sequence: AGG
  source 1..20: mol_type = other DNA
aggtatcaagcctgactata

SEQ ID NO: 18733 - DNA, 20 bp, synthetic construct
  misc_feature 1..20: note = Description of Artificial Sequence: Synthetic oligonucleotide
  misc_feature 1..20: note = Target: FXN; (+) strand; PAM type: NRG; PAM sequence: CAG
  source 1..20: mol_type = other DNA
atcaagcctgactataagga

SEQ ID NO: 18734 - DNA, 20 bp, synthetic construct
  misc_feature 1..20: note = Description of Artificial Sequence: Synthetic oligonucleotide
  misc_feature 1..20: note = Target: FXN; (+) strand; PAM type: NRG; PAM sequence: GAG
  source 1..20: mol_type = other DNA
agcctgactataaggacagt

SEQ ID NO: 18735 - DNA, 20 bp, synthetic construct
  misc_feature 1..20: note = Description of Artificial Sequence: Synthetic oligonucleotide
  misc_feature 1..20: note = Target: FXN; (+) strand; PAM type: NRG; PAM sequence: AGG
  source 1..20: mol_type = other DNA
gcctgactataaggacagtg

SEQ ID NO: 18736 - DNA, 20 bp, synthetic construct
  misc_feature 1..20: note = Description of Artificial Sequence: Synthetic oligonucleotide
  misc_feature 1..20: note = Target: FXN; (+) strand; PAM type: NRG; PAM sequence: GGG
  source 1..20: mol_type = other DNA
cctgactataaggacagtga

SEQ ID NO: 18737 - DNA, 20 bp, synthetic construct
  misc_feature 1..20: note = Description of Artificial Sequence: Synthetic oligonucleotide
  misc_feature 1..20: note = Target: FXN; (+) strand; PAM type: NRG; PAM sequence: AAG
  source 1..20: mol_type = other DNA
agggaattgaaaaaacaaaa

SEQ ID NO: 18738 - DNA, 20 bp, synthetic construct
  misc_feature 1..20: note = Description of Artificial Sequence: Synthetic oligonucleotide
  misc_feature 1..20: note = Target: FXN; (+) strand; PAM type: NRG; PAM sequence: AGG
  source 1..20: mol_type = other DNA
gggaattgaaaaaacaaaaa

SEQ ID NO: 18739 - DNA, 20 bp, synthetic construct
  misc_feature 1..20: note = Description of Artificial Sequence: Synthetic oligonucleotide
  misc_feature 1..20: note = Target: FXN; (+) strand; PAM type: NRG; PAM sequence: GAG
  source 1..20: mol_type = other DNA
gaattgaaaaaacaaaaaag

SEQ ID NO: 18740 - DNA, 20 bp, synthetic construct
  misc_feature 1..20: note = Description of Artificial Sequence: Synthetic oligonucleotide
  misc_feature 1..20: note = Target: FXN; (+) strand; PAM type: NRG; PAM sequence: TGG
  source 1..20: mol_type = other DNA
aaaaaacaaaaaaggagcaa

SEQ ID NO: 18741 - DNA, 20 bp, synthetic construct
  misc_feature 1..20: note = Description of Artificial Sequence: Synthetic oligonucleotide
  misc_feature 1..20: note = Target: FXN; (+) strand; PAM type: NRG; PAM sequence: GAG
  source 1..20: mol_type = other DNA
aaaacaaaaaaggagcaatg

SEQ ID NO: 18742 - DNA, 20 bp, synthetic construct
  misc_feature 1..20: note = Description of Artificial Sequence: Synthetic oligonucleotide
  misc_feature 1..20: note = Target: FXN; (+) strand; PAM type: NRG; PAM sequence: CAG
  source 1..20: mol_type = other DNA
acaaaaaaggagcaatggag

SEQ ID NO: 18743 - DNA, 20 bp, synthetic construct
  misc_feature 1..20: note = Description of Artificial Sequence: Synthetic oligonucleotide
  misc_feature 1..20: note = Target: FXN; (+) strand; PAM type: NRG; PAM sequence: AGG
  source 1..20: mol_type = other DNA
caaaaaaggagcaatggagc

SEQ ID NO: 18744 - DNA, 20 bp, synthetic construct
  misc_feature 1..20: note = Description of Artificial Sequence: Synthetic oligonucleotide
  misc_feature 1..20: note = Target: FXN; (+) strand; PAM type: NRG; PAM sequence: GGG
  source 1..20: mol_type = other DNA
aaaaaaggagcaatggagca

SEQ ID NO: 18745 - DNA, 20 bp, synthetic construct
  misc_feature 1..20: note = Description of Artificial Sequence: Synthetic oligonucleotide
  misc_feature 1..20: note = Target: FXN; (+) strand; PAM type: NRG; PAM sequence: AAG
  source 1..20: mol_type = other DNA
aaaggagcaatggagcaggg

SEQ ID NO: 18746 - DNA, 20 bp, synthetic construct
  misc_feature 1..20: note = Description of Artificial Sequence: Synthetic oligonucleotide
  misc_feature 1..20: note = Target: FXN; (+) strand; PAM type: NRG; PAM sequence: AGG
  source 1..20: mol_type = other DNA
aaggagcaatggagcaggga

SEQ ID NO: 18747 - DNA, 20 bp, synthetic construct
  misc_feature 1..20: note = Description of Artificial Sequence: Synthetic oligonucleotide
  misc_feature 1..20: note = Target: FXN; (+) strand; PAM type: NRG; PAM sequence: AAG
  source 1..20: mol_type = other DNA
ggaaggattgaatgcctttc

SEQ ID NO: 18748 - DNA, 20 bp, synthetic construct
  misc_feature 1..20: note = Description of Artificial Sequence: Synthetic oligonucleotide
  misc_feature 1..20: note = Target: FXN; (+) strand; PAM type: NRG; PAM sequence: TAG
  source 1..20: mol_type = other DNA
aggattgaatgcctttcaag

SEQ ID NO: 18749 - DNA, 20 bp, synthetic construct
  misc_feature 1..20: note = Description of Artificial Sequence: Synthetic oligonucleotide
  misc_feature 1..20: note = Target: FXN; (+) strand; PAM type: NRG; PAM sequence: CAG
  source 1..20: mol_type = other DNA
gaatgcctttcaagtagatt

SEQ ID NO: 18750 - DNA, 20 bp, synthetic construct
  misc_feature 1..20: note = Description of Artificial Sequence: Synthetic oligonucleotide
  misc_feature 1..20: note = Target: FXN; (+) strand; PAM type: NRG; PAM sequence: TAG
  source 1..20: mol_type = other DNA
gtagattcagtaattgctgt

SEQ ID NO: 18751 - DNA, 20 bp, synthetic construct
  misc_feature 1..20: note = Description of Artificial Sequence: Synthetic oligonucleotide
  misc_feature 1..20: note = Target: FXN; (+) strand; PAM type: NRG; PAM sequence: CAG
  source 1..20: mol_type = other DNA
gattcagtaattgctgttag

SEQ ID NO: 18752 - DNA, 20 bp, synthetic construct
  misc_feature 1..20: note = Description of Artificial Sequence: Synthetic oligonucleotide
  misc_feature 1..20: note = Target: FXN; (+) strand; PAM type: NRG; PAM sequence: CAG
  source 1..20: mol_type = other DNA
gctgttagcagcaaaaaatg

SEQ ID NO: 18753 - DNA, 20 bp, synthetic construct
  misc_feature 1..20: note = Description of Artificial Sequence: Synthetic oligonucleotide
  misc_feature 1..20: note = Target: FXN; (+) strand; PAM type: NRG; PAM sequence: TAG
  source 1..20: mol_type = other DNA
gttagcagcaaaaaatgcag

SEQ ID NO: 18754 - DNA, 20 bp, synthetic construct
  misc_feature 1..20: note = Description of Artificial Sequence: Synthetic oligonucleotide
  misc_feature 1..20: note = Target: FXN; (+) strand; PAM type: NRG; PAM sequence: TGG
  source 1..20: mol_type = other DNA
gcaaaaaatgcagtagtgcc

SEQ ID NO: 18755 - DNA, 20 bp, synthetic construct
  misc_feature 1..20: note = Description of Artificial Sequence: Synthetic oligonucleotide
  misc_feature 1..20: note = Target: FXN; (+) strand; PAM type: NRG; PAM sequence: GGG
  source 1..20: mol_type = other DNA
caaaaaatgcagtagtgcct

SEQ ID NO: 18756 - DNA, 20 bp, synthetic construct
  misc_feature 1..20: note = Description of Artificial Sequence: Synthetic oligonucleotide
  misc_feature 1..20: note = Target: FXN; (+) strand; PAM type: NRG; PAM sequence: CAG
  source 1..20: mol_type = other DNA
aaaatgcagtagtgcctggg

SEQ ID NO: 18757 - DNA, 20 bp, synthetic construct
  misc_feature 1..20: note = Description of Artificial Sequence: Synthetic oligonucleotide
  misc_feature 1..20: note = Target: FXN; (+) strand; PAM type: NRG; PAM sequence: AGG
  source 1..20: mol_type = other DNA
aaatgcagtagtgcctgggc

SEQ ID NO: 18758 - DNA, 20 bp, synthetic construct
  misc_feature 1..20: note = Description of Artificial Sequence: Synthetic oligonucleotide
  misc_feature 1..20: note = Target: FXN; (+) strand; PAM type: NRG; PAM sequence: GGG
  source 1..20: mol_type = other DNA
aatgcagtagtgcctgggca

SEQ ID NO: 18759 - DNA, 20 bp, synthetic construct
  misc_feature 1..20: note = Description of Artificial Sequence: Synthetic oligonucleotide
  misc_feature 1..20: note = Target: FXN; (+) strand; PAM type: NRG; PAM sequence: AAG
  source 1..20: mol_type = other DNA
agtgcctgggcagggcttta

SEQ ID NO: 18760 - DNA, 20 bp, synthetic construct
  misc_feature 1..20: note = Description of Artificial Sequence: Synthetic oligonucleotide
  misc_feature 1..20: note = Target: FXN; (+) strand; PAM type: NRG; PAM sequence: CAG
  source 1..20: mol_type = other DNA
agggctttaaagtgcttgca

SEQ ID NO: 18761 - DNA, 20 bp, synthetic construct
  misc_feature 1..20: note = Description of Artificial Sequence: Synthetic oligonucleotide
  misc_feature 1..20: note = Target: FXN; (+) strand; PAM type: NRG; PAM sequence: AGG
  source 1..20: mol_type = other DNA
gggctttaaagtgcttgcac

SEQ ID NO: 18762 - DNA, 20 bp, synthetic construct
  misc_feature 1..20: note = Description of Artificial Sequence: Synthetic oligonucleotide
  misc_feature 1..20: note = Target: FXN; (+) strand; PAM type: NRG; PAM sequence: CAG
  source 1..20: mol_type = other DNA
ctttaaagtgcttgcacagg

SEQ ID NO: 18763 - DNA, 20 bp, synthetic construct
  misc_feature 1..20: note = Description of Artificial Sequence: Synthetic oligonucleotide
  misc_feature 1..20: note = Target: FXN; (+) strand; PAM type: NRG; PAM sequence: TAG
  source 1..20: mol_type = other DNA
agtgcttgcacaggcagccc

SEQ ID NO: 18764 - DNA, 20 bp, synthetic construct
  misc_feature 1..20: note = Description of Artificial Sequence: Synthetic oligonucleotide
  misc_feature 1..20: note = Target: FXN; (+) strand; PAM type: NRG; PAM sequence: GAG
  source 1..20: mol_type = other DNA
tgcttgcacaggcagcccta

SEQ ID NO: 18765 - DNA, 20 bp, synthetic construct
  misc_feature 1..20: note = Description of Artificial Sequence: Synthetic oligonucleotide
  misc_feature 1..20: note = Target: FXN; (+) strand; PAM type: NRG; PAM sequence: AGG
  source 1..20: mol_type = other DNA
gcttgcacaggcagccctag

SEQ ID NO: 18766 - DNA, 20 bp, synthetic construct
  misc_feature 1..20: note = Description of Artificial Sequence: Synthetic oligonucleotide
  misc_feature 1..20: note = Target: FXN; (+) strand; PAM type: NRG; PAM sequence: GGG
  source 1..20: mol_type = other DNA
cttgcacaggcagccctaga

SEQ ID NO: 18767 - DNA, 20 bp, synthetic construct
  misc_feature 1..20: note = Description of Artificial Sequence: Synthetic oligonucleotide
  misc_feature 1..20: note = Target: FXN; (+) strand; PAM type: NRG; PAM sequence: CGG
  source 1..20: mol_type = other DNA
cacaggcagccctagagggc

SEQ ID NO: 18768 - DNA, 20 bp, synthetic construct
  misc_feature 1..20: note = Description of Artificial Sequence: Synthetic oligonucleotide
  misc_feature 1..20: note = Target: FXN; (+) strand; PAM type: NRG; PAM sequence: GGG
  source 1..20: mol_type = other DNA
acaggcagccctagagggcc

SEQ ID NO: 18769 - DNA, 20 bp, synthetic construct
  misc_feature 1..20: note = Description of Artificial Sequence: Synthetic oligonucleotide
  misc_feature 1..20: note = Target: FXN; (+) strand; PAM type: NRG; PAM sequence: TGG
  source 1..20: mol_type = other DNA
ccctagagggccgggctgct

SEQ ID NO: 18770 - DNA, 20 bp, synthetic construct
  misc_feature 1..20: note = Description of Artificial Sequence: Synthetic oligonucleotide
  misc_feature 1..20: note = Target: FXN; (+) strand; PAM type: NRG; PAM sequence: GGG
  source 1..20: mol_type = other DNA
cctagagggccgggctgctt

SEQ ID NO: 18771 - DNA, 20 bp, synthetic construct
  misc_feature 1..20: note = Description of Artificial Sequence: Synthetic oligonucleotide
  misc_feature 1..20: note = Target: FXN; (+) strand; PAM type: NRG; PAM sequence: GAG
  source 1..20: mol_type = other DNA
acaaactgacctaccaactt

SEQ ID NO: 18772 - DNA, 20 bp, synthetic construct
  misc_feature 1..20: note = Description of Artificial Sequence: Synthetic oligonucleotide
  misc_feature 1..20: note = Target: FXN; (+) strand; PAM type: NRG; PAM sequence: CAG
  source 1..20: mol_type = other DNA
cctaccaacttgagcatcca

SEQ ID NO: 18773 - DNA, 20 bp, synthetic construct
  misc_feature 1..20: note = Description of Artificial Sequence: Synthetic oligonucleotide
  misc_feature 1..20: note = Target: FXN; (+) strand; PAM type: NRG; PAM sequence: CAG
  source 1..20: mol_type = other DNA
ttgagcatccacagcctgat

SEQ ID NO: 18774 - DNA, 20 bp, synthetic construct
  misc_feature 1..20: note = Description of Artificial Sequence: Synthetic oligonucleotide
  misc_feature 1..20: note = Target: FXN; (+) strand; PAM type: NRG; PAM sequence: GAG
  source 1..20: mol_type = other DNA
gagcatccacagcctgatca

SEQ ID NO: 18775 - DNA, 20 bp, synthetic construct
  misc_feature 1..20: note = Description of Artificial Sequence: Synthetic oligonucleotide
  misc_feature 1..20: note = Target: FXN; (+) strand; PAM type: NRG; PAM sequence: AGG
  source 1..20: mol_type = other DNA
agcatccacagcctgatcag

SEQ ID NO: 18776 - DNA, 20 bp, synthetic construct
  misc_feature 1..20: note = Description of Artificial Sequence: Synthetic oligonucleotide
  misc_feature 1..20: note = Target: FXN; (+) strand; PAM type: NRG; PAM sequence: TGG
  source 1..20: mol_type = other DNA
atccacagcctgatcagagg

SEQ ID NO: 18777 - DNA, 20 bp, synthetic construct
  misc_feature 1..20: note = Description of Artificial Sequence: Synthetic oligonucleotide
  misc_feature 1..20: note = Target: FXN; (+) strand; PAM type: NRG; PAM sequence: GGG
  source 1..20: mol_type = other DNA
tccacagcctgatcagaggt

SEQ ID NO: 18778 - DNA, 20 bp, synthetic construct
  misc_feature 1..20: note = Description of Artificial Sequence: Synthetic oligonucleotide
  misc_feature 1..20: note = Target: FXN; (+) strand; PAM type: NRG; PAM sequence: GGG
  source 1..20: mol_type = other DNA
ccacagcctgatcagaggtg

SEQ ID NO: 18779 - DNA, 20 bp, synthetic construct
  misc_feature 1..20: note = Description of Artificial Sequence: Synthetic oligonucleotide
  misc_feature 1..20: note = Target: FXN; (+) strand; PAM type: NRG; PAM sequence: GGG
  source 1..20: mol_type = other DNA
cacagcctgatcagaggtgg

SEQ ID NO: 18780 - DNA, 20 bp, synthetic construct
  misc_feature 1..20: note = Description of Artificial Sequence: Synthetic oligonucleotide
  misc_feature 1..20: note = Target: FXN; (+) strand; PAM type: NRG; PAM sequence: GAG
  source 1..20: mol_type = other DNA
cagcctgatcagaggtgggg

SEQ ID NO: 18781 - DNA, 20 bp, synthetic construct
  misc_feature 1..20: note = Description of Artificial Sequence: Synthetic oligonucleotide
  misc_feature 1..20: note = Target: FXN; (+) strand; PAM type: NRG; PAM sequence: AAG
  source 1..20: mol_type = other DNA
tgatcagaggtgggggagtt

SEQ ID NO: 18782 - DNA, 20 bp, synthetic construct
  misc_feature 1..20: note = Description of Artificial Sequence: Synthetic oligonucleotide
  misc_feature 1..20: note = Target: FXN; (+) strand; PAM type: NRG; PAM sequence: AGG
  source 1..20: mol_type = other DNA
gatcagaggtgggggagtta

SEQ ID NO: 18783 - DNA, 20 bp, synthetic construct
  misc_feature 1..20: note = Description of Artificial Sequence: Synthetic oligonucleotide
  misc_feature 1..20: note = Target: FXN; (+) strand; PAM type: NRG; PAM sequence: GGG
  source 1..20: mol_type = other DNA
atcagaggtgggggagttaa

SEQ ID NO: 18784 - DNA, 20 bp, synthetic construct
  misc_feature 1..20: note = Description of Artificial Sequence: Synthetic oligonucleotide
  misc_feature 1..20: note = Target: FXN; (+) strand; PAM type: NRG; PAM sequence: TAG
  source 1..20: mol_type = other DNA
gttaagggccttctctcccc

SEQ ID NO: 18785 - DNA, 20 bp, synthetic construct
  misc_feature 1..20: note = Description of Artificial Sequence: Synthetic oligonucleotide
  misc_feature 1..20: note = Target: FXN; (+) strand; PAM type: NRG; PAM sequence: TAG
  source 1..20: mol_type = other DNA
ttctctcccctagcctctac

SEQ ID NO: 18786 - DNA, 20 bp, synthetic construct
  misc_feature 1..20: note = Description of Artificial Sequence: Synthetic oligonucleotide
  misc_feature 1..20: note = Target: FXN; (+) strand; PAM type: NRG; PAM sequence: GAG
  source 1..20: mol_type = other DNA
ctctcccctagcctctacta

SEQ ID NO: 18787 - DNA, 20 bp, synthetic construct
  misc_feature 1..20: note = Description of Artificial Sequence: Synthetic oligonucleotide
  misc_feature 1..20: note = Target: FXN; (+) strand; PAM type: NRG; PAM sequence: CAG
  source 1..20: mol_type = other DNA
tctactagagcctgtaactg

SEQ ID NO: 18788 - DNA, 20 bp, synthetic construct
  misc_feature 1..20: note = Description of Artificial Sequence: Synthetic oligonucleotide
  misc_feature 1..20: note = Target: FXN; (+) strand; PAM type: NRG; PAM sequence: AGG
  source 1..20: mol_type = other DNA
ctactagagcctgtaactgc

SEQ ID NO: 18789 - DNA, 20 bp, synthetic construct
  misc_feature 1..20: note = Description of Artificial Sequence: Synthetic oligonucleotide
  misc_feature 1..20: note = Target: FXN; (+) strand; PAM type: NRG; PAM sequence: GGG
  source 1..20: mol_type = other DNA
tactagagcctgtaactgca

SEQ ID NO: 18790 - DNA, 20 bp, synthetic construct
  misc_feature 1..20: note = Description of Artificial Sequence: Synthetic oligonucleotide
  misc_feature 1..20: note = Target: FXN; (+) strand; PAM type: NRG; PAM sequence: AAG
  source 1..20: mol_type = other DNA
cctgtaactgcagggaaacc

SEQ ID NO: 18791 - DNA, 20 bp, synthetic construct
  misc_feature 1..20: note = Description of Artificial Sequence: Synthetic oligonucleotide
  misc_feature 1..20: note = Target: FXN; (+) strand; PAM type: NRG; PAM sequence: CAG
  source 1..20: mol_type = other DNA
actgcagggaaaccaagttg

SEQ ID NO: 18792 - DNA, 20 bp, synthetic construct
  misc_feature 1..20: note = Description of Artificial Sequence: Synthetic oligonucleotide
  misc_feature 1..20: note = Target: FXN; (+) strand; PAM type: NRG; PAM sequence: AGG
  source 1..20: mol_type = other DNA
ctgcagggaaaccaagttgc

SEQ ID NO: 18793 - DNA, 20 bp, synthetic construct
  misc_feature 1..20: note = Description of Artificial Sequence: Synthetic oligonucleotide
  misc_feature 1..20: note = Target: FXN; (+) strand; PAM type: NRG; PAM sequence: CAG
  source 1..20: mol_type = other DNA
ctaaactctgcccacacatg

SEQ ID NO: 18794 - DNA, 20 bp, synthetic construct
  misc_feature 1..20: note = Description of Artificial Sequence: Synthetic oligonucleotide
  misc_feature 1..20: note = Target: FXN; (+) strand; PAM type: NRG; PAM sequence: TAG
  source 1..20: mol_type = other DNA
ccacacatgcagacattgat

SEQ ID NO: 18795 - DNA, 20 bp, synthetic construct
  misc_feature 1..20: note = Description of Artificial Sequence: Synthetic oligonucleotide
  misc_feature 1..20: note = Target: FXN; (+) strand; PAM type: NRG; PAM sequence: AAG
  source 1..20: mol_type = other DNA
acatgcagacattgattagc

SEQ ID NO: 18796 - DNA, 20 bp, synthetic construct
  misc_feature 1..20: note = Description of Artificial Sequence: Synthetic oligonucleotide
  misc_feature 1..20: note = Target: FXN; (+) strand; PAM type: NRG; PAM sequence: CAG
  source 1..20: mol_type = other DNA
tgattagcaagctacaaaaa

SEQ ID NO: 18797 - DNA, 20 bp, synthetic construct
  misc_feature 1..20: note = Description of Artificial Sequence: Synthetic oligonucleotide
  misc_feature 1..20: note = Target: FXN; (+) strand; PAM type: NRG; PAM sequence: TAG
  source 1..20: mol_type = other DNA
agtcatgaaacctgttttta

SEQ ID NO: 18798 - DNA, 20 bp, synthetic construct
  misc_feature 1..20: note = Description of Artificial Sequence: Synthetic oligonucleotide
  misc_feature 1..20: note = Target: FXN; (+) strand; PAM type: NRG; PAM sequence: AGG
  source 1..20: mol_type = other DNA
gtcatgaaacctgtttttat

SEQ ID NO: 18799 - DNA, 20 bp, synthetic construct
  misc_feature 1..20: note = Description of Artificial Sequence: Synthetic oligonucleotide
  misc_feature 1..20: note = Target: FXN; (+) strand; PAM type: NRG; PAM sequence: TAG
  source 1..20: mol_type = other DNA
gaaacctgtttttataggat

SEQ ID NO: 18800 - DNA, 20 bp, synthetic construct
  misc_feature 1..20: note = Description of Artificial Sequence: Synthetic oligonucleotide
  misc_feature 1..20: note = Target: FXN; (+) strand; PAM type: NRG; PAM sequence: AAG
  source 1..20: mol_type = other DNA
ctgtttttataggattagtg

SEQ ID NO: 18801 - DNA, 20 bp, synthetic construct
  misc_feature 1..20: note = Description of Artificial Sequence: Synthetic oligonucleotide
  misc_feature 1..20: note = Target: FXN; (+) strand; PAM type: NRG; PAM sequence: CAG
  source 1..20: mol_type = other DNA
ttataggattagtgaagccc

SEQ ID NO: 18802 - DNA, 20 bp, synthetic construct
  misc_feature 1..20: note = Description of Artificial Sequence: Synthetic oligonucleotide
  misc_feature 1..20: note = Target: FXN; (+) strand; PAM type: NRG; PAM sequence: CAG
  source 1..20: mol_type = other DNA
tagtgaagccccagtttgac

SEQ ID NO: 18803 - DNA, 20 bp, synthetic construct
  misc_feature 1..20: note = Description of Artificial Sequence: Synthetic oligonucleotide
  misc_feature 1..20: note = Target: FXN; (+) strand; PAM type: NRG; PAM sequence: GAG
  source 1..20: mol_type = other DNA
gtgaagccccagtttgacca

SEQ ID NO: 18804 - DNA, 20 bp, synthetic construct
  misc_feature 1..20: note = Description of Artificial Sequence: Synthetic oligonucleotide
  misc_feature 1..20: note = Target: FXN; (+) strand; PAM type: NRG; PAM sequence: TAG
  source 1..20: mol_type = other DNA
actttgcatgaatgttttgt

SEQ ID NO: 18805 - DNA, 20 bp, synthetic construct
  misc_feature 1..20: note = Description of Artificial Sequence: Synthetic oligonucleotide
  misc_feature 1..20: note = Target: FXN; (+) strand; PAM type: NRG; PAM sequence: AAG
  source 1..20: mol_type = other DNA
ttgcatgaatgttttgttag

SEQ ID NO: 18806 - DNA, 20 bp, synthetic construct
  misc_feature 1..20: note = Description of Artificial Sequence: Synthetic oligonucleotide
  misc_feature 1..20: note = Target: FXN; (+) strand; PAM type: NRG; PAM sequence: TAG
  source 1..20: mol_type = other DNA
aagcaaatgtgccaatattc

SEQ ID NO: 18807 - DNA, 20 bp, synthetic construct
  misc_feature 1..20: note = Description of Artificial Sequence: Synthetic oligonucleotide
  misc_feature 1..20: note = Target: FXN; (+) strand; PAM type: NRG; PAM sequence: CAG
  source 1..20: mol_type = other DNA
caaatgtgccaatattctag

SEQ ID NO: 18808 - DNA, 20 bp, synthetic construct
  misc_feature 1..20: note = Description of Artificial Sequence: Synthetic oligonucleotide
  misc_feature 1..20: note = Target: FXN; (+) strand; PAM type: NRG; PAM sequence: TGG
  source 1..20: mol_type = other DNA
aatattctagcagctgcgtt

SEQ ID NO: 18809 - DNA, 20 bp, synthetic construct
  misc_feature 1..20: note = Description of Artificial Sequence: Synthetic oligonucleotide
  misc_feature 1..20: note = Target: FXN; (+) strand; PAM type: NRG; PAM sequence: GAG
  source 1..20: mol_type = other DNA
tcttcttttttttttttttt

SEQ ID NO: 18810 - DNA, 20 bp, synthetic construct
  misc_feature 1..20: note = Description of Artificial Sequence: Synthetic oligonucleotide
  misc_feature 1..20: note = Target: FXN; (+) strand; PAM type: NRG; PAM sequence: AAG
  source 1..20: mol_type = other DNA
ttttttttttttttgagttg

SEQ ID NO: 18811 - DNA, 20 bp, synthetic construct
  misc_feature 1..20: note = Description of Artificial Sequence: Synthetic oligonucleotide
  misc_feature 1..20: note = Target: FXN; (+) strand; PAM type: NRG; PAM sequence: TAG
  source 1..20: mol_type = other DNA
tttttttttgagttgaagcc

SEQ ID NO: 18812 - DNA, 20 bp, synthetic construct
  misc_feature 1..20: note = Description of Artificial Sequence: Synthetic oligonucleotide
  misc_feature 1..20: note = Target: FXN; (+) strand; PAM type: NRG; PAM sequence: CAG
  source 1..20: mol_type = other DNA
tgaagcctagctctgtcacc

SEQ ID NO: 18813 - DNA, 20 bp, synthetic construct
  misc_feature 1..20: note = Description of Artificial Sequence: Synthetic oligonucleotide
  misc_feature 1..20: note = Target: FXN; (+) strand; PAM type: NRG; PAM sequence: AGG
  source 1..20: mol_type = other DNA
gaagcctagctctgtcaccc

SEQ ID NO: 18814 - DNA, 20 bp, synthetic construct
  misc_feature 1..20: note = Description of Artificial Sequence: Synthetic oligonucleotide
  misc_feature 1..20: note = Target: FXN; (+) strand; PAM type: NRG; PAM sequence: TGG
  source 1..20: mol_type = other DNA
cctagctctgtcacccaggc

SEQ ID NO: 18815 - DNA, 20 bp, synthetic construct
  misc_feature 1..20: note = Description of Artificial Sequence: Synthetic oligonucleotide
  misc_feature 1..20: note = Target: FXN; (+) strand; PAM type: NRG; PAM sequence: GAG
  source 1..20: mol_type = other DNA
tagctctgtcacccaggctg

SEQ ID NO: 18816 - DNA, 20 bp, synthetic construct
  misc_feature 1..20: note = Description of Artificial Sequence: Synthetic oligonucleotide
  misc_feature 1..20: note = Target: FXN; (+) strand; PAM type: NRG; PAM sequence: CAG
  source 1..20: mol_type = other DNA
ctgtcacccaggctggagtg

SEQ ID NO: 18817 - DNA, 20 bp, synthetic construct
  misc_feature 1..20: note = Description of Artificial Sequence: Synthetic oligonucleotide
  misc_feature 1..20: note = Target: FXN; (+) strand; PAM type: NRG; PAM sequence: CAG
  source 1..20: mol_type = other DNA
ggagtgcagttgtgtgatct

SEQ ID NO: 18818 - DNA, 20 bp, synthetic construct
  misc_feature 1..20: note = Description of Artificial Sequence: Synthetic oligonucleotide
  misc_feature 1..20: note = Target: FXN; (+) strand; PAM type: NRG; PAM sequence: CAG
  source 1..20: mol_type = other DNA
tcactgcaacctctgcctcc

SEQ ID NO: 18819 - DNA, 20 bp, synthetic construct
  misc_feature 1..20: note = Description of Artificial Sequence: Synthetic oligonucleotide
  misc_feature 1..20: note = Target: FXN; (+) strand; PAM type: NRG; PAM sequence: AGG
  source 1..20: mol_type = other DNA
cactgcaacctctgcctccc

SEQ ID NO: 18820 - DNA, 20 bp, synthetic construct
  misc_feature 1..20: note = Description of Artificial Sequence: Synthetic oligonucleotide
  misc_feature 1..20: note = Target: FXN; (+) strand; PAM type: NRG; PAM sequence: AAG
  source 1..20: mol_type = other DNA
aacctctgcctcccaggttc

SEQ ID NO: 18821 - DNA, 20 bp, synthetic construct
  misc_feature 1..20: note = Description of Artificial Sequence: Synthetic oligonucleotide
  misc_feature 1..20: note = Target: FXN; (+) strand; PAM type: NRG; PAM sequence: GAG
  source 1..20: mol_type = other DNA
ttctcccgcctcaacctcct

SEQ ID NO: 18822 - DNA, 20 bp, synthetic construct
  misc_feature 1..20: note = Description of Artificial Sequence: Synthetic oligonucleotide
  misc_feature 1..20: note = Target: FXN; (+) strand; PAM type: NRG; PAM sequence: TAG
  source 1..20: mol_type = other DNA
tcccgcctcaacctcctgag

SEQ ID NO: 18823 - DNA, 20 bp, synthetic construct
  misc_feature 1..20: note = Description of Artificial Sequence: Synthetic oligonucleotide
  misc_feature 1..20: note = Target: FXN; (+) strand; PAM type: NRG; PAM sequence: TGG
  source 1..20: mol_type = other DNA
gcctcaacctcctgagtagc

SEQ ID NO: 18824 - DNA, 20 bp, synthetic construct
  misc_feature 1..20: note = Description of Artificial Sequence: Synthetic oligonucleotide
  misc_feature 1..20: note = Target: FXN; (+) strand; PAM type: NRG; PAM sequence: GGG
  source 1..20: mol_type = other DNA
cctcaacctcctgagtagct

SEQ ID NO: 18825 - DNA, 20 bp, synthetic construct
  misc_feature 1..20: note = Description of Artificial Sequence: Synthetic oligonucleotide
  misc_feature 1..20: note = Target: FXN; (+) strand; PAM type: NRG; PAM sequence: CAG
  source 1..20: mol_type = other DNA
ctcctgagtagctgggatta

SEQ ID NO: 18826 - DNA, 20 bp, synthetic construct
  misc_feature 1..20: note = Description of Artificial Sequence: Synthetic oligonucleotide
  misc_feature 1..20: note = Target: FXN; (+) strand; PAM type: NRG; PAM sequence: CAG
  source 1..20: mol_type = other DNA
tacagacatgtaccacaata

SEQ ID NO: 18827 - DNA, 20 bp, synthetic construct
  misc_feature 1..20: note = Description of Artificial Sequence: Synthetic oligonucleotide
  misc_feature 1..20: note = Target: FXN; (+) strand; PAM type: NRG; PAM sequence: AGG
  source 1..20: mol_type = other DNA
acagacatgtaccacaatac

SEQ ID NO: 18828 - DNA, 20 bp, synthetic construct
  misc_feature 1..20: note = Description of Artificial Sequence: Synthetic oligonucleotide
  misc_feature 1..20: note = Target: FXN; (+) strand; PAM type: NRG; PAM sequence: GGG
  source 1..20: mol_type = other DNA
cagacatgtaccacaataca

SEQ ID NO: 18829 - DNA, 20 bp, synthetic construct
  misc_feature 1..20: note = Description of Artificial Sequence: Synthetic oligonucleotide
  misc_feature 1..20: note = Target: FXN; (+) strand; PAM type: NRG; PAM sequence: AAG
  source 1..20: mol_type = other DNA
atgtaccacaatacagggct

SEQ ID NO: 18830 - DNA, 20 bp, synthetic construct
  misc_feature 1..20: note = Description of Artificial Sequence: Synthetic oligonucleotide
  misc_feature 1..20: note = Target: FXN; (+) strand; PAM type: NRG; PAM sequence: TAG
  source 1..20: mol_type = other DNA
agggctaagttttgtatttt

SEQ ID NO: 18831 - DNA, 20 bp, synthetic construct
  misc_feature 1..20: note = Description of Artificial Sequence: Synthetic oligonucleotide
  misc_feature 1..20: note = Target: FXN; (+) strand; PAM type: NRG; PAM sequence: TAG
  source 1..20: mol_type = other DNA
gctaagttttgtatttttag

SEQ ID NO: 18832 - DNA, 20 bp, synthetic construct
  misc_feature 1..20: note = Description of Artificial Sequence: Synthetic oligonucleotide
  misc_feature 1..20: note = Target: FXN; (+) strand; PAM type: NRG; PAM sequence: TGG
  source 1..20: mol_type = other DNA
ttttgtatttttagtagaaa

SEQ ID NO: 18833 - DNA, 20 bp, synthetic construct
  misc_feature 1..20: note = Description of Artificial Sequence: Synthetic oligonucleotide
  misc_feature 1..20: note = Target: FXN; (+) strand; PAM type: NRG; PAM sequence: GGG
  source 1..20: mol_type = other DNA
tttgtatttttagtagaaat

SEQ ID NO: 18834 - DNA, 20 bp, synthetic construct
  misc_feature 1..20: note = Description of Artificial Sequence: Synthetic oligonucleotide
  misc_feature 1..20: note = Target: FXN; (+) strand; PAM type: NRG; PAM sequence: GGG
  source 1..20: mol_type = other DNA
ttgtatttttagtagaaatg

SEQ ID NO: 18835 - DNA, 20 bp, synthetic construct
  misc_feature 1..20: note = Description of Artificial Sequence: Synthetic oligonucleotide
  misc_feature 1..20: note = Target: FXN; (+) strand; PAM type: NRG; PAM sequence: TGG
  source 1..20: mol_type = other DNA
gaaatggggtttcaccatgt

SEQ ID NO: 18836 - DNA, 20 bp, synthetic construct
  misc_feature 1..20: note = Description of Artificial Sequence: Synthetic oligonucleotide
  misc_feature 1..20: note = Target: FXN; (+) strand; PAM type: NRG; PAM sequence: CAG
  source 1..20: mol_type = other DNA
tggggtttcaccatgttggc

SEQ ID NO: 18837 - DNA, 20 bp, synthetic construct
  misc_feature 1..20: note = Description of Artificial Sequence: Synthetic oligonucleotide
  misc_feature 1..20: note = Target: FXN; (+) strand; PAM type: NRG; PAM sequence: AGG
  source 1..20: mol_type = other DNA
ggggtttcaccatgttggcc

SEQ ID NO: 18838 - DNA, 20 bp, synthetic construct
  misc_feature 1..20: note = Description of Artificial Sequence: Synthetic oligonucleotide
  misc_feature 1..20: note = Target: FXN; (+) strand; PAM type: NRG; PAM sequence: TGG
  source 1..20: mol_type = other DNA
tttcaccatgttggccaggc

SEQ ID NO: 18839 - DNA, 20 bp, synthetic construct
  misc_feature 1..20: note = Description of Artificial Sequence: Synthetic oligonucleotide
  misc_feature 1..20: note = Target: FXN; (+) strand; PAM type: NRG; PAM sequence: AAG
  source 1..20: mol_type = other DNA
ggtctcaaactcctgatctc

SEQ ID NO: 18840 - DNA, 20 bp, synthetic construct
  misc_feature 1..20: note = Description of Artificial Sequence: Synthetic oligonucleotide
  misc_feature 1..20: note = Target: FXN; (+) strand; PAM type: NRG; PAM sequence: CAG
  source 1..20: mol_type = other DNA
ctcaagtgatccacccgcct

SEQ ID NO: 18841 - DNA, 20 bp, synthetic construct
  misc_feature 1..20: note = Description of Artificial Sequence: Synthetic oligonucleotide
  misc_feature 1..20: note = Target: FXN; (+) strand; PAM type: NRG; PAM sequence: AAG
  source 1..20: mol_type = other DNA
ccacccgcctcagcctccta

SEQ ID NO: 18842 - DNA, 20 bp, synthetic construct
  misc_feature 1..20: note = Description of Artificial Sequence: Synthetic oligonucleotide
  misc_feature 1..20: note = Target: FXN; (+) strand; PAM type: NRG; PAM sequence: TGG
  source 1..20: mol_type = other DNA
gcctcagcctcctaaagtgc

SEQ ID NO: 18843 - DNA, 20 bp, synthetic construct
  misc_feature 1..20: note = Description of Artificial Sequence: Synthetic oligonucleotide
  misc_feature 1..20: note = Target: FXN; (+) strand; PAM type: NRG; PAM sequence: GGG
  source 1..20: mol_type = other DNA
cctcagcctcctaaagtgct

SEQ ID NO: 18844 - DNA, 20 bp, synthetic construct
  misc_feature 1..20: note = Description of Artificial Sequence: Synthetic oligonucleotide
  misc_feature 1..20: note = Target: FXN; (+) strand; PAM type: NRG; PAM sequence: CAG
  source 1..20: mol_type = other DNA
ctcctaaagtgctgggttaa

SEQ ID NO: 18845 - DNA, 20 bp, synthetic construct
  misc_feature 1..20: note = Description of Artificial Sequence: Synthetic oligonucleotide
  misc_feature 1..20: note = Target: FXN; (+) strand; PAM type: NRG; PAM sequence: AGG
  source 1..20: mol_type = other DNA
tcctaaagtgctgggttaac

SEQ ID NO: 18846 - DNA, 20 bp, synthetic construct
  misc_feature 1..20: note = Description of Artificial Sequence: Synthetic oligonucleotide
  misc_feature 1..20: note = Target: FXN; (+) strand; PAM type: NRG; PAM sequence: GAG
  source 1..20: mol_type = other DNA
agtgctgggttaacaggcat

SEQ ID NO: 18847 - DNA, 20 bp, synthetic construct
  misc_feature 1..20: note = Description of Artificial Sequence: Synthetic oligonucleotide
  misc_feature 1..20: note = Target: FXN; (+) strand; PAM type: NRG; PAM sequence: CGG
  source 1..20: mol_type = other DNA
gggttaacaggcatgagcca

SEQ ID NO: 18848 - DNA, 20 bp, synthetic construct
  misc_feature 1..20: note = Description of Artificial Sequence: Synthetic oligonucleotide
  misc_feature 1..20: note = Target: FXN; (+) strand; PAM type: NRG; PAM sequence: TGG
  source 1..20: mol_type = other DNA
caggcatgagccacggcacc

SEQ ID NO: 18849 - DNA, 20 bp, synthetic construct
  misc_feature 1..20: note = Description of Artificial Sequence: Synthetic oligonucleotide
  misc_feature 1..20: note = Target: FXN; (+) strand; PAM type: NRG; PAM sequence: AAG
  source 1..20: mol_type = other DNA
tgagccacggcacctggcaa

SEQ ID NO: 18850 - DNA, 20 bp, synthetic construct
  misc_feature 1..20: note = Description of Artificial Sequence: Synthetic oligonucleotide
  misc_feature 1..20: note = Target: FXN; (+) strand; PAM type: NRG; PAM sequence: TGG
  source 1..20: mol_type = other DNA
acctggcaaaagtcatcttt

SEQ ID NO: 18851 - DNA, 20 bp, synthetic construct
  misc_feature 1..20: note = Description of Artificial Sequence: Synthetic oligonucleotide
  misc_feature 1..20: note = Target: FXN; (+) strand; PAM type: NRG; PAM sequence: AAG
  source 1..20: mol_type = other DNA
ttacttctattgaactgaaa

SEQ ID NO: 18852 - DNA, 20 bp, synthetic construct
  misc_feature 1..20: note = Description of Artificial Sequence: Synthetic oligonucleotide
  misc_feature 1..20: note = Target: FXN; (+) strand; PAM type: NRG; PAM sequence: TGG
  source 1..20: mol_type = other DNA
aatatatttatataaaaata

SEQ ID NO: 18853 - DNA, 20 bp, synthetic construct
  misc_feature 1..20: note = Description of Artificial Sequence: Synthetic oligonucleotide
  misc_feature 1..20: note = Target: FXN; (+) strand; PAM type: NRG; PAM sequence: TAG
  source 1..20: mol_type = other DNA
ttatataaaaatatggtatt

SEQ ID NO: 18854 - DNA, 20 bp, synthetic construct
  misc_feature 1..20: note = Description of Artificial Sequence: Synthetic oligonucleotide
  misc_feature 1..20: note = Target: FXN; (+) strand; PAM type: NRG; PAM sequence: TAG
  source 1..20: mol_type = other DNA
gtatttagtattattatttt

SEQ ID NO: 18855 - DNA, 20 bp, synthetic construct
  misc_feature 1..20: note = Description of Artificial Sequence: Synthetic oligonucleotide
  misc_feature 1..20: note = Target: FXN; (+) strand; PAM type: NRG; PAM sequence: GAG
  source 1..20: mol_type = other DNA
atttagtattattattttta

SEQ ID NO: 18856 - DNA, 20 bp, synthetic construct
  misc_feature 1..20: note = Description of Artificial Sequence: Synthetic oligonucleotide
  misc_feature 1..20: note = Target: FXN; (+) strand; PAM type: NRG; PAM sequence: CAG
  source 1..20: mol_type = other DNA
agtattattatttttagaga

SEQ ID NO: 18857 - DNA, 20 bp, synthetic construct
  misc_feature 1..20: note = Description of Artificial Sequence: Synthetic oligonucleotide
  misc_feature 1..20: note = Target: FXN; (+) strand; PAM type: NRG; PAM sequence: AGG
  source 1..20: mol_type = other DNA
gtattattatttttagagac

SEQ ID NO: 18858 - DNA, 20 bp, synthetic construct
  misc_feature 1..20: note = Description of Artificial Sequence: Synthetic oligonucleotide
  misc_feature 1..20: note = Target: FXN; (+) strand; PAM type: NRG; PAM sequence: GGG
  source 1..20: mol_type = other DNA
tattattatttttagagaca

SEQ ID NO: 18859 - DNA, 20 bp, synthetic construct
  misc_feature 1..20: note = Description of Artificial Sequence: Synthetic oligonucleotide
  misc_feature 1..20: note = Target: FXN; (+) strand; PAM type: NRG; PAM sequence: CAG
  source 1..20: mol_type = other DNA
cagggcctcgctctgtcacc

SEQ ID NO: 18860 - DNA, 20 bp, synthetic construct
  misc_feature 1..20: note = Description of Artificial Sequence: Synthetic oligonucleotide
  misc_feature 1..20: note = Target: FXN; (+) strand; PAM type: NRG; PAM sequence: AGG
  source 1..20: mol_type = other DNA
agggcctcgctctgtcaccc

SEQ ID NO: 18861 - DNA, 20 bp, synthetic construct
  misc_feature 1..20: note = Description of Artificial Sequence: Synthetic oligonucleotide
  misc_feature 1..20: note = Target: FXN; (+) strand; PAM type: NRG; PAM sequence: TGG
  source 1..20: mol_type = other DNA
cctcgctctgtcacccaggc

SEQ ID NO: 18862 - DNA, 20 bp, synthetic construct
  misc_feature 1..20: note = Description of Artificial Sequence: Synthetic oligonucleotide
  misc_feature 1..20: note = Target: FXN; (+) strand; PAM type: NRG; PAM sequence: GAG
  source 1..20: mol_type = other DNA
tcgctctgtcacccaggctg

SEQ ID NO: 18863 - DNA, 20 bp, synthetic construct
  misc_feature 1..20: note = Description of Artificial Sequence: Synthetic oligonucleotide
  misc_feature 1..20: note = Target: FXN; (+) strand; PAM type: NRG; PAM sequence: CAG
  source 1..20: mol_type = other DNA
ctgtcacccaggctggagtg

SEQ ID NO: 18864 - DNA, 20 bp, synthetic construct
  misc_feature 1..20: note = Description of Artificial Sequence: Synthetic oligonucleotide
  misc_feature 1..20: note = Target: FXN; (+) strand; PAM type: NRG; PAM sequence: TGG
  source 1..20: mol_type = other DNA
tcacccaggctggagtgcag

SEQ ID NO: 18865 - DNA, 20 bp, synthetic construct
  misc_feature 1..20: note = Description of Artificial Sequence: Synthetic oligonucleotide
  misc_feature 1..20: note = Target: FXN; (+) strand; PAM type: NRG; PAM sequence: TAG
  source 1..20: mol_type = other DNA
ggagtgcagtggcacaatca

SEQ ID NO: 18866 - DNA, 20 bp, synthetic construct
  misc_feature 1..20: note = Description of Artificial Sequence: Synthetic oligonucleotide
  misc_feature 1..20: note = Target: FXN; (+) strand; PAM type: NRG; PAM sequence: CAG
  source 1..20: mol_type = other DNA
ggcacaatcatagctcactg

SEQ ID NO: 18867 - DNA, 20 bp, synthetic construct
  misc_feature 1..20: note = Description of Artificial Sequence: Synthetic oligonucleotide
  misc_feature 1..20: note = Target: FXN; (+) strand; PAM type: NRG; PAM sequence: AAG
  source 1..20: mol_type = other DNA
tcatagctcactgcagcctc

SEQ ID NO: 18868 - DNA, 20 bp, synthetic construct
  misc_feature 1..20: note = Description of Artificial Sequence: Synthetic oligonucleotide
  misc_feature 1..20: note = Target: FXN; (+) strand; PAM type: NRG; PAM sequence: TGG
  source 1..20: mol_type = other DNA
tcactgcagcctcaagcttc

SEQ ID NO: 18869 - DNA, 20 bp, synthetic construct
  misc_feature 1..20: note = Description of Artificial Sequence: Synthetic oligonucleotide
  misc_feature 1..20: note = Target: FXN; (+) strand; PAM type: NRG; PAM sequence: GGG
  source 1..20: mol_type = other DNA
cactgcagcctcaagcttct

SEQ ID NO: 18870 - DNA, 20 bp, synthetic construct
  misc_feature 1..20: note = Description of Artificial Sequence: Synthetic oligonucleotide
  misc_feature 1..20: note = Target: FXN; (+) strand; PAM type: NRG; PAM sequence: AAG
  source 1..20: mol_type = other DNA
agcctcaagcttctgggctc

SEQ ID NO: 18871 - DNA, 20 bp, synthetic construct
  misc_feature 1..20: note = Description of Artificial Sequence: Synthetic oligonucleotide
  misc_feature 1..20: note = Target: FXN; (+) strand; PAM type: NRG; PAM sequence: CAG
  source 1..20: mol_type = other DNA
ctcaagtgatcgttccacct

SEQ ID NO: 18872 - DNA, 20 bp, synthetic construct
  misc_feature 1..20: note = Description of Artificial Sequence: Synthetic oligonucleotide
  misc_feature 1..20: note = Target: FXN; (+) strand; PAM type: NRG; PAM sequence: TAG
  source 1..20: mol_type = other DNA
tcgttccacctcagcctccc

SEQ ID NO: 18873 - DNA, 20 bp, synthetic construct
  misc_feature 1..20: note = Description of Artificial Sequence: Synthetic oligonucleotide
  misc_feature 1..20: note = Target: FXN; (+) strand; PAM type: NRG; PAM sequence: TAG
  source 1..20: mol_type = other DNA
ttccacctcagcctccctag

SEQ ID NO: 18874 - DNA, 20 bp, synthetic construct
  misc_feature 1..20: note = Description of Artificial Sequence: Synthetic oligonucleotide
  misc_feature 1..20: note = Target: FXN; (+) strand; PAM type: NRG; PAM sequence: TGG
  source 1..20: mol_type = other DNA
acctcagcctccctagtagc

SEQ ID NO: 18875 - DNA, 20 bp, synthetic construct
  misc_feature 1..20: note = Description of Artificial Sequence: Synthetic oligonucleotide
  misc_feature 1..20: note = Target: FXN; (+) strand; PAM type: NRG; PAM sequence: GGG
  source 1..20: mol_type = other DNA
cctcagcctccctagtagct

SEQ ID NO: 18876 - DNA, 20 bp, synthetic construct
  misc_feature 1..20: note = Description of Artificial Sequence: Synthetic oligonucleotide
  misc_feature 1..20: note = Target: FXN; (+) strand; PAM type: NRG; PAM sequence: CAG
  source 1..20: mol_type = other DNA
ctccctagtagctgggacta

SEQ ID NO: 18877 - DNA, 20 bp, synthetic construct
  misc_feature 1..20: note = Description of Artificial Sequence: Synthetic oligonucleotide
  misc_feature 1..20: note = Target: FXN; (+) strand; PAM type: NRG; PAM sequence: AGG
  source 1..20: mol_type = other DNA
tccctagtagctgggactac

SEQ ID NO: 18878 - DNA, 20 bp, synthetic construct
  misc_feature 1..20: note = Description of Artificial Sequence: Synthetic oligonucleotide
  misc_feature 1..20: note = Target: FXN; (+) strand; PAM type: NRG; PAM sequence: CGG
  source 1..20: mol_type = other DNA
caggcacatgccaccatact

SEQ ID NO: 18879 - DNA, 20 bp, synthetic construct
  misc_feature 1..20: note = Description of Artificial Sequence: Synthetic oligonucleotide
  misc_feature 1..20: note = Target: FXN; (+) strand; PAM type: NRG; PAM sequence: TGG
  source 1..20: mol_type = other DNA
taattattttattttattta

SEQ ID NO: 18880 - DNA, 20 bp, synthetic construct
  misc_feature 1..20: note = Description of Artificial Sequence: Synthetic oligonucleotide
  misc_feature 1..20: note = Target: FXN; (+) strand; PAM type: NRG; PAM sequence: GGG
  source 1..20: mol_type = other DNA
aattattttattttatttat

SEQ ID NO: 18881 - DNA, 20 bp, synthetic construct
  misc_feature 1..20: note = Description of Artificial Sequence: Synthetic oligonucleotide
  misc_feature 1..20: note = Target: FXN; (+) strand; PAM type: NRG; PAM sequence: CAG
  source 1..20: mol_type = other DNA
atgggtctcgctatgtttcc

SEQ ID NO: 18882 - DNA, 20 bp, synthetic construct
  misc_feature 1..20: note = Description of Artificial Sequence: Synthetic oligonucleotide
  misc_feature 1..20: note = Target: FXN; (+) strand; PAM type: NRG; PAM sequence: AGG
  source 1..20: mol_type = other DNA
tgggtctcgctatgtttccc

SEQ ID NO: 18883 - DNA, 20 bp, synthetic construct
  misc_feature 1..20: note = Description of Artificial Sequence: Synthetic oligonucleotide
  misc_feature 1..20: note = Target: FXN; (+) strand; PAM type: NRG; PAM sequence: TGG
  source 1..20: mol_type = other DNA
tctcgctatgtttcccaggc

SEQ ID NO: 18884 - DNA, 20 bp, synthetic construct
  misc_feature 1..20: note = Description of Artificial Sequence: Synthetic oligonucleotide
  misc_feature 1..20: note = Target: FXN; (+) strand; PAM type: NRG; PAM sequence: TGG
  source 1..20: mol_type = other DNA
ccaggctggtctcaaactcc

SEQ ID NO: 18885 - DNA, 20 bp, synthetic construct
  misc_feature 1..20: note = Description of Artificial Sequence: Synthetic oligonucleotide
  misc_feature 1..20: note = Target: FXN; (+) strand; PAM type: NRG; PAM sequence: AAG
  source 1..20: mol_type = other DNA
ggtctcaaactcctggcctc

SEQ ID NO: 18886 - DNA, 20 bp, synthetic construct
  misc_feature 1..20: note = Description of Artificial Sequence: Synthetic oligonucleotide
  misc_feature 1..20: note = Target: FXN; (+) strand; PAM type: NRG; PAM sequence: CGG
  source 1..20: mol_type = other DNA
ctcaagcgattctctcacct

SEQ ID NO: 18887 - DNA, 20 bp, synthetic construct
  misc_feature 1..20: note = Description of Artificial Sequence: Synthetic oligonucleotide
  misc_feature 1..20: note = Target: FXN; (+) strand; PAM type: NRG; PAM sequence: AAG
  source 1..20: mol_type = other DNA
tctctcacctcggcctccca

SEQ ID NO: 18888 - DNA, 20 bp, synthetic construct
  misc_feature 1..20: note = Description of Artificial Sequence: Synthetic oligonucleotide
  misc_feature 1..20: note = Target: FXN; (+) strand; PAM type: NRG; PAM sequence: CGG
  source 1..20: mol_type = other DNA
acctcggcctcccaaagcac

SEQ ID NO: 18889 - DNA, 20 bp, synthetic construct
  misc_feature 1..20: note = Description of Artificial Sequence: Synthetic oligonucleotide
  misc_feature 1..20: note = Target: FXN; (+) strand; PAM type: NRG; PAM sequence: GGG
  source 1..20: mol_type = other DNA
cctcggcctcccaaagcacc

SEQ ID NO: 18890 - DNA, 20 bp, synthetic construct
  misc_feature 1..20: note = Description of Artificial Sequence: Synthetic oligonucleotide
  misc_feature 1..20: note = Target: FXN; (+) strand; PAM type: NRG; PAM sequence: CAG
  source 1..20: mol_type = other DNA
ctcccaaagcaccgggatta

SEQ ID NO: 18891 - DNA, 20 bp, synthetic construct
  misc_feature 1..20: note = Description of Artificial Sequence: Synthetic oligonucleotide
  misc_feature 1..20: note = Target: FXN; (+) strand; PAM type: NRG; PAM sequence: AGG
  source 1..20: mol_type = other DNA
tcccaaagcaccgggattac

SEQ ID NO: 18892 - DNA, 20 bp, synthetic construct
  misc_feature 1..20: note = Description of Artificial Sequence: Synthetic oligonucleotide
  misc_feature 1..20: note = Target: FXN; (+) strand; PAM type: NRG; PAM sequence: CAG
  source 1..20: mol_type = other DNA
ccgggattacaggtgtgtgc

SEQ ID NO: 18893 - DNA, 20 bp, synthetic construct
  misc_feature 1..20: note = Description of Artificial Sequence: Synthetic oligonucleotide
  misc_feature 1..20: note = Target: FXN; (+) strand; PAM type: NRG; PAM sequence: CAG
  source 1..20: mol_type = other DNA
caggtgtgtgccagcacacc

SEQ ID NO: 18894 - DNA, 20 bp, synthetic construct
  misc_feature 1..20: note = Description of Artificial Sequence: Synthetic oligonucleotide
  misc_feature 1..20: note = Target: FXN; (+) strand; PAM type: NRG; PAM sequence: TAG
  source 1..20: mol_type = other DNA
cagccacaaatctataaatt

SEQ ID NO: 18895 - DNA, 20 bp, synthetic construct
  misc_feature 1..20: note = Description of Artificial Sequence: Synthetic oligonucleotide
  misc_feature 1..20: note = Target: FXN; (+) strand; PAM type: NRG; PAM sequence: AAG
  source 1..20: mol_type = other DNA
cacaaatctataaatttaga

SEQ ID NO: 18896 - DNA, 20 bp, synthetic construct
  misc_feature 1..20: note = Description of Artificial Sequence: Synthetic oligonucleotide
  misc_feature 1..20: note = Target: FXN; (+) strand; PAM type: NRG; PAM sequence: AGG
  source 1..20: mol_type = other DNA
acaaatctataaatttagaa

SEQ ID NO: 18897 - DNA, 20 bp, synthetic construct
  misc_feature 1..20: note = Description of Artificial Sequence: Synthetic oligonucleotide
  misc_feature 1..20: note = Target: FXN; (+) strand; PAM type: NRG; PAM sequence: GAG
  source 1..20: mol_type = other DNA
aaatctataaatttagaaag

SEQ ID NO: 18898 - DNA, 20 bp, synthetic construct
  misc_feature 1..20: note = Description of Artificial Sequence: Synthetic oligonucleotide
  misc_feature 1..20: note = Target: FXN; (+) strand; PAM type: NRG; PAM sequence: AGG
  source 1..20: mol_type = other DNA
aatctataaatttagaaagg

SEQ ID NO: 18899 - DNA, 20 bp, synthetic construct
  misc_feature 1..20: note = Description of Artificial Sequence: Synthetic oligonucleotide
  misc_feature 1..20: note = Target: FXN; (+) strand; PAM type: NRG; PAM sequence: AAG
  source 1..20: mol_type = other DNA
agaaaggaggactatttcta

SEQ ID NO: 18900 - DNA, 20 bp, synthetic construct
  misc_feature 1..20: note = Description of Artificial Sequence: Synthetic oligonucleotide
  misc_feature 1..20: note = Target: FXN; (+) strand; PAM type: NRG; PAM sequence: GAG
  source 1..20: mol_type = other DNA
aaaggaggactatttctaaa

SEQ ID NO: 18901 - DNA, 20 bp, synthetic construct
  misc_feature 1..20: note = Description of Artificial Sequence: Synthetic oligonucleotide
  misc_feature 1..20: note = Target: FXN; (+) strand; PAM type: NRG; PAM sequence: AGG
  source 1..20: mol_type = other DNA
aaggaggactatttctaaag

SEQ ID NO: 18902 - DNA, 20 bp, synthetic construct
  misc_feature 1..20: note = Description of Artificial Sequence: Synthetic oligonucleotide
  misc_feature 1..20: note = Target: FXN; (+) strand; PAM type: NRG; PAM sequence: GGG
  source 1..20: mol_type = other DNA
aggaggactatttctaaaga

SEQ ID NO: 18903 - DNA, 20 bp, synthetic construct
  misc_feature 1..20: note = Description of Artificial Sequence: Synthetic oligonucleotide
  misc_feature 1..20: note = Target: FXN; (+) strand; PAM type: NRG; PAM sequence: TAG
  source 1..20: mol_type = other DNA
aaagagggtcccactacctg

SEQ ID NO: 18904 - DNA, 20 bp, synthetic construct
  misc_feature 1..20: note = Description of Artificial Sequence: Synthetic oligonucleotide
  misc_feature 1..20: note = Target: FXN; (+) strand; PAM type: NRG; PAM sequence: AGG
  source 1..20: mol_type = other DNA
aagagggtcccactacctgt

SEQ ID NO: 18905 - DNA, 20 bp, synthetic construct
  misc_feature 1..20: note = Description of Artificial Sequence: Synthetic oligonucleotide
  misc_feature 1..20: note = Target: FXN; (+) strand; PAM type: NRG; PAM sequence: CAG
  source 1..20: mol_type = other DNA
agggtcccactacctgtagg

SEQ ID NO: 18906 - DNA, 20 bp, synthetic construct
  misc_feature 1..20: note = Description of Artificial Sequence: Synthetic oligonucleotide
  misc_feature 1..20: note = Target: FXN; (+) strand; PAM type: NRG; PAM sequence: AGG
  source 1..20: mol_type = other DNA
gggtcccactacctgtaggc

SEQ ID NO: 18907 - DNA, 20 bp, synthetic construct
  misc_feature 1..20: note = Description of Artificial Sequence: Synthetic oligonucleotide
  misc_feature 1..20: note = Target: FXN; (+) strand; PAM type: NRG; PAM sequence: AAG
  source 1..20: mol_type = other DNA
tcccactacctgtaggcagg

SEQ ID NO: 18908 - DNA, 20 bp, synthetic construct
  misc_feature 1..20: note = Description of Artificial Sequence: Synthetic oligonucleotide
  misc_feature 1..20: note = Target: FXN; (+) strand; PAM type: NRG; PAM sequence: CAG
  source 1..20: mol_type = other DNA
cactacctgtaggcaggaag

SEQ ID NO: 18909 - DNA, 20 bp, synthetic construct
  misc_feature 1..20: note = Description of Artificial Sequence: Synthetic oligonucleotide
  misc_feature 1..20: note = Target: FXN; (+) strand; PAM type: NRG; PAM sequence: GAG
  source 1..20: mol_type = other DNA
ctacctgtaggcaggaagca

SEQ ID NO: 18910 - DNA, 20 bp, synthetic construct
  misc_feature 1..20: note = Description of Artificial Sequence: Synthetic oligonucleotide
  misc_feature 1..20: note = Target: FXN; (+) strand; PAM type: NRG; PAM sequence: TGG
  source 1..20: mol_type = other DNA
taggcaggaagcagagcctc

SEQ ID NO: 18911 - DNA, 20 bp, synthetic construct
  misc_feature 1..20: note = Description of Artificial Sequence: Synthetic oligonucleotide
  misc_feature 1..20: note = Target: FXN; (+) strand; PAM type: NRG; PAM sequence: AAG
  source 1..20: mol_type = other DNA
tctggccataactgaaaaac

SEQ ID NO: 18912 - DNA, 20 bp, synthetic construct
  misc_feature 1..20: note = Description of Artificial Sequence: Synthetic oligonucleotide
  misc_feature 1..20: note = Target: FXN; (+) strand; PAM type: NRG; PAM sequence: AAG
  source 1..20: mol_type = other DNA
actgaaaaacaagcacttcc

SEQ ID NO: 18913 - DNA, 20 bp, synthetic construct
  misc_feature 1..20: note = Description of Artificial Sequence: Synthetic oligonucleotide
  misc_feature 1..20: note = Target: FXN; (+) strand; PAM type: NRG; PAM sequence: AAG
  source 1..20: mol_type = other DNA
gaaaaacaagcacttccaag

SEQ ID NO: 18914 - DNA, 20 bp, synthetic construct
  misc_feature 1..20: note = Description of Artificial Sequence: Synthetic oligonucleotide
  misc_feature 1..20: note = Target: FXN; (+) strand; PAM type: NRG; PAM sequence: AGG
  source 1..20: mol_type = other DNA
aaaaacaagcacttccaaga

SEQ ID NO: 18915 - DNA, 20 bp, synthetic construct
  misc_feature 1..20: note = Description of Artificial Sequence: Synthetic oligonucleotide
  misc_feature 1..20: note = Target: FXN; (+) strand; PAM type: NRG; PAM sequence: GGG
  source 1..20: mol_type = other DNA
aaaacaagcacttccaagaa

SEQ ID NO: 18916 - DNA, 20 bp, synthetic construct
  misc_feature 1..20: note = Description of Artificial Sequence: Synthetic oligonucleotide
  misc_feature 1..20: note = Target: FXN; (+) strand; PAM type: NRG; PAM sequence: GGG
  source 1..20: mol_type = other DNA
aaacaagcacttccaagaag

SEQ ID NO: 18917 - DNA, 20 bp, synthetic construct
  misc_feature 1..20: note = Description of Artificial Sequence: Synthetic oligonucleotide
  misc_feature 1..20: note = Target: FXN; (+) strand; PAM type: NRG; PAM sequence: AAG
  source 1..20: mol_type = other DNA
agcacttccaagaaggggca

SEQ ID NO: 18918 - DNA, 20 bp, synthetic construct
  misc_feature 1..20: note = Description of Artificial Sequence: Synthetic oligonucleotide
  misc_feature 1..20: note = Target: FXN; (+) strand; PAM type: NRG; PAM sequence: AGG
  source 1..20: mol_type = other DNA
gcacttccaagaaggggcaa

SEQ ID NO: 18919 - DNA, 20 bp, synthetic construct
  misc_feature 1..20: note = Description of Artificial Sequence: Synthetic oligonucleotide
  misc_feature 1..20: note = Target: FXN; (+) strand; PAM type: NRG; PAM sequence: GGG
  source 1..20: mol_type = other DNA
cacttccaagaaggggcaaa

SEQ ID NO: 18920 - DNA, 20 bp, synthetic construct
  misc_feature 1..20: note = Description of Artificial Sequence: Synthetic oligonucleotide
  misc_feature 1..20: note = Target: FXN; (+) strand; PAM type: NRG; PAM sequence: GAG
  source 1..20: mol_type = other DNA
agggaacatgaatttatgct

SEQ ID NO: 18921 - DNA, 20 bp, synthetic construct
  misc_feature 1..20: note = Description of Artificial Sequence: Synthetic oligonucleotide
  misc_feature 1..20: note = Target: FXN; (+) strand; PAM type: NRG; PAM sequence: GAG
  source 1..20: mol_type = other DNA
ggaacatgaatttatgctga

SEQ ID NO: 18922 - DNA, 20 bp, synthetic construct
  misc_feature 1..20: note = Description of Artificial Sequence: Synthetic oligonucleotide
  misc_feature 1..20: note = Target: FXN; (+) strand; PAM type: NRG; PAM sequence: AGG
  source 1..20: mol_type = other DNA
gaacatgaatttatgctgag

SEQ ID NO: 18923 - DNA, 20 bp, synthetic construct
  misc_feature 1..20: note = Description of Artificial Sequence: Synthetic oligonucleotide
  misc_feature 1..20: note = Target: FXN; (+) strand; PAM type: NRG; PAM sequence: TAG
  source 1..20: mol_type = other DNA
tgaatttatgctgagaggcg

SEQ ID NO: 18924 - DNA, 20 bp, synthetic construct
  misc_feature 1..20: note = Description of Artificial Sequence: Synthetic oligonucleotide
  misc_feature 1..20: note = Target: FXN; (+) strand; PAM type: NRG; PAM sequence: AAG
  source 1..20: mol_type = other DNA
ttatgctgagaggcgtagct

SEQ ID NO: 18925 - DNA, 20 bp, synthetic construct
  misc_feature 1..20: note = Description of Artificial Sequence: Synthetic oligonucleotide
  misc_feature 1..20: note = Target: FXN; (+) strand; PAM type: NRG; PAM sequence: CAG
  source 1..20: mol_type = other DNA
agctaagcatacatattcaa

SEQ ID NO: 18926 - DNA, 20 bp, synthetic construct
  misc_feature 1..20: note = Description of Artificial Sequence: Synthetic oligonucleotide
  misc_feature 1..20: note = Target: FXN; (+) strand; PAM type: NRG; PAM sequence: TGG
  source 1..20: mol_type = other DNA
catacatattcaacagatta

SEQ ID NO: 18927 - DNA, 20 bp, synthetic construct
  misc_feature 1..20: note = Description of Artificial Sequence: Synthetic oligonucleotide
  misc_feature 1..20: note = Target: FXN; (+) strand; PAM type: NRG; PAM sequence: GGG
  source 1..20: mol_type = other DNA
atacatattcaacagattat

SEQ ID NO: 18928 - DNA, 20 bp, synthetic construct
  misc_feature 1..20: note = Description of Artificial Sequence: Synthetic oligonucleotide
  misc_feature 1..20: note = Target: FXN; (+) strand; PAM type: NRG; PAM sequence: GAG
  source 1..20: mol_type = other DNA
acatattcaacagattatgg

SEQ ID NO: 18929 - DNA, 20 bp, synthetic construct
  misc_feature 1..20: note = Description of Artificial Sequence: Synthetic oligonucleotide
  misc_feature 1..20: note = Target: FXN; (+) strand; PAM type: NRG; PAM sequence: AGG
  source 1..20: mol_type = other DNA
catattcaacagattatggg

SEQ ID NO: 18930 - DNA, 20 bp, synthetic construct
  misc_feature 1..20: note = Description of Artificial Sequence: Synthetic oligonucleotide
  misc_feature 1..20: note = Target: FXN; (+) strand; PAM type: NRG; PAM sequence: AAG
  source 1..20: mol_type = other DNA
aggatctatgaatattcaca

SEQ ID NO: 18931 - DNA, 20 bp, synthetic construct
  misc_feature 1..20: note = Description of Artificial Sequence: Synthetic oligonucleotide
  misc_feature 1..20: note = Target: FXN; (+) strand; PAM type: NRG; PAM sequence: AGG
  source 1..20: mol_type = other DNA
ggatctatgaatattcacaa

SEQ ID NO: 18932 - DNA, 20 bp, synthetic construct
  misc_feature 1..20: note = Description of Artificial Sequence: Synthetic oligonucleotide
  misc_feature 1..20: note = Target: FXN; (+) strand; PAM type: NRG; PAM sequence: GGG
  source 1..20: mol_type = other DNA
gatctatgaatattcacaaa

SEQ ID NO: 18933 - DNA, 20 bp, synthetic construct
  misc_feature 1..20: note = Description of Artificial Sequence: Synthetic oligonucleotide
  misc_feature 1..20: note = Target: FXN; (+) strand; PAM type: NRG; PAM sequence: GAG
  source 1..20: mol_type = other DNA
tctatgaatattcacaaagg

SEQ ID NO: 18934 - DNA, 20 bp, synthetic construct
  misc_feature 1..20: note = Description of Artificial Sequence: Synthetic oligonucleotide
  misc_feature 1..20: note = Target: FXN; (+) strand; PAM type: NRG; PAM sequence: AGG
  source 1..20: mol_type = other DNA
ctatgaatattcacaaaggg

SEQ ID NO: 18935 - DNA, 20 bp, synthetic construct
  misc_feature 1..20: note = Description of Artificial Sequence: Synthetic oligonucleotide
  misc_feature 1..20: note = Target: FXN; (+) strand; PAM type: NRG; PAM sequence: TGG
  source 1..20: mol_type = other DNA
tctatgaatatgcacacatg

SEQ ID NO: 18936 - DNA, 20 bp, synthetic construct
  misc_feature 1..20: note = Description of Artificial Sequence: Synthetic oligonucleotide
  misc_feature 1..20: note = Target: FXN; (+) strand; PAM type: NRG; PAM sequence: GAG
  source 1..20: mol_type = other DNA
tatgaatatgcacacatgtg

SEQ ID NO: 18937 - DNA, 20 bp, synthetic construct
  misc_feature 1..20: note = Description of Artificial Sequence: Synthetic oligonucleotide
  misc_feature 1..20: note = Target: FXN; (+) strand; PAM type: NRG; PAM sequence: AAG
  source 1..20: mol_type = other DNA
aatatgcacacatgtggagt

SEQ ID NO: 18938 - DNA, 20 bp, synthetic construct
  misc_feature 1..20: note = Description of Artificial Sequence: Synthetic oligonucleotide
  misc_feature 1..20: note = Target: FXN; (+) strand; PAM type: NRG; PAM sequence: CAG
  source 1..20: mol_type = other DNA
gtggagtaagctaacgtgtg

SEQ ID NO: 18939 - DNA, 20 bp, synthetic construct
  misc_feature 1..20: note = Description of Artificial Sequence: Synthetic oligonucleotide
  misc_feature 1..20: note = Target: FXN; (+) strand; PAM type: NRG; PAM sequence: TAG
  source 1..20: mol_type = other DNA
catgtctcccatgttcacct

SEQ ID NO: 18940 - DNA, 20 bp, synthetic construct
  misc_feature 1..20: note = Description of Artificial Sequence: Synthetic oligonucleotide
  misc_feature 1..20: note = Target: FXN; (+) strand; PAM type: NRG; PAM sequence: AGG
  source 1..20: mol_type = other DNA
atgtctcccatgttcacctt

SEQ ID NO: 18941 - DNA, 20 bp, synthetic construct
  misc_feature 1..20: note = Description of Artificial Sequence: Synthetic oligonucleotide
  misc_feature 1..20: note = Target: FXN; (+) strand; PAM type: NRG; PAM sequence: CAG
  source 1..20: mol_type = other DNA
tctcccatgttcaccttagg

SEQ ID NO: 18942 - DNA, 20 bp, synthetic construct
  misc_feature 1..20: note = Description of Artificial Sequence: Synthetic oligonucleotide
  misc_feature 1..20: note = Target: FXN; (+) strand; PAM type: NRG; PAM sequence: CAG
  source 1..20: mol_type = other DNA
cttaacactaacatgtatta

SEQ ID NO: 18943 - DNA, 20 bp, synthetic construct
  misc_feature 1..20: note = Description of Artificial Sequence: Synthetic oligonucleotide
  misc_feature 1..20: note = Target: FXN; (+) strand; PAM type: NRG; PAM sequence: AGG
  source 1..20: mol_type = other DNA
ttaacactaacatgtattac

SEQ ID NO: 18944 - DNA, 20 bp, synthetic construct
  misc_feature 1..20: note = Description of Artificial Sequence: Synthetic oligonucleotide
  misc_feature 1..20: note = Target: FXN; (+) strand; PAM type: NRG; PAM sequence: GGG
  source 1..20: mol_type = other DNA
taacactaacatgtattaca

SEQ ID NO: 18945 - DNA, 20 bp, synthetic construct
  misc_feature 1..20: note = Description of Artificial Sequence: Synthetic oligonucleotide
  misc_feature 1..20: note = Target: FXN; (+) strand; PAM type: NRG; PAM sequence: GAG
  source 1..20: mol_type = other DNA
gtattacagggcaacaaaat

SEQ ID NO: 18946 - DNA, 20 bp, synthetic construct
  misc_feature 1..20: note = Description of Artificial Sequence: Synthetic oligonucleotide
  misc_feature 1..20: note = Target: FXN; (+) strand; PAM type: NRG; PAM sequence: TAG
  source 1..20: mol_type = other DNA
gactgcatatctacataacc

SEQ ID NO: 18947 - DNA, 20 bp, synthetic construct
  misc_feature 1..20: note = Description of Artificial Sequence: Synthetic oligonucleotide
  misc_feature 1..20: note = Target: FXN; (+) strand; PAM type: NRG; PAM sequence: TGG
  source 1..20: mol_type = other DNA
atctacataacctagctatt

SEQ ID NO: 18948 - DNA, 20 bp, synthetic construct
  misc_feature 1..20: note = Description of Artificial Sequence: Synthetic oligonucleotide
  misc_feature 1..20: note = Target: FXN; (+) strand; PAM type: NRG; PAM sequence: TAG
  source 1..20: mol_type = other DNA
tacataacctagctatttgg

SEQ ID NO: 18949 - DNA, 20 bp, synthetic construct
  misc_feature 1..20: note = Description of Artificial Sequence: Synthetic oligonucleotide
  misc_feature 1..20: note = Target: FXN; (+) strand; PAM type: NRG; PAM sequence: AGG
  source 1..20: mol_type = other DNA
acataacctagctatttggt

SEQ ID NO: 18950 - DNA, 20 bp, synthetic construct
  misc_feature 1..20: note = Description of Artificial Sequence: Synthetic oligonucleotide
  misc_feature 1..20: note = Target: FXN; (+) strand; PAM type: NRG; PAM sequence: AAG
  source 1..20: mol_type = other DNA
cctagctatttggtaggctg

SEQ ID NO: 18951 - DNA, 20 bp, synthetic construct
  misc_feature 1..20: note = Description of Artificial Sequence: Synthetic oligonucleotide
  misc_feature 1..20: note = Target: FXN; (+) strand; PAM type: NRG; PAM sequence: CAG
  source 1..20: mol_type = other DNA
agctatttggtaggctgaag

SEQ ID NO: 18952 - DNA, 20 bp, synthetic construct
  misc_feature 1..20: note = Description of Artificial Sequence: Synthetic oligonucleotide
  misc_feature 1..20: note = Target: FXN; (+) strand; PAM type: NRG; PAM sequence: AGG
  source 1..20: mol_type = other DNA
gctatttggtaggctgaagc

SEQ ID NO: 18953 - DNA, 20 bp, synthetic construct
  misc_feature 1..20: note = Description of Artificial Sequence: Synthetic oligonucleotide
  misc_feature 1..20: note = Target: FXN; (+) strand; PAM type: NRG; PAM sequence: GAG
  source 1..20: mol_type = other DNA
tatttggtaggctgaagcag

SEQ ID NO: 18954 - DNA, 20 bp, synthetic construct
  misc_feature 1..20: note = Description of Artificial Sequence: Synthetic oligonucleotide
  misc_feature 1..20: note = Target: FXN; (+) strand; PAM type: NRG; PAM sequence: AAG
  source 1..20: mol_type = other DNA
ctgaagcaggagcatcactt

SEQ ID NO: 18955 - DNA, 20 bp, synthetic construct
  misc_feature 1..20: note = Description of Artificial Sequence: Synthetic oligonucleotide
  misc_feature 1..20: note = Target: FXN; (+) strand; PAM type: NRG; PAM sequence: TGG
  source 1..20: mol_type = other DNA
gcaggagcatcacttaagac

SEQ ID NO: 18956 - DNA, 20 bp, synthetic construct
  misc_feature 1..20: note = Description of Artificial Sequence: Synthetic oligonucleotide
  misc_feature 1..20: note = Target: FXN; (+) strand; PAM type: NRG; PAM sequence: GGG
  source 1..20: mol_type = other DNA
caggagcatcacttaagact

SEQ ID NO: 18957 - DNA, 20 bp, synthetic construct
  misc_feature 1..20: note = Description of Artificial Sequence: Synthetic oligonucleotide
  misc_feature 1..20: note = Target: FXN; (+) strand; PAM type: NRG; PAM sequence: GAG
  source 1..20: mol_type = other DNA
ggagcatcacttaagactgg

SEQ ID NO: 18958 - DNA, 20 bp, synthetic construct
  misc_feature 1..20: note = Description of Artificial Sequence: Synthetic oligonucleotide
  misc_feature 1..20: note = Target: FXN; (+) strand; PAM type: NRG; PAM sequence: GAG
  source 1..20: mol_type = other DNA
tcacttaagactgggagttc

SEQ ID NO: 18959 - DNA, 20 bp, synthetic construct
  misc_feature 1..20: note = Description of Artificial Sequence: Synthetic oligonucleotide
  misc_feature 1..20: note = Target: FXN; (+) strand; PAM type: NRG; PAM sequence: AGG
  source 1..20: mol_type = other DNA
cacttaagactgggagttcg

SEQ ID NO: 18960 - DNA, 20 bp, synthetic construct
  misc_feature 1..20: note = Description of Artificial Sequence: Synthetic oligonucleotide
  misc_feature 1..20: note = Target: FXN; (+) strand; PAM type: NRG; PAM sequence: CAG
  source 1..20: mol_type = other DNA
ttaagactgggagttcgagg

SEQ ID NO: 18961 - DNA, 20 bp, synthetic construct
  misc_feature 1..20: note = Description of Artificial Sequence: Synthetic oligonucleotide
  misc_feature 1..20: note = Target: FXN; (+) strand; PAM type: NRG; PAM sequence: GAG
  source 1..20: mol_type = other DNA
tgggagttcgaggcagctgt

SEQ ID NO: 18962 - DNA, 20 bp, synthetic construct
  misc_feature 1..20: note = Description of Artificial Sequence: Synthetic oligonucleotide
  misc_feature 1..20: note = Target: FXN; (+) strand; PAM type: NRG; PAM sequence: CAG
  source 1..20: mol_type = other DNA
atgatcgcaccactgttctc

SEQ ID NO: 18963 - DNA, 20 bp, synthetic construct
  misc_feature 1..20: note = Description of Artificial Sequence: Synthetic oligonucleotide
  misc_feature 1..20: note = Target: FXN; (+) strand; PAM type: NRG; PAM sequence: CAG
  source 1..20: mol_type = other DNA
tcgcaccactgttctccagc

SEQ ID NO: 18964 - DNA, 20 bp, synthetic construct
  misc_feature 1..20: note = Description of Artificial Sequence: Synthetic oligonucleotide
  misc_feature 1..20: note = Target: FXN; (+) strand; PAM type: NRG; PAM sequence: AGG
  source 1..20: mol_type = other DNA
cgcaccactgttctccagcc

SEQ ID NO: 18965 - DNA, 20 bp, synthetic construct
  misc_feature 1..20: note = Description of Artificial Sequence: Synthetic oligonucleotide
  misc_feature 1..20: note = Target: FXN; (+) strand; PAM type: NRG; PAM sequence: CAG
  source 1..20: mol_type = other DNA
ctgttctccagccaggatga

SEQ ID NO: 18966 - DNA, 20 bp, synthetic construct
  misc_feature 1..20: note = Description of Artificial Sequence: Synthetic oligonucleotide
  misc_feature 1..20: note = Target: FXN; (+) strand; PAM type: NRG; PAM sequence: AGG
  source 1..20: mol_type = other DNA
tgttctccagccaggatgac

SEQ ID NO: 18967 - DNA, 20 bp, synthetic construct
  misc_feature 1..20: note = Description of Artificial Sequence: Synthetic oligonucleotide
  misc_feature 1..20: note = Target: FXN; (+) strand; PAM type: NRG; PAM sequence: GGG
  source 1..20: mol_type = other DNA
gttctccagccaggatgaca

SEQ ID NO: 18968 - DNA, 20 bp, synthetic construct
  misc_feature 1..20: note = Description of Artificial Sequence: Synthetic oligonucleotide
  misc_feature 1..20: note = Target: FXN; (+) strand; PAM type: NRG; PAM sequence: AAG
  source 1..20: mol_type = other DNA
tccagccaggatgacagggc

SEQ ID NO: 18969 - DNA, 20 bp, synthetic construct
  misc_feature 1..20: note = Description of Artificial Sequence: Synthetic oligonucleotide
  misc_feature 1..20: note = Target: FXN; (+) strand; PAM type: NRG; PAM sequence: TAG
  source 1..20: mol_type = other DNA
gacagggcaagaccctgtct

SEQ ID NO: 18970 - DNA, 20 bp, synthetic construct
  misc_feature 1..20: note = Description of Artificial Sequence: Synthetic oligonucleotide
  misc_feature 1..20: note = Target: FXN; (+) strand; PAM type: NRG; PAM sequence: TGG
  source 1..20: mol_type = other DNA
ccctgtcttagaccactctg

SEQ ID NO: 18971 - DNA, 20 bp, synthetic construct
  misc_feature 1..20: note = Description of Artificial Sequence: Synthetic oligonucleotide
  misc_feature 1..20: note = Target: FXN; (+) strand; PAM type: NRG; PAM sequence: CAG
  source 1..20: mol_type = other DNA
gtcttagaccactctgtggt

SEQ ID NO: 18972 - DNA, 20 bp, synthetic construct
  misc_feature 1..20: note = Description of Artificial Sequence: Synthetic oligonucleotide
  misc_feature 1..20: note = Target: FXN; (+) strand; PAM type: NRG; PAM sequence: TGG
  source 1..20: mol_type = other DNA
ttagaccactctgtggtcag

SEQ ID NO: 18973 - DNA, 20 bp, synthetic construct
  misc_feature 1..20: note = Description of Artificial Sequence: Synthetic oligonucleotide
  misc_feature 1..20: note = Target: FXN; (+) strand; PAM type: NRG; PAM sequence: CAG
  source 1..20: mol_type = other DNA
actctgtggtcagtggttat

SEQ ID NO: 18974 - DNA, 20 bp, synthetic construct
  misc_feature 1..20: note = Description of Artificial Sequence: Synthetic oligonucleotide
  misc_feature 1..20: note = Target: FXN; (+) strand; PAM type: NRG; PAM sequence: AGG
  source 1..20: mol_type = other DNA
ctctgtggtcagtggttatc

SEQ ID NO: 18975 - DNA, 20 bp, synthetic construct
  misc_feature 1..20: note = Description of Artificial Sequence: Synthetic oligonucleotide
  misc_feature 1..20: note = Target: FXN; (+) strand; PAM type: NRG; PAM sequence: AAG
  source 1..20: mol_type = other DNA
tgtggtcagtggttatcagg

SEQ ID NO: 18976 - DNA, 20 bp, synthetic construct
  misc_feature 1..20: note = Description of Artificial Sequence: Synthetic oligonucleotide
  misc_feature 1..20: note = Target: FXN; (+) strand; PAM type: NRG; PAM sequence: AGG
  source 1..20: mol_type = other DNA
gtggtcagtggttatcagga

SEQ ID NO: 18977 - DNA, 20 bp, synthetic construct
  misc_feature 1..20: note = Description of Artificial Sequence: Synthetic oligonucleotide
  misc_feature 1..20: note = Target: FXN; (+) strand; PAM type: NRG; PAM sequence: TAG
  source 1..20: mol_type = other DNA
tggttatcaggaaggaatgc

SEQ ID NO: 18978 - DNA, 20 bp, synthetic construct
  misc_feature 1..20: note = Description of Artificial Sequence: Synthetic oligonucleotide
  misc_feature 1..20: note = Target: FXN; (+) strand; PAM type: NRG; PAM sequence: CAG
  source 1..20: mol_type = other DNA
tatcaggaaggaatgctagt

SEQ ID NO: 18979 - DNA, 20 bp, synthetic construct
  misc_feature 1..20: note = Description of Artificial Sequence: Synthetic oligonucleotide
  misc_feature 1..20: note = Target: FXN; (+) strand; PAM type: NRG; PAM sequence: AAG
  source 1..20: mol_type = other DNA
gttgtgctgaaaccactaaa

SEQ ID NO: 18980 - DNA, 20 bp, synthetic construct
  misc_feature 1..20: note = Description of Artificial Sequence: Synthetic oligonucleotide
  misc_feature 1..20: note = Target: FXN; (+) strand; PAM type: NRG; PAM sequence: AGG
  source 1..20: mol_type = other DNA
ttgtgctgaaaccactaaaa

SEQ ID NO: 18981 - DNA, 20 bp, synthetic construct
  misc_feature 1..20: note = Description of Artificial Sequence: Synthetic oligonucleotide
  misc_feature 1..20: note = Target: FXN; (+) strand; PAM type: NRG; PAM sequence: AAG
  source 1..20: mol_type = other DNA
tgctgaaaccactaaaaagg

SEQ ID NO: 18982 - DNA, 20 bp, synthetic construct
  misc_feature 1..20: note = Description of Artificial Sequence: Synthetic oligonucleotide
  misc_feature 1..20: note = Target: FXN; (+) strand; PAM type: NRG; PAM sequence: AGG
  source 1..20: mol_type = other DNA
gctgaaaccactaaaaagga

SEQ ID NO: 18983 - DNA, 20 bp, synthetic construct
  misc_feature 1..20: note = Description of Artificial Sequence: Synthetic oligonucleotide
  misc_feature 1..20: note = Target: FXN; (+) strand; PAM type: NRG; PAM sequence: GGG
  source 1..20: mol_type = other DNA
ctgaaaccactaaaaaggaa

SEQ ID NO: 18984 - DNA, 20 bp, synthetic construct
  misc_feature 1..20: note = Description of Artificial Sequence: Synthetic oligonucleotide
  misc_feature 1..20: note = Target: FXN; (+) strand; PAM type: NRG; PAM sequence: CAG
  source 1..20: mol_type = other DNA
aaaccactaaaaaggaaggg

SEQ ID NO: 18985 - DNA, 20 bp, synthetic construct
  misc_feature 1..20: note = Description of Artificial Sequence: Synthetic oligonucleotide
  misc_feature 1..20: note = Target: FXN; (+) strand; PAM type: NRG; PAM sequence: TAG
  source 1..20: mol_type = other DNA
ctaaaaaggaagggcagaat

SEQ ID NO: 18986 - DNA, 20 bp, synthetic construct
  misc_feature 1..20: note = Description of Artificial Sequence: Synthetic oligonucleotide
  misc_feature 1..20: note = Target: FXN; (+) strand; PAM type: NRG; PAM sequence: AGG
  source 1..20: mol_type = other DNA
taaaaaggaagggcagaatt

SEQ ID NO: 18987 - DNA, 20 bp, synthetic construct
  misc_feature 1..20: note = Description of Artificial Sequence: Synthetic oligonucleotide
  misc_feature 1..20: note = Target: FXN; (+) strand; PAM type: NRG; PAM sequence: GAG
  source 1..20: mol_type = other DNA
gaagggcagaattaggtgat

SEQ ID NO: 18988 - DNA, 20 bp, synthetic construct
  misc_feature 1..20: note = Description of Artificial Sequence: Synthetic oligonucleotide
  misc_feature 1..20: note = Target: FXN; (+) strand; PAM type: NRG; PAM sequence: CAG
  source 1..20: mol_type = other DNA
attaggtgatgagttgatac

SEQ ID NO: 18989 - DNA, 20 bp, synthetic construct
  misc_feature 1..20: note = Description of Artificial Sequence: Synthetic oligonucleotide
  misc_feature 1..20: note = Target: FXN; (+) strand; PAM type: NRG; PAM sequence: TGG
  source 1..20: mol_type = other DNA
aggtgatgagttgataccag

SEQ ID NO: 18990 - DNA, 20 bp, synthetic construct
  misc_feature 1..20: note = Description of Artificial Sequence: Synthetic oligonucleotide
  misc_feature 1..20: note = Target: FXN; (+) strand; PAM type: NRG; PAM sequence: AAG
  source 1..20: mol_type = other DNA
atgagttgataccagtggtg

SEQ ID NO: 18991 - DNA, 20 bp, synthetic construct
  misc_feature 1..20: note = Description of Artificial Sequence: Synthetic oligonucleotide
  misc_feature 1..20: note = Target: FXN; (+) strand; PAM type: NRG; PAM sequence: GAG
  source 1..20: mol_type = other DNA
gttgataccagtggtgaagt

SEQ ID NO: 18992 - DNA, 20 bp, synthetic construct
  misc_feature 1..20: note = Description of Artificial Sequence: Synthetic oligonucleotide
  misc_feature 1..20: note = Target: FXN; (+) strand; PAM type: NRG; PAM sequence: GAG
  source 1..20: mol_type = other DNA
ttttttttttttttcttttt

SEQ ID NO: 18993 - DNA, 20 bp, synthetic construct
  misc_feature 1..20: note = Description of Artificial Sequence: Synthetic oligonucleotide
  misc_feature 1..20: note = Target: FXN; (+) strand; PAM type: NRG; PAM sequence: TGG
  source 1..20: mol_type = other DNA
ttttttttttctttttgaga

SEQ ID NO: 18994 - DNA, 20 bp, synthetic construct
  misc_feature 1..20: note = Description of Artificial Sequence: Synthetic oligonucleotide
  misc_feature 1..20: note = Target: FXN; (+) strand; PAM type: NRG; PAM sequence: GAG
  source 1..20: mol_type = other DNA
ttttttttctttttgagatg

SEQ ID NO: 18995 - DNA, 20 bp, synthetic construct
  misc_feature 1..20: note = Description of Artificial Sequence: Synthetic oligonucleotide
  misc_feature 1..20: note = Target: FXN; (+) strand; PAM type: NRG; PAM sequence: CAG
  source 1..20: mol_type = other DNA
tggagtcttgctctgttgcc

SEQ ID NO: 18996 - DNA, 20 bp, synthetic construct
  misc_feature 1..20: note = Description of Artificial Sequence: Synthetic oligonucleotide
  misc_feature 1..20: note = Target: FXN; (+) strand; PAM type: NRG; PAM sequence: AGG
  source 1..20: mol_type = other DNA
ggagtcttgctctgttgccc

SEQ ID NO: 18997 - DNA, 20 bp, synthetic construct
  misc_feature 1..20: note = Description of Artificial Sequence: Synthetic oligonucleotide
  misc_feature 1..20: note = Target: FXN; (+) strand; PAM type: NRG; PAM sequence: TGG
  source 1..20: mol_type = other DNA
tcttgctctgttgcccaggc

SEQ ID NO: 18998 - DNA, 20 bp, synthetic construct
  misc_feature 1..20: note = Description of Artificial Sequence: Synthetic oligonucleotide
  misc_feature 1..20: note = Target: FXN; (+) strand; PAM type: NRG; PAM sequence: GAG
  source 1..20: mol_type = other DNA
ttgctctgttgcccaggctg

SEQ ID NO: 18999 - DNA, 20 bp, synthetic construct
  misc_feature 1..20: note = Description of Artificial Sequence: Synthetic oligonucleotide
  misc_feature 1..20: note = Target: FXN; (+) strand; PAM type: NRG; PAM sequence: TAG
  source 1..20: mol_type = other DNA
ctgttgcccaggctggagtg

SEQ ID NO: 19000 - DNA, 20 bp, synthetic construct
  misc_feature 1..20: note = Description of Artificial Sequence: Synthetic oligonucleotide
  misc_feature 1..20: note = Target: FXN; (+) strand; PAM type: NRG; PAM sequence: TGG
  source 1..20: mol_type = other DNA
ttgcccaggctggagtgtag

SEQ ID NO: 19001 - DNA, 20 bp, synthetic construct
  misc_feature 1..20: note = Description of Artificial Sequence: Synthetic oligonucleotide
  misc_feature 1..20: note = Target: FXN; (+) strand; PAM type: NRG; PAM sequence: CAG
  source 1..20: mol_type = other DNA
ggagtgtagtggtgtgatct

SEQ ID NO: 19002 - DNA, 20 bp, synthetic construct
  misc_feature 1..20: note = Description of Artificial Sequence: Synthetic oligonucleotide
  misc_feature 1..20: note = Target: FXN; (+) strand; PAM type: NRG; PAM sequence: TGG
  source 1..20: mol_type = other DNA
tcatcgcaacctccacctcc

SEQ ID NO: 19003 - DNA, 20 bp, synthetic construct
  misc_feature 1..20: note = Description of Artificial Sequence: Synthetic oligonucleotide
  misc_feature 1..20: note = Target: FXN; (+) strand; PAM type: NRG; PAM sequence: GGG
  source 1..20: mol_type = other DNA
catcgcaacctccacctcct

SEQ ID NO: 19004 - DNA, 20 bp, synthetic construct
  misc_feature 1..20: note = Description of Artificial Sequence: Synthetic oligonucleotide
  misc_feature 1..20: note = Target: FXN; (+) strand; PAM type: NRG; PAM sequence: AAG
  source 1..20: mol_type = other DNA
aacctccacctcctgggttc

SEQ ID NO: 19005 - DNA, 20 bp, synthetic construct
  misc_feature 1..20: note = Description of Artificial Sequence: Synthetic oligonucleotide
  misc_feature 1..20: note = Target: FXN; (+) strand; PAM type: NRG; PAM sequence: CAG
  source 1..20: mol_type = other DNA
ttcaagtgattctcttgcct

SEQ ID NO: 19006 - DNA, 20 bp, synthetic construct
  misc_feature 1..20: note = Description of Artificial Sequence: Synthetic oligonucleotide
  misc_feature 1..20: note = Target: FXN; (+) strand; PAM type: NRG; PAM sequence: GAG
  source 1..20: mol_type = other DNA
ttctcttgcctcagcctccc

SEQ ID NO: 19007 - DNA, 20 bp, synthetic construct
  misc_feature 1..20: note = Description of Artificial Sequence: Synthetic oligonucleotide
  misc_feature 1..20: note = Target: FXN; (+) strand; PAM type: NRG; PAM sequence: TAG
  source 1..20: mol_type = other DNA
tcttgcctcagcctcccgag

SEQ ID NO: 19008 - DNA, 20 bp, synthetic construct
  misc_feature 1..20: note = Description of Artificial Sequence: Synthetic oligonucleotide
  misc_feature 1..20: note = Target: FXN; (+) strand; PAM type: NRG; PAM sequence: TGG
  source 1..20: mol_type = other DNA
gcctcagcctcccgagtagc

SEQ ID NO: 19009 - DNA, 20 bp, synthetic construct
  misc_feature 1..20: note = Description of Artificial Sequence: Synthetic oligonucleotide
  misc_feature 1..20: note = Target: FXN; (+) strand; PAM type: NRG; PAM sequence: GGG
  source 1..20: mol_type = other DNA
cctcagcctcccgagtagct

SEQ ID NO: 19010 - DNA, 20 bp, synthetic construct
  misc_feature 1..20: note = Description of Artificial Sequence: Synthetic oligonucleotide
  misc_feature 1..20: note = Target: FXN; (+) strand; PAM type: NRG; PAM sequence: CAG
  source 1..20: mol_type = other DNA
ctcccgagtagctgggatta

SEQ ID NO: 19011 - DNA, 20 bp, synthetic construct
  misc_feature 1..20: note = Description of Artificial Sequence: Synthetic oligonucleotide
  misc_feature 1..20: note = Target: FXN; (+) strand; PAM type: NRG; PAM sequence: AGG
  source 1..20: mol_type = other DNA
tcccgagtagctgggattac

SEQ ID NO: 19012 - DNA, 20 bp, synthetic construct
  misc_feature 1..20: note = Description of Artificial Sequence: Synthetic oligonucleotide
  misc_feature 1..20: note = Target: FXN; (+) strand; PAM type: NRG; PAM sequence: TGG
  source 1..20: mol_type = other DNA
caggcgcctgccaccacgcc

SEQ ID NO: 19013 - DNA, 20 bp, synthetic construct
  misc_feature 1..20: note = Description of Artificial Sequence: Synthetic oligonucleotide
  misc_feature 1..20: note = Target: FXN; (+) strand; PAM type: NRG; PAM sequence: TAG
  source 1..20: mol_type = other DNA
ggctaatttttttatatttt

SEQ ID NO: 19014 - DNA, 20 bp, synthetic construct
  misc_feature 1..20: note = Description of Artificial Sequence: Synthetic oligonucleotide
  misc_feature 1..20: note = Target: FXN; (+) strand; PAM type: NRG; PAM sequence: TAG
  source 1..20: mol_type = other DNA
taatttttttatatttttag

SEQ ID NO: 19015 - DNA, 20 bp, synthetic construct
  misc_feature 1..20: note = Description of Artificial Sequence: Synthetic oligonucleotide
  misc_feature 1..20: note = Target: FXN; (+) strand; PAM type: NRG; PAM sequence: GAG
  source 1..20: mol_type = other DNA
atttttttatatttttagta

SEQ ID NO: 19016 - DNA, 20 bp, synthetic construct
  misc_feature 1..20: note = Description of Artificial Sequence: Synthetic oligonucleotide
  misc_feature 1..20: note = Target: FXN; (+) strand; PAM type: NRG; PAM sequence: TGG
  source 1..20: mol_type = other DNA
tttatatttttagtagagac

SEQ ID NO: 19017 - DNA, 20 bp, synthetic construct
  misc_feature 1..20: note = Description of Artificial Sequence: Synthetic oligonucleotide
  misc_feature 1..20: note = Target: FXN; (+) strand; PAM type: NRG; PAM sequence: GGG
  source 1..20: mol_type = other DNA
ttatatttttagtagagact

SEQ ID NO: 19018 - DNA, 20 bp, synthetic construct
  misc_feature 1..20: note = Description of Artificial Sequence: Synthetic oligonucleotide
  misc_feature 1..20: note = Target: FXN; (+) strand; PAM type: NRG; PAM sequence: CAG
  source 1..20: mol_type = other DNA
actgggttttgccatgttgt

SEQ ID NO: 19019 - DNA, 20 bp, synthetic construct
  misc_feature 1..20: note = Description of Artificial Sequence: Synthetic oligonucleotide
  misc_feature 1..20: note = Target: FXN; (+) strand; PAM type: NRG; PAM sequence: AGG
  source 1..20: mol_type = other DNA
ctgggttttgccatgttgtc

SEQ ID NO: 19020 - DNA, 20 bp, synthetic construct
  misc_feature 1..20: note = Description of Artificial Sequence: Synthetic oligonucleotide
  misc_feature 1..20: note = Target: FXN; (+) strand; PAM type: NRG; PAM sequence: TAG
  source 1..20: mol_type = other DNA
gttttgccatgttgtcaggc

SEQ ID NO: 19021 - DNA, 20 bp, synthetic construct
  misc_feature 1..20: note = Description of Artificial Sequence: Synthetic oligonucleotide
  misc_feature 1..20: note = Target: FXN; (+) strand; PAM type: NRG; PAM sequence: CAG
  source 1..20: mol_type = other DNA
tagtcttgaactcctgacct

SEQ ID NO: 19022 - DNA, 20 bp, synthetic construct
  misc_feature 1..20: note = Description of Artificial Sequence: Synthetic oligonucleotide
  misc_feature 1..20: note = Target: FXN; (+) strand; PAM type: NRG; PAM sequence: AGG
  source 1..20: mol_type = other DNA
agtcttgaactcctgacctc

SEQ ID NO: 19023 - DNA, 20 bp, synthetic construct
  misc_feature 1..20: note = Description of Artificial Sequence: Synthetic oligonucleotide
  misc_feature 1..20: note = Target: FXN; (+) strand; PAM type: NRG; PAM sequence: TGG
  source 1..20: mol_type = other DNA
ctcaggtaatccaactgctt

SEQ ID NO: 19024 - DNA, 20 bp, synthetic construct
  misc_feature 1..20: note = Description of Artificial Sequence: Synthetic oligonucleotide
  misc_feature 1..20: note = Target: FXN; (+) strand; PAM type: NRG; PAM sequence: AAG
  source 1..20: mol_type = other DNA
ccaactgctttggcctccca

SEQ ID NO: 19025 - DNA, 20 bp, synthetic construct
  misc_feature 1..20: note = Description of Artificial Sequence: Synthetic oligonucleotide
  misc_feature 1..20: note = Target: FXN; (+) strand; PAM type: NRG; PAM sequence: TGG
  source 1..20: mol_type = other DNA
gctttggcctcccaaagtgc

SEQ ID NO: 19026 - DNA, 20 bp, synthetic construct
  misc_feature 1..20: note = Description of Artificial Sequence: Synthetic oligonucleotide
  misc_feature 1..20: note = Target: FXN; (+) strand; PAM type: NRG; PAM sequence: GGG
  source 1..20: mol_type = other DNA
ctttggcctcccaaagtgct

SEQ ID NO: 19027 - DNA, 20 bp, synthetic construct
  misc_feature 1..20: note = Description of Artificial Sequence: Synthetic oligonucleotide
  misc_feature 1..20: note = Target: FXN; (+) strand; PAM type: NRG; PAM sequence: CAG
  source 1..20: mol_type = other DNA
ctcccaaagtgctgggatta

SEQ ID NO: 19028 - DNA, 20 bp, synthetic construct
  misc_feature 1..20: note = Description of Artificial Sequence: Synthetic oligonucleotide
  misc_feature 1..20: note = Target: FXN; (+) strand; PAM type: NRG; PAM sequence: AGG
  source 1..20: mol_type = other DNA
tcccaaagtgctgggattac

SEQ ID NO: 19029 - DNA, 20 bp, synthetic construct
  misc_feature 1..20: note = Description of Artificial Sequence: Synthetic oligonucleotide
  misc_feature 1..20: note = Target: FXN; (+) strand; PAM type: NRG; PAM sequence: CAG
  source 1..20: mol_type = other DNA
caaagtgctgggattacagg

SEQ ID NO: 19030 - DNA, 20 bp, synthetic construct
  misc_feature 1..20: note = Description of Artificial Sequence: Synthetic oligonucleotide
  misc_feature 1..20: note = Target: FXN; (+) strand; PAM type: NRG; PAM sequence: AAG
  source 1..20: mol_type = other DNA
tgggattacaggcagctcca

SEQ ID NO: 19031 - DNA, 20 bp, synthetic construct
  misc_feature 1..20: note = Description of Artificial Sequence: Synthetic oligonucleotide
  misc_feature 1..20: note = Target: FXN; (+) strand; PAM type: NRG; PAM sequence: TGG
  source 1..20: mol_type = other DNA
tacaggcagctccaaagtgc

SEQ ID NO: 19032 - DNA, 20 bp, synthetic construct
  misc_feature 1..20: note = Description of Artificial Sequence: Synthetic oligonucleotide
  misc_feature 1..20: note = Target: FXN; (+) strand; PAM type: NRG; PAM sequence: GGG
  source 1..20: mol_type = other DNA
acaggcagctccaaagtgct

SEQ ID NO: 19033 - DNA, 20 bp, synthetic construct
  misc_feature 1..20: note = Description of Artificial Sequence: Synthetic oligonucleotide
  misc_feature 1..20: note = Target: FXN; (+) strand; PAM type: NRG; PAM sequence: CAG
  source 1..20: mol_type = other DNA
gctccaaagtgctgggatta

SEQ ID NO: 19034 - DNA, 20 bp, synthetic construct
  misc_feature 1..20: note = Description of Artificial Sequence: Synthetic oligonucleotide
  misc_feature 1..20: note = Target: FXN; (+) strand; PAM type: NRG; PAM sequence: AGG
  source 1..20: mol_type = other DNA
ctccaaagtgctgggattac

SEQ ID NO: 19035 - DNA, 20 bp, synthetic construct
  misc_feature 1..20: note = Description of Artificial Sequence: Synthetic oligonucleotide
  misc_feature 1..20: note = Target: FXN; (+) strand; PAM type: NRG; PAM sequence: GAG
  source 1..20: mol_type = other DNA
agtgctgggattacaggcat

SEQ ID NO: 19036 - DNA, 20 bp, synthetic construct
  misc_feature 1..20: note = Description of Artificial Sequence: Synthetic oligonucleotide
  misc_feature 1..20: note = Target: FXN; (+) strand; PAM type: NRG; PAM sequence: TGG
  source 1..20: mol_type = other DNA
caggcatgagccaccatgca

SEQ ID NO: 19037 - DNA, 20 bp, synthetic construct
  misc_feature 1..20: note = Description of Artificial Sequence: Synthetic oligonucleotide
  misc_feature 1..20: note = Target: FXN; (+) strand; PAM type: NRG; PAM sequence: AAG
  source 1..20: mol_type = other DNA
gcctgaaataatttttttga

SEQ ID NO: 19038 - DNA, 20 bp, synthetic construct
  misc_feature 1..20: note = Description of Artificial Sequence: Synthetic oligonucleotide
  misc_feature 1..20: note = Target: FXN; (+) strand; PAM type: NRG; PAM sequence: AGG
  source 1..20: mol_type = other DNA
cctgaaataatttttttgaa

SEQ ID NO: 19039 - DNA, 20 bp, synthetic construct
  misc_feature 1..20: note = Description of Artificial Sequence: Synthetic oligonucleotide
  misc_feature 1..20: note = Target: FXN; (+) strand; PAM type: NRG; PAM sequence: GGG
  source 1..20: mol_type = other DNA
ctgaaataatttttttgaaa

SEQ ID NO: 19040 - DNA, 20 bp, synthetic construct
  misc_feature 1..20: note = Description of Artificial Sequence: Synthetic oligonucleotide
  misc_feature 1..20: note = Target: FXN; (+) strand; PAM type: NRG; PAM sequence: TAG
  source 1..20: mol_type = other DNA
aataatttttttgaaagggc

SEQ ID NO: 19041 - DNA, 20 bp, synthetic construct
  misc_feature 1..20: note = Description of Artificial Sequence: Synthetic oligonucleotide
  misc_feature 1..20: note = Target: FXN; (+) strand; PAM type: NRG; PAM sequence: TAG
  source 1..20: mol_type = other DNA
tgaaagggctagtttctatt

SEQ ID NO: 19042 - DNA, 20 bp, synthetic construct
  misc_feature 1..20: note = Description of Artificial Sequence: Synthetic oligonucleotide
  misc_feature 1..20: note = Target: FXN; (+) strand; PAM type: NRG; PAM sequence: TAG
  source 1..20: mol_type = other DNA
gctagtttctatttagccct

SEQ ID NO: 19043 - DNA, 20 bp, synthetic construct
  misc_feature 1..20: note = Description of Artificial Sequence: Synthetic oligonucleotide
  misc_feature 1..20: note = Target: FXN; (+) strand; PAM type: NRG; PAM sequence: AGG
  source 1..20: mol_type = other DNA
ctagtttctatttagccctt

SEQ ID NO: 19044 - DNA, 20 bp, synthetic construct
  misc_feature 1..20: note = Description of Artificial Sequence: Synthetic oligonucleotide
  misc_feature 1..20: note = Target: FXN; (+) strand; PAM type: NRG; PAM sequence: GGG
  source 1..20: mol_type = other DNA
tagtttctatttagccctta

SEQ ID NO: 19045 - DNA, 20 bp, synthetic construct
  misc_feature 1..20: note = Description of Artificial Sequence: Synthetic oligonucleotide
  misc_feature 1..20: note = Target: FXN; (+) strand; PAM type: NRG; PAM sequence: GGG
  source 1..20: mol_type = other DNA
agtttctatttagcccttag

SEQ ID NO: 19046 - DNA, 20 bp, synthetic construct
  misc_feature 1..20: note = Description of Artificial Sequence: Synthetic oligonucleotide
  misc_feature 1..20: note = Target: FXN; (+) strand; PAM type: NRG; PAM sequence: TGG
  source 1..20: mol_type = other DNA
cttaggggaaaaaaaactaa

SEQ ID NO: 19047 - DNA, 20 bp, synthetic construct
  misc_feature 1..20: note = Description of Artificial Sequence: Synthetic oligonucleotide
  misc_feature 1..20: note = Target: FXN; (+) strand; PAM type: NRG; PAM sequence: CAG
  source 1..20: mol_type = other DNA
aggggaaaaaaaactaatgg

SEQ ID NO: 19048 - DNA, 20 bp, synthetic construct
  misc_feature 1..20: note = Description of Artificial Sequence: Synthetic oligonucleotide
  misc_feature 1..20: note = Target: FXN; (+) strand; PAM type: NRG; PAM sequence: TAG
  source 1..20: mol_type = other DNA
gaaaaaaaactaatggcagt

SEQ ID NO: 19049 - DNA, 20 bp, synthetic construct
  misc_feature 1..20: note = Description of Artificial Sequence: Synthetic oligonucleotide
  misc_feature 1..20: note = Target: FXN; (+) strand; PAM type: NRG; PAM sequence: AGG
  source 1..20: mol_type = other DNA
aaaaaaaactaatggcagtt

SEQ ID NO: 19050 - DNA, 20 bp, synthetic construct
  misc_feature 1..20: note = Description of Artificial Sequence: Synthetic oligonucleotide
  misc_feature 1..20: note = Target: FXN; (+) strand; PAM type: NRG; PAM sequence: GGG
  source 1..20: mol_type = other DNA
aaaaaaactaatggcagtta

SEQ ID NO: 19051 - DNA, 20 bp, synthetic construct
  misc_feature 1..20: note = Description of Artificial Sequence: Synthetic oligonucleotide
  misc_feature 1..20: note = Target: FXN; (+) strand; PAM type: NRG; PAM sequence: GAG
  source 1..20: mol_type = other DNA
aaaaactaatggcagttagg

SEQ ID NO: 19052 - DNA, 20 bp, synthetic construct
  misc_feature 1..20: note = Description of Artificial Sequence: Synthetic oligonucleotide
  misc_feature 1..20: note = Target: FXN; (+) strand; PAM type: NRG; PAM sequence: AGG
  source 1..20: mol_type = other DNA
aaaactaatggcagttaggg

SEQ ID NO: 19053 - DNA, 20 bp, synthetic construct
  misc_feature 1..20: note = Description of Artificial Sequence: Synthetic oligonucleotide
  misc_feature 1..20: note = Target: FXN; (+) strand; PAM type: NRG; PAM sequence: GGG
  source 1..20: mol_type = other DNA
aaactaatggcagttaggga

SEQ ID NO: 19054 - DNA, 20 bp, synthetic construct
  misc_feature 1..20: note = Description of Artificial Sequence: Synthetic oligonucleotide
  misc_feature 1..20: note = Target: FXN; (+) strand; PAM type: NRG; PAM sequence: TAG
  source 1..20: mol_type = other DNA
aatggcagttagggagggaa

SEQ ID NO: 19055 - DNA, 20 bp, synthetic construct
  misc_feature 1..20: note = Description of Artificial Sequence: Synthetic oligonucleotide
  misc_feature 1..20: note = Target: FXN; (+) strand; PAM type: NRG; PAM sequence: GAG
  source 1..20: mol_type = other DNA
agttagggagggaatagaac

SEQ ID NO: 19056 - DNA, 20 bp, synthetic construct
  misc_feature 1..20: note = Description of Artificial Sequence: Synthetic oligonucleotide
  misc_feature 1..20: note = Target: FXN; (+) strand; PAM type: NRG; PAM sequence: TGG
  source 1..20: mol_type = other DNA
tttgaactcctttcccatca

SEQ ID NO: 19057 - DNA, 20 bp, synthetic construct
  misc_feature 1..20: note = Description of Artificial Sequence: Synthetic oligonucleotide
  misc_feature 1..20: note = Target: FXN; (+) strand; PAM type: NRG; PAM sequence: TAG
  source 1..20: mol_type = other DNA
ccaaaacttaaaattttttt

SEQ ID NO: 19058 - DNA, 20 bp, synthetic construct
  misc_feature 1..20: note = Description of Artificial Sequence: Synthetic oligonucleotide
  misc_feature 1..20: note = Target: FXN; (+) strand; PAM type: NRG; PAM sequence: TGG
  source 1..20: mol_type = other DNA
aaattttttttagatatctc

SEQ ID NO: 19059 - DNA, 20 bp, synthetic construct
  misc_feature 1..20: note = Description of Artificial Sequence: Synthetic oligonucleotide
  misc_feature 1..20: note = Target: FXN; (+) strand; PAM type: NRG; PAM sequence: GGG
  source 1..20: mol_type = other DNA
aattttttttagatatctct

SEQ ID NO: 19060 - DNA, 20 bp, synthetic construct
  misc_feature 1..20: note = Description of Artificial Sequence: Synthetic oligonucleotide
  misc_feature 1..20: note = Target: FXN; (+) strand; PAM type: NRG; PAM sequence: TGG
  source 1..20: mol_type = other DNA
agatatctctgggctcccct

SEQ ID NO: 19061 - DNA, 20 bp, synthetic construct
  misc_feature 1..20: note = Description of Artificial Sequence: Synthetic oligonucleotide
  misc_feature 1..20: note = Target: FXN; (+) strand; PAM type: NRG; PAM sequence: AAG
  source 1..20: mol_type = other DNA
tctgggctccccttggccaa

SEQ ID NO: 19062 - DNA, 20 bp, synthetic construct
  misc_feature 1..20: note = Description of Artificial Sequence: Synthetic oligonucleotide
  misc_feature 1..20: note = Target: FXN; (+) strand; PAM type: NRG; PAM sequence: TAG
  source 1..20: mol_type = other DNA
ggctccccttggccaaaaga

SEQ ID NO: 19063 - DNA, 20 bp, synthetic construct
  misc_feature 1..20: note = Description of Artificial Sequence: Synthetic oligonucleotide
  misc_feature 1..20: note = Target: FXN; (+) strand; PAM type: NRG; PAM sequence: GAG
  source 1..20: mol_type = other DNA
tggccaaaagatagtttgtt

SEQ ID NO: 19064 - DNA, 20 bp, synthetic construct
  misc_feature 1..20: note = Description of Artificial Sequence: Synthetic oligonucleotide
  misc_feature 1..20: note = Target: FXN; (+) strand; PAM type: NRG; PAM sequence: CAG
  source 1..20: mol_type = other DNA
caaaagatagtttgttgagt

SEQ ID NO: 19065 - DNA, 20 bp, synthetic construct
  misc_feature 1..20: note = Description of Artificial Sequence: Synthetic oligonucleotide
  misc_feature 1..20: note = Target: FXN; (+) strand; PAM type: NRG; PAM sequence: TGG
  source 1..20: mol_type = other DNA
agatagtttgttgagtcagt

SEQ ID NO: 19066 - DNA, 20 bp, synthetic construct
  misc_feature 1..20: note = Description of Artificial Sequence: Synthetic oligonucleotide
  misc_feature 1..20: note = Target: FXN; (+) strand; PAM type: NRG; PAM sequence: GGG
  source 1..20: mol_type = other DNA
gatagtttgttgagtcagtt

SEQ ID NO: 19067 - DNA, 20 bp, synthetic construct
  misc_feature 1..20: note = Description of Artificial Sequence: Synthetic oligonucleotide
  misc_feature 1..20: note = Target: FXN; (+) strand; PAM type: NRG; PAM sequence: GAG
  source 1..20: mol_type = other DNA
tagtttgttgagtcagttgg

SEQ ID NO: 19068 - DNA, 20 bp, synthetic construct
  misc_feature 1..20: note = Description of Artificial Sequence: Synthetic oligonucleotide
  misc_feature 1..20: note = Target: FXN; (+) strand; PAM type: NRG; PAM sequence: TAG
  source 1..20: mol_type = other DNA
tgttgagtcagttgggagct

SEQ ID NO: 19069 - DNA, 20 bp, synthetic construct
  misc_feature 1..20: note = Description of Artificial Sequence: Synthetic oligonucleotide
  misc_feature 1..20: note = Target: FXN; (+) strand; PAM type: NRG; PAM sequence: CAG
  source 1..20: mol_type = other DNA
atcattgaatcaatttgaac

SEQ ID NO: 19070 - DNA, 20 bp, synthetic construct
  misc_feature 1..20: note = Description of Artificial Sequence: Synthetic oligonucleotide
  misc_feature 1..20: note = Target: FXN; (+) strand; PAM type: NRG; PAM sequence: AGG
  source 1..20: mol_type = other DNA
tcattgaatcaatttgaacc

SEQ ID NO: 19071 - DNA, 20 bp, synthetic construct
  misc_feature 1..20: note = Description of Artificial Sequence: Synthetic oligonucleotide
  misc_feature 1..20: note = Target: FXN; (+) strand; PAM type: NRG; PAM sequence: CAG
  source 1..20: mol_type = other DNA
gcgacaaaaccttctgctcc
